United States Patent Application Publication US 2025/0074962 A1 - sequence listing, part 7

SEQ ID NO: 10351 - DNA, 735 bp, synthetic construct
  misc_feature 1..735: note = Description of Artificial Sequence: Synthetic coding sequence
  source 1..735: mol_type = other DNA
atggcccccaagaagagacccgagacccagaagaccagcgagatcgtgctgagacccagaaacaagagaagcagaagccccctggagctggagcccgaggccaagaagctgtgcgccaagggcagcggccccagcagaagatgcgacagcgactgcctgtgggtgggcctggccggcccccagatcctgcccccctgcagaagcatcgtgagaaccctgcaccagcacaagctgggcagagccagctggcccagcgtgcagcagggcctgcagcagagcttcctgcacaccctggacagctacagaatcctgcagaaggccgcccccttcgacagaagagccaccagcctggcctggcaccccacccaccccagcaccgtggccgtgggcagcaagggcggcgacatcatgctgtggaacttcggcatcaaggacaagcccaccttcatcaagggcatcggcgccggcggcagcatcaccggcctgaagttcaaccccctgaacaccaaccagttctacgccagcagcatggagggcaccaccagactgcaggacttcaagggcaacatcctgagagtgttcgccagcagcgacaccatcaacatctggttctgcagcctggacgtgagcgccagcagcagaatggtggtgaccggcgacaacgtgggcaacgtgatcctgctgaacatggacggcaaggagctggtgagcgtgcccatggagcccggcagctag

SEQ ID NO: 10352 - DNA, 1092 bp, synthetic construct
  misc_feature 1..1092: note = Description of Artificial Sequence: Synthetic coding sequence
  source 1..1092: mol_type = other DNA
atggcccccaagaagagacccgagacccagaagaccagcgagatcgtgctgagacccagaaacaagagaagcagaagccccctggagctggagcccgaggccaagaagctgtgcgccaagggcagcggccccagcagaagatgcgacagcgactgcctgtgggtgggcctggccggcccccagatcctgcccccctgcagaagcatcgtgagaaccctgcaccagcacaagctgggcagagccagctggcccagcgtgcagcagatcggcgccggcggcagcatcaccggcctgaagttcaaccccctgaacaccaaccagttctacgccagcagcatggagggcaccaccagactgcaggacttcaagggcaacatcctgagagtgttcgccagcagcgacaccatcaacatctggttctgcagcctggacgtgagcgccagcagcagaatggtggtgaccggcgacaacgtgggcaacgtgatcctgctgaacatggacggcaaggagctgtggaacctgagaatgcacaagaagaaggtgacccacgtggccctgaacccctgctgcgactggttcctggccaccgccagcgtggaccagaccgtgaagatctgggacctgagacaggtgagaggcaaggccagcttcctgtacagcctgccccacagacaccccgtgaacgccgcctgcttcagccccgacggcgccagactgctgaccaccgaccagaagagcgagatcagagtgtacagcgccagccagtgggactgccccctgggcctgatcccccacccccacagacacttccagcacctgacccccatcaaggccgcctggcaccccagatacaacctgatcgtggtgggcagataccccgaccccaacttcaagagctgcaccccctacgagctgagaaccatcgacgtgttcgacggcaacagcggcaagatgatgtgccagctgtacgaccccgagagcagcggcatcagcagcctgaacgagttcaaccccatgggcgacaccctggccagcgccatgggctaccacatcctgatctggagccaggaggaggccagaaccagaaagtag

SEQ ID NO: 10353 - DNA, 1119 bp, synthetic construct
  misc_feature 1..1119: note = Description of Artificial Sequence: Synthetic coding sequence
  source 1..1119: mol_type = other DNA
atgagcgaggccggcgaggccaccaccaccaccaccaccaccctgccccaggcccccaccgaggccgccgccgccgccccccaggaccccgcccccaagagccccgtgggcagcggcgccccccaggccgccgcccccgcccccgccgcccacgtggccggcaaccccggcggcgacgccgcccccgccgccaccggcaccgccgccgccgccagcctggccaccgccgccggcagcgaggacgccgagaagaaggtgctggccaccaaggtgctgggcaccgtgaagtggttcaacgtgagaaacggctacggcttcatcaacagaaacgacaccaaggaggacgtgttcgtgcaccagaccgccatcaagaagaacaaccccagaaagtacctgagaagcgtgggcgacggcgagaccgtggagttcgacgtggtggagggcgagaagggcgccgaggccgccaacgtgaccggccccgacggcgtgcccgtggagggcagcagatacgccgccgacagaagaagatacagaagaggctactacggcagaagaagaggcccccccagaaactacgccggcgaggaggaggaggagggcagcggcagcagcgagggcttcgacccccccgccaccgacagacagttcagcggcgccagaaaccagctgagaagaccccagtacagaccccagtacagacagagaagattccccccctaccacgtgggccagaccttcgacagaagaagcagagtgctgccccaccccaacagaatccaggccggcgagatcggcgagatgaaggacggcgtgcccgagggcgcccagctgcagggccccgtgcacagaaaccccacctacagacccagatacagaagcagaggcccccccagacccagacccgcccccgccgtgggcgaggccgaggacaaggagaaccagcaggccaccagcggccccaaccagcccagcgtgagaagaggctacagaagaccctacaactacagaagaagacccagaccccccaacgcccccagccaggacggcaaggaggccaaggccggcgaggcccccaccgagaaccccgccccccccacccagcagagcagcgccgagtag

SEQ ID NO: 10354 - DNA, 867 bp, synthetic construct
  misc_feature 1..867: note = Description of Artificial Sequence: Synthetic coding sequence
  source 1..867: mol_type = other DNA
atggccaacgagacccagaaggtgggcgccatccacttccccttccccttcaccccctacagcatccaggaggacttcatggccgagctgtacagagtgctggaggccggcaagatcggcatcttcgagagccccaccggcaccggcaagagcctgagcctgatctgcggcgccctgagctggctgagagacttcgagcagaagaagagagaggaggaggccagactgctggagaccggcaccggccccctgcacgacgagaaggacgagagcctgtgcctgagcagcagctgcgagggcgccgccggcacccccagacccgccggcgagcccgcctgggtgacccagttcgtgcagaagaaggaggagagagacctggtggacagactgaaggccgagcaggccagaagaaagcagagagaggagagactgcagcagctgcagcacagagtgcagctgaagtacgccgccaagagactgagacaggaggaggaggagagagagaacctgctgagactgagcagagagatgctggagaccggccccgaggccgagagactggagcagctggagagcggcgaggaggagctggtgctggccgagtacgagagcgacgaggagaagaaggtggccagcagagcccccagcgacgccaccagcagcagacacccccccgacgccagcttccccgccgccctgaacttcctgcagagaaccagacccagcagcgtgctgagcgaggacctgctgatgcagagagccgtggccaagcaccccgccctgctgccctggcagatgagcagcagccccctgagacccggcagcgagtggatgagaatgagaatgacctggagaaagaacacctag

SEQ ID NO: 10355 - DNA, 2571 bp, synthetic construct
  misc_feature 1..2571: note = Description of Artificial Sequence: Synthetic coding sequence
  source 1..2571: mol_type = other DNA
atggccaacgagacccagaaggtgggcgccatccacttccccttccccttcaccccctacagcatccaggaggacttcatggccgagctgtacagagtgctggaggccggcaagatcggcatcttcgagagccccaccggcaccggcaagagcctgagcctgatctgcggcgccctgagctggctgagagacttcgagcagaagaagagagaggaggaggccagactgctggagaccggcaccggccccctgcacgacgagaaggacgagagcctgtgcctgagcagcagctgcgagggcgccgccggcacccccagacccgccggcgagcccgcctgggtgacccagttcgtgcagaagaaggaggagagagacctggtggacagactgaaggccgagcaggccagaagaaagcagagagaggagagactgcagcagctgcagcacagagtgcagctgaagtacgccgccaagagactgagacaggaggaggaggagagagagaacctgctgagactgagcagagagatgctggagaccggccccgaggccgagagactggagcagctggagagcggcgaggaggagctggtgctggccgagtacgagagcgacgaggagaagaaggtggccagcagagtggacgaggacgaggacgacctggaggaggagcacatcaccaagatctactactgcagcagaacccacagccagctggcccagttcgtgcacgaggtgaagaagagccccttcggcaaggacgtgagactggtgagcctgggcagcagacagaacctgtgcgtgaacgaggacgtgaagagcctgggcagcgtgcagctgatcaacgacagatgcgtggacatgcagagaagcagacacgagaagaagaagggcgccgaggaggagaagcccaagagaagaagacaggagaagcaggccgcctgccccttctacaaccacgagcagatgggcctgctgagagacgaggccctggccgaggtgaaggacatggagcagctgctggccctgggcaaggaggccagagcctgcccctactacggcagcagactggccatccccgccgcccagctggtggtgctgccctaccagatgctgctgcacgccgccaccagacaggccgccggcatcagactgcaggaccaggtggtgatcatcgacgaggcccacaacctgatcgacaccatcaccggcatgcacagcgtggaggtgagcggcagccagctgtgccaggcccacagccagctgctgcagtacgtggagagatacggcaagagactgaaggccaagaacctgatgtacctgaagcagatcctgtacctgctggagaagttcgtggccgtgctgggcggcaacatcaagcagaaccccaacacccagagcctgagccagaccggcaccgagctgaagaccatcaacgacttcctgttccagagccagatcgacaacatcaacctgttcaaggtgcagagatactgcgagaagagcatgatcagcagaaagctgttcggcttcaccgagagatacggcgccgtgttcagcagcagagagcagcccaagctggccggcttccagcagttcctgcagagcctgcagcccagaaccaccgaggccctggccgcccccgccgacgagagccaggccagcaccctgagacccgccagccccctgatgcacatccagggcttcctggccgccctgaccaccgccaaccaggacggcagagtgatcctgagcagacagggcagcctgagccagagcaccctgaagttcctgctgctgaaccccgccgtgcacttcgcccaggtggtgaaggagtgcagagccgtggtgatcgccggcggcaccatgcagcccgtgagcgacttcagacagcagctgctggcctgcgccggcgtggaggccgagagagtggtggagttcagctgcggccacgtgatcccccccgacaacatcctgcccctggtgatctgcagcggcatcagcaaccagcccctggagttcaccttccagaagagagagctgccccagatgatcttccaggagcccaagagcgcccaccaggtggagcaggtgctgctggcctacagcagatgcatccaggcctgcggccaggagagaggccaggtgaccggcgccctgctgctgagcgtggtgggcggcaagatgagcgagggcatcaacttcagcgacaacctgggcagatgcgtggtgatggtgggcatgcccttccccaacatcagaagcgccgagctgcaggagaagatggcctacctggaccagaccctgcccagagcccccggccaggccccccccggcaaggccctggtggagaacctgtgcatgaaggccgtgaaccagagcatcggcagagccatcagacaccagaaggacttcgccagcgtggtgctgctggaccagagatacgccagaccccccgtgctggccaagctgcccgcctggatcagagccagagtggaggtgaaggccaccttcggccccgccatcgccgccgtgcagaagttccacagagagaagagcgccagcagctag

SEQ ID NO: 10356 - DNA, 1671 bp, synthetic construct
  misc_feature 1..1671: note = Description of Artificial Sequence: Synthetic coding sequence
  source 1..1671: mol_type = other DNA
gaggaggagcccctgtggcagggctgcagcgccggcctgccctggctgcccgccgagaagaagaagggcgccgaggaggagaagcccaagagaagaagacaggagaagcaggccgcctgccccttctacaaccacgagcagatgggcctgctgagagacgaggccctggccgaggtgaaggacatggagcagctgctggccctgggcaaggaggccagagcctgcccctactacggcagcagactggccatccccgccgcccagctggtggtgctgccctaccagatgctgctgcacgccgccaccagacaggccgccggcatcagactgcaggaccaggtggtgatcatcgacgaggcccacaacctgatcgacaccatcaccggcatgcacagcgtggaggtgagcggcagccagctgtgccaggcccacagccagctgctgcagtacgtggagagatacggcaagagactgaaggccaagaacctgatgtacctgaagcagatcctgtacctgctggagaagttcgtggccgtgctgggcggcaacatcaagcagaaccccaacacccagagcctgagccagaccggcaccgagctgaagaccatcaacgacttcctgttccagagccagatcgacaacatcaacctgttcaaggtgcagagatactgcgagaagagcatgatcagcagaaagctgttcggcttcaccgagagatacggcgccgtgttcagcagcagagagcagcccaagctggccggcttccagcagttcctgcagagcctgcagcccagaaccaccgaggccctggccgcccccgccgacgagagccaggccagcaccctgagacccgccagccccctgatgcacatccagggcttcctggccgccctgaccaccgccaaccaggacggcagagtgatcctgagcagacagggcagcctgagccagagcaccctgaagttcctgctgctgaaccccgccgtgcacttcgcccaggtggtgaaggagtgcagagccgtggtgatcgccggcggcaccatgcagcccgtgagcgacttcagacagcagctgctggcctgcgccggcgtggaggccgagagagtggtggagttcagctgcggccacgtgatcccccccgacaacatcctgcccctggtgatctgcagcggcatcagcaaccagcccctggagttcaccttccagaagagagagctgccccagatgatggacgaggtgggcagaatcctgtgcaacctgtgcggcgtggtgcccggcggcgtggtgtgcttcttccccagctacgagtacctgagacaggtgcacgcccactgggagaagggcggcctgctgggcagactggccgccagaaagaagatcttccaggagcccaagagcgcccaccaggtggagcaggtgctgctggcctacagcagatgcatccaggcctgcggccaggagagaggccaggtgaccggcgccctgctgctgagcgtggtgggcggcaagatgagcgagggcatcaacttcagcgacaacctgggcagatgcgtggtgatggtgggcatgcccttccccaacatcagaagcgccgagctgcaggagaagatggcctacctggaccagaccctggccggccccagcggcaccagaagaatcctgcccgcctag

SEQ ID NO: 10357 - DNA, 2913 bp, synthetic construct
  misc_feature 1..2913: note = Description of Artificial Sequence: Synthetic coding sequence
  source 1..2913: mol_type = other DNA
atggccaacgagacccagaaggtgggcgccatccacttccccttccccttcaccccctacagcatccaggaggacttcatggccgagctgtacagagtgctggaggccggcaagatcggcatcttcgagagccccaccggcaccggcaagagcctgagcctgatctgcggcgccctgagctggctgagagacttcgagcagaagaagagagaggaggaggccagactgctggagaccggcaccggccccctgcacgacgagaaggacgagagcctgtgcctgagcagcagctgcgagggcgccgccggcacccccagacccgccggcgagcccgcctgggtgacccagttcgtgcagaagaaggaggagagagacctggtggacagactgaaggccgagcaggccagaagaaagcagagagaggagagactgcagcagctgcagcacagagtgcagctgaagtacgccgccaagagactgagacaggaggaggaggagagagagaacctgctgagactgagcagagagatgctggagaccggccccgaggccgagagactggagcagctggagagcggcgaggaggagctggtgctggccgagtacgagagcgacgaggagaagaaggtggccagcagagtggacgaggacgaggacgacctggaggaggagcacatcaccaagatctactactgcagcagaacccacagccagctggcccagttcgtgcacgaggtgaagaagagccccttcggcaaggacgtgagactggtgagcctgggcagcagacagaacctgtgcgtgaacgaggacgtgaagagcctgggcagcgtgcagctgatcaacgacagatgcgtggacatgcagagaagcagacacgagaagaagaagggcgccgaggaggagaagcccaagagaagaagacaggagaagcaggccgcctgccccttctacaaccacgagcagatgggcctgctgagagacgaggccctggccgaggtgaaggacatggagcagctgctggccctgggcaaggaggccagagcctgcccctactacggcagcagactggccatccccgccgcccagctggtggtgctgccctaccagatgctgctgcacgccgccaccagacaggccgccggcatcagactgcaggaccaggtggtgatcatcgacgaggcccacaacctgatcgacaccatcaccggcatgcacagcgtggaggtgagcggcagccagctgtgccaggcccacagccagctgctgcagtacgtggagagatacggcaagagactgaaggccaagaacctgatgtacctgaagcagatcctgtacctgctggagaagttcgtggccgtgctgggcggcaacatcaagcagaaccccaacacccagagcctgagccagaccggcaccgagctgaagaccatcaacgacttcctgttccagagccagatcgacaacatcaacctgttcaaggtgcagagatactgcgagaagagcatgatcagcagaaagctgttcggcttcaccgagagatacggcgccgtgttcagcagcagagagcagcccaagctggccggcttccagcagttcctgcagagcctgcagcccagaaccaccgaggccctggccgcccccgccgacgagagccaggccagcaccctgagacccgccagccccctgatgcacatccagggcttcctggccgccctgaccaccgccaaccaggacggcagagtgatcctgagcagacagggcagcctgagccagagcaccctgaagttcctgctgctgaaccccgccgtgcacttcgcccaggtggtgaaggagtgcagagccgtggtgatcgccggcggcaccatgcagcccgtgagcgacttcagacagcagctgctggcctgcgccggcgtggaggccgagagagtggtggagttcagctgcggccacgtgatcccccccgacaacatcctgcccctggtgatctgcagcggcatcagcaaccagcccctggagttcaccttccagaagagagagctgccccagatgatggacgaggtgggcagaatcctgtgcaacctgtgcggcgtggtgcccggcggcgtggtgtgcttcttccccagctacgagtacctgagacaggtgcacgcccactgggagaagggcggcctgctgggcagactggccgccagaaagaagatcttccaggagcccaagagcgcccaccaggtggagcaggtgctgctggcctacagcagatgcatccaggcctgcggccaggagagaggccaggtgaccggcgccctgctgctgagcgtggtgggcggcaagatgagcgagggcatcaacttcagcgacaacctgggcagatgcgtggtgatggtgggcatgcccttccccaacatcagaagcgccgagctgcaggagaagatggcctacctggaccagaccctgagccccagacccggcacccccagagagggcagcggcggcgagcccgtgcacgagggcagacagcccgtgcacagacagggccaccaggcccccgagggcttctgccagagaagcgcccccggccccgccatctgccccgccccctgccccggccaggccgccggcctggaccccagcccctgcggcggccagagctacctgtggcccagacactgctgctgcgccgaggtgagccccggcgaggtgggcctgttcctgatgggcaaccacaccaccgcctggagaagagccctgcccctgagctgccccctggagaccgtgttcgtggtgggcgtggtgtgcggcgaccccgtgaccaaggtgaagcccagaagaagagtgtggagccccgagtgctgccaggaccccggcaccggcgtgagcagcagaagaagaaagtggggcaaccccgagtag

SEQ ID NO: 10358 - DNA, 675 bp, synthetic construct
  misc_feature 1..675: note = Description of Artificial Sequence: Synthetic coding sequence
  source 1..675: mol_type = other DNA
atggccgagctgtacagagtgctggaggccggcaagatcggcatcttcgagagccccaccggcaccggcaagagcctgagcctgatctgcggcgccctgagctggctgagagacttcgagcagaagaagagagaggaggaggccagactgctggagaccggcaccggccccctgcacgacgagaaggacgagagcctgtgcctgagcagcagctgcgagggcgccgccggcacccccagacccgccggcgagcccgcctgggtgacccagttcgtgcagaagaaggaggagagagacctggtggacagactgaaggccgagcaggccagaagaaagcagagagaggagagactgcagcagctgcagcacagagtgcagctgaagtacgccgccaagagactgagacaggaggaggaggagagagagaacctgctgagactgagcagagagatgctggagaccggccccgaggccgagagactggagcagctggagagcggcgaggaggagctggtgctggccgagtacgagagcgacgaggagaagaaggtggccagcagagtggacgaggacgaggacgacctggaggaggagcacatcaccaagatctactactgcagcagaacccacagccagctggcccagttcgtgcacgaggtgaagaagagcccctag

SEQ ID NO: 10359 - DNA, 2721 bp, synthetic construct
  misc_feature 1..2721: note = Description of Artificial Sequence: Synthetic coding sequence
  source 1..2721: mol_type = other DNA
atggccaacgagacccagaaggtgggcgccatccacttccccttccccttcaccccctacagcatccaggaggacttcatggccgagctgtacagagtgctggaggccggcaagatcggcatcttcgagagccccaccggcaccggcaagagcctgagcctgatctgcggcgccctgagctggctgagagacttcgagcagaagaagagagaggaggaggccagactgctggagaccggcaccggccccctgcacgacgagaaggacgagagcctgtgcctgagcagcagctgcgagggcgccgccggcacccccagacccgccggcgagcccgcctgggtgacccagttcgtgcagaagaaggaggagagagacctggtggacagactgaaggccgagcaggccagaagaaagcagagagaggagagactgcagcagctgcagcacagagtgcagctgaagtacgccgccaagagactgagacaggaggaggaggagagagagaacctgctgagactgagcagagagatgctggagaccggccccgaggccgagagactggagcagctggagagcggcgaggaggagctggtgctggccgagtacgagagcgacgaggagaagaaggtggccagcagagtggacgaggacgaggacgacctggaggaggagcacatcaccaagatctactactgcagcagaacccacagccagctggcccagttcgtgcacgaggtgaagaagagccccttcggcaaggacgtgagactggtgagcctgggcagcagacagaacctgtgcgtgaacgaggacgtgaagagcctgggcagcgtgcagctgatcaacgacagatgcgtggacatgcagagaagcagacacgagaagaagaagggcgccgaggaggagaagcccaagagaagaagacaggagaagcaggccgcctgccccttctacaaccacgagcagatgggcctgctgagagacgaggccctggccgaggtgaaggacatggagcagctgctggccctgggcaaggaggccagagcctgcccctactacggcagcagactggccatccccgccgcccagctggtggtgctgccctaccagatgctgctgcacgccgccaccagacaggccgccggcatcagactgcaggaccaggtggtgatcatcgacgaggcccacaacctgatcgacaccatcaccggcatgcacagcgtggaggtgagcggcagccagctgtgccaggcccacagccagctgctgcagtacgtggagagatacggcaagagactgaaggccaagaacctgatgtacctgaagcagatcctgtacctgctggagaagttcgtggccgtgctgggcggcaacatcaagcagaaccccaacacccagagcctgagccagaccggcaccgagctgaagaccatcaacgacttcctgttccagagccagatcgacaacatcaacctgttcaaggtgcagagatactgcgagaagagcatgatcagcagaaagctgttcggcttcaccgagagatacggcgccgtgttcagcagcagagagcagcccaagctggccggcttccagcagttcctgcagagcctgcagcccagaaccaccgaggccctggccgcccccgccgacgagagccaggccagcaccctgagacccgccagccccctgatgcacatccagggcttcctggccgccctgaccaccgccaaccaggacggcagagtgatcctgagcagacagggcagcctgagccagagcaccctgaagttcctgctgctgaaccccgccgtgcacttcgcccaggtggtgaaggagtgcagagccgtggtgatcgccggcggcaccatgcagcccgtgagcgacttcagacagcagctgctggcctgcgccggcgtggaggccgagagagtggtggagttcagctgcggccacgtgatcccccccgacaacatcctgcccctggtgatctgcagcggcatcagcaaccagcccctggagttcaccttccagaagagagagctgccccagatgatggacgaggtgggcagaatcctgtgcaacctgtgcggcgtggtgcccggcggcgtggtgtgcttcttccccagctacgagtacctgagacaggtgcacgcccactgggagaagggcggcctgctgggcagactggccgccagaaagaagatcttccaggagcccaagagcgcccaccaggtggagcaggtgctgctggcctacagcagatgcatccaggcctgcggccaggagagaggccaggtgaccggcgccctgctgctgagcgtggtgggcggcaagatgagcgagggcatcaacttcagcgacaacctgggcagatgcgtggtgatggtgggcatgcccttccccaacatcagaagcgccgagctgcaggagaagatggcctacctggaccagaccctgcccagagcccccggccaggccccccccggcaaggccctggtggagaacctgtgcatgaaggccgtgaaccagagcatcggcagagccatcagacaccagaaggacttcgccagcgtggtgctgctggaccagagatacgccagaccccccgtgctggccaagctgcccgcctggatcagagccagagtggaggtgaaggccaccttcggccccgccatcgccgccgtgcagaagttccacagagagaagagcgccagcagctag

SEQ ID NO: 10360 - DNA, 2913 bp, synthetic construct; identical to SEQ ID NO: 10357
  misc_feature 1..2913: note = Description of Artificial Sequence: Synthetic coding sequence
  source 1..2913: mol_type = other DNA

SEQ ID NO: 10361 - DNA, 4293 bp, synthetic construct
  misc_feature 1..4293: note = Description of Artificial Sequence: Synthetic coding sequence
  source 1..4293: mol_type = other DNA
atgaccgtgttcagacaggagaacgtggacgactactacgacaccggcgaggagctgggcagcggccagttcgccgtggtgaagaagtgcagagagaagagcaccggcctgcagtacgccgccaagttcatcaagaagagaagaaccaagagcagcagaagaggcgtgagcagagaggacatcgagagagaggtgagcatcctgaaggagatccagcaccccaacgtgatcaccctgcacgaggtgtacgagaacaagaccgacgtgatcctgatcctggagctggtggccggcggcgagctgttcgacttcctggccgagaaggagagcctgaccgaggaggaggccaccgagttcctgaagcagatcctgaacggcgtgtactacctgcacagcctgcagatcgcccacttcgacctgaagcccgagaacatcatgctgctggacagaaacgtgcccaagcccagaatcaagatcatcgacttcggcctggcccacaagatcgacttcggcaacgagttcaagaacatcttcggcacccccgagttcgtggcccccgagatcgtgaactacgagcccctgggcctggaggccgacatgtggagcatcggcgtgatcacctacatcctgctgagcggcgccagccccttcctgggcgacaccaagcaggagaccctggccaacgtgagcgccgtgaactacgagttcgaggacgagtacttcagcaacaccagcgccctggccaaggacttcatcagaagactgctggtgaaggaccccaagaagagaatgaccatccaggacagcctgcagcacccctggatcaagcccaaggacacccagcaggccctgagcagaaaggccagcgccgtgaacatggagaagttcaagaagttcgccgccagaaagaagtggaagcagagcgtgagactgatcagcctgtgccagagactgagcagaagcttcctgagcagaagcaacatgagcgtggccagaagcgacgacaccctggacgaggaggacagcttcgtgatgaaggccatcatccacgccatcaacgacgacaacgtgcccggcctgcagcacctgctgggcagcctgagcaactacgacgtgaaccagcccaacaagcacggcaccccccccctgctgatcgccgccggctgcggcaacatccagatcctgcagctgctgatcaagagaggcagcagaatcgacgtgcaggacaagggcggcagcaacgccgtgtactgggccgccagacacggccacgtggacaccctgaagttcctgagcgagaacaagtgccccctggacgtgaaggacaagagcggcgagatggccctgcacgtggccgccagatacggccacgccgacgtggcccagctgctgtgcagcttcggcagcaaccccaacatccaggacaaggaggaggagacccccctgcactgcgccgcctggcacggctactacagcgtggccaaggccctgtgcgaggccggctgcaacgtgaacatcaagaacagagagggcgagacccccctgctgaccgccagcgccagaggctaccacgacatcgtggagtgcctggccgagcacggcgccgacctgaacgcctgcgacaaggacggccacatcgccctgcacctggccgtgagaagatgccagatggaggtgatcaagaccctgctgagccagggctgcttcgtggactaccaggacagacacggcaacacccccctgcacgtggcctgcaaggacggcaacatgcccatcgtggtggccctgtgcgaggccaactgcaacctggacatcagcaacaagtacggcagaacccccctgcacctggccgccaacaacggcatcctggacgtggtgagatacctgtgcctgatgggcgccagcgtggaggccctgaccaccgacggcaagaccgccgaggacctggccagaagcgagcagcacgagcacgtggccggcctgctggccagactgagaaaggacacccacagaggcctgttcatccagcagctgagacccacccagaacctgcagcccagaatcaagctgaagctgttcggccacagcggcagcggcaagaccaccctggtggagagcctgaagtgcggcctgctgagaagcttcttcagaagaagaagacccagactgagcagcaccaacagcagcagattcccccccagccccctggccagcaagcccaccgtgagcgtgagcatcaacaacctgtaccccggctgcgagaacgtgagcgtgagaagcagaagcatgatgttcgagcccggcctgaccaagggcatgctggaggtgttcgtggcccccacccaccacccccactgcagcgccgacgaccagagcaccaaggccatcgacatccagaacgcctacctgaacggcgtgggcgacttcagcgtgtgggagttcagcggcaaccccgtgtacttctgctgctacgactacttcgccgccaacgaccccaccagcatccacgtggtggtgttcagcctggaggagccctacgagatccagctgaaccaggtgatcttctggctgagcttcctgaagagcctggtgcccgtggaggagcccatcgccttcggcggcaagctgaagaaccccctgcaggtggtgctggtggccacccacgccgacatcatgaacgtgcccagacccgccggcggcgagttcggctacgacaaggacaccagcctgctgaaggagatcagaaacagattcggcaacgacctgcacatcagcaacaagctgttcgtgctggacgccggcgccagcggcagcaaggacatgaaggtgctgagaaaccacctgcaggagatcagaagccagatcgtgagcgtgtgcccccccatgacccacctgtgcgagaagatcatcagcaccctgcccagctggagaaagctgaacggccccaaccagctgatgagcctgcagcagttcgtgtacgacgtgcaggaccagctgaaccccctggccagcgaggaggacctgagaagaatcgcccagcagctgcacagcaccggcgagatcaacatcatgcagagcgagaccgtgcaggacgtgctgctgctggaccccagatggctgtgcaccaacgtgctgggcaagctgctgagcgtggagacccccagagccctgcaccactacagaggcagatacaccgtggaggacatccagagactggtgcccgacagcgacgtggaggagctgctgcagatcctggacgccatggacatctgcgccagagacctgagcagcggcaccatggtggacgtgcccgccctgatcaagaccgacaacctgcacagaagctgggccgacgaggaggacgaggtgatggtgtacggcggcgtgagaatcgtgcccgtggagcacctgacccccttcccctgcggcatcttccacaaggtgcaggtgaacctgtgcagatggatccaccagcagagcaccgagggcgacgccgacatcagactgtgggtgaacggctgcaagctggccaacagaggcgccgagctgctggtgctgctggtgaaccacggccagggcatcgaggtgcaggtgagaggcctggagaccgagaagatcaagtgctgcctgctgctggacagcgtgtgcagcaccatcgagaacgtgatggccaccaccctgcccggcctgctgaccgtgaagcactacctgagcccccagcagctgagagagcaccacgagcccgtgatgatctaccagcccagagacttcttcagagcccagaccctgaaggagaccagcctgaccaacaccatgggcggctacaaggagagcttcagcagcatcatgtgcttcggctgccacgacgtgtacagccaggccagcctgggcatggacatccacgccagcgacctgaacctgctgaccagaagaaagctgagcagactgctggacccccccgaccccctgggcaaggactggtgcctgctggccatgaacctgggcctgcccgacctggtggccaagtacaacaccagcaacggcgcccccaaggacttcctgcccagccccctgcacgccctgctgagagagtggaccacctaccccgagagcaccgtgggcaccctgatgagcaagctgagagagctgggcagaagagacgccgccgacttcctgctgaaggccagcagcgtgttcaagatcaacctggacggcaacggccaggaggcctacgccagcagctgcaacagcggcaccagctacaacagcatcagcagcgtggtgagcagatag

SEQ ID NO: 10362 - DNA, 4293 bp, synthetic construct; identical to SEQ ID NO: 10361
  misc_feature 1..4293: note = Description of Artificial Sequence: Synthetic coding sequence
  source 1..4293: mol_type = other DNA

SEQ ID NO: 10363 - DNA, 4368 bp, synthetic construct
  misc_feature 1..4368: note = Description of Artificial Sequence: Synthetic coding sequence
  source 1..4368: mol_type = other DNA
atgaccgtgttcagacaggagaacgtggacgactactacgacaccggcgaggagctgggcagcggccagttcgccgtggtgaagaagtgcagagagaagagcaccggcctgcagtacgccgccaagttcatcaagaagagaagaaccaagagcagcagaagaggcgtgagcagagaggacatcgagagagaggtgagcatcctgaaggagatccagcaccccaacgtgatcaccctgcacgaggtgtacgagaacaagaccgacgtgatcctgatcctggagctggtggccggcggcgagctgttcgacttcctggccgagaaggagagcctgaccgaggaggaggccaccgagttcctgaagcagatcctgaacggcgtgtactacctgcacagcctgcagatcgcccacttcgacctgaagcccgagaacatcatgctgctggacagaaacgtgcccaagcccagaatcaagatcatcgacttcggcctggcccacaagatcgacttcggcaacgagttcaagaacatcttcggcacccccgagttcgtggcccccgagatcgtgaactacgagcccctgggcctggaggccgacatgtggagcatcggcgtgatcacctacatcctgctgagcggcgccagccccttcctgggcgacaccaagcaggagaccctggccaacgtgagcgccgtgaactacgagttcgaggacgagtacttcagcaacaccagcgccctggccaaggacttcatcagaagactgctggtgaaggaccccaagaagagaatgaccatccaggacagcctgcagcacccctggatcaagcccaaggacacccagcaggccctgagcagaaaggccagcgccgtgaacatggagaagttcaagaagttcgccgccagaaagaagtggaagcagagcgtgagactgatcagcctgtgccagagactgagcagaagcttcctgagcagaagcaacatgagcgtggccagaagcgacgacaccctggacgaggaggacagcttcgtgatgaaggccatcatccacgccatcaacgacgacaacgtgcccggcctgcagcacctgctgggcagcctgagcaactacgacgtgaaccagcccaacaagcacggcaccccccccctgctgatcgccgccggctgcggcaacatccagatcctgcagctgctgatcaagagaggcagcagaatcgacgtgcaggacaagggcggcagcaacgccgtgtactgggccgccagacacggccacgtggacaccctgaagttcctgagcgagaacaagtgccccctggacgtgaaggacaagagcggcgagatggccctgcacgtggccgccagatacggccacgccgacgtggcccagctgctgtgcagcttcggcagcaaccccaacatccaggacaaggaggaggagacccccctgcactgcgccgcctggcacggctactacagcgtggccaaggccctgtgcgaggccggctgcaacgtgaacatcaagaacagagagggcgagacccccctgctgaccgccagcgccagaggctaccacgacatcgtggagtgcctggccgagcacggcgccgacctgaacgcctgcgacaaggacggccacatcgccctgcacctggccgtgagaagatgccagatggaggtgatcaagaccctgctgagccagggctgcttcgtggactaccaggacagacacggcaacacccccctgcacgtggcctgcaaggacggcaacatgcccatcgtggtggccctgtgcgaggccaactgcaacctggacatcagcaacaagtacggcagaacccccctgcacctggccgccaacaacggcatcctggacgtggtgagatacctgtgcctgatgggcgccagcgtggaggccctgaccaccgacggcaagaccgccgaggacctggccagaagcgagcagcacgagcacgtggccggcctgctggccagactgagaaaggacacccacagaggcctgttcatccagcagctgagacccacccagaacctgcagcccagaatcaagctgaagctgttcggccacagcggcagcggcaagaccaccctggtggagagcctgaagtgcggcctgctgagaagcttcttcagaagaagaagacccagactgagcagcaccaacagcagcagattcccccccagccccctggccagcaagcccaccgtgagcgtgagcatcaacaacctgtaccccggctgcgagaacgtgagcgtgagaagcagaagcatgatgttcgagcccggcctgaccaagggcatgctggaggtgttcgtggcccccacccaccacccccactgcagcgccgacgaccagagcaccaaggccatcgacatccagaacgcctacctgaacggcgtgggcgacttcagcgtgtgggagttcagcggcaaccccgtgtacttctgctgctacgactacttcgccgccaacgaccccaccagcatccacgtggtggtgttcagcctggaggagccctacgagatccagctgaaccaggtgatcttctggctgagcttcctgaagagcctggtgcccgtggaggagcccatcgccttcggcggcaagctgaagaaccccctgcaggtggtgctggtggccacccacgccgacatcatgaacgtgcccagacccgccggcggcgagttcggctacgacaaggacaccagcctgctgaaggagatcagaaacagattcggcaacgacctgcacatcagcaacaagctgttcgtgctggacgccggcgccagcggcagcaaggacatgaaggtgctgagaaaccacctgcaggagatcagaagccagatcgtgagcaagaccctgcccttcacccccgacatcctggtgggcgtgcccctgtggcaccaccagaagatcggcggcagccccgtgtgcccccccatgacccacctgtgcgagaagatcatcagcaccctgcccagctggagaaagctgaacggccccaaccagctgatgagcctgcagcagttcgtgtacgacgtgcaggaccagctgaaccccctggccagcgaggaggacctgagaagaatcgcccagcagctgcacagcaccggcgagatcaacatcatgcagagcgagaccgtgcaggacgtgctgctgctggaccccagatggctgtgcaccaacgtgctgggcaagctgctgagcgtggagacccccagagccctgcaccactacagaggcagatacaccgtggaggacatccagagactggtgcccgacagcgacgtggaggagctgctgcagatcctggacgccatggacatctgcgccagagacctgagcagcggcaccatggtggacgtgcccgccctgatcaagaccgacaacctgcacagaagctgggccgacgaggaggacgaggtgatggtgtacggcggcgtgagaatcgtgcccgtggagcacctgacccccttcccctgcggcatcttccacaaggtgcaggtgaacctgtgcagatggatccaccagcagagcaccgagggcgacgccgacatcagactgtgggtgaacggctgcaagctggccaacagaggcgccgagctgctggtgctgctggtgaaccacggccagggcatcgaggtgcaggtgagaggcctggagaccgagaagatcaagtgctgcctgctgctggacagcgtgtgcagcaccatcgagaacgtgatggccaccaccctgcccggcctgctgaccgtgaagcactacctgagcccccagcagctgagagagcaccacgagcccgtgatgatctaccagcccagagacttcttcagagcccagaccctgaaggagaccagcctgaccaacaccatgggcggctacaaggagagcttcagcagcatcatgtgcttcggctgccacgacgtgtacagccaggccagcctgggcatggacatccacgccagcgacctgaacctgctgaccagaagaaagctgagcagactgctggacccccccgaccccctgggcaaggactggtgcctgctggccatgaacctgggcctgcccgacctggtggccaagtacaacaccagcaacggcgcccccaaggacttcctgcccagccccctgcacgccctgctgagagagtggaccacctaccccgagagcaccgtgggcaccctgatgagcaagctgagagagctgggcagaagagacgccgccgacttcctgctgaaggccagcagcgtgttcaagatcaacctggacggcaacggccaggaggcctacgccagcagctgcaacagcggcaccagctacaacagcatcagcagcgtggtgagcagatag

SEQ ID NO: 10364 - DNA, 4293 bp, synthetic construct; identical to SEQ ID NO: 10361
  misc_feature 1..4293: note = Description of Artificial Sequence: Synthetic coding sequence
  source 1..4293: mol_type = other DNA

SEQ ID NO: 10365 - DNA, 4095 bp, synthetic construct
  misc_feature 1..4095: note = Description of Artificial Sequence: Synthetic coding sequence
  source 1..4095: mol_type = other DNA
atgaccgtgttcagacaggagaacgtggacgactactacgacaccggcgaggagctgggcagcggccagttcgccgtggtgaagaagtgcagagagaagagcaccggcctgcagtacgccgccaagttcatcaagaagagaagaaccaagagcagcagaagaggcgtgagcagagaggacatcgagagagaggtgagcatcctgaaggagatccagcaccccaacgtgatcaccctgcacgaggtgtacgagaacaagaccgacgtgatcctgatcctggagctggtggccggcggcgagctgttcgacttcctggccgagaaggagagcctgaccgaggaggaggccaccgagttcctgaagcagatcctgaacggcgtgtactacctgcacagcctgcagatcgcccacttcgacctgaagcccgagaacatcatgctgctggacagaaacgtgcccaagcccagaatcaagatcatcgacttcggcctggcccacaagatcgacttcggcaacgagttcaagaacatcttcggcacccccgagttcgtggcccccgagatcgtgaactacgagcccctgggcctggaggccgacatgtggagcatcggcgtgatcacctacatcctgctgagcggcgccagccccttcctgggcgacaccaagcaggagaccctggccaacgtgagcgccgtgaactacgagttcgaggacgagtacttcagcaacaccagcgccctggccaaggacttcatcagaagactgctggtgaaggaccccaagaagagaatgaccatccaggacagcctgcagcacccctggatcaagcccaaggacacccagcaggccctgagcagaaaggccagcgccgtgaacatggagaagttcaagaagttcgccgccagaaagaagtggaagcagagcgtgagactgatcagcctgtgccagagactgagcagaagcttcctgagcagaagcaacatgagcgtggccagaagcgacgacaccctggacgaggaggacagcttcgtgatgaaggccatcatccacgccatcaacgacgacaacgtgcccggcctgcagcacctgctgggcagcctgagcaactacgacgtgaaccagcccaacaagcacggcaccccccccctgctgatcgccgccggctgcggcaacatccagatcctgcagctgctgatcaagagaggcagcagaatcgacgtgcaggacaagggcggcagcaacgccgtgtactgggccgccagacacggccacgtggacaccctgaagttcctgagcgagaacaagtgccccctggacgtgaaggacaagagcggcgagatggccctgcacgtggccgccagatacggccacgccgacgtggcccagctgctgtgcagcttcggcagcaaccccaacatccaggacaaggaggaggagacccccctgcactgcgccgcctggcacggctactacagcgtggccaaggccctgtgcgaggccggctgcaacgtgaacatcaagaacagagagggcgagacccccctgctgaccgccagcgccagaggctaccacgacatcgtggagtgcctggccgagcacggcgccgacctgaacgcctgcgacaaggacggccacatcgccctgcacctggccgtgagaagatgccagatggaggtgatcaagaccctgctgagccagggctgcttcgtggactaccaggacagacacggcaacacccccctgcacgtggcctgcaaggacggcaacatgcccatcgtggtggccctgtgcgaggccaactgcaacctggacatcagcaacaagtacggcagaacccccctgcacctggccgccaacaacggcatcctggacgtggtgagatacctgtgcctgatgggcgccagcgtggaggccctgaccaccgacggcaagaccgccgaggacctggccagaagcgagcagcacgagcacgtggccggcctgctggccagactgagaaaggacacccacagaggcctgttcatccagcagctgagacccacccagaacctgcagcccagaatcaagctgaagctgttcggccacagcggcagcggcaagaccaccctggtggagagcctgaagtgcggcctgctgagaagcttcttcagaagaagaagacccagactgagcagcaccaacagcagcagattcccccccagccccctggccagcaagcccaccgtgagcgtgagcatcaacaacctgtaccccggctgcgagaacgtgagcgtgagaagcagaagcatgatgttcgagcccggcctgaccaagggcatgctggaggtgttcgtggcccccacccaccacccccactgcagcgccgacgaccagagcaccaaggccatcgacatccagaacgcctacctgaacgccttcggcggcaagctgaagaaccccctgcaggtggtgctggtggccacccacgccgacatcatgaacgtgcccagacccgccggcggcgagttcggctacgacaaggacaccagcctgctgaaggagatcagaaacagattcggcaacgacctgcacatcagcaacaagctgttcgtgctggacgccggcgccagcggcagcaaggacatgaaggtgctgagaaaccacctgcaggagatcagaagccagatcgtgagcgtgtgcccccccatgacccacctgtgcgagaagatcatcagcaccctgcccagctggagaaagctgaacggccccaaccagctgatgagcctgcagcagttcgtgtacgacgtgcaggaccagctgaaccccctggccagcgaggaggacctgagaagaatcgcccagcagctgcacagcaccggcgagatcaacatcatgcagagcgagaccgtgcaggacgtgctgctgctggaccccagatggctgtgcaccaacgtgctgggcaagctgctgagcgtggagacccccagagccctgcaccactacagaggcagatacaccgtggaggacatccagagactggtgcccgacagcgacgtggaggagctgctgcagatcctggacgccatggacatctgcgccagagacctgagcagcggcaccatggtggacgtgcccgccctgatcaagaccgacaacctgcacagaagctgggccgacgaggaggacgaggtgatggtgtacggcggcgtgagaatcgtgcccgtggagcacctgacccccttcccctgcggcatcttccacaaggtgcaggtgaacctgtgcagatggatccaccagcagagcaccgagggcgacgccgacatcagactgtgggtgaacggctgcaagctggccaacagaggcgccgagctgctggtgctgctggtgaaccacggccagggcatcgaggtgcaggtgagaggcctggagaccgagaagatcaagtgctgcctgctgctggacagcgtgtgcagcaccatcgagaacgtgatggccaccaccctgcccggcctgctgaccgtgaagcactacctgagcccccagcagctgagagagcaccacgagcccgtgatgatctaccagcccagagacttcttcagagcccagaccctgaaggagaccagcctgaccaacaccatgggcggctacaaggagagcttcagcagcatcatgtgcttcggctgccacgacgtgtacagccaggccagcctgggcatggacatccacgccagcgacctgaacctgctgaccagaagaaagctgagcagactgctggacccccccgaccccctgggcaaggactggtgcctgctggccatgaacctgggcctgcccgacctggtggccaagtacaacaccagcaacggcgcccccaaggacttcctgcccagccccctgcacgccctgctgagagagtggaccacctaccccgagagcaccgtgggcaccctgatgagcaagctgagagagctgggcagaagagacgccgccgacttcctgctgaaggccagcagcgtgttcaagatcaacctggacggcaacggccaggaggcctacgccagcagctgcaacagcggcaccagctacaacagcatcagcagcgtggtgagcagatag

SEQ ID NO: 10366 - DNA, 2223 bp, synthetic construct
  misc_feature 1..2223: note = Description of Artificial Sequence: Synthetic coding sequence
  source 1..2223: mol_type = other DNA
atggccaccgccaacagcatcatcgtgctggacgacgacgacgaggacgaggccgccgcccagcccggccccagccaccccctgcccaacgccgccagccccggcgccgaggcccccagcagcagcgagccccacggcgccagaggcagcagcagcagcggcggcaagaagtgctacaagctggagaacgagaagctgttcgaggagttcctggagctgtgcaagatgcagaccgccgaccaccccgaggtggtgcccttcctgtacaacagacagcagagagcccacagcctgttcctggccagcgccgagttctgcaacatcctgagcagagtgctgagcagagccagaagcagacccgccaagctgtacgtgtacatcaacgagctgtgcaccgtgctgaaggcccacagcgccaagaagaagctgaacctggcccccgccgccaccaccagcaacgagcccagcggcaacaacccccccacccacctgagcctggaccccaccaacgccgagaacaccgccagccagagccccagaaccagaggcagcagaagacagatccagagactggagcagctgctggccctgtacgtggccgagatcagaagactgcaggagaaggagctggacctgagcgagctggacgaccccgacagcgcctacctgcaggaggccagactgaagagaaagctgatcagactgttcggcagactgtgcgagctgaaggactgcagcagcctgaccggcagagtgatcgagcagagaatcccctacagaggcaccagataccccgaggtgaacagaagaatcgagagactgatcaacaagcccggccccgacaccttccccgactacggcgacgtgctgagagccgtggagaaggccgccgccagacacagcctgggcctgcccagacagcagctgcagctgatggcccaggacgccttcagagacgtgggcatcagactgcaggagagaagacacctggacctgatctacaacttcggctgccacctgaccgacgactacagacccggcgtggaccccgccctgagcgaccccgtgctggccagaagactgagagagaacagaagcctggccatgagcagactggacgaggtgatcagcaagtacgccatgctgcaggacaagagcgaggagggcgagagaaagaagagaagagccagactgcagggcaccagcagccacagcgccgacacccccgaggccagcctggacagcggcgagggccccagcggcatggccagccagggctgccccagcgccagcagagccgagaccgacgacgaggacgacgaggagagcgacgaggaggaggaggaggaggaggaggaggaggaggaggaggccaccgacagcgaggaggaggaggacctggagcagatgcaggagggccaggaggacgacgaggaggaggacgaggaggaggaggccgccgccggcaaggacggcgacaagagccccatgagcagcctgcagatcagcaacgagaagaacctggagcccggcaagcagatcagcagaagcagcggcgagcagcagaacaagggcagaatcgtgagccccagcctgctgagcgaggagcccctggcccccagcagcatcgacgccgagagcaacggcgagcagcccgaggagctgaccctggaggaggagagccccgtgagccagctgttcgagctggagatcgaggccctgcccctggacacccccagcagcgtggagaccgacatcagcagcagcagaaagcagagcgaggagcccttcaccaccgtgctggagaacggcgccggcatggtgagcagcaccagcttcaacggcggcgtgagcccccacaactggggcgacagcggccccccctgcaagaagagcagaaaggagaagaagcagaccggcagcggccccctgggcaacagctacgtggagagacagagaagcgtgcacgagaagaacggcaagaagatctgcaccctgcccagcccccccagccccctggccagcctggcccccgtggccgacagcagcaccagagtggacagccccagccacggcctggtgaccagcagcctgtgcatccccagccccgccagactgagccagaccccccacagccagccccccagacccggcacctgcaagaccagcgtggccacccagtgcgaccccgaggagatcatcgtgctgagcgacagcgactag

SEQ ID NO: 10367 - DNA, 2223 bp, synthetic construct; identical to SEQ ID NO: 10366
  misc_feature 1..2223: note = Description of Artificial Sequence: Synthetic coding sequence
  source 1..2223: mol_type = other DNA

SEQ ID NO: 10368 - DNA, 1998 bp, synthetic construct
  misc_feature 1..1998: note = Description of Artificial Sequence: Synthetic coding sequence
  source 1..1998: mol_type = other DNA
atgcagaccgccgaccaccccgaggtggtgcccttcctgtacaacagacagcagagagcccacagcctgttcctggccagcgccgagttctgcaacatcctgagcagagtgctgagcagagccagaagcagacccgccaagctgtacgtgtacatcaacgagctgtgcaccgtgctgaaggcccacagcgccaagaagaagctgaacctggcccccgccgccaccaccagcaacgagcccagcggcaacaacccccccacccacctgagcctggaccccaccaacgccgagaacaccgccagccagagccccagaaccagaggcagcagaagacagatccagagactggagcagctgctggccctgtacgtggccgagatcagaagactgcaggagaaggagctggacctgagcgagctggacgaccccgacagcgcctacctgcaggaggccagactgaagagaaagctgatcagactgttcggcagactgtgcgagctgaaggactgcagcagcctgaccggcagagtgatcgagcagagaatcccctacagaggcaccagataccccgaggtgaacagaagaatcgagagactgatcaacaagcccggccccgacaccttccccgactacggcgacgtgctgagagccgtggagaaggccgccgccagacacagcctgggcctgcccagacagcagctgcagctgatggcccaggacgccttcagagacgtgggcatcagactgcaggagagaagacacctggacctgatctacaacttcggctgccacctgaccgacgactacagacccggcgtggaccccgccctgagcgaccccgtgctggccagaagactgagagagaacagaagcctggccatgagcagactggacgaggtgatcagcaagtacgccatgctgcaggacaagagcgaggagggcgagagaaagaagagaagagccagactgcagggcaccagcagccacagcgccgacacccccgaggccagcctggacagcggcgagggccccagcggcatggccagccagggctgccccagcgccagcagagccgagaccgacgacgaggacgacgaggagagcgacgaggaggaggaggaggaggaggaggaggaggaggaggaggccaccgacagcgaggaggaggaggacctggagcagatgcaggagggccaggaggacgacgaggaggaggacgaggaggaggaggccgccgccggcaaggacggcgacaagagccccatgagcagcctgcagatcagcaacgagaagaacctggagcccggcaagcagatcagcagaagcagcggcgagcagcagaacaagggcagaatcgtgagccccagcctgctgagcgaggagcccctggcccccagcagcatcgacgccgagagcaacggcgagcagcccgaggagctgaccctggaggaggagagccccgtgagccagctgttcgagctggagatcgaggccctgcccctggacacccccagcagcgtggagaccgacatcagcagcagcagaaagcagagcgaggagcccttcaccaccgtgctggagaacggcgccggcatggtgagcagcaccagcttcaacggcggcgtgagcccccacaactggggcgacagcggccccccctgcaagaagagcagaaaggagaagaagcagaccggcagcggccccctgggcaacagctacgtggagagacagagaagcgtgcacgagaagaacggcaagaagatctgcaccctgcccagcccccccagccccctggccagcctggcccccgtggccgacagcagcaccagagtggacagccccagccacggcctggtgaccagcagcctgtgcatccccagccccgccagactgagccagaccccccacagccagccccccagacccggcacctgcaagaccagcgtggccacccagtgcgaccccgaggagatcatcgtgctgagcgacagcgactag

SEQ ID NO: 10369 - DNA, 537 bp, synthetic construct
  misc_feature 1..537: note = Description of Artificial Sequence: Synthetic coding sequence
  source 1..537: mol_type = other DNA
atggccaccgccaacagcatcatcgtgctggacgacgacgacgaggacgaggccgccgcccagcccggccccagccaccccctgcccaacgccgccagccccggcgccgaggcccccagcagcagcgagccccacggcgccagaggcagcagcagcagcggcggcaagaagtgctacaagctggagaacgagaagctgttcgaggagttcctggagctgtgcaagatgcagaccgccgaccaccccgaggtggtgcccttcctgtacaacagacagcagagagcccacagcctgttcctggccagcgccgagttctgcaacatcctgagcagagtgctgagcagagccagaagcagacccgccaagctgtacgtgtacatcaacgagctgtgcaccgtgctgaaggcccacagcgccaagaagaagctgaacctggcccccgccgccaccaccagcaacgagcccagcggcaacaacccccccacccacctgagcctggaccccaccaacgccgagaacaccgccagccagagctag

SEQ ID NO: 10370 - DNA, 147 bp, synthetic construct
  misc_feature 1..147: note = Description of Artificial Sequence: Synthetic coding sequence
  source 1..147: mol_type = other DNA
atggccaccgccaacagcatcatcgtgctggacgacgacgacgaggacgaggccgccgcccagcccggccccagccaccccctgcccaacgccgccagccccggcgccgaggcccccagcagcagcgagccccacggcgccagatag

SEQ ID NO: 10371 - DNA, 393 bp, synthetic construct
  misc_feature 1..393: note = Description of Artificial Sequence: Synthetic coding sequence
  source 1..393: mol_type = other DNA
atggccaccgccaacagcatcatcgtgctggacgacgacgacgaggacgaggccgccgcccagcccggccccagccaccccctgcccaacgccgccagccccggcgccgaggcccccagcagcagcgagccccacggcgccagaggcagcagcagcagcggcggcaagaagtgctacaagctggagaacgagaagctgttcgaggagttcctggagctgtgcaagatgcagaccgccgaccaccccgaggtggtgcccttcctgtacaacagacagcagagagcccacagcctgttcctggccagcgccgagttctgcaacatcctgagcagagtgctgagcagagccagaagcagacccgccaagctgtacgtgtacatcaacgagctgtag

SEQ ID NO: 10372 - DNA, 2316 bp, synthetic construct
  misc_feature 1..2316: note = Description of Artificial Sequence: Synthetic coding sequence
  source 1..2316: mol_type = other DNA
ggcgtgcccgtgatcaagtggaagaaggacggcatccacctggccctgggcatggacgagagaaagcagcagctgagcaacggcagcctgctgatccagaacatcctgcacagcagacaccacaagcccgacgagggcctgtaccagtgcgaggccagcctgggcgacagcggcagcatcatcagcagaaccgccaaggtggccgtggccggccccctgagattcctgagccagaccgagagcgtgaccgccttcatgggcgacaccgtgctgctgaagtgcgaggtgatcggcgagcccatgcccaccatccactggcagaagaaccagcaggacctgacccccatccccggcgacagcagagtggtggtgctgcccagcggcgccctgcagatcagcagactgcagcccggcgacatcggcatctacagatgcagcgccagaaaccccgccagcagcagaaccggcaacgaggccgaggtgagaatcctgagcgaccccggcctgcacagacagctgtacttcctgcagagacccagcaacgtggtggccatcgagggcaaggacgccgtgctggagtgctgcgtgagcggctaccccccccccagcttcacctggctgagaggcgaggaggtgatccagctgagaagcaagaagtacagcctgctgggcggcagcaacctgctgatcagcaacgtgaccgacgacgacagcggcatgtacacctgcgtggtgacctacaagaacgagaacatcagcgccagcgccgagctgaccgtgctggtgcccccctggttcctgaaccaccccagcaacctgtacgcctacgagagcatggacatcgagttcgagtgcaccgtgagcggcaagcccgtgcccaccgtgaactggatgaagaacggcgacgtggtgatccccagcgactacttccagatcgtgggcggcagcaacctgagaatcctgggcgtggtgaagagcgacgagggcttctaccagtgcgtggccgagaacgaggccggcaacgcccagaccagcgcccagctgatcgtgcccaagcccgccatccccagcagcagcgtgctgcccagcgcccccagagacgtggtgcccgtgctggtgagcagcagattcgtgagactgagctggagaccccccgccgaggccaagggcaacatccagaccttcaccgtgttcttcagcagagagggcgacaacagagagagagccctgaacaccacccagcccggcagcctgcagctgaccgtgggcaacctgaagcccgaggccatgtacaccttcagagtggtggcctacaacgagtggggccccggcgagagcagccagcccatcaaggtggccacccagcccgagctgcaggtgcccggccccgtggagaacctgcaggccgtgagcaccagccccaccagcatcctgatcacctgggagccccccgcctacgccaacggccccgtgcagggctacagactgttctgcaccgaggtgagcaccggcaaggagcagaacatcgaggtggacggcctgagctacaagctggagggcctgaagaagttcaccgagtacagcctgagattcctggcctacaacagatacggccccggcgtgagcaccgacgacatcaccgtggtgaccctgagcgacgtgcccagcgcccccccccagaacgtgagcctggaggtggtgaacagcagaagcatcaaggtgagctggctgcccccccccagcggcacccagaacggcttcatcaccggctacaagatcagacacagaaagaccaccagaagaggcgagatggagaccctggagcccaacaacctgtggtacctgttcaccggcctggagaagggcagccagtacagcttccaggtgagcgccatgaccgtgaacggcaccggcccccccagcaactggtacaccgccgagacccccgagaacgacctggacgagagccaggtgcccgaccagcccagcagcctgcacgtgagaccccagaccaactgcatcatcatgagctggaccccccccctgaaccccaacatcgtggtgagaggctacatcatcggctacggcgtgggcagcccctacgccgagaccgtgagagtggacagcaagcagagatactacagcatcgagagactggagagcagcagccactacgtgatcagcctgaaggccttcaacaacgccggcgagggcgtgcccctgtacgagagcgccaccaccagaagcatcaccgtgagaagacacaacatcagcaagctgcacagcaacagaccccagaccaagcacaacgtgtag

SEQ ID NO: 10373 - DNA, 2694 bp, synthetic construct
  misc_feature 1..2694: note = Description of Artificial Sequence: Synthetic coding sequence
  source 1..2694: mol_type = other DNA
atgggcgacaccgtgctgctgaagtgcgaggtgatcggcgagcccatgcccaccatccactggcagaagaaccagcaggacctgacccccatccccggcgacagcagagtggtggtgctgcccagcggcgccctgcagatcagcagactgcagcccggcgacatcggcatctacagatgcagcgccagaaaccccgccagcagcagaaccggcaacgaggccgaggtgagaatcctgagcgaccccggcctgcacagacagctgtacttcctgcagagacccagcaacgtggtggccatcgagggcaaggacgccgtgctggagtgctgcgtgagcggctaccccccccccagcttcacctggctgagaggcgaggaggtgatccagctgagaagcaagaagtacagcctgctgggcggcagcaacctgctgatcagcaacgtgaccgacgacgacagcggcatgtacacctgcgtggtgacctacaagaacgagaacatcagcgccagcgccgagctgaccgtgctggtgcccccctggttcctgaaccaccccagcaacctgtacgcctacgagagcatggacatcgagttcgagtgcaccgtgagcggcaagcccgtgcccaccgtgaactggatgaagaacggcgacgtggtgatccccagcgactacttccagatcgtgggcggcagcaacctgagaatcctgggcgtggtgaagagcgacgagggcttctaccagtgcgtggccgagaacgaggccggcaacgcccagaccagcgcccagctgatcgtgcccaagcccgccatccccagcagcagcgtgctgcccagcgcccccagagacgtggtgcccgtgctggtgagcagcagattcgtgagactgagctggagaccccccgccgaggccaagggcaacatccagaccttcaccgtgttcttcagcagagagggcgacaacagagagagagccctgaacaccacccagcccggcagcctgcagctgaccgtgggcaacctgaagcccgaggccatgtacaccttcagagtggtggcctacaacgagtggggccccggcgagagcagccagcccatcaaggtggccacccagcccgagctgcaggtgcccggccccgtggagaacctgcaggccgtgagcaccagccccaccagcatcctgatcacctgggagccccccgcctacgccaacggccccgtgcagggctacagactgttctgcaccgaggtgagcaccggcaaggagcagaacatcgaggtggacggcctgagctacaagctggagggcctgaagaagttcaccgagtacagcctgagattcctggcctacaacagatacggccccggcgtgagcaccgacgacatcaccgtggtgaccctgagcgacgtgcccagcgcccccccccagaacgtgagcctggaggtggtgaacagcagaagcatcaaggtgagctggctgcccccccccagcggcacccagaacggcttcatcaccggctacaagatcagacacagaaagaccaccagaagaggcgagatggagaccctggagcccaacaacctgtggtacctgttcaccggcctggagaagggcagccagtacagcttccaggtgagcgccatgaccgtgaacggcaccggcccccccagcaactggtacaccgccgagacccccgagaacgacctggacgagagccaggtgcccgaccagcccagcagcctgcacgtgagaccccagaccaactgcatcatcatgagctggaccccccccctgaaccccaacatcgtggtgagaggctacatcatcggctacggcgtgggcagcccctacgccgagaccgtgagagtggacagcaagcagagatactacagcatcgagagactggagagcagcagccactacgtgatcagcctgaaggccttcaacaacgccggcgagggcgtgcccctgtacgagagcgccaccaccagaagcatcaccgacctgagcacccccatgctgccccccgtgggcgtgcaggccgtggccctgacccacgacgccgtgagagtgagctgggccgacaacagcgtgcccaagaaccagaagaccagcgaggtgagactgtacaccgtgagatggagaaccagcttcagcgccagcgccaagtacaagagcgaggacaccaccagcctgagctacaccgccaccggcctgaagcccaacaccatgtacgagttcagcgtgatggtgaccaagaacagaagaagcagcacctggagcatgaccgcccacgccaccacctacgaggccgcccccaccagcgcccccaaggacctgaccgtgatcaccagagagggcaagcccagagccgtgatcgtgagctggcagccccccctggaggccaacggcaagatcaccgcctacatcctgttctacaccctggacaagaacatccccatcgacgactggatcatggagaccatcagcggcgacagactgacccaccagatcatggacctgaacctggacaccatgtactacttcagaatccaggccagaaacagcaagggcgtgggccccctgagcgaccccatcctgttcagaaccctgaaggtggagcaccccgacaagatggccaacgaccaggacaccggcgtgaccatcaacctggtgaacgaggtgctgctgggctag

SEQ ID NO: 10374 - DNA, 4344 bp, synthetic construct
  misc_feature 1..4344: note = Description of Artificial Sequence: Synthetic coding sequence
  source 1..4344: mol_type = other DNA
atggagaacagcctgagatgcgtgtgggtgcccaagctggccttcgtgctgttcggcgccagcctgttcagcgcccacctgcaggtgaccggcttccagatcaaggccttcaccgccctgagattcctgagcgagcccagcgacgccgtgaccatgagaggcggcaacgtgctgctggactgcagcgccgagagcgacagaggcgtgcccgtgatcaagtggaagaaggacggcatccacctggccctgggcatggacgagagaaagcagcagctgagcaacggcagcctgctgatccagaacatcctgcacagcagacaccacaagcccgacgagggcctgtaccagtgcgaggccagcctgggcgacagcggcagcatcatcagcagaaccgccaaggtggccgtggccggccccctgagattcctgagccagaccgagagcgtgaccgccttcatgggcgacaccgtgctgctgaagtgcgaggtgatcggcgagcccatgcccaccatccactggcagaagaaccagcaggacctgacccccatccccggcgacagcagagtggtggtgctgcccagcggcgccctgcagatcagcagactgcagcccggcgacatcggcatctacagatgcagcgccagaaaccccgccagcagcagaaccggcaacgaggccgaggtgagaatcctgagcgaccccggcctgcacagacagctgtacttcctgcagagacccagcaacgtggtggccatcgagggcaaggacgccgtgctggagtgctgcgtgagcggctaccccccccccagcttcacctggctgagaggcgaggaggtgatccagctgagaagcaagaagtacagcctgctgggcggcagcaacctgctgatcagcaacgtgaccgacgacgacagcggcatgtacacctgcgtggtgacctacaagaacgagaacatcagcgccagcgccgagctgaccgtgctggtgcccccctggttcctgaaccaccccagcaacctgtacgcctacgagagcatggacatcgagttcgagtgcaccgtgagcggcaagcccgtgcccaccgtgaactggatgaagaacggcgacgtggtgatccccagcgactacttccagatcgtgggcggcagcaacctgagaatcctgggcgtggtgaagagcgacgagggcttctaccagtgcgtggccgagaacgaggccggcaacgcccagaccagcgcccagctgatcgtgcccaagcccgccatccccagcagcagcgtgctgcccagcgcccccagagacgtggtgcccgtgctggtgagcagcagattcgtgagactgagctggagaccccccgccgaggccaagggcaacatccagaccttcaccgtgttcttcagcagagagggcgacaacagagagagagccctgaacaccacccagcccggcagcctgcagctgaccgtgggcaacctgaagcccgaggccatgtacaccttcagagtggtggcctacaacgagtggggccccggcgagagcagccagcccatcaaggtggccacccagcccgagctgcaggtgcccggccccgtggagaacctgcaggccgtgagcaccagccccaccagcatcctgatcacctgggagccccccgcctacgccaacggccccgtgcagggctacagactgttctgcaccgaggtgagcaccggcaaggagcagaacatcgaggtggacggcctgagctacaagctggagggcctgaagaagttcaccgagtacagcctgagattcctggcctacaacagatacggccccggcgtgagcaccgacgacatcaccgtggtgaccctgagcgacgtgcccagcgcccccccccagaacgtgagcctggaggtggtgaacagcagaagcatcaaggtgagctggctgcccccccccagcggcacccagaacggcttcatcaccggctacaagatcagacacagaaagaccaccagaagaggcgagatggagaccctggagcccaacaacctgtggtacctgttcaccggcctggagaagggcagccagtacagcttccaggtgagcgccatgaccgtgaacggcaccggcccccccagcaactggtacaccgccgagacccccgagaacgacctggacgagagccaggtgcccgaccagcccagcagcctgcacgtgagaccccagaccaactgcatcatcatgagctggaccccccccctgaaccccaacatcgtggtgagaggctacatcatcggctacggcgtgggcagcccctacgccgagaccgtgagagtggacagcaagcagagatactacagcatcgagagactggagagcagcagccactacgtgatcagcctgaaggccttcaacaacgccggcgagggcgtgcccctgtacgagagcgccaccaccagaagcatcaccgaccccaccgaccccgtggactactaccccctgctggacgacttccccaccagcgtgcccgacctgagcacccccatgctgccccccgtgggcgtgcaggccgtggccctgacccacgacgccgtgagagtgagctgggccgacaacagcgtgcccaagaaccagaagaccagcgaggtgagactgtacaccgtgagatggagaaccagcttcagcgccagcgccaagtacaagagcgaggacaccaccagcctgagctacaccgccaccggcctgaagcccaacaccatgtacgagttcagcgtgatggtgaccaagaacagaagaagcagcacctggagcatgaccgcccacgccaccacctacgaggccgcccccaccagcgcccccaaggacctgaccgtgatcaccagagagggcaagcccagagccgtgatcgtgagctggcagccccccctggaggccaacggcaagatcaccgcctacatcctgttctacaccctggacaagaacatccccatcgacgactggatcatggagaccatcagcggcgacagactgacccaccagatcatggacctgaacctggacaccatgtactacttcagaatccaggccagaaacagcaagggcgtgggccccctgagcgaccccatcctgttcagaaccctgaaggtggagcaccccgacaagatggccaacgaccagggcagacacggcgacggcggctactggcccgtggacaccaacctgatcgacagaagcaccctgaacgagccccccatcggccagatgcaccccccccacggcagcgtgaccccccagaagaacagcaacctgctggtgatcatcgtggtgaccgtgggcgtgatcaccgtgctggtggtggtgatcgtggccgtgatctgcaccagaagaagcagcgcccagcagagaaagaagagagccacccacagcgccggcaagagaaagggcagccagaaggacctgagaccccccgacctgtggatccaccacgaggagatggagatgaagaacatcgagaagcccagcggcaccgaccccgccggcagagacagccccatccagagctgccaggacctgacccccgtgagccacagccagagcgagacccagctgggcagcaagagcaccagccacagcggccaggacaccgaggaggccggcagcagcatgagcaccctggagagaagcctggccgccagaagagcccccagagccaagctgatgatccccatggacgcccagagcaacaaccccgccgtggtgagcgccatccccgtgcccaccctggagagcgcccagtaccccggcatcctgcccagccccacctgcggctacccccacccccagttcaccctgagacccgtgcccttccccaccctgagcgtggacagaggcttcggcgccggcagaagccagagcgtgagcgagggccccaccacccagcagccccccatgctgccccccagccagcccgagcacagcagcagcgaggaggcccccagcagaaccatccccaccgcctgcgtgagacccacccaccccctgagaagcttcgccaaccccctgctgcccccccccatgagcgccatcgagcccaaggtgccctacacccccctgctgagccagcccggccccaccctgcccaagacccacgtgaagaccgccagcctgggcctggccggcaaggccagaagccccctgctgcccgtgagcgtgcccaccgcccccgaggtgagcgaggagagccacaagcccaccgaggacagcgccaacgtgtacgagcaggacgacctgagcgagcagatggccagcctggagggcctgatgaagcagctgaacgccatcaccggcagcgccttctag

SEQ ID NO: 10375 - DNA, 213 bp, synthetic construct
  misc_feature 1..213: note = Description of Artificial Sequence: Synthetic coding sequence
  source 1..213: mol_type = other DNA
atgaccatgaacgtgctggaggccggcaagtggaagagcatcgtgcccgcccccggcgagggcctgctggccgtgctgcacatgatggtgttcaccgacgccctgcacagagagagaagcgtgaagtggcaggccggcgtgtgctacaacggcggcaaggacttcgccgtgagcctggccagacccaaggccgccgagggcatcgccgactag

SEQ ID NO: 10376 - DNA, 1392 bp, synthetic construct
  misc_feature 1..1392: note = Description of Artificial Sequence: Synthetic coding sequence
  source 1..1392: mol_type = other DNA
atgagcgtggccatcagaaagagaagctgggaggagcacgtgacccactggatgggccagcccttcaacagcgacgacagaaacaccgcctgccaccacggcctggtggccgacagcctgcaggccagcatggagaaggacgccaccctgaacgtggacagaaaggagaagtgcgtgagcctgcccgactgctgccacggcagcgagctgagagacttccccggcagacccatgggccacctgagcaaggacgtggacgagaacgacagccacgagggcgaggaccagttcctgagcctggaggccagcaccgagaccctggtgcacgtgagcgacgaggacaacaacgccgacctgtgcctgaccgacgacaagcaggtgctgaacacccagggccagaagaccagcggccagcacatgatccagggcgccggcagcctggagaaggccctgcccatcatccagagcaaccaggtgagcagcaacagctggggcatcgccggcgagaccgagctggccctggtgaaggagagcggcgagagaaaggtgaccgacagcatcagcaagagcctggagctgtgcaacgagatcagcctgagcgagatcaaggacgcccccaaggtgaacgccgtggacaccctgaacgtgaaggacatcgcccccgagaagcagctgctgaacagcgccgtgatcgcccagcagagaagaaagcccgacccccccaaggacgagaacgagagaagcacctgcaacgtggtgcagaacgagttcctggacaccccctgcaccaacagaggcctgcccctgctgaagaccgacttcggcagctgcctgctgcagccccccagctgccccaacggcatgagcgccgagaacggcctggagaagagcggcttcagccagcaccagaacaagagcccccccaaggtgaaggccgaggacggcatgcagtgcctgcagctgaaggagaccctggccacccaggagcccaccgacaaccaggtgagactgagaaagagaaaggagatcagagaggacagagacagagccagactggacagcatggtgctgctgatcatgaagctggaccagctggaccaggacatcgagaacgccctgagcaccagcagcagccccagcggcacccccaccaacctgagaagacacgtgcccgacctggagagcggcagcgagagcggcgccgacaccatcagcgtgaaccagaccagagtgaacctgagcagcgacaccgagagcaccgacctgcccagcagcacccccgtggccaacagcggcaccaagcccaagaccaccgccatccagggcatcagcgagaaggagaaggccggcaagctgaccttctggttctgcttcctggccaacctgttctag

SEQ ID NO: 10377 - DNA, 5268 bp, synthetic construct
  misc_feature 1..5268: note = Description of Artificial Sequence: Synthetic coding sequence
  source 1..5268: mol_type = other DNA
atggagaccagaagcagcaagaccagaagaagcctggccagcagaaccaacgagtgccagggcaccatgtgggcccccaccagcccccccgccggcagcagcagccccagccagcccacctggaagagcagcctgtacagcagcctggcctacagcgaggccttccactacagcttcgccgccagacccagaagactgacccagctggccctggcccagagacccgagccccagctgctgagactgagacccagcagcctgagaacccaggacatcagccacctgctgaccggcgtgttcagaaacctgtacagcgccgaggtgatcggcgacgaggtgagcgccagcctgatcaaggccagaggcagcgagaacgagagacacgaggagttcgtggaccagctgcagcagatcagagagctgtacaagcagagactggacgagttcgagatgctggagagacacatcacccaggcccaggccagagccatcgccgagaacgagagagtgatgagccaggccggcgtgcaggacctggagagcctggtgagactgccccccgtgaagagcgtgagcagatggtgcatcgacagcgagctgctgagaaagcaccacctgatcagccccgaggactactacaccgacaccgtgcccttccacagcgcccccaagggcatcagcctgcccggctgcagcaagctgaccttcagctgcgagaagagaagcgtgcagaagaaggagctgaacaagaagctggaggacagctgcagaaagaagctggccgagttcgaggacgagctggaccacaccgtggacagcctgacctggaacctgacccccaaggccaaggagagaaccagagagcccctgaagaaggccagccagcccagaaacaagaactggatgaaccacctgagagtgccccagagagagctggacagactgctgctggccagaatggagagcagaaaccacttcctgaagaaccccagattcttcccccccaacaccagatacggcggcaagagcctggtgttcccccccaagaagcccgcccccatcggcgagttccagagcaccgagcccgagcagagctgcgccgacacccccgtgttcctggccaagccccccatcggcttcttcaccgactacgagatcggccccgtgtacgagatggtgatcgccctgcagaacaccaccaccaccagcagatacctgagagtgctgccccccagcaccccctacttcgccctgggcctgggcatgttccccggcaagggcggcatggtggcccccggcatgacctgccagtacatcgtgcagttcttccccgactgcctgggcgacttcgacgacttcatcctggtggagacccagagcgcccacaccctgctgatccccctgcaggccagaagacccccccccgtgctgaccctgagccccgtgctggactgcggctactgcctgatcggcggcgtgaagatgaccagattcatctgcaagaacgtgggcttcagcgtgggcagattctgcatcatgcccaagaccagctggccccccctgagcttcaaggccatcgccaccgtgggcttcgtggagcagccccccttcggcatcctgcccagcgtgttcgagctggcccccggccacgccatcctggtggaggtgctgttcagccccaagagcctgggcaaggccgagcagaccttcatcatcatgtgcgacaactgccagatcaaggagctggtgaccatcggcatcggccagctgatcgccctggacctgatctacatcagcggcgagaagagccagcccgaccccggcgagctgaccgacctgaccgcccagcacttcatcagattcgagcccgagaacctgagaagcaccgccagaaagcagctgatcatcagaaacgccacccacgtggagctggccttctactggcagatcatgaagcccaacctgcagcccctgatgcccggcgagaccttcagcatggacagcatcaagtgctaccccgacaaggagaccgccttcagcatcatgcccagaaagggcgtgctgagcccccacaccgaccacgagttcatcctgagcttcagcccccacgagctgagagacttccacagcgtgctgcagatggtgctggaggaggtgcccgagcccgtgagcagcgaggccgagagcctgggccacagcagctacagcgtggacgacgtgatcgtgctggagatcgaggtgaagggcagcgtggagcccttccaggtgctgctggagccctacgccctgatcatccccggcgagaactacatcggcatcaacgtgaagaaggccttcaagatgtggaacaacagcaagagccccatcagatacctgtggggcaagatcagcgactgccacatcatcgaggtggagcccggcaccggcgtgatcgagcccagcgaggtgggcgacttcgagctgaacttcaccggcggcgtgcccggccccaccagccaggacctgctgtgcgagatcgaggacagccccagccccgtggtgctgcacatcgaggccgtgttcaagggccccgccctgatcatcaacgtgagcgccctgcagttcggcctgctgagactgggccagaaggccaccaacagcatccagatcagaaacgtgagccagctgcccgccacctggagaatgaaggagagccccgtgagcctgcaggagagacccgaggacgtgagccccttcgacatcgagcccagcagcggccagctgcacagcctgggcgagtgcagagtggacatcaccctggaggccctgcactgccagcacctggagaccgtgctggagctggaggtggagaacggcgcctggagctacctgcccgtgtacgccgaggtgcagaagccccacgtgtacctgcagagcagccaggtggaggtgagaaacctgtacctgggcgtgcccaccaagaccaccatcaccctgatcaacggcaccctgctgcccacccagttccactggggcaagctgctgggccaccaggccgagttctgcatggtgaccgtgagccccaagcacggcctgctgggccccagcgaggagtgccagctgaagctggagctgaccgcccacacccaggaggagctgacccacctggccctgccctgccacgtgagcggcatgaagaagcccctggtgctgggcatcagcggcaagccccagggcctgcaggtggccatcaccatcagcaaggagagcagcgactgcagcaccgagcagtggcccggccaccccaaggagctgagactggacttcggcagcgccgtgcccctgagaaccagagtgaccagacagctgatcctgaccaacagaagccccatcagaaccagattcagcctgaagttcgagtacttcggcagcccccagaacagcctgagcaagaagaccagcctgcccaacatgccccccgccctgctgaagaccgtgagaatgcaggagcacctggccaagagagagcagctggacttcatggagagcatgctgagccacggcaagggcgccgccttcttcccccacttcagccagggcatgctgggcccctaccagcagctgtgcatcgacatcaccggctgcgccaacatgtggggcgagtactgggacaacctgatctgcaccgtgggcgacctgctgcccgaggtgatccccgtgcacatggccgccgtgggctgccccatcagcagcctgagaaccaccagctacaccatcgaccaggcccagaaggagcccgccatgagattcggcacccaggtgagcggcggcgacaccgtgaccagaaccctgagactgaacaacagcagcccctgcgacatcagactggactgggagacctacgtgcccgaggacaaggaggacagactggtggagctgctggtgttctacggcccccccttccccctgagagaccaggccggcaacgagctggtgtgccccgacacccccgagggcggctgcctgctgtggagccccggccccagcagcagcagcgagttcagccacgagaccgacagcagcgtggagggcagcagcagcgccagcaacagagtggcccagaagctgatcagcgtgatcctgcaggcccacgagggcgtgcccagcggccacctgtactgcatcagccccaagcaggtggtggtgcccgccggcggcagcagcaccatctacatcagcttcacccccatggtgctgagccccgagatcctgcacaaggtggagtgcaccggctacgccctgggcttcatgagcctggacagcaaggtggagagagagatccccggcaagagacacagactgcaggacttcgccgtgggccccctgaagctggacctgcacagctacgtgagacccgcccagctgagcgtggagctggactacggcggcagcatggagttccagtgccaggccagcgacctgatccccgagcagccctgcagcggcgtgctgagcgagctggtgaccacccaccacctgaagctgaccaacaccaccgagatcccccactacttcagactgatggtgagcagacccttcagcgtgagccaggacggcgccagccaggaccacagagcccccggccccggccagaagcaggagtgcgaggaggagaccgccagcgccgacaagcagctggtgctgcaggcccaggagaacatgctggtgaacgtgagcttcagcctgagcctggagctgctgagctaccagaagctgcccgccgaccagaccctgcccggcgtggacatccagcagagcgccagcggcgagagagagatggtgttcacccagaacctgctgctggagtacaccaaccagaccacccaggtggtgcccctgagagccgtggtggccgtgcccgagctgcagctgagcaccagctgggtggacttcggcacctgcttcgtgagccagcagagagtgagagaggtgtacctgatgaacctgagcggctgcagaagctactggaccatgctgatgggccagcaggagcccgccaaggccgccgtggccttcagagtgagccccaacagcggcctgctggaggccagaagcgccaacgccccccccaccagcatcgccctgcaggtgttcttcaccgccagaagcagcgagctgtacgagagcaccatggtggtggagggcgtgctgggcgagaagagctgcaccctgagactgagaggccagggcagctacgacgagagatacatgctgccccaccagccctag

SEQ ID NO: 10378 - DNA, 5337 bp, synthetic construct
  misc_feature 1..5337: note = Description of Artificial Sequence: Synthetic coding sequence
  source 1..5337: mol_type = other DNA
atggagaccagaagcagcaagaccagaagaagcctggccagcagaaccaacgagtgccagggcaccatgtgggcccccaccagcccccccgccggcagcagcagccccagccagcccacctggaagagcagcctgtacagcagcctggcctacagcgaggccttccactacagcttcgccgccagacccagaagactgacccagctggccctggcccagagacccgagccccagctgctgagactgagacccagcagcctgagaacccaggacatcagccacctgctgaccggcgtgttcagaaacctgtacagcgccgaggtgatcggcgacgaggtgagcgccagcctgatcaaggccagaggcagcgagaacgagagacacgaggagttcgtggaccagctgcagcagatcagagagctgtacaagcagagactggacgagttcgagatgctggagagacacatcacccaggcccaggccagagccatcgccgagaacgagagagtgatgagccaggccggcgtgcaggacctggagagcctggtgagactgccccccgtgaagagcgtgagcagatggtgcatcgacagcgagctgctgagaaagcaccacctgatcagccccgaggactactacaccgacaccgtgcccttccacagcgcccccaagggcatcagcctgcccggctgcagcaagctgaccttcagctgcgagaagagaagcgtgcagaagaaggagctgaacaagaagctggaggacagctgcagaaagaagctggccgagttcgaggacgagctggaccacaccgtggacagcctgacctggaacctgacccccaaggccaaggagagaaccagagagcccctgaagaaggccagccagcccagaaacaagaactggatgaaccacctgagagtgccccagagagagctggacagactgctgctggccagaatggagagcagaaaccacttcctgaagaaccccagattcttcccccccaacaccagatacggcggcaagagcctggtgttcccccccaagaagcccgcccccatcggcgagttccagagcaccgagcccgagcagagctgcgccgacacccccgtgttcctggccaagccccccatcggcttcttcaccgactacgagatcggccccgtgtacgagatggtgatcgccctgcagaacaccaccaccaccagcagatacctgagagtgctgccccccagcaccccctacttcgccctgggcctgggcatgttccccggcaagggcggcatggtggcccccggcatgacctgccagtacatcgtgcagttcttccccgactgcctgggcgacttcgacgacttcatcctggtggagacccagagcgcccacaccctgctgatccccctgcaggccagaagacccccccccgtgctgaccctgagccccgtgctggactgcggctactgcctgatcggcggcgtgaagatgaccagattcatctgcaagaacgtgggcttcagcgtgggcagattctgcatcatgcccaagaccagctggccccccctgagcttcaaggccatcgccaccgtgggcttcgtggagcagccccccttcggcatcctgcccagcgtgttcgagctggcccccggccacgccatcctggtggaggtgctgttcagccccaagagcctgggcaaggccgagcagaccttcatcatcatgtgcgacaactgccagatcaaggagctggtgaccatcggcatcggccagctgatcgccctggacctgatctacatcagcggcgagaagagccagcccgaccccggcgagctgaccgacctgaccgcccagcacttcatcagattcgagcccgagaacctgagaagcaccgccagaaagcagctgatcatcagaaacgccacccacgtggagctggccttctactggcagatcatgaagcccaacctgcagcccctgatgcccggcgagaccttcagcatggacagcatcaagtgctaccccgacaaggagaccgccttcagcatcatgcccagaaagggcgtgctgagcccccacaccgaccacgagttcatcctgagcttcagcccccacgagctgagagacttccacagcgtgctgcagatggtgctggaggaggtgcccgagcccgtgagcagcgaggccgagagcctgggccacagcagctacagcgtggacgacgtgatcgtgctggagatcgaggtgaagggcagcgtggagcccttccaggtgctgctggagccctacgccctgatcatccccggcgagaactacatcggcatcaacgtgaagaaggccttcaagatgtggaacaacagcaagagccccatcagatacctgtggggcaagatcagcgactgccacatcatcgaggtggagcccggcaccggcgtgatcgagcccagcgaggtgggcgacttcgagctgaacttcaccggcggcgtgcccggccccaccagccaggacctgctgtgcgagatcgaggacagccccagccccgtggtgctgcacatcgaggccgtgttcaagggccccgccctgatcatcaacgtgagcgccctgcagttcggcctgctgagactgggccagaaggccaccaacagcatccagatcagaaacgtgagccagctgcccgccacctggagaatgaaggagagccccgtgagcctgcaggagagacccgaggacgtgagccccttcgacatcgagcccagcagcggccagctgcacagcctgggcgagtgcagagtggacatcaccctggaggccctgcactgccagcacctggagaccgtgctggagctggaggtggagaacggcgcctggagctacctgcccgtgtacgccgaggtgcagaagccccacgtgtacctgcagagcagccaggtggaggtgagaaacctgtacctgggcgtgcccaccaagaccaccatcaccctgatcaacggcaccctgctgcccacccagttccactggggcaagctgctgggccaccaggccgagttctgcatggtgaccgtgagccccaagcacggcctgctgggccccagcgaggagtgccagctgaagctggagctgaccgcccacacccaggaggagctgacccacctggccctgccctgccacgtgagcggcatgaagaagcccctggtgctgggcatcagcggcaagccccagggcctgcaggtggccatcaccatcagcaaggagagcagcgactgcagcaccgagcagtggcccggccaccccaaggagctgagactggacttcggcagcgccgtgcccctgagaaccagagtgaccagacagctgatcctgaccaacagaagccccatcagaaccagattcagcctgaagttcgagtacttcggcagcccccagaacagcctgagcaagaagaccagcctgcccaacatgccccccgccctgctgaagaccgtgagaatgcaggagcacctggccaagagagagcagctggacttcatggagagcatgctgagccacggcaagggcgccgccttcttcccccacttcagccagggcatgctgggcccctaccagcagctgtgcatcgacatcaccggctgcgccaacatgtggggcgagtactgggacaacctgatctgcaccgtgggcgacctgctgcccgaggtgatccccgtgcacatggccgccgtgggctgccccatcagcagcctgagaaccaccagctacaccatcgaccaggcccagaaggagcccgccatgagattcggcacccaggtgagcggcggcgacaccgtgaccagaaccctgagactgaacaacagcagcccctgcgacatcagactggactgggagacctacgtgcccgaggacaaggaggacagactggtggagctgctggtgttctacggcccccccttccccctgagagaccaggccggcaacgagctggtgtgccccgacacccccgagggcggctgcctgctgtggagccccggccccagcagcagcagcgagttcagccacgagaccgacagcagcgtggagggcagcagcagcgccagcaacagagtggcccagaagctgatcagcgtgatcctgcaggcccacgagggcgtgcccagcggccacctgtactgcatcagccccaagcaggtggtggtgcccgccggcggcagcagcaccatctacatcagcttcacccccatggtgctgagccccgagatcctgcacaaggtggagtgcaccggctacgccctgggcttcatgagcctggacagcaaggtggagagagagatccccggcaagagacacagactgcaggacttcgccgtgggccccctgaagctggacctgcacagctacgtgagacccgcccagctgagcgtggagctggactacggcggcagcatggagttccagtgccaggccagcgacctgatccccgagcagccctgcagcggcgtgctgagcgagctggtgaccacccaccacctgaagctgaccaacaccaccgagatcccccactacttcagactgatggtgagcagacccttcagcgtgagccaggacggcgccagccaggaccacagagcccccggccccggccagaagcaggagtgcgaggaggagaccgccagcgccgacaagcagctggtgctgcaggcccaggagaacatgctggtgaacgtgagcttcagcctgagcctggagctgctgagctaccagaagctgcccgccgaccagaccctgcccggcgtggacatccagcagagcgccagcggcgagagagagatggtgttcacccagaacctgctgctggagtacaccaaccagaccacccaggtggtgcccctgagagccgtggtggccgtgcccgagctgcagctgagcaccagctgggtggacttcggcacctgcttcgtgagccagcagagagtgagagaggtgtacctgatgaacctgagcggctgcagaagctactggaccatgctgatgggcgtggtgagctgcaccagccccagatggtggtggaaggtgtgcagcgtgagaagccccgccccctgcggcagcggcgccaaggcccccatgatgagagacacctgctgcctgaccagccccgaggcccccccccagcccagcgcccccggccccagctggagaaagaacatcgcccagggcctgggcgccgccctgcagcacaaggacaccgacctgggcacctggggccccctgggcagcagctggaacggcagaacccccttccacaacggcctgagcctgggcccccacgacatgagcagcgagctgacctag

SEQ ID NO: 10379 - DNA, 5277 bp, synthetic construct
  misc_feature 1..5277: note = Description of Artificial Sequence: Synthetic coding sequence
  source 1..5277: mol_type = other DNA
atggagaccagaagcagcaagaccagaagaagcctggccagcagaaccaacgagtgccagggcaccatgtgggcccccaccagcccccccgccggcagcagcagccccagccagcccacctggaagagcagcctgtacagcagcctggcctacagcgaggccttccactacagcttcgccgccagacccagaagactgacccagctggccctggcccagagacccgagccccagctgctgagactgagacccagcagcctgagaacccaggacatcagccacctgctgaccggcgtgttcagaaacctgtacagcgccgaggtgatcggcgacgaggtgagcgccagcctgatcaaggccagaggcagcgagaacgagagacacgaggagttcgtggaccagctgcagcagatcagagagctgtacaagcagagactggacgagttcgagatgctggagagacacatcacccaggcccaggccagagccatcgccgagaacgagagagtgatgagccaggccggcgtgcaggacctggagagcctggtgagactgccccccgtgaagagcgtgagcagatggtgcatcgacagcgagctgctgagaaagcaccacctgatcagccccgaggactactacaccgacaccgtgcccttccacagcgcccccaagggcatcagcctgcccggctgcagcaagctgaccttcagctgcgagaagagaagcgtgcagaagaaggagctgaacaagaagctggaggacagctgcagaaagaagctggccgagttcgaggacgagctggaccacaccgtggacagcctgacctggaacctgacccccaaggccaaggagagaaccagagagcccctgaagaaggccagccagcccagaaacaagaactggatgaaccacctgagagtgccccagagagagctggacagactgctgctggccagaatggagagcagaaaccacttcctgaagaaccccagattcttcccccccaacaccagatacggcggcaagagcctggtgttcccccccaagaagcccgcccccatcggcgagttccagagcaccgagcccgagcagagctgcgccgacacccccgtgttcctggccaagccccccatcggcttcttcaccgactacgagatcggccccgtgtacgagatggtgatcgccctgcagaacaccaccaccaccagcagatacctgagagtgctgccccccagcaccccctacttcgccctgggcctgggcatgttccccggcaagggcggcatggtggcccccggcatgacctgccagtacatcgtgcagttcttccccgactgcctgggcgacttcgacgacttcatcctggtggagacccagagcgcccacaccctgctgatccccctgcaggccagaagacccccccccgtgctgaccctgagccccgtgctggactgcggctactgcctgatcggcggcgtgaagatgaccagattcatctgcaagaacgtgggcttcagcgtgggcagattctgcatcatgcccaagaccagctggccccccctgagcttcaaggccatcgccaccgtgggcttcgtggagcagccccccttcggcatcctgcccagcgtgttcgagctggcccccggccacgccatcctggtggaggtgctgttcagccccaagagcctgggcaaggccgagcagaccttcatcatcatgtgcgacaactgccagatcaaggagctggtgaccatcggcatcggccagctgatcgccctggacctgatctacatcagcggcgagaagagccagcccgaccccggcgagctgaccgacctgaccgcccagcacttcatcagattcgagcccgagaacctgagaagcaccgccagaaagcagctgatcatcagaaacgccacccacgtggagctggccttctactggcagatcatgaagcccaacctgcagcccctgatgcccggcgagaccttcagcatggacagcatcaagtgctaccccgacaaggagaccgccttcagcatcatgcccagaaagggcgtgctgagcccccacaccgaccacgagttcatcctgagcttcagcccccacgagctgagagacttccacagcgtgctgcagatggtgctggaggaggtgcccgagcccgtgagcagcgaggccgagagcctgggccacagcagctacagcgtggacgacgtgatcgtgctggagatcgaggtgaagggcagcgtggagcccttccaggtgctgctggagccctacgccctgatcatccccggcgagaactacatcggcatcaacgtgaagaaggccttcaagatgtggaacaacagcaagagccccatcagatacctgtggggcaagatcagcgactgccacatcatcgaggtggagcccggcaccggcgtgatcgagcccagcgaggtgggcgacttcgagctgaacttcaccggcggcgtgcccggccccaccagccaggacctgctgtgcgagatcgaggacagccccagccccgtggtgctgcacatcgaggccgtgttcaagggccccgccctgatcatcaacgtgagcgccctgcagttcggcctgctgagactgggccagaaggccaccaacagcatccagatcagaaacgtgagccagctgcccgccacctggagaatgaaggagagccccgtgagcctgcaggagagacccgaggacgtgagccccttcgacatcgagcccagcagcggccagctgcacagcctgggcgagtgcagagtggacatcaccctggaggccctgcactgccagcacctggagaccgtgctggagctggaggtggagaacggcgcctggagctacctgcccgtgtacgccgaggtgcagaagccccacgtgtacctgcagagcagccaggtggaggtgagaaacctgtacctgggcgtgcccaccaagaccaccatcaccctgatcaacggcaccctgctgcccacccagttccactggggcaagctgctgggccaccaggccgagttctgcatggtgaccgtgagccccaagcacggcctgctgggccccagcgaggagtgccagctgaagctggagctgaccgcccacacccaggaggagctgacccacctggccctgccctgccacgtgagcggcatgaagaagcccctggtgctgggcatcagcggcaagccccagggcctgcaggtggccatcaccatcagcaaggagagcagcgactgcagcgtgttcagcaccgagcagtggcccggccaccccaaggagctgagactggacttcggcagcgccgtgcccctgagaaccagagtgaccagacagctgatcctgaccaacagaagccccatcagaaccagattcagcctgaagttcgagtacttcggcagcccccagaacagcctgagcaagaagaccagcctgcccaacatgccccccgccctgctgaagaccgtgagaatgcaggagcacctggccaagagagagcagctggacttcatggagagcatgctgagccacggcaagggcgccgccttcttcccccacttcagccagggcatgctgggcccctaccagcagctgtgcatcgacatcaccggctgcgccaacatgtggggcgagtactgggacaacctgatctgcaccgtgggcgacctgctgcccgaggtgatccccgtgcacatggccgccgtgggctgccccatcagcagcctgagaaccaccagctacaccatcgaccaggcccagaaggagcccgccatgagattcggcacccaggtgagcggcggcgacaccgtgaccagaaccctgagactgaacaacagcagcccctgcgacatcagactggactgggagacctacgtgcccgaggacaaggaggacagactggtggagctgctggtgttctacggcccccccttccccctgagagaccaggccggcaacgagctggtgtgccccgacacccccgagggcggctgcctgctgtggagccccggccccagcagcagcagcgagttcagccacgagaccgacagcagcgtggagggcagcagcagcgccagcaacagagtggcccagaagctgatcagcgtgatcctgcaggcccacgagggcgtgcccagcggccacctgtactgcatcagccccaagcaggtggtggtgcccgccggcggcagcagcaccatctacatcagcttcacccccatggtgctgagccccgagatcctgcacaaggtggagtgcaccggctacgccctgggcttcatgagcctggacagcaaggtggagagagagatccccggcaagagacacagactgcaggacttcgccgtgggccccctgaagctggacctgcacagctacgtgagacccgcccagctgagcgtggagctggactacggcggcagcatggagttccagtgccaggccagcgacctgatccccgagcagccctgcagcggcgtgctgagcgagctggtgaccacccaccacctgaagctgaccaacaccaccgagatcccccactacttcagactgatggtgagcagacccttcagcgtgagccaggacggcgccagccaggaccacagagcccccggccccggccagaagcaggagtgcgaggaggagaccgccagcgccgacaagcagctggtgctgcaggcccaggagaacatgctggtgaacgtgagcttcagcctgagcctggagctgctgagctaccagaagctgcccgccgaccagaccctgcccggcgtggacatccagcagagcgccagcggcgagagagagatggtgttcacccagaacctgctgctggagtacaccaaccagaccacccaggtggtgcccctgagagccgtggtggccgtgcccgagctgcagctgagcaccagctgggtggacttcggcacctgcttcgtgagccagcagagagtgagagaggtgtacctgatgaacctgagcggctgcagaagctactggaccatgctgatgggccagcaggagcccgccaaggccgccgtggccttcagagtgagccccaacagcggcctgctggaggccagaagcgccaacgccccccccaccagcatcgccctgcaggtgttcttcaccgccagaagcagcgagctgtacgagagcaccatggtggtggagggcgtgctgggcgagaagagctgcaccctgagactgagaggccagggcagctacgacgagagatacatgctgccccaccagccctag

SEQ ID NO: 10380 - DNA, 237 bp, synthetic construct
  misc_feature 1..237: note = Description of Artificial Sequence: Synthetic coding sequence
  source 1..237: mol_type = other DNA
atgagaccctgcatctggatccacgtgcacctgaagcccccctgcagactggtggagctgctgcccttcagcagcgccctgcagggcctgagccacctgagcctgggcaccaccctgcccgtgatcctgcccgagagaaacgaggagcagaacctgcaggagctgagccacaacgccgacaagtaccagatgggcgactgctgcaaggaggagatcgacgacagcatcttctactag

SEQ ID NO: 10381 - DNA, 2940 bp, synthetic construct
  misc_feature 1..2940: note = Description of Artificial Sequence: Synthetic coding sequence
  source 1..2940: mol_type = other DNA
atgagaggctaccacggcgacagaggcagccaccccagacccgccagattcgccgaccagcagcacatggacgtgggccccgccgccagagccccctacctgctgggcagcagagaggccttcagcaccgagcccagattctgcgcccccagagccggcctgggccacatcagccccgagggccccctgagcctgagcgagggccccagcgtgggccccgagggcggccccgccggcgccggcgtgggcggcggcagcagcaccttccccagaatgtaccccggccagggccccttcgacacctgcgaggactgcgtgggccacccccagggcaagggcgcccccagactgccccccaccctgctggaccagttcgagaagcagctgcccgtgcagcaggacggcttccacaccctgccctaccagagaggccccgccggcgccggccccggccccgcccccggcaccggcaccgcccccgagcccagaagcgagagccccagcagaatcagacacctggtgcacagcgtgcagaagctgttcgccaagagccacagcctggaggcccccggcaagagagactacaacggccccaaggccgagggcagaggcggcagcggcggcgacagctaccccggccccggcagcggcggcccccacaccagccaccaccaccaccaccaccaccaccaccaccaccaccagagcagacacggcaagagaagcaagagcaaggacagaaagggcgacggcagacaccaggccaagagcaccggctggtggagcagcgacgacaacctggacagcgacagcggcttcctggccggcggcagaccccccggcgagcccggcggccccttctgcctggagggccccgacggcagctacagagacctgagcttcaagggcagaagcggcggcagcgagggcagatgcctggcctgcaccggcatgagcatgagcctggacggccagagcgtgaagagaagcgcctggcacaccatgatggtgagccagggcagagacggctaccccggcgccggccccggcaagggcctgctgggccccgagaccaaggccaaggccagaacctaccactacctgcaggtgccccaggacgactggggcggctaccccaccggcggcaaggacggcgagatcccctgcagaagaatgagaagcggcagctacatcaaggccatgggcgacgaggagagcggcgacagcgacggcagccccaagaccagccccaaggccgtggccagaagattcaccaccagaagaagcagcagcgtggaccaggccagaatcaactgctgcgtgccccccagaatccaccccagaagcagcatccccggctacagcagaagcctgaccaccggccagctgagcgacgagctgaaccagcagctggaggccgtgtgcggcagcgtgttcggcgagctggagagccaggccgtggacgccctggacctgcccggctgcttcagaatgagaagccacagctacctgagagccatccaggccggctgcagccaggacgacgactgcctgcccctgctggccacccccgccgccgtgagcggcagacccggcagcagcttcaacttcagaaaggcccccccccccatcccccccggcagccaggccccccccagaatcagcatcaccgcccagagcagcaccgacagcgcccacgagagcttcaccgccgccgagggccccgccagaagatgcagcagcgccgacggcctggacggccccgccatgggcgccagaaccctggagctggcccccgtgccccccagagccagccccaagccccccaccctgatcatcaagaccatccccggcagagaggagctgagaagcctggccagacagagaaagtggagacccagcatcggcgtgcaggtggagaccatcagcgacagcgacaccgagaacagaagcagaagagagttccacagcatcggcgtgcaggtggaggaggacaagagaagagccagattcaagagaagcaacagcgtgaccgccggcgtgcaggccgacctggagctggagggcctggccggcctggccaccgtggccaccgaggacaaggccctgcagttcggcagaagcttccagagacacgccagcgagccccagcccggccccagagcccccacctacagcgtgttcagaaccgtgcacacccagggccagtgggcctacagagagggctaccccctgccctacgagccccccgccaccgacggcagccccggccccgcccccgcccccacccccggccccggcgccggcagaagagacagctggatcgagagaggcagcagaagcctgcccgacagcggcagagccagcccctgccccagagacggcgagtggttcatcaagatgctgagagccgaggtggagaagctggagcactggtgccagcagatggagagagaggccgaggactacgagctgcccgaggagatcctggagaagatcagaagcgccgtgggcagcacccagctgctgctgagccagaaggtgcagcagttcttcagactgtgccagcagagcatggaccccaccgccttccccgtgcccaccttccaggacctggccggcttctgggacctgctgcagctgagcatcgaggacgtgaccctgaagttcctggagctgcagcagctgaaggccaacagctggaagctgctggagcccaaggaggagaagaaggtgcccccccccatccccaagaagcccctgagaggcagaggcgtgcccgtgaaggagagaagcctggacagcgtggacagacagagacaggaggccagaaagagactgctggccgccaagagagccgccagcttcagacacagcagcgccaccgagagcgccgacagcatcgagatctacatccccgaggcccagaccagactgtag

SEQ ID NO: 10382 - DNA, 5358 bp, synthetic construct
  misc_feature 1..5358: note = Description of Artificial Sequence: Synthetic coding sequence
  source 1..5358: mol_type = other DNA
atgggcatcagcaccgtgatcctggagatgtgcctgctgtggggccaggtgctgagcaccggcggctggatccccagaaccaccgactacgccagcctgatccccagcgaggtgcccctggaccccaccgtggccgagggcagccccttccccagcgagagcaccctggagagcaccgtggccgagggcagccccatcagcctggagagcaccctggagagcaccgtggccgagggcagcctgatccccagcgagagcaccctggagagcaccgtggccgagggcagcgacagcggcctggccctgagactggtgaacggcgacggcagatgccagggcagagtggagatcctgtacagaggcagctggggcaccgtgtgcgacgacagctgggacaccaacgacgccaacgtggtgtgcagacagctgggctgcggctgggccatgagcgcccccggcaacgcctggttcggccagggcagcggccccatcgccctggacgacgtgagatgcagcggccacgagagctacctgtggagctgcccccacaacggctggctgagccacaactgcggccacggcgaggacgccggcgtgatctgcagcgccgcccagccccagagcaccctgagacccgagagctggcccgtgagaatcagcccccccgtgcccaccgagggcagcgagagcagcctggccctgagactggtgaacggcggcgacagatgcagaggcagagtggaggtgctgtacagaggcagctggggcaccgtgtgcgacgactactgggacaccaacgacgccaacgtggtgtgcagacagctgggctgcggctgggccatgagcgcccccggcaacgcccagttcggccagggcagcggccccatcgtgctggacgacgtgagatgcagcggccacgagagctacctgtggagctgcccccacaacggctggctgacccacaactgcggccacagcgaggacgccggcgtgatctgcagcgccccccagagcagacccacccccagccccgacacctggcccaccagccacgccagcaccgccggccccgagagcagcctggccctgagactggtgaacggcggcgacagatgccagggcagagtggaggtgctgtacagaggcagctggggcaccgtgtgcgacgacagctgggacaccagcgacgccaacgtggtgtgcagacagctgggctgcggctgggccaccagcgcccccggcaacgccagattcggccagggcagcggccccatcgtgctggacgacgtgagatgcagcggctacgagagctacctgtggagctgcccccacaacggctggctgagccacaactgccagcacagcgaggacgccggcgtgatctgcagcgccgcccacagctggagcacccccagccccgacaccctgcccaccatcaccctgcccgccagcaccgtgggcagcgagagcagcctggccctgagactggtgaacggcggcgacagatgccagggcagagtggaggtgctgtaccagggcagctggggcaccgtgtgcgacgacagctgggacaccaacgacgccaacgtggtgtgcagacagctgggctgcggctgggccatgagcgcccccggcaacgccagattcggccagggcagcggccccatcgtgctggacgacgtgagatgcagcggccacgagagctacctgtggagctgcccccacaacggctggctgagccacaactgcggccacagcgaggacgccggcgtgatctgcagcgccagccagagcagacccacccccagccccgacacctggcccaccagccacgccagcaccgccggcagcgagagcagcctggccctgagactggtgaacggcggcgacagatgccagggcagagtggaggtgctgtacagaggcagctggggcaccgtgtgcgacgactactgggacaccaacgacgccaacgtggtgtgcagacagctgggctgcggctgggccatgagcgcccccggcaacgccagattcggccagggcagcggccccatcgtgctggacgacgtgagatgcagcggccacgagagctacctgtggagctgcccccacaacggctggctgagccacaactgcggccaccacgaggacgccggcgtgatctgcagcgccagccagagccagcccacccccagccccgacacctggcccaccagccacgccagcaccgccggcagcgagagcagcctggccctgagactggtgaacggcggcgacagatgccagggcagagtggaggtgctgtacagaggcagctggggcaccgtgtgcgacgactactgggacaccaacgacgccaacgtggtgtgcagacagctgggctgcggctgggccaccagcgcccccggcaacgccagattcggccagggcagcggccccatcgtgctggacgacgtgagatgcagcggccacgagagctacctgtggagctgcccccacaacggctggctgagccacaactgcggccaccacgaggacgccggcgtgatctgcagcgccagccagagccagcccacccccagccccgacacctggcccaccagcagagccagcaccgccggcagcgagagcaccctggccctgagactggtgaacggcggcgacagatgcagaggcagagtggaggtgctgtaccagggcagctggggcaccgtgtgcgacgactactgggacaccaacgacgccaacgtggtgtgcagacagctgggctgcggctgggccatgagcgcccccggcaacgcccagttcggccagggcagcggccccatcgtgctggacgacgtgagatgcagcggccacgagagctacctgtggagctgcccccacaacggctggctgagccacaactgcggccaccacgaggacgccggcgtgatctgcagcgccgcccagagccagagcacccccagacccgacacctggctgaccaccaacctgcccgccctgaccgtgggcagcgagagcagcctggccctgagactggtgaacggcggcgacagatgcagaggcagagtggaggtgctgtacagaggcagctggggcaccgtgtgcgacgacagctgggacaccaacgacgccaacgtggtgtgcagacagctgggctgcggctgggccatgagcgcccccggcaacgccagattcggccagggcagcggccccatcgtgctggacgacgtgagatgcagcggcaacgagagctacctgtggagctgcccccacaagggctggctgacccacaactgcggccaccacgaggacgccggcgtgatctgcagcgccacccagatcaacagcaccaccaccgactggtggcaccccaccaccaccaccaccgccagacccagcagcaactgcggcggcttcctgttctacgccagcggcaccttcagcagccccagctaccccgcctactaccccaacaacgccaagtgcgtgtgggagatcgaggtgaacagcggctacagaatcaacctgggcttcagcaacctgaagctggaggcccaccacaactgcagcttcgactacgtggagatcttcgacggcagcctgaacagcagcctgctgctgggcaagatctgcaacgacaccagacagatcttcaccagcagctacaacagaatgaccatccacttcagaagcgacatcagcttccagaacaccggcttcctggcctggtacaacagcttccccagcgacgccaccctgagactggtgaacctgaacagcagctacggcctgtgcgccggcagagtggagatctaccacggcggcacctggggcaccgtgtgcgacgacagctggaccatccaggaggccgaggtggtgtgcagacagctgggctgcggcagagccgtgagcgccctgggcaacgcctacttcggcagcggcagcggccccatcaccctggacgacgtggagtgcagcggcaccgagagcaccctgtggcagtgcagaaacagaggctggttcagccacaactgcaaccacagagaggacgccggcgtgatctgcagcggcaaccacctgagcacccccgcccccttcctgaacatcaccagacccaacaccgactacagctgcggcggcttcctgagccagcccagcggcgacttcagcagccccttctaccccggcaactaccccaacaacgccaagtgcgtgtgggacatcgaggtgcagaacaactacagagtgaccgtgatcttcagagacgtgcagctggagggcggctgcaactacgactacatcgaggtgttcgacggcccctacagaagcagccccctgatcgccagagtgtgcgacggcgccagaggcagcttcaccagcagcagcaacttcatgagcatcagattcatcagcgaccacagcatcaccagaagaggcttcagagccgagtactacagcagccccagcaacgacagcaccaacctgctgtgcctgcccaaccacatgcaggccagcgtgagcagaagctacctgcagagcctgggcttcagcgccagcgacctggtgatcagcacctggaacggctactacgagtgcagaccccagatcacccccaacctggtgatcttcaccatcccctacagcggctgcggcaccttcaagcaggccgacaacgacaccatcgactacagcaacttcctgaccgccgccgtgagcggcggcatcatcaagagaagaaccgacctgagaatccacgtgagctgcagaatgctgcagaacacctgggtggacaccatgtacatcgccaacgacaccatccacgtggccaacaacaccatccaggtggaggaggtgcagtacggcaacttcgacgtgaacatcagcttctacaccagcagcagcttcctgtaccccgtgaccagcagaccctactacgtggacctgaaccaggacctgtacgtgcaggccgagatcctgcacagcgacgccgtgctgaccctgttcgtggacacctgcgtggccagcccctacagcaacgacttcaccagcctgacctacgacctgatcagaagcggctgcgtgagagacgacacctacggcccctacagcagccccagcctgagaatcgccagattcagattcagagccttccacttcctgaacagattccccagcgtgtacctgagatgcaagatggtggtgtgcagagcctacgaccccagcagcagatgctacagaggctgcgtgctgagaagcaagagagacgtgggcagctaccaggagaaggtggacgtggtgctgggccccatccagctgcagaccccccccagaagagaggaggagcccagatag

SEQ ID NO: 10383 - DNA, 5358 bp, synthetic construct; identical to SEQ ID NO: 10382
  misc_feature 1..5358: note = Description of Artificial Sequence: Synthetic coding sequence
  source 1..5358: mol_type = other DNA

SEQ ID NO: 10384 - DNA, 7242 bp, synthetic construct
  misc_feature 1..7242: note = Description of Artificial Sequence: Synthetic coding sequence
  source 1..7242: mol_type = other DNA
atgggcatcagcaccgtgatcctggagatgtgcctgctgtggggccaggtgctgagcaccggcggctggatccccagaaccaccgactacgccagcctgatccccagcgaggtgcccctggaccccaccgtggccgagggcagccccttccccagcgagagcaccctggagagcaccgtggccgagggcagccccatcagcctggagagcaccctggagagcaccgtggccgagggcagcctgatccccagcgagagcaccctggagagcaccgtggccgagggcagcgacagcggcctggccctgagactggtgaacggcgacggcagatgccagggcagagtggagatcctgtacagaggcagctggggcaccgtgtgcgacgacagctgggacaccaacgacgccaacgtggtgtgcagacagctgggctgcggctgggccatgagcgcccccggcaacgcctggttcggccagggcagcggccccatcgccctggacgacgtgagatgcagcggccacgagagctacctgtggagctgcccccacaacggctggctgagccacaactgcggccacggcgaggacgccggcgtgatctgcagcgccgcccagccccagagcaccctgagacccgagagctggcccgtgagaatcagcccccccgtgcccaccgagggcagcgagagcagcctggccctgagactggtgaacggcggcgacagatgcagaggcagagtggaggtgctgtacagaggcagctggggcaccgtgtgcgacgactactgggacaccaacgacgccaacgtggtgtgcagacagctgggctgcggctgggccatgagcgcccccggcaacgcccagttcggccagggcagcggccccatcgtgctggacgacgtgagatgcagcggccacgagagctacctgtggagctgcccccacaacggctggctgacccacaactgcggccacagcgaggacgccggcgtgatctgcagcgccccccagagcagacccacccccagccccgacacctggcccaccagccacgccagcaccgccggccccgagagcagcctggccctgagactggtgaacggcggcgacagatgccagggcagagtggaggtgctgtacagaggcagctggggcaccgtgtgcgacgacagctgggacaccagcgacgccaacgtggtgtgcagacagctgggctgcggctgggccaccagcgcccccggcaacgccagattcggccagggcagcggccccatcgtgctggacgacgtgagatgcagcggctacgagagctacctgtggagctgcccccacaacggctggctgagccacaactgccagcacagcgaggacgccggcgtgatctgcagcgccgcccacagctggagcacccccagccccgacaccctgcccaccatcaccctgcccgccagcaccgtgggcagcgagagcagcctggccctgagactggtgaacggcggcgacagatgccagggcagagtggaggtgctgtacagaggcagctggggcaccgtgtgcgacgacagctgggacaccaacgacgccaacgtggtgtgcagacagctgggctgcggctgggccatgctggcccccggcaacgccagattcggccagggcagcggccccatcgtgctggacgacgtgagatgcagcggcaacgagagctacctgtggagctgcccccacaacggctggctgagccacaactgcggccacagcgaggacgccggcgtgatctgcagcggccccgagagcagcctggccctgagactggtgaacggcggcgacagatgccagggcagagtggaggtgctgtacagaggcagctggggcaccgtgtgcgacgacagctgggacaccaacgacgccaacgtggtgtgcagacagctgggctgcggctgggccaccagcgcccccggcaacgccagattcggccagggcagcggccccatcgtgctggacgacgtgagatgcagcggccacgagagctacctgtggagctgccccaacaacggctggctgagccacaactgcggccaccacgaggacgccggcgtgatctgcagcgccgcccagagcagaagcacccccagacccgacaccctgagcaccatcaccctgccccccagcaccgtgggcagcgagagcagcctgaccctgagactggtgaacggcagcgacagatgccagggcagagtggaggtgctgtacagaggcagctggggcaccgtgtgcgacgacagctgggacaccaacgacgccaacgtggtgtgcagacagctgggctgcggctgggccaccagcgcccccggcaacgccagattcggccagggcagcggccccatcgtgctggacgacgtgagatgcagcggccacgagagctacctgtggagctgcccccacaacggctggctgagccacaactgcggccaccacgaggacgccggcgtgatctgcagcgtgagccagagcagacccacccccagccccgacacctggcccaccagccacgccagcaccgccggccccgagagcagcctggccctgagactggtgaacggcggcgacagatgccagggcagagtggaggtgctgtacagaggcagctggggcaccgtgtgcgacgacagctgggacaccagcgacgccaacgtggtgtgcagacagctgggctgcggctgggccaccagcgcccccggcaacgccagattcggccagggcagcggccccatcgtgctggacgacgtgagatgcagcggctacgagagctacctgtggagctgcccccacaacggctggctgagccacaactgccagcacagcgaggacgccggcgtgatctgcagcgccgcccacagctggagcacccccagccccgacaccctgcccaccatcaccctgcccgccagcaccgtgggcagcgagagcagcctggccctgagactggtgaacggcggcgacagatgccagggcagagtggaggtgctgtaccagggcagctggggcaccgtgtgcgacgacagctgggacaccaacgacgccaacgtggtgtgcagacagctgggctgcggctgggccatgagcgcccccggcaacgccagattcggccagggcagcggccccatcgtgctggacgacgtgagatgcagcggccacgagagctacctgtggagctgcccccacaacggctggctgagccacaactgcggccacagcgaggacgccggcgtgatctgcagcgccagccagagcagacccacccccagccccgacacctggcccaccagccacgccagcaccgccggcagcgagagcagcctggccctgagactggtgaacggcggcgacagatgccagggcagagtggaggtgctgtacagaggcagctggggcaccgtgtgcgacgactactgggacaccaacgacgccaacgtggtgtgcagacagctgggctgcggctgggccatgagcgcccccggcaacgccagattcggccagggcagcggccccatcgtgctggacgacgtgagatgcagcggccacgagagctacctgtggagctgcccccacaacggctggctgagccacaactgcggccaccacgaggacgccggcgtgatctgcagcgccagccagagccagcccacccccagccccgacacctggcccaccagccacgccagcaccgccggcagcgagagcagcctggccctgagactggtgaacggcggcgacagatgccagggcagagtggaggtgctgtacagaggcagctggggcaccgtgtgcgacgactactgggacaccaacgacgccaacgtggtgtgcagacagctgggctgcggctgggccaccagcgcccccggcaacgccagattcggccagggcagcggccccatcgtgctggacgacgtgagatgcagcggccacgagagctacctgtggagctgcccccacaacggctggctgagccacaactgcggccaccacgaggacgccggcgtgatctgcagcgccagccagagccagcccacccccagccccgacacctggcccaccagccacgccagcaccgccggcagcgagagcagcctggccctgagactggtgaacggcggcgacagatgccagggcagagtggaggtgctgtacagaggcagctggggcaccgtgtgcgacgactactgggacaccaacgacgccaacgtggtgtgcagacagctgggctgcggctgggccaccagcgcccccggcaacgccagattcggccagggcagcggccccatcgtgctggacgacgtgagatgcagcggccacgagagctacctgtggagctgcccccacaacggctggctgagccacaactgcggccaccacgaggacgccggcgtgatctgcagcgccagccagagccagcccacccccagccccgacacctggcccaccagcagagccagcaccgccggcagcgagagcaccctggccctgagactggtgaacggcggcgacagatgcagaggcagagtggaggtgctgtaccagggcagctggggcaccgtgtgcgacgactactgggacaccaacgacgccaacgtggtgtgcagacagctgggctgcggctgggccatgagcgcccccggcaacgcccagttcggccagggcagcggccccatcgtgctggacgacgtgagatgcagcggccacgagagctacctgtggagctgcccccacaacggctggctgagccacaactgcggccaccacgaggacgccggcgtgatctgcagcgccgcccagagccagagcacccccagacccgacacctggctgaccaccaacctgcccgccctgaccgtgggcagcgagagcagcctggccctgagactggtgaacggcggcgacagatgcagaggcagagtggaggtgctgtacagaggcagctggggcaccgtgtgcgacgacagctgggacaccaacgacgccaacgtggtgtgcagacagctgggctgcggctgggccatgagcgcccccggcaacgccagattcggccagggcagcggccccatcgtgctggacgacgtgagatgcagcggcaacgagagctacctgtggagctgcccccacaagggctggctgacccacaactgcggccaccacgaggacgccggcgtgatctgcagcgccacccagatcaacagcaccaccaccgactggtggcaccccaccaccaccaccaccgccagacccagcagcaactgcggcggcttcctgttctacgccagcggcaccttcagcagccccagctaccccgcctactaccccaacaacgccaagtgcgtgtgggagatcgaggtgaacagcggctacagaatcaacctgggcttcagcaacctgaagctggaggcccaccacaactgcagcttcgactacgtggagatcttcgacggcagcctgaacagcagcctgctgctgggcaagatctgcaacgacaccagacagatcttcaccagcagctacaacagaatgaccatccacttcagaagcgacatcagcttccagaacaccggcttcctggcctggtacaacagcttccccagcgacgccaccctgagactggtgaacctgaacagcagctacggcctgtgcgccggcagagtggagatctaccacggcggcacctggggcaccgtgtgcgacgacagctggaccatccaggaggccgaggtggtgtgcagacagctgggctgcggcagagccgtgagcgccctgggcaacgcctacttcggcagcggcagcggccccatcaccctggacgacgtggagtgcagcggcaccgagagcaccctgtggcagtgcagaaacagaggctggttcagccacaactgcaaccacagagaggacgccggcgtgatctgcagcggcaaccacctgagcacccccgcccccttcctgaacatcaccagacccaacaccgactacagctgcggcggcttcctgagccagcccagcggcgacttcagcagccccttctaccccggcaactaccccaacaacgccaagtgcgtgtgggacatcgaggtgcagaacaactacagagtgaccgtgatcttcagagacgtgcagctggagggcggctgcaactacgactacatcgaggtgttcgacggcccctacagaagcagccccctgatcgccagagtgtgcgacggcgccagaggcagcttcaccagcagcagcaacttcatgagcatcagattcatcagcgaccacagcatcaccagaagaggcttcagagccgagtactacagcagccccagcaacgacagcaccaacctgctgtgcctgcccaaccacatgcaggccagcgtgagcagaagctacctgcagagcctgggcttcagcgccagcgacctggtgatcagcacctggaacggctactacgagtgcagaccccagatcacccccaacctggtgatcttcaccatcccctacagcggctgcggcaccttcaagcaggccgacaacgacaccatcgactacagcaacttcctgaccgccgccgtgagcggcggcatcatcaagagaagaaccgacctgagaatccacgtgagctgcagaatgctgcagaacacctgggtggacaccatgtacatcgccaacgacaccatccacgtggccaacaacaccatccaggtggaggaggtgcagtacggcaacttcgacgtgaacatcagcttctacaccagcagcagcttcctgtaccccgtgaccagcagaccctactacgtggacctgaaccaggacctgtacgtgcaggccgagatcctgcacagcgacgccgtgctgaccctgttcgtggacacctgcgtggccagcccctacagcaacgacttcaccagcctgacctacgacctgatcagaagcggctgcgtgagagacgacacctacggcccctacagcagccccagcctgagaatcgccagattcagattcagagccttccacttcctgaacagattccccagcgtgtacctgagatgcaagatggtggtgtgcagagcctacgaccccagcagcagatgctacagaggctgcgtgctgagaagcaagagagacgtgggcagctaccaggagaaggtggacgtggtgctgggccccatccagctgcagaccccccccagaagagaggaggagcccagatag

SEQ ID NO: 10385 - DNA, 5358 bp, synthetic construct; identical to SEQ ID NO: 10382
  misc_feature 1..5358: note = Description of Artificial Sequence: Synthetic coding sequence
  source 1..5358: mol_type = other DNA

SEQ ID NO: 10386 - DNA, 7242 bp, synthetic construct; identical to SEQ ID NO: 10384
  misc_feature 1..7242: note = Description of Artificial Sequence: Synthetic coding sequence
  source 1..7242: mol_type = other DNA

SEQ ID NO: 10387 - DNA, 7242 bp, synthetic construct; identical to SEQ ID NO: 10384
  misc_feature 1..7242: note = Description of Artificial Sequence: Synthetic coding sequence
  source 1..7242: mol_type = other DNA

SEQ ID NO: 10388 - DNA, 7212 bp, synthetic construct
  misc_feature 1..7212: note = Description of Artificial Sequence: Synthetic coding sequence
  source 1..7212: mol_type = other DNA
atgggcatcagcaccgtgatcctggagatgtgcctgctgtggggccaggtgctgagcaccggcggctggatccccagaaccaccgactacgccagcctgatccccagcgaggtgcccctggaccccaccgtggccgagggcagccccttccccagcgagagcaccctggagagcaccgtggccgagggcagccccatcagcctggagagcaccctggagagcaccgtggccgagggcagcctgatccccagcgagagcaccctggagagcaccgtggccgagggcagcgacagcggcctggccctgagactggtgaacggcgacggcagatgccagggcagagtggagatcctgtacagaggcagctggggcaccgtgtgcgacgacagctgggacaccaacgacgccaacgtggtgtgcagacagctgggctgcggctgggccatgagcgcccccggcaacgcctggttcggccagggcagcggccccatcgccctggacgacgtgagatgcagcggccacgagagctacctgtggagctgcccccacaacggctggctgagccacaactgcggccacggcgaggacgccggcgtgatctgcagcgccgcccagccccagagcaccctgagacccgagagctggcccgtgagaatcagcccccccgtgcccaccgagggcagcgagagcagcctggccctgagactggtgaacggcggcgacagatgcagaggcagagtggaggtgctgtacagaggcagctggggcaccgtgtgcgacgactactgggacaccaacgacgccaacgtggtgtgcagacagctgggctgcggctgggccatgagcgcccccggcaacgcccagttcggccagggcagcggccccatcgtgctggacgacgtgagatgcagcggccacgagagctacctgtggagctgcccccacaacggctggctgacccacaactgcggccacagcgaggacgccggcgtgatctgcagcgccccccagagcagacccacccccagccccgacacctggcccaccagccacgccagcaccgccggccccgagagcagcctggccctgagactggtgaacggcggcgacagatgccagggcagagtggaggtgctgtacagaggcagctggggcaccgtgtgcgacgacagctgggacaccagcgacgccaacgtggtgtgcagacagctgggctgcggctgggccaccagcgcccccggcaacgccagattcggccagggcagcggccccatcgtgctggacgacgtgagatgcagcggctacgagagctacctgtggagctgcccccacaacggctggctgagccacaactgccagcacagcgaggacgccggcgtgatctgcagcgacaccctgcccaccatcaccctgcccgccagcaccgtgggcagcgagagcagcctggccctgagactggtgaacggcggcgacagatgccagggcagagtggaggtgctgtacagaggcagctggggcaccgtgtgcgacgacagctgggacaccaacgacgccaacgtggtgtgcagacagctgggctgcggctgggccatgctggcccccggcaacgccagattcggccagggcagcggccccatcgtgctggacgacgtgagatgcagcggcaacgagagctacctgtggagctgcccccacaacggctggctgagccacaactgcggccacagcgaggacgccggcgtgatctgcagcggccccgagagcagcctggccctgagactggtgaacggcggcgacagatgccagggcagagtggaggtgctgtacagaggcagctggggcaccgtgtgcgacgacagctgggacaccaacgacgccaacgtggtgtgcagacagctgggctgcggctgggccaccagcgcccccggcaacgccagattcggccagggcagcggccccatcgtgctggacgacgtgagatgcagcggccacgagagctacctgtggagctgccccaacaacggctggctgagccacaactgcggccaccacgaggacgccggcgtgatctgcagcgccgcccagagcagaagcacccccagacccgacaccctgagcaccatcaccctgccccccagcaccgtgggcagcgagagcagcctgaccctgagactggtgaacggcagcgacagatgccagggcagagtggaggtgctgtacagaggcagctggggcaccgtgtgcgacgacagctgggacaccaacgacgccaacgtggtgtgcagacagctgggctgcggctgggccaccagcgcccccggcaacgccagattcggccagggcagcggccccatcgtgctggacgacgtgagatgcagcggccacgagagctacctgtggagctgcccccacaacggctggctgagccacaactgcggccaccacgaggacgccggcgtgatctgcagcgtgagccagagcagacccacccccagccccgacacctggcccaccagccacgccagcaccgccggccccgagagcagcctggccctgagactggtgaacggcggcgacagatgccagggcagagtggaggtgctgtacagaggcagctggggcaccgtgtgcgacgacagctgggacaccagcgacgccaacgtggtgtgcagacagctgggctgcggctgggccaccagcgcccccggcaacgccagattcggccagggcagcggccccatcgtgctggacgacgtgagatgcagcggctacgagagctacctgtggagctgcccccacaacggctggctgagccacaactgccagcacagcgaggacgccggcgtgatctgcagcgccgcccacagctggagcacccccagccccgacaccctgcccaccatcaccctgcccgccagcaccgtgggcagcgagagcagcctggccctgagactggtgaacggcggcgacagatgccagggcagagtggaggtgctgtaccagggcagctggggcaccgtgtgcgacgacagctgggacaccaacgacgccaacgtggtgtgcagacagctgggctgcggctgggccatgagcgcccccggcaacgccagattcggccagggcagcggccccatcgtgctggacgacgtgagatgcagcggccacgagagctacctgtggagctgcccccacaacggctggctgagccacaactgcggccacagcgaggacgccggcgtgatctgcagcgccagccagagcagacccacccccagccccgacacctggcccaccagccacgccagcaccgccggcagcgagagcagcctggccctgagactggtgaacggcggcgacagatgccagggcagagtggaggtgctgtacagaggcagctggggcaccgtgtgcgacgactactgggacaccaacgacgccaacgtggtgtgcagacagctgggctgcggctgggccatgagcgcccccggcaacgccagattcggccagggcagcggccccatcgtgctggacgacgtgagatgcagcggccacgagagctacctgtggagctgcccccacaacggctggctgagccacaactgcggccaccacgaggacgccggcgtgatctgcagcgccagccagagccagcccacccccagccccgacacctggcccaccagccacgccagcaccgccggcagcgagagcagcctggccctgagactggtgaacggcggcgacagatgccagggcagagtggaggtgctgtacagaggcagctggggcaccgtgtgcgacgactactgggacaccaacgacgccaacgtggtgtgcagacagctgggctgcggctgggccaccagcgcccccggcaacgccagattcggccagggcagcggccccatcgtgctggacgacgtgagatgcagcggccacgagagctacctgtggagctgcccccacaacggctggctgagccacaactgcggccaccacgaggacgccggcgtgatctgcagcgccagccagagccagcccacccccagccccgacacctggcccaccagccacgccagcaccgccggcagcgagagcagcctggccctgagactggtgaacggcggcgacagatgccagggcagagtggaggtgctgtacagaggcagctggggcaccgtgtgcgacgactactgggacaccaacgacgccaacgtggtgtgcagacagctgggctgcggctgggccaccagcgcccccggcaacgccagattcggccagggcagcggccccatcgtgctggacgacgtgagatgcagcggccacgagagctacctgtggagctgcccccacaacggctggctgagccacaactgcggccaccacgaggacgccggcgtgatctgcagcgccagccagagccagcccacccccagccccgacacctggcccaccagcagagccagcaccgccggcagcgagagcaccctggccctgagactggtgaacggcggcgacagatgcagaggcagagtggaggtgctgtaccagggcagctggggcaccgtgtgcgacgactactgggacaccaacgacgccaacgtggtgtgcagacagctgggctgcggctgggccatgagcgcccccggcaacgcccagttcggccagggcagcggccccatcgtgctggacgacgtgagatgcagcggccacgagagctacctgtggagctgcccccacaacggctggctgagccacaactgcggccaccacgaggacgccggcgtgatctgcagcgccgcccagagccagagcacccccagacccgacacctggctgaccaccaacctgcccgccctgaccgtgggcagcgagagcagcctggccctgagactggtgaacggcggcgacagatgcagaggcagagtggaggtgctgtacagaggcagctggggcaccgtgtgcgacgacagctgggacaccaacgacgccaacgtggtgtgcagacagctgggctgcggctgggccatgagcgcccccggcaacgccagattcggccagggcagcggccccatcgtgctggacgacgtgagatgcagcggcaacgagagctacctgtggagctgcccccacaagggctggctgacccacaactgcggccaccacgaggacgccggcgtgatctgcagcgccacccagatcaacagcaccaccaccgactggtggcaccccaccaccaccaccaccgccagacccagcagcaactgcggcggcttcctgttctacgccagcggcaccttcagcagccccagctaccccgcctactaccccaacaacgccaagtgcgtgtgggagatcgaggtgaacagcggctacagaatcaacctgggcttcagcaacctgaagctggaggcccaccacaactgcagcttcgactacgtggagatcttcgacggcagcctgaacagcagcctgctgctgggcaagatctgcaacgacaccagacagatcttcaccagcagctacaacagaatgaccatccacttcagaagcgacatcagcttccagaacaccggcttcctggcctggtacaacagcttccccagcgacgccaccctgagactggtgaacctgaacagcagctacggcctgtgcgccggcagagtggagatctaccacggcggcacctggggcaccgtgtgcgacgacagctggaccatccaggaggccgaggtggtgtgcagacagctgggctgcggcagagccgtgagcgccctgggcaacgcctacttcggcagcggcagcggccccatcaccctggacgacgtggagtgcagcggcaccgagagcaccctgtggcagtgcagaaacagaggctggttcagccacaactgcaaccacagagaggacgccggcgtgatctgcagcggcaaccacctgagcacccccgcccccttcctgaacatcaccagacccaacaccgactacagctgcggcggcttcctgagccagcccagcggcgacttcagcagccccttctaccccggcaactaccccaacaacgccaagtgcgtgtgggacatcgaggtgcagaacaactacagagtgaccgtgatcttcagagacgtgcagctggagggcggctgcaactacgactacatcgaggtgttcgacggcccctacagaagcagccccctgatcgccagagtgtgcgacggcgccagaggcagcttcaccagcagcagcaacttcatgagcatcagattcatcagcgaccacagcatcaccagaagaggcttcagagccgagtactacagcagccccagcaacgacagcaccaacctgctgtgcctgcccaaccacatgcaggccagcgtgagcagaagctacctgcagagcctgggcttcagcgccagcgacctggtgatcagcacctggaacggctactacgagtgcagaccccagatcacccccaacctggtgatcttcaccatcccctacagcggctgcggcaccttcaagcaggccgacaacgacaccatcgactacagcaacttcctgaccgccgccgtgagcggcggcatcatcaagagaagaaccgacctgagaatccacgtgagctgcagaatgctgcagaacacctgggtggacaccatgtacatcgccaacgacaccatccacgtggccaacaacaccatccaggtggaggaggtgcagtacggcaacttcgacgtgaacatcagcttctacaccagcagcagcttcctgtaccccgtgaccagcagaccctactacgtggacctgaaccaggacctgtacgtgcaggccgagatcctgcacagcgacgccgtgctgaccctgttcgtggacacctgcgtggccagcccctacagcaacgacttcaccagcctgacctacgacctgatcagaagcggctgcgtgagagacgacacctacggcccctacagcagccccagcctgagaatcgccagattcagattcagagccttccacttcctgaacagattccccagcgtgtacctgagatgcaagatggtggtgtgcagagcctacgaccccagcagcagatgctacagaggctgcgtgctgagaagcaagagagacgtgggcagctaccaggagaaggtggacgtggtgctgggccccatccagctgcagaccccccccagaagagaggaggagcccagatag

SEQ ID NO: 10389 - DNA, 1680 bp, synthetic construct
  misc_feature 1..1680: note = Description of Artificial Sequence: Synthetic coding sequence
  source 1..1680: mol_type = other DNA
atgaccatccacttcagaagcgacatcagcttccagaacaccggcttcctggcctggtacaacagcttccccagcgacgccaccctgagactggtgaacctgaacagcagctacggcctgtgcgccggcagagtggagatctaccacggcggcacctggggcaccgtgtgcgacgacagctggaccatccaggaggccgaggtggtgtgcagacagctgggctgcggcagagccgtgagcgccctgggcaacgcctacttcggcagcggcagcggccccatcaccctggacgacgtggagtgcagcggcaccgagagcaccctgtggcagtgcagaaacagaggctggttcagccacaactgcaaccacagagaggacgccggcgtgatctgcagcggcaaccacctgagcacccccgcccccttcctgaacatcaccagacccaacaccgactacagctgcggcggcttcctgagccagcccagcggcgacttcagcagccccttctaccccggcaactaccccaacaacgccaagtgcgtgtgggacatcgaggtgcagaacaactacagagtgaccgtgatcttcagagacgtgcagctggagggcggctgcaactacgactacatcgaggtgttcgacggcccctacagaagcagccccctgatcgccagagtgtgcgacggcgccagaggcagcttcaccagcagcagcaacttcatgagcatcagattcatcagcgaccacagcatcaccagaagaggcttcagagccgagtactacagcagccccagcaacgacagcaccaacctgctgtgcctgcccaaccacatgcaggccagcgtgagcagaagctacctgcagagcctgggcttcagcgccagcgacctggtgatcagcacctggaacggctactacgagtgcagaccccagatcacccccaacctggtgatcttcaccatcccctacagcggctgcggcaccttcaagcaggccgacaacgacaccatcgactacagcaacttcctgaccgccgccgtgagcggcggcatcatcaagagaagaaccgacctgagaatccacgtgagctgcagaatgctgcagaacacctgggtggacaccatgtacatcgccaacgacaccatccacgtggccaacaacaccatccaggtggaggaggtgcagtacggcaacttcgacgtgaacatcagcttctacaccagcagcagcttcctgtaccccgtgaccagcagaccctactacgtggacctgaaccaggacctgtacgtgcaggccgagatcctgcacagcgacgccgtgctgaccctgttcgtggacacctgcgtggccagcccctacagcaacgacttcaccagcctgacctacgacctgatcagaagcggctgcgtgagagacgacacctacggcccctacagcagccccagcctgagaatcgccagattcagattcagagccttccacttcctgaacagattccccagcgtgtacctgagatgcaagatggtggtgtgcagagcctacgaccccagcagcagatgctacagaggctgcgtgctgagaagcaagagagacgtgggcagctaccaggagaaggtggacgtggtgctgggccccatccagctgcagaccccccccagaagagaggaggagcccagatag

SEQ ID NO: 10390 - DNA, 3402 bp, synthetic construct
  misc_feature 1..3402: note = Description of Artificial Sequence: Synthetic coding sequence
  source 1..3402: mol_type = other DNA
atgggcatcagcaccgtgatcctggagatgtgcctgctgtggggccaggtgctgagcaccggcggctggatccccagaaccaccgactacgccagcctgatccccagcgaggtgcccctggaccccaccgtggccgagggcagccccttccccagcgagagcaccctggagagcaccgtggccgagggcagccccatcagcctggagagcaccctggagagcaccgtggccgagggcagcctgatccccagcgagagcaccctggagagcaccgtggccgagggcagcgacagcggcctggccctgagactggtgaacggcgacggcagatgccagggcagagtggagatcctgtacagaggcagctggggcaccgtgtgcgacgacagctgggacaccaacgacgccaacgtggtgtgcagacagctgggctgcggctgggccatgagcgcccccggcaacgcctggttcggccagggcagcggccccatcgccctggacgacgtgagatgcagcggccacgagagctacctgtggagctgcccccacaacggctggctgagccacaactgcggccacggcgaggacgccggcgtgatctgcagcgccccccagagcagacccacccccagccccgacacctggcccaccagccacgccagcaccgccggcagcgagagcagcctggccctgagactggtgaacggcggcgacagatgccagggcagagtggaggtgctgtacagaggcagctggggcaccgtgtgcgacgactactgggacaccaacgacgccaacgtggtgtgcagacagctgggctgcggctgggccaccagcgcccccggcaacgccagattcggccagggcagcggccccatcgtgctggacgacgtgagatgcagcggccacgagagctacctgtggagctgcccccacaacggctggctgagccacaactgcggccaccacgaggacgccggcgtgatctgcagcgccagccagagccagcccacccccagccccgacacctggcccaccagcagagccagcaccgccggcagcgagagcaccctggccctgagactggtgaacggcggcgacagatgcagaggcagagtggaggtgctgtaccagggcagctggggcaccgtgtgcgacgactactgggacaccaacgacgccaacgtggtgtgcagacagctgggctgcggctgggccatgagcgcccccggcaacgcccagttcggccagggcagcggccccatcgtgctggacgacgtgagatgcagcggccacgagagctacctgtggagctgcccccacaacggctggctgagccacaactgcggccaccacgaggacgccggcgtgatctgcagcgccacccagatcaacagcaccaccaccgactggtggcaccccaccaccaccaccaccgccagacccagcagcaactgcggcggcttcctgttctacgccagcggcaccttcagcagccccagctaccccgcctactaccccaacaacgccaagtgcgtgtgggagatcgaggtgaacagcggctacagaatcaacctgggcttcagcaacctgaagctggaggcccaccacaactgcagcttcgactacgtggagatcttcgacggcagcctgaacagcagcctgctgctgggcaagatctgcaacgacaccagacagatcttcaccagcagctacaacagaatgaccatccacttcagaagcgacatcagcttccagaacaccggcttcctggcctggtacaacagcttccccagcgacgccaccctgagactggtgaacctgaacagcagctacggcctgtgcgccggcagagtggagatctaccacggcggcacctggggcaccgtgtgcgacgacagctggaccatccaggaggccgaggtggtgtgcagacagctgggctgcggcagagccgtgagcgccctgggcaacgcctacttcggcagcggcagcggccccatcaccctggacgacgtggagtgcagcggcaccgagagcaccctgtggcagtgcagaaacagaggctggttcagccacaactgcaaccacagagaggacgccggcgtgatctgcagcggcaaccacctgagcacccccgcccccttcctgaacatcaccagacccaacaccgactacagctgcggcggcttcctgagccagcccagcggcgacttcagcagccccttctaccccggcaactaccccaacaacgccaagtgcgtgtgggacatcgaggtgcagaacaactacagagtgaccgtgatcttcagagacgtgcagctggagggcggctgcaactacgactacatcgaggtgttcgacggcccctacagaagcagccccctgatcgccagagtgtgcgacggcgccagaggcagcttcaccagcagcagcaacttcatgagcatcagattcatcagcgaccacagcatcaccagaagaggcttcagagccgagtactacagcagccccagcaacgacagcaccaacctgctgtgcctgcccaaccacatgcaggccagcgtgagcagaagctacctgcagagcctgggcttcagcgccagcgacctggtgatcagcacctggaacggctactacgagtgcagaccccagatcacccccaacctggtgatcttcaccatcccctacagcggctgcggcaccttcaagcaggccgacaacgacaccatcgactacagcaacttcctgaccgccgccgtgagcggcggcatcatcaagagaagaaccgacctgagaatccacgtgagctgcagaatgctgcagaacacctgggtggacaccatgtacatcgccaacgacaccatccacgtggccaacaacaccatccaggtggaggaggtgcagtacggcaacttcgacgtgaacatcagcttctacaccagcagcagcttcctgtaccccgtgaccagcagaccctactacgtggacctgaaccaggacctgtacgtgcaggccgagatcctgcacagcgacgccgtgctgaccctgttcgtggacacctgcgtggccagcccctacagcaacgacttcaccagcctgacctacgacctgatcagaagcggctgcgtgagagacgacacctacggcccctacagcagccccagcctgagaatcgccagattcagattcagagccttccacttcctgaacagattccccagcgtgtacctgagatgcaagatggtggtgtgcagagcctacgaccccagcagcagatgctacagaggctgcgtgctgagaagcaagagagacgtgggcagctaccaggagaaggtggacgtggtgctgggccccatccagctgcagaccccccccagaagagaggaggagcccagatag

SEQ ID NO: 10391 - DNA, 7242 bp, synthetic construct; identical to SEQ ID NO: 10384
  misc_feature 1..7242: note = Description of Artificial Sequence: Synthetic coding sequence
  source 1..7242: mol_type = other DNA

SEQ ID NO: 10392 - DNA, 7629 bp, synthetic construct
  misc_feature 1..7629: note = Description of Artificial Sequence: Synthetic coding sequence
  source 1..7629: mol_type = other DNA
atgggcatcagcaccgtgatcctggagatgtgcctgctgtggggccaggtgctgagcaccggcggctggatccccagaaccaccgactacgccagcctgatccccagcgaggtgcccctggaccccaccgtggccgagggcagccccttccccagcgagagcaccctggagagcaccgtggccgagggcagccccatcagcctggagagcaccctggagagcaccgtggccgagggcagcctgatccccagcgagagcaccctggagagcaccgtggccgagggcagcgacagcggcctggccctgagactggtgaacggcgacggcagatgccagggcagagtggagatcctgtacagaggcagctggggcaccgtgtgcgacgacagctgggacaccaacgacgccaacgtggtgtgcagacagctgggctgcggctgggccatgagcgcccccggcaacgcctggttcggccagggcagcggccccatcgccctggacgacgtgagatgcagcggccacgagagctacctgtggagctgcccccacaacggctggctgagccacaactgcggccacggcgaggacgccggcgtgatctgcagcgccgcccagccccagagcaccctgagacccgagagctggcccgtgagaatcagcccccccgtgcccaccgagggcagcgagagcagcctggccctgagactggtgaacggcggcgacagatgcagaggcagagtggaggtgctgtacagaggcagctggggcaccgtgtgcgacgactactgggacaccaacgacgccaacgtggtgtgcagacagctgggctgcggctgggccatgagcgcccccggcaacgcccagttcggccagggcagcggccccatcgtgctggacgacgtgagatgcagcggccacgagagctacctgtggagctgcccccacaacggctggctgacccacaactgcggccacagcgaggacgccggcgtgatctgcagcgccccccagagcagacccacccccagccccgacacctggcccaccagccacgccagcaccgccggccccgagagcagcctggccctgagactggtgaacggcggcgacagatgccagggcagagtggaggtgctgtacagaggcagctggggcaccgtgtgcgacgacagctgggacaccagcgacgccaacgtggtgtgcagacagctgggctgcggctgggccaccagcgcccccggcaacgccagattcggccagggcagcggccccatcgtgctggacgacgtgagatgcagcggctacgagagctacctgtggagctgcccccacaacggctggctgagccacaactgccagcacagcgaggacgccggcgtgatctgcagcgccgcccacagctggagcacccccagccccgacaccctgcccaccatcaccctgcccgccagcaccgtgggcagcgagagcagcctggccctgagactggtgaacggcggcgacagatgccagggcagagtggaggtgctgtacagaggcagctggggcaccgtgtgcgacgacagctgggacaccaacgacgccaacgtggtgtgcagacagctgggctgcggctgggccatgctggcccccggcaacgccagattcggccagggcagcggccccatcgtgctggacgacgtgagatgcagcggcaacgagagctacctgtggagctgcccccacaacggctggctgagccacaactgcggccacagcgaggacgccggcgtgatctgcagcggccccgagagcagcctggccctgagactggtgaacggcggcgacagatgccagggcagagtggaggtgctgtacagaggcagctggggcaccgtgtgcgacgacagctgggacaccaacgacgccaacgtggtgtgcagacagctgggctgcggctgggccaccagcgcccccggcaacgccagattcggccagggcagcggccccatcgtgctggacgacgtgagatgcagcggccacgagagctacctgtggagctgccccaacaacggctggctgagccacaactgcggccaccacgaggacgccggcgtgatctgcagcgccgcccagagcagaagcacccccagacccgacaccctgagcaccatcaccctgccccccagcaccgtgggcagcgagagcagcctgaccctgagactggtgaacggcagcgacagatgccagggcagagtggaggtgctgtacagaggcagctggggcaccgtgtgcgacgacagctgggacaccaacgacgccaacgtggtgtgcagacagctgggctgcggctgggccaccagcgcccccggcaacgccagattcggccagggcagcggccccatcgtgctggacgacgtgagatgcagcggccacgagagctacctgtggagctgcccccacaacggctggctgagccacaactgcggccaccacgaggacgccggcgtgatctgcagcgtgagccagagcagacccacccccagccccgacacctggcccaccagccacgccagcaccgccggccccgagagcagcctggccctgagactggtgaacggcggcgacagatgccagggcagagtggaggtgctgtacagaggcagctggggcaccgtgtgcgacgacagctgggacaccagcgacgccaacgtggtgtgcagacagctgggctgcggctgggccaccagcgcccccggcaacgccagattcggccagggcagcggccccatcgtgctggacgacgtgagatgcagcggctacgagagctacctgtggagctgcccccacaacggctggctgagccacaactgccagcacagcgaggacgccggcgtgatctgcagcgccgcccacagctggagcacccccagccccgacaccctgcccaccatcaccctgcccgccagcaccgtgggcagcgagagcagcctggccctgagactggtgaacggcggcgacagatgccagggcagagtggaggtgctgtaccagggcagctggggcaccgtgtgcgacgacagctgggacaccaacgacgccaacgtggtgtgcagacagctgggctgcggctgggccatgagcgcccccggcaacgccagattcggccagggcagcggccccatcgtgctggacgacgtgagatgcagcggccacgagagctacctgtggagctgcccccacaacggctggctgagccacaactgcggccacagcgaggacgccggcgtgatctgcagcgccagccagagcagacccacccccagccccgacacctggcccaccagccacgccagcaccgccggcagcgagagcagcctggccctgagactggtgaacggcggcgacagatgccagggcagagtggaggtgctgtacagaggcagctggggcaccgtgtgcgacgactactgggacaccaacgacgccaacgtggtgtgcagacagctgggctgcggctgggccatgagcgcccccggcaacgccagattcggccagggcagcggccccatcgtgctggacgacgtgagatgcagcggccacgagagctacctgtggagctgcccccacaacggctggctgagccacaactgcggccaccacgaggacgccggcgtgatctgcagcgccagccagagccagcccacccccagccccgacacctggcccaccagccacgccagcaccgccggcagcgagagcagcctggccctgagactggtgaacggcggcgacagatgccagggcagagtggaggtgctgtacagaggcagctggggcaccgtgtgcgacgactactgggacaccaacgacgccaacgtggtgtgcagacagctgggctgcggctgggccaccagcgcccccggcaacgccagattcggccagggcagcggccccatcgtgctggacgacgtgagatgcagcggccacgagagctacctgtggagctgcccccacaacggctggctgagccacaactgcggccaccacgaggacgccggcgtgatctgcagcgccagccagagccagcccacccccagccccgacacctggcccaccagccacgccagcaccgccggcagcgagagcagcctggccctgagactggtgaacggcggcgacagatgccagggcagagtggaggtgctgtacagaggcagctggggcaccgtgtgcgacgactactgggacaccaacgacgccaacgtggtgtgcagacagctgggctgcggctgggccaccagcgcccccggcaacgccagattcggccagggcagcggccccatcgtgctggacgacgtgagatgcagcggccacgagagctacctgtggagctgcccccacaacggctggctgagccacaactgcggccaccacgaggacgccggcgtgatctgcagcgccagccagagccagcccacccccagccccgacacctggcccaccagccacgccagcaccgccggcagcgagagcagcctggccctgagactggtgaacggcggcgacagatgccagggcagagtggaggtgctgtacagaggcagctggggcaccgtgtgcgacgactactgggacaccaacgacgccaacgtggtgtgcagacagctgggctgcggctgggccaccagcgcccccggcaacgccagattcggccagggcagcggccccatcgtgctggacgacgtgagatgcagcggccacgagagctacctgtggagctgcccccacaacggctggctgagccacaactgcggccaccacgaggacgccggcgtgatctgcagcgccagccagagccagcccacccccagccccgacacctggcccaccagcagagccagcaccgccggcagcgagagcaccctggccctgagactggtgaacggcggcgacagatgcagaggcagagtggaggtgctgtaccagggcagctggggcaccgtgtgcgacgactactgggacaccaacgacgccaacgtggtgtgcagacagctgggctgcggctgggccatgagcgcccccggcaacgcccagttcggccagggcagcggccccatcgtgctggacgacgtgagatgcagcggccacgagagctacctgtggagctgcccccacaacggctggctgagccacaactgcggccaccacgaggacgccggcgtgatctgcagcgccgcccagagccagagcacccccagacccgacacctggctgaccaccaacctgcccgccctgaccgtgggcagcgagagcagcctggccctgagactggtgaacggcggcgacagatgcagaggcagagtggaggtgctgtacagaggcagctggggcaccgtgtgcgacgacagctgggacaccaacgacgccaacgtggtgtgcagacagctgggctgcggctgggccatgagcgcccccggcaacgccagattcggccagggcagcggccccatcgtgctggacgacgtgagatgcagcggcaacgagagctacctgtggagctgcccccacaagggctggctgacccacaactgcggccaccacgaggacgccggcgtgatctgcagcgccacccagatcaacagcaccaccaccgactggtggcaccccaccaccaccaccaccgccagacccagcagcaactgcggcggcttcctgttctacgccagcggcaccttcagcagccccagctaccccgcctactaccccaacaacgccaagtgcgtgtgggagatcgaggtgaacagcggctacagaatcaacctgggcttcagcaacctgaagctggaggcccaccacaactgcagcttcgactacgtggagatcttcgacggcagcctgaacagcagcctgctgctgggcaagatctgcaacgacaccagacagatcttcaccagcagctacaacagaatgaccatccacttcagaagcgacatcagcttccagaacaccggcttcctggcctggtacaacagcttccccagcgacgccaccctgagactggtgaacctgaacagcagctacggcctgtgcgccggcagagtggagatctaccacggcggcacctggggcaccgtgtgcgacgacagctggaccatccaggaggccgaggtggtgtgcagacagctgggctgcggcagagccgtgagcgccctgggcaacgcctacttcggcagcggcagcggccccatcaccctggacgacgtggagtgcagcggcaccgagagcaccctgtggcagtgcagaaacagaggctggttcagccacaactgcaaccacagagaggacgccggcgtgatctgcagcggcaaccacctgagcacccccgcccccttcctgaacatcaccagacccaacaccgactacagctgcggcggcttcctgagccagcccagcggcgacttcagcagccccttctaccccggcaactaccccaacaacgccaagtgcgtgtgggacatcgaggtgcagaacaactacagagtgaccgtgatcttcagagacgtgcagctggagggcggctgcaactacgactacatcgaggtgttcgacggcccctacagaagcagccccctgatcgccagagtgtgcgacggcgccagaggcagcttcaccagcagcagcaacttcatgagcatcagattcatcagcgaccacagcatcaccagaagaggcttcagagccgagtactacagcagccccagcaacgacagcaccaacctgctgtgcctgcccaaccacatgcaggccagcgtgagcagaagctacctgcagagcctgggcttcagcgccagcgacctggtgatcagcacctggaacggctactacgagtgcagaccccagatcacccccaacctggtgatcttcaccatcccctacagcggctgcggcaccttcaagcaggccgacaacgacaccatcgactacagcaacttcctgaccgccgccgtgagcggcggcatcatcaagagaagaaccgacctgagaatccacgtgagctgcagaatgctgcagaacacctgggtggacaccatgtacatcgccaacgacaccatccacgtggccaacaacaccatccaggtggaggaggtgcagtacggcaacttcgacgtgaacatcagcttctacaccagcagcagcttcctgtaccccgtgaccagcagaccctactacgtggacctgaaccaggacctgtacgtgcaggccgagatcctgcacagcgacgccgtgctgaccctgttcgtggacacctgcgtggccagcccctacagcaacgacttcaccagcctgacctacgacctgatcagaagcggctgcgtgagagacgacacctacggcccctacagcagccccagcctgagaatcgccagattcagattcagagccttccacttcctgaacagattccccagcgtgtacctgagatgcaagatggtggtgtgcagagcctacgaccccagcagcagatgctacagaggctgcgtgctgagaagcaagagagacgtgggcagctaccaggagaaggtggacgtggtgctgggccccatccagctgcagaccccccccagaagagaggaggagcccagatag

SEQ ID NO: 10393 - DNA, 7239 bp, synthetic construct
  misc_feature 1..7239: note = Description of Artificial Sequence: Synthetic coding sequence
  source 1..7239: mol_type = other DNA
atgggcatcagcaccgtgatcctggagatgtgcctgctgtggggccaggtgctgagcaccggcggctggatccccagaaccaccgactacgccagcctgatccccagcgaggtgcccctggaccccaccgtggccgagggcagccccttccccagcgagagcaccctggagagcaccgtggccgagggcagccccatcagcctggagagcaccctggagagcaccgtggccgagggcagcctgatccccagcgagagcaccctggagagcaccgtggccgagggcagcgacagcggcctggccctgagactggtgaacggcgacggcagatgccagggcagagtggagatcctgtacagaggcagctggggcaccgtgtgcgacgacagctgggacaccaacgacgccaacgtggtgtgcagacagctgggctgcggctgggccatgagcgcccccggcaacgcctggttcggccagggcagcggccccatcgccctggacgacgtgagatgcagcggccacgagagctacctgtggagctgcccccacaacggctggctgagccacaactgcggccacggcgaggacgccggcgtgatctgcagcgccgcccagccccagagcaccctgagacccgagagctggcccgtgagaatcagcccccccgtgcccaccgagggcagcgagagcagcctggccctgagactggtgaacggcggcgacagatgcagaggcagagtggaggtgctgtacagaggcagctggggcaccgtgtgcgacgactactgggacaccaacgacgccaacgtggtgtgcagacagctgggctgcggctgggccatgagcgcccccggcaacgcccagttcggccagggcagcggccccatcgtgctggacgacgtgagatgcagcggccacgagagctacctgtggagctgcccccacaacggctggctgacccacaactgcggccacagcgaggacgccggcgtgatctgcagcgccccccagagcagacccacccccagccccgacacctggcccaccagccacgccagcaccgccggccccgagagcagcctggccctgagactggtgaacggcggcgacagatgccagggcagagtggaggtgctgtacagaggcagctggggcaccgtgtgcgacgacagctgggacaccagcgacgccaacgtggtgtgcagacagctgggctgcggctgggccaccagcgcccccggcaacgccagattcggccagggcagcggccccatcgtgctggacgacgtgagatgcagcggctacgagagctacctgtggagctgcccccacaacggctggctgagccacaactgccagcacagcgaggacgccggcgtgatctgcagcgccgcccacagctggagcacccccagccccgacaccctgcccaccatcaccctgcccgccagcaccgtgggcagcgagagcagcctggccctgagactggtgaacggcggcgacagatgccagggcagagtggaggtgctgtacagaggcagctggggcaccgtgtgcgacgacagctgggacaccaacgacgccaacgtggtgtgcagacagctgggctgcggctgggccatgctggcccccggcaacgccagattcggccagggcagcggccccatcgtgctggacgacgtgagatgcagcggcaacgagagctacctgtggagctgcccccacaacggctggctgagccacaactgcggccacagcgaggacgccggcgtgatctgcagcggccccgagagcagcctggccctgagactggtgaacggcggcgacagatgccagggcagagtggaggtgctgtacagaggcagctggggcaccgtgtgcgacgacagctgggacaccaacgacgccaacgtggtgtgcagacagctgggctgcggctgggccaccagcgcccccggcaacgccagattcggccagggcagcggccccatcgtgctggacgacgtgagatgcagcggccacgagagctacctgtggagctgccccaacaacggctggctgagccacaactgcggccaccacgaggacgccggcgtgatctgcagcgccgcccagagcagaagcacccccagacccgacaccctgagcaccatcaccctgccccccagcaccgtgggcagcgagagcagcctgaccctgagactggtgaacggcagcgacagatgccagggcagagtggaggtgctgtacagaggcagctggggcaccgtgtgcgacgacagctgggacaccaacgacgccaacgtggtgtgcagacagctgggctgcggctgggccaccagcgcccccggcaacgccagattcggccagggcagcggccccatcgtgctggacgacgtgagatgcagcggccacgagagctacctgtggagctgcccccacaacggctggctgagccacaactgcggccaccacgaggacgccggcgtgatctgcagcgtgagccagagcagacccacccccagccccgacacctggcccaccagccacgccagcaccgccggccccgagagcagcctggccctgagactggtgaacggcggcgacagatgccagggcagagtggaggtgctgtacagaggcagctggggcaccgtgtgcgacgacagctgggacaccagcgacgccaacgtggtgtgcagacagctgggctgcggctgggccaccagcgcccccggcaacgccagattcggccagggcagcggccccatcgtgctggacgacgtgagatgcagcggctacgagagctacctgtggagctgcccccacaacggctggctgagccacaactgccagcacagcgaggacgccggcgtgatctgcagcgccgcccacagctggagcacccccagccccgacaccctgcccaccatcaccctgcccgccagcaccgtgggcagcgagagcagcctggccctgagactggtgaacggcggcgacagatgccagggcagagtggaggtgctgtaccagggcagctggggcaccgtgtgcgacgacagctgggacaccaacgacgccaacgtggtgtgcagacagctgggctgcggctgggccatgagcgcccccggcaacgccagattcggccagggcagcggccccatcgtgctggacgacgtgagatgcagcggccacgagagctacctgtggagctgcccccacaacggctggctgagccacaactgcggccacagcgaggacgccggcgtgatctgcagcgccagccagagcagacccacccccagccccgacacctggcccaccagccacgccagcaccgccggcagcgagagcagcctggccctgagactggtgaacggcggcgacagatgccagggcagagtggaggtgctgtacagaggcagctggggcaccgtgtgcgacgactactgggacaccaacgacgccaacgtggtgtgcagacagctgggctgcggctgggccatgagcgcccccggcaacgccagattcggccagggcagcggccccatcgtgctggacgacgtgagatgcagcggccacgagagctacctgtggagctgcccccacaacggctggctgagccacaactgcggccaccacgaggacgccggcgtgatctgcagcgccagccagagccagcccacccccagccccgacacctggcccaccagccacgccagcaccgccggcagcgagagcagcctggccctgagactggtgaacggcggcgacagatgccagggcagagtggaggtgctgtacagaggcagctggggcaccgtgtgcgacgactactgggacaccaacgacgccaacgtggtgtgcagacagctgggctgcggctgggccaccagcgcccccggcaacgccagattcggccagggcagcggccccatcgtgctggacgacgtgagatgcagcggccacgagagctacctgtggagctgcccccacaacggctggctgagccacaactgcggccaccacgaggacgccggcgtgatctgcagcgccagccagagccagcccacccccagccccgacacctggcccaccagccacgccagcaccgccggcagcgagagcagcctggccctgagactggtgaacggcggcgacagatgccagggcagagtggaggtgctgtacagaggcagctggggcaccgtgtgcgacgactactgggacaccaacgacgccaacgtggtgtgcagacagctgggctgcggctgggccaccagcgcccccggcaacgccagattcggccagggcagcggccccatcgtgctggacgacgtgagatgcagcggccacgagagctacctgtggagctgcccccacaacggctggctgagccacaactgcggccaccacgaggacgccggcgtgatctgcagcgccagccagagccagcccacccccagccccgacacctggcccaccagcagagccagcaccgccggcagcgagagcaccctggccctgagactggtgaacggcggcgacagatgcagaggcagagtggaggtgctgtaccagggcagctggggcaccgtgtgcgacgactactgggacaccaacgacgccaacgtggtgtgcagacagctgggctgcggctgggccatgagcgcccccggcaacgcccagttcggccagggcagcggccccatcgtgctggacgacgtgagatgcagcggccacgagagctacctgtggagctgcccccacaacggctggctgagccacaactgcggccaccacgaggacgccggcgtgatctgcagcgccgcccagagccagagcacccccagacccgacacctggctgaccaccaacctgcccgccctgaccgtgggcagcgagagcagcctggccctgagactggtgaacggcggcgacagatgcagaggcagagtggaggtgctgtacagaggcagctggggcaccgtgtgcgacgacagctgggacaccaacgacgccaacgtggtgtgcagacagctgggctgcggctgggccatgagcgcccccggcaacgccagattcggccagggcagcggccccatcgtgctggacgacgtgagatgcagcggcaacgagagctacctgtggagctgcccccacaagggctggctgacccacaactgcggccaccacgaggacgccggcgtgatctgcagcgccacccagatcaacagcaccaccaccgactggtggcaccccaccaccaccaccaccgccagacccagcagcaactgcggcggcttcctgttctacgccagcggcaccttcagcagccccagctaccccgcctactaccccaacaacgccaagtgcgtgtgggagatcgaggtgaacagcggctacagaatcaacctgggcttcagcaacctgaagctggaggcccaccacaactgcagcttcgactacgtggagatcttcgacggcagcctgaacagcagcctgctgctgggcaagatctgcaacgacaccagacagatcttcaccagcagctacaacagaatgaccatccacttcagaagcgacatcagcttccagaacaccggcttcctggcctggtacaacagcttccccagcgacgccaccctgagactggtgaacctgaacagcagctacggcctgtgcgccggcagagtggagatctaccacggcggcacctggggcaccgtgtgcgacgacagctggaccatccaggaggccgaggtggtgtgcagacagctgggctgcggcagagccgtgagcgccctgggcaacgcctacttcggcagcggcagcggccccatcaccctggacgacgtggagtgcagcggcaccgagagcaccctgtggcagtgcagaaacagaggctggttcagccacaactgcaaccacagagaggacgccggcgtgatctgcagcggcaaccacctgagcacccccgcccccttcctgaacatcaccagacccaacaactacagctgcggcggcttcctgagccagcccagcggcgacttcagcagccccttctaccccggcaactaccccaacaacgccaagtgcgtgtgggacatcgaggtgcagaacaactacagagtgaccgtgatcttcagagacgtgcagctggagggcggctgcaactacgactacatcgaggtgttcgacggcccctacagaagcagccccctgatcgccagagtgtgcgacggcgccagaggcagcttcaccagcagcagcaacttcatgagcatcagattcatcagcgaccacagcatcaccagaagaggcttcagagccgagtactacagcagccccagcaacgacagcaccaacctgctgtgcctgcccaaccacatgcaggccagcgtgagcagaagctacctgcagagcctgggcttcagcgccagcgacctggtgatcagcacctggaacggctactacgagtgcagaccccagatcacccccaacctggtgatcttcaccatcccctacagcggctgcggcaccttcaagcaggccgacaacgacaccatcgactacagcaacttcctgaccgccgccgtgagcggcggcatcatcaagagaagaaccgacctgagaatccacgtgagctgcagaatgctgcagaacacctgggtggacaccatgtacatcgccaacgacaccatccacgtggccaacaacaccatccaggtggaggaggtgcagtacggcaacttcgacgtgaacatcagcttctacaccagcagcagcttcctgtaccccgtgaccagcagaccctactacgtggacctgaaccaggacctgtacgtgcaggccgagatcctgcacagcgacgccgtgctgaccctgttcgtggacacctgcgtggccagcccctacagcaacgacttcaccagcctgacctacgacctgatcagaagcggctgcgtgagagacgacacctacggcccctacagcagccccagcctgagaatcgccagattcagattcagagccttccacttcctgaacagattccccagcgtgtacctgagatgcaagatggtggtgtgcagagcctacgaccccagcagcagatgctacagaggctgcgtgctgagaagcaagagagacgtgggcagctaccaggagaaggtggacgtggtgctgggccccatccagctgcagaccccccccagaagagaggaggagcccagatag

SEQ ID NO: 10394 - DNA, 7242 bp, synthetic construct; identical to SEQ ID NO: 10384
  misc_feature 1..7242: note = Description of Artificial Sequence: Synthetic coding sequence
  source 1..7242: mol_type = other DNA

SEQ ID NO: 10395 - DNA, 7212 bp, synthetic construct; identical to SEQ ID NO: 10388
  misc_feature 1..7212: note = Description of Artificial Sequence: Synthetic coding sequence
  source 1..7212: mol_type = other DNA

SEQ ID NO: 10396 - DNA, 5358 bp, synthetic construct; identical to SEQ ID NO: 10382
  misc_feature 1..5358: note = Description of Artificial Sequence: Synthetic coding sequence
  source 1..5358: mol_type = other DNA

SEQ ID NO: 10397 - DNA, 597 bp, synthetic construct
  misc_feature 1..597: note = Description of Artificial Sequence: Synthetic coding sequence
  source 1..597: mol_type = other DNA
atggccgccgacatcagcgagagcagcggcgccgactgcaagggcgaccccagaaacagcgccaagctggacgccgactaccccctgagagtgctgtactgcggcgtgtgcagcctgcccaccgagtactgcgagtacatgcccgacgtggccaagtgcagacagtggctggagaagaacttccccaacgagttcgccaagctgaccgtggagaacagccccaagcaggaggccggcatcagcgagggccagggcaccgccggcgaggaggaggagaagaagaagcagaagagaggcggcagaggccagatcaagcagaagaagaagaccgtgccccagaaggtgaccatcgccaagatccccagagccaagaagaagtacgtgaccagagtgtgcggcctggccaccttcgagatcgacctgaaggaggcccagagattcttcgcccagaagttcagctgcggcgccagcgtgaccggcgaggacgagatcatcatccagggcgacttcaccgacgacatcatcgacgtgatccaggagaagtggcccgaggtggacgacgacagcatcgaggacctgggcgaggtgaagaagtag

SEQ ID NO: 10398 - DNA, 1530 bp, synthetic construct
  misc_feature 1..1530: note = Description of Artificial Sequence: Synthetic coding sequence
  source 1..1530: mol_type = other DNA
atggacccccccagagccagccacctgagccccagaaagaagagacccagacagaccggcgccctgatggccagcagcccccaggacatcaagttccaggacctggtggtgttcatcctggagaagaagatgggcaccaccagaagagccttcctgatggagctggccagaagaaagggcttcagagtggagaacgagctgagcgacagcgtgacccacatcgtggccgagaacaacagcggcagcgacgtgctggagtggctgcaggcccagaaggtgcaggtgagcagccagcccgagctgctggacgtgagctggctgatcgagtgcatcagagccggcaagcccgtggagatgaccggcaagcaccagctggtggtgagaagagactacagcgacagcaccaaccccggcccccccaagaccccccccatcgccgtgcagaagatcagccagtacgcctgccagagaagaaccaccctgaacaactgcaaccagatcttcaccgacgccttcgacatcctggccgagaactgcgagttcagagagaacgaggacagctgcgtgaccttcatgagagccgccagcgtgctgaagagcctgcccttcaccatcatcagcatgaaggacaccgagggcatcccctgcctgggcagcaaggtgaagggcatcatcgaggagatcatcgaggacggcgagagcagcgaggtgaaggccgtgctgaacgacgagagataccagagcttcaagctgttcaccagcgtgttcggcgtgggcctgaagaccagcgagaagtggttcagaatgggcttcagaaccctgagcaaggtgagaagcgacaagagcctgaagttcaccagaatgcagaaggccggcttcctgtactacgaggacctggtgagctgcgtgaccagagccgaggccgaggccgtgagcgtgctggtgaaggaggccgtgtgggccttcctgcccgacgccttcgtgaccatgaccggcggcttcagaagaggcaagaagatgggccacgacgtggacttcctgatcaccagccccggcagcaccgaggacgaggagcagctgctgcagaaggtgatgaacctgtgggagaagaagggcctgctgctgtactacgacctggtggagagcaccttcgagaagctgagactgcccagcagaaaggtggacgccctggaccacttccagaagtgcttcctgatcttcaagctgcccagacagagagtggacagcgaccagagcagctggcaggagggcaagacctggaaggccatcagagtggacctggtgctgtgcccctacgagagaagagccttcgccctgctgggctggaccggcagcagacagttcgagagagacctgagaagatacgccacccacgagagaaagatgatcctggacaaccacgccctgtacgacaagaccaagagaatcttcctgaaggccgagagcgaggaggagatcttcgcccacctgggcctggactacatcgagccctgggagagaaacgcctag

SEQ ID NO: 10399 - DNA, 1527 bp, synthetic construct
  misc_feature 1..1527: note = Description of Artificial Sequence: Synthetic coding sequence
  source 1..1527: mol_type = other DNA
atggacccccccagagccagccacctgagccccagaaagaagagacccagacagaccggcgccctgatggccagcagcccccaggacatcaagttccaggacctggtggtgttcatcctggagaagaagatgggcaccaccagaagagccttcctgatggagctggccagaagaaagggcttcagagtggagaacgagctgagcgacagcgtgacccacatcgtggccgagaacaacagcggcagcgacgtgctggagtggctgcaggcccagaaggtgcaggtgagcagccagcccgagctgctggacgtgagctggctgatcgagtgcatcagagccggcaagcccgtggagatgaccggcaagcaccagctggtggtgagaagagactacagcgacagcaccaaccccggcccccccaagaccccccccatcgccgtgcagaagatcagccagtacgcctgccagagaagaaccaccctgaacaactgcaaccagatcttcaccgacgccttcgacatcctggccgagaactgcgagttcagagagaacgaggacagctgcgtgaccttcatgagagccgccagcgtgctgaagagcctgcccttcaccatcatcagcatgaaggacaccgagggcatcccctgcctgggcagcaaggtgaagggcatcatcgaggagatcatcgaggacggcgagagcagcgaggtgaaggccgtgctgaacgacgagagataccagagcttcaagctgttcaccagcgtgttcggcgtgggcctgaagaccagcgagaagtggttcagaatgggcttcagaaccctgagcaaggtgagaagcgacaagagcctgaagttcaccagaatgcagaaggccggcttcctgtactacgaggacctggtgagctgcgtgaccagagccgaggccgaggccgtgagcgtgctggtgaaggaggccgtgtgggccttcctgcccgacgccttcgtgaccatgaccggcggcttcagaagaggcaagaagatgggccacgacgtggacttcctgatcaccagccccggcagcaccgaggacgaggagcagctgctgcagaaggtgatgaacctgtgggagaagaagggcctgctgctgtactacgacctggtggagagcaccttcgagaagctgagactgcccagcagaaaggtggacgccctggaccacttccagaagtgcttcctgatcttcaagctgcccagacagagagtggacagcgaccagagcagctggcaggagggcaagacctggaaggccatcagagtggacctggtgctgtgcccctacgagagaagagccttcgccctgctgggctggaccggcagcagattcgagagagacctgagaagatacgccacccacgagagaaagatgatcctggacaaccacgccctgtacgacaagaccaagagaatcttcctgaaggccgagagcgaggaggagatcttcgcccacctgggcctggactacatcgagccctgggagagaaacgcctag

SEQ ID NO: 10400 - DNA, 2544 bp, synthetic construct
  misc_feature 1..2544: note = Description of Artificial Sequence: Synthetic coding sequence
  source 1..2544: mol_type = other DNA
atggaggccgccagacccagcggcagctggaacggcgccctgtgcagactgctgctgctgaccctggccatcctgatcttcgccagcgacgcctgcaagaacgtgaccctgcacgtgcccagcaagctggacgccgagaagctggtgggcagagtgaacctgaaggagtgcttcaccgccgccaacctgatccacagcagcgaccccgacttccagatcctggaggacggcagcgtgtacaccaccaacaccatcctgctgagcagcgagaagagaagcttcaccatcctgctgagcaacaccgagaaccaggagaagaagaagatcttcgtgttcctggagcaccagaccaaggtgctgaagaagagacacaccaaggagaaggtgctgagaagagccaagagaagatgggcccccatcccctgcagcatgctggagaacagcctgggccccttccccctgttcctgcagcaggtgcagagcgacaccgcccagaactacaccatctactacagcatcagaggccccggcgtggaccaggagcccagaaacctgttctacgtggagagagacaccggcaacctgtactgcaccagacccgtggacagagagcagtacgagagcttcgagatcatcgccttcgccaccacccccgacggctacacccccgagctgcccctgcccctgatcatcaagatcgaggacgagaacgacaactaccccatcttcaccgaggagacctacaccttcaccatcttcgagaactgcagagtgggcaccaccgtgggccaggtgtgcgccaccgacaaggacgagcccgacaccatgcacaccagactgaagtacagcatcatcggccaggtgccccccagccccaccctgttcagcatgcaccccaccaccggcgtgatcaccaccaccagcagccagctggacagagagctgatcgacaagtaccagctgaagatcaaggtgcaggacatggacggccagtacttcggcctgcagaccaccagcacctgcatcatcaacatcgacgacgtgaacgaccacctgcccaccttcaccagaaccagctacgtgaccagcgtggaggagaacaccgtggacgtggagatcctgagagtgaccgtggaggacaaggacctggtgaacaccgccaactggagagccaactacaccatcctgaagggcaacgagaacggcaacttcaagatcgtgaccgacgccaagaccaacgagggcgtgctgtgcgtggtgaagcccctgaactacgaggagaagcagcagatgatcctgcagatcggcgtggtgaacgaggcccccttcagcagagaggccagccccagaagcgccatgagcaccgccaccgtgaccgtgaacgtggaggaccaggacgagggccccgagtgcaacccccccatccagaccgtgagaatgaaggagaacgccgaggtgggcaccaccagcaacggctacaaggcctacgaccccgagaccagaagcagcagcggcatcagatacaagaagctgaccgaccccaccggctgggtgaccatcgacgagaacaccggcagcatcaaggtgttcagaagcctggacagagaggccgagaccatcaagaacggcatctacaacatcaccgtgctggccagcgaccagggcggcagaacctgcaccggcaccctgggcatcatcctgcaggacgtgaacgacaacagccccttcatccccaagaagaccgtgatcatctgcaagcccaccatgagcagcgccgagatcgtggccgtggaccccgacgagcccatccacggcccccccttcgacttcagcctggagagcagcaccagcgaggtgcagagaatgtggagactgaaggccatcaacgacaccgccgccagactgagctaccagaacgacccccccttcggcagctacgtggtgcccatcaccgtgagagacagactgggcatgagcagcgtgaccagcctggacgtgaccctgtgcgactgcatcaccgagaacgactgcacccacagagtggaccccagaatcggcggcggcggcgtgcagctgggcaagtgggccatcctggccatcctgctgggcatcgccctgctgttctgcatcctgttcaccctggtgtgcggcgccagcggcaccagcaagcagcccaaggtgatccccgacgacctggcccagcagaacctgatcgtgagcaacaccgaggcccccggcgacgacaaggtgtacagcgccaacggcttcaccacccagaccgtgggcgccagcgcccagggcgtgtgcggcaccgtgggcagcggcatcaagaacggcggccaggagaccatcgagatggtgaagggcggccaccagaccagcgagagctgcagaggcgccggccaccaccacaccctggacagctgcagaggcggccacaccgaggtggacaactgcagatacacctacagcgagtggcacagcttcacccagcccagactgggcgaggagagcatcagaggccacaccctgatcaagaactag

SEQ ID NO: 10401 - DNA, 2706 bp, synthetic construct
  misc_feature 1..2706: note = Description of Artificial Sequence: Synthetic coding sequence
  source 1..2706: mol_type = other DNA
atggaggccgccagacccagcggcagctggaacggcgccctgtgcagactgctgctgctgaccctggccatcctgatcttcgccagcgacgcctgcaagaacgtgaccctgcacgtgcccagcaagctggacgccgagaagctggtgggcagagtgaacctgaaggagtgcttcaccgccgccaacctgatccacagcagcgaccccgacttccagatcctggaggacggcagcgtgtacaccaccaacaccatcctgctgagcagcgagaagagaagcttcaccatcctgctgagcaacaccgagaaccaggagaagaagaagatcttcgtgttcctggagcaccagaccaaggtgctgaagaagagacacaccaaggagaaggtgctgagaagagccaagagaagatgggcccccatcccctgcagcatgctggagaacagcctgggccccttccccctgttcctgcagcaggtgcagagcgacaccgcccagaactacaccatctactacagcatcagaggccccggcgtggaccaggagcccagaaacctgttctacgtggagagagacaccggcaacctgtactgcaccagacccgtggacagagagcagtacgagagcttcgagatcatcgccttcgccaccacccccgacggctacacccccgagctgcccctgcccctgatcatcaagatcgaggacgagaacgacaactaccccatcttcaccgaggagacctacaccttcaccatcttcgagaactgcagagtgggcaccaccgtgggccaggtgtgcgccaccgacaaggacgagcccgacaccatgcacaccagactgaagtacagcatcatcggccaggtgccccccagccccaccctgttcagcatgcaccccaccaccggcgtgatcaccaccaccagcagccagctggacagagagctgatcgacaagtaccagctgaagatcaaggtgcaggacatggacggccagtacttcggcctgcagaccaccagcacctgcatcatcaacatcgacgacgtgaacgaccacctgcccaccttcaccagaaccagctacgtgaccagcgtggaggagaacaccgtggacgtggagatcctgagagtgaccgtggaggacaaggacctggtgaacaccgccaactggagagccaactacaccatcctgaagggcaacgagaacggcaacttcaagatcgtgaccgacgccaagaccaacgagggcgtgctgtgcgtggtgaagcccctgaactacgaggagaagcagcagatgatcctgcagatcggcgtggtgaacgaggcccccttcagcagagaggccagccccagaagcgccatgagcaccgccaccgtgaccgtgaacgtggaggaccaggacgagggccccgagtgcaacccccccatccagaccgtgagaatgaaggagaacgccgaggtgggcaccaccagcaacggctacaaggcctacgaccccgagaccagaagcagcagcggcatcagatacaagaagctgaccgaccccaccggctgggtgaccatcgacgagaacaccggcagcatcaaggtgttcagaagcctggacagagaggccgagaccatcaagaacggcatctacaacatcaccgtgctggccagcgaccagggcggcagaacctgcaccggcaccctgggcatcatcctgcaggacgtgaacgacaacagccccttcatccccaagaagaccgtgatcatctgcaagcccaccatgagcagcgccgagatcgtggccgtggaccccgacgagcccatccacggcccccccttcgacttcagcctggagagcagcaccagcgaggtgcagagaatgtggagactgaaggccatcaacgacaccgccgccagactgagctaccagaacgacccccccttcggcagctacgtggtgcccatcaccgtgagagacagactgggcatgagcagcgtgaccagcctggacgtgaccctgtgcgactgcatcaccgagaacgactgcacccacagagtggaccccagaatcggcggcggcggcgtgcagctgggcaagtgggccatcctggccatcctgctgggcatcgccctgctgttctgcatcctgttcaccctggtgtgcggcgccagcggcaccagcaagcagcccaaggtgatccccgacgacctggcccagcagaacctgatcgtgagcaacaccgaggcccccggcgacgacaaggtgtacagcgccaacggcttcaccacccagaccgtgggcgccagcgcccagggcgtgtgcggcaccgtgggcagcggcatcaagaacggcggccaggagaccatcgagatggtgaagggcggccaccagaccagcgagagctgcagaggcgccggccaccaccacaccctggacagctgcagaggcggccacaccgaggtggacaactgcagatacacctacagcgagtggcacagcttcacccagcccagactgggcgagaaggtgtacctgtgcaaccaggacgagaaccacaagcacgcccaggactacgtgctgacctacaactacgagggcagaggcagcgtggccggcagcgtgggctgctgcagcgagagacaggaggaggacggcctggagttcctggacaacctggagcccaagttcagaaccctggccgaggcctgcatgaagagatag

SEQ ID NO: 10402 - DNA, 2745 bp, synthetic construct
  misc_feature 1..2745: note = Description of Artificial Sequence: Synthetic coding sequence
  source 1..2745: mol_type = other DNA
atggaggccgccagacccagcggcagctggaacggcgccctgtgcagactgctgctgctgaccctggccatcctgatcttcgccagcgacgcctgcaagaacgtgaccctgcacgtgcccagcaagctggacgccgagaagctggtgggcagagtgaacctgaaggagtgcttcaccgccgccaacctgatccacagcagcgaccccgacttccagatcctggaggacggcagcgtgtacaccaccaacaccatcctgctgagcagcgagaagagaagcttcaccatcctgctgagcaacaccgagaaccaggagaagaagaagatcttcgtgttcctggagcaccagaccaagatcagcctgctggtgccctggctgtgcctggtggccgaggtgctgaagaagagacacaccaaggagaaggtgctgagaagagccaagagaagatgggcccccatcccctgcagcatgctggagaacagcctgggccccttccccctgttcctgcagcaggtgcagagcgacaccgcccagaactacaccatctactacagcatcagaggccccggcgtggaccaggagcccagaaacctgttctacgtggagagagacaccggcaacctgtactgcaccagacccgtggacagagagcagtacgagagcttcgagatcatcgccttcgccaccacccccgacggctacacccccgagctgcccctgcccctgatcatcaagatcgaggacgagaacgacaactaccccatcttcaccgaggagacctacaccttcaccatcttcgagaactgcagagtgggcaccaccgtgggccaggtgtgcgccaccgacaaggacgagcccgacaccatgcacaccagactgaagtacagcatcatcggccaggtgccccccagccccaccctgttcagcatgcaccccaccaccggcgtgatcaccaccaccagcagccagctggacagagagctgatcgacaagtaccagctgaagatcaaggtgcaggacatggacggccagtacttcggcctgcagaccaccagcacctgcatcatcaacatcgacgacgtgaacgaccacctgcccaccttcaccagaaccagctacgtgaccagcgtggaggagaacaccgtggacgtggagatcctgagagtgaccgtggaggacaaggacctggtgaacaccgccaactggagagccaactacaccatcctgaagggcaacgagaacggcaacttcaagatcgtgaccgacgccaagaccaacgagggcgtgctgtgcgtggtgaagcccctgaactacgaggagaagcagcagatgatcctgcagatcggcgtggtgaacgaggcccccttcagcagagaggccagccccagaagcgccatgagcaccgccaccgtgaccgtgaacgtggaggaccaggacgagggccccgagtgcaacccccccatccagaccgtgagaatgaaggagaacgccgaggtgggcaccaccagcaacggctacaaggcctacgaccccgagaccagaagcagcagcggcatcagatacaagaagctgaccgaccccaccggctgggtgaccatcgacgagaacaccggcagcatcaaggtgttcagaagcctggacagagaggccgagaccatcaagaacggcatctacaacatcaccgtgctggccagcgaccagggcggcagaacctgcaccggcaccctgggcatcatcctgcaggacgtgaacgacaacagccccttcatccccaagaagaccgtgatcatctgcaagcccaccatgagcagcgccgagatcgtggccgtggaccccgacgagcccatccacggcccccccttcgacttcagcctggagagcagcaccagcgaggtgcagagaatgtggagactgaaggccatcaacgacaccgccgccagactgagctaccagaacgacccccccttcggcagctacgtggtgcccatcaccgtgagagacagactgggcatgagcagcgtgaccagcctggacgtgaccctgtgcgactgcatcaccgagaacgactgcacccacagagtggaccccagaatcggcggcggcggcgtgcagctgggcaagtgggccatcctggccatcctgctgggcatcgccctgctgttctgcatcctgttcaccctggtgtgcggcgccagcggcaccagcaagcagcccaaggtgatccccgacgacctggcccagcagaacctgatcgtgagcaacaccgaggcccccggcgacgacaaggtgtacagcgccaacggcttcaccacccagaccgtgggcgccagcgcccagggcgtgtgcggcaccgtgggcagcggcatcaagaacggcggccaggagaccatcgagatggtgaagggcggccaccagaccagcgagagctgcagaggcgccggccaccaccacaccctggacagctgcagaggcggccacaccgaggtggacaactgcagatacacctacagcgagtggcacagcttcacccagcccagactgggcgagaaggtgtacctgtgcaaccaggacgagaaccacaagcacgcccaggactacgtgctgacctacaactacgagggcagaggcagcgtggccggcagcgtgggctgctgcagcgagagacaggaggaggacggcctggagttcctggacaacctggagcccaagttcagaaccctggccgaggcctgcatgaagagatag

SEQ ID NO: 10403 - DNA, 2004 bp, synthetic construct
  misc_feature 1..2004: note = Description of Artificial Sequence: Synthetic coding sequence
  source 1..2004: mol_type = other DNA
atgaagatgatcaccacccagttcctgcagaagaagctgatcctgctgcagttcctgaagatcgccgagtggggcaccaccgtgggccaggtgtgcgccaccgacaaggacgagcccgacaccatgcacaccagactgaagtacagcatcatcggccaggtgccccccagccccaccctgttcagcatgcaccccaccaccggcgtgatcaccaccaccagcagccagctggacagagagctgatcgacaagtaccagctgaagatcaaggtgcaggacatggacggccagtacttcggcctgcagaccaccagcacctgcatcatcaacatcgacgacgtgaacgaccacctgcccaccttcaccagaaccagctacgtgaccagcgtggaggagaacaccgtggacgtggagatcctgagagtgaccgtggaggacaaggacctggtgaacaccgccaactggagagccaactacaccatcctgaagggcaacgagaacggcaacttcaagatcgtgaccgacgccaagaccaacgagggcgtgctgtgcgtggtgaagcccctgaactacgaggagaagcagcagatgatcctgcagatcggcgtggtgaacgaggcccccttcagcagagaggccagccccagaagcgccatgagcaccgccaccgtgaccgtgaacgtggaggaccaggacgagggccccgagtgcaacccccccatccagaccgtgagaatgaaggagaacgccgaggtgggcaccaccagcaacggctacaaggcctacgaccccgagaccagaagcagcagcggcatcagatacaagaagctgaccgaccccaccggctgggtgaccatcgacgagaacaccggcagcatcaaggtgttcagaagcctggacagagaggccgagaccatcaagaacggcatctacaacatcaccgtgctggccagcgaccagggcggcagaacctgcaccggcaccctgggcatcatcctgcaggacgtgaacgacaacagccccttcatccccaagaagaccgtgatcatctgcaagcccaccatgagcagcgccgagatcgtggccgtggaccccgacgagcccatccacggcccccccttcgacttcagcctggagagcagcaccagcgaggtgcagagaatgtggagactgaaggccatcaacgacaccgccgccagactgagctaccagaacgacccccccttcggcagctacgtggtgcccatcaccgtgagagacagactgggcatgagcagcgtgaccagcctggacgtgaccctgtgcgactgcatcaccgagaacgactgcacccacagagtggaccccagaatcggcggcggcggcgtgcagctgggcaagtgggccatcctggccatcctgctgggcatcgccctgctgttctgcatcctgttcaccctggtgtgcggcgccagcggcaccagcaagcagcccaaggtgatccccgacgacctggcccagcagaacctgatcgtgagcaacaccgaggcccccggcgacgacaaggtgtacagcgccaacggcttcaccacccagaccgtgggcgccagcgcccagggcgtgtgcggcaccgtgggcagcggcatcaagaacggcggccaggagaccatcgagatggtgaagggcggccaccagaccagcgagagctgcagaggcgccggccaccaccacaccctggacagctgcagaggcggccacaccgaggtggacaactgcagatacacctacagcgagtggcacagcttcacccagcccagactgggcgagaaggtgtacctgtgcaaccaggacgagaaccacaagcacgcccaggactacgtgctgacctacaactacgagggcagaggcagcgtggccggcagcgtgggctgctgcagcgagagacaggaggaggacggcctggagttcctggacaacctggagcccaagttcagaaccctggccgaggcctgcatgaagagatag

SEQ ID NO: 10404 - DNA, 3000 bp, synthetic construct
  misc_feature 1..3000: note = Description of Artificial Sequence: Synthetic coding sequence
  source 1..3000: mol_type = other DNA
atgatgggcctgttccccagaaccaccggcgccctggccatcttcgtggtggtgatcctggtgcacggcgagctgagaatcgagaccaagggccagtacgacgaggaggagatgaccatgcagcaggccaagagaagacagaagagagagtgggtgaagttcgccaagccctgcagagagggcgaggacaacagcaagagaaaccccatcgccaagatcaccagcgactaccaggccacccagaagatcacctacagaatcagcggcgtgggcatcgaccagccccccttcggcatcttcgtggtggacaagaacaccggcgacatcaacatcaccgccatcgtggacagagaggagacccccagcttcctgatcacctgcagagccctgaacgcccagggcctggacgtggagaagcccctgatcctgaccgtgaagatcctggacatcaacgacaacccccccgtgttcagccagcagatcttcatgggcgagatcgaggagaacagcgccagcaacagcctggtgatgatcctgaacgccaccgacgccgacgagcccaaccacctgaacagcaagatcgccttcaagatcgtgagccaggagcccgccggcacccccatgttcctgctgagcagaaacaccggcgaggtgagaaccctgaccaacagcctggacagagagcaggccagcagctacagactggtggtgagcggcgccgacaaggacggcgagggcctgagcacccagtgcgagtgcaacatcaaggtgaaggacgtgaacgacaacttccccatgttcagagacagccagtacagcgccagaatcgaggagaacatcctgagcagcgagctgctgagattccaggtgaccgacctggacgaggagtacaccgacaactggctggccgtgtacttcttcaccagcggcaacgagggcaactggttcgagatccagaccgaccccagaaccaacgagggcatcctgaaggtggtgaaggccctggactacgagcagctgcagagcgtgaagctgagcatcgccgtgaagaacaaggccgagttccaccagagcgtgatcagcagatacagagtgcagagcacccccgtgaccatccaggtgatcaacgtgagagagggcatcgccttcagacccgccagcaagaccttcaccgtgcagaagggcatcagcagcaagaagctggtggactacatcctgggcacctaccaggccatcgacgaggacaccaacaaggccgccagcaacgtgaagtacgtgatgggcagaaacgacggcggctacctgatgatcgacagcaagaccgccgagatcaagttcgtgaagaacatgaacagagacagcaccttcatcgtgaacaagaccatcaccgccgaggtgctggccatcgacgagtacaccggcaagaccagcaccggcaccgtgtacgtgagagtgcccgacttcaacgacaactgccccaccgccgtgctggagaaggacgccgtgtgcagcagcagccccagcgtggtggtgagcgccagaaccctgaacaacagatacaccggcccctacaccttcgccctggaggaccagcccgtgaagctgcccgccgtgtggagcatcaccaccctgaacgccaccagcgccctgctgagagcccaggagcagatcccccccggcgtgtaccacatcagcctggtgctgaccgacagccagaacaacagatgcgagatgcccagaagcctgaccctggaggtgtgccagtgcgacaacagaggcatctgcggcaccagctaccccaccaccagccccggcaccagatacggcagaccccacagcggcagactgggccccgccgccatcggcctgctgctgctgggcctgctgctgctgctgctggcccccctgctgctgctgacctgcgactgcggcgccggcagcaccggcggcgtgaccggcggcttcatccccgtgcccgacggcagcgagggcaccatccaccagtggggcatcgagggcgcccaccccgaggacaaggagatcaccaacatctgcgtgccccccgtgaccgccaacggcgccgacttcatggagagcagcgaggtgtgcaccaacacctacgccagaggcaccgccgtggagggcaccagcggcatggagatgaccaccaagctgggcgccgccaccgagagcggcggcgccgccggcttcgccaccggcaccgtgagcggcgccgccagcggcttcggcgccgccaccggcgtgggcatctgcagcagcggccagagcggcaccatgagaaccagacacagcaccggcggcaccaacaaggactacgccgacggcgccatcagcatgaacttcctggacagctacttcagccagaaggccttcgcctgcgccgaggaggacgacggccaggaggccaacgactgcctgctgatctacgacaacgagggcgccgacgccaccggcagccccgtgggcagcgtgggctgctgcagcttcatcgccgacgacctggacgacagcttcctggacagcctgggccccaagttcaagaagctggccgagatcagcctgggcgtggacggcgagggcaaggaggtgcagccccccagcaaggacagcggctacggcatcgagagctgcggccaccccatcgaggtgcagcagaccggcttcgtgaagtgccagaccctgagcggcagccagggcgccagcgccctgagcaccagcggcagcgtgcagcccgccgtgagcatccccgaccccctgcagcacggcaactacctggtgaccgagacctacagcgccagcggcagcctggtgcagcccagcaccgccggcttcgaccccctgctgacccagaacgtgatcgtgaccgagagagtgatctgccccatcagcagcgtgcccggcaacctggccggccccacccagctgagaggcagccacaccatgctgtgcaccgaggacccctgcagcagactgatctag

SEQ ID NO: 10405 - DNA, 8616 bp, synthetic construct
  misc_feature 1..8616: note = Description of Artificial Sequence: Synthetic coding sequence
  source 1..8616: mol_type = other DNA
atgagctgcaacggcggcagccaccccagaatcaacaccctgggcagaatgatcagagccgagagcggccccgacctgagatacgaggtgaccagcggcggcggcggcaccagcagaatgtactacagcagaagaggcgtgatcaccgaccagaacagcgacggctactgccagaccggcaccatgagcagacaccagaaccagaacaccatccaggagctgctgcagaactgcagcgactgcctgatgagagccgagctgatcgtgcagcccgagctgaagtacggcgacggcatccagctgaccagaagcagagagctggacgagtgcttcgcccaggccaacgaccagatggagatcctggacagcctgatcagagagatgagacagatgggccagccctgcgacgcctaccagaagagactgctgcagctgcaggagcagatgagagccctgtacaaggccatcagcgtgcccagagtgagaagagccagcagcaagggcggcggcggctacacctgccagagcggcagcggctgggacgagttcaccaagcacgtgaccagcgagtgcctgggctggatgagacagcagagagccgagatggacatggtggcctggggcgtggacctggccagcgtggagcagcacatcaacagccacagaggcatccacaacagcatcggcgactacagatggcagctggacaagatcaaggccgacctgagagagaagagcgccatctaccagctggaggaggagtacgagaacctgctgaaggccagcttcgagagaatggaccacctgagacagctgcagaacatcatccaggccaccagcagagagatcatgtggatcaacgactgcgaggaggaggagctgctgtacgactggagcgacaagaacaccaacatcgcccagaagcaggaggccttcagcatcagaatgagccagctggaggtgaaggagaaggagctgaacaagctgaagcaggagagcgaccagctggtgctgaaccagcaccccgccagcgacaagatcgaggcctacatggacaccctgcagacccagtggagctggatcctgcagatcaccaagtgcatcgacgtgcacctgaaggagaacgccgcctacttccagttcttcgaggaggcccagagcaccgaggcctacctgaagggcctgcaggacagcatcagaaagaagtacccctgcgacaagaacatgcccctgcagcacctgctggagcagatcaaggagctggagaaggagagagagaagatcctggagtacaagagacaggtgcagaacctggtgaacaagagcaagaagatcgtgcagctgaagcccagaaaccccgactacagaagcaacaagcccatcatcctgagagccctgtgcgactacaagcaggaccagaagatcgtgcacaagggcgacgagtgcatcctgaaggacaacaacgagagaagcaagtggtacgtgaccggccccggcggcgtggacatgctggtgcccagcgtgggcctgatcatccccccccccaaccccctggccgtggacctgagctgcaagatcgagcagtactacgaggccatcctggccctgtggaaccagctgtacatcaacatgaagagcctggtgagctggcactactgcatgatcgacatcgagaagatcagagccatgaccatcgccaagctgaagaccatgagacaggaggactacatgaagaccatcgccgacctggagctgcactaccaggagttcatcagaaacagccagggcagcgagatgttcggcgacgacgacaagagaaagatccagagccagttcaccgacgcccagaagcactaccagaccctggtgatccagctgcccggctacccccagcaccagaccgtgaccaccaccgagatcacccaccacggcacctgccaggacgtgaaccacaacaaggtgatcgagaccaacagagagaacgacaagcaggagacctggatgctgatggagctgcagaagatcagaagacagatcgagcactgcgagggcagaatgaccctgaagaacctgcccctggccgaccagggcagcagccaccacatcaccgtgaagatcaacgagctgaagagcgtgcagaacgacagccaggccatcgccgaggtgctgaaccagctgaaggacatgctggccaacttcagaggcagcgagaagtactgctacctgcagaacgaggtgttcggcctgttccagaagctggagaacatcaacggcgtgaccgacggctacctgaacagcctgtgcaccgtgagagccctgctgcaggccatcctgcagaccgaggacatgctgaaggtgtacgaggccagactgaccgaggaggagaccgtgtgcctggacctggacaaggtggaggcctacagatgcggcctgaagaagatcaagaacgacctgaacctgaagaagagcctgctggccaccatgaagaccgagctgcagaaggcccagcagatccacagccagaccagccagcagtaccccctgtacgacctggacctgggcaagttcggcgagaaggtgacccagctgaccgacagatggcagagaatcgacaagcagatcgacttcagactgtgggacctggagaagcagatcaagcagctgagaaactacagagacaactaccaggccttctgcaagtggctgtacgacgccaagagaagacaggacagcctggagagcatgaagttcggcgacagcaacaccgtgatgagattcctgaacgagcagaagaacctgcacagcgagatcagcggcaagagagacaagagcgaggaggtgcagaagatcgccgagctgtgcgccaacagcatcaaggactacgagctgcagctggccagctacaccagcggcctggagaccctgctgaacatccccatcaagagaaccatgatccagagccccagcggcgtgatcctgcaggaggccgccgacgtgcacgccagatacatcgagctgctgaccagaagcggcgactactacagattcctgagcgagatgctgaagagcctggaggacctgaagctgaagaacaccaagatcgaggtgctggaggaggagctgagactggccagagacgccaacagcgagaactgcaacaagaacaagttcctggaccagaacctgcagaagtaccaggccgagtgcagccagttcaaggccaagctggccagcctggaggagctgaagagacaggccgagctggacggcaagagcgccaagcagaacctggacaagtgctacggccagatcaaggagctgaacgagaagatcaccagactgacctacgagatcgaggacgagaagagaagaagaaagagcgtggaggacagattcgaccagcagaagaacgactacgaccagctgcagaaggccagacagtgcgagaaggagaacctgggctggcagaagctggagagcgagaaggccatcaaggagaaggagtacgagatcgagagactgagagtgctgctgcaggaggagggcaccagaaagagagagtacgagaacgagctggccaaggtgagaaaccactacaacgaggagatgagcaacctgagaaacaagtacgagaccgagatcaacatcaccaagaccaccatcaaggagatcagcatgcagaaggaggacgacagcaagaacctgagaaaccagctggacagactgagcagagagaacagagacctgaaggacgagatcgtgagactgaacgacagcatcctgcaggccaccgagcagagaagaagagccgaggagaacgccctgcagcagaaggcctgcggcagcgagatcatgcagaagaagcagcacctggagatcgagctgaagcaggtgatgcagcagagaagcgaggacaacgccagacacaagcagagcctggaggaggccgccaagaccatccaggacaagaacaaggagatcgagagactgaaggccgagttccaggaggaggccaagagaagatgggagtacgagaacgagctgagcaaggtgagaaacaactacgacgaggagatcatcagcctgaagaaccagttcgagaccgagatcaacatcaccaagaccaccatccaccagctgaccatgcagaaggaggaggacaccagcggctacagagcccagatcgacaacctgaccagagagaacagaagcctgagcgaggagatcaagagactgaagaacaccctgacccagaccaccgagaacctgagaagagtggaggaggacatccagcagcagaaggccaccggcagcgaggtgagccagagaaagcagcagctggaggtggagctgagacaggtgacccagatgagaaccgaggagagcgtgagatacaagcagagcctggacgacgccgccaagaccatccaggacaagaacaaggagatcgagagactgaagcagctgatcgacaaggagaccaacgacagaaagtgcctggaggacgagaacgccagactgcagagagtgcagtacgacctgcagaaggccaacagcagcgccaccgagaccatcaacaagctgaaggtgcaggagcaggagctgaccagactgagaatcgactacgagagagtgagccaggagagaaccgtgaaggaccaggacatcaccagattccagaacagcctgaaggagctgcagctgcagaagcagaaggtggaggaggagctgaacagactgaagagaaccgccagcgaggacagctgcaagagaaagaagctggaggaggagctggagggcatgagaagaagcctgaaggagcaggccatcaagatcaccaacctgacccagcagctggagcaggccagcatcgtgaagaagagaagcgaggacgacctgagacagcagagagacgtgctggacggccacctgagagagaagcagagaacccaggaggagctgagaagactgagcagcgaggtggaggccctgagaagacagctgctgcaggagcaggagagcgtgaagcaggcccacctgagaaacgagcacttccagaaggccatcgaggacaagagcagaagcctgaacgagagcaagatcgagatcgagagactgcagagcctgaccgagaacctgaccaaggagcacctgatgctggaggaggagctgagaaacctgagactggagtacgacgacctgagaagaggcagaagcgaggccgacagcgacaagaacgccaccatcctggagctgagaagccagctgcagatcagcaacaacagaaccctggagctgcagggcctgatcaacgacctgcagagagagagagagaacctgagacaggagatcgagaagttccagaagcaggccctggaggccagcaacagaatccaggagagcaagaaccagtgcacccaggtggtgcaggagagagagagcctgctggtgaagatcaaggtgctggagcaggacaaggccagactgcagagactggaggacgagctgaacagagccaagagcaccctggaggccgagaccagagtgaagcagagactggagtgcgagaagcagcagatccagaacgacctgaaccagtggaagacccagtacagcagaaaggaggaggccatcagaaagatcgagagcgagagagagaagagcgagagagagaagaacagcctgagaagcgagatcgagagactgcaggccgagatcaagagaatcgaggagagatgcagaagaaagctggaggacagcaccagagagacccagagccagctggagaccgagagaagcagataccagagagagatcgacaagctgagacagagaccctacggcagccacagagagacccagaccgagtgcgagtggaccgtggacaccagcaagctggtgttcgacggcctgagaaagaaggtgaccgccatgcagctgtacgagtgccagctgatcgacaagaccaccctggacaagctgctgaagggcaagaagagcgtggaggaggtggccagcgagatccagcccttcctgagaggcgccggcagcatcgccggcgccagcgccagccccaaggagaagtacagcctggtggaggccaagagaaagaagctgatcagccccgagagcaccgtgatgctgctggaggcccaggccgccaccggcggcatcatcgacccccacagaaacgagaagctgaccgtggacagcgccatcgccagagacctgatcgacttcgacgacagacagcagatctacgccgccgagaaggccatcaccggcttcgacgaccccttcagcggcaagaccgtgagcgtgagcgaggccatcaagaagaacctgatcgacagagagaccggcatgagactgctggaggcccagatcgccagcggcggcgtggtggaccccgtgaacagcgtgttcctgcccaaggacgtggccctggccagaggcctgatcgacagagacctgtacagaagcctgaacgaccccagagacagccagaagaacttcgtggaccccgtgaccaagaagaaggtgagctacgtgcagctgaaggagagatgcagaatcgagccccacaccggcctgctgctgctgagcgtgcagaagagaagcatgagcttccagggcatcagacagcccgtgaccgtgaccgagctggtggacagcggcatcctgagacccagcaccgtgaacgagctggagagcggccagatcagctacgacgaggtgggcgagagaatcaaggacttcctgcagggcagcagctgcatcgccggcatctacaacgagaccaccaagcagaagctgggcatctacgaggccatgaagatcggcctggtgagacccggcaccgccctggagctgctggaggcccaggccgccaccggcttcatcgtggaccccgtgagcaacctgagactgcccgtggaggaggcctacaagagaggcctggtgggcatcgagttcaaggagaagctgctgagcgccgagagagccgtgaccggctacaacgaccccgagaccggcaacatcatcagcctgttccaggccatgaacaaggagctgatcgagaagggccacggcatcagactgctggaggcccagatcgccaccggcggcatcatcgaccccaaggagagccacagactgcccgtggacatcgcctacaagagaggctacttcaacgaggagctgagcgagatcctgagcgaccccagcgacgacaccaagggcttcttcgaccccaacaccgaggagaacctgacctacctgcagctgaaggagagatgcatcaaggacgaggagaccggcctgtgcctgctgcccctgaaggagaagaagaagcaggtgcagaccagccagaagaacaccctgagaaagagaagagtggtgatcgtggaccccgagaccaacaaggagatgagcgtgcaggaggcctacaagaagggcctgatcgactacgagaccttcaaggagctgtgcgagcaggagtgcgagtgggaggagatcaccatcaccggcagcgacggcagcaccagagtggtgctggtggacagaaagaccggcagccagtacgacatccaggacgccatcgacaagggcctggtggacagaaagttcttcgaccagtacagaagcggcagcctgagcctgacccagttcgccgacatgatcagcctgaagaacggcgtgggcaccagcagcagcatgggcagcggcgtgagcgacgacgtgttcagcagcagcagacacgagagcgtgagcaagatcagcaccatcagcagcgtgagaaacctgaccatcagaagcagcagcttcagcgacaccctggaggagagcagccccatcgccgccatcttcgacaccgagaacctggagaagatcagcatcaccgagggcatcgagagaggcatcgtggacagcatcaccggccagagactgctggaggcccaggcctgcaccggcggcatcatccaccccaccaccggccagaagctgagcctgcaggacgccgtgagccagggcgtgatcgaccaggacatggccaccagactgaagcccgcccagaaggccttcatcggcttcgagggcgtgaagggcaagaagaagatgagcgccgccgaggccgtgaaggagaagtggctgccctacgaggccggccagagattcctggagttccagtacctgaccggcggcctggtggaccccgaggtgcacggcagaatcagcaccgaggaggccatcagaaagggcttcatcgacggcagagccgcccagagactgcaggacaccagcagctacgccaagatcctgacctgccccaagaccaagctgaagatcagctacaaggacgccatcaacagaagcatggtggaggacatcaccggcctgagactgctggaggccgccagcgtgagcagcaagggcctgcccagcccctacaacatgagcagcgcccccggcagcagaagcggcagcagaagcggcagcagaagcggcagcagaagcggcagcagaagcggcagcagaagaggcagcttcgacgccaccggcaacagcagctacagctacagctacagcttcagcagcagcagcatcggccactag

SEQ ID NO: 10406 - DNA, 2862 bp, synthetic construct
  misc_feature 1..2862: note = Description of Artificial Sequence: Synthetic coding sequence
  source 1..2862: mol_type = other DNA
cagcagcagagagccgagatggacatggtggcctggggcgtggacctggccagcgtggagcagcacatcaacagccacagaggcatccacaacagcatcggcgactacagatggcagctggacaagatcaaggccgacctgagagagaagagcgccatctaccagctggaggaggagtacgagaacctgctgaaggccagcttcgagagaatggaccacctgagacagctgcagaacatcatccaggccaccagcagagagatcatgtggatcaacgactgcgaggaggaggagctgctgtacgactggagcgacaagaacaccaacatcgcccagaagcaggaggccttcagcatcagaatgagccagctggaggtgaaggagaaggagctgaacaagctgaagcaggagagcgaccagctggtgctgaaccagcaccccgccagcgacaagatcgaggcctacatggacaccctgcagacccagtggagctggatcctgcagatcaccaagtgcatcgacgtgcacctgaaggagaacgccgcctacttccagttcttcgaggaggcccagagcaccgaggcctacctgaagggcctgcaggacagcatcagaaagaagtacccctgcgacaagaacatgcccctgcagcacctgctggagcagatcaaggagctggagaaggagagagagaagatcctggagtacaagagacaggtgcagaacctggtgaacaagagcaagaagatcgtgcagctgaagcccagaaaccccgactacagaagcaacaagcccatcatcctgagagccctgtgcgactacaagcaggaccagaagatcgtgcacaagggcgacgagtgcatcctgaaggacaacaacgagagaagcaagtggtacgtgaccggccccggcggcgtggacatgctggtgcccagcgtgggcctgatcatccccccccccaaccccctggccgtggacctgagctgcaagatcgagcagtactacgaggccatcctggccctgtggaaccagctgtacatcaacatgaagagcctggtgagctggcactactgcatgatcgacatcgagaagatcagagccatgaccatcgccaagctgaagaccatgagacaggaggactacatgaagaccatcgccgacctggagctgcactaccaggagttcatcagaaacagccagggcagcgagatgttcggcgacgacgacaagagaaagatccagagccagttcaccgacgcccagaagcactaccagaccctggtgatccagctgcccggctacccccagcaccagaccgtgaccaccaccgagatcacccaccacggcacctgccaggacgtgaaccacaacaaggtgatcgagaccaacagagagaacgacaagcaggagacctggatgctgatggagctgcagaagatcagaagacagatcgagcactgcgagggcagaatgaccctgaagaacctgcccctggccgaccagggcagcagccaccacatcaccgtgaagatcaacgagctgaagagcgtgcagaacgacagccaggccatcgccgaggtgctgaaccagctgaaggacatgctggccaacttcagaggcagcgagaagtactgctacctgcagaacgaggtgttcggcctgttccagaagctggagaacatcaacggcgtgaccgacggctacctgaacagcctgtgcaccgtgagagccctgctgcaggccatcctgcagaccgaggacatgctgaaggtgtacgaggccagactgaccgaggaggagaccgtgtgcctggacctggacaaggtggaggcctacagatgcggcctgaagaagatcaagaacgacctgaacctgaagaagagcctgctggccaccatgaagaccgagctgcagaaggcccagcagatccacagccagaccagccagcagtaccccctgtacgacctggacctgggcaagttcggcgagaaggtgacccagctgaccgacagatggcagagaatcgacaagcagatcgacttcagactgtgggacctggagaagcagatcaagcagctgagaaactacagagacaactaccaggccttctgcaagtggctgtacgacgccaagagaagacaggacagcctggagagcatgaagttcggcgacagcaacaccgtgatgagattcctgaacgagcagaagaacctgcacagcgagatcagcggcaagagagacaagagcgaggaggtgcagaagatcgccgagctgtgcgccaacagcatcaaggactacgagctgcagctggccagctacaccagcggcctggagaccctgctgaacatccccatcaagagaaccatgatccagagccccagcggcgtgatcctgcaggaggccgccgacgtgcacgccagatacatcgagctgctgaccagaagcggcgactactacagattcctgagcgagatgctgaagagcctggaggacctgaagctgaagaacaccaagatcgaggtgctggaggaggagctgagactggccagagacgccaacagcgagaactgcaacaagaacaagttcctggaccagaacctgcagaagtaccaggccgagtgcagccagttcaaggccaagctggccagcctggaggagctgaagagacaggccgagctggacggcaagagcgccaagcagaacctggacaagtgctacggccagatcaaggagctgaacgagaagatcaccagactgacctacgagatcgaggacgagaagagaagaagaaagagcgtggaggacagattcgaccagcagaagaacgactacgaccagctgcagaaggccagacagtgctag

SEQ ID NO: 10407 - DNA, 6819 bp, synthetic construct
  misc_feature 1..6819: note = Description of Artificial Sequence: Synthetic coding sequence
  source 1..6819: mol_type = other DNA
atgagctgcaacggcggcagccaccccagaatcaacaccctgggcagaatgatcagagccgagagcggccccgacctgagatacgaggtgaccagcggcggcggcggcaccagcagaatgtactacagcagaagaggcgtgatcaccgaccagaacagcgacggctactgccagaccggcaccatgagcagacaccagaaccagaacaccatccaggagctgctgcagaactgcagcgactgcctgatgagagccgagctgatcgtgcagcccgagctgaagtacggcgacggcatccagctgaccagaagcagagagctggacgagtgcttcgcccaggccaacgaccagatggagatcctggacagcctgatcagagagatgagacagatgggccagccctgcgacgcctaccagaagagactgctgcagctgcaggagcagatgagagccctgtacaaggccatcagcgtgcccagagtgagaagagccagcagcaagggcggcggcggctacacctgccagagcggcagcggctgggacgagttcaccaagcacgtgaccagcgagtgcctgggctggatgagacagcagagagccgagatggacatggtggcctggggcgtggacctggccagcgtggagcagcacatcaacagccacagaggcatccacaacagcatcggcgactacagatggcagctggacaagatcaaggccgacctgagagagaagagcgccatctaccagctggaggaggagtacgagaacctgctgaaggccagcttcgagagaatggaccacctgagacagctgcagaacatcatccaggccaccagcagagagatcatgtggatcaacgactgcgaggaggaggagctgctgtacgactggagcgacaagaacaccaacatcgcccagaagcaggaggccttcagcatcagaatgagccagctggaggtgaaggagaaggagctgaacaagctgaagcaggagagcgaccagctggtgctgaaccagcaccccgccagcgacaagatcgaggcctacatggacaccctgcagacccagtggagctggatcctgcagatcaccaagtgcatcgacgtgcacctgaaggagaacgccgcctacttccagttcttcgaggaggcccagagcaccgaggcctacctgaagggcctgcaggacagcatcagaaagaagtacccctgcgacaagaacatgcccctgcagcacctgctggagcagatcaaggagctggagaaggagagagagaagatcctggagtacaagagacaggtgcagaacctggtgaacaagagcaagaagatcgtgcagctgaagcccagaaaccccgactacagaagcaacaagcccatcatcctgagagccctgtgcgactacaagcaggaccagaagatcgtgcacaagggcgacgagtgcatcctgaaggacaacaacgagagaagcaagtggtacgtgaccggccccggcggcgtggacatgctggtgcccagcgtgggcctgatcatccccccccccaaccccctggccgtggacctgagctgcaagatcgagcagtactacgaggccatcctggccctgtggaaccagctgtacatcaacatgaagagcctggtgagctggcactactgcatgatcgacatcgagaagatcagagccatgaccatcgccaagctgaagaccatgagacaggaggactacatgaagaccatcgccgacctggagctgcactaccaggagttcatcagaaacagccagggcagcgagatgttcggcgacgacgacaagagaaagatccagagccagttcaccgacgcccagaagcactaccagaccctggtgatccagctgcccggctacccccagcaccagaccgtgaccaccaccgagatcacccaccacggcacctgccaggacgtgaaccacaacaaggtgatcgagaccaacagagagaacgacaagcaggagacctggatgctgatggagctgcagaagatcagaagacagatcgagcactgcgagggcagaatgaccctgaagaacctgcccctggccgaccagggcagcagccaccacatcaccgtgaagatcaacgagctgaagagcgtgcagaacgacagccaggccatcgccgaggtgctgaaccagctgaaggacatgctggccaacttcagaggcagcgagaagtactgctacctgcagaacgaggtgttcggcctgttccagaagctggagaacatcaacggcgtgaccgacggctacctgaacagcctgtgcaccgtgagagccctgctgcaggccatcctgcagaccgaggacatgctgaaggtgtacgaggccagactgaccgaggaggagaccgtgtgcctggacctggacaaggtggaggcctacagatgcggcctgaagaagatcaagaacgacctgaacctgaagaagagcctgctggccaccatgaagaccgagctgcagaaggcccagcagatccacagccagaccagccagcagtaccccctgtacgacctggacctgggcaagttcggcgagaaggtgacccagctgaccgacagatggcagagaatcgacaagcagatcgacttcagactgtgggacctggagaagcagatcaagcagctgagaaactacagagacaactaccaggccttctgcaagtggctgtacgacgccaagagaagacaggacagcctggagagcatgaagttcggcgacagcaacaccgtgatgagattcctgaacgagcagaagaacctgcacagcgagatcagcggcaagagagacaagagcgaggaggtgcagaagatcgccgagctgtgcgccaacagcatcaaggactacgagctgcagctggccagctacaccagcggcctggagaccctgctgaacatccccatcaagagaaccatgatccagagccccagcggcgtgatcctgcaggaggccgccgacgtgcacgccagatacatcgagctgctgaccagaagcggcgactactacagattcctgagcgagatgctgaagagcctggaggacctgaagctgaagaacaccaagatcgaggtgctggaggaggagctgagactggccagagacgccaacagcgagaactgcaacaagaacaagttcctggaccagaacctgcagaagtaccaggccgagtgcagccagttcaaggccaagctggccagcctggaggagctgaagagacaggccgagctggacggcaagagcgccaagcagaacctggacaagtgctacggccagatcaaggagctgaacgagaagatcaccagactgacctacgagatcgaggacgagaagagaagaagaaagagcgtggaggacagattcgaccagcagaagaacgactacgaccagctgcagaaggccagacagtgcgagaaggagaacctgggctggcagaagctggagagcgagaaggccatcaaggagaaggagtacgagatcgagagactgagagtgctgctgcaggaggagggcaccagaaagagagagtacgagaacgagctggccaaggccagcaacagaatccaggagagcaagaaccagtgcacccaggtggtgcaggagagagagagcctgctggtgaagatcaaggtgctggagcaggacaaggccagactgcagagactggaggacgagctgaacagagccaagagcaccctggaggccgagaccagagtgaagcagagactggagtgcgagaagcagcagatccagaacgacctgaaccagtggaagacccagtacagcagaaaggaggaggccatcagaaagatcgagagcgagagagagaagagcgagagagagaagaacagcctgagaagcgagatcgagagactgcaggccgagatcaagagaatcgaggagagatgcagaagaaagctggaggacagcaccagagagacccagagccagctggagaccgagagaagcagataccagagagagatcgacaagctgagacagagaccctacggcagccacagagagacccagaccgagtgcgagtggaccgtggacaccagcaagctggtgttcgacggcctgagaaagaaggtgaccgccatgcagctgtacgagtgccagctgatcgacaagaccaccctggacaagctgctgaagggcaagaagagcgtggaggaggtggccagcgagatccagcccttcctgagaggcgccggcagcatcgccggcgccagcgccagccccaaggagaagtacagcctggtggaggccaagagaaagaagctgatcagccccgagagcaccgtgatgctgctggaggcccaggccgccaccggcggcatcatcgacccccacagaaacgagaagctgaccgtggacagcgccatcgccagagacctgatcgacttcgacgacagacagcagatctacgccgccgagaaggccatcaccggcttcgacgaccccttcagcggcaagaccgtgagcgtgagcgaggccatcaagaagaacctgatcgacagagagaccggcatgagactgctggaggcccagatcgccagcggcggcgtggtggaccccgtgaacagcgtgttcctgcccaaggacgtggccctggccagaggcctgatcgacagagacctgtacagaagcctgaacgaccccagagacagccagaagaacttcgtggaccccgtgaccaagaagaaggtgagctacgtgcagctgaaggagagatgcagaatcgagccccacaccggcctgctgctgctgagcgtgcagaagagaagcatgagcttccagggcatcagacagcccgtgaccgtgaccgagctggtggacagcggcatcctgagacccagcaccgtgaacgagctggagagcggccagatcagctacgacgaggtgggcgagagaatcaaggacttcctgcagggcagcagctgcatcgccggcatctacaacgagaccaccaagcagaagctgggcatctacgaggccatgaagatcggcctggtgagacccggcaccgccctggagctgctggaggcccaggccgccaccggcttcatcgtggaccccgtgagcaacctgagactgcccgtggaggaggcctacaagagaggcctggtgggcatcgagttcaaggagaagctgctgagcgccgagagagccgtgaccggctacaacgaccccgagaccggcaacatcatcagcctgttccaggccatgaacaaggagctgatcgagaagggccacggcatcagactgctggaggcccagatcgccaccggcggcatcatcgaccccaaggagagccacagactgcccgtggacatcgcctacaagagaggctacttcaacgaggagctgagcgagatcctgagcgaccccagcgacgacaccaagggcttcttcgaccccaacaccgaggagaacctgacctacctgcagctgaaggagagatgcatcaaggacgaggagaccggcctgtgcctgctgcccctgaaggagaagaagaagcaggtgcagaccagccagaagaacaccctgagaaagagaagagtggtgatcgtggaccccgagaccaacaaggagatgagcgtgcaggaggcctacaagaagggcctgatcgactacgagaccttcaaggagctgtgcgagcaggagtgcgagtgggaggagatcaccatcaccggcagcgacggcagcaccagagtggtgctggtggacagaaagaccggcagccagtacgacatccaggacgccatcgacaagggcctggtggacagaaagttcttcgaccagtacagaagcggcagcctgagcctgacccagttcgccgacatgatcagcctgaagaacggcgtgggcaccagcagcagcatgggcagcggcgtgagcgacgacgtgttcagcagcagcagacacgagagcgtgagcaagatcagcaccatcagcagcgtgagaaacctgaccatcagaagcagcagcttcagcgacaccctggaggagagcagccccatcgccgccatcttcgacaccgagaacctggagaagatcagcatcaccgagggcatcgagagaggcatcgtggacagcatcaccggccagagactgctggaggcccaggcctgcaccggcggcatcatccaccccaccaccggccagaagctgagcctgcaggacgccgtgagccagggcgtgatcgaccaggacatggccaccagactgaagcccgcccagaaggccttcatcggcttcgagggcgtgaagggcaagaagaagatgagcgccgccgaggccgtgaaggagaagtggctgccctacgaggccggccagagattcctggagttccagtacctgaccggcggcctggtggaccccgaggtgcacggcagaatcagcaccgaggaggccatcagaaagggcttcatcgacggcagagccgcccagagactgcaggacaccagcagctacgccaagatcctgacctgccccaagaccaagctgaagatcagctacaaggacgccatcaacagaagcatggtggaggacatcaccggcctgagactgctggaggccgccagcgtgagcagcaagggcctgcccagcccctacaacatgagcagcgcccccggcagcagaagcggcagcagaagcggcagcagaagcggcagcagaagcggcagcagaagcggcagcagaagaggcagcttcgacgccaccggcaacagcagctacagctacagctacagcttcagcagcagcagcatcggccactag

SEQ ID NO: 10408 - DNA, 507 bp, synthetic construct
  misc_feature 1..507: note = Description of Artificial Sequence: Synthetic coding sequence
  source 1..507: mol_type = other DNA
atggagccccccaacctgtaccccgtgaagctgtacgtgtacgacctgagcaagggcctggccagaagactgagccccatcatgctgggcaagcagctggagggcatctggcacaccagcatcgtggtgcacaaggacgagttcttcttcggcagcggcggcatcagcagctgcccccccggcggcaccctgctgggcccccccgacagcgtggtggacgtgggcagcaccgaggtgaccgaggagatcttcctggagtacctgagcagcctgggcgagagcctgttcagaggcgaggcctacaacctgttcgagcacaactgcaacaccttcagcaacgaggtggcccagttcctgaccggcagaaagatccccagctacatcaccgacctgcccagcgaggtgctgagcacccccttcggccaggccctgagacccctgctggacagcatccagatccagccccccggcggcagcagcgtgggcagacccaacggccagagctag

SEQ ID NO: 10409 - DNA, 561 bp, synthetic construct
  misc_feature 1..561: note = Description of Artificial Sequence: Synthetic coding sequence
  source 1..561: mol_type = other DNA
atgaagagcgacttctacttccagaagagcgagccccacagcctgagcagcgaggccctgatgagaagagccgtgagcctggtgaccgacagcaccagcaccttcctgagccagaccacctacgccctgatcgaggccatcaccgagtacaccaaggccgtgtacaccctgaccagcctgtacagacagtacaccagcctgctgggcaagatgaacagcgaggaggaggacgaggtgtggcaggtgatcatcggcgccagagccgagatgaccagcaagcaccaggagtacctgaagctggagaccacctggatgaccgccgtgggcctgagcgagatggccgccgaggccgcctaccagaccggcgccgaccaggccagcatcaccgccagaaaccacatccagctggtgaagctgcaggtggaggaggtgcaccagctgagcagaaaggccgagaccaagctggccgaggcccagatcgaggagctgagacagaagacccaggaggagggcgaggagagagccgagagcgagcaggaggcctacctgagagaggactag

SEQ ID NO: 10410 - DNA, 588 bp, synthetic construct
  misc_feature 1..588: note = Description of Artificial Sequence: Synthetic coding sequence
  source 1..588: mol_type = other DNA
atggccgccctgaagagctggctgagcagaagcgtgaccagcttcttcagatacagacagtgcctgtgcgtgcccgtggtggccaacttcaagaagagatgcttcagcgagctgatcagaccctggcacaagaccgtgaccatcggcttcggcgtgaccctgtgcgccgtgcccatcgcccaggccgtgtacaccctgaccagcctgtacagacagtacaccagcctgctgggcaagatgaacagcgaggaggaggacgaggtgtggcaggtgatcatcggcgccagagccgagatgaccagcaagcaccaggagtacctgaagctggagaccacctggatgaccgccgtgggcctgagcgagatggccgccgaggccgcctaccagaccggcgccgaccaggccagcatcaccgccagaaaccacatccagctggtgaagctgcaggtggaggaggtgcaccagctgagcagaaaggccgagaccaagctggccgaggcccagatcgaggagctgagacagaagacccaggaggagggcgaggagagagccgagagcgagcaggaggcctacctgagagaggactag

SEQ ID NO: 10411 - DNA, 588 bp, synthetic construct; identical to SEQ ID NO: 10410
  misc_feature 1..588: note = Description of Artificial Sequence: Synthetic coding sequence
  source 1..588: mol_type = other DNA

SEQ ID NO: 10412 - DNA, 720 bp, synthetic construct
  misc_feature 1..720: note = Description of Artificial Sequence: Synthetic coding sequence
  source 1..720: mol_type = other DNA
atggccgccctgaagagctggctgagcagaagcgtgaccagcttcttcagatacagacagtgcctgtgcgtgcccgtggtggccaacttcaagaagagatgcttcagcgagctgatcagaccctggcacaagaccgtgaccatcggcttcggcgtgaccctgtgcgccgtgcccatcgcccagaagagcgagccccacagcctgagcagcgaggccctgatgagaagagccgtgagcctggtgaccgacagcaccagcaccttcctgagccagaccacctacgccctgatcgaggccatcaccgagtacaccaaggccgtgtacaccctgaccagcctgtacagacagtacaccagcctgctgggcaagatgaacagcgaggaggaggacgaggtgtggcaggtgatcatcggcgccagagccgagatgaccagcaagcaccaggagtacctgaagctggagaccacctggatgaccgccgtgggcctgagcgagatggccgccgaggccgcctaccagaccggcgccgaccaggccagcatcaccgccagaaaccacatccagctggtgaagctgcaggtggaggaggtgcaccagctgagcagaaaggccgagaccaagctggccgaggcccagatcgaggagctgagacagaagacccaggaggagggcgaggagagagccgagagcgagcaggaggcctacctgagagaggactag

SEQ ID NO: 10413 - DNA, 561 bp, synthetic construct; identical to SEQ ID NO: 10409
  misc_feature 1..561: note = Description of Artificial Sequence: Synthetic coding sequence
  source 1..561: mol_type = other DNA

SEQ ID NO: 10414 - DNA, 3822 bp, synthetic construct
  misc_feature 1..3822: note = Description of Artificial Sequence: Synthetic coding sequence
  source 1..3822: mol_type = other DNA
atggagccccccggcggcagcctgggccccggcagaggcaccagagacaagaagaagggcagaagccccgacgagctgcccagcgccggcggcgacggcggcaagagcaagaagttcaccctgaagagactgatggccgacgagctggagagattcaccagcatgagaatcaagaaggagaaggagaagcccaacagcgcccacagaaacagcagcgccagctacggcgacgaccccaccgcccagagcctgcaggacgtgagcgacgagcaggtgctggtgctgttcgagcagatgctgctggacatgaacctgaacgaggagaagcagcagcccctgagagagaaggacatcatcatcaagagagagatggtgagccagtacctgtacaccagcaaggccggcatgagccagaaggagagcagcaagagcgccatgatgtacatccaggagctgagaagcggcctgagagacatgcccctgctgagctgcctggagagcctgagagtgagcctgaacaacaaccccgtgagctgggtgcagaccttcggcgccgagggcctggccagcctgctggacatcctgaagagactgcacgacgagaaggaggagaccgccggcagctacgacagcagaaacaagcacgagatcatcagatgcctgaaggccttcatgaacaacaagttcggcatcaagaccatgctggagaccgaggagggcatcctgctgctggtgagagccatggaccccgccgtgcccaacatgatgatcgacgccgccaagctgctgagcgccctgtgcatcctgccccagcccgaggacatgaacgagagagtgctggaggccatgaccgagagagccgagatggacgaggtggagagattccagcccctgctggacggcctgaagagcggcaccaccatcgccctgaaggtgggctgcctgcagctgatcaacgccctgatcacccccgccgaggagctggacttcagagtgcacatcagaagcgagctgatgagactgggcctgcaccaggtgctgcaggacctgagagagatcgagaacgaggacatgagagtgcagctgaacgtgttcgacgagcagggcgaggaggacagctacgacctgaagggcagactggacgacatcagaatggagatggacgacttcaacgaggtgttccagatcctgctgaacaccgtgaaggacagcaaggccgagccccacttcctgagcatcctgcagcacctgctgctggtgagaaacgactacgaggccagaccccagtactacaagctgatcgaggagtgcatcagccagatcgtgctgcacaagaacggcgccgaccccgacttcaagtgcagacacctgcagatcgagatcgagggcctgatcgaccagatgatcgacaagaccaaggtggagaagagcgaggccaaggccgccgagctggagaagaagctggacagcgagctgaccgccagacacgagctgcaggtggagatgaagaagatggagagcgacttcgagcagaagctgcaggacctgcagggcgagaaggacgccctgcacagcgagaagcagcagatcgccaccgagaagcaggacctggaggccgaggtgagccagctgaccggcgaggtggccaagctgaccaaggagctggaggacgccaagaaggagatggccagcctgagcgccgccgccatcaccgtgccccccagcgtgcccagcagagcccccgtgccccccgccccccccctgcccggcgacagcggcaccatcatcccccccccccccgcccccggcgacagcaccacccccccccccccccccccccccccccccccccccccccccctgcccggcggcgtgtgcatcagcagcccccccagcctgcccggcggcaccgccatcagcccccccccccccctgagcggcgacgccaccatccccccccccccccccctgcccgagggcgtgggcatccccagccccagcagcctgcccggcggcaccgccatccccccccccccccccctgcccggcagcgccagaatcccccccccccccccccccctgcccggcagcgccggcatcccccccccccccccccccctgcccggcgaggccggcatgccccccccccccccccccctgcccggcggccccggcatccccccccccccccccttccccggcggccccggcatccccccccccccccccggcatgggcatgcccccccccccccccttcggcttcggcgtgcccgccgcccccgtgctgcccttcggcctgacccccaagaagctgtacaagcccgaggtgcagctgagaagacccaactggagcaagctggtggccgaggacctgagccaggactgcttctggaccaaggtgaaggaggacagattcgagaacaacgagctgttcgccaagctgaccctgaccttcagcgcccagaccaagagaaccaagaaggccaagaaggaccaggagggcggcgaggagaagaagagcgtgcagaagaagaaggtgaaggagctgaaggtgctggacagcaagaccgcccagaacctgagcatcttcctgggcagcttcagaatgccctaccaggagatcaagaacgtgatcctggaggtgaacgaggccgtgctgaccgagagcatgatccagaacctgatcaagcagatgcccgagcccgagcagctgaagatgctgagcgagctgaaggacgagtacgacgacctggccgagagcgagcagttcggcgtggtgatgggcaccgtgcccagactgagacccagactgaacgccatcctgttcaagctgcagttcagcgagcaggtggagaacatcaagcccgagatcgtgagcgtgaccgccgcctgcgaggagctgagaaagagcgagagcttcagcaacctgctggagatcaccctgctggtgggcaactacatgaacgccggcagcagaaacgccggcgccttcggcttcaacatcagcttcctgtgcaagctgagagacaccaagagcaccgaccagaagatgaccctgctgcacttcctggccgagctgtgcgagaacgactaccccgacgtgctgaagttccccgacgagctggcccacgtggagaaggccagcagagtgagcgccgagaacctgcagaagaacctggaccagatgaagaagcagatcagcgacgtggagagagacgtgcagaacttccccgccgccaccgacgagaaggacaagttcgtggagaagatgaccatcttcgtgaaggacgcccaggagcagtacaacaagctgagaatgatgcacagcaacatggagaccctgtacaaggagctgggcgagtacttcctgttcgaccccaagaagctgagcgtggaggagttcttcatggacctgcacaacttcagaaacatgttcctgcaggccgtgaaggagaaccagaagagaagagagaccgaggagaagatgagaagagccaagctggccaaggagaaggccgagaaggagagactggagaagcagcagaagagagagcagctgatcgacatgaacgccgagggcgacgagaccggcgtgatggacagcctgctggaggccctgcagagcggcgccgccttcagaagaaagagaggccccagacaggccaacagaaaggccggctgcgccgtgaccagcctgctggccagcgagctgaccaaggacgacgccatggccgccgtgcccgccaaggtgagcaagaacagcgagaccttccccaccatcctggaggaggccaaggagctggtgggcagagccagctag

SEQ ID NO: 10415 - DNA, 3810 bp, synthetic construct
  misc_feature 1..3810: note = Description of Artificial Sequence: Synthetic coding sequence
  source 1..3810: mol_type = other DNA
atggagccccccggcggcagcctgggccccggcagaggcaccagagacaagaagaagggcagaagccccgacgagctgcccagcgccggcggcgacggcggcaagagcaagaagttcaccctgaagagactgatggccgacgagctggagagattcaccagcatgagaatcaagaaggagaaggagaagcccaacagcgcccacagaaacagcagcgccagctacggcgacgaccccaccgcccagagcctgcaggacgtgagcgacgagcaggtgctggtgctgttcgagcagatgctgctggacatgaacctgaacgaggagaagcagcagcccctgagagagaaggacatcatcatcaagagagagatggtgagccagtacctgtacaccagcaaggccggcatgagccagaaggagagcagcaagagcgccatgatgtacatccaggagctgagaagcggcctgagagacatgcccctgctgagctgcctggagagcctgagagtgagcctgaacaacaaccccgtgagctgggtgcagaccttcggcgccgagggcctggccagcctgctggacatcctgaagagactgcacgacgagaaggaggagaccgccggcagctacgacagcagaaacaagcacgagatcatcagatgcctgaaggccttcatgaacaacaagttcggcatcaagaccatgctggagaccgaggagggcatcctgctgctggtgagagccatggaccccgccgtgcccaacatgatgatcgacgccgccaagctgctgagcgccctgtgcatcctgccccagcccgaggacatgaacgagagagtgctggaggccatgaccgagagagccgagatggacgaggtggagagattccagcccctgctggacggcctgaagagcggcaccaccatcgccctgaaggtgggctgcctgcagctgatcaacgccctgatcacccccgccgaggagctggacttcagagtgcacatcagaagcgagctgatgagactgggcctgcaccaggtgctgcaggacctgagagagatcgagaacgaggacatgagagtgcagctgaacgtgttcgacgagcagggcgaggaggacagctacgacctgaagggcagactggacgacatcagaatggagatggacgacttcaacgaggtgttccagatcctgctgaacaccgtgaaggacagcaaggccgagccccacttcctgagcatcctgcagcacctgctgctggtgagaaacgactacgaggccagaccccagtactacaagctgatcgaggagtgcatcagccagatcgtgctgcacaagaacggcgccgaccccgacttcaagtgcagacacctgcagatcgagatcgagggcctgatcgaccagatgatcgacaagaccaaggtggagaagagcgaggccaaggccgccgagctggagaagaagctggacagcgagctgaccgccagacacgagctgcaggtggagatgaagaagatggagagcgacttcgagcagaagctgcaggacctgcagggcgagaaggacgccctgcacagcgagaagcagcagatcgccaccgagaagcaggacctggaggccgaggtgagccagctgaccggcgaggtggccaagctgaccaaggagctggaggacgccaagaaggagatggccagcctgagcgccgccgccatcaccgtgccccccagcgtgcccagcagagcccccgtgccccccgccccccccctgcccggcgacagcggcaccatcatcccccccccccccgcccccggcgacagcaccacccccccccccccccccccccccccccccccccccccccccctgcccggcggcgtgtgcatcagcagcccccccagcctgcccggcggcaccgccatcagcccccccccccccctgagcggcgacgccaccatccccccccccccccccctgcccgagggcgtgggcatccccagccccagcagcctgcccggcggcaccgccatccccccccccccccccctgcccggcagcgccagaatcccccccccccccccccccctgcccggcagcgccggcatcccccccccccccccccccctgcccggcgaggccggcatgccccccccccccccccccctgcccggcggccccggcatccccccccccccccccttccccggcggccccggcatccccccccccccccccggcatgggcatgcccccccccccccccttcggcttcggcgtgcccgccgcccccgtgctgcccttcggcctgacccccaagaagctgtacaagcccgaggtgcagctgagaagacccaactggagcaagctggtggccgaggacctgagccaggactgcttctggaccaaggtgaaggaggacagattcgagaacaacgagctgttcgccaagctgaccctgaccttcagcgcccagaccaagaccaagaaggaccaggagggcggcgaggagaagaagagcgtgcagaagaagaaggtgaaggagctgaaggtgctggacagcaagaccgcccagaacctgagcatcttcctgggcagcttcagaatgccctaccaggagatcaagaacgtgatcctggaggtgaacgaggccgtgctgaccgagagcatgatccagaacctgatcaagcagatgcccgagcccgagcagctgaagatgctgagcgagctgaaggacgagtacgacgacctggccgagagcgagcagttcggcgtggtgatgggcaccgtgcccagactgagacccagactgaacgccatcctgttcaagctgcagttcagcgagcaggtggagaacatcaagcccgagatcgtgagcgtgaccgccgcctgcgaggagctgagaaagagcgagagcttcagcaacctgctggagatcaccctgctggtgggcaactacatgaacgccggcagcagaaacgccggcgccttcggcttcaacatcagcttcctgtgcaagctgagagacaccaagagcaccgaccagaagatgaccctgctgcacttcctggccgagctgtgcgagaacgactaccccgacgtgctgaagttccccgacgagctggcccacgtggagaaggccagcagagtgagcgccgagaacctgcagaagaacctggaccagatgaagaagcagatcagcgacgtggagagagacgtgcagaacttccccgccgccaccgacgagaaggacaagttcgtggagaagatgaccagcttcgtgaaggacgcccaggagcagtacaacaagctgagaatgatgcacagcaacatggagaccctgtacaaggagctgggcgagtacttcctgttcgaccccaagaagctgagcgtggaggagttcttcatggacctgcacaacttcagaaacatgttcctgcaggccgtgaaggagaaccagaagagaagagagaccgaggagaagatgagaagagccaagctggccaaggagaaggccgagaaggagagactggagaagcagcagaagagagagcagctgatcgacatgaacgccgagggcgacgagaccggcgtgatggacagcctgctggaggccctgcagagcggcgccgccttcagaagaaagagaggccccagacaggccaacagaaaggccggctgcgccgtgaccagcctgctggccagcgagctgaccaaggacgacgccatggccgccgtgcccgccaaggtgagcaagaacagcgagaccttccccaccatcctggaggaggccaaggagctggtgggcagagccagctag

SEQ ID NO: 10416 - DNA, 3792 bp, synthetic construct
  misc_feature 1..3792: note = Description of Artificial Sequence: Synthetic coding sequence
  source 1..3792: mol_type = other DNA
atggagccccccggcggcagcctgggccccggcagaggcaccagagacaagaagaagggcagaagccccgacgagctgcccagcgccggcggcgacggcggcaagagcaagaagttcctggagagattcaccagcatgagaatcaagaaggagaaggagaagcccaacagcgcccacagaaacagcagcgccagctacggcgacgaccccaccgcccagagcctgcaggacgtgagcgacgagcaggtgctggtgctgttcgagcagatgctgctggacatgaacctgaacgaggagaagcagcagcccctgagagagaaggacatcatcatcaagagagagatggtgagccagtacctgtacaccagcaaggccggcatgagccagaaggagagcagcaagagcgccatgatgtacatccaggagctgagaagcggcctgagagacatgcccctgctgagctgcctggagagcctgagagtgagcctgaacaacaaccccgtgagctgggtgcagaccttcggcgccgagggcctggccagcctgctggacatcctgaagagactgcacgacgagaaggaggagaccgccggcagctacgacagcagaaacaagcacgagatcatcagatgcctgaaggccttcatgaacaacaagttcggcatcaagaccatgctggagaccgaggagggcatcctgctgctggtgagagccatggaccccgccgtgcccaacatgatgatcgacgccgccaagctgctgagcgccctgtgcatcctgccccagcccgaggacatgaacgagagagtgctggaggccatgaccgagagagccgagatggacgaggtggagagattccagcccctgctggacggcctgaagagcggcaccaccatcgccctgaaggtgggctgcctgcagctgatcaacgccctgatcacccccgccgaggagctggacttcagagtgcacatcagaagcgagctgatgagactgggcctgcaccaggtgctgcaggacctgagagagatcgagaacgaggacatgagagtgcagctgaacgtgttcgacgagcagggcgaggaggacagctacgacctgaagggcagactggacgacatcagaatggagatggacgacttcaacgaggtgttccagatcctgctgaacaccgtgaaggacagcaaggccgagccccacttcctgagcatcctgcagcacctgctgctggtgagaaacgactacgaggccagaccccagtactacaagctgatcgaggagtgcatcagccagatcgtgctgcacaagaacggcgccgaccccgacttcaagtgcagacacctgcagatcgagatcgagggcctgatcgaccagatgatcgacaagaccaaggtggagaagagcgaggccaaggccgccgagctggagaagaagctggacagcgagctgaccgccagacacgagctgcaggtggagatgaagaagatggagagcgacttcgagcagaagctgcaggacctgcagggcgagaaggacgccctgcacagcgagaagcagcagatcgccaccgagaagcaggacctggaggccgaggtgagccagctgaccggcgaggtggccaagctgaccaaggagctggaggacgccaagaaggagatggccagcctgagcgccgccgccatcaccgtgccccccagcgtgcccagcagagcccccgtgccccccgccccccccctgcccggcgacagcggcaccatcatcccccccccccccgcccccggcgacagcaccacccccccccccccccccccccccccccccccccccccccccctgcccggcggcgtgtgcatcagcagcccccccagcctgcccggcggcaccgccatcagcccccccccccccctgagcggcgacgccaccatccccccccccccccccctgcccgagggcgtgggcatccccagccccagcagcctgcccggcggcaccgccatccccccccccccccccctgcccggcagcgccagaatcccccccccccccccccccctgcccggcagcgccggcatcccccccccccccccccccctgcccggcgaggccggcatgccccccccccccccccccctgcccggcggccccggcatccccccccccccccccttccccggcggccccggcatccccccccccccccccggcatgggcatgcccccccccccccccttcggcttcggcgtgcccgccgcccccgtgctgcccttcggcctgacccccaagaagctgtacaagcccgaggtgcagctgagaagacccaactggagcaagctggtggccgaggacctgagccaggactgcttctggaccaaggtgaaggaggacagattcgagaacaacgagctgttcgccaagctgaccctgaccttcagcgcccagaccaagaccagcaaggccaagaaggaccaggagggcggcgaggagaagaagagcgtgcagaagaagaaggtgaaggagctgaaggtgctggacagcaagaccgcccagaacctgagcatcttcctgggcagcttcagaatgccctaccaggagatcaagaacgtgatcctggaggtgaacgaggccgtgctgaccgagagcatgatccagaacctgatcaagcagatgcccgagcccgagcagctgaagatgctgagcgagctgaaggacgagtacgacgacctggccgagagcgagcagttcggcgtggtgatgggcaccgtgcccagactgagacccagactgaacgccatcctgttcaagctgcagttcagcgagcaggtggagaacatcaagcccgagatcgtgagcgtgaccgccgcctgcgaggagctgagaaagagcgagagcttcagcaacctgctggagatcaccctgctggtgggcaactacatgaacgccggcagcagaaacgccggcgccttcggcttcaacatcagcttcctgtgcaagctgagagacaccaagagcaccgaccagaagatgaccctgctgcacttcctggccgagctgtgcgagaacgactaccccgacgtgctgaagttccccgacgagctggcccacgtggagaaggccagcagagtgagcgccgagaacctgcagaagaacctggaccagatgaagaagcagatcagcgacgtggagagagacgtgcagaacttccccgccgccaccgacgagaaggacaagttcgtggagaagatgaccagcttcgtgaaggacgcccaggagcagtacaacaagctgagaatgatgcacagcaacatggagaccctgtacaaggagctgggcgagtacttcctgttcgaccccaagaagctgagcgtggaggagttcttcatggacctgcacaacttcagaaacatgttcctgcaggccgtgaaggagaaccagaagagaagagagaccgaggagaagatgagaagagccaagctggccaaggagaaggccgagaaggagagactggagaagcagcagaagagagagcagctgatcgacatgaacgccgagggcgacgagaccggcgtgatggacagcctgctggaggccctgcagagcggcgccgccttcagaagaaagagaggccccagacaggccaacagaaaggccggctgcgccgtgaccagcctgctggccagcgagctgaccaaggacgacgccatggccgccgtgcccgccaaggtgagcaagaacagcgagaccttccccaccatcctggaggaggccaaggagctggtgggcagagccagctag

SEQ ID NO: 10417 - DNA, 3819 bp, synthetic construct
  misc_feature 1..3819: note = Description of Artificial Sequence: Synthetic coding sequence
  source 1..3819: mol_type = other DNA
atggagccccccggcggcagcctgggccccggcagaggcaccagagacaagaagaagggcagaagccccgacgagctgcccagcgccggcggcgacggcggcaagagcaagaagttcaccctgaagagactgatggccgacgagctggagagattcaccagcatgagaatcaagaaggagaaggagaagcccaacagcgcccacagaaacagcagcgccagctacggcgacgaccccaccgcccagagcctgcaggacgtgagcgacgagcaggtgctggtgctgttcgagcagatgctgctggacatgaacctgaacgaggagaagcagcagcccctgagagagaaggacatcatcatcaagagagagatggtgagccagtacctgtacaccagcaaggccggcatgagccagaaggagagcagcaagagcgccatgatgtacatccaggagctgagaagcggcctgagagacatgcccctgctgagctgcctggagagcctgagagtgagcctgaacaacaaccccgtgagctgggtgcagaccttcggcgccgagggcctggccagcctgctggacatcctgaagagactgcacgacgagaaggaggagaccgccggcagctacgacagcagaaacaagcacgagatcatcagatgcctgaaggccttcatgaacaacaagttcggcatcaagaccatgctggagaccgaggagggcatcctgctgctggtgagagccatggaccccgccgtgcccaacatgatgatcgacgccgccaagctgctgagcgccctgtgcatcctgccccagcccgaggacatgaacgagagagtgctggaggccatgaccgagagagccgagatggacgaggtggagagattccagcccctgctggacggcctgaagagcggcaccaccatcgccctgaaggtgggctgcctgcagctgatcaacgccctgatcacccccgccgaggagctggacttcagagtgcacatcagaagcgagctgatgagactgggcctgcaccaggtgctgcaggacctgagagagatcgagaacgaggacatgagagtgcagctgaacgtgttcgacgagcagggcgaggaggacagctacgacctgaagggcagactggacgacatcagaatggagatggacgacttcaacgaggtgttccagatcctgctgaacaccgtgaaggacagcaaggccgagccccacttcctgagcatcctgcagcacctgctgctggtgagaaacgactacgaggccagaccccagtactacaagctgatcgaggagtgcatcagccagatcgtgctgcacaagaacggcgccgaccccgacttcaagtgcagacacctgcagatcgagatcgagggcctgatcgaccagatgatcgacaagaccaaggtggagaagagcgaggccaaggccgccgagctggagaagaagctggacagcgagctgaccgccagacacgagctgcaggtggagatgaagaagatggagagcgacttcgagcagaagctgcaggacctgcagggcgagaaggacgccctgcacagcgagaagcagcagatcgccaccgagaagcaggacctggaggccgaggtgagccagctgaccggcgaggtggccaagctgaccaaggagctggaggacgccaagaaggagatggccagcctgagcgccgccgccatcaccgtgccccccagcgtgcccagcagagcccccgtgccccccgccccccccctgcccggcgacagcggcaccatcatcccccccccccccgcccccggcgacagcaccacccccccccccccccccccccccccccccccccccccccccctgcccggcggcgtgtgcatcagcagcccccccagcctgcccggcggcaccgccatcagcccccccccccccctgagcggcgacgccaccatccccccccccccccccctgcccgagggcgtgggcatccccagccccagcagcctgcccggcggcaccgccatccccccccccccccccctgcccggcagcgccagaatcccccccccccccccccccctgcccggcagcgccggcatcccccccccccccccccccctgcccggcgaggccggcatgccccccccccccccccccctgcccggcggccccggcatccccccccccccccccttccccggcggccccggcatccccccccccccccccggcatgggcatgcccccccccccccccttcggcttcggcgtgcccgccgcccccgtgctgcccttcggcctgacccccaagaagctgtacaagcccgaggtgcagctgagaagacccaactggagcaagctggtggccgaggacctgagccaggactgcttctggaccaaggtgaaggaggacagattcgagaacaacgagctgttcgccaagctgaccctgaccttcagcgcccagaccaagaccagcaaggccaagaaggaccaggagggcggcgaggagaagaagagcgtgcagaagaagaaggtgaaggagctgaaggtgctggacagcaagaccgcccagaacctgagcatcttcctgggcagcttcagaatgccctaccaggagatcaagaacgtgatcctggaggtgaacgaggccgtgctgaccgagagcatgatccagaacctgatcaagcagatgcccgagcccgagcagctgaagatgctgagcgagctgaaggacgagtacgacgacctggccgagagcgagcagttcggcgtggtgatgggcaccgtgcccagactgagacccagactgaacgccatcctgttcaagctgcagttcagcgagcaggtggagaacatcaagcccgagatcgtgagcgtgaccgccgcctgcgaggagctgagaaagagcgagagcttcagcaacctgctggagatcaccctgctggtgggcaactacatgaacgccggcagcagaaacgccggcgccttcggcttcaacatcagcttcctgtgcaagctgagagacaccaagagcaccgaccagaagatgaccctgctgcacttcctggccgagctgtgcgagaacgactaccccgacgtgctgaagttccccgacgagctggcccacgtggagaaggccagcagagtgagcgccgagaacctgcagaagaacctggaccagatgaagaagcagatcagcgacgtggagagagacgtgcagaacttccccgccgccaccgacgagaaggacaagttcgtggagaagatgaccagcttcgtgaaggacgcccaggagcagtacaacaagctgagaatgatgcacagcaacatggagaccctgtacaaggagctgggcgagtacttcctgttcgaccccaagaagctgagcgtggaggagttcttcatggacctgcacaacttcagaaacatgttcctgcaggccgtgaaggagaaccagaagagaagagagaccgaggagaagatgagaagagccaagctggccaaggagaaggccgagaaggagagactggagaagcagcagaagagagagcagctgatcgacatgaacgccgagggcgacgagaccggcgtgatggacagcctgctggaggccctgcagagcggcgccgccttcagaagaaagagaggccccagacaggccaacagaaaggccggctgcgccgtgaccagcctgctggccagcgagctgaccaaggacgacgccatggccgccgtgcccgccaaggtgagcaagaacagcgagaccttccccaccatcctggaggaggccaaggagctggtgggcagagccagctag

SEQ ID NO: 10418 - DNA, 3747 bp, synthetic construct
  misc_feature 1..3747: note = Description of Artificial Sequence: Synthetic coding sequence
  source 1..3747: mol_type = other DNA
atggagccccccggcggcagcctgggccccggcagaggcaccagagacaagaagaagggcagaagccccgacgagctgcccagcgccggcggcgacggcggcaagagcaagaagttcctggagagattcaccagcatgagaatcaagaaggagaaggagaagcccaacagcgcccacagaaacagcagcgccagctacggcgacgaccccaccgcccagagcctgcaggacgtgagcgacgagcaggtgctggtgctgttcgagcagatgctgctggacatgaacctgaacgaggagaagcagcagcccctgagagagaaggacatcatcatcaagagagagatggtgagccagtacctgtacaccagcaaggccggcatgagccagaaggagagcagcaagagcgccatgatgtacatccaggagctgagaagcggcctgagagacatgcccctgctgagctgcctggagagcctgagagtgagcctgaacaacaaccccgtgagctgggtgcagaccttcggcgccgagggcctggccagcctgctggacatcctgaagagactgcacgacgagaaggaggagaccgccggcagctacgacagcagaaacaagcacgagatcatcagatgcctgaaggccttcatgaacaacaagttcggcatcaagaccatgctggagaccgaggagggcatcctgctgctggtgagagccatggaccccgccgtgcccaacatgatgatcgacgccgccaagctgctgagcgccctgtgcatcctgccccagcccgaggacatgaacgagagagtgctggaggccatgaccgagagagccgagatggacgaggtggagagattccagcccctgctggacggcctgaagagcggcaccaccatcgccctgaaggtgggctgcctgcagctgatcaacgccctgatcacccccgccgaggagctggacttcagagtgcacatcagaagcgagctgatgagactgggcctgcaccaggtgctgcaggacctgagagagatcgagaacgaggacatgagagtgcagctgaacgtgttcgacgagcagggcgaggaggacagctacgacctgaagggcagactggacgacatcagaatggagatggacgacttcaacgaggtgttccagatcctgctgaacaccgtgaaggacagcaaggccgagccccacttcctgagcatcctgcagcacctgctgctggtgagaaacgactacgaggccagaccccagtactacaagctgatcgaggagtgcatcagccagatcgtgctgcacaagaacggcgccgaccccgacttcaagtgcagacacctgcagatcgagatcgagggcctgatcgaccagatgatcgacaagaccaaggtggagaagagcgaggccaaggccgccgagctggagaagaagctggacagcgagctgaccgccagacacgagctgcaggtggagatgaagaagatggagagcgacttcgagcagaagctgcaggacctgcagggcgagaaggacgccctgcacagcgagaagcagcagatcgccaccgagaagcaggacctggaggccgaggtgagccagctgaccggcgaggtggccaagctgaccaaggagctggaggacgccaagaaggagatggccagcctgagcgccgccgccatcaccgtgccccccagcgtgcccagcagagcccccgtgccccccgccccccccctgcccggcgacagcggcaccatcatcccccccccccccgcccccggcgacagcaccacccccccccccccccccccccccccccccccccccccccccctgcccggcggcaccgccatcagcccccccccccccctgagcggcgacgccaccatccccccccccccccccctgcccgagggcgtgggcatccccagccccagcagcctgcccggcggcaccgccatccccccccccccccccctgcccggcagcgccagaatcccccccccccccccccccctgcccggcagcgccggcatcccccccccccccccccccctgcccggcgaggccggcatgccccccccccccccccccctgcccggcggccccggcatccccccccccccccccttccccggcggccccggcatccccccccccccccccggcatgggcatgcccccccccccccccttcggcttcggcgtgcccgccgcccccgtgctgcccttcggcctgacccccaagaagctgtacaagcccgaggtgcagctgagaagacccaactggagcaagctggtggccgaggacctgagccaggactgcttctggaccaaggtgaaggaggacagattcgagaacaacgagctgttcgccaagctgaccctgaccttcagcgcccagaccaagaccaagaaggaccaggagggcggcgaggagaagaagagcgtgcagaagaagaaggtgaaggagctgaaggtgctggacagcaagaccgcccagaacctgagcatcttcctgggcagcttcagaatgccctaccaggagatcaagaacgtgatcctggaggtgaacgaggccgtgctgaccgagagcatgatccagaacctgatcaagcagatgcccgagcccgagcagctgaagatgctgagcgagctgaaggacgagtacgacgacctggccgagagcgagcagttcggcgtggtgatgggcaccgtgcccagactgagacccagactgaacgccatcctgttcaagctgcagttcagcgagcaggtggagaacatcaagcccgagatcgtgagcgtgaccgccgcctgcgaggagctgagaaagagcgagagcttcagcaacctgctggagatcaccctgctggtgggcaactacatgaacgccggcagcagaaacgccggcgccttcggcttcaacatcagcttcctgtgcaagctgagagacaccaagagcaccgaccagaagatgaccctgctgcacttcctggccgagctgtgcgagaacgactaccccgacgtgctgaagttccccgacgagctggcccacgtggagaaggccagcagagtgagcgccgagaacctgcagaagaacctggaccagatgaagaagcagatcagcgacgtggagagagacgtgcagaacttccccgccgccaccgacgagaaggacaagttcgtggagaagatgaccatcttcgtgaaggacgcccaggagcagtacaacaagctgagaatgatgcacagcaacatggagaccctgtacaaggagctgggcgagtacttcctgttcgaccccaagaagctgagcgtggaggagttcttcatggacctgcacaacttcagaaacatgttcctgcaggccgtgaaggagaaccagaagagaagagagaccgaggagaagatgagaagagccaagctggccaaggagaaggccgagaaggagagactggagaagcagcagaagagagagcagctgatcgacatgaacgccgagggcgacgagaccggcgtgatggacagcctgctggaggccctgcagagcggcgccgccttcagaagaaagagaggccccagacaggccaacagaaaggccggctgcgccgtgaccagcctgctggccagcgagctgaccaaggacgacgccatggccgccgtgcccgccaaggtgagcaagaacagcgagaccttccccaccatcctggaggaggccaaggagctggtgggcagagccagctag

SEQ ID NO: 10419 - DNA, 3795 bp, synthetic construct
  misc_feature 1..3795: note = Description of Artificial Sequence: Synthetic coding sequence
  source 1..3795: mol_type = other DNA
atggagccccccggcggcagcctgggccccggcagaggcaccagagacaagaagaagggcagaagccccgacgagctgcccagcgccggcggcgacggcggcaagagcaagaagttcctggagagattcaccagcatgagaatcaagaaggagaaggagaagcccaacagcgcccacagaaacagcagcgccagctacggcgacgaccccaccgcccagagcctgcaggacgtgagcgacgagcaggtgctggtgctgttcgagcagatgctgctggacatgaacctgaacgaggagaagcagcagcccctgagagagaaggacatcatcatcaagagagagatggtgagccagtacctgtacaccagcaaggccggcatgagccagaaggagagcagcaagagcgccatgatgtacatccaggagctgagaagcggcctgagagacatgcccctgctgagctgcctggagagcctgagagtgagcctgaacaacaaccccgtgagctgggtgcagaccttcggcgccgagggcctggccagcctgctggacatcctgaagagactgcacgacgagaaggaggagaccgccggcagctacgacagcagaaacaagcacgagatcatcagatgcctgaaggccttcatgaacaacaagttcggcatcaagaccatgctggagaccgaggagggcatcctgctgctggtgagagccatggaccccgccgtgcccaacatgatgatcgacgccgccaagctgctgagcgccctgtgcatcctgccccagcccgaggacatgaacgagagagtgctggaggccatgaccgagagagccgagatggacgaggtggagagattccagcccctgctggacggcctgaagagcggcaccaccatcgccctgaaggtgggctgcctgcagctgatcaacgccctgatcacccccgccgaggagctggacttcagagtgcacatcagaagcgagctgatgagactgggcctgcaccaggtgctgcaggacctgagagagatcgagaacgaggacatgagagtgcagctgaacgtgttcgacgagcagggcgaggaggacagctacgacctgaagggcagactggacgacatcagaatggagatggacgacttcaacgaggtgttccagatcctgctgaacaccgtgaaggacagcaaggccgagccccacttcctgagcatcctgcagcacctgctgctggtgagaaacgactacgaggccagaccccagtactacaagctgatcgaggagtgcatcagccagatcgtgctgcacaagaacggcgccgaccccgacttcaagtgcagacacctgcagatcgagatcgagggcctgatcgaccagatgatcgacaagaccaaggtggagaagagcgaggccaaggccgccgagctggagaagaagctggacagcgagctgaccgccagacacgagctgcaggtggagatgaagaagatggagagcgacttcgagcagaagctgcaggacctgcagggcgagaaggacgccctgcacagcgagaagcagcagatcgccaccgagaagcaggacctggaggccgaggtgagccagctgaccggcgaggtggccaagctgaccaaggagctggaggacgccaagaaggagatggccagcctgagcgccgccgccatcaccgtgccccccagcgtgcccagcagagcccccgtgccccccgccccccccctgcccggcgacagcggcaccatcatcccccccccccccgcccccggcgacagcaccacccccccccccccccccccccccccccccccccccccccccctgcccggcggcgtgtgcatcagcagcccccccagcctgcccggcggcaccgccatcagcccccccccccccctgagcggcgacgccaccatccccccccccccccccctgcccgagggcgtgggcatccccagccccagcagcctgcccggcggcaccgccatccccccccccccccccctgcccggcagcgccagaatcccccccccccccccccccctgcccggcagcgccggcatcccccccccccccccccccctgcccggcgaggccggcatgccccccccccccccccccctgcccggcggccccggcatccccccccccccccccttccccggcggccccggcatccccccccccccccccggcatgggcatgcccccccccccccccttcggcttcggcgtgcccgccgcccccgtgctgcccttcggcctgacccccaagaagctgtacaagcccgaggtgcagctgagaagacccaactggagcaagctggtggccgaggacctgagccaggactgcttctggaccaaggtgaaggaggacagattcgagaacaacgagctgttcgccaagctgaccctgaccttcagcgcccagaccaagagaaccaagaaggccaagaaggaccaggagggcggcgaggagaagaagagcgtgcagaagaagaaggtgaaggagctgaaggtgctggacagcaagaccgcccagaacctgagcatcttcctgggcagcttcagaatgccctaccaggagatcaagaacgtgatcctggaggtgaacgaggccgtgctgaccgagagcatgatccagaacctgatcaagcagatgcccgagcccgagcagctgaagatgctgagcgagctgaaggacgagtacgacgacctggccgagagcgagcagttcggcgtggtgatgggcaccgtgcccagactgagacccagactgaacgccatcctgttcaagctgcagttcagcgagcaggtggagaacatcaagcccgagatcgtgagcgtgaccgccgcctgcgaggagctgagaaagagcgagagcttcagcaacctgctggagatcaccctgctggtgggcaactacatgaacgccggcagcagaaacgccggcgccttcggcttcaacatcagcttcctgtgcaagctgagagacaccaagagcaccgaccagaagatgaccctgctgcacttcctggccgagctgtgcgagaacgactaccccgacgtgctgaagttccccgacgagctggcccacgtggagaaggccagcagagtgagcgccgagaacctgcagaagaacctggaccagatgaagaagcagatcagcgacgtggagagagacgtgcagaacttccccgccgccaccgacgagaaggacaagttcgtggagaagatgaccatcttcgtgaaggacgcccaggagcagtacaacaagctgagaatgatgcacagcaacatggagaccctgtacaaggagctgggcgagtacttcctgttcgaccccaagaagctgagcgtggaggagttcttcatggacctgcacaacttcagaaacatgttcctgcaggccgtgaaggagaaccagaagagaagagagaccgaggagaagatgagaagagccaagctggccaaggagaaggccgagaaggagagactggagaagcagcagaagagagagcagctgatcgacatgaacgccgagggcgacgagaccggcgtgatggacagcctgctggaggccctgcagagcggcgccgccttcagaagaaagagaggccccagacaggccaacagaaaggccggctgcgccgtgaccagcctgctggccagcgagctgaccaaggacgacgccatggccgccgtgcccgccaaggtgagcaagaacagcgagaccttccccaccatcctggaggaggccaaggagctggtgggcagagccagctag

SEQ ID NO: 10420 - DNA, 855 bp, synthetic construct
  misc_feature 1..855: note = Description of Artificial Sequence: Synthetic coding sequence
  source 1..855: mol_type = other DNA
atggccagcctgagcgccgccgccatcaccgtgccccccagcgtgcccagcagagcccccgtgccccccgccccccccctgcccggcgacagcggcaccatcatcccccccccccccgcccccggcgacagcaccacccccccccccccccccccccccccccccccccccccccccctgcccggcggcgtgtgcatcagcagcccccccagcctgcccggcggcaccgccatcagcccccccccccccctgagcggcgacgccaccatccccccccccccccccctgcccgagggcgtgggcatccccagccccagcagcctgcccggcggcaccgccatccccccccccccccccctgcccggcagcgccagaatcccccccccccccccccccctgcccggcagcgccggcatcccccccccccccccccccctgcccggcgaggccggcatgccccccccccccccccccctgcccggcggccccggcatccccccccccccccccttccccggcggccccggcatccccccccccccccccggcatgggcatgcccccccccccccccttcggcttcggcgtgcccgccgcccccgtgctgcccttcggcctgacccccaagaagctgtacaagcccgaggtgcagctgagaagacccaactggagcaagctggtggccgaggacctgagccaggactgcttctggaccaaggtgaaggaggacagattcgagaacaacgagctgttcgccaagctgaccctgaccttcagcgcccagaccaagagcgagaaggccaagaaggaccaggagggcggcgaggagaagaagagcgtgcagaagaagaagtag

SEQ ID NO: 10421 - DNA, 513 bp, synthetic construct
  misc_feature 1..513: note = Description of Artificial Sequence: Synthetic coding sequence
  source 1..513: mol_type = other DNA
atgtactgccagttcgccagcttccagtacacctgccagccctgcagaggccagagaatgctgtgcaccagagacagcgagtgctgcggcgaccagctgtgcgtgtggggccactgcaccaagatggccaccagaggcagcaacggcaccatctgcgacaaccagagagactgccagcccggcctgtgctgcgccttccagagaggcctgctgttccccgtgtgcacccccctgcccgtggagggcgagctgtgccacgaccccgccagcagactgctggacctgatcacctgggagctggagcccgacggcgccctggacagatgcccctgcgccagcggcctgctgtgccagccccacagccacagcctggtgtacgtgtgcaagcccaccttcgtgggcagcagagaccaggacggcgagatcctgctgcccagagaggtgcccgacgagtacctggccgccagctggagaagatgcgccagaagctggagaacctggagaggcgcctag

SEQ ID NO: 10422 - DNA, 1053 bp, synthetic construct
  misc_feature 1..1053: note = Description of Artificial Sequence: Synthetic coding sequence
  source 1..1053: mol_type = other DNA
atgcagagactgggcgccaccctgctgtgcctgctgctggccgccgccgtgcccaccgcccccgcccccgcccccaccgccaccagcgcccccgtgaagcccggccccgccctgagctacccccaggaggaggccaccctgaacgagatgttcagagaggtggaggagctgatggaggacacccagcacaagctgagaagcgccgtggaggagatggaggccgaggaggccgccgccaaggccagcagcgaggtgaacctggccaacctgccccccagctaccacaacgagaccaacaccgacaccaaggtgggcaacaacaccatccacgtgcacagagagatccacaagatcaccaacaaccagaccggccagatggtgttcagcgagaccgtgatcaccagcgtgggcgacgaggagggcagaagaagccacgagtgcatcatcgacgaggactgcggccccagcatgtactgccagttcgccagcttccagtacacctgccagccctgcagaggccagagaatgctgtgcaccagagacagcgagtgctgcggcgaccagctgtgcgtgtggggccactgcaccaagatggccaccagaggcagcaacggcaccatctgcgacaaccagagagactgccagcccggcctgtgctgcgccttccagagaggcctgctgttccccgtgtgcacccccctgcccgtggagggcgagctgtgccacgaccccgccagcagactgctggacctgatcacctgggagctggagcccgacggcgccctggacagatgcccctgcgccagcggcctgctgtgccagccccacagccacagcctggtgtacgtgtgcaagcccaccttcgtgggcagcagagaccaggacggcgagatcctgctgcccagagaggtgcccgacgagtacgaggtgggcagcttcatggaggaggtgagacaggagctggaggacctggagagaagcctgaccgaggagatggccctgagagagcccgccgccgccgccgccgccctgctgggcggcgaggagatctag

SEQ ID NO: 10423 - DNA, 882 bp, synthetic construct
  misc_feature 1..882: note = Description of Artificial Sequence: Synthetic coding sequence
  source 1..882: mol_type = other DNA
atggaggacacccagcacaagctgagaagcgccgtggaggagatggaggccgaggaggccgccgccaaggccagcagcgaggtgaacctggccaacctgccccccagctaccacaacgagaccaacaccgacaccaaggtgggcaacaacaccatccacgtgcacagagagatccacaagatcaccaacaaccagaccggccagatggtgttcagcgagaccgtgatcaccagcgtgggcgacgaggagggcagaagaagccacgagtgcatcatcgacgaggactgcggccccagcatgtactgccagttcgccagcttccagtacacctgccagccctgcagaggccagagaatgctgtgcaccagagacagcgagtgctgcggcgaccagctgtgcgtgtggggccactgcaccaagatggccaccagaggcagcaacggcaccatctgcgacaaccagagagactgccagcccggcctgtgctgcgccttccagagaggcctgctgttccccgtgtgcacccccctgcccgtggagggcgagctgtgccacgaccccgccagcagactgctggacctgatcacctgggagctggagcccgacggcgccctggacagatgcccctgcgccagcggcctgctgtgccagccccacagccacagcctggtgtacgtgtgcaagcccaccttcgtgggcagcagagaccaggacggcgagatcctgctgcccagagaggtgcccgacgagtacgaggtgggcagcttcatggaggaggtgagacaggagctggaggacctggagagaagcctgaccgaggagatggccctgagagagcccgccgccgccgccgccgccctgctgggcggcgaggagatctag

SEQ ID NO: 10424 - DNA, 1053 bp, synthetic construct; identical to SEQ ID NO: 10422
  misc_feature 1..1053: note = Description of Artificial Sequence: Synthetic coding sequence
  source 1..1053: mol_type = other DNA

SEQ ID NO: 10425 - DNA, 969 bp, synthetic construct
  misc_feature 1..969: note = Description of Artificial Sequence: Synthetic coding sequence
  source 1..969: mol_type = other DNA
atgcagagactgggcgccaccctgctgtgcctgctgctggccgccgccgtgcccaccgcccccgcccccgcccccaccgccaccagcgcccccgtgaagcccggccccgccctgagctacccccaggaggaggccaccctgaacgagatgttcagagaggtggaggagctgatggaggacacccagcacaagctgagaagcgccgtggaggagatggaggccgaggaggccgccgccaaggccagcagcgaggtgaacctggccaacctgccccccagctaccacaacgagaccaacaccgacaccaaggtgggcaacaacaccatccacgtgcacagagagatccacaaggagtgcatcatcgacgaggactgcggccccagcatgtactgccagttcgccagcttccagtacacctgccagccctgcagaggccagagaatgctgtgcaccagagacagcgagtgctgcggcgaccagctgtgcgtgtggggccactgcaccaagatggccaccagaggcagcaacggcaccatctgcgacaaccagagagactgccagcccggcctgtgctgcgccttccagagaggcctgctgttccccgtgtgcacccccctgcccgtggagggcgagctgtgccacgaccccgccagcagactgctggacctgatcacctgggagctggagcccgacggcgccctggacagatgcccctgcgccagcggcctgctgtgccagccccacagccacagcctggtgtacgtgtgcaagcccaccttcgtgggcagcagagaccaggacggcgagatcctgctgcccagagaggtgcccgacgagtacgaggtgggcagcttcatggaggaggtgagacaggagctggaggacctggagagaagcctgaccgaggagatggccctgagagagcccgccgccgccgccgccgccctgctgggcggcgaggagatctag

SEQ ID NO: 10426 - DNA, 708 bp, synthetic construct
  misc_feature 1..708: note = Description of Artificial Sequence: Synthetic coding sequence
  source 1..708: mol_type = other DNA
atgcagagactgggcgccaccctgctgtgcctgctgctggccgccgccgtgcccaccgcccccgcccccgcccccaccgccaccagcgcccccgtgaagcccggccccgccctgagctacccccaggaggaggccaccctgaacgagatgttcagagaggtggaggagctgatggaggacacccagcacaagctgagaagcgccgtggaggagatggaggccgaggaggccgccgccaaggccagcagcgaggtgaacctggccaacctgccccccagctaccacaacgagaccaacaccgacaccaaggtgggcaacaacaccatccacgtgcacagagagatccacaagatcaccaacaaccagaccggccagatggtgttcagcgagaccgtgatcaccagcgtgggcgacgaggagggcagaagaagccacgagtgcatcatcgacgaggactgcggccccagcatgtactgccagttcgccagcttccagtacacctgccagccctgcagaggccagagaatgctgtgcaccagagacagcgagtgctgcggcgaccagctgtgcgtgtggggccactgcaccaagatggccaccagaggcagcaacggcaccatctgcgacaaccagagagactgccagcccggcctgtgctgcgccttccagagaggcctgctgttccccgtgtgcacccccctgccctag

SEQ ID NO: 10427 - DNA, 2301 bp, synthetic construct
  misc_feature 1..2301: note = Description of Artificial Sequence: Synthetic coding sequence
  source 1..2301: mol_type = other DNA
atgaagaccccctggaaggtgctgctgggcctgctgggcgccgccgccctggtgaccatcatcaccgtgcccgtggtgctgctgaacaagggcaccgacgacgccaccgccgacagcagaaagacctacaccctgaccgactacctgaagaacacctacagactgaagctgtacagcctgagatggatcagcgaccacgagtacctgtacaagcaggagaacaacatcctggtgttcaacgccgagtacggcaacagcagcgtgttcctggagaacagcaccttcgacgagttcggccacagcatcaacgactacagcatcagccccgacggccagttcatcctgctggagtacaactacgtgaagcagtggagacacagctacaccgccagctacgacatctacgacctgaacaagagacagctgatcaccgaggagagaatccccaacaacacccagtgggtgacctggagccccgtgggccacaagctggcctacgtgtggaacaacgacatctacgtgaagatcgagcccaacctgcccagctacagaatcacctggaccggcaaggaggacatcatctacaacggcatcaccgactgggtgtacgaggaggaggtgttcagcgcctacagcgccctgtggtggagccccaacggcaccttcctggcctacgcccagttcaacgacaccgaggtgcccctgatcgagtacagcttctacagcgacgagagcctgcagtaccccaagaccgtgagagtgccctaccccaaggccggcgccgtgaaccccaccgtgaagttcttcgtggtgaacaccgacagcctgagcagcgtgaccaacgccaccagcatccagatcaccgcccccgccagcatgctgatcggcgaccactacctgtgcgacgtgacctgggccacccaggagagaatcagcctgcagtggctgagaagaatccagaactacagcgtgatggacatctgcgactacgacgagagcagcggcagatggaactgcctggtggccagacagcacatcgagatgagcaccaccggctgggtgggcagattcagacccagcgagccccacttcaccctggacggcaacagcttctacaagatcatcagcaacgaggagggctacagacacatctgctacttccagatcgacaagaaggactgcaccttcatcaccaagggcacctgggaggtgatcggcatcgaggccctgaccagcgactacctgtactacatcagcaacgagtacaagggcatgcccggcggcagaaacctgtacaagatccagctgagcgactacaccaaggtgacctgcctgagctgcgagctgaaccccgagagatgccagtactacagcgtgagcttcagcaaggaggccaagtactaccagctgagatgcagcggccccggcctgcccctgtacaccctgcacagcagcgtgaacgacaagggcctgagagtgctggaggacaacagcgccctggacaagatgctgcagaacgtgcagatgcccagcaagaagctggacttcatcatcctgaacgagaccaagttctggtaccagatgatcctgcccccccacttcgacaagagcaagaagtaccccctgctgctggacgtgtacgccggcccctgcagccagaaggccgacaccgtgttcagactgaactgggccacctacctggccagcaccgagaacatcatcgtggccagcttcgacggcagaggcagcggctaccagggcgacaagatcatgcacgccatcaacagaagactgggcaccttcgaggtggaggaccagatcgaggccgccagacagttcagcaagatgggcttcgtggacaacaagagaatcgccatctggggctggagctacggcggctacgtgaccagcatggtgctgggcagcggcagcggcgtgttcaagtgcggcatcgccgtggcccccgtgagcagatgggagtactacgacagcgtgtacaccgagagatacatgggcctgcccacccccgaggacaacctggaccactacagaaacagcaccgtgatgagcagagccgagaacttcaagcaggtggagtacctgctgatccacggcaccgccgacgacaacgtgcacttccagcagagcgcccagatcagcaaggccctggtggacgtgggcgtggacttccaggccatgtggtacaccgacgaggaccacggcatcgccagcagcaccgcccaccagcacatctacacccacatgagccacttcatcaagcagtgcttcagcctgccctag

SEQ ID NO: 10428 - DNA, 645 bp, synthetic construct
  misc_feature 1..645: note = Description of Artificial Sequence: Synthetic coding sequence
  source 1..645: mol_type = other DNA
atgaacgtgttcagaatcctgggcgacctgagccacctgctggccatgatcctgctgctgggcaagatctggagaagcaagtgctgcaagggcatcagcggcaagagccagatcctgttcgccctggtgttcaccaccagatacctggacctgttcaccaacttcatcagcatctacaacaccgtgatgaaggtggtgttcctgctgtgcgcctacgtgaccgtgtacatgatctacggcaagttcagaaagaccttcgacagcgagaacgacaccttcagactggagttcctgctggtgcccgtgatcggcctgagcttcctggagaactacagcttcaccctgctggagatcctgtggaccttcagcatctacctggagagcgtggccatcctgccccagctgttcatgatcagcaagaccggcgaggccgagaccatcaccacccactacctgttcttcctgggcctgtacagagccctgtacctggccaactggatcagaagataccagaccgagaacttctacgaccagatcgccgtggtgagcggcgtggtgcagaccatcttctactgcgacttcttctacctgtacgtgaccaaggtgctgaagggcaagaagctgagcctgcccatgcccatctag

SEQ ID NO: 10429 - DNA, 498 bp, synthetic construct
  misc_feature 1..498: note = Description of Artificial Sequence: Synthetic coding sequence
  source 1..498: mol_type = other DNA
atgaaggaggaccaggtggtggccgaggagcccggcttccaggacgaggaggagagcctgttccaggacatcgacctgctgcagaagcacggcatcaacgtggccgacatcaagaagctgaagagcgtgggcatctgcaccatcaagggcatccagatgaccaccagaagagccctgtgcaacgtgaagggcctgagcgaggccaaggtggacaagatcaaggaggccgccaacaagctgatcgagcccggcttcctgaccgccttcgagtacagcgagaagagaaagatggtgttccacatcaccaccggcagccaggagttcgacaagctgctgggcggcggcatcgagagcatggccatcaccgaggccttcggcgagttcagaaccggcaagacccagctgagccacaccctgtgcgtgaccgcccagctgcccggcgccggcggctaccccggcggcaagatcatcttcatcgacaccgagaacaccctgtag

SEQ ID NO: 10430 - DNA, 420 bp, synthetic construct
  misc_feature 1..420: note = Description of Artificial Sequence: Synthetic coding sequence
  source 1..420: mol_type = other DNA
atgaaggaggaccaggtggtggccgaggagcccggcttccaggacgaggaggagagcctgttccaggacatcgacctgctgcagaagcacggcatcaacgtggccgacatcaagaagctgaagagcgtgggcatctgcaccatcaagggcatccagatgaccaccagaagagccctgtgcaacgtgaagggcctgagcgaggccaaggtggacaagatcaaggaggccgccaacaagctgatcgagcccggcttcctgaccgccttcgagtacagcgagaagagaaagatggtgttccacatcaccaccggcagccaggagttcgacaagctgctgggcggcggcatcgagagcatggccatcaccgaggccttcggcgagttcagaaccggcaagacccagctgagccacaccctgtag

SEQ ID NO: 10431 - DNA, 858 bp, synthetic construct
  misc_feature 1..858: note = Description of Artificial Sequence: Synthetic coding sequence
  source 1..858: mol_type = other DNA
atgaaggaggaccaggtggtggccgaggagcccggcttccaggacgaggaggagagcctgttccaggacatcgacctgctgcagaagcacggcatcaacgtggccgacatcaagaagctgaagagcgtgggcatctgcaccatcaagggcatccagatgaccaccagaagagccctgtgcaacgtgaagggcctgagcgaggccaaggtggacaagatcaaggaggccgccaacaagctgatcgagcccggcttcctgaccgccttcgagtacagcgagaagagaaagatggtgttccacatcaccaccggcagccaggagttcgacaagctgctgggcggcggcatcgagagcatggccatcaccgaggccttcggcgagttcagaaccggcaagacccagctgagccacaccctgtgcggcgagcaccagatggagctgctggactacgtggccgccaagttccacgaggaggccggcatcttcaagctgctgatcatcgacagcatcatggccctgttcagagtggacttcagcggcagaggcgagctggccgagagacagcagaagctggcccagatgctgagcagactgcagaagatcagcgaggagtacaacgtggccgtgttcgtgaccaaccagatgaccgccgaccccggcgccaccatgaccttccaggccgaccccaagaagcccatcggcggccacatcctggcccacgccagcaccaccagaatcagcctgagaaagggcagaggcgagctgagaatcgccaagatctacgacagccccgagatgcccgagaacgaggccaccttcgccatcaccgccggcggcatcggcgacgccaaggagtag

SEQ ID NO: 10432 - DNA, 612 bp, synthetic construct
  misc_feature 1..612: note = Description of Artificial Sequence: Synthetic coding sequence
  source 1..612: mol_type = other DNA
atgaaggaggaccaggtggtggccgaggagcccggcttccaggacgaggaggagagcctgttccaggacatcgacctgctgcagaagcacggcatcaacgtggccgacatcaagaagctgaagagcgtgggcatctgcaccatcaagggcatccagatgaccaccagaagagccctgtgcaacgtgaagggcctgagcgaggccaaggtggacaagatcaaggaggccgccaacaagctgatcgagcccggcttcctgaccgccttcgagtacagcgagaagagaaagatggtgttccacatcaccaccggcagccaggagttcgacaagctgctgggcggcggcatcgagagcatggccatcaccgaggccttcggcgagttcagaaccggcaagacccagctgagccacaccctgtgcggcgagcaccagatggagctgctggactacgtggccgccaagttccacgaggaggccggcatcttcaagctgctgatcatcgacagcatcatggccctgttcagagtggacttcagcggcagaggcgagctggccgagagacagcagaagctggcccagatgctgagcagactgcagaagatcagcgagtag

SEQ ID NO: 10433 - DNA, 1599 bp, synthetic construct
  misc_feature 1..1599: note = Description of Artificial Sequence: Synthetic coding sequence
  source 1..1599: mol_type = other DNA
atgaacggcgtgctgatcccccacacccccatcgccgtggacttctggagcctgagaagagccggcaccgccagactgttcttcctgagccacatgcacagcgaccacaccgtgggcctgagcagcacctgggccagacccctgtactgcagccccatcaccgcccacctgctgcacagacacctgcaggtgagcaagcagtggatccaggccctggaggtgggcgagagccacgtgctgcccctggacgagatcggccaggagaccatgaccgtgaccctgctggacgccaaccactgccccggcagcgtgatgttcctgttcgagggctacttcggcaccatcctgtacaccggcgacttcagatacacccccagcatgctgaaggagcccgccctgaccctgggcaagcagatccacaccctgtacctggacaacaccaactgcaaccccgccctggtgctgcccagcagacaggaggccgcccaccagatcgtgcagctgatcagaaagcacccccagcacaacatcaagatcggcctgtacagcctgggcaaggagagcctgctggagcagctggccctggagttccagacctgggtggtgctgagccccagaagactggagctggtgcagctgctgggcctggccgacgtgttcaccgtggaggagaaggccggcagaatccacgccgtggaccacatggagatctgccacagcaacatgctgagatggaaccagacccaccccaccatcgccatcctgcccaccagcagaaagatccacagcagccaccccgacatccacgtgatcccctacagcgaccacagcagctacagcgagctgagagccttcgtggccgccctgaagccctgccaggtggtgcccatcgtgagcagaagaccctgcggcggcttccaggacagcctgagccccagaatcagcgtgcccctgatccccgacagcgtgcagcagtacatgagcagcagcagcagaaagcccagcctgctgtggctgctggagagaagactgaagagacccagaacccagggcgtggtgttcgagagccccgaggagagcgccgaccagagccaggccgacagagacagcaagaaggccaagaaggagaagctgagcccctggcccgccgacctggagaagcagcccagccaccaccccctgagaatcaagaagcagctgttccccgacctgtacagcaaggagtggaacaaggccgtgcccttctgcgagagccagaagagagtgaccatgctgaccgcccccctgggcttcagcgtgcacctgagaagcaccgacgaggagttcatcagccagaagaccagagaggagatcggcctgggcagccccctggtgcccatgggcgacgacgacggcggccccgaggccaccggcaaccagagcgcctggatgggccacggcagccccctgagccacagcagcaagggcacccccctgctggccaccgagttcagaggcctggccctgaagtacctgctgacccccgtgaacttcttccaggccggctacagcagcagaagattcgaccagcaggtggagaagtaccacaagccctgctag

SEQ ID NO: 10434 - DNA, 1734 bp, synthetic construct
  misc_feature 1..1734: note = Description of Artificial Sequence: Synthetic coding sequence
  source 1..1734: mol_type = other DNA
atgaagcaccaggagagattcctgttccagggcaacaacggcaccgtgctgtacaccggcgacttcagactggcccagggcgaggccgccagaatggagctgctgcacagcggcggcagagtgaaggacatccagagcgtgtacctggacaccaccttctgcgaccccagattctaccagatccccagcagagaggagtgcctgagcggcgtgctggagctggtgagaagctggatcaccagaagcccctaccacgtggtgtggctgaactgcaaggccgcctacggctacgagtacctgttcaccaacctgagcgaggagctgggcgtgcaggtgcacgtgaacaagctggacatgttcagaaacatgcccgagatcctgcaccacctgaccaccgacagaaacacccagatccacgcctgcagacaccccaaggccgaggagtacttccagtggagcaagctgccctgcggcatcaccagcagaaacagaatccccctgcacatcatcagcatcaagcccagcaccatgtggttcggcgagagaagcagaaagaccaacgtgatcgtgagaaccggcgagagcagctacagagcctgcttcagcttccacagcagctacagcgagatcaaggacttcctgagctacctgtgccccgtgaacgcctaccccaacgtgatccccgtgggcaccaccatggacaaggtggtggagatcctgaagcccctgtgcagaagcagccagagcaccgagcccaagtacaagcccctgggcaagctgaagagagccagaaccgtgcacagagacagcgaggaggaggacgactacctgttcgacgaccccctgcccatccccctgagacacaaggtgccctaccccgagaccttccaccccgaggtgttcagcatgaccgccgtgagcgagaagcagcccgagaagctgagacagacccccggctgctgcagagccgagtgcatgcagagcagcagattcaccaacttcgtggactgcgaggagagcaacagcgagagcgaggaggaggtgggcatccccgccagcctgcagggcgacctgggcagcgtgctgcacctgcagaaggccgacggcgacgtgccccagtgggaggtgttcttcaagagaaacgacgagatcaccgacgagagcctggagaacttccccagcagcaccgtggccggcggcagccagagccccaagctgttcagcgacagcgacggcgagagcacccacatcagcagccagaacagcagccagagcacccacatcaccgagcagggcagccagggctgggacagccagagcgacaccgtgctgctgagcagccaggagagaaacagcggcgacatcaccagcctggacaaggccgactacagacccaccatcaaggagaacatccccgccagcctgatggagcagaacgtgatctgccccaaggacacctacagcgacctgaagagcagagacaaggacgtgaccatcgtgcccagcaccggcgagcccaccaccctgagcagcgagacccacatccccgaggagaagagcctgctgaacctgagcaccaacgccgacagccagagcagcagcgacttcgaggtgcccagcacccccgaggccgagctgcccaagagagagcacctgcagtacctgtacgagaagctggccaccggcgagagcatcgccgtgaagaagagaaagtgcagcctgctggacacctag

SEQ ID NO: 10435 - DNA, 255 bp, synthetic construct
  misc_feature 1..255: note = Description of Artificial Sequence: Synthetic coding sequence
  source 1..255: mol_type = other DNA
atgttcctgttccagggcaacaacggcaccgtgctgtacaccggcgacttcagactggcccagggcgaggccgccagaatggagctgctgcacagcggcggcagagtgaaggacatccagagcgtgtacctggacaccaccttctgcgaccccagattctaccagatccccagcagagaggagtgcctgagcggcgtgctggagctggtgagaagctggatcaccagaagcccctaccacgtggtgtggctgtag

SEQ ID NO: 10436 - DNA, 1038 bp, synthetic construct
  misc_feature 1..1038: note = Description of Artificial Sequence: Synthetic coding sequence
  source 1..1038: mol_type = other DNA
atggacaaggtggtggagatcctgaagcccctgtgcagaagcagccagagcaccgagcccaagtacaagcccctgggcaagctgaagagagccagaaccgtgcacagagacagcgaggaggaggacgactacctgttcgacgaccccctgcccatccccctgagacacaaggtgccctaccccgagaccttccaccccgaggtgttcagcatgaccgccgtgagcgagaagcagcccgagaagctgagacagacccccggctgctgcagagccgagtgcatgcagagcagcagattcaccaacttcgtggactgcgaggagagcaacagcgagagcgaggaggaggtgggcatccccgccagcctgcagggcgacctgggcagcgtgctgcacctgcagaaggccgacggcgacgtgccccagtgggaggtgttcttcaagagaaacgacgagatcaccgacgagagcctggagaacttccccagcagcaccgtggccggcggcagccagagccccaagctgttcagcgacagcgacggcgagagcacccacatcagcagccagaacagcagccagagcacccacatcaccgagcagggcagccagggctgggacagccagagcgacaccgtgctgctgagcagccaggagagaaacagcggcgacatcaccagcctggacaaggccgactacagacccaccatcaaggagaacatccccgccagcctgatggagcagaacgtgatctgccccaaggacacctacagcgacctgaagagcagagacaaggacgtgaccatcgtgcccagcaccggcgagcccaccaccctgagcagcgagacccacatccccgaggagaagagcctgctgaacctgagcaccaacgccgacagccagagcagcagcgacttcgaggtgcccagcacccccgaggccgagctgcccaagagagagcacctgcagtacctgtacgagaagctggccaccggcgagagcatcgccgtgaagaagagaaagtgcagcctgctggacacctag

SEQ ID NO: 10437 - DNA, 1734 bp, synthetic construct; identical to SEQ ID NO: 10434
  misc_feature 1..1734: note = Description of Artificial Sequence: Synthetic coding sequence
  source 1..1734: mol_type = other DNA

SEQ ID NO: 10438 - DNA, 1734 bp, synthetic construct; identical to SEQ ID NO: 10434
  misc_feature 1..1734: note = Description of Artificial Sequence: Synthetic coding sequence
  source 1..1734: mol_type = other DNA

SEQ ID NO: 10439 - DNA, 1719 bp, synthetic construct
  misc_feature 1..1719: note = Description of Artificial Sequence: Synthetic coding sequence
  source 1..1719: mol_type = other DNA
atgttcctgttccagggcaacaacggcaccgtgctgtacaccggcgacttcagactggcccagggcgaggccgccagaatggagctgctgcacagcggcggcagagtgaaggacatccagagcgtgtacctggacaccaccttctgcgaccccagattctaccagatccccagcagagaggagtgcctgagcggcgtgctggagctggtgagaagctggatcaccagaagcccctaccacgtggtgtggctgaactgcaaggccgcctacggctacgagtacctgttcaccaacctgagcgaggagctgggcgtgcaggtgcacgtgaacaagctggacatgttcagaaacatgcccgagatcctgcaccacctgaccaccgacagaaacacccagatccacgcctgcagacaccccaaggccgaggagtacttccagtggagcaagctgccctgcggcatcaccagcagaaacagaatccccctgcacatcatcagcatcaagcccagcaccatgtggttcggcgagagaagcagaaagaccaacgtgatcgtgagaaccggcgagagcagctacagagcctgcttcagcttccacagcagctacagcgagatcaaggacttcctgagctacctgtgccccgtgaacgcctaccccaacgtgatccccgtgggcaccaccatggacaaggtggtggagatcctgaagcccctgtgcagaagcagccagagcaccgagcccaagtacaagcccctgggcaagctgaagagagccagaaccgtgcacagagacagcgaggaggaggacgactacctgttcgacgaccccctgcccatccccctgagacacaaggtgccctaccccgagaccttccaccccgaggtgttcagcatgaccgccgtgagcgagaagcagcccgagaagctgagacagacccccggctgctgcagagccgagtgcatgcagagcagcagattcaccaacttcgtggactgcgaggagagcaacagcgagagcgaggaggaggtgggcatccccgccagcctgcagggcgacctgggcagcgtgctgcacctgcagaaggccgacggcgacgtgccccagtgggaggtgttcttcaagagaaacgacgagatcaccgacgagagcctggagaacttccccagcagcaccgtggccggcggcagccagagccccaagctgttcagcgacagcgacggcgagagcacccacatcagcagccagaacagcagccagagcacccacatcaccgagcagggcagccagggctgggacagccagagcgacaccgtgctgctgagcagccaggagagaaacagcggcgacatcaccagcctggacaaggccgactacagacccaccatcaaggagaacatccccgccagcctgatggagcagaacgtgatctgccccaaggacacctacagcgacctgaagagcagagacaaggacgtgaccatcgtgcccagcaccggcgagcccaccaccctgagcagcgagacccacatccccgaggagaagagcctgctgaacctgagcaccaacgccgacagccagagcagcagcgacttcgaggtgcccagcacccccgaggccgagctgcccaagagagagcacctgcagtacctgtacgagaagctggccaccggcgagagcatcgccgtgaagaagagaaagtgcagcctgctggacacctag

SEQ ID NO: 10440 - DNA, 1719 bp, synthetic construct; identical to SEQ ID NO: 10439
  misc_feature 1..1719: note = Description of Artificial Sequence: Synthetic coding sequence
  source 1..1719: mol_type = other DNA

SEQ ID NO: 10441 - DNA, 1719 bp, synthetic construct; identical to SEQ ID NO: 10439
  misc_feature 1..1719: note = Description of Artificial Sequence: Synthetic coding sequence
  source 1..1719: mol_type = other DNA

SEQ ID NO: 10442 - DNA, 2079 bp, synthetic construct
  misc_feature 1..2079: note = Description of Artificial Sequence: Synthetic coding sequence
  source 1..2079: mol_type = other DNA
atgagcagcttcgagggccagatggccgagtaccccaccatcagcatcgacagattcgacagagagaacctgagagccagagcctacttcctgagccactgccacaaggaccacatgaagggcctgagagcccccaccctgaagagaagactggagtgcagcctgaaggtgtacctgtactgcagccccgtgaccaaggagctgctgctgaccagccccaagtacagattctggaagaagagaatcatcagcatcgagatcgagacccccacccagatcagcctggtggacgaggccagcggcgagaaggaggagatcgtggtgaccctgctgcccgccggccactgccccggcagcgtgatgttcctgttccagggcaacaacggcaccgtgctgtacaccggcgacttcagactggcccagggcgaggccgccagaatggagctgctgcacagcggcggcagagtgaaggacatccagagcgtgtacctggacaccaccttctgcgaccccagattctaccagatccccagcagagaggagtgcctgagcggcgtgctggagctggtgagaagctggatcaccagaagcccctaccacgtggtgtggctgaactgcaaggccgcctacggctacgagtacctgttcaccaacctgagcgaggagctgggcgtgcaggtgcacgtgaacaagctggacatgttcagaaacatgcccgagatcctgcaccacctgaccaccgacagaaacacccagatccacgcctgcagacaccccaaggccgaggagtacttccagtggagcaagctgccctgcggcatcaccagcagaaacagaatccccctgcacatcatcagcatcaagcccagcaccatgtggttcggcgagagaagcagaaagaccaacgtgatcgtgagaaccggcgagagcagctacagagcctgcttcagcttccacagcagctacagcgagatcaaggacttcctgagctacctgtgccccgtgaacgcctaccccaacgtgatccccgtgggcaccaccatggacaaggtggtggagatcctgaagcccctgtgcagaagcagccagagcaccgagcccaagtacaagcccctgggcaagctgaagagagccagaaccgtgcacagagacagcgaggaggaggacgactacctgttcgacgaccccctgcccatccccctgagacacaaggtgccctaccccgagaccttccaccccgaggtgttcagcatgaccgccgtgagcgagaagcagcccgagaagctgagacagacccccggctgctgcagagccgagtgcatgcagagcagcagattcaccaacttcgtggactgcgaggagagcaacagcgagagcgaggaggaggtgggcatccccgccagcctgcagggcgacctgggcagcgtgctgcacctgcagaaggccgacggcgacgtgccccagtgggaggtgttcttcaagagaaacgacgagatcaccgacgagagcctggagaacttccccagcagcaccgtggccggcggcagccagagccccaagctgttcagcgacagcgacggcgagagcacccacatcagcagccagaacagcagccagagcacccacatcaccgagcagggcagccagggctgggacagccagagcgacaccgtgctgctgagcagccaggagagaaacagcggcgacatcaccagcctggacaaggccgactacagacccaccatcaaggagaacatccccgccagcctgatggagcagaacgtgatctgccccaaggacacctacagcgacctgaagagcagagacaaggacgtgaccatcgtgcccagcaccggcgagcccaccaccctgagcagcgagacccacatccccgaggagaagagcctgctgaacctgagcaccaacgccgacagccagagcagcagcgacttcgaggtgcccagcacccccgaggccgagctgcccaagagagagcacctgcagtacctgtacgagaagctggccaccggcgagagcatcgccgtgaagaagagaaagtgcagcctgctggacacctag

SEQ ID NO: 10443 - DNA, 1305 bp, synthetic construct
  misc_feature 1..1305: note = Description of Artificial Sequence: Synthetic coding sequence
  source 1..1305: mol_type = other DNA
atgagcagcttcgagggccagatggccgagtaccccaccatcagcatcgacagattcgacagagagaacctgagagccagagcctacttcctgagccactgccacaaggaccacatgaagggcctgagagcccccaccctgaagagaagactggagtgcagcctgaaggtgtacctgtactgcagccccgtgaccaaggagctgctgctgaccagccccaagtacagattctggaagaagagaatcatcagcatcgagatcgagacccccacccagatcagcctggtggacgaggccagcggcgagaaggaggagatcgtggtgaccctgctgcccgccggccactgccccggcagcgtgatgttcctgttccagggcaacaacggcaccgtgctgtacaccggcgacttcagactggcccagggcgaggccgccagaatggagctgctgcacagcggcggcagagtgaaggacatccagagcgtgtacctggacaccaccttctgcgaccccagattctaccagatccccagcagagaggagtgcctgagcggcgtgctggagctggtgagaagctggatcaccagaagcccctaccacgtggtgtggctgaactgcaaggccgcctacggctacgagtacctgttcaccaacctgagcgaggagctgggcgtgcaggtgcacgtgaacaagctggacatgttcagaaacatgcccgagatcctgcaccacctgaccaccgacagaaacacccagatccacgcctgcagacaccccaaggccgaggagtacttccagtggagcaagctgccctgcggcatcaccagcagaaacagaatccccctgcacatcatcagcatcaagcccagcaccatgtggttcggcgagagaagcagaaagaccaacgtgatcgtgagaaccggcgagagcagctacagagcctgcttcagcttccacagcagctacagcgagatcaaggacttcctgagctacctgtgccccgtgaacgcctaccccaacgtgatccccgtgggcaccaccatggacaaggtggtggagatcctgaagcccctgtgcagaagcagccagagcaccgagcccaagtacaagcccctgggcaagctgaagagagccagaaccgtgcacagagacagcggcagccacagcgtgacccaggccagaatgagatggtgccaccacgacagcctgtaccccctgacccccggcatcaagagaagcagctgcctgagcctgctgaccagctggatcaccggcgcctacagacacgcccagctgatgatctag

SEQ ID NO: 10444 - DNA, 1719 bp, synthetic construct; identical to SEQ ID NO: 10439
  misc_feature 1..1719: note = Description of Artificial Sequence: Synthetic coding sequence
  source 1..1719: mol_type = other DNA

SEQ ID NO: 10445 - DNA, 354 bp, synthetic construct
  misc_feature 1..354: note = Description of Artificial Sequence: Synthetic coding sequence
  source 1..354: mol_type = other DNA
atggagctgctgcacagcggcggcagagtgaaggacatccagagcgtgtacctggacaccaccttctgcgaccccagattctaccagatccccagcagagaggagtgcctgagcggcgtgctggagctggtgagaagctggatcaccagaagcccctaccacgtggtgtggctgaactgcaaggccgcctacggctacgagtacctgttcaccaacctgagcgaggagctgggcgtgcaggtgcacgtgaacaagctggacatgttcagaaacatgcccgagatcctgcaccacctgaccaccgacagaaacacccagatccacgcctgcagacaccccaaggccgaggagtag

SEQ ID NO: 10446 - DNA, 1719 bp, synthetic construct; identical to SEQ ID NO: 10439
  misc_feature 1..1719: note = Description of Artificial Sequence: Synthetic coding sequence
  source 1..1719: mol_type = other DNA

SEQ ID NO: 10447 - DNA, 174 bp, synthetic construct
  misc_feature 1..174: note = Description of Artificial Sequence: Synthetic coding sequence
  source 1..174: mol_type = other DNA
atgaagcaccaggagagattcctgttccagggcaacaacggcaccgtgctgtacaccggcgacttcagactggcccagggcgaggccgccagaatggagctgctgcacagcggcggcagagtgaaggacatccagagcgtgtacctggacaccaccttctgcgaccccagatag

SEQ ID NO: 10448 - DNA, 807 bp, synthetic construct
  misc_feature 1..807: note = Description of Artificial Sequence: Synthetic coding sequence
  source 1..807: mol_type = other DNA
atggaggtgaccggcgacgccggcgtgcccgagagcggcgagatcagaaccctgaagccctgcctgctgagaagaaactacagcagagagcagcacggcgtggccgccagctgcctggaggacctgagaagcaaggcctgcgacatcctggccatcgacaagagcctgacccccgtgaccctggtgctggccgaggacggcaccatcgtggacgacgacgactacttcctgtgcctgcccagcaacaccaagttcgtggccctggccagcaacgagaagtgggcctacaacaacagcgacggcggcaccgcctggatcagccaggagagcttcgacgtggacgagaccgacagcggcgccggcctgaagtggaagaacgtggccagacagctgaaggaggacctgagcagcatcatcctgctgagcgaggaggacctgcagatgctggtggacgccccctgcagcgacctggcccaggagctgagacagagctgcgccaccgtgcagagactgcagcacaccctgcagcaggtgctggaccagagagaggaggtgagacagagcaagcagctgctgcagctgtacctgcaggccctggagaaggagggcagcctgctgagcaagcaggaggagagcaaggccgccttcggcgaggaggtggacgccgtggacaccggcatcagcagagagaccagcagcgacgtggccctggccagccacatcctgaccgccctgagagagaagcaggcccccgagctgagcctgagcagccaggacctggaggtgggcggcaaccagggccactag

SEQ ID NO: 10449 - DNA, 996 bp, synthetic construct
  misc_feature 1..996: note = Description of Artificial Sequence: Synthetic coding sequence
  source 1..996: mol_type = other DNA
atggaggtgaccggcgacgccggcgtgcccgagagcggcgagatcagaaccctgaagccctgcctgctgagaagaaactacagcagagagcagcacggcgtggccgccagctgcctggaggacctgagaagcaaggcctgcgacatcctggccatcgacaagagcctgacccccgtgaccctggtgctggccgaggacggcaccatcgtggacgacgacgactacttcctgtgcctgcccagcaacaccaagttcgtggccctggccagcaacgagaagtgggcctacaacaacagcgacggcggcaccgcctggatcagccaggagagcttcgacgtggacgagaccgacagcggcgccggcctgaagtggaagaacgtggccagacagctgaaggaggacctgagcagcatcatcctgctgagcgaggaggacctgcagatgctggtggacgccccctgcagcgacctggcccaggagctgagacagagctgcgccaccgtgcagagactgcagcacaccctgcagcaggtgctggaccagagagaggaggtgagacagagcaagcagctgctgcagctgtacctgcaggccctggagaaggagggcagcctgctgagcaagcaggaggagagcaaggccgccttcggcgaggaggtggacgccgtggacaccggcatcagcagagagaccagcagcgacgtggccctggccagccacatcctgaccgccctgagagagaagcaggcccccgagctgagcctgagcagccaggacctggagctggtgaccaaggaggaccccaaggccctggccgtggccctgaactgggacatcaagaagaccgagaccgtgcaggaggcctgcgagagagagctggccctgagactgcagcagacccagagcctgcacagcctgagaagcatcagcgccagcaaggccagcccccccggcgacctgcagaaccccaagagagccagacaggaccccacctag

SEQ ID NO: 10450 - DNA, 510 bp, synthetic construct
  misc_feature 1..510: note = Description of Artificial Sequence: Synthetic coding sequence
  source 1..510: mol_type = other DNA
atggccgccgagagcctgcccttcagcttcggcaccctgagcagctgggagctggaggcctggtacgaggacctgcaggaggtgctgagcagcgacgagaacggcggcacctacgtgagcccccccggcaacgaggaggaggagagcaagatcttcaccaccctggaccccgccagcctggcctggctgaccgaggaggagcccgagcccgccgaggtgaccagcaccagccagagcccccacagccccgacagcagccagagcagcctggcccaggaggaggaggaggaggaccagggcagaaccagaaagagaaagcagagcggccacagccccgccagagccggcaagcagagaatgaaggagaaggagcaggagaacgagagaaaggtggcccagctggccgaggagaacgagagactgaagcaggagatcgagagactgaccagagaggtggaggccaccagaagagccctgatcgacagaatggtgaacctgcaccaggcctag

SEQ ID NO: 10451 - DNA, 510 bp, synthetic construct; identical to SEQ ID NO: 10450
  misc_feature 1..510: note = Description of Artificial Sequence: Synthetic coding sequence
  source 1..510: mol_type = other DNA

SEQ ID NO: 10452 - DNA, 438 bp, synthetic construct
  misc_feature 1..438: note = Description of Artificial Sequence: Synthetic coding sequence
  source 1..438: mol_type = other DNA
atggagctggtgcccgccaccccccactaccccgccgacgtgctgttccagaccgaccccaccgccgagatggccgccgagagcctgcccttcagcttcggcaccctgagcagctgggagctggaggcctggtacgaggacctgcaggaggtgctgagcagcgacgagaacggcggcacctacgtgagcccccccggcaacgaggaggaggagagcaagatcttcaccaccctggaccccgccagcctggcctggctgaccgaggaggagcccgagcccgccgaggtgaccagcaccagccagagcccccacagccccgacagcagccagagcagcctggcccaggaggaggaggaggaggaccagggcagaaccagaaagagaaagcagagcggccacagccccgccagagccggcaagcagagaatgaaggagtag

SEQ ID NO: 10453 - DNA, 579 bp, synthetic construct
  misc_feature 1..579: note = Description of Artificial Sequence: Synthetic coding sequence
  source 1..579: mol_type = other DNA
atggagctggtgcccgccaccccccactaccccgccgacgtgctgttccagaccgaccccaccgccgagatggccgccgagagcctgcccttcagcttcggcaccctgagcagctgggagctggaggcctggtacgaggacctgcaggaggtgctgagcagcgacgagaacggcggcacctacgtgagcccccccggcaacgaggaggaggagagcaagatcttcaccaccctggaccccgccagcctggcctggctgaccgaggaggagcccgagcccgccgaggtgaccagcaccagccagagcccccacagccccgacagcagccagagcagcctggcccaggaggaggaggaggaggaccagggcagaaccagaaagagaaagcagagcggccacagccccgccagagccggcaagcagagaatgaaggagaaggagcaggagaacgagagaaaggtggcccagctggccgaggagaacgagagactgaagcaggagatcgagagactgaccagagaggtggaggccaccagaagagccctgatcgacagaatggtgaacctgcaccaggcctag

SEQ ID NO: 10454 - DNA, 579 bp, synthetic construct; identical to SEQ ID NO: 10453
  misc_feature 1..579: note = Description of Artificial Sequence: Synthetic coding sequence
  source 1..579: mol_type = other DNA

SEQ ID NO: 10455 - DNA, 864 bp, synthetic construct
  misc_feature 1..864: note = Description of Artificial Sequence: Synthetic coding sequence
  source 1..864: mol_type = other DNA
atggccagcctggaggtgagcagaagccccagaagaagcagaagagagctggaggtgagaagccccagacagaacaagtacagcgtgctgctgcccacctacaacgagagagagaacctgcccctgatcgtgtggctgctggtgaagagcttcagcgagagcggcatcaactacgagatcatcatcatcgacgacggcagccccgacggcaccagagacgtggccgagcagctggagaagatctacggcagcgacagaatcctgctgagacccagagagaagaagctgggcctgggcaccgcctacatccacggcatgaagcacgccaccggcaactacatcatcatcatggacgccgacctgagccaccaccccaagttcatccccgagttcatcagaaagcagaaggagggcaacttcgacatcgtgagcggcaccagatacaagggcaacggcggcgtgtacggctgggacctgaagagaaagatcatcagcgacggcgtgctgccctgctgccccggctggagcctgctgggcagcagcgaccccgccatcctggccagctgggactacagcagaggcgccaacttcctgacccagatcctgctgagacccggcgccagcgacctgaccggcagcttcagactgtacagaaaggaggtgctggagaagctgatcgagaagtgcgtgagcaagggctacgtgttccagatggagatgatcgtgagagccagacagctgaactacaccatcggcgaggtgcccatcagcttcgtggacagagtgtacggcgagagcaagctgggcggcaacgagatcgtgagcttcctgaagggcctgctgaccctgttcgccaccacctag

SEQ ID NO: 10456 - DNA, 768 bp, synthetic construct
  misc_feature 1..768: note = Description of Artificial Sequence: Synthetic coding sequence
  source 1..768: mol_type = other DNA
atggccagcctggaggtgagcagaagccccagaagaagcagaagagagctggaggtgagaagccccagacagaacaagtacagcgtgctgctgcccacctacaacgagagagagaacctgcccctgatcgtgtggctgctggtgaagagcttcagcgagagcggcatcaactacgagatcatcatcatcgacgacggcagccccgacggcaccagagacgtggccgagcagctggagaagatctacggcagcgacagaatcctgctgagacccagagagaagaagctgggcctgggcaccgcctacatccacggcatgaagcacgccaccggcaactacatcatcatcatggacgccgacctgagccaccaccccaagttcatccccgagttcatcagcgacggcgtgctgccctgctgccccggctggagcctgctgggcagcagcgaccccgccatcctggccagctgggactacagcagaggcgccaacttcctgacccagatcctgctgagacccggcgccagcgacctgaccggcagcttcagactgtacagaaaggaggtgctggagaagctgatcgagaagtgcgtgagcaagggctacgtgttccagatggagatgatcgtgagagccagacagctgaactacaccatcggcgaggtgcccatcagcttcgtggacagagtgtacggcgagagcaagctgggcggcaacgagatcgtgagcttcctgaagggcctgctgaccctgttcgccaccacctag

SEQ ID NO: 10457 - DNA, 888 bp, synthetic construct
  misc_feature 1..888: note = Description of Artificial Sequence: Synthetic coding sequence
  source 1..888: mol_type = other DNA
tgagccagcctggaggtgagcagaagccccagaagaagcagaagagagctggaggtgagaagccccagacagaacaagtacagcgtgctgctgcccacctacaacgagagagagaacctgcccctgatcgtgtggctgctggtgaagagcttcagcgagagcggcatcaactacgagatcatcatcatcgacgacggcagccccgacggcaccagagacgtggccgagcagctggagaagatctacggcagcgacagaatcctgctgagacccagagagaagaagctgggcctgggcaccgcctacatccacggcatgaagcacgccaccggcaactacatcatcatcatggacgccgacctgagccaccaccccaagttcatccccgagttcatcagaaagcagaaggagggcaacttcgacatcgtgagcggcaccagatacaagggcaacggcggcgtgtacggctgggacctgaagagaaagatcatcagcgacggcgtgctgccctgctgccccggctggagcctgctgggcagcagcgaccccgccatcctggccagctgggactacagatgcgagccccccagactggccagcagaggcgccaacttcctgacccagatcctgctgagacccggcgccagcgacctgaccggcagcttcagactgtacagaaaggaggtgctggagaagctgatcgagaagtgcgtgagcaagggctacgtgttccagatggagatgatcgtgagagccagacagctgaactacaccatcggcgaggtgcccatcagcttcgtggacagagtgtacggcgagagcaagctgggcggcaacgagatcgtgagcttcctgaagggcctgctgaccctgttcgccaccacctag

SEQ ID NO: 10458 - DNA, 783 bp, synthetic construct
  misc_feature 1..783: note = Description of Artificial Sequence: Synthetic coding sequence
  source 1..783: mol_type = other DNA
atggccagcctggaggtgagcagaagccccagaagaagcagaagagagctggaggtgagaagccccagacagaacaagtacagcgtgctgctgcccacctacaacgagagagagaacctgcccctgatcgtgtggctgctggtgaagagcttcagcgagagcggcatcaactacgagatcatcatcatcgacgacggcagccccgacggcaccagagacgtggccgagcagctggagaagatctacggcagcgacagaatcctgctgagacccagagagaagaagctgggcctgggcaccgcctacatccacggcatgaagcacgccaccggcaactacatcatcatcatggacgccgacctgagccaccaccccaagttcatccccgagttcatcagaaagcagaaggagggcaacttcgacatcgtgagcggcaccagatacaagggcaacggcggcgtgtacggctgggacctgaagagaaagatcatcagcagaggcgccaacttcctgacccagatcctgctgagacccggcgccagcgacctgaccggcagcttcagactgtacagaaaggaggtgctggagaagctgatcgagaagtgcgtgagcaagggctacgtgttccagatggagatgatcgtgagagccagacagctgaactacaccatcggcgaggtgcccatcagcttcgtggacagagtgtacggcgagagcaagctgggcggcaacgagatcgtgagcttcctgaagggcctgctgaccctgttcgccaccacctag

SEQ ID NO: 10459 - DNA, 666 bp, synthetic construct
  misc_feature 1..666: note = Description of Artificial Sequence: Synthetic coding sequence
  source 1..666: mol_type = other DNA
atggccagcctggaggtgagcagaagccccagaagaagcagaagagagctggaggtgagaagccccagacagaacaagtacagcgtgctgctgcccacctacaacgagagagagaacctgcccctgatcgtgtggctgctggtgaagagcttcagcgagagcggcatcaactacgagatcatcatcatcgacgacggcagccccgacggcaccagagacgtggccgagcagctggagaagatctacggcagcgacagaatcctgctgagacccagagagaagaagctgggcctgggcaccgcctacatccacggcatgaagcacgccaccggcaactacatcatcatcatggacgccgacctgagccaccaccccaagttcatccccgagttcatcagcgacggcgtgctgccctgctgccccggctggagcctgctgggcagcagcgaccccgccatcctggccagctgggactacagcagaggcgccaacttcctgacccagatcctgctgagacccggcgccagcgacctgaccggcagcttcagactgtacagaaaggaggtgctggagaagctgatcgagaagtgcgtgagcaagggctacgtgttccagatggagatgatcgtgagagccagacagctgaactacaccatcggcgagtag

SEQ ID NO: 10460 - DNA, 888 bp, synthetic construct
  misc_feature 1..888: note = Description of Artificial Sequence: Synthetic coding sequence
  source 1..888: mol_type = other DNA
atggccagcctggaggtgagcagaagccccagaagaagcagaagagagctggaggtgagaagccccagacagaacaagtacagcgtgctgctgcccacctacaacgagagagagaacctgcccctgatcgtgtggctgctggtgaagagcttcagcgagagcggcatcaactacgagatcatcatcatcgacgacggcagccccgacggcaccagagacgtggccgagcagctggagaagatctacggcagcgacagaatcctgctgagacccagagagaagaagctgggcctgggcaccgcctacatccacggcatgaagcacgccaccggcaactacatcatcatcatggacgccgacctgagccaccaccccaagttcatccccgagttcatcagaaagcagaaggagggcaacttcgacatcgtgagcggcaccagatacaagggcaacggcggcgtgtacggctgggacctgaagagaaagatcatcagcgacggcgtgctgccctgctgccccggctggagcctgctgggcagcagcgaccccgccatcctggccagctgggactacagatgcgagccccccagactggccagcagaggcgccaacttcctgacccagatcctgctgagacccggcgccagcgacctgaccggcagcttcagactgtacagaaaggaggtgctggagaagctgatcgagaagtgcgtgagcaagggctacgtgttccagatggagatgatcgtgagagccagacagctgaactacaccatcggcgaggtgcccatcagcttcgtggacagagtgtacggcgagagcaagctgggcggcaacgagatcgtgagcttcctgaagggcctgctgaccctgttcgccaccacctag

SEQ ID NO: 10461 - DNA, 1332 bp, synthetic construct
  misc_feature 1..1332: note = Description of Artificial Sequence: Synthetic coding sequence
  source 1..1332: mol_type = other DNA
atgagaagacaggtgatggccgccctggtggtgagcggcgccgccgagcagggcggcagagacggccccggcagaggcagagcccccagaggcagagtggccaaccagatcccccccgagatcctgaagaacccccagctgcaggccgccatcagagtgctgcccagcaactacaacttcgagatccccaagaccatctggagaatccagcaggcccaggccaagaaggtggccctgcagatgcccgagggcctgctgctgttcgcctgcaccatcgtggacatcctggagagattcaccgaggccgaggtgatggtgatgggcgacgtgacctacggcgcctgctgcgtggacgacttcaccgccagagccctgggcgccgacttcctggtgcactacggccacagctgcctgatccccatggacaccagcgcccaggacttcagagtgctgtacgtgttcgtggacatcagaatcgacaccacccacctgctggacagcctgagactgaccttcccccccgccaccgccctggccctggtgagcaccatccagttcgtgagcaccctgcaggccgccgcccaggagctgaaggccgagtacagagtgagcgtgccccagtgcaagcccctgagccccggcgagatcctgggctgcaccagccccagactgagcaaggaggtggaggccgtggtgtacctgggcgacggcagattccacctggagagcgtgatgatcgccaaccccaacgtgcccgcctacagatacgacccctacagcaaggtgctgagcagagagcactacgaccaccagagaatgcaggccgccagacaggaggccatcgccaccgccagaagcgccaagagctggggcctgatcctgggcaccctgggcagacagggcagccccaagatcctggagcacctggagagcagactgagagccctgggcctgagcttcgtgagactgctgctgagcgagatcttccccagcaagctgagcctgctgcccgaggtggacgtgtgggtgcaggtggcctgccccagactgagcatcgactggggcaccgccttccccaagcccctgctgaccccctacgaggccgccgtggccctgagagacatcagctggcagcagccctaccccatggacttctacgccggcagcagcctgggcccctggaccgtgaaccacggccaggacagaagaccccacgcccccggcagacccgccagaggcaaggtgcaggagggcagcgccagaccccccagcgccgtggcctgcgaggactgcagctgcagagacgagaaggtggcccccctggccccctag

SEQ ID NO: 10462 - DNA, 1146 bp, synthetic construct
  misc_feature 1..1146: note = Description of Artificial Sequence: Synthetic coding sequence
  source 1..1146: mol_type = other DNA
atgatcgacaccctgagacccgtgcccttcgccagcgagatggccatcagcaagaccgtggcctggctgaacgagcagctggagctgggcaacgagagactgctgctgatggactgcagaccccaggagctgtacgagagcagccacatcgagagcgccatcaacgtggccatccccggcatcatgctgagaagactgcagaagggcaacctgcccgtgagagccctgttcaccagaggcgaggacagagacagattcaccagaagatgcggcaccgacaccgtggtgctgtacgacgagagcagcagcgactggaacgagaacaccggcggcgagagcgtgctgggcctgctgctgaagaagctgaaggacgagggctgcagagccttctacctggagggcggcttcagcaagttccaggccgagttcagcctgcactgcgagaccaacctggacggcagctgcagcagcagcagcccccccctgcccgtgctgggcctgggcggcctgagaatcagcagcgacagcagcagcgacatcgagagcgacctggacagagaccccaacagcgccaccgacagcgacggcagccccctgagcaacagccagcccagcttccccgtggagatcctgcccttcctgtacctgggctgcgccaaggacagcaccaacctggacgtgctggaggagttcggcatcaagtacatcctgaacgtgacccccaacctgcccaacctgttcgagaacgccggcgagttcaagtacaagcagatccccatcagcgaccactggagccagaacctgagccagttcttccccgaggccatcagcttcatcgacgaggccagaggcaagaactgcggcgtgctggtgcactgcctggccggcatcagcagaagcgtgaccgtgaccgtggcctacctgatgcagaagctgaacctgagcatgaacgacgcctacgacatcgtgaagatgaagaagagcaacatcagccccaacttcaacttcatgggccagctgctggacttcgagagaaccctgggcctgagcagcccctgcgacaacagagtgcccgcccagcagctgtacttcaccacccccagcaaccagaacgtgtaccaggtggacagcctgcagagcacctag

SEQ ID NO: 10463 - DNA, 708 bp, synthetic construct
  misc_feature 1..708: note = Description of Artificial Sequence: Synthetic coding sequence
  source 1..708: mol_type = other DNA
atgatcgacaccctgagacccgtgcccttcgccagcgagatggccatcagcaagaccgtggcctggctgaacgagcagctggagctgggcaacgagagactgctgctgatggactgcagaccccaggagctgtacgagagcagccacatcgagagcgccatcaacgtggccatccccggcatcatgctgagaagactgcagaagggcaacctgcccgtgagagccctgttcaccagaggcgaggacagagacagattcaccagaagatgcggcaccgacaccgtggtgctgtacgacgagagcagcagcgactggaacgagaacaccggcggcgagagcgtgctgggcctgctgctgaagaagctgaaggacgagggctgcagagccttctacctggaggacgaggccagaggcaagaactgcggcgtgctggtgcactgcctggccggcatcagcagaagcgtgaccgtgaccgtggcctacctgatgcagaagctgaacctgagcatgaacgacgcctacgacatcgtgaagatgaagaagagcaacatcagccccaacttcaacttcatgggccagctgctggacttcgagagaaccctgggcctgagcagcccctgcgacaacagagtgcccgcccagcagctgtacttcaccacccccagcaaccagaacgtgtaccaggtggacagcctgcagagcacctag

SEQ ID NO: 10464 - DNA, 354 bp, synthetic construct
  misc_feature 1..354: note = Description of Artificial Sequence: Synthetic coding sequence
  source 1..354: mol_type = other DNA
atgatcgacaccctgagacccgtgcccttcgccagcgagatggccatcagcaagaccgtggcctggctgaacgagcagctggagctgggcaacgagagactgctgctgatggactgcagaccccaggagctgtacgagagcagccacatcgagagcgccatcaacgtggccatccccggcatcatgctgagaagactgcagaagggcaacctgcccgtgagagccctgttcaccagaggcgaggacagagacagattcaccagaagatgcggcaccgacaccgtggtgctgtacgacgagagcagcagcgactggaacgagaacaccggcggcgagagcgtgctgggcctgtag

SEQ ID NO: 10465 - DNA, 1545 bp, synthetic construct
  misc_feature 1..1545: note = Description of Artificial Sequence: Synthetic coding sequence
  source 1..1545: mol_type = other DNA
atggccgacgccgaggtgatcatcctgcccaagaagcacaagaagaagaaggagagaaagagcctgcccgaggaggacgtggccgagatccagcacgccgaggagttcctgatcaagcccgagagcaaggtggccaagctggacaccagccagtggcccctgctgctgaagaacttcgacaagctgaacgtgagaaccacccactacacccccctggcctgcggcagcaaccccctgaagagagagatcggcgactacatcagaaccggcttcatcaacctggacaagcccagcaaccccagcagccacgaggtggtggcctggatcagaagaatcctgagagtggagaagaccggccacagcggcaccctggaccccaaggtgaccggctgcctgatcgtgtgcatcgagagagccaccagactggtgaagagccagcagagcgccggcaaggagtacgtgggcatcgtgagactgcacaacgccatcgagggcggcacccagctgagcagagccctggagaccctgaccggcgccctgttccagagaccccccctgatcgccgccgtgaagagacagctgagagtgagaaccatctacgagagcaagatgatcgagtacgaccccgagagaagactgggcatcttctgggtgagctgcgaggccggcacctacatcagaaccctgtgcgtgcacctgggcctgctgctgggcgtgggcggccagatgcaggagctgagaagagtgagaagcggcgtgatgagcgagaaggaccacatggtgaccatgcacgacgtgctggacgcccagtggctgtacgacaaccacaaggacgagagctacctgagaagagtggtgtaccccctggagaagctgctgaccagccacaagagactggtgatgaaggacagcgccgtgaacgccatctgctacggcgccaagatcatgctgcccggcgtgctgagatacgaggacggcatcgaggtgaaccaggagatcgtggtgatcaccaccaagggcgaggccatctgcatggccatcgccctgatgaccaccgccgtgatcagcacctgcgaccacggcatcgtggccaagatcaagagagtgatcatggagagagacacctaccccagaaagtggggcctgggccccaaggccagccagaagaagctgatgatcaagcagggcctgctggacaagcacggcaagcccaccgacagcacccccgccacctggaagcaggagtacgtggactacagcgagagcgccaagaaggaggtggtggccgaggtggtgaaggccccccaggtggtggccgaggccgccaagaccgccaagagaaagagagagagcgagagcgagagcgacgagaccccccccgccgccccccagctgatcaagaaggagaagaagaagagcaagaaggacaagaaggccaaggccggcctggagagcggcgccgagcccggcgacggcgacagcgacaccaccaagaagaagaagaagaagaagaaggccaaggaggtggagctggtgagcgagtag

SEQ ID NO: 10466 - DNA, 7245 bp, synthetic construct
  misc_feature 1..7245: note = Description of Artificial Sequence: Synthetic coding sequence
  source 1..7245: mol_type = other DNA
atggccgagaacgtggtggagcccggcccccccagcgccaagagacccaagctgagcagccccgccctgagcgccagcgccagcgacggcaccgacttcggcagcctgttcgacctggagcacgacctgcccgacgagctgatcaacagcaccgagctgggcctgaccaacggcggcgacatcaaccagctgcagaccagcctgggcatggtgcaggacgccgccagcaagcacaagcagctgagcgagctgctgagaagcggcagcagccccaacctgaacatgggcgtgggcggccccggccaggtgatggccagccaggcccagcagagcagccccggcctgggcctgatcaacagcatggtgaagagccccatgacccaggccggcctgaccagccccaacatgggcatgggcaccagcggccccaaccagggccccacccagagcaccggcatgatgaacagccccgtgaaccagcccgccatgggcatgaacaccggcatgaacgccggcatgaaccccggcatgctggccgccggcaacggccagggcatcatgcccaaccaggtgatgaacggcagcatcggcgccggcagaggcagacagaacatgcagtaccccaaccccggcatgggcagcgccggcaacctgctgaccgagcccctgcagcagggcagcccccagatgggcggccagaccggcctgagaggcccccagcccctgaagatgggcatgatgaacaaccccaacccctacggcagcccctacacccagaaccccggccagcagatcggcgccagcggcctgggcctgcagatccagaccaagaccgtgctgagcaacaacctgagccccttcgccatggacaagaaggccgtgcccggcggcggcatgcccaacatgggccagcagcccgccccccaggtgcagcagcccggcctggtgacccccgtggcccagggcatgggcagcggcgcccacaccgccgaccccgagaagagaaagctgatccagcagcagctggtgctgctgctgcacgcccacaagtgccagagaagagagcaggccaacggcgaggtgagacagtgcaacctgccccactgcagaaccatgaagaacgtgctgaaccacatgacccactgccagagcggcaagagctgccaggtggcccactgcgccagcagcagacagatcatcagccactggaagaactgcaccagacacgactgccccgtgtgcctgcccctgaagaacgccggcgacaagagaaaccagcagcccatcctgaccggcgcccccgtgggcctgggcaaccccagcagcctgggcgtgggccagcagagcgcccccaacctgagcaccgtgagccagatcgaccccagcagcatcgagagagcctacgccgccctgggcctgccctaccaggtgaaccagatgcccacccagccccaggtgcaggccaagaaccagcagaaccagcagcccggccagagcccccagggcatgagacccatgagcaacatgagcgccagccccatgggcgtgaacggcggcgtgggcgtgcagacccccagcctgctgagcgacagcatgctgcacagcgccatcaacagccagaaccccatgatgagcgagaacgccagcgtgcccagcctgggccccatgcccaccgccgcccagcccagcaccaccggcatcagaaagcagtggcacgaggacatcacccaggacctgagaaaccacctggtgcacaagctggtgcaggccatcttccccacccccgaccccgccgccctgaaggacagaagaatggagaacctggtggcctacgccagaaaggtggagggcgacatgtacgagagcgccaacaacagagccgagtactaccacctgctggccgagaagatctacaagatccagaaggagctggaggagaagagaagaaccagactgcagaagcagaacatgctgcccaacgccgccggcatggtgcccgtgagcatgaaccccggccccaacatgggccagccccagcccggcatgaccagcaacggccccctgcccgaccccagcatgatcagaggcagcgtgcccaaccagatgatgcccagaatcaccccccagagcggcctgaaccagttcggccagatgagcatggcccagccccccatcgtgcccagacagaccccccccctgcagcaccacggccagctggcccagcccggcgccctgaacccccccatgggctacggccccagaatgcagcagcccagcaaccagggccagttcctgccccagacccagttccccagccagggcatgaacgtgaccaacatccccctggcccccagcagcggccaggcccccgtgagccaggcccagatgagcagcagcagctgccccgtgaacagccccatcatgccccccggcagccagggcagccacatccactgcccccagctgccccagcccgccctgcaccagaacagccccagccccgtgcccagcagaacccccaccccccaccacaccccccccagcatcggcgcccagcagccccccgccaccaccatccccgcccccgtgcccaccccccccgccatgccccccggcccccagagccaggccctgcaccccccccccagacagacccccaccccccccaccacccagctgccccagcaggtgcagcccagcctgcccgccgcccccagcgccgaccagccccagcagcagcccagaagccagcagagcaccgccgccagcgtgcccacccccaccgcccccctgctgcccccccagcccgccacccccctgagccagcccgccgtgagcatcgagggccaggtgagcaacccccccagcaccagcagcaccgaggtgaacagccaggccatcgccgagaagcagcccagccaggaggtgaagatggaggccaagatggaggtggaccagcccgagcccgccgacacccagcccgaggacatcagcgagagcaaggtggaggactgcaagatggagagcaccgagaccgaggagagaagcaccgagctgaagaccgagatcaaggaggaggaggaccagcccagcaccagcgccacccagagcagccccgcccccggccagagcaagaagaagatcttcaagcccgaggagctgagacaggccctgatgcccaccctggaggccctgtacagacaggaccccgagagcctgcccttcagacagcccgtggacccccagctgctgggcatccccgactacttcgacatcgtgaagagccccatggacctgagcaccatcaagagaaagctggacaccggccagtaccaggagccctggcagtacgtggacgacatctggctgatgttcaacaacgcctggctgtacaacagaaagaccagcagagtgtacaagtactgcagcaagctgagcgaggtgttcgagcaggagatcgaccccgtgatgcagagcctgggctactgctgcggcagaaagctggagttcagcccccagaccctgtgctgctacggcaagcagctgtgcaccatccccagagacgccacctactacagctaccagaacagataccacttctgcgagaagtgcttcaacgagatccagggcgagagcgtgagcctgggcgacgaccccagccagccccagaccaccatcaacaaggagcagttcagcaagagaaagaacgacaccctggaccccgagctgttcgtggagtgcaccgagtgcggcagaaagatgcaccagatctgcgtgctgcaccacgagatcatctggcccgccggcttcgtgtgcgacggctgcctgaagaagagcgccagaaccagaaaggagaacaagttcagcgccaagagactgcccagcaccagactgggcaccttcctggagaacagagtgaacgacttcctgagaagacagaaccaccccgagagcggcgaggtgaccgtgagagtggtgcacgccagcgacaagaccgtggaggtgaagcccggcatgaaggccagattcgtggacagcggcgagatggccgagagcttcccctacagaaccaaggccctgttcgccttcgaggagatcgacggcgtggacctgtgcttcttcggcatgcacgtgcaggagtacggcagcgactgccccccccccaaccagagaagagtgtacatcagctacctggacagcgtgcacttcttcagacccaagtgcctgagaaccgccgtgtaccacgagatcctgatcggctacctggagtacgtgaagaagctgggctacaccaccggccacatctgggcctgcccccccagcgagggcgacgactacatcttccactgccacccccccgaccagaagatccccaagcccaagagactgcaggagtggtacaagaagatgctggacaaggccgtgagcgagagaatcgtgcacgactacaaggacatcttcaagcaggccaccgaggacagactgaccagcgccaaggagctgccctacttcgagggcgacttctggcccaacgtgctggaggagagcatcaaggagctggagcaggaggaggaggagagaaagagagaggagaacaccagcaacgagagcaccgacgtgaccaagggcgacagcaagaacgccaagaagaagaacaacaagaagaccagcaagaacaagagcagcctgagcagaggcaacaagaagaagcccggcatgcccaacgtgagcaacgacctgagccagaagctgtacgccaccatggagaagcacaaggaggtgttcttcgtgatcagactgatcgccggccccgccgccaacagcctgccccccatcgtggaccccgaccccctgatcccctgcgacctgatggacggcagagacgccttcctgaccctggccagagacaagcacctggagttcagcagcctgagaagagcccagtggagcaccatgtgcatgctggtggagctgcacacccagagccaggacagattcgtgtacacctgcaacgagtgcaagcaccacgtggagaccagatggcactgcaccgtgtgcgaggactacgacctgtgcatcacctgctacaacaccaagaaccacgaccacaagatggagaagctgggcctgggcctggacgacgagagcaacaaccagcaggccgccgccacccagagccccggcgacagcagaagactgagcatccagagatgcatccagagcctggtgcacgcctgccagtgcagaaacgccaactgcagcctgcccagctgccagaagatgaagagagtggtgcagcacaccaagggctgcaagagaaagaccaacggcggctgccccatctgcaagcagctgatcgccctgtgctgctaccacgccaagcactgccaggagaacaagtgccccgtgcccttctgcctgaacatcaagcagaagctgagacagcagcagctgcagcacagactgcagcaggcccagatgctgagaagaagaatggccagcatgcagagaaccggcgtggtgggccagcagcagggcctgcccagccccacccccgccacccccaccacccccaccggccagcagcccaccaccccccagaccccccagcccaccagccagccccagcccaccccccccaacagcatgcccccctacctgcccagaacccaggccgccggccccgtgagccagggcaaggccgccggccaggtgaccccccccacccccccccagaccgcccagccccccctgcccggccccccccccgccgccgtggagatggccatgcagatccagagagccgccgagacccagagacagatggcccacgtgcagatcttccagagacccatccagcaccagatgccccccatgacccccatggcccccatgggcatgaaccccccccccatgaccagaggccccagcggccacctggagcccggcatgggccccaccggcatgcagcagcagcccccctggagccagggcggcctgccccagccccagcagctgcagagcggcatgcccagacccgccatgatgagcgtggcccagcacggccagcccctgaacatggccccccagcccggcctgggccaggtgggcatcagccccctgaagcccggcaccgtgagccagcaggccctgcagaacctgctgagaaccctgagaagccccagcagccccctgcagcagcagcaggtgctgagcatcctgcacgccaacccccagctgctggccgccttcatcaagcagagagccgccaagtacgccaacagcaacccccagcccatccccggccagcccggcatgccccagggccagcccggcctgcagccccccaccatgcccggccagcagggcgtgcacagcaaccccgccatgcagaacatgaaccccatgcaggccggcgtgcagagagccggcctgccccagcagcagccccagcagcagctgcagccccccatgggcggcatgagcccccaggcccagcagatgaacatgaaccacaacaccatgcccagccagttcagagacatcctgagaagacagcagatgatgcagcagcagcagcagcagggcgccggccccggcatcggccccggcatggccaaccacaaccagttccagcagccccagggcgtgggctaccccccccagcagcagcagagaatgcagcaccacatgcagcagatgcagcagggcaacatgggccagatcggccagctgccccaggccctgggcgccgaggccggcgccagcctgcaggcctaccagcagagactgctgcagcagcagatgggcagccccgtgcagcccaaccccatgagcccccagcagcacatgctgcccaaccaggcccagagcccccacctgcagggccagcagatccccaacagcctgagcaaccaggtgagaagcccccagcccgtgcccagccccagaccccagagccagcccccccacagcagccccagccccagaatgcagccccagcccagcccccaccacgtgagcccccagaccagcagcccccaccccggcctggtggccgcccaggccaaccccatggagcagggccacttcgccagccccgaccagaacagcatgctgagccagctggccagcaaccccggcatggccaacctgcacggcgccagcgccaccgacctgggcctgagcaccgacaacagcgacctgaacagcaacctgagccagagcaccctggacatccactag

SEQ ID NO: 10467 - DNA, 1314 bp, synthetic construct
  misc_feature 1..1314: note = Description of Artificial Sequence: Synthetic coding sequence
  source 1..1314: mol_type = other DNA
atggccctggccggcgcccccgccggcggcccctgcgcccccgccctggaggccctgctgggcgccggcgccctgagactgctggacagcagccagatcgtgatcatcagcgccgcccaggacgccagcgccccccccgcccccaccggccccgccgcccccgccgccggcccctgcgaccccgacctgctgctgttcgccaccccccaggcccccagacccacccccagcgcccccagacccgccctgggcagaccccccgtgaagagaagactggacctggagaccgaccaccagtacctggccgagagcagcggccccgccagaggcagaggcagacaccccggcaagggcgtgaagagccccggcgagaagagcagatacgagaccagcctgaacctgaccaccaagagattcctggagctgctgagccacagcgccgacggcgtggtggacctgaactgggccgccgaggtgctgaaggtgcagaagagaagaatctacgacatcaccaacgtgctggagggcatccagctgatcgccaagaagagcaagaaccacatccagtggctgggcagccacaccaccgtgggcgtgggcggcagactggagggcctgacccaggacctgagacagctgcaggagagcgagcagcagctggaccacctgatgaacatctgcaccacccagctgagactgctgagcgaggacaccgacagccagagactggcctacgtgacctgccaggacctgagaagcatcgccgaccccgccgagcagatggtgatggtgatcaaggccccccccgagacccagctgcaggccgtggacagcagcgagaacttccagatcagcctgaagagcaagcagggccccatcgacgtgttcctgtgccccgaggagaccgtgggcggcatcagccccggcaagacccccagccaggaggtgaccagcgaggaggagaacagagccaccgacagcgccaccatcgtgagccccccccccagcagcccccccagcagcctgaccaccgaccccagccagagcctgctgagcctggagcaggagcccctgctgagcagaatgggcagcctgagagcccccgtggacgaggacagactgagccccctggtggccgccgacagcctgctggagcacgtgagagaggacttcagcggcctgctgcccgaggagttcatcagcctgagccccccccacgaggccctggactaccacttcggcctggaggagggcgagggcatcagagacctgttcgactgcgacttcggcgacctgacccccctggacttctag

SEQ ID NO: 10468 - DNA, 1242 bp, synthetic construct
  misc_feature 1..1242: note = Description of Artificial Sequence: Synthetic coding sequence
  source 1..1242: mol_type = other DNA
atggccgaggccggcccccaggccccccccccccccggcacccccagcagacacgagaagagcctgggcctgctgaccaccaagttcgtgagcctgctgcaggaggccaaggacggcgtgctggacctgaagctggccgccgacaccctggccgtgagacagaagagaagaatctacgacatcaccaacgtgctggagggcatcggcctgatcgagaagaagagcaagaacagcatccagtggaagggcgtgggccccggctgcaacaccagagagatcgccgacaagctgatcgagctgaaggccgagatcgaggagctgcagcagagagagcaggagctggaccagcacaaggtgtgggtgcagcagagcatcagaaacgtgaccgaggacgtgcagaacagctgcctggcctacgtgacccacgaggacatctgcagatgcttcgccggcgacaccctgctggccatcagagcccccagcggcaccagcctggaggtgcccatccccgagggcctgaacggccagaagaagtaccagatccacctgaagagcgtgagcggccccatcgaggtgctgctggtgaacaaggaggcctggagcagcccccccgtggccgtgcccgtgcccccccccgaggacctgctgcagagccccagcgccgtgagcacccccccccccctgcccaagcccgccctggcccagagccaggaggccagcagacccaacagcccccagctgacccccaccgccgtgcccggcagcgccgaggtgcagggcatggccggccccgccgccgagatcaccgtgagcggcggccccggcaccgacagcaaggacagcggcgagctgagcagcctgcccctgggccccaccaccctggacaccagacccctgcagagcagcgccctgctggacagcagcagcagcagcagcagcagcagcagcagcagcagcaacagcaacagcagcagcagcagcggccccaaccccagcaccagcttcgagcccatcaaggccgaccccaccggcgtgctggagctgcccaaggagctgagcgagatcttcgaccccaccagagagtgcatgagcagcgagctgctggaggagctgatgagcagcgaggtgttcgcccccctgctgagactgagccccccccccggcgaccacgactacatctacaacctggacgagagcgagggcgtgtgcgacctgttcgacgtgcccgtgctgaacctgtag

SEQ ID NO: 10469 - DNA, 1164 bp, synthetic construct
  misc_feature 1..1164: note = Description of Artificial Sequence: Synthetic coding sequence
  source 1..1164: mol_type = other DNA
atgaccggcaagctggccgagaagctgcccgtgaccatgagcagcctgctgaaccagctgcccgacaacctgtaccccgaggagatccccagcgccctgaacctgttcagcggcagcagcgacagcgtggtgcactacaaccagatggccaccgagaacgtgatggacatcggcctgaccaacgagaagcccaaccccgagctgagctacagcggcagcttccagcccgcccccggcaacaagaccgtgacctacctgggcaagttcgccttcgacagccccagcaactggtgccaggacaacatcatcagcctgatgagcgccggcatcctgggcgtgccccccgccagcggcgccctgagcacccagaccagcaccgccagcatggtgcagcccccccagggcgacgtggaggccatgtaccccgccctgcccccctacagcaactgcggcgacctgtacagcgagcccgtgagcttccacgacccccagggcaaccccggcctggcctacagcccccaggactaccagagcgccaagcccgccctggacagcaacctgttccccatgatccccgactacaacctgtaccaccaccccaacgacatgggcagcatccccgagcacaagcccttccagggcatggaccccatcagagtgaaccccccccccatcacccccctggagaccatcaaggccttcaaggacaagcagatccaccccggcttcggcagcctgccccagccccccctgaccctgaagcccatcagacccagaaagtaccccaacagacccagcaagacccccctgcacgagagaccccacgcctgccccgccgagggctgcgacagaagattcagcagaagcgacgagctgaccagacacctgagaatccacaccggccacaagcccttccagtgcagaatctgcatgagaagcttcagcagaagcgaccacctgaccacccacatcagaacccacaccggcgagaagcccttcgcctgcgagttctgcggcagaaagttcgccagaagcgacgagagaaagagacacgccaagatccacctgaagcagaaggagaagaaggccgagaagggcggcgcccccagcgccagcagcgccccccccgtgagcctggcccccgtggtgaccacctgcgcctag

SEQ ID NO: 10470 - DNA, 687 bp, synthetic construct
  misc_feature 1..687: note = Description of Artificial Sequence: Synthetic coding sequence
  source 1..687: mol_type = other DNA
atggacatcggcctgaccaacgagaagcccaaccccgagctgagctacagcggcagcttccagcccgcccccggcaacaagaccgtgaccatgatccccgactacaacctgtaccaccaccccaacgacatgggcagcatccccgagcacaagcccttccagggcatggaccccatcagagtgaaccccccccccatcacccccctggagaccatcaaggccttcaaggacaagcagatccaccccggcttcggcagcctgccccagccccccctgaccctgaagcccatcagacccagaaagtaccccaacagacccagcaagacccccctgcacgagagaccccacgcctgccccgccgagggctgcgacagaagattcagcagaagcgacgagctgaccagacacctgagaatccacaccggccacaagcccttccagtgcagaatctgcatgagaagcttcagcagaagcgaccacctgaccacccacatcagaacccacaccggcgagaagcccttcgcctgcgagttctgcggcagaaagttcgccagaagcgacgagagaaagagacacgccaagatccacctgaagcagaaggagaagaaggccgagaagggcggcgcccccagcgccagcagcgccccccccgtgagcctggcccccgtggtgaccacctgcgcctag

SEQ ID NO: 10471 - DNA, 1050 bp, synthetic construct
  misc_feature 1..1050: note = Description of Artificial Sequence: Synthetic coding sequence
  source 1..1050: mol_type = other DNA
atggagccctgcgccgcctggagccccagaggcggcagagagaacgtgatggacatcggcctgaccaacgagaagcccaaccccgagctgagctacagcggcagcttccagcccgcccccggcaacaagaccgtgacctacctgggcaagttcgccttcgacagccccagcaactggtgccaggacaacatcatcagcctgatgagcgccggcatcctgggcgtgccccccgccagcggcgccctgagcacccagaccagcaccgccagcatggtgcagcccccccagggcgacgtggaggccatgtaccccgccctgcccccctacagcaactgcggcgacctgtacagcgagcccgtgagcttccacgacccccagggcaaccccggcctggcctacagcccccaggactaccagagcgccaagcccgccctggacagcaacctgttccccatgatccccgactacaacctgtaccaccaccccaacgacatgggcagcatccccgagcacaagcccttccagggcatggaccccatcagagtgaaccccccccccatcacccccctggagaccatcaaggccttcaaggacaagcagatccaccccggcttcggcagcctgccccagccccccctgaccctgaagcccatcagacccagaaagtaccccaacagacccagcaagacccccctgcacgagagaccccacgcctgccccgccgagggctgcgacagaagattcagcagaagcgacgagctgaccagacacctgagaatccacaccggccacaagcccttccagtgcagaatctgcatgagaagcttcagcagaagcgaccacctgaccacccacatcagaacccacaccggcgagaagcccttcgcctgcgagttctgcggcagaaagttcgccagaagcgacgagagaaagagacacgccaagatccacctgaagcagaaggagaagaaggccgagaagggcggcgcccccagcgccagcagcgccccccccgtgagcctggcccccgtggtgaccacctgcgcctag

SEQ ID NO: 10472 - DNA, 3696 bp, synthetic construct
  misc_feature 1..3696: note = Description of Artificial Sequence: Synthetic coding sequence
  source 1..3696: mol_type = other DNA
atggccagcgtgtggaagagactgcagagagtgggcaagcacgccagcaagttccagttcgtggccagctaccaggagctgatggtggagtgcaccaagaagtggcagcccgacaagctggtggtggtgtggaccagaagaagcagaagaaagagcagcaaggcccacagctggcagcccggcatcaagaacccctacagaggcgtggtggtgtggcccgtgcccgagaacatcgagatcaccgtgaccctgttcaaggacccccacgccgaggagttcgaggacaaggagtggaccttcgtgatcgagaacgagagccccagcggcagaagaaaggccctggccaccagcagcatcaacatgaagcagtacgccagccccatgcccacccagaccgacgtgaagctgaagttcaagcccctgagcaagaaggtggtgagcgccgccctgcagttcagcctgagctgcatcttcctgagagagggcaaggccaccgacgaggacatgcagagcctggccagcctgatgagcatgaagcaggccgacatcggcaacctggacgacttcgaggaggacaacgaggacgacgacgagaacagagtgaaccaggaggagaaggccgccaagatcaccgagatcgtgaaccagctgaacgccctgagcagcctggacgaggaccaggacgactgcatcaagcaggccaacatgagaagcgccaagagcgccagcagcagcgaggagctgatcaacaagctgaacttcctggacgaggccgagaaggacctggccaccgtgaacagcaaccccttcgacgaccccgacgccgccgagctgaaccccttcggcgaccccgacagcgaggagcccatcaccgagaccgccagccccagaaagaccgaggacagcttctacaacaacagctacaaccccttcaaggaggtgcagaccccccagtacctgaaccccttcgacgagcccgaggccttcgtgaccatcaaggacagccccccccagagcaccaagagaaagaacatcagacccgtggacatgagcaagtacctgtacgccgacagcagcaagaccgaggaggaggagctggacgagagcaaccccttctacgagcccaagagcacccccccccccaacaacctggtgaaccccgtgcaggagctggagaccgagagaagagtgaagagaaaggcccccgccccccccgtgctgagccccaagaccggcgtgctgaacgagaacaccgtgagcgccggcaaggacctgagcaccagccccaagcccagccccatccccagccccgtgctgggcagaaagcccaacgccagccagagcctgctggtgtggtgcaaggaggtgaccaagaactacagaggcgtgaagatcaccaacttcaccaccagctggagaaacggcctgagcttctgcgccatcctgcaccacttcagacccgacctgatcgactacaagagcctgaacccccaggacatcaaggagaacaacaagaaggcctacgacggcttcgccagcatcggcatcagcagactgctggagcccagcgacatggtgctgctggccatccccgacaagctgaccgtgatgacctacctgtaccagatcagagcccacttcagcggccaggagctgaacgtggtgcagatcgaggagaacagcagcaagagcacctacaaggtgggcaactacgagaccgacaccaacagcagcgtggaccaggagaagttctacgccgagctgagcgacctgaagagagagcccgagctgcagcagcccatcagcggcgccgtggacttcctgagccaggacgacagcgtgttcgtgaacgacagcggcgtgggcgagagcgagagcgagcaccagacccccgacgaccacctgagccccagcaccgccagcccctactgcagaagaaccaagagcgacaccgagccccagaagagccagcagagcagcggcagaaccagcggcagcgacgaccccggcatctgcagcaacaccgacagcacccaggcccaggtgctgctgggcaagaagagactgctgaaggccgagaccctggagctgagcgacctgtacgtgagcgacaagaagaaggacatgagcccccccttcatctgcgaggagaccgacgagcagaagctgcagaccctggacatcggcagcaacctggagaaggagaagctggagaacagcagaagcctggagtgcagaagcgaccccgagagccccatcaagaagaccagcctgagccccaccagcaagctgggctacagctacagcagagacctggacctggccaagaagaagcacgccagcctgagacagaccgagagcgaccccgacgccgacagaaccaccctgaaccacgccgaccacagcagcaagatcgtgcagcacagactgctgagcagacaggaggagctgaaggagagagccagagtgctgctggagcaggccagaagagacgccgccctgaaggccggcaacaagcacaacaccaacaccgccacccccttctgcaacagacagctgagcgaccagcaggacgaggagagaagaagacagctgagagagagagccagacagctgatcgccgaggccagaagcggcgtgaagatgagcgagctgcccagctacggcgagatggccgccgagaagctgaaggagagaagcaaggccagcggcgacgagaacgacaacatcgagatcgacaccaacgaggagatccccgagggcttcgtggtgggcggcggcgacgagctgaccaacctggagaacgacctggacacccccgagcagaacagcaagctggtggacctgaagctgaagaagctgctggaggtgcagccccaggtggccaacagccccagcagcgccgcccagaaggccgtgaccgagagcagcgagcaggacatgaagagcggcaccgaggacctgagaaccgagagactgcagaagaccaccgagagattcagaaaccccgtggtgttcagcaaggacagcaccgtgagaaagacccagctgcagagcttcagccagtacatcgagaacagacccgagatgaagagacagagaagcatccaggaggacaccaagaagggcaacgaggagaaggccgccatcaccgagacccagagaaagcccagcgaggacgaggtgctgaacaagggcttcaaggacaccagccagtacgtggtgggcgagctggccgccctggagaacgagcagaagcagatcgacaccagagccgccctggtggagaagagactgagatacctgatggacaccggcagaaacaccgaggaggaggaggccatgatgcaggagtggttcatgctggtgaacaagaagaacgccctgatcagaagaatgaaccagctgagcctgctggagaaggagcacgacctggagagaagatacgagctgctgaacagagagctgagagccatgctggccatcgaggactggcagaagaccgaggcccagaagagaagagagcagctgctgctggacgagctggtggccctggtgaacaagagagacgccctggtgagagacctggacgcccaggagaagcaggccgaggaggaggacgagcacctggagagaaccctggagcagaacaagggcaagatggccaagaaggaggagaagtgcgtgctgcagtag

SEQ ID NO: 10473 - DNA, 3591 bp, synthetic construct
  misc_feature 1..3591: note = Description of Artificial Sequence: Synthetic coding sequence
  source 1..3591: mol_type = other DNA
atggccagcgtgtggaagagactgcagagagtgggcaagcacgccagcaagttccagttcgtggccagctaccaggagctgatggtggagtgcaccaagaagtggcagcccgacaagctggtggtggtgtggaccagaagaagcagaagaaagagcagcaaggcccacagctggcagcccggcatcaagaacccctacagaggcgtggtggtgtggcccgtgcccgagaacatcgagatcaccgtgaccctgttcaaggacccccacgccgaggagttcgaggacaaggagtggaccttcgtgatcgagaacgagagccccagcggcagaagaaaggccctggccaccagcagcatcaacatgaagcagtacgccagccccatgcccacccagaccgacgtgaagctgaagttcaagcccctgagcaagaaggtggtgagcgccgccctgcagttcagcctgagctgcatcttcctgagagagggcaaggccaccgacgaggacatgcagagcctggccagcctgatgagcatgaagcaggccgacatcggcaacctggacgacttcgaggaggacaacgaggacgacgacgagaacagagtgaaccaggaggagaaggccgccaagatcaccgagctgatcaacaagctgaacttcctggacgaggccgagaaggacctggccaccgtgaacagcaaccccttcgacgaccccgacgccgccgagctgaaccccttcggcgaccccgacagcgaggagcccatcaccgagaccgccagccccagaaagaccgaggacagcttctacaacaacagctacaaccccttcaaggaggtgcagaccccccagtacctgaaccccttcgacgagcccgaggccttcgtgaccatcaaggacagccccccccagagcaccaagagaaagaacatcagacccgtggacatgagcaagtacctgtacgccgacagcagcaagaccgaggaggaggagctggacgagagcaaccccttctacgagcccaagagcacccccccccccaacaacctggtgaaccccgtgcaggagctggagaccgagagaagagtgaagagaaaggcccccgccccccccgtgctgagccccaagaccggcgtgctgaacgagaacaccgtgagcgccggcaaggacctgagcaccagccccaagcccagccccatccccagccccgtgctgggcagaaagcccaacgccagccagagcctgctggtgtggtgcaaggaggtgaccaagaactacagaggcgtgaagatcaccaacttcaccaccagctggagaaacggcctgagcttctgcgccatcctgcaccacttcagacccgacctgatcgactacaagagcctgaacccccaggacatcaaggagaacaacaagaaggcctacgacggcttcgccagcatcggcatcagcagactgctggagcccagcgacatggtgctgctggccatccccgacaagctgaccgtgatgacctacctgtaccagatcagagcccacttcagcggccaggagctgaacgtggtgcagatcgaggagaacagcagcaagagcacctacaaggtgggcaactacgagaccgacaccaacagcagcgtggaccaggagaagttctacgccgagctgagcgacctgaagagagagcccgagctgcagcagcccatcagcggcgccgtggacttcctgagccaggacgacagcgtgttcgtgaacgacagcggcgtgggcgagagcgagagcgagcaccagacccccgacgaccacctgagccccagcaccgccagcccctactgcagaagaaccaagagcgacaccgagccccagaagagccagcagagcagcggcagaaccagcggcagcgacgaccccggcatctgcagcaacaccgacagcacccaggcccaggtgctgctgggcaagaagagactgctgaaggccgagaccctggagctgagcgacctgtacgtgagcgacaagaagaaggacatgagcccccccttcatctgcgaggagaccgacgagcagaagctgcagaccctggacatcggcagcaacctggagaaggagaagctggagaacagcagaagcctggagtgcagaagcgaccccgagagccccatcaagaagaccagcctgagccccaccagcaagctgggctacagctacagcagagacctggacctggccaagaagaagcacgccagcctgagacagaccgagagcgaccccgacgccgacagaaccaccctgaaccacgccgaccacagcagcaagatcgtgcagcacagactgctgagcagacaggaggagctgaaggagagagccagagtgctgctggagcaggccagaagagacgccgccctgaaggccggcaacaagcacaacaccaacaccgccacccccttctgcaacagacagctgagcgaccagcaggacgaggagagaagaagacagctgagagagagagccagacagctgatcgccgaggccagaagcggcgtgaagatgagcgagctgcccagctacggcgagatggccgccgagaagctgaaggagagaagcaaggccagcggcgacgagaacgacaacatcgagatcgacaccaacgaggagatccccgagggcttcgtggtgggcggcggcgacgagctgaccaacctggagaacgacctggacacccccgagcagaacagcaagctggtggacctgaagctgaagaagctgctggaggtgcagccccaggtggccaacagccccagcagcgccgcccagaaggccgtgaccgagagcagcgagcaggacatgaagagcggcaccgaggacctgagaaccgagagactgcagaagaccaccgagagattcagaaaccccgtggtgttcagcaaggacagcaccgtgagaaagacccagctgcagagcttcagccagtacatcgagaacagacccgagatgaagagacagagaagcatccaggaggacaccaagaagggcaacgaggagaaggccgccatcaccgagacccagagaaagcccagcgaggacgaggtgctgaacaagggcttcaaggacaccagccagtacgtggtgggcgagctggccgccctggagaacgagcagaagcagatcgacaccagagccgccctggtggagaagagactgagatacctgatggacaccggcagaaacaccgaggaggaggaggccatgatgcaggagtggttcatgctggtgaacaagaagaacgccctgatcagaagaatgaaccagctgagcctgctggagaaggagcacgacctggagagaagatacgagctgctgaacagagagctgagagccatgctggccatcgaggactggcagaagaccgaggcccagaagagaagagagcagctgctgctggacgagctggtggccctggtgaacaagagagacgccctggtgagagacctggacgcccaggagaagcaggccgaggaggaggacgagcacctggagagaaccctggagcagaacaagggcaagatggccaagaaggaggagaagtgcgtgctgcagtag

SEQ ID NO: 10474 - DNA, 3483 bp, synthetic construct
  misc_feature 1..3483: note = Description of Artificial Sequence: Synthetic coding sequence
  source 1..3483: mol_type = other DNA
atggccagcgtgtggaagagactgcagagagtgggcaagcacgccagcaagttccagttcgtggccagctaccaggagctgatggtggagtgcaccaagaagtggcagcccgacaagctggtggtggtgtggaccagaagaagcagaagaaagagcagcaaggcccacagctggcagcccggcatcaagaacccctacagaggcgtggtggtgtggcccgtgcccgagaacatcgagatcaccgtgaccctgttcaaggacccccacgccgaggagttcgaggacaaggagtggaccttcgtgatcgagaacgagagccccagcggcagaagaaaggccctggccaccagcagcatcaacatgaagcagtacgccagccccatgcccacccagaccgacgtgaagctgaagttcaagcccctgagcaagaaggtggtgagcgccgccctgcagttcagcctgagctgcatcttcctgagagagggcaaggccaccgacgaggacatgcagagcctggccagcctgatgagcatgaagcaggccgacatcggcaacctggacgacttcgaggaggacaacgaggacgacgacgagaacagagtgaaccaggaggagaaggccgccaagatcaccgagctgatcaacaagctgaacttcctggacgaggccgagaaggacctggccaccgtgaacagcaaccccttcgacgaccccgacgccgccgagctgaaccccttcggcgaccccgacagcgaggagcccatcaccgagaccgccagccccagaaagaccgaggacagcttctacaacaacagctacaaccccttcaaggaggtgcagaccccccagtacctgaaccccttcgacgagcccgaggccttcgtgaccatcaaggacagccccccccagagcaccaagagaaagaacatcagacccgtggacatgagcaagtacctgtacgccgacagcagcaagaccgaggaggaggagctggacgagagcaaccccttctacgagcccaagagcacccccccccccaacaacctggtgaaccccgtgcaggagctggagaccgagagaagagtgaagagaaaggcccccgccccccccgtgctgagccccaagaccggcgtgctgaacgagaacaccgtgagcgccggcaaggacctgagcaccagccccaagcccagccccatccccagccccgtgctgggcagaaagcccaacgccagccagagcctgctggtgtggtgcaaggaggtgaccaagaactacagaggcgtgaagatcaccaacttcaccaccagctggagaaacggcctgagcttctgcgccatcctgcaccacttcagacccgacctgatcgactacaagagcctgaacccccaggacatcaaggagaacaacaagaaggcctacgacggcttcgccagcatcggcatcagcagactgctggagcccagcgacatggtgctgctggccatccccgacaagctgaccgtgatgacctacctgtaccagatcagagcccacttcagcggccaggagctgaacgtggtgcagatcgaggagaacagcagcaagagcacctacaaggtgggcaactacgagaccgacaccaacagcagcgtggaccaggagaagttctacgccgagctgagcgacctgaagagagagcccgagctgcagcagcccatcagcggcgccgtggacttcctgagccaggacgacagcgtgttcgtgaacgacagcggcgtgggcgagagcgagagcgagcaccagacccccgacgaccacctgagccccagcaccgccagcccctactgcagaagaaccaagagcgacaccgagccccagaagagccagcagagcagcggcagaaccagcggcagcgacgaccccggcatctgcagcaacaccgacagcacccaggcccaggtgctgctgggcaagaagagactgctgaaggccgagaccctggagctgagcgacctgtacgtgagcgacaagaagaaggacatgagcccccccttcatctgcgaggagaccgacgagcagaagctgcagaccctggacatcggcagcaacctggagaaggagaagctggagaacagcagaagcctggagtgcagaagcgaccccgagagccccatcaagaagaccagcctgagccccaccagcaagctgggctacagctacagcagagacctggacctggccaagaagaagcacgccagcctgagacagaccgagagcgaccccgacgccgacagaaccaccctgaaccacgccgaccacagcagcaagatcgtgcagcacagactgctgagcagacaggaggagctgaaggagagagccagagtgctgctggagcaggccagaagagacgccgccctgaaggccggcaacaagcacaacaccaacaccgccacccccttctgcaacagacagctgagcgaccagcaggacgaggagagaagaagacagctgagagagagagccagacagctgatcgccgaggccagaagcggcgtgaagatgagcgagctgcccagctacggcgagatggccgccgagaagctgaaggagagaagcaaggccagcggcgagcagaacagcaagctggtggacctgaagctgaagaagctgctggaggtgcagccccaggtggccaacagccccagcagcgccgcccagaaggccgtgaccgagagcagcgagcaggacatgaagagcggcaccgaggacctgagaaccgagagactgcagaagaccaccgagagattcagaaaccccgtggtgttcagcaaggacagcaccgtgagaaagacccagctgcagagcttcagccagtacatcgagaacagacccgagatgaagagacagagaagcatccaggaggacaccaagaagggcaacgaggagaaggccgccatcaccgagacccagagaaagcccagcgaggacgaggtgctgaacaagggcttcaaggacaccagccagtacgtggtgggcgagctggccgccctggagaacgagcagaagcagatcgacaccagagccgccctggtggagaagagactgagatacctgatggacaccggcagaaacaccgaggaggaggaggccatgatgcaggagtggttcatgctggtgaacaagaagaacgccctgatcagaagaatgaaccagctgagcctgctggagaaggagcacgacctggagagaagatacgagctgctgaacagagagctgagagccatgctggccatcgaggactggcagaagaccgaggcccagaagagaagagagcagctgctgctggacgagctggtggccctggtgaacaagagagacgccctggtgagagacctggacgcccaggagaagcaggccgaggaggaggacgagcacctggagagaaccctggagcagaacaagggcaagatggccaagaaggaggagaagtgcgtgctgcagtag

SEQ ID NO: 10475 - DNA, 3591 bp, synthetic construct; identical to SEQ ID NO: 10473
  misc_feature 1..3591: note = Description of Artificial Sequence: Synthetic coding sequence
  source 1..3591: mol_type = other DNA

SEQ ID NO: 10476 - DNA, 933 bp, synthetic construct
  misc_feature 1..933: note = Description of Artificial Sequence: Synthetic coding sequence
  source 1..933: mol_type = other DNA
atggccagcgtgtggaagagactgcagagagtgggcaagcacgccagcaagttccagttcgtggccagctaccaggagctgatggtggagtgcaccaagaagtggcagcccgacaagctggtggtggtgtggaccagaagaagcagaagaaagagcagcaaggcccacagctggcagcccggcatcaagaacccctacagaggcgtggtggtgtggcccgtgcccgagaacatcgagatcaccgtgaccctgttcaaggacccccacgccgaggagttcgaggacaaggagtggaccttcgtgatcgagaacgagagccccagcggcagaagaaaggccctggccaccagcagcatcaacatgaagcagtacgccagccccatgcccacccagaccgacgtgaagctgaagttcaagcccctgagcaagaaggtggtgagcgccgccctgcagttcagcctgagctgcatcttcctgagagagggcaaggccaccgacgaggacatgcagagcctggccagcctgatgagcatgaagcaggccgacatcggcaacctggacgacttcgaggaggacaacgaggacgacgacgagaacagagtgaaccaggaggagaaggccgccaagatcaccgagctgatcaacaagctgaacttcctggacgaggccgagaaggacctggccaccgtgaacagcaaccccttcgacgaccccgacgccgccgagctgaaccccttcggcgaccccgacagcgaggagcccatcaccgagaccgccagccccagaaagaccgaggacagcttctacaacaacagctacaaccccttcaaggaggtgcagaccccccagtacctgaaccccttcgacgagcccgaggccttcgtgaccatcaaggacagccccccccagagcaccaagagaaagaacatctag

SEQ ID NO: 10477 - DNA, 234 bp, synthetic construct
  misc_feature 1..234: note = Description of Artificial Sequence: Synthetic coding sequence
  source 1..234: mol_type = other DNA
atggccagcgtgtggaagagactgcagagagtgggcaagcacgccagcaagttccagttcgtggccagctaccaggagctgatggtggagtgcaccaagaagtggcagcccgacaagctggtggtggtgtggaccagaagaagcagaagaaagagcagcaaggcccacagctggcagcccggcatcaagaacccctacagaggcgtggtggtgtggcccgtgcccgagaactag

SEQ ID NO: 10478 - DNA, 3483 bp, synthetic construct; identical to SEQ ID NO: 10474
  misc_feature 1..3483: note = Description of Artificial Sequence: Synthetic coding sequence
  source 1..3483: mol_type = other DNA

SEQ ID NO: 10479 - DNA, 609 bp, synthetic construct
  misc_feature 1..609: note = Description of Artificial Sequence: Synthetic coding sequence
  source 1..609: mol_type = other DNA
atgaagagacagagaagcatccaggaggacaccaagaagggcaacgaggagaaggccgccatcaccgagacccagagaaagcccagcgaggacgaggtgctgaacaagggcttcaaggacaccagccagtacgtggtgggcgagctggccgccctggagaacgagcagaagcagatcgacaccagagccgccctggtggagaagagactgagatacctgatggacaccggcagaaacaccgaggaggaggaggccatgatgcaggagtggttcatgctggtgaacaagaagaacgccctgatcagaagaatgaaccagctgagcctgctggagaaggagcacgacctggagagaagatacgagctgctgaacagagagctgagagccatgctggccatcgaggactggcagaagaccgaggcccagaagagaagagagcagctgctgctggacgagctggtggccctggtgaacaagagagacgccctggtgagagacctggacgcccaggagaagcaggccgaggaggaggacgagcacctggagagaaccctggagcagaacaagggcaagatggccaagaaggaggagaagtgcgtgctgcagtag

SEQ ID NO: 10480 - DNA, 1287 bp, synthetic construct
  misc_feature 1..1287: note = Description of Artificial Sequence: Synthetic coding sequence
  source 1..1287: mol_type = other DNA
atggaccccagcgtgaccctgtggcagttcctgctgcagctgctgagagagcagggcaacggccacatcatcagctggaccagcagagacggcggcgagttcaagctggtggacgccgaggaggtggccagactgtggggcctgagaaagaacaagaccaacatgaactacgacaagctgagcagagccctgagatactactacgacaagaacatcatcagaaaggtgagcggccagaagttcgtgtacaagttcgtgagctaccccgaggtggccggctgcagcaccgaggactgccccccccagcccgaggtgagcgtgaccagcaccatgcccaacgtggcccccgccgccatccacgccgcccccggcgacaccgtgagcggcaagcccggcacccccaagggcgccggcatggccggccccggcggcctggccagaagcagcagaaacgagtacatgagaagcggcctgtacagcaccttcaccatccagagcctgcagccccagccccccccccaccccagacccgccgtggtgctgcccagcgccgcccccgccggcgccgccgccccccccagcggcagcagaagcaccagccccagccccctggaggcctgcctggaggccgaggaggccggcctgcccctgcaggtgatcctgaccccccccgaggcccccaacctgaagagcgaggagctgaacgtggagcccggcctgggcagagccctgccccccgaggtgaaggtggagggccccaaggaggagctggaggtggccggcgagagaggcttcgtgcccgagaccaccaaggccgagcccgaggtgcccccccaggagggcgtgcccgccagactgcccgccgtggtgatggacaccgccggccaggccggcggccacgccgccagcagccccgagatcagccagccccagaagggcagaaagcccagagacctggagctgcccctgagccccagcctgctgggcggccccggccccgagagaacccccggcagcggcagcggcagcggcctgcaggcccccggccccgccctgacccccagcctgctgcccacccacaccctgacccccgtgctgctgacccccagcagcctgccccccagcatccacttctggagcaccctgagccccatcgcccccagaagccccgccaagctgagcttccagttccccagcagcggcagcgcccaggtgcacatccccagcatcagcgtggacggcctgagcacccccgtggtgctgagccccggcccccagaagccctag

SEQ ID NO: 10481 - DNA, 288 bp, synthetic construct
  misc_feature 1..288: note = Description of Artificial Sequence: Synthetic coding sequence
  source 1..288: mol_type = other DNA
atggaccccagcgtgaccctgtggcagttcctgctgcagctgctgagagagcagggcaacggccacatcatcagctggaccagcagagacggcggcgagttcaagctggtggacgccgaggaggtggccagactgtggggcctgagaaagaacaagaccaacatgaactacgacaagctgagcagagccctgagatactactacgacaagaacatcatcagaaaggtgagcggccagaagttcgtgtacaagttcgtgagctaccccgagagccactgcgccccctag

SEQ ID NO: 10482 - DNA, 1287 bp, synthetic construct; identical to SEQ ID NO: 10480
  misc_feature 1..1287: note = Description of Artificial Sequence: Synthetic coding sequence
  source 1..1287: mol_type = other DNA

SEQ ID NO: 10483 - DNA, 366 bp, synthetic construct
  misc_feature 1..366: note = Description of Artificial Sequence: Synthetic coding sequence
  source 1..366: mol_type = other DNA
atggacaccgccggccaggccggcggccacgccgccagcagccccgagatcagccagccccagaagggcagaaagcccagagacctggagctgcccctgagccccagcctgctgggcggccccggccccgagagaacccccgccctgctgcccacccacaccctgacccccgtgctgctgacccccagcagcctgccccccagcatccacttctggagcaccctgagccccatcgcccccagaagccccgccaagctgagcttccagttccccagcagcggcagcgcccaggtgcacatccccagcatcagcgtggacggcctgagcacccccgtggtgctgagccccggcccccagaagccctag

SEQ ID NO: 10484 - DNA, 1713 bp, synthetic construct
  misc_feature 1..1713: note = Description of Artificial Sequence: Synthetic coding sequence
  source 1..1713: mol_type = other DNA
atgagcgagcagagcatctgccaggccagagccgccgtgatggtgtacgacgacgccaacaagaagtgggtgcccgccggcggcagcaccggcttcagcagagtgcacatctaccaccacaccggcaacaacaccttcagagtggtgggcagaaagatccaggaccaccaggtggtgatcaactgcgccatccccaagggcctgaagtacaaccaggccacccagaccttccaccagtggagagacgccagacaggtgtacggcctgaacttcggcagcaaggaggacgccaacgtgttcgccagcgccatgatgcacgccctggaggtgctgaacagccaggagaccggccccaccctgcccagacagaacagccagctgcccgcccaggtgcagaacggccccagccaggaggagctggagatccagagaagacagctgcaggagcagcagagacagaaggagctggagagagagagactggagagagagagaatggagagagagagactggagagagagagactggagagagagagactggagagagagagactggagcaggagcagctggagagagagagacaggagagagagagacaggagagactggagagacaggagagactggagagacaggagagactggagagacaggagagactggacagagagagacaggagagacaggagagagagagactggagagactggagagagagagacaggagagagagagacaggagcagctggagagagagcagctggagtgggagagagagagaagaatcagcagcgccgccgcccccgccagcgtggagacccccctgaacagcgtgctgggcgacagcagcgccagcgagcccggcctgcaggccgccagccagcccgccgagacccccagccagcagggcatcgtgctgggccccctggccccccccccccccccccccctgccccccggccccgcccaggccagcgtggccctgccccccccccccggcccccccccccccccccccctgcccagcaccggccccccccccccccccccccccccccccctgcccaaccaggtgccccccccccccccccccccccccgccccccccctgcccgccagcggcttcttcctggccagcatgagcgaggacaacagacccctgaccggcctggccgccgccatcgccggcgccaagctgagaaaggtgagcagaatggaggacaccagcttccccagcggcggcaacgccatcggcgtgaacagcgccagcagcaagaccgacaccggcagaggcaacggccccctgcccctgggcggcagcggcctgatggaggagatgagcgccctgctggccagaagaagaagaatcgccgagaagggcagcaccatcgagaccgagcagaaggaggacaagggcgaggacagcgagcccgtgaccagcaaggccagcagcaccagcacccccgagcccaccagaaagccctgggagagaaccaacaccatgaacggcagcaagagccccgtgatcagcagacccaagagcacccccctgagccagcccagcgccaacggcgtgcagaccgagggcctggactacgacagactgaagcaggacatcctggacgagatgagaaaggagctgaccaagctgaaggaggagctgatcgacgccatcagacaggagctgagcaagagcaacaccgcctag

SEQ ID NO: 10485 - DNA, 1776 bp, synthetic construct
  misc_feature 1..1776: note = Description of Artificial Sequence: Synthetic coding sequence
  source 1..1776: mol_type = other DNA
atgagcgagcagagcatctgccaggccagagccgccgtgatggtgtacgacgacgccaacaagaagtgggtgcccgccggcggcagcaccggcttcagcagagtgcacatctaccaccacaccggcaacaacaccttcagagtggtgggcagaaagatccaggaccaccaggtggtgatcaactgcgccatccccaagggcctgaagtacaaccaggccacccagaccttccaccagtggagagacgccagacaggtgtacggcctgaacttcggcagcaaggaggacgccaacgtgttcgccagcgccatgatgcacgccctggaggtgctgaacagccaggagaccggccccaccctgcccagacagaacagccagctgcccgcccaggtgcagaacggccccagccaggaggagctggagatccagagaagacagctgcaggagcagcagagacagaaggagctggagagagagagactggagagagagagaatggagagagagagactggagagagagagactggagagagagagactggagagagagagactggagcaggagcagctggagagagagagacaggagagagagagacaggagagactggagagacaggagagactggagagacaggagagactggagagacaggagagactggacagagagagacaggagagacaggagagagagagactggagagactggagagagagagacaggagagagagagacaggagcagctggagagagagcagctggagtgggagagagagagaagaatcagcagcgccgccgcccccgccagcgtggagacccccctgaacagcgtgctgggcgacagcagcgccagcgagcccggcctgcaggccgccagccagcccgccgagacccccagccagcagggcatcgtgctgggccccctggccccccccccccccccccccctgccccccggccccgcccaggccagcgtggccctgccccccccccccggcccccccccccccccccccctgcccagcaccggccccccccccccccccccccccccccccctgcccaaccaggtgccccccccccccccccccccccccgccccccccctgcccgccagcggcttcttcctggccagcatgagcgaggacaacagacccctgaccggcctggccgccgccatcgccggcgccaagctgagaaaggtgagcagaatggaggacaccagcttccccagcggcggcaacgccatcggcgtgaacagcgccagcagcaagaccgacaccggcagaggcaacggccccctgcccctgggcggcagcggcctgatggaggagatgagcgccctgctggccagaagaagaagaatcgccgagaagggcagcaccatcgagaccgagcagaaggaggacaagggcgaggacagcgagcccgtgaccagcaaggccagcagcaccagcacccccgagcccaccagaaagccctgggagagaaccaacaccatgaacggcagcaagagccccgtgatcagcagaagagacagccccagaaagaaccagatcgtgttcgacaacagaagctacgacagcctgcacagacccaagagcacccccctgagccagcccagcgccaacggcgtgcagaccgagggcctggactacgacagactgaagcaggacatcctggacgagatgagaaaggagctgaccaagctgaaggaggagctgatcgacgccatcagacaggagctgagcaagagcaacaccgcctag

SEQ ID NO: 10486 - DNA, 1599 bp, synthetic construct
  misc_feature 1..1599: note = Description of Artificial Sequence: Synthetic coding sequence
  source 1..1599: mol_type = other DNA
agcgagcagagcatctgccaggccagagccgccgtgatggtgtacgacgacgccaacaagaagtgggtgcccgccggcggcagcaccggcttcagcagagtgcacatctaccaccacaccggcaacaacaccttcagagtggtgggcagaaagatccaggaccaccaggtggtgatcaactgcgccatccccaagggcctgaagtacaaccaggccacccagaccttccaccagtggagagacgccagacaggtgtacggcctgaacttcggcagcaaggaggacgccaacgtgttcgccagcgccatgatgcacgccctggaggtgctgaacagccaggagaccggccccaccctgcccagacagaacagccagctgcccgcccaggtgcagaacggccccagccaggaggagctggagatccagagaagacagctgcaggagcagcagagacagaaggagctggagagagagagactggagagagagagaatggagagagagagactggagagagagagactggagagagagagactggagagagagagactggagcaggagcagctggagagagagagacaggagagagagagacaggagagactggagagacaggagagactggagagacaggagagactggagagacaggagagactggacagagagagacaggagagacaggagagagagagactggagagactggagagagagagacaggagagagagagacaggagcagctggagagagagcagctggagtgggagagagagagaagaatcagcagcgccggcatcgtgctgggccccctggccccccccccccccccccccctgccccccggccccgcccaggccagcgtggccctgccccccccccccggcccccccccccccccccccctgcccagcaccggccccccccccccccccccccccccccccctgcccaaccaggtgccccccccccccccccccccccccgccccccccctgcccgccagcggcttcttcctggccagcatgagcgaggacaacagacccctgaccggcctggccgccgccatcgccggcgccaagctgagaaaggtgagcagaatggaggacaccagcttccccagcggcggcaacgccatcggcgtgaacagcgccagcagcaagaccgacaccggcagaggcaacggccccctgcccctgggcggcagcggcctgatggaggagatgagcgccctgctggccagaagaagaagaatcgccgagaagggcagcaccatcgagaccgagcagaaggaggacaagggcgaggacagcgagcccgtgaccagcaaggccagcagcaccagcacccccgagcccaccagaaagccctgggagagaaccaacaccatgaacggcagcaagagccccgtgatcagcagacccaagagcacccccctgagccagcccagcgccaacggcgtgcagaccgagggcctggactacgacagactgaagcaggacatcctggacgagatgagaaaggagctgaccaagctgaaggaggagctgatcgacgccatcagacaggagctgagcaagagcaacaccgcctag

SEQ ID NO: 10487 - DNA, 1878 bp, synthetic construct
  misc_feature 1..1878: note = Description of Artificial Sequence: Synthetic coding sequence
  source 1..1878: mol_type = other DNA
atggacagaggcaccctgcccctggccgtggccctgctgctggccagctgcagcctgagccccaccagcctggccgagaccgtgcactgcgacctgcagcccgtgggccccgagagaggcgaggtgacctacaccaccagccaggtgagcaagggctgcgtggcccaggcccccaacgccatcctggaggtgcacgtgctgttcctggagttccccaccggccccagccagctggagctgaccctgcaggccagcaagcagaacggcacctggcccagagaggtgctgctggtgctgagcgtgaacagcagcgtgttcctgcacctgcaggccctgggcatccccctgcacctggcctacaacagcagcctggtgaccttccaggagccccccggcgtgaacaccaccgagctgcccagcttccccaagacccagatcctggagtgggccgccgagagaggccccatcaccagcgccgccgagctgaacgacccccagagcatcctgctgagactgggccaggcccagggcagcctgagcttctgcatgctggaggccagccaggacatgggcagaaccctggagtggagacccagaacccccgccctggtgagaggctgccacctggagggcgtggccggccacaaggaggcccacatcctgagagtgctgcccggccacagcgccggccccagaaccgtgaccgtgaaggtggagctgagctgcgcccccggcgacctggacgccgtgctgatcctgcagggccccccctacgtgagctggctgatcgacgccaaccacaacatgcagatctggaccaccggcgagtacagcttcaagatcttccccgagaagaacatcagaggcttcaagctgcccgacaccccccagggcctgctgggcgaggccagaatgctgaacgccagcatcgtggccagcttcgtggagctgcccctggccagcatcgtgagcctgcacgccagcagctgcggcggcagactgcagaccagccccgcccccatccagaccaccccccccaaggacacctgcagccccgagctgctgatgagcctgatccagaccaagtgcgccgacgacgccatgaccctggtgctgaagaaggagctggtggcccacctgaagtgcaccatcaccggcctgaccttctgggaccccagctgcgaggccgaggacagaggcgacaagttcgtgctgagaagcgcctacagcagctgcggcatgcaggtgagcgccagcatgatcagcaacgaggccgtggtgaacatcctgagcagcagcagcccccagagaaagaaggtgcactgcctgaacatggacagcctgagcttccagctgggcctgtacctgagcccccacttcctgcaggccagcaacaccatcgagcccggccagcagagcttcgtgcaggtgagagtgagccccagcgtgagcgagttcctgctgcagctggacagctgccacctggacctgggccccgagggcggcaccgtggagctgatccagggcagagccgccaagggcaactgcgtgagcctgctgagccccagccccgagggcgaccccagattcagcttcctgctgcacttctacaccgtgcccatccccaagaccggcaccctgagctgcaccgtggccctgagacccaagaccggcagccaggaccaggaggtgcacagaaccgtgttcatgagactgaacatcatcagccccgacctgagcggctgcaccagcaagggcctggtgctgcccgccgtgctgggcatcaccttcggcgccttcctgatcggcgccctgctgaccgccgccctgtggtacatctacagccacaccagagagtaccccagacccccccagtag

SEQ ID NO: 10488 - DNA, 1977 bp, synthetic construct
  misc_feature 1..1977: note = Description of Artificial Sequence: Synthetic coding sequence
  source 1..1977: mol_type = other DNA
atggacagaggcaccctgcccctggccgtggccctgctgctggccagctgcagcctgagccccaccagcctggccgagaccgtgcactgcgacctgcagcccgtgggccccgagagaggcgaggtgacctacaccaccagccaggtgagcaagggctgcgtggcccaggcccccaacgccatcctggaggtgcacgtgctgttcctggagttccccaccggccccagccagctggagctgaccctgcaggccagcaagcagaacggcacctggcccagagaggtgctgctggtgctgagcgtgaacagcagcgtgttcctgcacctgcaggccctgggcatccccctgcacctggcctacaacagcagcctggtgaccttccaggagccccccggcgtgaacaccaccgagctgcccagcttccccaagacccagatcctggagtgggccgccgagagaggccccatcaccagcgccgccgagctgaacgacccccagagcatcctgctgagactgggccaggcccagggcagcctgagcttctgcatgctggaggccagccaggacatgggcagaaccctggagtggagacccagaacccccgccctggtgagaggctgccacctggagggcgtggccggccacaaggaggcccacatcctgagagtgctgcccggccacagcgccggccccagaaccgtgaccgtgaaggtggagctgagctgcgcccccggcgacctggacgccgtgctgatcctgcagggccccccctacgtgagctggctgatcgacgccaaccacaacatgcagatctggaccaccggcgagtacagcttcaagatcttccccgagaagaacatcagaggcttcaagctgcccgacaccccccagggcctgctgggcgaggccagaatgctgaacgccagcatcgtggccagcttcgtggagctgcccctggccagcatcgtgagcctgcacgccagcagctgcggcggcagactgcagaccagccccgcccccatccagaccaccccccccaaggacacctgcagccccgagctgctgatgagcctgatccagaccaagtgcgccgacgacgccatgaccctggtgctgaagaaggagctggtggcccacctgaagtgcaccatcaccggcctgaccttctgggaccccagctgcgaggccgaggacagaggcgacaagttcgtgctgagaagcgcctacagcagctgcggcatgcaggtgagcgccagcatgatcagcaacgaggccgtggtgaacatcctgagcagcagcagcccccagagaaagaaggtgcactgcctgaacatggacagcctgagcttccagctgggcctgtacctgagcccccacttcctgcaggccagcaacaccatcgagcccggccagcagagcttcgtgcaggtgagagtgagccccagcgtgagcgagttcctgctgcagctggacagctgccacctggacctgggccccgagggcggcaccgtggagctgatccagggcagagccgccaagggcaactgcgtgagcctgctgagccccagccccgagggcgaccccagattcagcttcctgctgcacttctacaccgtgcccatccccaagaccggcaccctgagctgcaccgtggccctgagacccaagaccggcagccaggaccaggaggtgcacagaaccgtgttcatgagactgaacatcatcagccccgacctgagcggctgcaccagcaagggcctggtgctgcccgccgtgctgggcatcaccttcggcgccttcctgatcggcgccctgctgaccgccgccctgtggtacatctacagccacaccagaagccccagcaagagagagcccgtggtggccgtggccgcccccgccagcagcgagagcagcagcaccaaccacagcatcggcagcacccagagcaccccctgcagcaccagcagcatggcctag

SEQ ID NO: 10489 - DNA, 1977 bp, synthetic construct; identical to SEQ ID NO: 10488
  misc_feature 1..1977: note = Description of Artificial Sequence: Synthetic coding sequence
  source 1..1977: mol_type = other DNA

SEQ ID NO: 10490 - DNA, 1431 bp, synthetic construct
  misc_feature 1..1431: note = Description of Artificial Sequence: Synthetic coding sequence
  source 1..1431: mol_type = other DNA
atgctggaggccagccaggacatgggcagaaccctggagtggagacccagaacccccgccctggtgagaggctgccacctggagggcgtggccggccacaaggaggcccacatcctgagagtgctgcccggccacagcgccggccccagaaccgtgaccgtgaaggtggagctgagctgcgcccccggcgacctggacgccgtgctgatcctgcagggccccccctacgtgagctggctgatcgacgccaaccacaacatgcagatctggaccaccggcgagtacagcttcaagatcttccccgagaagaacatcagaggcttcaagctgcccgacaccccccagggcctgctgggcgaggccagaatgctgaacgccagcatcgtggccagcttcgtggagctgcccctggccagcatcgtgagcctgcacgccagcagctgcggcggcagactgcagaccagccccgcccccatccagaccaccccccccaaggacacctgcagccccgagctgctgatgagcctgatccagaccaagtgcgccgacgacgccatgaccctggtgctgaagaaggagctggtggcccacctgaagtgcaccatcaccggcctgaccttctgggaccccagctgcgaggccgaggacagaggcgacaagttcgtgctgagaagcgcctacagcagctgcggcatgcaggtgagcgccagcatgatcagcaacgaggccgtggtgaacatcctgagcagcagcagcccccagagaaagaaggtgcactgcctgaacatggacagcctgagcttccagctgggcctgtacctgagcccccacttcctgcaggccagcaacaccatcgagcccggccagcagagcttcgtgcaggtgagagtgagccccagcgtgagcgagttcctgctgcagctggacagctgccacctggacctgggccccgagggcggcaccgtggagctgatccagggcagagccgccaagggcaactgcgtgagcctgctgagccccagccccgagggcgaccccagattcagcttcctgctgcacttctacaccgtgcccatccccaagaccggcaccctgagctgcaccgtggccctgagacccaagaccggcagccaggaccaggaggtgcacagaaccgtgttcatgagactgaacatcatcagccccgacctgagcggctgcaccagcaagggcctggtgctgcccgccgtgctgggcatcaccttcggcgccttcctgatcggcgccctgctgaccgccgccctgtggtacatctacagccacaccagaagccccagcaagagagagcccgtggtggccgtggccgcccccgccagcagcgagagcagcagcaccaaccacagcatcggcagcacccagagcaccccctgcagcaccagcagcatggcctag

SEQ ID NO: 10491 - DNA, 639 bp, synthetic construct
  misc_feature 1..639: note = Description of Artificial Sequence: Synthetic coding sequence
  source 1..639: mol_type = other DNA
atggactacctgctgatgatcttcagcctgctgttcgtggcctgccagggcgcccccgagaccgccgtgctgggcgccgagctgagcgccgtgggcgagaacggcggcgagaagcccacccccagccccccctggagactgagaagaagcaagagatgcagctgcagcagcctgatggacaaggagtgcgtgtacttctgccacctggacatcatctgggtgaacacccccgagcacgtggtgccctacggcctgggcagccccagaagcaagagagccctggagaacctgctgcccaccaaggccaccgacagagagaacagatgccagtgcgccagccagaaggacaagaagtgctggaacttctgccaggccggcaaggagctgagagccgaggacatcatggagaaggactggaacaaccacaagaagggcaaggactgcagcaagctgggcaagaagtgcatctaccagcagctggtgagaggcagaaagatcagaagaagcagcgaggagcacctgagacagaccagaagcgagaccatgagaaacagcgtgaagagcagcttccacgaccccaagctgaagggcaagcccagcagagagagatacgtgacccacaacagagcccactggtag

SEQ ID NO: 10492 - DNA, 1329 bp, synthetic construct
  misc_feature 1..1329: note = Description of Artificial Sequence: Synthetic coding sequence
  source 1..1329: mol_type = other DNA
atgcagcccccccccagcctgtgcggcagagccctggtggccctggtgctggcctgcggcctgagcagaatctggggcgaggagagaggcttcccccccgacagagccacccccctgctgcagaccgccgagatcatgaccccccccaccaagaccctgtggcccaagggcagcaacgccagcctggccagaagcctggcccccgccgaggtgcccaagggcgacagaaccgccggcagcccccccagaaccatcagcccccccccctgccagggccccatcgagatcaaggagaccttcaagtacatcaacaccgtggtgagctgcctggtgttcgtgctgggcatcatcggcaacagcaccctgctgagaatcatctacaagaacaagtgcatgagaaacggccccaacatcctgatcgccagcctggccctgggcgacctgctgcacatcgtgatcgacatccccatcaacgtgtacaagctgctggccgaggactggcccttcggcgccgagatgtgcaagctggtgcccttcatccagaaggccagcgtgggcatcaccgtgctgagcctgtgcgccctgagcatcgacagatacagagccgtggccagctggagcagaatcaagggcatcggcgtgcccaagtggaccgccgtggagatcgtgctgatctgggtggtgagcgtggtgctggccgtgcccgaggccatcggcttcgacatcatcaccatggactacaagggcagctacctgagaatctgcctgctgcaccccgtgcagaagaccgccttcatgcagttctacaagaccgccaaggactggtggctgttcagcttctacttctgcctgcccctggccatcaccgccttcttctacaccctgatgacctgcgagatgctgagaaagaagagcggcatgcagatcgccctgaacgaccacctgaagcagagaagagaggtggccaagaccgtgttctgcctggtgctggtgttcgccctgtgctggctgcccctgcacctgagcagaatcctgaagctgaccctgtacaaccagaacgaccccaacagatgcgagctgctgagcttcctgctggtgctggactacatcggcatcaacatggccagcctgaacagctgcatcaaccccatcgccctgtacctggtgagcaagagattcaagaactgcttcaagagctgcctgtgctgctggtgccagagcttcgaggagaagcagagcctggaggagaagcagagctgcctgaagttcaaggccaacgaccacggctacgacaacttcagaagcagcaacaagtacagcagcagctag

SEQ ID NO: 10493 - DNA, 1599 bp, synthetic construct
  misc_feature 1..1599: note = Description of Artificial Sequence: Synthetic coding sequence
  source 1..1599: mol_type = other DNA
atgaacaagagcacctgcctgatggccgccgagacccccagcaagagatggagactgcactgcctggccttcagccagagattcgtgagagccggccccgcctgcagcagcagagaggcctgcagcagccccagagccggctggaaccccgccggcttcagactgcccggcagatggagccccttcgtggccctgcacctggtgtgccagatcagagaggccctgaagctgagaagcggccacagaacccccagcggcgccggcagcagcatgcagcccccccccagcctgtgcggcagagccctggtggccctggtgctggcctgcggcctgagcagaatctggggcgaggagagaggcttcccccccgacagagccacccccctgctgcagaccgccgagatcatgaccccccccaccaagaccctgtggcccaagggcagcaacgccagcctggccagaagcctggcccccgccgaggtgcccaagggcgacagaaccgccggcagcccccccagaaccatcagcccccccccctgccagggccccatcgagatcaaggagaccttcaagtacatcaacaccgtggtgagctgcctggtgttcgtgctgggcatcatcggcaacagcaccctgctgagaatcatctacaagaacaagtgcatgagaaacggccccaacatcctgatcgccagcctggccctgggcgacctgctgcacatcgtgatcgacatccccatcaacgtgtacaagctgctggccgaggactggcccttcggcgccgagatgtgcaagctggtgcccttcatccagaaggccagcgtgggcatcaccgtgctgagcctgtgcgccctgagcatcgacagatacagagccgtggccagctggagcagaatcaagggcatcggcgtgcccaagtggaccgccgtggagatcgtgctgatctgggtggtgagcgtggtgctggccgtgcccgaggccatcggcttcgacatcatcaccatggactacaagggcagctacctgagaatctgcctgctgcaccccgtgcagaagaccgccttcatgcagttctacaagaccgccaaggactggtggctgttcagcttctacttctgcctgcccctggccatcaccgccttcttctacaccctgatgacctgcgagatgctgagaaagaagagcggcatgcagatcgccctgaacgaccacctgaagcagagaagagaggtggccaagaccgtgttctgcctggtgctggtgttcgccctgtgctggctgcccctgcacctgagcagaatcctgaagctgaccctgtacaaccagaacgaccccaacagatgcgagctgctgagcttcctgctggtgctggactacatcggcatcaacatggccagcctgaacagctgcatcaaccccatcgccctgtacctggtgagcaagagattcaagaactgcttcaagagctgcctgtgctgctggtgccagagcttcgaggagaagcagagcctggaggagaagcagagctgcctgaagttcaaggccaacgaccacggctacgacaacttcagaagcagcaacaagtacagcagcagctag

SEQ ID NO: 10494 - DNA, 1311 bp, synthetic construct
  misc_feature 1..1311: note = Description of Artificial Sequence: Synthetic coding sequence
  source 1..1311: mol_type = other DNA
atgcagcccccccccagcctgtgcggcagagccctggtggccctggtgctggcctgcggcctgagcagaatctggggcgaggagagaggcttcccccccgacagagccacccccctgctgcagaccgccgagatcatgaccccccccaccaagaccctgtggcccaagggcagcaacgccagcctggccagaagcctggcccccgccgaggtgcccaagggcgacagaaccgccggcagcccccccagaaccatcagcccccccccctgccagggccccatcgagatcaaggagaccttcaagtacatcaacaccgtggtgagctgcctggtgttcgtgctgggcatcatcggcaacagcaccctgctgagaatcatctacaagaacaagtgcatgagaaacggccccaacatcctgatcgccagcctggccctgggcgacctgctgcacatcgtgatcgacatccccatcaacgtgtacaagctgctggccgaggactggcccttcggcgccgagatgtgcaagctggtgcccttcatccagaaggccagcgtgggcatcaccgtgctgagcctgtgcgccctgagcatcgacagatacagagccgtggccagctggagcagaatcaagggcatcggcgtgcccaagtggaccgccgtggagatcgtgctgatctgggtggtgagcgtggtgctggccgtgcccgaggccatcggcttcgacatcatcaccatggactacaagggcagctacctgagaatctgcctgctgcaccccgtgcagaagaccgccttcatgcagttctacaagaccgccaaggactggtggctgttcagcttctacttctgcctgcccctggccatcaccgccttcttctacaccctgatgacctgcgagatgctgagaaagaagagcggcatgcagatcgccctgaacgaccacctgaagcagagaagagaggtggccaagaccgtgttctgcctggtgctggtgttcgccctgtgctggctgcccctgcacctgagcagaatcctgaagctgaccctgtacaaccagaacgaccccaacagatgcgagctgctgagcttcctgctggtgctggactacatcggcatcaacatggccagcctgaacagctgcatcaaccccatcgccctgtacctggtgagcaagagattcaagaactgcttcaaggccggcccccacgtgggcaacaagctggtgatgctgttcagcgtgaacatcgagtgcgacggcaccgtgaaccagaaccccaccatgtggcccgagagaaagagcaacaacaactag

SEQ ID NO: 10495 - DNA, 2787 bp, synthetic construct
  misc_feature 1..2787: note = Description of Artificial Sequence: Synthetic coding sequence
  source 1..2787: mol_type = other DNA
atggccctgagaagactgggcgccgccctgctgctgctgcccctgctggccgccgtggaggagaccctgatggacagcaccaccgccaccgccgagctgggctggatggtgcacccccccagcggctgggaggaggtgagcggctacgacgagaacatgaacaccatcagaacctaccaggtgtgcaacgtgttcgagagcagccagaacaactggctgagaaccaagttcatcagaagaagaggcgcccacagaatccacgtggagatgaagttcagcgtgagagactgcagcagcatccccagcgtgcccggcagctgcaaggagaccttcaacctgtactactacgaggccgacttcgacagcgccaccaagaccttccccaactggatggagaacccctgggtgaaggtggacaccatcgccgccgacgagagcttcagccaggtggacctgggcggcagagtgatgaagatcaacaccgaggtgagaagcttcggccccgtgagcagaagcggcttctacctggccttccaggactacggcggctgcatgagcctgatcgccgtgagagtgttctacagaaagtgccccagaatcatccagaacggcgccatcttccaggagaccctgagcggcgccgagagcaccagcctggtggccgccagaggcagctgcatcgccaacgccgaggaggtggacgtgcccatcaagctgtactgcaacggcgacggcgagtggctggtgcccatcggcagatgcatgtgcaaggccggcttcgaggccgtggagaacggcaccgtgtgcagaggctgccccagcggcaccttcaaggccaaccagggcgacgaggcctgcacccactgccccatcaacagcagaaccaccagcgagggcgccaccaactgcgtgtgcagaaacggctactacagagccgacctggaccccctggacatgccctgcaccaccatccccagcgccccccaggccgtgatcagcagcgtgaacgagaccagcctgatgctggagtggaccccccccagagacagcggcggcagagaggacctggtgtacaacatcatctgcaagagctgcggcagcggcagaggcgcctgcaccagatgcggcgacaacgtgcagtacgcccccagacagctgggcctgaccgagcccagaatctacatcagcgacctgctggcccacacccagtacaccttcgagatccaggccgtgaacggcgtgaccgaccagagccccttcagcccccagttcgccagcgtgaacatcaccaccaaccaggccgcccccagcgccgtgagcatcatgcaccaggtgagcagaaccgtggacagcatcaccctgagctggagccagcccgaccagcccaacggcgtgatcctggactacgagctgcagtactacgagaaggagctgagcgagtacaacgccaccgccatcaagagccccaccaacaccgtgaccgtgcagggcctgaaggccggcgccatctacgtgttccaggtgagagccagaaccgtggccggctacggcagatacagcggcaagatgtacttccagaccatgaccgaggtgacccccggcatgaagatctacatcgaccccttcacctacgaggaccccaacgaggccgtgagagagttcgccaaggagatcgacatcagctgcgtgaagatcgagcaggtgatcggcgccggcgagttcggcgaggtgtgcagcggccacctgaagctgcccggcaagagagagatcttcgtggccatcaagaccctgaagagcggctacaccgagaagcagagaagagacttcctgagcgaggccagcatcatgggccagttcgaccaccccaacgtgatccacctggagggcgtggtgaccaagagcacccccgtgatgatcatcaccgagttcatggagaacggcagcctggacagcttcctgagacagaacgacggccagttcaccgtgatccagctggtgggcatgctgagaggcatcgccgccggcatgaagtacctggccgacatgaactacgtgcacagagacctggccgccagaaacatcctggtgaacagcaacctggtgtgcaaggtgagcgacttcggcctgagcagattcctggaggacgacaccagcgaccccacctacaccagcgccctgggcggcaagatccccatcagatggaccgcccccgaggccatccagtacagaaagttcaccagcgccagcgacgtgtggagctacggcatcgtgatgtgggaggtgatgagctacggcgagagaccctactgggacatgaccaaccaggacgtgatcaacgccatcgagcaggactacagactgcccccccccatggactgccccagcgccctgcaccagctgatgctggactgctggcagaaggacagaaaccacagacccaagttcggccagatcgtgaacaccctggacaagatgatcagaaaccccaacagcctgaaggccatggcccccctgagcagcggcatcaacctgcccctgctggacagaaccatccccgactacaccagcttcaacaccgtggacgagtggctggaggccatcaagatgggccagtacaaggagagcttcgccaacgccggcttcaccagcttcgacgtggtgagccagatgatgatggaggacatcctgagagtgggcgtgaccctggccggccaccagaagaagatcctgaacagcatccaggtgatgagagcccagatgaaccagatccagagcgtggaggtgtag

SEQ ID NO: 10496 - DNA, 2841 bp, synthetic construct
  misc_feature 1..2841: note = Description of Artificial Sequence: Synthetic coding sequence
  source 1..2841: mol_type = other DNA
atgtgggtgcccgtgctggccctgcccgtgtgcacctacgccgagaccctgatggacagcaccaccgccaccgccgagctgggctggatggtgcacccccccagcggctgggaggaggtgagcggctacgacgagaacatgaacaccatcagaacctaccaggtgtgcaacgtgttcgagagcagccagaacaactggctgagaaccaagttcatcagaagaagaggcgcccacagaatccacgtggagatgaagttcagcgtgagagactgcagcagcatccccagcgtgcccggcagctgcaaggagaccttcaacctgtactactacgaggccgacttcgacagcgccaccaagaccttccccaactggatggagaacccctgggtgaaggtggacaccatcgccgccgacgagagcttcagccaggtggacctgggcggcagagtgatgaagatcaacaccgaggtgagaagcttcggccccgtgagcagaagcggcttctacctggccttccaggactacggcggctgcatgagcctgatcgccgtgagagtgttctacagaaagtgccccagaatcatccagaacggcgccatcttccaggagaccctgagcggcgccgagagcaccagcctggtggccgccagaggcagctgcatcgccaacgccgaggaggtggacgtgcccatcaagctgtactgcaacggcgacggcgagtggctggtgcccatcggcagatgcatgtgcaaggccggcttcgaggccgtggagaacggcaccgtgtgcagaggctgccccagcggcaccttcaaggccaaccagggcgacgaggcctgcacccactgccccatcaacagcagaaccaccagcgagggcgccaccaactgcgtgtgcagaaacggctactacagagccgacctggaccccctggacatgccctgcaccaccatccccagcgccccccaggccgtgatcagcagcgtgaacgagaccagcctgatgctggagtggaccccccccagagacagcggcggcagagaggacctggtgtacaacatcatctgcaagagctgcggcagcggcagaggcgcctgcaccagatgcggcgacaacgtgcagtacgcccccagacagctgggcctgaccgagcccagaatctacatcagcgacctgctggcccacacccagtacaccttcgagatccaggccgtgaacggcgtgaccgaccagagccccttcagcccccagttcgccagcgtgaacatcaccaccaaccaggccgcccccagcgccgtgagcatcatgcaccaggtgagcagaaccgtggacagcatcaccctgagctggagccagcccgaccagcccaacggcgtgatcctggactacgagctgcagtactacgagaagcaggagctgagcgagtacaacgccaccgccatcaagagccccaccaacaccgtgaccgtgcagggcctgaaggccggcgccatctacgtgttccaggtgagagccagaaccgtggccggctacggcagatacagcggcaagatgtacttccagaccatgaccgaggccgagtaccagaccagcatccaggagaagctgcccctgatcatcggcagcagcgccgccggcctggtgttcctgatcgccgtggtggtgatcgccatcgtgtgcaacagaagaggcttcgagagagccgacagcgagtacaccgacaagctgcagcactacaccagcggccacatgacccccggcatgaagatctacatcgaccccttcacctacgaggaccccaacgaggccgtgagagagttcgccaaggagatcgacatcagctgcgtgaagatcgagcaggtgatcggcgccggcgagttcggcgaggtgtgcagcggccacctgaagctgcccggcaagagagagatcttcgtggccatcaagaccctgaagagcggctacaccgagaagcagagaagagacttcctgagcgaggccagcatcatgggccagttcgaccaccccaacgtgatccacctggagggcgtggtgaccaagagcacccccgtgatgatcatcaccgagttcatggagaacggcagcctggacagcttcctgagacagaacgacggccagttcaccgtgatccagctggtgggcatgctgagaggcatcgccgccggcatgaagtacctggccgacatgaactacgtgcacagagacctggccgccagaaacatcctggtgaacagcaacctggtgtgcaaggtgagcgacttcggcctgagcagattcctggaggacgacaccagcgaccccacctacaccagcgccctgggcggcaagatccccatcagatggaccgcccccgaggccatccagtacagaaagttcaccagcgccagcgacgtgtggagctacggcatcgtgatgtgggaggtgatgagctacggcgagagaccctactgggacatgaccaaccaggacgtgatcaacgccatcgagcaggactacagactgcccccccccatggactgccccagcgccctgcaccagctgatgctggactgctggcagaaggacagaaaccacagacccaagttcggccagatcgtgaacaccctggacaagatgatcagaaaccccaacagcctgaaggccatggcccccctgagcagcggcatcaacctgcccctgctggacagaaccatccccgactacaccagcttcaacaccgtggacgagtggctggaggccatcaagatgggccagtacaaggagagcttcgccaacgccggcttcaccagcttcgacgtggtgagccagatgatgatggagtag

SEQ ID NO: 10497 - DNA, 2961 bp, synthetic construct
  misc_feature 1..2961: note = Description of Artificial Sequence: Synthetic coding sequence
  source 1..2961: mol_type = other DNA
atggccctgagaagactgggcgccgccctgctgctgctgcccctgctggccgccgtggaggagaccctgatggacagcaccaccgccaccgccgagctgggctggatggtgcacccccccagcggctgggaggaggtgagcggctacgacgagaacatgaacaccatcagaacctaccaggtgtgcaacgtgttcgagagcagccagaacaactggctgagaaccaagttcatcagaagaagaggcgcccacagaatccacgtggagatgaagttcagcgtgagagactgcagcagcatccccagcgtgcccggcagctgcaaggagaccttcaacctgtactactacgaggccgacttcgacagcgccaccaagaccttccccaactggatggagaacccctgggtgaaggtggacaccatcgccgccgacgagagcttcagccaggtggacctgggcggcagagtgatgaagatcaacaccgaggtgagaagcttcggccccgtgagcagaagcggcttctacctggccttccaggactacggcggctgcatgagcctgatcgccgtgagagtgttctacagaaagtgccccagaatcatccagaacggcgccatcttccaggagaccctgagcggcgccgagagcaccagcctggtggccgccagaggcagctgcatcgccaacgccgaggaggtggacgtgcccatcaagctgtactgcaacggcgacggcgagtggctggtgcccatcggcagatgcatgtgcaaggccggcttcgaggccgtggagaacggcaccgtgtgcagaggctgccccagcggcaccttcaaggccaaccagggcgacgaggcctgcacccactgccccatcaacagcagaaccaccagcgagggcgccaccaactgcgtgtgcagaaacggctactacagagccgacctggaccccctggacatgccctgcaccaccatccccagcgccccccaggccgtgatcagcagcgtgaacgagaccagcctgatgctggagtggaccccccccagagacagcggcggcagagaggacctggtgtacaacatcatctgcaagagctgcggcagcggcagaggcgcctgcaccagatgcggcgacaacgtgcagtacgcccccagacagctgggcctgaccgagcccagaatctacatcagcgacctgctggcccacacccagtacaccttcgagatccaggccgtgaacggcgtgaccgaccagagccccttcagcccccagttcgccagcgtgaacatcaccaccaaccaggccgcccccagcgccgtgagcatcatgcaccaggtgagcagaaccgtggacagcatcaccctgagctggagccagcccgaccagcccaacggcgtgatcctggactacgagctgcagtactacgagaaggagctgagcgagtacaacgccaccgccatcaagagccccaccaacaccgtgaccgtgcagggcctgaaggccggcgccatctacgtgttccaggtgagagccagaaccgtggccggctacggcagatacagcggcaagatgtacttccagaccatgaccgaggccgagtaccagaccagcatccaggagaagctgcccctgatcatcggcagcagcgccgccggcctggtgttcctgatcgccgtggtggtgatcgccatcgtgtgcaacagaagaggcttcgagagagccgacagcgagtacaccgacaagctgcagcactacaccagcggccacatgacccccggcatgaagatctacatcgaccccttcacctacgaggaccccaacgaggccgtgagagagttcgccaaggagatcgacatcagctgcgtgaagatcgagcaggtgatcggcgccggcgagttcggcgaggtgtgcagcggccacctgaagctgcccggcaagagagagatcttcgtggccatcaagaccctgaagagcggctacaccgagaagcagagaagagacttcctgagcgaggccagcatcatgggccagttcgaccaccccaacgtgatccacctggagggcgtggtgaccaagagcacccccgtgatgatcatcaccgagttcatggagaacggcagcctggacagcttcctgagacagaacgacggccagttcaccgtgatccagctggtgggcatgctgagaggcatcgccgccggcatgaagtacctggccgacatgaactacgtgcacagagacctggccgccagaaacatcctggtgaacagcaacctggtgtgcaaggtgagcgacttcggcctgagcagattcctggaggacgacaccagcgaccccacctacaccagcgccctgggcggcaagatccccatcagatggaccgcccccgaggccatccagtacagaaagttcaccagcgccagcgacgtgtggagctacggcatcgtgatgtgggaggtgatgagctacggcgagagaccctactgggacatgaccaaccaggacgtgatcaacgccatcgagcaggactacagactgcccccccccatggactgccccagcgccctgcaccagctgatgctggactgctggcagaaggacagaaaccacagacccaagttcggccagatcgtgaacaccctggacaagatgatcagaaaccccaacagcctgaaggccatggcccccctgagcagcggcatcaacctgcccctgctggacagaaccatccccgactacaccagcttcaacaccgtggacgagtggctggaggccatcaagatgggccagtacaaggagagcttcgccaacgccggcttcaccagcttcgacgtggtgagccagatgatgatggaggacatcctgagagtgggcgtgaccctggccggccaccagaagaagatcctgaacagcatccaggtgatgagagcccagatgaaccagatccagagcgtggaggtgtag

SEQ ID NO: 10498 - DNA, 2964 bp, synthetic construct
  misc_feature 1..2964: note = Description of Artificial Sequence: Synthetic coding sequence
  source 1..2964: mol_type = other DNA
atggccctgagaagactgggcgccgccctgctgctgctgcccctgctggccgccgtggaggagaccctgatggacagcaccaccgccaccgccgagctgggctggatggtgcacccccccagcggctgggaggaggtgagcggctacgacgagaacatgaacaccatcagaacctaccaggtgtgcaacgtgttcgagagcagccagaacaactggctgagaaccaagttcatcagaagaagaggcgcccacagaatccacgtggagatgaagttcagcgtgagagactgcagcagcatccccagcgtgcccggcagctgcaaggagaccttcaacctgtactactacgaggccgacttcgacagcgccaccaagaccttccccaactggatggagaacccctgggtgaaggtggacaccatcgccgccgacgagagcttcagccaggtggacctgggcggcagagtgatgaagatcaacaccgaggtgagaagcttcggccccgtgagcagaagcggcttctacctggccttccaggactacggcggctgcatgagcctgatcgccgtgagagtgttctacagaaagtgccccagaatcatccagaacggcgccatcttccaggagaccctgagcggcgccgagagcaccagcctggtggccgccagaggcagctgcatcgccaacgccgaggaggtggacgtgcccatcaagctgtactgcaacggcgacggcgagtggctggtgcccatcggcagatgcatgtgcaaggccggcttcgaggccgtggagaacggcaccgtgtgcagaggctgccccagcggcaccttcaaggccaaccagggcgacgaggcctgcacccactgccccatcaacagcagaaccaccagcgagggcgccaccaactgcgtgtgcagaaacggctactacagagccgacctggaccccctggacatgccctgcaccaccatccccagcgccccccaggccgtgatcagcagcgtgaacgagaccagcctgatgctggagtggaccccccccagagacagcggcggcagagaggacctggtgtacaacatcatctgcaagagctgcggcagcggcagaggcgcctgcaccagatgcggcgacaacgtgcagtacgcccccagacagctgggcctgaccgagcccagaatctacatcagcgacctgctggcccacacccagtacaccttcgagatccaggccgtgaacggcgtgaccgaccagagccccttcagcccccagttcgccagcgtgaacatcaccaccaaccaggccgcccccagcgccgtgagcatcatgcaccaggtgagcagaaccgtggacagcatcaccctgagctggagccagcccgaccagcccaacggcgtgatcctggactacgagctgcagtactacgagaaggagctgagcgagtacaacgccaccgccatcaagagccccaccaacaccgtgaccgtgcagggcctgaaggccggcgccatctacgtgttccaggtgagagccagaaccgtggccggctacggcagatacagcggcaagatgtacttccagaccatgaccgaggccgagtaccagaccagcatccaggagaagctgcccctgatcatcggcagcagcgccgccggcctggtgttcctgatcgccgtggtggtgatcgccatcgtgtgcaacagaagaagaggcttcgagagagccgacagcgagtacaccgacaagctgcagcactacaccagcggccacatgacccccggcatgaagatctacatcgaccccttcacctacgaggaccccaacgaggccgtgagagagttcgccaaggagatcgacatcagctgcgtgaagatcgagcaggtgatcggcgccggcgagttcggcgaggtgtgcagcggccacctgaagctgcccggcaagagagagatcttcgtggccatcaagaccctgaagagcggctacaccgagaagcagagaagagacttcctgagcgaggccagcatcatgggccagttcgaccaccccaacgtgatccacctggagggcgtggtgaccaagagcacccccgtgatgatcatcaccgagttcatggagaacggcagcctggacagcttcctgagacagaacgacggccagttcaccgtgatccagctggtgggcatgctgagaggcatcgccgccggcatgaagtacctggccgacatgaactacgtgcacagagacctggccgccagaaacatcctggtgaacagcaacctggtgtgcaaggtgagcgacttcggcctgagcagattcctggaggacgacaccagcgaccccacctacaccagcgccctgggcggcaagatccccatcagatggaccgcccccgaggccatccagtacagaaagttcaccagcgccagcgacgtgtggagctacggcatcgtgatgtgggaggtgatgagctacggcgagagaccctactgggacatgaccaaccaggacgtgatcaacgccatcgagcaggactacagactgcccccccccatggactgccccagcgccctgcaccagctgatgctggactgctggcagaaggacagaaaccacagacccaagttcggccagatcgtgaacaccctggacaagatgatcagaaaccccaacagcctgaaggccatggcccccctgagcagcggcatcaacctgcccctgctggacagaaccatccccgactacaccagcttcaacaccgtggacgagtggctggaggccatcaagatgggccagtacaaggagagcttcgccaacgccggcttcaccagcttcgacgtggtgagccagatgatgatggaggacatcctgagagtgggcgtgaccctggccggccaccagaagaagatcctgaacagcatccaggtgatgagagcccagatgaaccagatccagagcgtggaggtgtag

SEQ ID NO: 10499 - DNA, 3168 bp, synthetic construct
  misc_feature 1..3168: note = Description of Artificial Sequence: Synthetic coding sequence
  source 1..3168: mol_type = other DNA
atggccctgagaagactgggcgccgccctgctgctgctgcccctgctggccgccgtggaggagaccctgatggacagcaccaccgccaccgccgagctgggctggatggtgcacccccccagcggctgggaggaggtgagcggctacgacgagaacatgaacaccatcagaacctaccaggtgtgcaacgtgttcgagagcagccagaacaactggctgagaaccaagttcatcagaagaagaggcgcccacagaatccacgtggagatgaagttcagcgtgagagactgcagcagcatccccagcgtgcccggcagctgcaaggagaccttcaacctgtactactacgaggccgacttcgacagcgccaccaagaccttccccaactggatggagaacccctgggtgaaggtggacaccatcgccgccgacgagagcttcagccaggtggacctgggcggcagagtgatgaagatcaacaccgaggtgagaagcttcggccccgtgagcagaagcggcttctacctggccttccaggactacggcggctgcatgagcctgatcgccgtgagagtgttctacagaaagtgccccagaatcatccagaacggcgccatcttccaggagaccctgagcggcgccgagagcaccagcctggtggccgccagaggcagctgcatcgccaacgccgaggaggtggacgtgcccatcaagctgtactgcaacggcgacggcgagtggctggtgcccatcggcagatgcatgtgcaaggccggcttcgaggccgtggagaacggcaccgtgtgcagaggctgccccagcggcaccttcaaggccaaccagggcgacgaggcctgcacccactgccccatcaacagcagaaccaccagcgagggcgccaccaactgcgtgtgcagaaacggctactacagagccgacctggaccccctggacatgccctgcaccaccatccccagcgccccccaggccgtgatcagcagcgtgaacgagaccagcctgatgctggagtggaccccccccagagacagcggcggcagagaggacctggtgtacaacatcatctgcaagagctgcggcagcggcagaggcgcctgcaccagatgcggcgacaacgtgcagtacgcccccagacagctgggcctgaccgagcccagaatctacatcagcgacctgctggcccacacccagtacaccttcgagatccaggccgtgaacggcgtgaccgaccagagccccttcagcccccagttcgccagcgtgaacatcaccaccaaccaggccgcccccagcgccgtgagcatcatgcaccaggtgagcagaaccgtggacagcatcaccctgagctggagccagcccgaccagcccaacggcgtgatcctggactacgagctgcagtactacgagaaggagctgagcgagtacaacgccaccgccatcaagagccccaccaacaccgtgaccgtgcagggcctgaaggccggcgccatctacgtgttccaggtgagagccagaaccgtggccggctacggcagatacagcggcaagatgtacttccagaccatgaccgaggccgagtaccagaccagcatccaggagaagctgcccctgatcatcggcagcagcgccgccggcctggtgttcctgatcgccgtggtggtgatcgccatcgtgtgcaacagaagaggcttcgagagagccgacagcgagtacaccgacaagctgcagcactacaccagcggccacatgacccccggcatgaagatctacatcgaccccttcacctacgaggaccccaacgaggccgtgagagagttcgccaaggagatcgacatcagctgcgtgaagatcgagcaggtgatcggcgccggcgagttcggcgaggtgtgcagcggccacctgaagctgcccggcaagagagagatcttcgtggccatcaagaccctgaagagcggctacaccgagaagcagagaagagacttcctgagcgaggccagcatcatgggccagttcgaccaccccaacgtgatccacctggagggcgtggtgaccaagagcacccccgtgatgatcatcaccgagttcatggagaacggcagcctggacagcttcctgagacagaacgacggccagttcaccgtgatccagctggtgggcatgctgagaggcatcgccgccggcatgaagtacctggccgacatgaactacgtgcacagagacctggccgccagaaacatcctggtgaacagcaacctggtgtgcaaggtgagcgacttcggcctgagcagattcctggaggacgacaccagcgaccccacctacaccagcgccctgggcggcaagatccccatcagatggaccgcccccgaggccatccagtacagaaagttcaccagcgccagcgacgtgtggagctacggcatcgtgatgtgggaggtgatgagctacggcgagagaccctactgggacatgaccaaccaggacgtgatcaacgccatcgagcaggactacagactgcccccccccatggactgccccagcgccctgcaccagctgatgctggactgctggcagaaggacagaaaccacagacccaagttcggccagatcgtgaacaccctggacaagatgatcagaaaccccaacagcctgaaggccatggcccccctgagcagcggcatcaacctgcccctgctggacagaaccatccccgactacaccagcttcaacaccgtggacgagtggctggaggccatcaagatgggccagtacaaggagagcttcgccaacgccggcttcaccagcttcgacgtggtgagccagatgatgatggaggacatcctgagagtgggcgtgaccctggccggccaccagaagaagatcctgaacagcatccaggtgatgagagcccagatgaaccagatccagagcgtggagggccagcccctggccagaagacccagagccaccggcagaaccaagagatgccagcccagagacgtgaccaagaagacctgcaacagcaacgacggcaagaagaagggcatgggcaagaagaagaccgaccccggcagaggcagagagatccagggcatcttcttcaaggaggacagccacaaggagagcaacgactgcagctgcggcggctag

SEQ ID NO: 10500 - DNA, 1449 bp, synthetic construct
  misc_feature 1..1449: note = Description of Artificial Sequence: Synthetic coding sequence
  source 1..1449: mol_type = other DNA
atggccctgagaagactgggcgccgccctgctgctgctgcccctgctggccgccgtggaggagaccctgatggacagcaccaccgccaccgccgagctgggctggatggtgcacccccccagcggctgggaggaggtgagcggctacgacgagaacatgaacaccatcagaacctaccaggtgtgcaacgtgttcgagagcagccagaacaactggctgagaaccaagttcatcagaagaagaggcgcccacagaatccacgtggagatgaagttcagcgtgagagactgcagcagcatccccagcgtgcccggcagctgcaaggagaccttcaacctgtactactacgaggccgacttcgacagcgccaccaagaccttccccaactggatggagaacccctgggtgaaggtggacaccatcgccgccgacgagagcttcagccaggtggacctgggcggcagagtgatgaagatcaacaccgaggtgagaagcttcggccccgtgagcagaagcggcttctacctggccttccaggactacggcggctgcatgagcctgatcgccgtgagagtgttctacagaaagtgccccagaatcatccagaacggcgccatcttccaggagaccctgagcggcgccgagagcaccagcctggtggccgccagaggcagctgcatcgccaacgccgaggaggtggacgtgcccatcaagctgtactgcaacggcgacggcgagtggctggtgcccatcggcagatgcatgtgcaaggccggcttcgaggccgtggagaacggcaccgtgtgcagaggctgccccagcggcaccttcaaggccaaccagggcgacgaggcctgcacccactgccccatcaacagcagaaccaccagcgagggcgccaccaactgcgtgtgcagaaacggctactacagagccgacctggaccccctggacatgccctgcaccaccatccccagcgccccccaggccgtgatcagcagcgtgaacgagaccagcctgatgctggagtggaccccccccagagacagcggcggcagagaggacctggtgtacaacatcatctgcaagagctgcggcagcggcagaggcgcctgcaccagatgcggcgacaacgtgcagtacgcccccagacagctgggcctgaccgagcccagaatctacatcagcgacctgctggcccacacccagtacaccttcgagatccaggccgtgaacggcgtgaccgaccagagccccttcagcccccagttcgccagcgtgaacatcaccaccaaccaggccgcccccagcgccgtgagcatcatgcaccaggtgagcagaaccgtggacagcatcaccctgagctggagccagcccgaccagcccaacggcgtgatcctggactacgagctgcagtactacgagaagatgaagacccagagaagctag

SEQ ID NO: 10501 - DNA, 2964 bp, synthetic construct
  misc_feature 1..2964: note = Description of Artificial Sequence: Synthetic coding sequence
  source 1..2964: mol_type = other DNA
atggagctgagagtgctgctgtgctgggccagcctggccgccgccctggaggagaccctgctgaacaccaagctggagaccgccgacctgaagtgggtgaccttcccccaggtggacggccagtgggaggagctgagcggcctggacgaggagcagcacagcgtgagaacctacgaggtgtgcgacgtgcagagagcccccggccaggcccactggctgagaaccggctgggtgcccagaagaggcgccgtgcacgtgtacgccaccctgagattcaccatgctggagtgcctgagcctgcccagagccggcagaagctgcaaggagaccttcaccgtgttctactacgagagcgacgccgacaccgccaccgccctgacccccgcctggatggagaacccctacatcaaggtggacaccgtggccgccgagcacctgaccagaaagagacccggcgccgaggccaccggcaaggtgaacgtgaagaccctgagactgggccccctgagcaaggccggcttctacctggccttccaggaccagggcgcctgcatggccctgctgagcctgcacctgttctacaagaagtgcgcccagctgaccgtgaacctgaccagattccccgagaccgtgcccagagagctggtggtgcccgtggccggcagctgcgtggtggacgccgtgcccgcccccggccccagccccagcctgtactgcagagaggacggccagtgggccgagcagcccgtgaccggctgcagctgcgcccccggcttcgaggccgccgagggcaacaccaagtgcagagcctgcgcccagggcaccttcaagcccctgagcggcgagggcagctgccagccctgccccgccaacagccacagcaacaccatcggcagcgccgtgtgccagtgcagagtgggctacttcagagccagaaccgaccccagaggcgccccctgcaccaccccccccagcgcccccagaagcgtggtgagcagactgaacggcagcagcctgcacctggagtggagcgcccccctggagagcggcggcagagaggacctgacctacgccctgagatgcagagagtgcagacccggcggcagctgcgccccctgcggcggcgacctgaccttcgaccccggccccagagacctggtggagccctgggtggtggtgagaggcctgagacccgacttcacctacaccttcgaggtgaccgccctgaacggcgtgagcagcctggccaccggccccgtgcccttcgagcccgtgaacgtgaccaccgacagagaggtgccccccgccgtgagcgacatcagagtgaccagaagcagccccagcagcctgagcctggcctgggccgtgcccagagcccccagcggcgccgtgctggactacgaggtgaagtaccacgagaagggcgccgagggccccagcagcgtgagattcctgaagaccagcgagaacagagccgagctgagaggcctgaagagaggcgccagctacctggtgcaggtgagagccagaagcgaggccggctacggccccttcggccaggagcaccacagccagacccagctggacgagagcgagggctggagagagcagctggccctgatcgccggcaccgccgtggtgggcgtggtgctggtgctggtggtgatcgtggtggccgtgctgtgcctgagaaagcagagcaacggcagagaggccgagtacagcgacaagcacggccagtacctgatcggccacggcaccaaggtgtacatcgaccccttcacctacgaggaccccaacgaggccgtgagagagttcgccaaggagatcgacgtgagctacgtgaagatcgaggaggtgatcggcgccggcgagttcggcgaggtgtgcagaggcagactgaaggcccccggcaagaaggagagctgcgtggccatcaagaccctgaagggcggctacaccgagagacagagaagagagttcctgagcgaggccagcatcatgggccagttcgagcaccccaacatcatcagactggagggcgtggtgaccaacagcatgcccgtgatgatcctgaccgagttcatggagaacggcgccctggacagcttcctgagactgaacgacggccagttcaccgtgatccagctggtgggcatgctgagaggcatcgccagcggcatgagatacctggccgagatgagctacgtgcacagagacctggccgccagaaacatcctggtgaacagcaacctggtgtgcaaggtgagcgacttcggcctgagcagattcctggaggagaacagcagcgaccccacctacaccagcagcctgggcggcaagatccccatcagatggaccgcccccgaggccatcgccttcagaaagttcaccagcgccagcgacgcctggagctacggcatcgtgatgtgggaggtgatgagcttcggcgagagaccctactgggacatgagcaaccaggacgtgatcaacgccatcgagcaggactacagactgccccccccccccgactgccccaccagcctgcaccagctgatgctggactgctggcagaaggacagaaacgccagacccagattcccccaggtggtgagcgccctggacaagatgatcagaaaccccgccagcctgaagatcgtggccagagagaacggcggcgccagccaccccctgctggaccagagacagccccactacagcgccttcggcagcgtgggcgagtggctgagagccatcaagatgggcagatacgaggagagcttcgccgccgccggcttcggcagcttcgagctggtgagccagatcagcgccgaggacctgctgagaatcggcgtgaccctggccggccaccagaagaagatcctggccagcgtgcagcacatgaagagccaggccaagcccggcacccccggcggcaccggcggccccgccccccagtactag

SEQ ID NO: 10502 - DNA, 2808 bp, synthetic construct
  misc_feature 1..2808: note = Description of Artificial Sequence: Synthetic coding sequence
  source 1..2808: mol_type = other DNA
atggagctgagagtgctgctgtgctgggccagcctggccgccgccctggaggagaccctgctgaacaccaagctggagaccgccgacctgaagtgggtgaccttcccccaggtggacggccagtgggaggagctgagcggcctggacgaggagcagcacagcgtgagaacctacgaggtgtgcgacgtgcagagagcccccggccaggcccactggctgagaaccggctgggtgcccagaagaggcgccgtgcacgtgtacgccaccctgagattcaccatgctggagtgcctgagcctgcccagagccggcagaagctgcaaggagaccttcaccgtgttctactacgagagcgacgccgacaccgccaccgccctgacccccgcctggatggagaacccctacatcaaggtggacaccgtggccgccgagcacctgaccagaaagagacccggcgccgaggccaccggcaaggtgaacgtgaagaccctgagactgggccccctgagcaaggccggcttctacctggccttccaggaccagggcgcctgcatggccctgctgagcctgcacctgttctacaagaagtgcgcccagctgaccgtgaacctgaccagattccccgagaccgtgcccagagagctggtggtgcccgtggccggcagctgcgtggtggacgccgtgcccgcccccggccccagccccagcctgtactgcagagaggacggccagtgggccgagcagcccgtgaccggctgcagctgcgcccccggcttcgaggccgccgagggcaacaccaagtgcagagcctgcgcccagggcaccttcaagcccctgagcggcgagggcagctgccagccctgccccgccaacagccacagcaacaccatcggcagcgccgtgtgccagtgcagagtgggctacttcagagccagaaccgaccccagaggcgccccctgcaccaccccccccagcgcccccagaagcgtggtgagcagactgaacggcagcagcctgcacctggagtggagcgcccccctggagagcggcggcagagaggacctgacctacgccctgagatgcagagagtgcagacccggcggcagctgcgccccctgcggcggcgacctgaccttcgaccccggccccagagacctggtggagccctgggtggtggtgagaggcctgagacccgacttcacctacaccttcgaggtgaccgccctgaacggcgtgagcagcctggccaccggccccgtgcccttcgagcccgtgaacgtgaccaccgacagagaggtgccccccgccgtgagcgacatcagagtgaccagaagcagccccagcagcctgagcctggcctgggccgtgcccagagcccccagcggcgccgtgctggactacgaggtgaagtaccacgagaagggcgccgagggccccagcagcgtgagattcctgaagaccagcgagaacagagccgagctgagaggcctgaagagaggcgccagctacctggtgcaggtgagagccagaagcgaggccggctacggccccttcggccaggagcaccacagccagacccagctggacgagagcgagggctggagagagcagctggccctgatcgccggcaccgccgtggtgggcgtggtgctggtgctggtggtgatcgtggtggccgtgctgtgcctgagaaagcagagcaacggcagagaggccgagtacagcgacaagcacggccagtacctgatcggccacggcaccaaggtgtacatcgaccccttcacctacgaggaccccaacgaggccgtgagagagttcgccaaggagatcgacgtgagctacgtgaagatcgaggaggtgatcggcgccggcgagttcggcgaggtgtgcagaggcagactgaaggcccccggcaagaaggagagctgcgtggccatcaagaccctgaagggcggctacaccgagagacagagaagagagttcctgagcgaggccagcatcatgggccagttcgagcaccccaacatcatcagactggagggcgtggtgaccaacagcatgcccgtgatgatcctgaccgagttcatggagaacggcgccctggacagcttcctgagactgaacgacggccagttcaccgtgatccagctggtgggcatgctgagaggcatcgccagcggcatgagatacctggccgagatgagctacgtgcacagagacctggccgccagaaacatcctggtgaacagcaacctggtgtgcaaggtgagcgacttcggcctgagcagattcctggaggagaacagcagcgaccccacctacaccagcagcctgggcggcaagatccccatcagatggaccgcccccgaggccatcgccttcagaaagttcaccagcgccagcgacgcctggagctacggcatcgtgatgtgggaggtgatgagcttcggcgagagaccctactgggacatgagcaaccaggacgtgatcaacgccatcgagcaggactacagactgccccccccccccgactgccccaccagcctgcaccagctgatgctggactgctggcagaaggacagaaacgccagacccagattcccccaggtggtgagcgccctggacaagatgatcagaaaccccgccagcctgaagatcgtggccagagagaacggcggcgacctgctgagaatcggcgtgaccctggccggccaccagaagaagatcctggccagcgtgcagcacatgaagagccaggccaagcccggcacccccggcggcaccggcggccccgccccccagtactag

SEQ ID NO: 10503 - DNA, 552 bp, synthetic construct
  misc_feature 1..552: note = Description of Artificial Sequence: Synthetic coding sequence
  source 1..552: mol_type = other DNA
atggagttcctgtgggcccccctgctgggcctgtgctgcagcctggccgccgccgacagacacaccgtgttctggaacagcagcaaccccaagttcagaaacgaggactacaccatccacgtgcagctgaacgactacgtggacatcatctgcccccactacgaggaccacagcgtggccgacgccgccatggagcagtacatcctgtacctggtggagcacgaggagtaccagctgtgccagccccagagcaaggaccaggtgagatggcagtgcaacagacccagcgccaagcacggccccgagaagctgagcgagaagttccagagattcacccccttcaccctgggcaaggagttcaaggagggccacagctactactacatcagccacagcccccaggcccacgacaacccccaggagaagagactggccgccgacgaccccgaggtgagagtgctgcacagcatcggccacagcgccgcccccagactgttccccctggcctggaccgtgctgctgctgcccctgctgctgctgcagaccccctag

SEQ ID NO: 10504 - DNA, 618 bp, synthetic construct
  misc_feature 1..618: note = Description of Artificial Sequence: Synthetic coding sequence
  source 1..618: mol_type = other DNA
atggagttcctgtgggcccccctgctgggcctgtgctgcagcctggccgccgccgacagacacaccgtgttctggaacagcagcaaccccaagttcagaaacgaggactacaccatccacgtgcagctgaacgactacgtggacatcatctgcccccactacgaggaccacagcgtggccgacgccgccatggagcagtacatcctgtacctggtggagcacgaggagtaccagctgtgccagccccagagcaaggaccaggtgagatggcagtgcaacagacccagcgccaagcacggccccgagaagctgagcgagaagttccagagattcacccccttcaccctgggcaaggagttcaaggagggccacagctactactacatcagcaagcccatccaccagcacgaggacagatgcctgagactgaaggtgaccgtgagcggcaagatcacccacagcccccaggcccacgacaacccccaggagaagagactggccgccgacgaccccgaggtgagagtgctgcacagcatcggccacagcgccgcccccagactgttccccctggcctggaccgtgctgctgctgcccctgctgctgctgcagaccccctag

SEQ ID NO: 10505 - DNA, 1002 bp, synthetic construct
  misc_feature 1..1002: note = Description of Artificial Sequence: Synthetic coding sequence
  source 1..1002: mol_type = other DNA
atggccgtgagaagagacagcgtgtggaagtactgctggggcgtgctgatggtgctgtgcagaaccgccatcagcaagagcatcgtgctggagcccatctactggaacagcagcaacagcaagttcctgcccggccagggcctggtgctgtacccccagatcggcgacaagctggacatcatctgccccaaggtggacagcaagaccgtgggccagtacgagtactacaaggtgtacatggtggacaaggaccaggccgacagatgcaccatcaagaaggagaacacccccctgctgaactgcgccaagcccgaccaggacatcaagttcaccatcaagttccaggagttcagccccaacctgtggggcctggagttccagaagaacaaggactactacatcatcagcaccagcaacggcagcctggagggcctggacaaccaggagggcggcgtgtgccagaccagagccatgaagatcctgatgaaggtgggccaggacgccagcagcgccggcagcaccagaaacaaggaccccaccagaagacccgagctggaggccggcaccaacggcagaagcagcaccaccagccccttcgtgaagcccaaccccggcagcagcaccgacggcaacagcgccggccacagcggcaacaacatcctgggcagcgaggtggccctgttcgccggcatcgccagcggctgcatcatcttcatcgtgatcatcatcaccctggtggtgctgctgctgaagtacagaagaagacacagaaagcacagcccccagcacaccaccaccctgagcctgagcaccctggccacccccaagagaagcggcaacaacaacggcagcgagcccagcgacatcatcatccccctgagaaccgccgacagcgtgttctgcccccactacgagaaggtgagcggcgactacggccaccccgtgtacatcgtgcaggagatgcccccccagagccccgccaacatctactacaaggtgtag

SEQ ID NO: 10506 - DNA, 3624 bp, synthetic construct
  misc_feature 1..3624: note = Description of Artificial Sequence: Synthetic coding sequence
  source 1..3624: mol_type = other DNA
atgctgctgaccctgatcatcctgctgcccgtggtgagcaagttcagcttcgtgagcctgagcgccccccagcactggagctgccccgagggcaccctggccggcaacggcaacagcacctgcgtgggccccgcccccttcctgatcttcagccacggcaacagcatcttcagaatcgacaccgagggcaccaactacgagcagctggtggtggacgccggcgtgagcgtgatcatggacttccactacaacgagaagagaatctactgggtggacctggagagacagctgctgcagagagtgttcctgaacggcagcagacaggagagagtgtgcaacatcgagaagaacgtgagcggcatggccatcaactggatcaacgaggaggtgatctggagcaaccagcaggagggcatcatcaccgtgaccgacatgaagggcaacaacagccacatcctgctgagcgccctgaagtaccccgccaacgtggccgtggaccccgtggagagattcatcttctggagcagcgaggtggccggcagcctgtacagagccgacctggacggcgtgggcgtgaaggccctgctggagaccagcgagaagatcaccgccgtgagcctggacgtgctggacaagagactgttctggatccagtacaacagagagggcagcaacagcctgatctgcagctgcgactacgacggcggcagcgtgcacatcagcaagcaccccacccagcacaacctgttcgccatgagcctgttcggcgacagaatcttctacagcacctggaagatgaagaccatctggatcgccaacaagcacaccggcaaggacatggtgagaatcaacctgcacagcagcttcgtgcccctgggcgagctgaaggtggtgcaccccctggcccagcccaaggccgaggacgacacctgggagcccgagcagaagctgtgcaagctgagaaagggcaactgcagcagcaccgtgtgcggccaggacctgcagagccacctgtgcatgtgcgccgagggctacgccctgagcagagacagaaagtactgcgaggacgtgaacgagtgcgccttctggaaccacggctgcaccctgggctgcaagaacacccccggcagctactactgcacctgccccgtgggcttcgtgctgctgcccgacggcaagagatgccaccagctggtgagctgccccagaaacgtgagcgagtgcagccacgactgcgtgctgaccagcgagggccccctgtgcttctgccccgagggcagcgtgctggagagagacggcaagacctgcagcggctgcagcagccccgacaacggcggctgcagccagctgtgcgtgcccctgagccccgtgagctgggagtgcgactgcttccccggctacgacctgcagctggacgagaagagctgcgccgccagcggcccccagcccttcctgctgttcgccaacagccaggacatcagacacatgcacttcgacggcaccgactacggcaccctgctgagccagcagatgggcatggtgtacgccctggaccacgaccccgtggagaacaagatctacttcgcccacaccgccctgaagtggatcgagagagccaacatggacggcagccagagagagagactgatcgaggagggcgtggacgtgcccgagggcctggccgtggactggatcggcagaagattctactggaccgacagaggcaagagcctgatcggcagaagcgacctgaacggcaagagaagcaagatcatcaccaaggagaacatcagccagcccagaggcatcgccgtgcaccccatggccaagagactgttctggaccgacaccggcatcaaccccagaatcgagagcagcagcctgcagggcctgggcagactggtgatcgccagcagcgacctgatctggcccagcggcatcaccatcgacttcctgaccgacaagctgtactggtgcgacgccaagcagagcgtgatcgagatggccaacctggacggcagcaagagaagaagactgacccagaacgacgtgggccaccccttcgccgtggccgtgttcgaggactacgtgtggttcagcgactgggccatgcccagcgtgatgagagtgaacaagagaaccggcaaggacagagtgagactgcagggcagcatgctgaagcccagcagcctggtggtggtgcaccccctggccaagcccggcgccgacccctgcctgtaccagaacggcggctgcgagcacatctgcaagaagagactgggcaccgcctggtgcagctgcagagagggcttcatgaaggccagcgacggcaagacctgcctggccctggacggccaccagctgctggccggcggcgaggtggacctgaagaaccaggtgacccccctggacatcctgagcaagaccagagtgagcgaggacaacatcaccgagagccagcacatgctggtggccgagatcatggtgagcgaccaggacgactgcgcccccgtgggctgcagcatgtacgccagatgcatcagcgagggcgaggacgccacctgccagtgcctgaagggcttcgccggcgacggcaagctgtgcagcgacatcgacgagtgcgagatgggcgtgcccgtgtgcccccccgccagcagcaagtgcatcaacaccgagggcggctacgtgtgcagatgcagcgagggctaccagggcgacggcatccactgcctggacatcgacgagtgccagctgggcgagcacagctgcggcgagaacgccagctgcaccaacaccgagggcggctacacctgcatgtgcgccggcagactgagcgagcccggcctgatctgccccgacagcaccccccccccccacctgagagaggacgaccaccactacagcgtgagaaacagcgacagcgagtgccccctgagccacgacggctactgcctgcacgacggcgtgtgcatgtacatcgaggccctggacaagtacgcctgcaactgcgtggtgggctacatcggcgagagatgccagtacagagacctgaagtggtgggagctgagacacgccggccacggccagcagcagaaggtgatcgtggtggccgtgtgcgtggtggtgctggtgatgctgctgctgctgagcctgtggggcgcccactactacagaacccagaagctgctgagcaagaaccccaagaacccctacgaggagagcagcagagacgtgagaagcagaagacccgccgacaccgaggacggcatgagcagctgcccccagccctggttcgtggtgatcaaggagcaccaggacctgaagaacggcggccagcccgtggccggcgaggacggccaggccgccgacggcagcatgcagcccaccagctggagacaggagccccagctgtgcggcatgggcaccgagcagggctgctggatccccgtgagcagcgacaagggcagctgcccccaggtgatggagagaagcttccacatgcccagctacggcacccagaccctggagggcggcgtggagaagccccacagcctgctgagcgccaaccccctgtggcagcagagagccctggaccccccccaccagatggagctgacccagtag

SEQ ID NO: 10507 - DNA, 3501 bp, synthetic construct
  misc_feature 1..3501: note = Description of Artificial Sequence: Synthetic coding sequence
  source 1..3501: mol_type = other DNA
atgctgctgaccctgatcatcctgctgcccgtggtgagcaagttcagcttcgtgagcctgagcgccccccagcactggagctgccccgagggcaccctggccggcaacggcaacagcacctgcgtgggccccgcccccttcctgatcttcagccacggcaacagcatcttcagaatcgacaccgagggcaccaactacgagcagctggtggtggacgccggcgtgagcgtgatcatggacttccactacaacgagaagagaatctactgggtggacctggagagacagctgctgcagagagtgttcctgaacggcagcagacaggagagagtgtgcaacatcgagaagaacgtgagcggcatggccatcaactggatcaacgaggaggtgatctggagcaaccagcaggagggcatcatcaccgtgaccgacatgaagggcaacaacagccacatcctgctgagcgccctgaagtaccccgccaacgtggccgtggaccccgtggagagattcatcttctggagcagcgaggtggccggcagcctgtacagagccgacctggacggcgtgggcgtgaaggccctgctggagaccagcgagaagatcaccgccgtgagcctggacgtgctggacaagagactgttctggatccagtacaacagagagggcagcaacagcctgatctgcagctgcgactacgacggcggcagcgtgcacatcagcaagcaccccacccagcacaacctgttcgccatgagcctgttcggcgacagaatcttctacagcacctggaagatgaagaccatctggatcgccaacaagcacaccggcaaggacatggtgagaatcaacctgcacagcagcttcgtgcccctgggcgagctgaaggtggtgcaccccctggcccagcccaaggccgaggacgacacctgggagcccgagcagaagctgtgcaagctgagaaagggcaactgcagcagcaccgtgtgcggccaggacctgcagagccacctgtgcatgtgcgccgagggctacgccctgagcagagacagaaagtactgcgaggacgtgaacgagtgcgccttctggaaccacggctgcaccctgggctgcaagaacacccccggcagctactactgcacctgccccgtgggcttcgtgctgctgcccgacggcaagagatgccaccagctggtgagctgccccagaaacgtgagcgagtgcagccacgactgcgtgctgaccagcgagggccccctgtgcttctgccccgagggcagcgtgctggagagagacggcaagacctgcagcggctgcagcagccccgacaacggcggctgcagccagctgtgcgtgcccctgagccccgtgagctgggagtgcgactgcttccccggctacgacctgcagctggacgagaagagctgcgccgccagcggcccccagcccttcctgctgttcgccaacagccaggacatcagacacatgcacttcgacggcaccgactacggcaccctgctgagccagcagatgggcatggtgtacgccctggaccacgaccccgtggagaacaagatctacttcgcccacaccgccctgaagtggatcgagagagccaacatggacggcagccagagagagagactgatcgaggagggcgtggacgtgcccgagggcctggccgtggactggatcggcagaagattctactggaccgacagaggcaagagcctgatcggcagaagcgacctgaacggcaagagaagcaagatcatcaccaaggagaacatcagccagcccagaggcatcgccgtgcaccccatggccaagagactgttctggaccgacaccggcatcaaccccagaatcgagagcagcagcctgcagggcctgggcagactggtgatcgccagcagcgacctgatctggcccagcggcatcaccatcgacttcctgaccgacaagctgtactggtgcgacgccaagcagagcgtgatcgagatggccaacctggacggcagcaagagaagaagactgacccagaacgacgtgggccaccccttcgccgtggccgtgttcgaggactacgtgtggttcagcgactgggccatgcccagcgtgatgagagtgaacaagagaaccggcaaggacagagtgagactgcagggcagcatgctgaagcccagcagcctggtggtggtgcaccccctggccaagcccggcgccgacccctgcctgtaccagaacggcggctgcgagcacatctgcaagaagagactgggcaccgcctggtgcagctgcagagagggcttcatgaaggccagcgacggcaagacctgcctggccctggacggccaccagctgctggccggcggcgaggtggacctgaagaaccaggtgacccccctggacatcctgagcaagaccagagtgagcgaggacaacatcaccgagagccagcacatgctggtggccgagatcatggtgagcgaccaggacgactgcgcccccgtgggctgcagcatgtacgccagatgcatcagcgagggcgaggacgccacctgccagtgcctgaagggcttcgccggcgacggcaagctgtgcagcgacatcgacgagtgcgagatgggcgtgcccgtgtgcccccccgccagcagcaagtgcatcaacaccgagggcggctacgtgtgcagatgcagcgagggctaccagggcgacggcatccactgcctggacagcaccccccccccccacctgagagaggacgaccaccactacagcgtgagaaacagcgacagcgagtgccccctgagccacgacggctactgcctgcacgacggcgtgtgcatgtacatcgaggccctggacaagtacgcctgcaactgcgtggtgggctacatcggcgagagatgccagtacagagacctgaagtggtgggagctgagacacgccggccacggccagcagcagaaggtgatcgtggtggccgtgtgcgtggtggtgctggtgatgctgctgctgctgagcctgtggggcgcccactactacagaacccagaagctgctgagcaagaaccccaagaacccctacgaggagagcagcagagacgtgagaagcagaagacccgccgacaccgaggacggcatgagcagctgcccccagccctggttcgtggtgatcaaggagcaccaggacctgaagaacggcggccagcccgtggccggcgaggacggccaggccgccgacggcagcatgcagcccaccagctggagacaggagccccagctgtgcggcatgggcaccgagcagggctgctggatccccgtgagcagcgacaagggcagctgcccccaggtgatggagagaagcttccacatgcccagctacggcacccagaccctggagggcggcgtggagaagccccacagcctgctgagcgccaaccccctgtggcagcagagagccctggaccccccccaccagatggagctgacccagtag

SEQ ID NO: 10508 - DNA, 3498 bp, synthetic construct
  misc_feature 1..3498: note = Description of Artificial Sequence: Synthetic coding sequence
  source 1..3498: mol_type = other DNA
atgctgctgaccctgatcatcctgctgcccgtggtgagcaagttcagcttcgtgagcctgagcgccccccagcactggagctgccccgagggcaccctggccggcaacggcaacagcacctgcgtgggccccgcccccttcctgatcttcagccacggcaacagcatcttcagaatcgacaccgagggcaccaactacgagcagctggtggtggacgccggcgtgagcgtgatcatggacttccactacaacgagaagagaatctactgggtggacctggagagacagctgctgcagagagtgttcctgaacggcagcagacaggagagagtgtgcaacatcgagaagaacgtgagcggcatggccatcaactggatcaacgaggaggtgatctggagcaaccagcaggagggcatcatcaccgtgaccgacatgaagggcaacaacagccacatcctgctgagcgccctgaagtaccccgccaacgtggccgtggaccccgtggagagattcatcttctggagcagcgaggtggccggcagcctgtacagagccgacctggacggcgtgggcgtgaaggccctgctggagaccagcgagaagatcaccgccgtgagcctggacgtgctggacaagagactgttctggatccagtacaacagagagggcagcaacagcctgatctgcagctgcgactacgacggcggcagcgtgcacatcagcaagcaccccacccagcacaacctgttcgccatgagcctgttcggcgacagaatcttctacagcacctggaagatgaagaccatctggatcgccaacaagcacaccggcaaggacatggtgagaatcaacctgcacagcagcttcgtgcccctgggcgagctgaaggtggtgcaccccctggcccagcccaaggccgaggacgacacctgggagcccgacgtgaacgagtgcgccttctggaaccacggctgcaccctgggctgcaagaacacccccggcagctactactgcacctgccccgtgggcttcgtgctgctgcccgacggcaagagatgccaccagctggtgagctgccccagaaacgtgagcgagtgcagccacgactgcgtgctgaccagcgagggccccctgtgcttctgccccgagggcagcgtgctggagagagacggcaagacctgcagcggctgcagcagccccgacaacggcggctgcagccagctgtgcgtgcccctgagccccgtgagctgggagtgcgactgcttccccggctacgacctgcagctggacgagaagagctgcgccgccagcggcccccagcccttcctgctgttcgccaacagccaggacatcagacacatgcacttcgacggcaccgactacggcaccctgctgagccagcagatgggcatggtgtacgccctggaccacgaccccgtggagaacaagatctacttcgcccacaccgccctgaagtggatcgagagagccaacatggacggcagccagagagagagactgatcgaggagggcgtggacgtgcccgagggcctggccgtggactggatcggcagaagattctactggaccgacagaggcaagagcctgatcggcagaagcgacctgaacggcaagagaagcaagatcatcaccaaggagaacatcagccagcccagaggcatcgccgtgcaccccatggccaagagactgttctggaccgacaccggcatcaaccccagaatcgagagcagcagcctgcagggcctgggcagactggtgatcgccagcagcgacctgatctggcccagcggcatcaccatcgacttcctgaccgacaagctgtactggtgcgacgccaagcagagcgtgatcgagatggccaacctggacggcagcaagagaagaagactgacccagaacgacgtgggccaccccttcgccgtggccgtgttcgaggactacgtgtggttcagcgactgggccatgcccagcgtgatgagagtgaacaagagaaccggcaaggacagagtgagactgcagggcagcatgctgaagcccagcagcctggtggtggtgcaccccctggccaagcccggcgccgacccctgcctgtaccagaacggcggctgcgagcacatctgcaagaagagactgggcaccgcctggtgcagctgcagagagggcttcatgaaggccagcgacggcaagacctgcctggccctggacggccaccagctgctggccggcggcgaggtggacctgaagaaccaggtgacccccctggacatcctgagcaagaccagagtgagcgaggacaacatcaccgagagccagcacatgctggtggccgagatcatggtgagcgaccaggacgactgcgcccccgtgggctgcagcatgtacgccagatgcatcagcgagggcgaggacgccacctgccagtgcctgaagggcttcgccggcgacggcaagctgtgcagcgacatcgacgagtgcgagatgggcgtgcccgtgtgcccccccgccagcagcaagtgcatcaacaccgagggcggctacgtgtgcagatgcagcgagggctaccagggcgacggcatccactgcctggacatcgacgagtgccagctgggcgagcacagctgcggcgagaacgccagctgcaccaacaccgagggcggctacacctgcatgtgcgccggcagactgagcgagcccggcctgatctgccccgacagcaccccccccccccacctgagagaggacgaccaccactacagcgtgagaaacagcgacagcgagtgccccctgagccacgacggctactgcctgcacgacggcgtgtgcatgtacatcgaggccctggacaagtacgcctgcaactgcgtggtgggctacatcggcgagagatgccagtacagagacctgaagtggtgggagctgagacacgccggccacggccagcagcagaaggtgatcgtggtggccgtgtgcgtggtggtgctggtgatgctgctgctgctgagcctgtggggcgcccactactacagaacccagaagctgctgagcaagaaccccaagaacccctacgaggagagcagcagagacgtgagaagcagaagacccgccgacaccgaggacggcatgagcagctgcccccagccctggttcgtggtgatcaaggagcaccaggacctgaagaacggcggccagcccgtggccggcgaggacggccaggccgccgacggcagcatgcagcccaccagctggagacaggagccccagctgtgcggcatgggcaccgagcagggctgctggatccccgtgagcagcgacaagggcagctgcccccaggtgatggagagaagcttccacatgcccagctacggcacccagaccctggagggcggcgtggagaagccccacagcctgctgagcgccaaccccctgtggcagcagagagccctggaccccccccaccagatggagctgacccagtag

SEQ ID NO: 10509 - DNA, 3633 bp, synthetic construct
  misc_feature 1..3633: note = Description of Artificial Sequence: Synthetic coding sequence
  source 1..3633: mol_type = other DNA
atgagacccagcggcaccgccggcgccgccctgctggccctgctggccgccctgtgccccgccagcagagccctggaggagaagaaggtgtgccagggcaccagcaacaagctgacccagctgggcaccttcgaggaccacttcctgagcctgcagagaatgttcaacaactgcgaggtggtgctgggcaacctggagatcacctacgtgcagagaaactacgacctgagcttcctgaagaccatccaggaggtggccggctacgtgctgatcgccctgaacaccgtggagagaatccccctggagaacctgcagatcatcagaggcaacatgtactacgagaacagctacgccctggccgtgctgagcaactacgacgccaacaagaccggcctgaaggagctgcccatgagaaacctgcaggagatcctgcacggcgccgtgagattcagcaacaaccccgccctgtgcaacgtggagagcatccagtggagagacatcgtgagcagcgacttcctgagcaacatgagcatggacttccagaaccacctgggcagctgccagaagtgcgaccccagctgccccaacggcagctgctggggcgccggcgaggagaactgccagaagctgaccaagatcatctgcgcccagcagtgcagcggcagatgcagaggcaagagccccagcgactgctgccacaaccagtgcgccgccggctgcaccggccccagagagagcgactgcctggtgtgcagaaagttcagagacgaggccacctgcaaggacacctgcccccccctgatgctgtacaaccccaccacctaccagatggacgtgaaccccgagggcaagtacagcttcggcgccacctgcgtgaagaagtgccccagaaactacgtggtgaccgaccacggcagctgcgtgagagcctgcggcgccgacagctacgagatggaggaggacggcgtgagaaagtgcaagaagtgcgagggcccctgcagaaaggtgtgcaacggcatcggcatcggcgagttcaaggacagcctgagcatcaacgccaccaacatcaagcacttcaagaactgcaccagcatcagcggcgacctgcacatcctgcccgtggccttcagaggcgacagcttcacccacaccccccccctggacccccaggagctggacatcctgaagaccgtgaaggagatcaccggcttcctgctgatccaggcctggcccgagaacagaaccgacctgcacgccttcgagaacctggagatcatcagaggcagaaccaagcagcacggccagttcagcctggccgtggtgagcctgaacatcaccagcctgggcctgagaagcctgaaggagatcagcgacggcgacgtgatcatcagcggcaacaagaacctgtgctacgccaacaccatcaactggaagaagctgttcggcaccagcggccagaagaccaagatcatcagcaacagaggcgagaacagctgcaaggccaccggccaggtgtgccacgccctgtgcagccccgagggctgctggggccccgagcccagagactgcgtgagctgcagaaacgtgagcagaggcagagagtgcgtggacaagtgcaacctgctggagggcgagcccagagagttcgtggagaacagcgagtgcatccagtgccaccccgagtgcctgccccaggccatgaacatcacctgcaccggcagaggccccgacaactgcatccagtgcgcccactacatcgacggcccccactgcgtgaagacctgccccgccggcgtgatgggcgagaacaacaccctggtgtggaagtacgccgacgccggccacgtgtgccacctgtgccaccccaactgcacctacggctgcaccggccccggcctggagggctgccccaccaacggccccaagatccccagcatcgccaccggcatggtgggcgccctgctgctgctgctggtggtggccctgggcatcggcctgttcatgagaagaagacacatcgtgagaaagagaaccctgagaagactgctgcaggagagagagctggtggagcccctgacccccagcggcgaggcccccaaccaggccctgctgagaatcctgaaggagaccgagttcaagaagatcaaggtgctgggcagcggcgccttcggcaccgtgtacaagggcctgtggatccccgagggcgagaaggtgaagatccccgtggccatcaaggagctgagagaggccaccagccccaaggccaacaaggagatcctggacgaggcctacgtgatggccagcgtggacaacccccacgtgtgcagactgctgggcatctgcctgaccagcaccgtgcagctgatcacccagctgatgcccttcggctgcctgctggactacgtgagagagcacaaggacaacatcggcagccagtacctgctgaactggtgcgtgcagatcgccaagggcatgaactacctggaggacagaagactggtgcacagagacctggccgccagaaacgtgctggtgaagaccccccagcacgtgaagatcaccgacttcggcctggccaagctgctgggcgccgaggagaaggagtaccacgccgagggcggcaaggtgcccatcaagtggatggccctggagagcatcctgcacagaatctacacccaccagagcgacgtgtggagctacggcgtgaccgtgtgggagctgatgaccttcggcagcaagccctacgacggcatccccgccagcgagatcagcagcatcctggagaagggcgagagactgccccagccccccatctgcaccatcgacgtgtacatgatcatggtgaagtgctggatgatcgacgccgacagcagacccaagttcagagagctgatcatcgagttcagcaagatggccagagacccccagagatacctggtgatccagggcgacgagagaatgcacctgcccagccccaccgacagcaacttctacagagccctgatggacgaggaggacatggacgacgtggtggacgccgacgagtacctgatcccccagcagggcttcttcagcagccccagcaccagcagaacccccctgctgagcagcctgagcgccaccagcaacaacagcaccgtggcctgcatcgacagaaacggcctgcagagctgccccatcaaggaggacagcttcctgcagagatacagcagcgaccccaccggcgccctgaccgaggacagcatcgacgacaccttcctgcccgtgcccgagtacatcaaccagagcgtgcccaagagacccgccggcagcgtgcagaaccccgtgtaccacaaccagcccctgaaccccgcccccagcagagacccccactaccaggacccccacagcaccgccgtgggcaaccccgagtacctgaacaccgtgcagcccacctgcgtgaacagcaccttcgacagccccgcccactgggcccagaagggcagccaccagatcagcctggacaaccccgactaccagcaggacttcttccccaaggaggccaagcccaacggcatcttcaagggcagcaccgccgagaacgccgagtacctgagagtggccccccagagcagcgagttcatcggcgcctag

SEQ ID NO: 10510 - DNA, 1887 bp, synthetic construct
  misc_feature 1..1887: note = Description of Artificial Sequence: Synthetic coding sequence
  source 1..1887: mol_type = other DNA
atgagacccagcggcaccgccggcgccgccctgctggccctgctggccgccctgtgccccgccagcagagccctggaggagaagaaggtgtgccagggcaccagcaacaagctgacccagctgggcaccttcgaggaccacttcctgagcctgcagagaatgttcaacaactgcgaggtggtgctgggcaacctggagatcacctacgtgcagagaaactacgacctgagcttcctgaagaccatccaggaggtggccggctacgtgctgatcgccctgaacaccgtggagagaatccccctggagaacctgcagatcatcagaggcaacatgtactacgagaacagctacgccctggccgtgctgagcaactacgacgccaacaagaccggcctgaaggagctgcccatgagaaacctgcaggagatcctgcacggcgccgtgagattcagcaacaaccccgccctgtgcaacgtggagagcatccagtggagagacatcgtgagcagcgacttcctgagcaacatgagcatggacttccagaaccacctgggcagctgccagaagtgcgaccccagctgccccaacggcagctgctggggcgccggcgaggagaactgccagaagctgaccaagatcatctgcgcccagcagtgcagcggcagatgcagaggcaagagccccagcgactgctgccacaaccagtgcgccgccggctgcaccggccccagagagagcgactgcctggtgtgcagaaagttcagagacgaggccacctgcaaggacacctgcccccccctgatgctgtacaaccccaccacctaccagatggacgtgaaccccgagggcaagtacagcttcggcgccacctgcgtgaagaagtgccccagaaactacgtggtgaccgaccacggcagctgcgtgagagcctgcggcgccgacagctacgagatggaggaggacggcgtgagaaagtgcaagaagtgcgagggcccctgcagaaaggtgtgcaacggcatcggcatcggcgagttcaaggacagcctgagcatcaacgccaccaacatcaagcacttcaagaactgcaccagcatcagcggcgacctgcacatcctgcccgtggccttcagaggcgacagcttcacccacaccccccccctggacccccaggagctggacatcctgaagaccgtgaaggagatcaccggcttcctgctgatccaggcctggcccgagaacagaaccgacctgcacgccttcgagaacctggagatcatcagaggcagaaccaagcagcacggccagttcagcctggccgtggtgagcctgaacatcaccagcctgggcctgagaagcctgaaggagatcagcgacggcgacgtgatcatcagcggcaacaagaacctgtgctacgccaacaccatcaactggaagaagctgttcggcaccagcggccagaagaccaagatcatcagcaacagaggcgagaacagctgcaaggccaccggccaggtgtgccacgccctgtgcagccccgagggctgctggggccccgagcccagagactgcgtgagctgcagaaacgtgagcagaggcagagagtgcgtggacaagtgcaacctgctggagggcgagcccagagagttcgtggagaacagcgagtgcatccagtgccaccccgagtgcctgccccaggccatgaacatcacctgcaccggcagaggccccgacaactgcatccagtgcgcccactacatcgacggcccccactgcgtgaagacctgccccgccggcgtgatgggcgagaacaacaccctggtgtggaagtacgccgacgccggccacgtgtgccacctgtgccaccccaactgcacctacggcagctag

SEQ ID NO: 10511 - DNA, 2118 bp, synthetic construct
  misc_feature 1..2118: note = Description of Artificial Sequence: Synthetic coding sequence
  source 1..2118: mol_type = other DNA
atgagacccagcggcaccgccggcgccgccctgctggccctgctggccgccctgtgccccgccagcagagccctggaggagaagaaggtgtgccagggcaccagcaacaagctgacccagctgggcaccttcgaggaccacttcctgagcctgcagagaatgttcaacaactgcgaggtggtgctgggcaacctggagatcacctacgtgcagagaaactacgacctgagcttcctgaagaccatccaggaggtggccggctacgtgctgatcgccctgaacaccgtggagagaatccccctggagaacctgcagatcatcagaggcaacatgtactacgagaacagctacgccctggccgtgctgagcaactacgacgccaacaagaccggcctgaaggagctgcccatgagaaacctgcaggagatcctgcacggcgccgtgagattcagcaacaaccccgccctgtgcaacgtggagagcatccagtggagagacatcgtgagcagcgacttcctgagcaacatgagcatggacttccagaaccacctgggcagctgccagaagtgcgaccccagctgccccaacggcagctgctggggcgccggcgaggagaactgccagaagctgaccaagatcatctgcgcccagcagtgcagcggcagatgcagaggcaagagccccagcgactgctgccacaaccagtgcgccgccggctgcaccggccccagagagagcgactgcctggtgtgcagaaagttcagagacgaggccacctgcaaggacacctgcccccccctgatgctgtacaaccccaccacctaccagatggacgtgaaccccgagggcaagtacagcttcggcgccacctgcgtgaagaagtgccccagaaactacgtggtgaccgaccacggcagctgcgtgagagcctgcggcgccgacagctacgagatggaggaggacggcgtgagaaagtgcaagaagtgcgagggcccctgcagaaaggtgtgcaacggcatcggcatcggcgagttcaaggacagcctgagcatcaacgccaccaacatcaagcacttcaagaactgcaccagcatcagcggcgacctgcacatcctgcccgtggccttcagaggcgacagcttcacccacaccccccccctggacccccaggagctggacatcctgaagaccgtgaaggagatcaccggcttcctgctgatccaggcctggcccgagaacagaaccgacctgcacgccttcgagaacctggagatcatcagaggcagaaccaagcagcacggccagttcagcctggccgtggtgagcctgaacatcaccagcctgggcctgagaagcctgaaggagatcagcgacggcgacgtgatcatcagcggcaacaagaacctgtgctacgccaacaccatcaactggaagaagctgttcggcaccagcggccagaagaccaagatcatcagcaacagaggcgagaacagctgcaaggccaccggccaggtgtgccacgccctgtgcagccccgagggctgctggggccccgagcccagagactgcgtgagctgcagaaacgtgagcagaggcagagagtgcgtggacaagtgcaacctgctggagggcgagcccagagagttcgtggagaacagcgagtgcatccagtgccaccccgagtgcctgccccaggccatgaacatcacctgcaccggcagaggccccgacaactgcatccagtgcgcccactacatcgacggcccccactgcgtgaagacctgccccgccggcgtgatgggcgagaacaacaccctggtgtggaagtacgccgacgccggccacgtgtgccacctgtgccaccccaactgcacctacggccccggcaacgagagcctgaaggccatgctgttctgcctgttcaagctgagcagctgcaaccagagcaacgacggcagcgtgagccaccagagcggcagccccgccgcccaggagagctgcctgggctggatccccagcctgctgcccagcgagttccagctgggctggggcggctgcagccacctgcacgcctggcccagcgccagcgtgatcatcaccgccagcagctgccactag

SEQ ID NO: 10512 - DNA, 3243 bp, synthetic construct
  misc_feature 1..3243: note = Description of Artificial Sequence: Synthetic coding sequence
  source 1..3243: mol_type = other DNA
aacagaaccgagggcgccgcccacgagaagttcaccggcaaccccgcctggagaagagccgtgcagcagcagccctgccccgtggtggagagcatccagtggagagacatcgtgagcagcgacttcctgagcaacatgagcatggacttccagaaccacctgggcagctgccagaagtgcgaccccagctgccccaacggcagctgctggggcgccggcgaggagaactgccagaagctgaccaagatcatctgcgcccagcagtgcagcggcagatgcagaggcaagagccccagcgactgctgccacaaccagtgcgccgccggctgcaccggccccagagagagcgactgcctggtgtgcagaaagttcagagacgaggccacctgcaaggacacctgcccccccctgatgctgtacaaccccaccacctaccagatggacgtgaaccccgagggcaagtacagcttcggcgccacctgcgtgaagaagtgccccagaaactacgtggtgaccgaccacggcagctgcgtgagagcctgcggcgccgacagctacgagatggaggaggacggcgtgagaaagtgcaagaagtgcgagggcccctgcagaaaggtgtgcaacggcatcggcatcggcgagttcaaggacagcctgagcatcaacgccaccaacatcaagcacttcaagaactgcaccagcatcagcggcgacctgcacatcctgcccgtggccttcagaggcgacagcttcacccacaccccccccctggacccccaggagctggacatcctgaagaccgtgaaggagatcaccggcttcctgctgatccaggcctggcccgagaacagaaccgacctgcacgccttcgagaacctggagatcatcagaggcagaaccaagcagcacggccagttcagcctggccgtggtgagcctgaacatcaccagcctgggcctgagaagcctgaaggagatcagcgacggcgacgtgatcatcagcggcaacaagaacctgtgctacgccaacaccatcaactggaagaagctgttcggcaccagcggccagaagaccaagatcatcagcaacagaggcgagaacagctgcaaggccaccggccaggtgtgccacgccctgtgcagccccgagggctgctggggccccgagcccagagactgcgtgagctgcagaaacgtgagcagaggcagagagtgcgtggacaagtgcaacctgctggagggcgagcccagagagttcgtggagaacagcgagtgcatccagtgccaccccgagtgcctgccccaggccatgaacatcacctgcaccggcagaggccccgacaactgcatccagtgcgcccactacatcgacggcccccactgcgtgaagacctgccccgccggcgtgatgggcgagaacaacaccctggtgtggaagtacgccgacgccggccacgtgtgccacctgtgccaccccaactgcacctacggctgcaccggccccggcctggagggctgccccaccaacggccccaagatccccagcatcgccaccggcatggtgggcgccctgctgctgctgctggtggtggccctgggcatcggcctgttcatgagaagaagacacatcgtgagaaagagaaccctgagaagactgctgcaggagagagagctggtggagcccctgacccccagcggcgaggcccccaaccaggccctgctgagaatcctgaaggagaccgagttcaagaagatcaaggtgctgggcagcggcgccttcggcaccgtgtacaagggcctgtggatccccgagggcgagaaggtgaagatccccgtggccatcaaggagctgagagaggccaccagccccaaggccaacaaggagatcctggacgaggcctacgtgatggccagcgtggacaacccccacgtgtgcagactgctgggcatctgcctgaccagcaccgtgcagctgatcacccagctgatgcccttcggctgcctgctggactacgtgagagagcacaaggacaacatcggcagccagtacctgctgaactggtgcgtgcagatcgccaagggcatgaactacctggaggacagaagactggtgcacagagacctggccgccagaaacgtgctggtgaagaccccccagcacgtgaagatcaccgacttcggcctggccaagctgctgggcgccgaggagaaggagtaccacgccgagggcggcaaggtgcccatcaagtggatggccctggagagcatcctgcacagaatctacacccaccagagcgacgtgtggagctacggcgtgaccgtgtgggagctgatgaccttcggcagcaagccctacgacggcatccccgccagcgagatcagcagcatcctggagaagggcgagagactgccccagccccccatctgcaccatcgacgtgtacatgatcatggtgaagtgctggatgatcgacgccgacagcagacccaagttcagagagctgatcatcgagttcagcaagatggccagagacccccagagatacctggtgatccagggcgacgagagaatgcacctgcccagccccaccgacagcaacttctacagagccctgatggacgaggaggacatggacgacgtggtggacgccgacgagtacctgatcccccagcagggcttcttcagcagccccagcaccagcagaacccccctgctgagcagcctgagcgccaccagcaacaacagcaccgtggcctgcatcgacagaaacggcctgcagagctgccccatcaaggaggacagcttcctgcagagatacagcagcgaccccaccggcgccctgaccgaggacagcatcgacgacaccttcctgcccgtgcccgagtacatcaaccagagcgtgcccaagagacccgccggcagcgtgcagaaccccgtgtaccacaaccagcccctgaaccccgcccccagcagagacccccactaccaggacccccacagcaccgccgtgggcaaccccgagtacctgaacaccgtgcagcccacctgcgtgaacagcaccttcgacagccccgcccactgggcccagaagggcagccaccagatcagcctggacaaccccgactaccagcaggacttcttccccaaggaggccaagcccaacggcatcttcaagggcagcaccgccgagaacgccgagtacctgagagtggccccccagagcagcgagttcatcggcgcctag

SEQ ID NO: 10513 - DNA, 1218 bp, synthetic construct
  misc_feature 1..1218: note = Description of Artificial Sequence: Synthetic coding sequence
  source 1..1218: mol_type = other DNA
atgagacccagcggcaccgccggcgccgccctgctggccctgctggccgccctgtgccccgccagcagagccctggaggagaagaaggtgtgccagggcaccagcaacaagctgacccagctgggcaccttcgaggaccacttcctgagcctgcagagaatgttcaacaactgcgaggtggtgctgggcaacctggagatcacctacgtgcagagaaactacgacctgagcttcctgaagaccatccaggaggtggccggctacgtgctgatcgccctgaacaccgtggagagaatccccctggagaacctgcagatcatcagaggcaacatgtactacgagaacagctacgccctggccgtgctgagcaactacgacgccaacaagaccggcctgaaggagctgcccatgagaaacctgcaggagatcctgcacggcgccgtgagattcagcaacaaccccgccctgtgcaacgtggagagcatccagtggagagacatcgtgagcagcgacttcctgagcaacatgagcatggacttccagaaccacctgggcagctgccagaagtgcgaccccagctgccccaacggcagctgctggggcgccggcgaggagaactgccagaagctgaccaagatcatctgcgcccagcagtgcagcggcagatgcagaggcaagagccccagcgactgctgccacaaccagtgcgccgccggctgcaccggccccagagagagcgactgcctggtgtgcagaaagttcagagacgaggccacctgcaaggacacctgcccccccctgatgctgtacaaccccaccacctaccagatggacgtgaaccccgagggcaagtacagcttcggcgccacctgcgtgaagaagtgccccagaaactacgtggtgaccgaccacggcagctgcgtgagagcctgcggcgccgacagctacgagatggaggaggacggcgtgagaaagtgcaagaagtgcgagggcccctgcagaaaggtgtgcaacggcatcggcatcggcgagttcaaggacagcctgagcatcaacgccaccaacatcaagcacttcaagaactgcaccagcatcagcggcgacctgcacatcctgcccgtggccttcagaggcgacagcttcacccacaccccccccctggacccccaggagctggacatcctgaagaccgtgaaggagatcaccggcctgagctag

SEQ ID NO: 10514 - DNA, 1974 bp, synthetic construct
  misc_feature 1..1974: note = Description of Artificial Sequence: Synthetic coding sequence
  source 1..1974: mol_type = other DNA
atgagacccagcggcaccgccggcgccgccctgctggccctgctggccgccctgtgccccgccagcagagccctggaggagaagaaggtgtgccagggcaccagcaacaagctgacccagctgggcaccttcgaggaccacttcctgagcctgcagagaatgttcaacaactgcgaggtggtgctgggcaacctggagatcacctacgtgcagagaaactacgacctgagcttcctgaagaccatccaggaggtggccggctacgtgctgatcgccctgaacaccgtggagagaatccccctggagaacctgcagatcatcagaggcaacatgtactacgagaacagctacgccctggccgtgctgagcaactacgacgccaacaagaccggcctgaaggagctgcccatgagaaacctgcaggagatcctgcacggcgccgtgagattcagcaacaaccccgccctgtgcaacgtggagagcatccagtggagagacatcgtgagcagcgacttcctgagcaacatgagcatggacttccagaaccacctgggcagctgccagaagtgcgaccccagctgccccaacggcagctgctggggcgccggcgaggagaactgccagaagctgaccaagatcatctgcgcccagcagtgcagcggcagatgcagaggcaagagccccagcgactgctgccacaaccagtgcgccgccggctgcaccggccccagagagagcgactgcctggtgtgcagaaagttcagagacgaggccacctgcaaggacacctgcccccccctgatgctgtacaaccccaccacctaccagatggacgtgaaccccgagggcaagtacagcttcggcgccacctgcgtgaagaagtgccccagaaactacgtggtgaccgaccacggcagctgcgtgagagcctgcggcgccgacagctacgagatggaggaggacggcgtgagaaagtgcaagaagtgcgagggcccctgcagaaaggtgtgcaacggcatcggcatcggcgagttcaaggacagcctgagcatcaacgccaccaacatcaagcacttcaagaactgcaccagcatcagcggcgacctgcacatcctgcccgtggccttcagaggcgacagcttcacccacaccccccccctggacccccaggagctggacatcctgaagaccgtgaaggagatcaccggcttcctgctgatccaggcctggcccgagaacagaaccgacctgcacgccttcgagaacctggagatcatcagaggcagaaccaagcagcacggccagttcagcctggccgtggtgagcctgaacatcaccagcctgggcctgagaagcctgaaggagatcagcgacggcgacgtgatcatcagcggcaacaagaacctgtgctacgccaacaccatcaactggaagaagctgttcggcaccagcggccagaagaccaagatcatcagcaacagaggcgagaacagctgcaaggccaccggccaggtgtgccacgccctgtgcagccccgagggctgctggggccccgagcccagagactgcgtgagctgcagaaacgtgagcagaggcagagagtgcgtggacaagtgcaacctgctggagggcgagcccagagagttcgtggagaacagcgagtgcatccagtgccaccccgagtgcctgccccaggccatgaacatcacctgcaccggcagaggccccgacaactgcatccagtgcgcccactacatcgacggcccccactgcgtgaagacctgccccgccggcgtgatgggcgagaacaacaccctggtgtggaagtacgccgacgccggccacgtgtgccacctgtgccaccccaactgcacctacggctgcaccggccccggcctggagggctgccccaccaacggcagctacatcgtgagccacttccccagaagcttctacaagatgagcgtgcactag

SEQ ID NO: 10515 - DNA, 3474 bp, synthetic construct
  misc_feature 1..3474: note = Description of Artificial Sequence: Synthetic coding sequence
  source 1..3474: mol_type = other DNA
atgttcaacaactgcgaggtggtgctgggcaacctggagatcacctacgtgcagagaaactacgacctgagcttcctgaagaccatccaggaggtggccggctacgtgctgatcgccctgaacaccgtggagagaatccccctggagaacctgcagatcatcagaggcaacatgtactacgagaacagctacgccctggccgtgctgagcaactacgacgccaacaagaccggcctgaaggagctgcccatgagaaacctgcaggagatcctgcacggcgccgtgagattcagcaacaaccccgccctgtgcaacgtggagagcatccagtggagagacatcgtgagcagcgacttcctgagcaacatgagcatggacttccagaaccacctgggcagctgccagaagtgcgaccccagctgccccaacggcagctgctggggcgccggcgaggagaactgccagaagctgaccaagatcatctgcgcccagcagtgcagcggcagatgcagaggcaagagccccagcgactgctgccacaaccagtgcgccgccggctgcaccggccccagagagagcgactgcctggtgtgcagaaagttcagagacgaggccacctgcaaggacacctgcccccccctgatgctgtacaaccccaccacctaccagatggacgtgaaccccgagggcaagtacagcttcggcgccacctgcgtgaagaagtgccccagaaactacgtggtgaccgaccacggcagctgcgtgagagcctgcggcgccgacagctacgagatggaggaggacggcgtgagaaagtgcaagaagtgcgagggcccctgcagaaaggtgtgcaacggcatcggcatcggcgagttcaaggacagcctgagcatcaacgccaccaacatcaagcacttcaagaactgcaccagcatcagcggcgacctgcacatcctgcccgtggccttcagaggcgacagcttcacccacaccccccccctggacccccaggagctggacatcctgaagaccgtgaaggagatcaccggcttcctgctgatccaggcctggcccgagaacagaaccgacctgcacgccttcgagaacctggagatcatcagaggcagaaccaagcagcacggccagttcagcctggccgtggtgagcctgaacatcaccagcctgggcctgagaagcctgaaggagatcagcgacggcgacgtgatcatcagcggcaacaagaacctgtgctacgccaacaccatcaactggaagaagctgttcggcaccagcggccagaagaccaagatcatcagcaacagaggcgagaacagctgcaaggccaccggccaggtgtgccacgccctgtgcagccccgagggctgctggggccccgagcccagagactgcgtgagctgcagaaacgtgagcagaggcagagagtgcgtggacaagtgcaacctgctggagggcgagcccagagagttcgtggagaacagcgagtgcatccagtgccaccccgagtgcctgccccaggccatgaacatcacctgcaccggcagaggccccgacaactgcatccagtgcgcccactacatcgacggcccccactgcgtgaagacctgccccgccggcgtgatgggcgagaacaacaccctggtgtggaagtacgccgacgccggccacgtgtgccacctgtgccaccccaactgcacctacggctgcaccggccccggcctggagggctgccccaccaacggccccaagatccccagcatcgccaccggcatggtgggcgccctgctgctgctgctggtggtggccctgggcatcggcctgttcatgagaagaagacacatcgtgagaaagagaaccctgagaagactgctgcaggagagagagctggtggagcccctgacccccagcggcgaggcccccaaccaggccctgctgagaatcctgaaggagaccgagttcaagaagatcaaggtgctgggcagcggcgccttcggcaccgtgtacaagggcctgtggatccccgagggcgagaaggtgaagatccccgtggccatcaaggagctgagagaggccaccagccccaaggccaacaaggagatcctggacgaggcctacgtgatggccagcgtggacaacccccacgtgtgcagactgctgggcatctgcctgaccagcaccgtgcagctgatcacccagctgatgcccttcggctgcctgctggactacgtgagagagcacaaggacaacatcggcagccagtacctgctgaactggtgcgtgcagatcgccaagggcatgaactacctggaggacagaagactggtgcacagagacctggccgccagaaacgtgctggtgaagaccccccagcacgtgaagatcaccgacttcggcctggccaagctgctgggcgccgaggagaaggagtaccacgccgagggcggcaaggtgcccatcaagtggatggccctggagagcatcctgcacagaatctacacccaccagagcgacgtgtggagctacggcgtgaccgtgtgggagctgatgaccttcggcagcaagccctacgacggcatccccgccagcgagatcagcagcatcctggagaagggcgagagactgccccagccccccatctgcaccatcgacgtgtacatgatcatggtgaagtgctggatgatcgacgccgacagcagacccaagttcagagagctgatcatcgagttcagcaagatggccagagacccccagagatacctggtgatccagggcgacgagagaatgcacctgcccagccccaccgacagcaacttctacagagccctgatggacgaggaggacatggacgacgtggtggacgccgacgagtacctgatcccccagcagggcttcttcagcagccccagcaccagcagaacccccctgctgagcagcctgagcgccaccagcaacaacagcaccgtggcctgcatcgacagaaacggcctgcagagctgccccatcaaggaggacagcttcctgcagagatacagcagcgaccccaccggcgccctgaccgaggacagcatcgacgacaccttcctgcccgtgcccgagtacatcaaccagagcgtgcccaagagacccgccggcagcgtgcagaaccccgtgtaccacaaccagcccctgaaccccgcccccagcagagacccccactaccaggacccccacagcaccgccgtgggcaaccccgagtacctgaacaccgtgcagcccacctgcgtgaacagcaccttcgacagccccgcccactgggcccagaagggcagccaccagatcagcctggacaaccccgactaccagcaggacttcttccccaaggaggccaagcccaacggcatcttcaagggcagcaccgccgagaacgccgagtacctgagagtggccccccagagcagcgagttcatcggcgcctag

SEQ ID NO: 10516 - DNA, 3276 bp, synthetic construct
  misc_feature 1..3276: note = Description of Artificial Sequence: Synthetic coding sequence
  source 1..3276: mol_type = other DNA
atgagacccagcggcaccgccggcgccgccctgctggccctgctggccgccctgtgccccgccagcagagccctggaggagaagaaggtgtgccagggcaccagcaacaagctgacccagctgggcaccttcgaggaccacttcctgagcctgcagagaatgttcaacaactgcgaggtggtgctgggcaacctggagatcacctacgtgcagagaaactacgacctgagcttcctgaagaccatccaggaggtggccggctacgtgctgatcgccctgaacaccgtggagagaatccccctggagaacctgcagatcatcagaggcaacatgtactacgagaacagctacgccctggccgtgctgagcaactacgacgccaacaagaccggcctgaaggagctgcccatgagaaacctgcagggccagaagtgcgaccccagctgccccaacggcagctgctggggcgccggcgaggagaactgccagaagctgaccaagatcatctgcgcccagcagtgcagcggcagatgcagaggcaagagccccagcgactgctgccacaaccagtgcgccgccggctgcaccggccccagagagagcgactgcctggtgtgcagaaagttcagagacgaggccacctgcaaggacacctgcccccccctgatgctgtacaaccccaccacctaccagatggacgtgaaccccgagggcaagtacagcttcggcgccacctgcgtgaagaagtgccccagaaactacgtggtgaccgaccacggcagctgcgtgagagcctgcggcgccgacagctacgagatggaggaggacggcgtgagaaagtgcaagaagtgcgagggcccctgcagaaaggtgtgcaacggcatcggcatcggcgagttcaaggacagcctgagcatcaacgccaccaacatcaagcacttcaagaactgcaccagcatcagcggcgacctgcacatcctgcccgtggccttcagaggcgacagcttcacccacaccccccccctggacccccaggagctggacatcctgaagaccgtgaaggagatcaccggcttcctgctgatccaggcctggcccgagaacagaaccgacctgcacgccttcgagaacctggagatcatcagaggcagaaccaagcagcacggccagttcagcctggccgtggtgagcctgaacatcaccagcctgggcctgagaagcctgaaggagatcagcgacggcgacgtgatcatcagcggcaacaagaacctgtgctacgccaacaccatcaactggaagaagctgttcggcaccagcggccagaagaccaagatcatcagcaacagaggcgagaacagctgcaaggccaccggccaggtgtgccacgccctgtgcagccccgagggctgctggggccccgagcccagagactgcgtgagctgcagaaacgtgagcagaggcagagagtgcgtggacaagtgcaacctgctggagggcgagcccagagagttcgtggagaacagcgagtgcatccagtgccaccccgagtgcctgccccaggccatgaacatcacctgcaccggcagaggccccgacaactgcatccagtgcgcccactacatcgacggcccccactgcgtgaagacctgccccgccggcgtgatgggcgagaacaacaccctggtgtggaagtacgccgacgccggccacgtgtgccacctgtgccaccccaactgcacctacggctgcaccggccccggcctggagggctgccccaccaacggccccaagatccccagcatcgccaccggcatggtgggcgccctgctgctgctgctggtggtggccctgggcatcggcctgttcatgagaagaagacacatcgtgagaaagagaaccctgagaagactgctgcaggagagagagctggtggagcccctgacccccagcggcgaggcccccaaccaggccctgctgagaatcctgaaggagaccgagttcaagaagatcaaggtgctgggcagcggcgccttcggcaccgtgtacaagggcctgtggatccccgagggcgagaaggtgaagatccccgtggccatcaaggagctgagagaggccaccagccccaaggccaacaaggagatcctggacgaggcctacgtgatggccagcgtggacaacccccacgtgtgcagactgctgggcatctgcctgaccagcaccgtgcagctgatcacccagctgatgcccttcggctgcctgctggactacgtgagagagcacaaggacaacatcggcagccagtacctgctgaactggtgcgtgcagatcgccaagggcatgaactacctggaggacagaagactggtgcacagagacctggccgccagaaacgtgctggtgaagaccccccagcacgtgaagatcaccgacttcggcctggccaagctgctgggcgccgaggagaaggagtaccacgccgagggcggcaaggtgcccatcaagtggatggccctggagagcatcctgcacagaatctacacccaccagagcgacgtgtggagctacggcgtgaccgtgtgggagctgatgaccttcggcagcaagccctacgacggcatccccgccagcgagatcagcagcatcctggagaagggcgagagactgccccagccccccatctgcaccatcgacgtgtacatgatcatggtgaagtgctggatgatcgacgccgacagcagacccaagttcagagagctgatcatcgagttcagcaagatggccagagacccccagagatacctggtgatccagggcgacgagagaatgcacctgcccagccccaccgacagcaacttctacagagccctgatggacgaggaggacatggacgacgtggtggacgccgacgagtacctgatcccccagcagggcttcttcagcagccccagcaccagcagaacccccctgctgagcagcctgagcgccaccagcaacaacagcaccgtggcctgcatcgacagaaacggcctgcagagctgccccatcaaggaggacagcttcctgcagagatacagcagcgaccccaccggcgccctgaccgaggacagcatcgacgacaccttcctgcccgtgcccggcgagtggctggtgtggaagcagagctgcagcagcaccagcagcacccacagcgccgccgccagcctgcagtgccccagccaggtgctgccccccgccagccccgagggcgagaccgtggccgacctgcagacccagtag

SEQ ID NO: 10517 - DNA, 1395 bp, synthetic construct
  misc_feature 1..1395: note = Description of Artificial Sequence: Synthetic coding sequence
  source 1..1395: mol_type = other DNA
atgagcagcctgaccaagatcatctgcgcccagcagtgcagcggcagatgcagaggcaagagccccagcgactgctgccacaaccagtgcgccgccggctgcaccggccccagagagagcgactgcctggtgtgcagaaagttcagagacgaggccacctgcaaggacacctgcccccccctgatgctgtacaaccccaccacctaccagatggacgtgaaccccgagggcaagtacagcttcggcgccacctgcgtgaagaagtgccccagaaactacgtggtgaccgaccacggcagctgcgtgagagcctgcggcgccgacagctacgagatggaggaggacggcgtgagaaagtgcaagaagtgcgagggcccctgcagaaaggtgtgcaacggcatcggcatcggcgagttcaaggacagcctgagcatcaacgccaccaacatcaagcacttcaagaactgcaccagcatcagcggcgacctgcacatcctgcccgtggccttcagaggcgacagcttcacccacaccccccccctggacccccaggagctggacatcctgaagaccgtgaaggagatcaccggcttcctgctgatccaggcctggcccgagaacagaaccgacctgcacgccttcgagaacctggagatcatcagaggcagaaccaagcagcacggccagttcagcctggccgtggtgagcctgaacatcaccagcctgggcctgagaagcctgaaggagatcagcgacggcgacgtgatcatcagcggcaacaagaacctgtgctacgccaacaccatcaactggaagaagctgttcggcaccagcggccagaagaccaagatcatcagcaacagaggcgagaacagctgcaaggccaccggccaggtgtgccacgccctgtgcagccccgagggctgctggggccccgagcccagagactgcgtgagctgcagaaacgtgagcagaggcagagagtgcgtggacaagtgcaacctgctggagggcgagcccagagagttcgtggagaacagcgagtgcatccagtgccaccccgagtgcctgccccaggccatgaacatcacctgcaccggcagaggccccgacaactgcatccagtgcgcccactacatcgacggcccccactgcgtgaagacctgccccgccggcgtgatgggcgagaacaacaccctggtgtggaagtacgccgacgccggccacgtgtgccacctgtgccaccccaactgcacctacggctgcaccggccccggcctggagggctgccccaccaacggccccaagatccccagcatcgccaccggcatggtgggcgccctgctgctgctgctggtggtggccctgggcatcggcctgttcatgagaagatag

SEQ ID NO: 10518 - DNA, 843 bp, synthetic construct
  misc_feature 1..843: note = Description of Artificial Sequence: Synthetic coding sequence
  source 1..843: mol_type = other DNA
atgcccgccgacatcatggagaagaacagcagcagccccgtggccgccacccccgccagcgtgaacaccacccccgacaagcccaagaccgccagcgagcacagaaagagcagcaagcccatcatggagaagagaagaagagccagaatcaacgagagcctgagccagctgaagaccctgatcctggacgccctgaagaaggacagcagcagacacagcaagctggagaaggccgacatcctggagatgaccgtgaagcacctgagaaacctgcagagagcccagatgaccgccgccctgagcaccgaccccagcgtgctgggcaagtacagagccggcttcagcgagtgcatgaacgaggtgaccagattcctgagcacctgcgagggcgtgaacaccgaggtgagaaccagactgctgggccacctggccaactgcatgacccagatcaacgccatgacctaccccggccagccccaccccgccctgcaggccccccccccccccccccccggccccggcggcccccagcacgcccccttcgccccccccccccccctggtgcccatccccggcggcgccgcccccccccccggcggcgccccctgcaagctgggcagccaggccggcgaggccgccaaggtgttcggcggcttccaggtggtgcccgcccccgacggccagttcgccttcctgatccccaacggcgccttcgcccacagcggccccgtgatccccgtgtacaccagcaacagcggcaccagcgtgggccccaacgccgtgagccccagcagcggccccagcctgaccgccgacagcatgtggagaccctggagaaactag

SEQ ID NO: 10519 - DNA, 57 bp, synthetic construct
  misc_feature 1..57: note = Description of Artificial Sequence: Synthetic coding sequence
  source 1..57: mol_type = other DNA
atggccgagaacagcgtgctgaccagcaccaccggcagaaccagcctggccgactag

SEQ ID NO: 10520 - DNA, 2745 bp, synthetic construct
  misc_feature 1..2745: note = Description of Artificial Sequence: Synthetic coding sequence
  source 1..2745: mol_type = other DNA
atggccgagaacagcgtgctgaccagcaccaccggcagaaccagcctggccgacagcagcatcttcgacagcaaggtgaccgagatcagcaaggagaacctgctgatcggcagcaccagctacgtggaggaggagatgccccagatcgagaccagagtgatcctggtgcaggaggccggcaagcaggaggagctgatcaaggccctgaagaccatcaagatcatggaggtgcccgtgatcaagatcaaggagagctgccccggcaagagcgacgagaagctgatcaagagcgtgatcaacatggacatcaaggtgggcttcgtgaagatggagagcgtggaggagttcgagggcctggacagccccgagttcgagaacgtgttcgtggtgaccgacttccaggacagcgtgttcaacgacctgtacaaggccgactgcagagtgatcggcccccccgtggtgctgaactgcagccagaagggcgagcccctgcccttcagctgcagacccctgtactgcaccagcatgatgaacctggtgctgtgcttcaccggcttcagaaagaaggaggagctggtgagactggtgaccctggtgcaccacatgggcggcgtgatcagaaaggacttcaacagcaaggtgacccacctggtggccaactgcacccagggcgagaagttcagagtggccgtgagcctgggcacccccatcatgaagcccgagtggatctacaaggcctgggagagaagaaacgagcaggacttctacgccgccgtggacgacttcagaaacgagttcaaggtgccccccttccaggactgcatcctgagcttcctgggcttcagcgacgaggagaagaccaacatggaggagatgaccgagatgcagggcggcaagtacctgcccctgggcgacgagagatgcacccacctggtggtggaggagaacatcgtgaaggacctgcccttcgagcccagcaagaagctgtacgtggtgaagcaggagtggttctggggcagcatccagatggacgccagagccggcgagaccatgtacctgtacgagaaggccaacacccccgagctgaagaagagcgtgagcatgctgagcctgaacacccccaacagcaacagaaagagaagaagactgaaggagaccctggcccagctgagcagagagaccgacgtgagccccttcccccccagaaagagacccagcgccgagcacagcctgagcatcggcagcctgctggacatcagcaacacccccgagagcagcatcaactacggcgacacccccaagagctgcaccaagagcagcaagagcagcacccccgtgcccagcaagcagagcgccagatggcaggtggccaaggagctgtaccagaccgagagcaactacgtgaacatcctggccaccatcatccagctgttccaggtgcccctggaggaggagggccagagaggcggccccatcctggcccccgaggagatcaagaccatcttcggcagcatccccgacatcttcgacgtgcacaccaagatcaaggacgacctggaggacctgatcgtgaactgggacgagagcaagagcatcggcgacatcttcctgaagtacagcaaggacctggtgaagacctacccccccttcgtgaacttcttcgagatgagcaaggagaccatcatcaagtgcgagaagcagaagcccagattccacgccttcctgaagatcaaccaggccaagcccgagtgcggcagacagagcctggtggagctgctgatcagacccgtgcagagactgcccagcgtggccctgctgctgaacgacctgaagaagcacaccgccgacgagaaccccgacaagagcaccctggagaaggccatcggcagcctgaaggaggtgatgacccacatcaacgaggacaagagaaagaccgaggcccagaagcagatcttcgacgtggtgtacgaggtggacggctgccccgccaacctgctgagcagccacagaagcctggtgcagagagtggagaccatcagcctgggcgagcacccctgcgacagaggcgagcaggtgaccctgttcctgttcaacgactgcctggagatcgccagaaagagacacaaggtgatcggcaccttcagaagcccccacggccagaccagaccccccgccagcctgaagcacatccacctgatgcccctgagccagatcaagaaggtgctggacatcagagagaccgaggactgccacaacgccttcgccctgctggtgagaccccccaccgagcaggccaacgtgctgctgagcttccagatgaccagcgacgagctgcccaaggagaactggctgaagatgctgtgcagacacgtggccaacaccatctgcaaggccgacgccgagaacctgatctacaccgccgaccccgagagcttcgaggtgaacaccaaggacatggacagcaccctgagcagagccagcagagccatcaagaagaccagcaagaaggtgaccagagccttcagcttcagcaagacccccaagagagccctgagaagagccctgatgaccagccacggcagcgtggagggcagaagccccagcagcaacgacaagcacgtgatgagcagactgagcagcaccagcagcctggccggcatccccagccccagcctggtgagcctgcccagcttcttcgagagaagaagccacaccctgagcagaagcaccacccacctgatctag

SEQ ID NO: 10521 - DNA, 480 bp, synthetic construct
  misc_feature 1..480: note = Description of Artificial Sequence: Synthetic coding sequence
  source 1..480: mol_type = other DNA
atggccgagaacagcgtgctgaccagcaccaccggcagaaccagcctggccgacagcagcatcttcgacagcaaggtgaccgagatcagcaaggagaacctgctgatcggcagcaccagctacgtggaggaggagatgccccagatcgagaccagagtgatcctggtgcaggaggccggcaagcaggaggagctgatcaaggccctgaaggacatcaaggtgggcttcgtgaagatggagagcgtggaggagttcgagggcctggacagccccgagttcgagaacgtgttcgtggtgaccgacttccaggacagcgtgttcaacgacctgtacaaggccgactgcagagtgatcggcccccccgtggtgctgaactgcagccagaagggcgagcccctgcccttcagctgcagacccctgtactgcaccagcatgatgaacctggtgctgtgcttcaccggcttcagaaagaaggagtag

SEQ ID NO: 10522 - DNA, 2649 bp, synthetic construct
  misc_feature 1..2649: note = Description of Artificial Sequence: Synthetic coding sequence
  source 1..2649: mol_type = other DNA
atggccgagaacagcgtgctgaccagcaccaccggcagaaccagcctggccgacagcagcatcttcgacagcaaggtgaccgagatcagcaaggagaacctgctgatcggcagcaccagctacgtggaggagatgccccagatcgagaccagagtgatcctggtgcaggaggccggcaagcaggaggagctgatcaaggccctgaaggacatcaaggtgggcttcgtgaagatggagagcgtggaggagttcgagggcctggacagccccgagttcgagaacgtgttcgtggtgaccgacttccaggacagcgtgttcaacgacctgtacaaggccgactgcagagtgatcggcccccccgtggtgctgaactgcagccagaagggcgagcccctgcccttcagctgcagacccctgtactgcaccagcatgatgaacctggtgctgtgcttcaccggcttcagaaagaaggaggagctggtgagactggtgaccctggtgcaccacatgggcggcgtgatcagaaaggacttcaacagcaaggtgacccacctggtggccaactgcacccagggcgagaagttcagagtggccgtgagcctgggcacccccatcatgaagcccgagtggatctacaaggcctgggagagaagaaacgagcaggacttctacgccgccgtggacgacttcagaaacgagttcaaggtgccccccttccaggactgcatcctgagcttcctgggcttcagcgacgaggagaagaccaacatggaggagatgaccgagatgcagggcggcaagtacctgcccctgggcgacgagagatgcacccacctggtggtggaggagaacatcgtgaaggacctgcccttcgagcccagcaagaagctgtacgtggtgaagcaggagtggttctggggcagcatccagatggacgccagagccggcgagaccatgtacctgtacgagaaggccaacacccccgagctgaagaagagcgtgagcatgctgagcctgaacacccccaacagcaacagaaagagaagaagactgaaggagaccctggcccagctgagcagagagaccgacgtgagccccttcccccccagaaagagacccagcgccgagcacagcctgagcatcggcagcctgctggacatcagcaacacccccgagagcagcatcaactacggcgacacccccaagagctgcaccaagagcagcaagagcagcacccccgtgcccagcaagcagagcgccagatggcaggtggccaaggagctgtaccagaccgagagcaactacgtgaacatcctggccaccatcatccagctgttccaggtgcccctggaggaggagggccagagaggcggccccatcctggcccccgaggagatcaagaccatcttcggcagcatccccgacatcttcgacgtgcacaccaagatcaaggacgacctggaggacctgatcgtgaactgggacgagagcaagagcatcggcgacatcttcctgaagtacagcaaggacctggtgaagacctacccccccttcgtgaacttcttcgagatgagcaaggagaccatcatcaagtgcgagaagcagaagcccagattccacgccttcctgaagatcaaccaggccaagcccgagtgcggcagacagagcctggtggagctgctgatcagacccgtgcagagactgcccagcgtggccctgctgctgaacgacctgaagaagcacaccgccgacgagaaccccgacaagagcaccctggagaaggccatcggcagcctgaaggaggtgatgacccacatcaacgaggacaagagaaagaccgaggcccagaagcagatcttcgacgtggtgtacgaggtggacggctgccccgccaacctgctgagcagccacagaagcctggtgcagagagtggagaccatcagcctgggcgagcacccctgcgacagaggcgagcaggtgaccctgttcctgttcaacgactgcctggagatcgccagaaagagacacaaggtgatcggcaccttcagaagcccccacggccagaccagaccccccgccagcctgaagcacatccacctgatgcccctgagccagatcaagaaggtgctggacatcagagagaccgaggactgccacaacgccttcgccctgctggtgagaccccccaccgagcaggccaacgtgctgctgagcttccagatgaccagcgacgagctgcccaaggagaactggctgaagatgctgtgcagacacgtggccaacaccatctgcaaggccgacgccgagaacctgatctacaccgccgaccccgagagcttcgaggtgaacaccaaggacatggacagcaccctgagcagagccagcagagccatcaagaagaccagcaagaaggtgaccagagccttcagcttcagcaagacccccaagagagccctgagaagagccctgatgaccagccacggcagcgtggagggcagaagccccagcagcaacgacaagcacgtgatgagcagactgagcagcaccagcagcctggccggcatccccagccccagcctggtgagcctgcccagcttcttcgagagaagaagccacaccctgagcagaagcaccacccacctgatctag

SEQ ID NO: 10523 - DNA, 321 bp, synthetic construct
  misc_feature 1..321: note = Description of Artificial Sequence: Synthetic coding sequence
  source 1..321: mol_type = other DNA
atggccgagaacagcgtgctgaccagcaccaccggcagaaccagcctggccgacagcagcatcttcgacagcaaggtgaccgagatcagcaaggagaacctgctgatcggcagcaccagctacgtggaggaggagatgccccagatcgagaccagagtgatcctggtgcaggaggccggcaagcaggaggagctgatcaaggccctgaaggacatcaaggtgggcttcgtgaagatggagagcgtggaggagttcgagggcctggacagccccgagttcgagaacgtgttcgtggtgaccgacttccaggacagcgtgtag

SEQ ID NO: 10524 - DNA, 2784 bp, synthetic construct
  misc_feature 1..2784: note = Description of Artificial Sequence: Synthetic coding sequence
  source 1..2784: mol_type = other DNA
atggccgagaacagcgtgctgaccagcaccaccggcagaaccagcctggccgacagcagcatcttcgacagcaaggtgaccgagatcagcaaggagaacctgctgatcggcagcaccagctacgtggaggaggagatgccccagatcgagaccagagtgatcctggtgcaggaggccggcaagcaggaggagctgatcaaggccctgaaggacatcaaggtgggcttcgtgaagatggagagcgtggaggagttcgagggcctggacagccccgagttcgagaacgtgttcgtggtgaccgacttccaggacagcgtgttcaacgacctgtacaaggccgactgcagagtgatcggcccccccgtggtgctgaactgcagccagaagggcgagcccctgcccttcagctgcagacccctgtactgcaccagcatgatgaacctggtgctgtgcttcaccggcttcagaaagaaggaggagctggtgagactggtgaccctggtgcaccacatgggcggcgtgatcagaaaggacttcaacagcaaggtgacccacctggtggccaactgcacccagggcgagaagttcagagtggccgtgagcctgggcacccccatcatgaagcccgagtggatctacaaggcctgggagagaagaaacgagcaggacttctacgccgccgtggacgacttcagaaacgagttcaaggtgccccccttccaggactgcatcctgagcttcctgggcttcagcgacgaggagaagaccaacatggaggagatgaccgagatgcagggcggcaagtacctgcccctgggcgacgagagatgcacccacctggtggtggaggagaacatcgtgaaggacctgcccttcgagcccagcaagaagctgtacgtggtgaagcaggagtggttctggggcagcatccagatggacgccagagccggcgagaccatgtacctgtacgagaaggccaacacccccgagctgaagaagagcgtgagcatgctgagcctgaacacccccaacagcaacagaaagagaagaagactgaaggagaccctggcccagctgagcagagagaccgacgtgagccccttcccccccagaaagagacccagcgccgagcacagcctgagcatcggcagcctgctggacatcagcaacacccccgagagcagcatcaactacggcgacacccccaagagctgcaccaagagcagcaagagcagcacccccgtgcccagcaagcagagcgccagatggcaggtggccaaggagctgtaccagaccgagagcaactacgtgaacatcctggccaccatcatccagctgttccaggtgcccctggaggaggagggccagagaggcggccccatcctggcccccgaggagatcaagaccatcttcggcagcatccccgacatcttcgacgtgcacaccaagatcaaggacgacctggaggacctgatcgtgaactgggacgagagcaagagcatcggcgacatcttcctgaagtacagcaaggacctggtgaagacctacccccccttcgtgaacttcttcgagatgagcaaggagaccatcatcaagtgcgagaagcagaagcccagattccacgccttcctgaagatcaaccaggccaagcccgagtgcggcagacagagcctggtggagctgctgatcagacccgtgcagagactgcccagcgtggccctgctgctgaacgacctgaagaagcacaccgccgacgagaaccccgacaagagcaccctggagaaggccatcggcagcctgaaggaggtgatgacccacatcaacgaggacaagagaaagaccgaggcccagaagcagatcttcgacgtggtgtacgaggtggacggctgccccgccaacctgctgagcagccacagaagcctggtgcagagagtggagaccatcagcctgggcgagcacccctgcgacagaggcgagcaggtgaccctgttcctgttcaacgactgcctggagatcgccagaaagagacacaaggtgatcggcaccttcagaagcccccacggccagaccagaccccccgccagcctgaagcacatccacctgatgcccctgagccagatcaagaaggtgctggacatcagagagaccgaggactgccacaacgccttcgccctgctggtgagaccccccaccgagcaggccaacgtgctgctgagcttccagatgaccagcgacgagctgcccaaggagaactggctgaagatgctgtgcagacacgtggccaacaccatctgcaaggccgacgccgagaacctgatctacaccgccgaccccgagagcttcgaggtgaacaccaaggacatggacagcaccctgagcagagccagcagagccatcaagaagaccagcaagaaggtgaccagagccttcagcttcagcaagacccccaagagagccctgagaagagccctgatgaccagccacggcagcgtggagggcagaagccccagcagcaacgacaagcacgtgatgagcagactgagcagcaccagcagcctggccatcacccacagcgtgagcaccagcaacgtgatcggcttcaccaagcacgtgtacgtgcagagactgaacagcaccggcggcagaagccagtacagctggttccagagcgtgagacacagcgccttcagagccagcttcagcgagatcctggagggcaacaccgacttcagcaacttcaagaaggtgctgagcaagagcagcctgaccttcgtgaagaactag

SEQ ID NO: 10525 - DNA, 2652 bp, synthetic construct
  misc_feature 1..2652: note = Description of Artificial Sequence: Synthetic coding sequence
  source 1..2652: mol_type = other DNA
atggccgagaacagcgtgctgaccagcaccaccggcagaaccagcctggccgacagcagcatcttcgacagcaaggtgaccgagatcagcaaggagaacctgctgatcggcagcaccagctacgtggaggaggagatgccccagatcgagaccagagtgatcctggtgcaggaggccggcaagcaggaggagctgatcaaggccctgaaggacatcaaggtgggcttcgtgaagatggagagcgtggaggagttcgagggcctggacagccccgagttcgagaacgtgttcgtggtgaccgacttccaggacagcgtgttcaacgacctgtacaaggccgactgcagagtgatcggcccccccgtggtgctgaactgcagccagaagggcgagcccctgcccttcagctgcagacccctgtactgcaccagcatgatgaacctggtgctgtgcttcaccggcttcagaaagaaggaggagctggtgagactggtgaccctggtgcaccacatgggcggcgtgatcagaaaggacttcaacagcaaggtgacccacctggtggccaactgcacccagggcgagaagttcagagtggccgtgagcctgggcacccccatcatgaagcccgagtggatctacaaggcctgggagagaagaaacgagcaggacttctacgccgccgtggacgacttcagaaacgagttcaaggtgccccccttccaggactgcatcctgagcttcctgggcttcagcgacgaggagaagaccaacatggaggagatgaccgagatgcagggcggcaagtacctgcccctgggcgacgagagatgcacccacctggtggtggaggagaacatcgtgaaggacctgcccttcgagcccagcaagaagctgtacgtggtgaagcaggagtggttctggggcagcatccagatggacgccagagccggcgagaccatgtacctgtacgagaaggccaacacccccgagctgaagaagagcgtgagcatgctgagcctgaacacccccaacagcaacagaaagagaagaagactgaaggagaccctggcccagctgagcagagagaccgacgtgagccccttcccccccagaaagagacccagcgccgagcacagcctgagcatcggcagcctgctggacatcagcaacacccccgagagcagcatcaactacggcgacacccccaagagctgcaccaagagcagcaagagcagcacccccgtgcccagcaagcagagcgccagatggcaggtggccaaggagctgtaccagaccgagagcaactacgtgaacatcctggccaccatcatccagctgttccaggtgcccctggaggaggagggccagagaggcggccccatcctggcccccgaggagatcaagaccatcttcggcagcatccccgacatcttcgacgtgcacaccaagatcaaggacgacctggaggacctgatcgtgaactgggacgagagcaagagcatcggcgacatcttcctgaagtacagcaaggacctggtgaagacctacccccccttcgtgaacttcttcgagatgagcaaggagaccatcatcaagtgcgagaagcagaagcccagattccacgccttcctgaagatcaaccaggccaagcccgagtgcggcagacagagcctggtggagctgctgatcagacccgtgcagagactgcccagcgtggccctgctgctgaacgacctgaagaagcacaccgccgacgagaaccccgacaagagcaccctggagaaggccatcggcagcctgaaggaggtgatgacccacatcaacgaggacaagagaaagaccgaggcccagaagcagatcttcgacgtggtgtacgaggtggacggctgccccgccaacctgctgagcagccacagaagcctggtgcagagagtggagaccatcagcctgggcgagcacccctgcgacagaggcgagcaggtgaccctgttcctgttcaacgactgcctggagatcgccagaaagagacacaaggtgatcggcaccttcagaagcccccacggccagaccagaccccccgccagcctgaagcacatccacctgatgcccctgagccagatcaagaaggtgctggacatcagagagaccgaggactgccacaacgccttcgccctgctggtgagaccccccaccgagcaggccaacgtgctgctgagcttccagatgaccagcgacgagctgcccaaggagaactggctgaagatgctgtgcagacacgtggccaacaccatctgcaaggccgacgccgagaacctgatctacaccgccgaccccgagagcttcgaggtgaacaccaaggacatggacagcaccctgagcagagccagcagagccatcaagaagaccagcaagaaggtgaccagagccttcagcttcagcaagacccccaagagagccctgagaagagccctgatgaccagccacggcagcgtggagggcagaagccccagcagcaacgacaagcacgtgatgagcagactgagcagcaccagcagcctggccggcatccccagccccagcctggtgagcctgcccagcttcttcgagagaagaagccacaccctgagcagaagcaccacccacctgatctag

SEQ ID NO: 10526 - DNA, 2745 bp, synthetic construct; identical to SEQ ID NO: 10520
  misc_feature 1..2745: note = Description of Artificial Sequence: Synthetic coding sequence
  source 1..2745: mol_type = other DNA

SEQ ID NO: 10527 - DNA, 1389 bp, synthetic construct
  misc_feature 1..1389: note = Description of Artificial Sequence: Synthetic coding sequence
  source 1..1389: mol_type = other DNA
atgagcatcgccggcgtggccgcccaggagatcagagtgcccctgaagaccggcttcctgcacaacggcagagccatgggcaacatgagaaagacctactggagcagcagaagcgagttcaagaacaacttcctgaacatcgaccccatcaccatggcctacagcctgaacagcagcgcccaggagagactgatccccctgggccacgccagcaagagcgcccccatgaacggccactgcttcgccgagaacggccccagccagaagagcagcctgccccccctgctgatcccccccagcgagaacctgggcccccacgaggaggaccaggtggtgtgcggcttcaagaagctgaccgtgaacggcgtgtgcgccagcaccccccccctgacccccatcaagaacagccccagcctgttcccctgcgcccccctgtgcgagagaggcagcagacccctgccccccctgcccatcagcgaggccctgagcctggacgacaccgactgcgaggtggagttcctgaccagcagcgacaccgacttcctgctggaggacagcaccctgagcgacttcaagtacgacgtgcccggcagaagaagcttcagaggctgcggccagatcaactacgcctacttcgacacccccgccgtgagcgccgccgacctgagctacgtgagcgaccagaacggcggcgtgcccgaccccaaccccccccccccccagacccacagaagactgagaagaagccacagcggccccgccggcagcttcaacaagcccgccatcagaatcagcaactgctgcatccacagagccagccccaacagcgacgaggacaagcccgaggtgccccccagagtgcccatcccccccagacccgtgaagcccgactacagaagatggagcgccgaggtgaccagcagcacctacagcgacgaggacagaccccccaaggtgccccccagagagcccctgagccccagcaacagcagaacccccagccccaagagcctgcccagctacctgaacggcgtgatgccccccacccagagcttcgcccccgaccccaagtacgtgagcagcaaggccctgcagagacagaacagcgagggcagcgccagcaaggtgccctgcatcctgcccatcatcgagaacggcaagaaggtgagcagcacccactactacctgctgcccgagagacccccctacctggacaagtacgagaagttcttcagagaggccgaggagaccaacggcggcgcccagatccagcccctgcccgccgactgcggcatcagcagcgccaccgagaagcccgacagcaagaccaagatggacctgggcggccacgtgaagagaaagcacctgagctacgtggtgagcccctag

SEQ ID NO: 10528 - DNA, 1713 bp, synthetic construct
  misc_feature 1..1713: note = Description of Artificial Sequence: Synthetic coding sequence
  source 1..1713: mol_type = other DNA
atggccctgaagaagagcagccccagcctggacagcggcgacagcgacagcgaggagctgcccaccttcgccttcctgaagaaggagcccagcagcaccaagagaagacagcccgagagagaggagaagatcgtggtggtggacatcagcgactgcgaggccagctgcccccccgcccccgagctgttcagcccccccgtgcccgagatcgccgagaccgtgacccagacccagcccgtgagactgctgagcagcgagagcgaggacgaggaggagttcatccccctggcccagagactgacctgcaagttcctgacccacaagcagctgagccccgaggacagcagcagccccgtgaagagcgtgctggaccaccagaacaacgagggcgccagctgcgactggaagaagcccttccccaagatccccgaggtgcccctgcacgacacccccgagagaagcgccgccgacaacaaggacctgatcctggacccctgctgccagctgcccgcctacctgagcacctgccccggccagagcagcagcctggccgtgaccaagaccaacagcgacatcctgcccccccagaagaagaccaagcccagccagaaggtgcagggcagaggcagccacggctgcagacagcagagacaggccagacagaaggagagcaccctgagaagacaggagagaaagaacgccgccctggtgaccagaatgaaggcccagagacccgaggagtgcctgaagcacatcatcgtggtgctggaccccgtgctgctgcagatggagggcggcggccagctgctgggcgccctgcagaccatggagtgcagatgcgtgatcgaggcccaggccgtgccctgcagcgtgacctggagaagaagagccggccccagcgaggacagagaggactgggtggaggagcccaccgtgctggtgctgctgagagccgaggccttcgtgagcatgatcgacaacggcaagcagggcagcctggacagcaccatgaagggcaaggagaccctgcagggcttcgtgaccgacatcaccgccaagaccgccggcaaggccctgagcctggtgatcgtggaccaggagaagtgcttcagcgcccagaacccccccagaagaggcaagcagggcgccaacaagcagaccaagaagcagcagcagagacagcccgaggccagcatcggcagcatggtgagcagagtggacgccgaggaggccctggtggacctgcagctgcacaccgaggcccaggcccagatcgtgcagagctggaaggagctggccgacttcacctgcgccttcaccaaggccgtggccgaggcccccttcaagaagctgagagacgagaccaccttcagcttctgcctggagagcgactgggccggcggcgtgaaggtggacctggccggcagaggcctggccctggtgtggagaagacagatccagcagctgaacagagtgagcctggagatggccagcgccgtggtgaacgcctaccccagcccccagctgctggtgcaggcctaccagcagtgcttcagcgacaaggagagacagaacctgctggccgacatccaggtgagaagaggcgagggcgtgaccagcaccagcagaagaatcggccccgagctgagcagaagaatctacctgcagatgaccaccctgcagccccacctgagcctggacagcgccgactag

SEQ ID NO: 10529 - DNA, 1752 bp, synthetic construct
  misc_feature 1..1752: note = Description of Artificial Sequence: Synthetic coding sequence
  source 1..1752: mol_type = other DNA
atggccctgaagaagagcagccccagcctggacagcggcgacagcgacagcgaggagctgcccaccttcgccttcctgaagaaggagcccagcagcaccaagagaagacagcccgagagagaggagaagatcgtggtggtggacatcagcgactgcgaggccagctgcccccccgcccccgagctgttcagcccccccgtgcccgagatcgccgagaccgtgacccagacccagcccgtgagactgctgagcagcgagagcgaggacgaggaggagttcatccccctggcccagagactgacctgcaagttcctgacccacaagcagctgagccccgaggacagcagcagccccgtgaagagcgtgctggaccaccagaacaacgagggcgccagctgcgactggaagaagcccttccccaagatccccgaggtgcccctgcacgacacccccgagagaagcgccgccgacaacaaggacctgatcctggacccctgctgccagctgcccgcctacctgagcacctgccccggccagagcagcagcctggccgtgaccaagaccaacagcgacatcctgcccccccagaagaagaccaagcccagccagaaggtgcagggcagaggcagccacggctgcagacagcagagacaggccagacagaaggagagcaccctgagaagacaggagagaaagaacgccgccctggtgaccagaatgaaggcccagagacccgaggagtgcctgaagcacatcatcgtggtgctggaccccgtgctgctgcagatggagggcggcggccagctgctgggcgccctgcagaccatggagtgcagatgcgtgatcgaggcccaggccgtgccctgcagcgtgacctggagaagaagagccggccccagcgaggacagagaggactgggtggaggagcccaccgtgctggtgctgctgagagccgaggccttcgtgagcatgatcgacaacggcaagcagggcagcctggacagcaccatgaagggcaaggagaccctgcagggcttcgtgaccgacatcaccgccaagaccgccggcaaggccctgagcctggtgatcgtggaccaggagaagtgcttcagcctggagctgctgttcttcgacttcctgccctgcaccagcgcccagaacccccccagaagaggcaagcagggcgccaacaagcagaccaagaagcagcagcagagacagcccgaggccagcatcggcagcatggtgagcagagtggacgccgaggaggccctggtggacctgcagctgcacaccgaggcccaggcccagatcgtgcagagctggaaggagctggccgacttcacctgcgccttcaccaaggccgtggccgaggcccccttcaagaagctgagagacgagaccaccttcagcttctgcctggagagcgactgggccggcggcgtgaaggtggacctggccggcagaggcctggccctggtgtggagaagacagatccagcagctgaacagagtgagcctggagatggccagcgccgtggtgaacgcctaccccagcccccagctgctggtgcaggcctaccagcagtgcttcagcgacaaggagagacagaacctgctggccgacatccaggtgagaagaggcgagggcgtgaccagcaccagcagaagaatcggccccgagctgagcagaagaatctacctgcagatgaccaccctgcagccccacctgagcctggacagcgccgactag

SEQ ID NO: 10530 - DNA, 1752 bp, synthetic construct; identical to SEQ ID NO: 10529
  misc_feature 1..1752: note = Description of Artificial Sequence: Synthetic coding sequence
  source 1..1752: mol_type = other DNA

SEQ ID NO: 10531 - DNA, 684 bp, synthetic construct
  misc_feature 1..684: note = Description of Artificial Sequence: Synthetic coding sequence
  source 1..684: mol_type = other DNA
atggccgacctgctgggcagcatcctgagcagcatggagaagccccccagcctgggcgaccaggagaccagaagaaaggccagagagcaggccgccagactgaagaagctgcaggagcaggagaagcagcagaaggtggagttcagaaagagaatggagaaggaggtgagcgacttcatccaggacagcggccagatcaagaagaagttccagcccatgaacaagatcgagagaagcatcctgcacgacgtggtggaggtggccggcctgaccagcttcagcttcggcgaggacgacgactgcagatacgtgatgatcttcaagaaggagttcgcccccagcgacgaggagctggacagctacagaagaggcgaggagtgggacccccagaaggccgaggagaagagaaagctgaaggagctggcccagagacaggaggaggaggccgcccagcagggccccgtggtggtgagccccgccagcgactacaaggacaagtacagccacctgatcggcaagggcgccgccaaggacgccgcccacatgctgcaggccaacaagacctacggctgcgtgcccgtggccaacaagagagacaccagaagcatcgaggaggccatgaacgagatcagagccaagaagagactgagacagagcggcgaggagctgccccccaccagctag

SEQ ID NO: 10532 - DNA, 1788 bp, synthetic construct
  misc_feature 1..1788: note = Description of Artificial Sequence: Synthetic coding sequence
  source 1..1788: mol_type = other DNA
atgaccatgaccctgcacaccaaggccagcggcatggccctgctgcaccagatccagggcaacgagctggagcccctgaacagaccccagctgaagatccccctggagagacccctgggcgaggtgtacctggacagcagcaagcccgccgtgtacaactaccccgagggcgccgcctacgagttcaacgccgccgccgccgccaacgcccaggtgtacggccagaccggcctgccctacggccccggcagcgaggccgccgccttcggcagcaacggcctgggcggcttcccccccctgaacagcgtgagccccagccccctgatgctgctgcacccccccccccagctgagccccttcctgcagccccacggccagcaggtgccctactacctggagaacgagcccagcggctacaccgtgagagaggccggcccccccgccttctacagacccaacagcgacaacagaagacagggcggcagagagagactggccagcaccaacgacaagggcagcatggccatggagagcgccaaggagaccagatactgcgccgtgtgcaacgactacgccagcggctaccactacggcgtgtggagctgcgagggctgcaaggccttcttcaagagaagcatccagggccacaacgactacatgtgccccgccaccaaccagtgcaccatcgacaagaacagaagaaagagctgccaggcctgcagactgagaaagtgctacgaggtgggcatgatgaagggcggcatcagaaaggacagaagaggcggcagaatgctgaagcacaagagacagagagacgacggcgagggcagaggcgaggtgggcagcgccggcgacatgagagccgccaacctgtggcccagccccctgatgatcaagagaagcaagaagaacagcctggccctgagcctgaccgccgaccagatggtgagcgccctgctggacgccgagccccccatcctgtacagcgagtacgaccccaccagacccttcagcgaggccagcatgatgggcctgctgaccaacctggccgacagagagctggtgcacatgatcaactgggccaagagagtgcccggcttcgtggacctgaccctgcacgaccaggtgcacctgctggagtgcgcctggctggagatcctgatgatcggcctggtgtggagaagcatggagcaccccggcaagctgctgttcgcccccaacctgctgctggacagaaaccagggcaagtgcgtggagggcatggtggagatcttcgacatgctgctggccaccagcagcagattcagaatgatgaacctgcagggcgaggagttcgtgtgcctgaagagcatcatcctgctgaacagcggcgtgtacaccttcctgagcagcaccctgaagagcctggaggagaaggaccacatccacagagtgctggacaagatcaccgacaccctgatccacctgatggccaaggccggcctgaccctgcagcagcagcaccagagactggcccagctgctgctgatcctgagccacatcagacacatgagcaacaagggcatggagcacctgtacagcatgaagtgcaagaacgtggtgcccctgtacgacctgctgctggagatgctggacgcccacagactgcacgcccccaccagcagaggcggcgccagcgtggaggagaccgaccagagccacctggccaccgccggcagcaccagcagccacagcctgcagaagtactacatcaccggcgaggccgagggcttccccgccaccgtgtag

SEQ ID NO: 10533 - DNA, 549 bp, synthetic construct
  misc_feature 1..549: note = Description of Artificial Sequence: Synthetic coding sequence
  source 1..549: mol_type = other DNA
atggagagcgccaaggagaccagatactgcgccgtgtgcaacgactacgccagcggctaccactacggcgtgtggagctgcgagggctgcaaggccttcttcaagagaagcatccagggccacaacgactacatgtgccccgccaccaaccagtgcaccatcgacaagaacagaagaaagagctgccaggcctgcagactgagaaagtgctacgaggtgggcatgatgaagggcggcatcagaaaggacagaagaggcggcagaatgctgaagcacaagctgctgctgatcctgagccacatcagacacatgagcaacaagggcatggagcacctgtacagcatgaagtgcaagaacgtggtgcccctgtacgacctgctgctggagatgctggacgcccacagactgcacgcccccaccagcagaggcggcgccagcgtggaggagaccgaccagagccacctggccaccgccggcagcaccagcagccacagcctgcagaagtactacatcaccggcgaggccgagggcttccccgccaccgtgtag

SEQ ID NO: 10534 - DNA, 255 bp, synthetic construct
  misc_feature 1..255: note = Description of Artificial Sequence: Synthetic coding sequence
  source 1..255: mol_type = other DNA
atgaccatgaccctgcacaccaaggccagcggcatggccctgctgcaccagatccagggcaacgagctggagcccctgaacagaccccagctgaagatccccctggagagacccctgggcgaggtgtacctggacagcagcaagcccgccgtgtacaactaccccgagggcgccgcctacgagttcaacgccgccgccgccgccaacgcccaggtgtacggccagaccggcctgccctacggccccggcagctag

SEQ ID NO: 10535 - DNA, 1005 bp, synthetic construct
  misc_feature 1..1005: note = Description of Artificial Sequence: Synthetic coding sequence
  source 1..1005: mol_type = other DNA
atgaccatgaccctgcacaccaaggccagcggcatggccctgctgcaccagatccagggcaacgagctggagcccctgaacagaccccagctgaagatccccctggagagacccctgggcgaggtgtacctggacagcagcaagcccgccgtgtacaactaccccgagggcgccgcctacgagttcaacgccgccgccgccgccaacgcccaggtgtacggccagaccggcctgccctacggccccggcagcgaggccgccgccttcggcagcaacggcctgggcggcttcccccccctgaacagcgtgagccccagccccctgatgctgctgcacccccccccccagctgagccccttcctgcagccccacggccagcaggtgccctactacctggagaacgagcccagcggctacaccgtgagagaggccggcccccccgccttctacagaaaccagggcaagtgcgtggagggcatggtggagatcttcgacatgctgctggccaccagcagcagattcagaatgatgaacctgcagggcgaggagttcgtgtgcctgaagagcatcatcctgctgaacagcggcgtgtacaccttcctgagcagcaccctgaagagcctggaggagaaggaccacatccacagagtgctggacaagatcaccgacaccctgatccacctgatggccaaggccggcctgaccctgcagcagcagcaccagagactggcccagctgctgctgatcctgagccacatcagacacatgagcaacaagggcatggagcacctgtacagcatgaagtgcaagaacgtggtgcccctgtacgacctgctgctggagatgctggacgcccacagactgcacgcccccaccagcagaggcggcgccagcgtggaggagaccgaccagagccacctggccaccgccggcagcaccagcagccacagcctgcagaagtactacatcaccggcgaggccgagggcttccccgccaccgtgtag

SEQ ID NO: 10536 - DNA, 324 bp, synthetic construct
  misc_feature 1..324: note = Description of Artificial Sequence: Synthetic coding sequence
  source 1..324: mol_type = other DNA
cacaacgactacatgtgccccgccaccaaccagtgcaccatcgacaagaacagaagaaagagctgccaggcctgcagactgagaaagtgctacgaggtgggcatgatgaagggcggcttcgtggacctgaccctgcacgaccaggtgcacctgctggagtgcgcctggctggagatcctgatgatcggcctggtgtggagaagcatggagcaccccggcaagctgctgttcgcccccaacctgctgctggacagaaaccagggcaagtgcgtggagggcatggtggagatcttcgacatgctgctggccaccagcagcagatag

SEQ ID NO: 10537 - DNA, 1167 bp, synthetic construct
  misc_feature 1..1167: note = Description of Artificial Sequence: Synthetic coding sequence
  source 1..1167: mol_type = other DNA
tgactgaagatcatcagctgccagcccagcgacaagcccgtgccccccggcgagaacgcccccgagtggagagccggccagcccggcagcgcccccagaagccactgcggcagaagcgccgccggccccggccacagaagacccctgtgcgacttcaacggcgagggccccaacagcgacaacagaagacagggcggcagagagagactggccagcaccaacgacaagggcagcatggccatggagagcgccaaggagaccagatactgcgccgtgtgcaacgactacgccagcggctaccactacggcgtgtggagctgcgagggctgcaaggccttcttcaagagaagcatccagggccacaacgactacatgtgccccgccaccaaccagtgcaccatcgacaagaacagaagaaagagctgccaggcctgcagactgagaaagtgctacgaggtgggcatgatgaagggcggcatcagaaaggacagaagaggcggcagaatgctgaagcacaagagacagagagacgacggcgagggcagaggcgaggtgggcagcgccggcgacatgagagccgccaacctgtggcccagccccctgatgatcaagagaagcaagaagaacagcctggccctgagcctgaccgccgaccagatggtgagcgccctgctggacgccgagccccccatcctgtacagcgagtacgaccccaccagacccttcagcgaggccagcatgatgggcctgctgaccaacctggccgacagagagctggtgcacatgatcaactgggccaagagagtgcccggcttcgtggacctgaccctgcacgaccaggtgcacctgctggagtgcgcctggctggagatcctgatgatcggcctggtgtggagaagcatggagcaccccggcaagctgctgttcgcccccaacctgctgctggacagaaaccagggcaagtgcgtggagggcatggtggagatcttcgacatgctgctggccaccagcagcagattcagaatgatgaacctgcagggcgaggagttcgtgtgcctgaagagcatcatcctgctgaacagcggcatcagccacgtggaggccaagaagagaatcctgaacctgcaccccaagatcttcggcaacaagtggttccccagagtgtag

SEQ ID NO: 10538 - DNA, 813 bp, synthetic construct
  misc_feature 1..813: note = Description of Artificial Sequence: Synthetic coding sequence
  source 1..813: mol_type = other DNA
atgtgccccgccaccaaccagtgcaccatcgacaagaacagaagaaagagctgccaggcctgcagactgagaaagtgctacgaggtgggcatgatgaagggcggcatcagaaaggacagaagaggcggcagaatgctgaagcacaagagacagagagacgacggcgagggcagaggcgaggtgggcagcgccggcgacatgagagccgccaacctgtggcccagccccctgatgatcaagagaagcaagaagaacagcctggccctgagcctgaccgccgaccagatggtgagcgccctgctggacgccgagccccccatcctgtacagcgagtacgaccccaccagacccttcagcgaggccagcatgatgggcctgctgaccaacctggccgacagagagctggtgcacatgatcaactgggccaagagagtgcccggcttcgtggacctgaccctgcacgaccaggtgcacctgctggagtgcgcctggctggagatcctgatgatcggcctggtgtggagaagcatggagcaccccggcaagctgctgttcgcccccaacctgctgctggacagcaacaagggcatggagcacctgtacagcatgaagtgcaagaacgtggtgcccctgtacgacctgctgctggagatgctggacgcccacagactgcacgcccccaccagcagaggcggcgccagcgtggaggagaccgaccagagccacctggccaccgccggcagcaccagcagccacagcctgcagaagtactacatcaccggcgaggccgagggcttccccgccaccgtgtag

SEQ ID NO: 10539 - DNA, 1572 bp, synthetic construct
  misc_feature 1..1572: note = Description of Artificial Sequence: Synthetic coding sequence
  source 1..1572: mol_type = other DNA
atgaccatgaccctgcacaccaaggccagcggcatggccctgctgcaccagatccagggcaacgagctggagcccccccccctgaacagcgtgagccccagccccctgatgctgctgcacccccccccccagctgagccccttcctgcagccccacggccagcaggtgccctactacctggagaacgagcccagcggctacaccgtgagagaggccggcccccccgccttctacagacccaacagcgacaacagaagacagggcggcagagagagactggccagcaccaacgacaagggcagcatggccatggagagcgccaaggagaccagatactgcgccgtgtgcaacgactacgccagcggctaccactacggcgtgtggagctgcgagggctgcaaggccttcttcaagagaagcatccagggccacaacgactacatgtgccccgccaccaaccagtgcaccatcgacaagaacagaagaaagagctgccaggcctgcagactgagaaagtgctacgaggtgggcatgatgaagggcggcatcagaaaggacagaagaggcggcagaatgctgaagcacaagagacagagagacgacggcgagggcagaggcgaggtgggcagcgccggcgacatgagagccgccaacctgtggcccagccccctgatgatcaagagaagcaagaagaacagcctggccctgagcctgaccgccgaccagatggtgagcgccctgctggacgccgagccccccatcctgtacagcgagtacgaccccaccagacccttcagcgaggccagcatgatgggcctgctgaccaacctggccgacagagagctggtgcacatgatcaactgggccaagagagtgcccggcttcgtggacctgaccctgcacgaccaggtgcacctgctggagtgcgcctggctggagatcctgatgatcggcctggtgtggagaagcatggagcaccccggcaagctgctgttcgcccccaacctgctgctggacagaaaccagggcaagtgcgtggagggcatggtggagatcttcgacatgctgctggccaccagcagcagattcagaatgatgaacctgcagggcgaggagttcgtgtgcctgaagagcatcatcctgctgaacagcggcgtgtacaccttcctgagcagcaccctgaagagcctggaggagaaggaccacatccacagagtgctggacaagatcaccgacaccctgatccacctgatggccaaggccggcctgaccctgcagcagcagcaccagagactggcccagctgctgctgatcctgagccacatcagacacatgagcaacaagggcatggagcacctgtacagcatgaagtgcaagaacgtggtgcccctgtacgacctgctgctggagatgctggacgcccacagactgcacgcccccaccagcagaggcggcgccagcgtggaggagaccgaccagagccacctggccaccgccggcagcaccagcagccacagcctgcagaagtactacatcaccggcgaggccgagggcttccccgccaccgtgtag

SEQ ID NO: 10540 - DNA, 1788 bp, synthetic construct; identical to SEQ ID NO: 10532
  misc_feature 1..1788: note = Description of Artificial Sequence: Synthetic coding sequence
  source 1..1788: mol_type = other DNA

SEQ ID NO: 10541 - DNA, 1788 bp, synthetic construct; identical to SEQ ID NO: 10532
  misc_feature 1..1788: note = Description of Artificial Sequence: Synthetic coding sequence
  source 1..1788: mol_type = other DNA

SEQ ID NO: 10542 - DNA, 348 bp, synthetic construct
  misc_feature 1..348: note = Description of Artificial Sequence: Synthetic coding sequence
  source 1..348: mol_type = other DNA
atgaccatgaccctgcacaccaaggccagcggcatggccctgctgcaccagatccagggcaacgagctggagcccctgaacagaccccagctgaagatccccctggagagacccctgggcgaggtgtacctggacagcagcaagcccgccgtgtacaactaccccgagggcgccgcctacgagttcaacgccgccgccgccgccaacgcccaggtgtacggccagaccggcctgccctacggccccggcagcgaggccgccgccttcggcagcaacggcctgggcggcttcccccccctgaacagcgtgagccccagccccctgatgctgctgcacccccccccctag

SEQ ID NO: 10543 - DNA, 1452 bp, synthetic construct
  misc_feature 1..1452: note = Description of Artificial Sequence: Synthetic coding sequence
  source 1..1452: mol_type = other DNA
atgaccatgaccctgcacaccaaggccagcggcatggccctgctgcaccagatccagggcaacgagctggagcccctgaacagaccccagctgaagatccccctggagagacccctgggcgaggtgtacctggacagcagcaagcccgccgtgtacaactaccccgagggcgccgcctacgagttcaacgccgccgccgccgccaacgcccaggtgtacggccagaccggcctgccctacggccccggcagcgaggccgccgccttcggcagcaacggcctgggcggcttcccccccctgaacagcgtgagccccagccccctgatgctgctgcacccccccccccagctgagccccttcctgcagccccacggccagcaggtgccctactacctggagaacgagcccagcggctacaccgtgagagaggccggcccccccgccttctacagacccaacagcgacaacagaagacagggcggcagagagagactggccagcaccaacgacaagggcagcatggccatggagagcgccaaggagaccagatactgcgccgtgtgcaacgactacgccagcggctaccactacggcgtgtggagctgcgagggctgcaaggccttcttcaagagaagcatccagggccacaacgactacatgtgccccgccaccaaccagtgcaccatcgacaagaacagaagaaagagctgccaggcctgcagactgagaaagtgctacgaggtgggcatgatgaagggcggcttcgtggacctgaccctgcacgaccaggtgcacctgctggagtgcgcctggctggagatcctgatgatcggcctggtgtggagaagcatggagcaccccggcaagctgctgttcgcccccaacctgctgctggacagaaaccagggcaagtgcgtggagggcatggtggagatcttcgacatgctgctggccaccagcagcagattcagaatgatgaacctgcagggcgaggagttcgtgtgcctgaagagcatcatcctgctgaacagcggcgtgtacaccttcctgagcagcaccctgaagagcctggaggagaaggaccacatccacagagtgctggacaagatcaccgacaccctgatccacctgatggccaaggccggcctgaccctgcagcagcagcaccagagactggcccagctgctgctgatcctgagccacatcagacacatgagcaacaagggcatggagcacctgtacagcatgaagtgcaagaacgtggtgcccctgtacgacctgctgctggagatgctggacgcccacagactgcacgcccccaccagcagaggcggcgccagcgtggaggagaccgaccagagccacctggccaccgccggcagcaccagcagccacagcctgcagaagtactacatcaccggcgaggccgagggcttccccgccaccgtgtag

SEQ ID NO: 10544 - DNA, 933 bp, synthetic construct
  misc_feature 1..933: note = Description of Artificial Sequence: Synthetic coding sequence
  source 1..933: mol_type = other DNA
atggccatggagagcgccaaggagaccagatactgcgccgtgtgcaacgactacgccagcggctaccactacggcgtgtggagctgcgagggctgcaaggccttcttcaagagaagcatccagggccacaacgactacatgtgccccgccaccaaccagtgcaccatcgacaagaacagaagaaagagctgccaggcctgcagactgagaaagtgctacgaggtgggcatgatgaagggcggcatcagaaaggacagaagaggcggcagaatgctgaagcacaagagacagagagacgacggcgagggcagaggcgaggtgggcagcgccggcgacatgagagccgccaacctgtggcccagccccctgatgatcaagagaagcaagaagaacagcctggccctgagcctgaccgccgaccagatggtgagcgccctgctggacgccgagccccccatcctgtacagcgagtacgaccccaccagacccttcagcgaggccagcatgatgggcctgctgaccaacctggccgacagagagctggtgcacatgatcaactgggccaagagagtgcccggcttcgtggacctgaccctgcacgaccaggtgcacctgctggagtgcgcctggctggagatcctgatgatcggcctggtgtggagaagcatggagcaccccggcaagctgctgttcgcccccaacctgctgctggacagaaaccagggcaagtgcgtggagggcatggtggagatcttcgacatgctgctggccaccagcagcagattcagaatgatgaacctgcagggcgaggagttcgtgtgcctgaagagcatcatcctgctgaacagcggcatcagccacgtggaggccaagaagagaatcctgaacctgcaccccaagatcttcggcaacaagtggttccccagagtgtag

SEQ ID NO: 10545 - DNA, 1320 bp, synthetic construct
  misc_feature 1..1320: note = Description of Artificial Sequence: Synthetic coding sequence
  source 1..1320: mol_type = other DNA
atggacatcaagaacagccccagcagcctgaacagccccagcagctacaactgcagccagagcatcctgcccctggagcacggcagcatctacatccccagcagctacgtggacagccaccacgagtaccccgccatgaccttctacagccccgccgtgatgaactacagcatccccagcaacgtgaccaacctggagggcggccccggcagacagaccaccagccccaacgtgctgtggcccacccccggccacctgagccccctggtggtgcacagacagctgagccacctgtacgccgagccccagaagagcccctggtgcgaggccagaagcctggagcacaccctgcccgtgaacagagagaccctgaagagaaaggtgagcggcaacagatgcgccagccccgtgaccggccccggcagcaagagagacgcccacttctgcgccgtgtgcagcgactacgccagcggctaccactacggcgtgtggagctgcgagggctgcaaggccttcttcaagagaagcatccagggccacaacgactacatctgccccgccaccaaccagtgcaccatcgacaagaacagaagaaagagctgccaggcctgcagactgagaaagtgctacgaggtgggcatggtgaagtgcggcagcagaagagagagatgcggctacagactggtgagaagacagagaagcgccgacgagcagctgcactgcgccggcaaggccaagagaagcggcggccacgcccccagagtgagagagctgctgctggacgccctgagccccgagcagctggtgctgaccctgctggaggccgagcccccccacgtgctgatcagcagacccagcgcccccttcaccgaggccagcatgatgatgagcctgaccaagctggccgacaaggagctggtgcacatgatcagctgggccaagaagatccccggcatgtaccccctggtgaccgccacccaggacgccgacagcagcagaaagctggcccacctgctgaacgccgtgaccgacgccctggtgtgggtgatcgccaagagcggcatcagcagccagcagcagagcatgagactggccaacctgctgatgctgctgagccacgtgagacacgccagcaacaagggcatggagcacctgctgaacatgaagtgcaagaacgtggtgcccgtgtacgacctgctgctggagatgctgaacgcccacgtgctgagaggctgcaagagcagcatcaccggcagcgagtgcagccccgccgaggacagcaagagcaaggagggcagccagaacccccagagccagtag

SEQ ID NO: 10546 - DNA, 1593 bp, synthetic construct
  misc_feature 1..1593: note = Description of Artificial Sequence: Synthetic coding sequence
  source 1..1593: mol_type = other DNA
atggacatcaagaacagccccagcagcctgaacagccccagcagctacaactgcagccagagcatcctgcccctggagcacggcagcatctacatccccagcagctacgtggacagccaccacgagtaccccgccatgaccttctacagccccgccgtgatgaactacagcatccccagcaacgtgaccaacctggagggcggccccggcagacagaccaccagccccaacgtgctgtggcccacccccggccacctgagccccctggtggtgcacagacagctgagccacctgtacgccgagccccagaagagcccctggtgcgaggccagaagcctggagcacaccctgcccgtgaacagagagaccctgaagagaaaggtgagcggcaacagatgcgccagccccgtgaccggccccggcagcaagagagacgcccacttctgcgccgtgtgcagcgactacgccagcggctaccactacggcgtgtggagctgcgagggctgcaaggccttcttcaagagaagcatccagggccacaacgactacatctgccccgccaccaaccagtgcaccatcgacaagaacagaagaaagagctgccaggcctgcagactgagaaagtgctacgaggtgggcatggtgaagtgcggcagcagaagagagagatgcggctacagactggtgagaagacagagaagcgccgacgagcagctgcactgcgccggcaaggccaagagaagcggcggccacgcccccagagtgagagagctgctgctggacgccctgagccccgagcagctggtgctgaccctgctggaggccgagcccccccacgtgctgatcagcagacccagcgcccccttcaccgaggccagcatgatgatgagcctgaccaagctggccgacaaggagctggtgcacatgatcagctgggccaagaagatccccggcttcgtggagctgagcctgttcgaccaggtgagactgctggagagctgctggatggaggtgctgatgatgggcctgatgtggagaagcatcgaccaccccggcaagctgatcttcgcccccgacctggtgctggacagagacgagggcaagtgcgtggagggcatcctggagatcttcgacatgctgctggccaccaccagcagattcagagagctgaagctgcagcacaaggagtacctgtgcgtgaaggccatgatcctgctgaacagcagcatgtaccccctggtgaccgccacccaggacgccgacagcagcagaaagctggcccacctgctgaacgccgtgaccgacgccctggtgtgggtgatcgccaagagcggcatcagcagccagcagcagagcatgagactggccaacctgctgatgctgctgagccacgtgagacacgccagcaacaagggcatggagcacctgctgaacatgaagtgcaagaacgtggtgcccgtgtacgacctgctgctggagatgctgaacgcccacgtgctgagaggctgcaagagcagcatcaccggcagcgagtgcagccccgccgaggacagcaagagcaaggagggcagccagaacccccagagccagtag

SEQ ID NO: 10547 - DNA, 1488 bp, synthetic construct
  misc_feature 1..1488: note = Description of Artificial Sequence: Synthetic coding sequence
  source 1..1488: mol_type = other DNA
atggacatcaagaacagccccagcagcctgaacagccccagcagctacaactgcagccagagcatcctgcccctggagcacggcagcatctacatccccagcagctacgtggacagccaccacgagtaccccgccatgaccttctacagccccgccgtgatgaactacagcatccccagcaacgtgaccaacctggagggcggccccggcagacagaccaccagccccaacgtgctgtggcccacccccggccacctgagccccctggtggtgcacagacagctgagccacctgtacgccgagccccagaagagcccctggtgcgaggccagaagcctggagcacaccctgcccgtgaacagagagaccctgaagagaaaggtgagcggcaacagatgcgccagccccgtgaccggccccggcagcaagagagacgcccacttctgcgccgtgtgcagcgactacgccagcggctaccactacggcgtgtggagctgcgagggctgcaaggccttcttcaagagaagcatccagggccacaacgactacatctgccccgccaccaaccagtgcaccatcgacaagaacagaagaaagagctgccaggcctgcagactgagaaagtgctacgaggtgggcatggtgaagtgcggcagcagaagagagagatgcggctacagactggtgagaagacagagaagcgccgacgagcagctgcactgcgccggcaaggccaagagaagcggcggccacgcccccagagtgagagagctgctgctggacgccctgagccccgagcagctggtgctgaccctgctggaggccgagcccccccacgtgctgatcagcagacccagcgcccccttcaccgaggccagcatgatgatgagcctgaccaagctggccgacaaggagctggtgcacatgatcagctgggccaagaagatccccggcttcgtggagctgagcctgttcgaccaggtgagactgctggagagctgctggatggaggtgctgatgatgggcctgatgtggagaagcatcgaccaccccggcaagctgatcttcgcccccgacctggtgctggacagagacgagggcaagtgcgtggagggcatcctggagatcttcgacatgctgctggccaccaccagcagattcagagagctgaagctgcagcacaaggagtacctgtgcgtgaaggccatgatcctgctgaacagcagcatgtaccccctggtgaccgccacccaggacgccgacagcagcagaaagctggcccacctgctgaacgccgtgaccgacgccctggtgtgggtgatcgccaagagcggcatcagcagccagcagcagagcatgagactggccaacctgctgatgctgctgagccacgtgagacacgccagagccgagaaggccagccagaccctgaccagcttcggcatgaagatggagaccctgctgcccgaggccaccatggagcagtag

SEQ ID NO: 10548 - DNA, 1446 bp, synthetic construct
  misc_feature 1..1446: note = Description of Artificial Sequence: Synthetic coding sequence
  source 1..1446: mol_type = other DNA
atggacatcaagaacagccccagcagcctgaacagccccagcagctacaactgcagccagagcatcctgcccctggagcacggcagcatctacatccccagcagctacgtggacagccaccacgagtaccccgccatgaccttctacagccccgccgtgatgaactacagcatccccagcaacgtgaccaacctggagggcggccccggcagacagaccaccagccccaacgtgctgtggcccacccccggccacctgagccccctggtggtgcacagacagctgagccacctgtacgccgagccccagaagagcccctggtgcgaggccagaagcctggagcacaccctgcccgtgaacagagagaccctgaagagaaaggtgagcggcaacagatgcgccagccccgtgaccggccccggcagcaagagagacgcccacttctgcgccgtgtgcagcgactacgccagcggctaccactacggcgtgtggagctgcgagggctgcaaggccttcttcaagagaagcatccagggccacaacgactacatctgccccgccaccaaccagtgcaccatcgacaagaacagaagaaagagctgccaggcctgcagactgagaaagtgctacgaggtgggcatggtgaagtgcggcagcagaagagagagatgcggctacagactggtgagaagacagagaagcgccgacgagcagctgcactgcgccggcaaggccaagagaagcggcggccacgcccccagagtgagagagctgctgctggacgccctgagccccgagcagctggtgctgaccctgctggaggccgagcccccccacgtgctgatcagcagacccagcgcccccttcaccgaggccagcatgatgatgagcctgaccaagctggccgacaaggagctggtgcacatgatcagctgggccaagaagatccccggcttcgtggagctgagcctgttcgaccaggtgagactgctggagagctgctggatggaggtgctgatgatgggcctgatgtggagaagcatcgaccaccccggcaagctgatcttcgcccccgacctggtgctggacagagacgagggcaagtgcgtggagggcatcctggagatcttcgacatgctgctggccaccaccagcagattcagagagctgaagctgcagcacaaggagtacctgtgcgtgaaggccatgatcctgctgaacagcagcatgtaccccctggtgaccgccacccaggacgccgacagcagcagaaagctggcccacctgctgaacgccgtgaccgacgccctggtgtgggtgatcgccaagagcggcatcagcagccagcagcagagcatgagactggccaacctgctgatgctgctgagccacgtgagacacgccagatggggcgagaagcagttcatccacctgaagctgagctag

SEQ ID NO: 10549 - DNA, 1488 bp, synthetic construct; identical to SEQ ID NO: 10547
  misc_feature 1..1488: note = Description of Artificial Sequence: Synthetic coding sequence
  source 1..1488: mol_type = other DNA

SEQ ID NO: 10550 - DNA, 1542 bp, synthetic construct
  misc_feature 1..1542: note = Description of Artificial Sequence: Synthetic coding sequence
  source 1..1542: mol_type = other DNA
atggacatcaagaacagccccagcagcctgaacagccccagcagctacaactgcagccagagcatcctgcccctggagcacggcagcatctacatccccagcagctacgtggacagccaccacgagtaccccgccatgaccttctacagccccgccgtgatgaactacagcatccccagcaacgtgaccaacctggagggcggccccggcagacagaccaccagccccaacgtgctgtggcccacccccggccacctgagccccctggtggtgcacagacagctgagccacctgtacgccgagccccagaagagcccctggtgcgaggccagaagcctggagcacaccctgcccgtgaacagagagaccctgaagagaaaggtgagcggcaacagatgcgccagccccgtgaccggccccggcagcaagagagacgcccacttctgcgccgtgtgcagcgactacgccagcggctaccactacggcgtgtggagctgcgagggctgcaaggccttcttcaagagaagcatccagggccacaacgactacatctgccccgccaccaaccagtgcaccatcgacaagaacagaagaaagagctgccaggcctgcagactgagaaagtgctacgaggtgggcatggtgaagtgcggcagcagaagagagagatgcggctacagactggtgagaagacagagaagcgccgacgagcagctgcactgcgccggcaaggccaagagaagcggcggccacgcccccagagtgagagagctgctgctggacgccctgagccccgagcagctggtgctgaccctgctggaggccgagcccccccacgtgctgatcagcagacccagcgcccccttcaccgaggccagcatgatgatgagcctgaccaagctggccgacaaggagctggtgcacatgatcagctgggccaagaagatccccggcttcgtggagctgagcctgttcgaccaggtgagactgctggagagctgctggatggaggtgctgatgatgggcctgatgtggagaagcatcgaccaccccggcaagctgatcttcgcccccgacctggtgctggacagagacgagggcaagtgcgtggagggcatcctggagatcttcgacatgctgctggccaccaccagcagattcagagagctgaagctgcagcacaaggagtacctgtgcgtgaaggccatgatcctgctgaacagcagcatgtaccccctggtgaccgccacccaggacgccgacagcagcagaaagctggcccacctgctgaacgccgtgaccgacgccctggtgtgggtgatcgccaagagcggcatcagcagccagcagcagagcatgagactggccaacctgctgatgctgctgagccacgtgagacacgccagcagcctgagcctgagctggagactgttcatgctgagagaggccagctgccacggcgtgagacagacccccggcggcgcccacgtgagcgtgagcagaagcagaagcttcgaggcctgccagcagcccagagagtag

SEQ ID NO: 10551 - DNA, 1488 bp, synthetic construct; identical to SEQ ID NO: 10547
  misc_feature 1..1488: note = Description of Artificial Sequence: Synthetic coding sequence
  source 1..1488: mol_type = other DNA

SEQ ID NO: 10552 - DNA, 1419 bp, synthetic construct
  misc_feature 1..1419: note = Description of Artificial Sequence: Synthetic coding sequence
  source 1..1419: mol_type = other DNA
atggacatcaagaacagccccagcagcctgaacagccccagcagctacaactgcagccagagcatcctgcccctggagcacggcagcatctacatccccagcagctacgtggacagccaccacgagtaccccgccatgaccttctacagccccgccgtgatgaactacagcatccccagcaacgtgaccaacctggagggcggccccggcagacagaccaccagccccaacgtgctgtggcccacccccggccacctgagccccctggtggtgcacagacagctgagccacctgtacgccgagccccagaagagcccctggtgcgaggccagaagcctggagcacaccctgcccgtgaacagagagaccctgaagagaaaggtgagcggcaacagatgcgccagccccgtgaccggccccggcagcaagagagacgcccacttctgcgccgtgtgcagcgactacgccagcggctaccactacggcgtgtggagctgcgagggctgcaaggccttcttcaagagaagcatccagggccacaacgactacatctgccccgccaccaaccagtgcaccatcgacaagaacagaagaaagagctgccaggcctgcagactgagaaagtgctacgaggtgggcatggtgaagtgcggcagcagaagagagagatgcggctacagactggtgagaagacagagaagcgccgacgagcagctgcactgcgccggcaaggccaagagaagcggcggccacgcccccagagtgagagagctgctgctggacgccctgagccccgagcagctggtgctgaccctgctggaggccgagcccccccacgtgctgatcagcagacccagcgcccccttcaccgaggccagcatgatgatgagcctgaccaagctggccgacaaggagctggtgcacatgatcagctgggccaagaagatccccggcttcgtggagctgagcctgttcgaccaggtgagactgctggagagctgctggatggaggtgctgatgatgggcctgatgtggagaagcatcgaccaccccggcaagctgatcttcgcccccgacctggtgctggacagagacgagggcaagtgcgtggagggcatcctggagatcttcgacatgctgctggccaccaccagcagattcagagagctgaagctgcagcacaaggagtacctgtgcgtgaaggccatgatcctgctgaacagcagcatgtaccccctggtgaccgccacccaggacgccgacagcagcagaaagctggcccacctgctgaacgccgtgaccgacgccctggtgtgggtgatcgccaagagcggcatcagcagccagcagcagagcatgagactggccaacctgctgatgctgctgagccacgtgagacacgccagatacgccccctag

SEQ ID NO: 10553 - DNA, 1446 bp, synthetic construct; identical to SEQ ID NO: 10548
  misc_feature 1..1446: note = Description of Artificial Sequence: Synthetic coding sequence
  source 1..1446: mol_type = other DNA

SEQ ID NO: 10554 - DNA, 1380 bp, synthetic construct
  misc_feature 1..1380: note = Description of Artificial Sequence: Synthetic coding sequence
  source 1..1380: mol_type = other DNA
atggacggcttctacgaccagcaggtgccctacatggtgaccaacagccagagaggcagaaactgcaacgagaagcccaccaacgtgagaaagagaaagttcatcaacagagacctggcccacgacagcgaggagctgttccaggacctgagccagctgcaggagacctggctggccgaggtggccttccacggcctgcccctgaagatcaagaaggagccccacagcccctgcagcgagatcagcagcgcctgcagccaggagcagcccttcaagttcagctacggcgagaagtgcctgtacaacgtgagcgcctacgaccagaagccccaggtgggcatgagacccagcaacccccccacccccagcagcacccccgtgagccccctgcaccacgccagccccaacagcacccacacccccaagcccgacagagccttccccgcccacctgccccccagccagagcatccccgacagcagctaccccatggaccacagattcagaagacagctgagcgagccctgcaacagcttcccccccctgcccaccatgcccagagagggcagacccatgtaccagagacagatgagcgagcccaacatccccttccccccccagggcttcaagcaggagtaccacgaccccgtgtacgagcacaacaccatggtgggcagcgccgccagccagagcttccccccccccctgatgatcaagcaggagcccagagacttcgcctacgacagcgaggtgcccagctgccacagcatctacatgagacaggagggcttcctggcccaccccagcagaaccgagggctgcatgttcgagaagggccccagacagttctacgacgacacctgcgtggtgcccgagaagttcgacggcgacatcaagcaggagcccggcatgtacagagagggccccacctaccagagaagaggcagcctgcagctgtggcagttcctggtggccctgctggacgaccccagcaacagccacttcatcgcctggaccggcagaggcatggagttcaagctgatcgagcccgaggaggtggccagaagatggggcatccagaagaacagacccgccatgaactacgacaagctgagcagaagcctgagatactactacgagaagggcatcatgcagaaggtggccggcgagagatacgtgtacaagttcgtgtgcgaccccgaggccctgttcagcatggccttccccgacaaccagagacccctgctgaagaccgacatggagagacacatcaacgaggaggacaccgtgcccctgagccacttcgacgagagcatggcctacatgcccgagggcggctgctgcaacccccacccctacaacgagggctacgtgtactag

SEQ ID NO: 10555 - DNA, 1380 bp, synthetic construct; identical to SEQ ID NO: 10554
  misc_feature 1..1380: note = Description of Artificial Sequence: Synthetic coding sequence
  source 1..1380: mol_type = other DNA

SEQ ID NO: 10556 - DNA, 1125 bp, synthetic construct
  misc_feature 1..1125: note = Description of Artificial Sequence: Synthetic coding sequence
  source 1..1125: mol_type = other DNA
atgctgcaggacctgagcgccagcgtgttcttccccccctgcagccagcacagaaccctggcccaggtgcccgacaacgacgagcagttcgtgcccgactaccaggccgagagcctggccttccacggcctgcccctgaagatcaagaaggagccccacagcccctgcagcgagatcagcagcgcctgcagccaggagcagcccttcaagttcagctacggcgagaagtgcctgtacaacgtgagattcagaagacagctgagcgagccctgcaacagcttcccccccctgcccaccatgcccagagagggcagacccatgtaccagagacagatgagcgagcccaacatccccttccccccccagggcttcaagcaggagtaccacgaccccgtgtacgagcacaacaccatggtgggcagcgccgccagccagagcttccccccccccctgatgatcaagcaggagcccagagacttcgcctacgacagcgaggtgcccagctgccacagcatctacatgagacaggagggcttcctggcccaccccagcagaaccgagggctgcatgttcgagaagggccccagacagttctacgacgacacctgcgtggtgcccgagaagttcgacggcgacatcaagcaggagcccggcatgtacagagagggccccacctaccagagaagaggcagcctgcagctgtggcagttcctggtggccctgctggacgaccccagcaacagccacttcatcgcctggaccggcagaggcatggagttcaagctgatcgagcccgaggaggtggccagaagatggggcatccagaagaacagacccgccatgaactacgacaagctgagcagaagcctgagatactactacgagaagggcatcatgcagaaggtggccggcgagagatacgtgtacaagttcgtgtgcgaccccgaggccctgttcagcatggccttccccgacaaccagagacccctgctgaagaccgacatggagagacacatcaacgaggaggacaccgtgcccctgagccacttcgacgagagcatggcctacatgcccgagggcggctgctgcaacccccacccctacaacgagggctacgtgtactag

SEQ ID NO: 10557 - DNA, 1380 bp, synthetic construct; identical to SEQ ID NO: 10554
  misc_feature 1..1380: note = Description of Artificial Sequence: Synthetic coding sequence
  source 1..1380: mol_type = other DNA

SEQ ID NO: 10558 - DNA, 1434 bp, synthetic construct
  misc_feature 1..1434: note = Description of Artificial Sequence: Synthetic coding sequence
  source 1..1434: mol_type = other DNA
atggacggcttctacgaccagcaggtgccctacatggtgaccaacagccagagaggcagaaactgcaacgagaagcccaccaacgtgagaaagagaaagttcatcaacagagacctggcccacgacagcgaggagctgttccaggacctgagccagctgcaggagacctggctggccgaggcccaggtgcccgacaacgacgagcagttcgtgcccgactaccaggccgagagcctggccttccacggcctgcccctgaagatcaagaaggagccccacagcccctgcagcgagatcagcagcgcctgcagccaggagcagcccttcaagttcagctacggcgagaagtgcctgtacaacgtgagcgcctacgaccagaagccccaggtgggcatgagacccagcaacccccccacccccagcagcacccccgtgagccccctgcaccacgccagccccaacagcacccacacccccaagcccgacagagccttccccgcccacctgccccccagccagagcatccccgacagcagctaccccatggaccacagattcagaagacagctgagcgagccctgcaacagcttcccccccctgcccaccatgcccagagagggcagacccatgtaccagagacagatgagcgagcccaacatccccttccccccccagggcttcaagcaggagtaccacgaccccgtgtacgagcacaacaccatggtgggcagcgccgccagccagagcttccccccccccctgatgatcaagcaggagcccagagacttcgcctacgacagcgaggtgcccagctgccacagcatctacatgagacaggagggcttcctggcccaccccagcagaaccgagggctgcatgttcgagaagggccccagacagttctacgacgacacctgcgtggtgcccgagaagttcgacggcgacatcaagcaggagcccggcatgtacagagagggccccacctaccagagaagaggcagcctgcagctgtggcagttcctggtggccctgctggacgaccccagcaacagccacttcatcgcctggaccggcagaggcatggagttcaagctgatcgagcccgaggaggtggccagaagatggggcatccagaagaacagacccgccatgaactacgacaagctgagcagaagcctgagatactactacgagaagggcatcatgcagaaggtggccggcgagagatacgtgtacaagttcgtgtgcgaccccgaggccctgttcagcatggccttccccgacaaccagagacccctgctgaagaccgacatggagagacacatcaacgaggaggacaccgtgcccctgagccacttcgacgagagcatggcctacatgcccgagggcggctgctgcaacccccacccctacaacgagggctacgtgtactag

SEQ ID NO: 10559 - DNA, 1260 bp, synthetic construct
  misc_feature 1..1260: note = Description of Artificial Sequence: Synthetic coding sequence
  source 1..1260: mol_type = other DNA
atgctgcaggacctgagcgccagcgtgttcttccccccctgcagccagcacagaaccctggtggccttccacggcctgcccctgaagatcaagaaggagccccacagcccctgcagcgagatcagcagcgcctgcagccaggagcagcccttcaagttcagctacggcgagaagtgcctgtacaacgtgagcgcctacgaccagaagccccaggtgggcatgagacccagcaacccccccacccccagcagcacccccgtgagccccctgcaccacgccagccccaacagcacccacacccccaagcccgacagagccttccccgcccacctgccccccagccagagcatccccgacagcagctaccccatggaccacagattcagaagacagctgagcgagccctgcaacagcttcccccccctgcccaccatgcccagagagggcagacccatgtaccagagacagatgagcgagcccaacatccccttccccccccagggcttcaagcaggagtaccacgaccccgtgtacgagcacaacaccatggtgggcagcgccgccagccagagcttccccccccccctgatgatcaagcaggagcccagagacttcgcctacgacagcgaggtgcccagctgccacagcatctacatgagacaggagggcttcctggcccaccccagcagaaccgagggctgcatgttcgagaagggccccagacagttctacgacgacacctgcgtggtgcccgagaagttcgacggcgacatcaagcaggagcccggcatgtacagagagggccccacctaccagagaagaggcagcctgcagctgtggcagttcctggtggccctgctggacgaccccagcaacagccacttcatcgcctggaccggcagaggcatggagttcaagctgatcgagcccgaggaggtggccagaagatggggcatccagaagaacagacccgccatgaactacgacaagctgagcagaagcctgagatactactacgagaagggcatcatgcagaaggtggccggcgagagatacgtgtacaagttcgtgtgcgaccccgaggccctgttcagcatggccttccccgacaaccagagacccctgctgaagaccgacatggagagacacatcaacgaggaggacaccgtgcccctgagccacttcgacgagagcatggcctacatgcccgagggcggctgctgcaacccccacccctacaacgagggctacgtgtactag

SEQ ID NO: 10560 - DNA, 372 bp, synthetic construct
  misc_feature 1..372: note = Description of Artificial Sequence: Synthetic coding sequence
  source 1..372: mol_type = other DNA
atggacggcttctacgaccagcaggtgccctacatggtgaccaacagccagagaggcagaaactgcaacgagaagcccaccaacgtgagaaagagaaagttcatcaacagagacctggcccacgacagcgaggagctgttccaggacctgagccagctgcaggagacctggctggccgaggcccaggtgcccgacaacgacgagcagttcgtgcccgactaccaggccgagagcctggccttccacggcctgcccctgaagatcaagaaggagccccacagcccctgcagcgagatcagcagcgcctgcagccaggagcagcccttcaagttcagctacggcgagaagtgcctgtacaacgtgagcgcctag

SEQ ID NO: 10561 - DNA, 1434 bp, synthetic construct; identical to SEQ ID NO: 10558
  misc_feature 1..1434: note = Description of Artificial Sequence: Synthetic coding sequence
  source 1..1434: mol_type = other DNA

SEQ ID NO: 10562 - DNA, 288 bp, synthetic construct
  misc_feature 1..288: note = Description of Artificial Sequence: Synthetic coding sequence
  source 1..288: mol_type = other DNA
atggacggcttctacgaccagcaggtgccctacatggtgaccaacagccagagaggcagaaactgcaacgagaagcccaccaacgtgagaaagagaaagttcatcaacagagacctggcccacgacagcgaggagctgttccaggacctgagccagctgcaggagacctggctggccgaggcccaggtgcccgacaacgacgagcagttcgtgcccgactaccaggccgagagcctggccttccacggcctgcccctgaagatcaagaaggagccccacagcccctag

SEQ ID NO: 10563 - DNA, 63 bp, synthetic construct
  misc_feature 1..63: note = Description of Artificial Sequence: Synthetic coding sequence
  source 1..63: mol_type = other DNA
atggacggcttctacgaccagcaggtgccctacatggtgaccaacagccagagaggcagatag

SEQ ID NO: 10564 - DNA, 1314 bp, synthetic construct
  misc_feature 1..1314: note = Description of Artificial Sequence: Synthetic coding sequence
  source 1..1314: mol_type = other DNA
atgctgcaggacctgagcgccagcgtgttcttccccccctgcagccagcacagaaccctggcccaggtgcccgacaacgacgagcagttcgtgcccgactaccaggccgagagcctggccttccacggcctgcccctgaagatcaagaaggagccccacagcccctgcagcgagatcagcagcgcctgcagccaggagcagcccttcaagttcagctacggcgagaagtgcctgtacaacgtgagcgcctacgaccagaagccccaggtgggcatgagacccagcaacccccccacccccagcagcacccccgtgagccccctgcaccacgccagccccaacagcacccacacccccaagcccgacagagccttccccgcccacctgccccccagccagagcatccccgacagcagctaccccatggaccacagattcagaagacagctgagcgagccctgcaacagcttcccccccctgcccaccatgcccagagagggcagacccatgtaccagagacagatgagcgagcccaacatccccttccccccccagggcttcaagcaggagtaccacgaccccgtgtacgagcacaacaccatggtgggcagcgccgccagccagagcttccccccccccctgatgatcaagcaggagcccagagacttcgcctacgacagcgaggtgcccagctgccacagcatctacatgagacaggagggcttcctggcccaccccagcagaaccgagggctgcatgttcgagaagggccccagacagttctacgacgacacctgcgtggtgcccgagaagttcgacggcgacatcaagcaggagcccggcatgtacagagagggccccacctaccagagaagaggcagcctgcagctgtggcagttcctggtggccctgctggacgaccccagcaacagccacttcatcgcctggaccggcagaggcatggagttcaagctgatcgagcccgaggaggtggccagaagatggggcatccagaagaacagacccgccatgaactacgacaagctgagcagaagcctgagatactactacgagaagggcatcatgcagaaggtggccggcgagagatacgtgtacaagttcgtgtgcgaccccgaggccctgttcagcatggccttccccgacaaccagagacccctgctgaagaccgacatggagagacacatcaacgaggaggacaccgtgcccctgagccacttcgacgagagcatggcctacatgcccgagggcggctgctgcaacccccacccctacaacgagggctacgtgtactag

SEQ ID NO: 10565 - DNA, 1365 bp, synthetic construct
  misc_feature 1..1365: note = Description of Artificial Sequence: Synthetic coding sequence
  source 1..1365: mol_type = other DNA
atggacggcttctacgaccagcaggtgccctacatggtgaccaacagccagagaggcagaaactgcaacgagaagcccaccaacgtgagaaagagaaagttcatcaacagagacctggcccacgacagcgaggagctgttccaggacctgagccagctgcaggagacctggctggccgaggcccaggtgcccgacaacgacgagcagttcgtgcccgactaccaggccgagagcctggccttccacggcctgcccctgaagatcaagaaggagccccacagcccctgcagcgagatcagcagcgcctgcagccaggagcagcccttcaagttcagctacggcgagaagtgcctgtacaacgtgagcgcctacgaccagaagccccaggtgggcatgagacccagcaacccccccacccccagcagcacccccgtgagccccctgcaccacgccagccccaacagcacccacacccccaagcccgacagagccttccccgcccacctgccccccagccagagcatccccgacagcagctaccccatggaccacagattcagaagacagctgagcgagccctgcaacagcttcccccccctgcccaccatgcccagagagggcagacccatgtaccagagacagatgagcgagcccaacatccccttccccccccagggcttcaagcaggagtaccacgaccccgtgtacgagcacaacaccatggtgggcagcgccgccagccagagcttccccccccccctgatgatcaagcaggagcccagagacttcgcctacgacagcggctgcatgttcgagaagggccccagacagttctacgacgacacctgcgtggtgcccgagaagttcgacggcgacatcaagcaggagcccggcatgtacagagagggccccacctaccagagaagaggcagcctgcagctgtggcagttcctggtggccctgctggacgaccccagcaacagccacttcatcgcctggaccggcagaggcatggagttcaagctgatcgagcccgaggaggtggccagaagatggggcatccagaagaacagacccgccatgaactacgacaagctgagcagaagcctgagatactactacgagaagggcatcatgcagaaggtggccggcgagagatacgtgtacaagttcgtgtgcgaccccgaggccctgttcagcatggccttccccgacaaccagagacccctgctgaagaccgacatggagagacacatcaacgaggaggacaccgtgcccctgagccacttcgacgagagcatggcctacatgcccgagggcggctgctgcaacccccacccctacaacgagggctacgtgtactag

SEQ ID NO: 10566 - DNA, 1455 bp, synthetic construct
  misc_feature 1..1455: note = Description of Artificial Sequence: Synthetic coding sequence
  source 1..1455: mol_type = other DNA
atggagagaagaatgaaggccggctacctggaccagcaggtgccctacaccttcagcagcaagagccccggcaacggcagcctgagagaggccctgatcggccccctgggcaagctgatggaccccggcagcctgccccccctggacagcgaggacctgttccaggacctgagccacttccaggagacctggctggccgaggcccaggtgcccgacagcgacgagcagttcgtgcccgacttccacagcgagaacctggccttccacagccccaccaccagaatcaagaaggagccccagagccccagaaccgaccccgccctgagctgcagcagaaagccccccctgccctaccaccacggcgagcagtgcctgtacagcagcgcctacgacccccccagacagatcgccatcaagagccccgcccccggcgccctgggccagagccccctgcagcccttccccagagccgagcagagaaacttcctgagaagcagcggcaccagccagccccaccccggccacggctacctgggcgagcacagcagcgtgttccagcagcccctggacatctgccacagcttcaccagccagggcggcggcagagagcccctgcccgccccctaccagcaccagctgagcgagccctgccccccctacccccagcagagcttcaagcaggagtaccacgaccccctgtacgagcaggccggccagcccgccgtggaccagggcggcgtgaacggccacagataccccggcgccggcgtggtgatcaagcaggagcagaccgacttcgcctacgacagcgacgtgaccggctgcgccagcatgtacctgcacaccgagggcttcagcggccccagccccggcgacggcgccatgggctacggctacgagaagcccctgagacccttccccgacgacgtgtgcgtggtgcccgagaagttcgagggcgacatcaagcaggagggcgtgggcgccttcagagagggccccccctaccagagaagaggcgccctgcagctgtggcagttcctggtggccctgctggacgaccccaccaacgcccacttcatcgcctggaccggcagaggcatggagttcaagctgatcgagcccgaggaggtggccagactgtggggcatccagaagaacagacccgccatgaactacgacaagctgagcagaagcctgagatactactacgagaagggcatcatgcagaaggtggccggcgagagatacgtgtacaagttcgtgtgcgagcccgaggccctgttcagcctggccttccccgacaaccagagacccgccctgaaggccgagttcgacagacccgtgagcgaggaggacaccgtgcccctgagccacctggacgagagccccgcctacctgcccgagctggccggccccgcccagcccttcggccccaagggcggctacagctactag

SEQ ID NO: 10567 - DNA, 1455 bp, synthetic construct; identical to SEQ ID NO: 10566
  misc_feature 1..1455: note = Description of Artificial Sequence: Synthetic coding sequence
  source 1..1455: mol_type = other DNA

SEQ ID NO: 10568 - DNA, 1338 bp, synthetic construct
  misc_feature 1..1338: note = Description of Artificial Sequence: Synthetic coding sequence
  source 1..1338: mol_type = other DNA
atggaccccggcagcctgccccccctggacagcgaggacctgttccaggacctgagccacttccaggagacctggctggccgaggcccaggtgcccgacagcgacgagcagttcgtgcccgacttccacagcgagaacctggccttccacagccccaccaccagaatcaagaaggagccccagagccccagaaccgaccccgccctgagctgcagcagaaagccccccctgccctaccaccacggcgagcagtgcctgtacagcagcgcctacgacccccccagacagatcgccatcaagagccccgcccccggcgccctgggccagagccccctgcagcccttccccagagccgagcagagaaacttcctgagaagcagcggcaccagccagccccaccccggccacggctacctgggcgagcacagcagcgtgttccagcagcccctggacatctgccacagcttcaccagccagggcggcggcagagagcccctgcccgccccctaccagcaccagctgagcgagccctgccccccctacccccagcagagcttcaagcaggagtaccacgaccccctgtacgagcaggccggccagcccgccgtggaccagggcggcgtgaacggccacagataccccggcgccggcgtggtgatcaagcaggagcagaccgacttcgcctacgacagcgacgtgaccggctgcgccagcatgtacctgcacaccgagggcttcagcggccccagccccggcgacggcgccatgggctacggctacgagaagcccctgagacccttccccgacgacgtgtgcgtggtgcccgagaagttcgagggcgacatcaagcaggagggcgtgggcgccttcagagagggccccccctaccagagaagaggcgccctgcagctgtggcagttcctggtggccctgctggacgaccccaccaacgcccacttcatcgcctggaccggcagaggcatggagttcaagctgatcgagcccgaggaggtggccagactgtggggcatccagaagaacagacccgccatgaactacgacaagctgagcagaagcctgagatactactacgagaagggcatcatgcagaaggtggccggcgagagatacgtgtacaagttcgtgtgcgagcccgaggccctgttcagcctggccttccccgacaaccagagacccgccctgaaggccgagttcgacagacccgtgagcgaggaggacaccgtgcccctgagccacctggacgagagccccgcctacctgcccgagctggccggccccgcccagcccttcggccccaagggcggctacagctactag

SEQ ID NO: 10569 - DNA, 1293 bp, synthetic construct
  misc_feature 1..1293: note = Description of Artificial Sequence: Synthetic coding sequence
  source 1..1293: mol_type = other DNA
atggagagaagaatgaaggccggctacctggaccagcaggtgccctacaccttcagcagcaagagccccggcaacggcagcctgagagaggccctgatcggccccctgggcaagctgatggaccccggcagcctgccccccctggacagcgaggacctgttccaggacctgagccacttccaggagacctggctggccgaggcccaggtgcccgacagcgacgagcagttcgtgcccgacttccacagcgagaacctggccttccacagccccaccaccagaatcaagaaggagccccagagccccagaaccgaccccgccctgagctgcagcagaaagccccccctgccctaccaccacggcgagcagtgcctgtacagcagcagcgtgttccagcagcccctggacatctgccacagcttcaccagccagggcggcggcagagagcccctgcccgccccctaccagcaccagctgagcgagccctgccccccctacccccagcagagcttcaagcaggagtaccacgaccccctgtacgagcaggccggccagcccgccgtggaccagggcggcgtgaacggccacagataccccggcgccggcgtggtgatcaagcaggagcagaccgacttcgcctacgacagcgacgtgaccggctgcgccagcatgtacctgcacaccgagggcttcagcggccccagccccggcgacggcgccatgggctacggctacgagaagcccctgagacccttccccgacgacgtgtgcgtggtgcccgagaagttcgagggcgacatcaagcaggagggcgtgggcgccttcagagagggccccccctaccagagaagaggcgccctgcagctgtggcagttcctggtggccctgctggacgaccccaccaacgcccacttcatcgcctggaccggcagaggcatggagttcaagctgatcgagcccgaggaggtggccagactgtggggcatccagaagaacagacccgccatgaactacgacaagctgagcagaagcctgagatactactacgagaagggcatcatgcagaaggtggccggcgagagatacgtgtacaagttcgtgtgcgagcccgaggccctgttcagcctggccttccccgacaaccagagacccgccctgaaggccgagttcgacagacccgtgagcgaggaggacaccgtgcccctgagccacctggacgagagccccgcctacctgcccgagctggccggccccgcccagcccttcggccccaagggcggctacagctactag

SEQ ID NO: 10570 - DNA, 1338 bp, synthetic construct; identical to SEQ ID NO: 10568
  misc_feature 1..1338: note = Description of Artificial Sequence: Synthetic coding sequence
  source 1..1338: mol_type = other DNA

SEQ ID NO: 10571 - DNA, 1791 bp, synthetic construct
  misc_feature 1..1791: note = Description of Artificial Sequence: Synthetic coding sequence
  source 1..1791: mol_type = other DNA
atggccggcagaagagtgaacgtgaacgtgggcgtgctgggccacatcgacagcggcaagaccgccctggccagagccctgagcaccaccgccagcaccgccgccttcgacaagcagccccagagcagagagagaggcatcaccctggacctgggcttcagctgcttcagcgtgcccctgcccgccagactgagaagcagcctgcccgagttccaggccgcccccgaggccgagcccgagcccggcgagcccctgctgcaggtgaccctggtggactgccccggccacgccagcctgatcagaaccatcatcggcggcgcccagatcatcgacctgatgatgctggtgatcgacgtgaccaagggcatgcagacccagagcgccgagtgcctggtgatcggccagatcgcctgccagaagctggtggtggtgctgaacaagatcgacctgctgcccgagggcaagagacaggccgccatcgacaagatgaccaagaagatgcagaagaccctggagaacaccaagttcagaggcgcccccatcatccccgtggccgccaagcccggcggccccgaggcccccgagaccgaggccccccagggcatccccgagctgatcgagctgctgaccagccagatcagcatccccaccagagaccccagcggccccttcctgatgagcgtggaccactgcttcagcatcaagggccagggcaccgtgatgaccggcaccatcctgagcggcagcatcagcctgggcgacagcgtggagatccccgccctgaaggtggtgaagaaggtgaagagcatgcagatgttccacatgcccatcaccagcgccatgcagggcgacagactgggcatctgcgtgacccagttcgaccccaagctgctggagagaggcctggtgtgcgcccccgagagcctgcacaccgtgcacgccgccctgatcagcgtggagaagatcccctacttcagaggccccctgcagaccaaggccaagttccacatcaccgtgggccacgagaccgtgatgggcagactgatgttcttcagccccgcccccgacaacttcgaccaggagcccatcctggacagcttcaacttcagccaggagtacctgttccaggagcagtacctgagcaaggacctgacccccgccgtgaccgacaacgacgaggccgacaagaaggccggccaggccaccgagggccactgccccagacagcagtgggccctggtggagttcgagaagcccgtgacctgccccagactgtgcctggtgatcggcagcagactggacgccgacatccacaccaacacctgcagactggccttccacggcatcctgctgcacggcctggaggacagaaactacgccgacagcttcctgcccagactgaaggtgtacaagctgaagcacaagcacggcctggtggagagagccatggacgactacagcgtgatcggcagaagcctgttcaagaaggagaccaacatccagctgttcgtgggcctgaaggtgcacctgagcaccggcgagctgggcatcatcgacagcgccttcggccagagcggcaagttcaagatccacatccccggcggcctgagccccgagagcaagaagatcctgacccccgccctgaagaagagagccagagccggcagaggcgaggccaccagacaggaggagagcgccgagagaagcgagcccagccagcacgtggtgctgagcctgaccttcaagagatacgtgttcgacacccacaagagaatggtgcagagcccctag

SEQ ID NO: 10572 - DNA, 1233 bp, synthetic construct
  misc_feature 1..1233: note = Description of Artificial Sequence: Synthetic coding sequence
  source 1..1233: mol_type = other DNA
atggccgccgagatccacagcagaccccagagcagcagacccgtgctgctgagcaagatcgagggccaccaggacgccgtgaccgccgccctgctgatccccaaggaggacggcgtgatcaccgccagcgaggacagaaccatcagagtgtggctgaagagagacagcggccagtactggcccagcatctaccacaccatggccagcccctgcagcgccatggcctaccaccacgacagcagaagaatcttcgtgggccaggacaacggcgccgtgatggagttccacgtgagcgaggacttcaacaagatgaacttcatcaagacctaccccgcccaccagaacagagtgagcgccatcatcttcagcctggccaccgagtgggtgatcagcaccggccacgacaagtgcgtgagctggatgtgcaccagaagcggcaacatgctgggcagacacttcttcaccagctgggccagctgcctgcagtacgacttcgacacccagtacgccttcgtgggcgactacagcggccagatcaccctgctgaagctggagcagaacacctgcagcgtgatcaccaccctgaagggccacgagggcagcgtggcctgcctgtggtgggaccccatccagagactgctgttcagcggcgccagcgacaacagcatcatcatgtgggacatcggcggcagaaagggcagaaccctgctgctgcagggccaccacgacaaggtgcagagcctgtgctacctgcagctgaccagacagctggtgagctgcagcagcgacggcggcatcgccgtgtggaacatggacgtgagcagagaggaggccccccagtggctggagagcgacagctgccagaagtgcgagcagcccttcttctggaacatcaagcagatgtgggacaccaagaccctgggcctgagacagcaccactgcagaaagtgcggccaggccgtgtgcggcaagtgcagcagcaagagaagcagctaccccgtgatgggcttcgagttccaggtgagagtgtgcgacagctgctacgacagcatcaaggacgaggacagaaccagcctggccaccttccacgagggcaagcacaacatcagccacatgagcatggacatcgccagaggcctgatggtgacctgcggcaccgacagaatcgtgaagatctgggacatgacccccgtggtgggctgcagcctggccaccggcttcagcccccactag

SEQ ID NO: 10573 - DNA, 1092 bp, synthetic construct
  misc_feature 1..1092: note = Description of Artificial Sequence: Synthetic coding sequence
  source 1..1092: mol_type = other DNA
atggccggcgacctgagcgccggcttcttcatggaggagctgaacacctacagacagaagcagggcgtggtgctgaagtaccaggagctgcccaacagcggccccccccacgacagaagattcaccttccaggtgatcatcgacggcagagagttccccgagggcgagggcagaagcaagaaggaggccaagaacgccgccgccaagctggccgtggagatcctgaacaaggagaagaaggccgtgagccccctgctgctgaccaccaccaacagcagcgagggcctgagcatgggcaactacatcggcctgatcaacagaatcgcccagaagaagagactgaccgtgaactacgagcagtgcgccagcggcgtgcacggccccgagggcttccactacaagtgcaagatgggccagaaggagtacagcatcggcaccggcagcaccaagcaggaggccaagcagctggccgccaagctggcctacctgcagatcctgagcgaggagaccagcgtgaagagcgactacctgagcagcggcagcttcgccaccacctgcgagagccagagcaacagcctggtgaccagcaccctggccagcgagagcagcagcgagggcgacttcagcgccgacaccagcgagatcaacagcaacagcgacagcctgaacagcagcagcctgctgatgaacggcctgagaaacaaccagagaaaggccaagagaagcctggcccccagattcgacctgcccgacatgaaggagaccaagtacaccgtggacaagagattcggcatggacttcaaggagatcgagctgatcggcagcggcggcttcggccaggtgttcaaggccaagcacagaatcgacggcaagacctacgtgatcaagagagtgaagtacaacaacgagagcaagaccaagtgcctgttcatccagatggagttctgcgacaagggcaccctggagcagtggatcgagaagagaagaggcgagaagctggacaaggtgctggccctggagctgttcgagcagatcaccaagggcgtggactacatccacagcaagaagaagaagaagaagaagaagaagtag

SEQ ID NO: 10574 - DNA, 309 bp, synthetic construct
  misc_feature 1..309: note = Description of Artificial Sequence: Synthetic coding sequence
  source 1..309: mol_type = other DNA
atggccggcgacctgagcgccggcttcttcatggaggagctgaacacctacagacagaagcagggcgtggtgctgaagtaccaggagctgcccaacagcggccccccccacgacagaagattcaccttccaggtgatcatcgacggcagagagttccccgagggcgagggcagaagcaagaaggaggccaagaacgccgccgccaagctggccgtggagatcctgaacaaggagaagaaggccgtgagccccctgctgctgaccaccaccaacagcagcgagggcctgagcatgggcaactacatctag

SEQ ID NO: 10575 - DNA, 1656 bp, synthetic construct
  misc_feature 1..1656: note = Description of Artificial Sequence: Synthetic coding sequence
  source 1..1656: mol_type = other DNA
atggccggcgacctgagcgccggcttcttcatggaggagctgaacacctacagacagaagcagggcgtggtgctgaagtaccaggagctgcccaacagcggccccccccacgacagaagattcaccttccaggtgatcatcgacggcagagagttccccgagggcgagggcagaagcaagaaggaggccaagaacgccgccgccaagctggccgtggagatcctgaacaaggagaagaaggccgtgagccccctgctgctgaccaccaccaacagcagcgagggcctgagcatgggcaactacatcggcctgatcaacagaatcgcccagaagaagagactgaccgtgaactacgagcagtgcgccagcggcgtgcacggccccgagggcttccactacaagtgcaagatgggccagaaggagtacagcatcggcaccggcagcaccaagcaggaggccaagcagctggccgccaagctggcctacctgcagatcctgagcgaggagaccagcgtgaagagcgactacctgagcagcggcagcttcgccaccacctgcgagagccagagcaacagcctggtgaccagcaccctggccagcgagagcagcagcgagggcgacttcagcgccgacaccagcgagatcaacagcaacagcgacagcctgaacagcagcagcctgctgatgaacggcctgagaaacaaccagagaaaggccaagagaagcctggcccccagattcgacctgcccgacatgaaggagaccaagtacaccgtggacaagagattcggcatggacttcaaggagatcgagctgatcggcagcggcggcttcggccaggtgttcaaggccaagcacagaatcgacggcaagacctacgtgatcaagagagtgaagtacaacaacgagaaggccgagagagaggtgaaggccctggccaagctggaccacgtgaacatcgtgcactacaacggctgctgggacggcttcgactacgaccccgagaccagcgacgacagcctggagagcagcgactacgaccccgagaacagcaagaacagcagcagaagcaagaccaagtgcctgttcatccagatggagttctgcgacaagggcaccctggagcagtggatcgagaagagaagaggcgagaagctggacaaggtgctggccctggagctgttcgagcagatcaccaagggcgtggactacatccacagcaagaagctgatccacagagacctgaagcccagcaacatcttcctggtggacaccaagcaggtgaagatcggcgacttcggcctggtgaccagcctgaagaacgacggcaagagaaccagaagcaagggcaccctgagatacatgagccccgagcagatcagcagccaggactacggcaaggaggtggacctgtacgccctgggcctgatcctggccgagctgctgcacgtgtgcgacaccgccttcgagaccagcaagttcttcaccgacctgagagacggcatcatcagcgacatcttcgacaagaaggagaagaccctgctgcagaagctgctgagcaagaagcccgaggacagacccaacaccagcgagatcctgagaaccctgaccgtgtggaagaagagccccgagaagaacgagagacacacctgctag

SEQ ID NO: 10576 - DNA, 351 bp, synthetic construct
  misc_feature 1..351: note = Description of Artificial Sequence: Synthetic coding sequence
  source 1..351: mol_type = other DNA
atggccggcgacctgagcgccggcttcttcatggaggagctgaacacctacagacagaagcagggcgtggtgctgaagtaccaggagctgcccaacagcggccccccccacgacagaagattcaccttccaggtgatcatcgacggcagagagttccccgagggcgagggcagaagcaagaaggaggccaagaacgccgccgccaagctggccgtggagatcctgaacaaggagaagaaggccgtgagccccctgctgctgaccaccaccaacagcagcgagggcctgagcatgggcaactacatcggcctgatcaacagaatcgcccagaagaagagactgaccgtgtag

SEQ ID NO: 10577 - DNA, 1533 bp, synthetic construct
  misc_feature 1..1533: note = Description of Artificial Sequence: Synthetic coding sequence
  source 1..1533: mol_type = other DNA
atggccggcgacctgagcgccggcttcttcatggaggagctgaacacctacagacagaagcagggcgtggtgctgaagtaccaggagctgcccaacagcggccccccccacgacagaagattcaccttccaggtgatcatcgacggcagagagttccccgagggcgagggcagaagcaagaaggaggccaagaacgccgccgccaagctggccgtggagatcctgaacaaggagaagaaggccgtgagccccctgctgctgaccaccaccaacagcagcgagggcctgagcatgggcaactacatcggcctgatcaacagaatcgcccagaagaagagactgaccgtgaactacgagcagtgcgccagcggcgtgcacggccccgagggcttccactacaagtgcaagatgggccagaaggagtacagcatcggcaccggcagcaccaagcaggaggccaagcagctggccgccaagctggcctacctgcagatcctgagcgaggagaccagcgtgaagagcgactacctgagcagcggcagcttcgccaccacctgcgagagccagagcaacagcctggtgaccagcaccctggccagcgagagcagcagcgagggcgacttcagcgccgacaccagcgagatcaacagcaacagcgacagcctgaacagcagcagcctgctgatgaacggcctgagaaacaaccagagaaaggccaagagaagcctggcccccagattcgacctgcccgacatgaaggagaccaagtacaccgtggacaagagaaaggccgagagagaggtgaaggccctggccaagctggaccacgtgaacatcgtgcactacaacggctgctgggacggcttcgactacgaccccgagaccagcgacgacagcctggagagcagcgactacgaccccgagaacagcaagaacagcagcagaagcaagaccaagtgcctgttcatccagatggagttctgcgacaagggcaccctggagcagtggatcgagaagagaagaggcgagaagctggacaaggtgctggccctggagctgttcgagcagatcaccaagggcgtggactacatccacagcaagaagctgatccacagagacctgaagcccagcaacatcttcctggtggacaccaagcaggtgaagatcggcgacttcggcctggtgaccagcctgaagaacgacggcaagagaaccagaagcaagggcaccctgagatacatgagccccgagcagatcagcagccaggactacggcaaggaggtggacctgtacgccctgggcctgatcctggccgagctgctgcacgtgtgcgacaccgccttcgagaccagcaagttcttcaccgacctgagagacggcatcatcagcgacatcttcgacaagaaggagaagaccctgctgcagaagctgctgagcaagaagcccgaggacagacccaacaccagcgagatcctgagaaccctgaccgtgtggaagaagagccccgagaagaacgagagacacacctgctag

SEQ ID NO: 10578 - DNA, 4800 bp, synthetic construct
  misc_feature 1..4800: note = Description of Artificial Sequence: Synthetic coding sequence
  source 1..4800: mol_type = other DNA
atgaacaaggccccccagagcaccggccccccccccgcccccagccccggcctgccccagcccgccttcccccccggccagaccgcccccgtggtgttcagcaccccccaggccacccagatgaacacccccagccagcccagacagcacttctaccccagcagagcccagccccccagcagcgccgccagcagagtgcagagcgccgcccccgccagacccggccccgccgcccacgtgtaccccgccggcagccaggtgatgatgatccccagccagatcagctaccccgccagccagggcgcctactacatccccggccagggcagaagcacctacgtggtgcccacccagcagtaccccgtgcagcccggcgcccccggcttctaccccggcgccagccccaccgagttcggcacctacgccggcgcctactaccccgcccagggcgtgcagcagttccccaccggcgtggcccccacccccgtgctgatgaaccagcccccccagatcgcccccaagagagagagaaagaccatcagaatcagagaccccaaccagggcggcaaggacatcaccgaggagatcatgagcggcgccagaaccgccagcacccccacccccccccagaccggcggcggcctggagccccaggccaacggcgagaccccccaggtggccgtgatcgtgagacccgacgacagaagccagggcgccatcatcgccgacagacccggcctgcccggccccgagcacagccccagcgagagccagcccagcagccccagccccacccccagccccagccccgtgctggagcccggcagcgagcccaacctggccgtgctgagcatccccggcgacaccatgaccaccatccagatgagcgtggaggagagcacccccatcagcagagagaccggcgagccctacagactgagccccgagcccacccccctggccgagcccatcctggaggtggaggtgaccctgagcaagcccgtgcccgagagcgagttcagcagcagccccctgcaggcccccacccccctggccagccacaccgtggagatccacgagcccaacggcatggtgcccagcgaggacctggagcccgaggtggagagcagccccgagctggcccccccccccgcctgccccagcgagagccccgtgcccatcgcccccaccgcccagcccgaggagctgctgaacggcgcccccagcccccccgccgtggacctgagccccgtgagcgagcccgaggagcaggccaaggaggtgaccgccagcatggccccccccaccatccccagcgccacccccgccaccgcccccagcgccaccagccccgcccaggaggaggagatggaggaggaggaggaggaggaggagggcgaggccggcgaggccggcgaggccgagagcgagaagggcggcgaggagctgctgccccccgagagcacccccatccccgccaacctgagccagaacctggaggccgccgccgccacccaggtggccgtgagcgtgcccaagagaagaagaaagatcaaggagctgaacaagaaggaggccgtgggcgacctgctggacgccttcaaggaggccaaccccgccgtgcccgaggtggagaaccagccccccgccggcagcaaccccggccccgagagcgagggcagcggcgtgccccccagacccgaggaggccgacgagacctgggacagcaaggaggacaagatccacaacgccgagaacatccagcccggcgagcagaagtacgagtacaagagcgaccagtggaagcccctgaacctggaggagaagaagagatacgacagagagttcctgctgggcttccagttcatcttcgccagcatgcagaagcccgagggcctgccccacatcagcgacgtggtgctggacaaggccaacaagacccccctgagacccctggaccccaccagactgcagggcatcaactgcggccccgacttcacccccagcttcgccaacctgggcagaaccaccctgagcaccagaggcccccccagaggcggccccggcggcgagctgcccagaggccccgccggcctgggccccagaagaagccagcagggccccagaaaggagcccagaaagatcatcgccaccgtgctgatgaccgaggacatcaagctgaacaaggccgagaaggcctggaagcccagcagcaagagaaccgccgccgacaaggacagaggcgaggaggacgccgacggcagcaagacccaggacctgttcagaagagtgagaagcatcctgaacaagctgaccccccagatgttccagcagctgatgaagcaggtgacccagctggccatcgacaccgaggagagactgaagggcgtgatcgacctgatcttcgagaaggccatcagcgagcccaacttcagcgtggcctacgccaacatgtgcagatgcctgatggccctgaaggtgcccaccaccgagaagcccaccgtgaccgtgaacttcagaaagctgctgctgaacagatgccagaaggagttcgagaaggacaaggacgacgacgaggtgttcgagaagaagcagaaggagatggacgaggccgccaccgccgaggagagaggcagactgaaggaggagctggaggaggccagagacatcgccagaagaagaagcctgggcaacatcaagttcatcggcgagctgttcaagctgaagatgctgaccgaggccatcatgcacgactgcgtggtgaagctgctgaagaaccacgacgaggagagcctggagtgcctgtgcagactgctgaccaccatcggcaaggacctggacttcgagaaggccaagcccagaatggaccagtacttcaaccagatggagaagatcatcaaggagaagaagaccagcagcagaatcagattcatgctgcaggacgtgctggacctgagaggcagcaactgggtgcccagaagaggcgaccagggccccaagaccatcgaccagatccacaaggaggccgagatggaggagcacagagagcacatcaaggtgcagcagctgatggccaagggcagcgacaagagaagaggcggcccccccggcccccccatcagcagaggcctgcccctggtggacgacggcggctggaacaccgtgcccatcagcaagggcagcagacccatcgacaccagcagactgaccaagatcaccaagcccggcagcatcgacagcaacaaccagctgttcgcccccggcggcagactgagctggggcaagggcagcagcggcggcagcggcgccaagcccagcgacgccgccagcgaggccgccagacccgccaccagcaccctgaacagattcagcgccctgcagcaggccgtgcccaccgagagcaccgacaacagaagagtggtgcagagaagcagcctgagcagagagagaggcgagaaggccggcgacagaggcgacagactggagagaagcgagagaggcggcgacagaggcgacagactggacagagccagaacccccgccaccaagagaagcttcagcaaggaggtggaggagagaagcagagagagacccagccagcccgagggcctgagaaaggccgccagcctgaccgaggacagagacagaggcagagacgccgtgaagagagaggccgccctgccccccgtgagccccctgaaggccgccctgagcgaggaggagctggagaagaagagcaaggccatcatcgaggagtacctgcacctgaacgacatgaaggaggccgtgcagtgcgtgcaggagctggccagccccagcctgctgttcatcttcgtgagacacggcgtggagagcaccctggagagaagcgccatcgccagagagcacatgggccagctgctgcaccagctgctgtgcgccggccacctgagcaccgcccagtactaccagggcctgtacgagatcctggagctggccgaggacatggagatcgacatcccccacgtgtggctgtacctggccgagctggtgacccccatcctgcaggagggcggcgtgcccatgggcgagctgttcagagagatcaccaagcccctgagacccctgggcaaggccgccagcctgctgctggagatcctgggcctgctgtgcaagagcatgggccccaagaaggtgggcaccctgtggagagaggccggcctgagctggaaggagttcctgcccgagggccaggacatcggcgccttcgtggccgagcagaaggtggagtacaccctgggcgaggagagcgaggcccccggccagagagccctgcccagcgaggagctgaacagacagctggagaagctgctgaaggagggcagcagcaaccagagagtgttcgactggatcgaggccaacctgagcgagcagcagatcgtgagcaacaccctggtgagagccctgatgaccgccgtgtgctacagcgccatcatcttcgagacccccctgagagtggacgtggccgtgctgaaggccagagccaagctgctgcagaagtacctgtgcgacgagcagaaggagctgcaggccctgtacgccctgcaggccctggtggtgaccctggagcagccccccaacctgctgagaatgttcttcgacgccctgtacgacgaggacgtggtgaaggaggacgccttctacagctgggagagcagcaaggaccccgccgagcagcagggcaagggcgtggccctgaagagcgtgaccgccttcttcaagtggctgagagaggccgaggaggagagcgaccacaactag

SEQ ID NO: 10579 - DNA, 4803 bp, synthetic construct
  misc_feature 1..4803: note = Description of Artificial Sequence: Synthetic coding sequence
  source 1..4803: mol_type = other DNA
atgaacaaggccccccagagcaccggccccccccccgcccccagccccggcctgccccagcccgccttcccccccggccagaccgcccccgtggtgttcagcaccccccaggccacccagatgaacacccccagccagcccagacagcacttctaccccagcagagcccagccccccagcagcgccgccagcagagtgcagagcgccgcccccgccagacccggccccgccgcccacgtgtaccccgccggcagccaggtgatgatgatccccagccagatcagctaccccgccagccagggcgcctactacatccccggccagggcagaagcacctacgtggtgcccacccagcagtaccccgtgcagcccggcgcccccggcttctaccccggcgccagccccaccgagttcggcacctacgccggcgcctactaccccgcccagggcgtgcagcagttccccaccggcgtggcccccacccccgtgctgatgaaccagcccccccagatcgcccccaagagagagagaaagaccatcagaatcagagaccccaaccagggcggcaaggacatcaccgaggagatcatgagcggcgccagaaccgccagcacccccacccccccccagaccggcggcggcctggagccccaggccaacggcgagaccccccaggtggccgtgatcgtgagacccgacgacagaagccagggcgccatcatcgccgacagacccggcctgcccggccccgagcacagccccagcgagagccagcccagcagccccagccccacccccagccccagccccgtgctggagcccggcagcgagcccaacctggccgtgctgagcatccccggcgacaccatgaccaccatccagatgagcgtggaggagagcacccccatcagcagagagaccggcgagccctacagactgagccccgagcccacccccctggccgagcccatcctggaggtggaggtgaccctgagcaagcccgtgcccgagagcgagttcagcagcagccccctgcaggcccccacccccctggccagccacaccgtggagatccacgagcccaacggcatggtgcccagcgaggacctggagcccgaggtggagagcagccccgagctggcccccccccccgcctgccccagcgagagccccgtgcccatcgcccccaccgcccagcccgaggagctgctgaacggcgcccccagcccccccgccgtggacctgagccccgtgagcgagcccgaggagcaggccaaggaggtgaccgccagcatggccccccccaccatccccagcgccacccccgccaccgcccccagcgccaccagccccgcccaggaggaggagatggaggaggaggaggaggaggaggagggcgaggccggcgaggccggcgaggccgagagcgagaagggcggcgaggagctgctgccccccgagagcacccccatccccgccaacctgagccagaacctggaggccgccgccgccacccaggtggccgtgagcgtgcccaagagaagaagaaagatcaaggagctgaacaagaaggaggccgtgggcgacctgctggacgccttcaaggaggccaaccccgccgtgcccgaggtggagaaccagccccccgccggcagcaaccccggccccgagagcgagggcagcggcgtgccccccagacccgaggaggccgacgagacctgggacagcaaggaggacaagatccacaacgccgagaacatccagcccggcgagcagaagtacgagtacaagagcgaccagtggaagcccctgaacctggaggagaagaagagatacgacagagagttcctgctgggcttccagttcatcttcgccagcatgcagaagcccgagggcctgccccacatcagcgacgtggtgctggacaaggccaacaagacccccctgagacccctggaccccaccagactgcagggcatcaactgcggccccgacttcacccccagcttcgccaacctgggcagaaccaccctgagcaccagaggcccccccagaggcggccccggcggcgagctgcccagaggcccccaggccggcctgggccccagaagaagccagcagggccccagaaaggagcccagaaagatcatcgccaccgtgctgatgaccgaggacatcaagctgaacaaggccgagaaggcctggaagcccagcagcaagagaaccgccgccgacaaggacagaggcgaggaggacgccgacggcagcaagacccaggacctgttcagaagagtgagaagcatcctgaacaagctgaccccccagatgttccagcagctgatgaagcaggtgacccagctggccatcgacaccgaggagagactgaagggcgtgatcgacctgatcttcgagaaggccatcagcgagcccaacttcagcgtggcctacgccaacatgtgcagatgcctgatggccctgaaggtgcccaccaccgagaagcccaccgtgaccgtgaacttcagaaagctgctgctgaacagatgccagaaggagttcgagaaggacaaggacgacgacgaggtgttcgagaagaagcagaaggagatggacgaggccgccaccgccgaggagagaggcagactgaaggaggagctggaggaggccagagacatcgccagaagaagaagcctgggcaacatcaagttcatcggcgagctgttcaagctgaagatgctgaccgaggccatcatgcacgactgcgtggtgaagctgctgaagaaccacgacgaggagagcctggagtgcctgtgcagactgctgaccaccatcggcaaggacctggacttcgagaaggccaagcccagaatggaccagtacttcaaccagatggagaagatcatcaaggagaagaagaccagcagcagaatcagattcatgctgcaggacgtgctggacctgagaggcagcaactgggtgcccagaagaggcgaccagggccccaagaccatcgaccagatccacaaggaggccgagatggaggagcacagagagcacatcaaggtgcagcagctgatggccaagggcagcgacaagagaagaggcggcccccccggcccccccatcagcagaggcctgcccctggtggacgacggcggctggaacaccgtgcccatcagcaagggcagcagacccatcgacaccagcagactgaccaagatcaccaagcccggcagcatcgacagcaacaaccagctgttcgcccccggcggcagactgagctggggcaagggcagcagcggcggcagcggcgccaagcccagcgacgccgccagcgaggccgccagacccgccaccagcaccctgaacagattcagcgccctgcagcaggccgtgcccaccgagagcaccgacaacagaagagtggtgcagagaagcagcctgagcagagagagaggcgagaaggccggcgacagaggcgacagactggagagaagcgagagaggcggcgacagaggcgacagactggacagagccagaacccccgccaccaagagaagcttcagcaaggaggtggaggagagaagcagagagagacccagccagcccgagggcctgagaaaggccgccagcctgaccgaggacagagacagaggcagagacgccgtgaagagagaggccgccctgccccccgtgagccccctgaaggccgccctgagcgaggaggagctggagaagaagagcaaggccatcatcgaggagtacctgcacctgaacgacatgaaggaggccgtgcagtgcgtgcaggagctggccagccccagcctgctgttcatcttcgtgagacacggcgtggagagcaccctggagagaagcgccatcgccagagagcacatgggccagctgctgcaccagctgctgtgcgccggccacctgagcaccgcccagtactaccagggcctgtacgagatcctggagctggccgaggacatggagatcgacatcccccacgtgtggctgtacctggccgagctggtgacccccatcctgcaggagggcggcgtgcccatgggcgagctgttcagagagatcaccaagcccctgagacccctgggcaaggccgccagcctgctgctggagatcctgggcctgctgtgcaagagcatgggccccaagaaggtgggcaccctgtggagagaggccggcctgagctggaaggagttcctgcccgagggccaggacatcggcgccttcgtggccgagcagaaggtggagtacaccctgggcgaggagagcgaggcccccggccagagagccctgcccagcgaggagctgaacagacagctggagaagctgctgaaggagggcagcagcaaccagagagtgttcgactggatcgaggccaacctgagcgagcagcagatcgtgagcaacaccctggtgagagccctgatgaccgccgtgtgctacagcgccatcatcttcgagacccccctgagagtggacgtggccgtgctgaaggccagagccaagctgctgcagaagtacctgtgcgacgagcagaaggagctgcaggccctgtacgccctgcaggccctggtggtgaccctggagcagccccccaacctgctgagaatgttcttcgacgccctgtacgacgaggacgtggtgaaggaggacgccttctacagctgggagagcagcaaggaccccgccgagcagcagggcaagggcgtggccctgaagagcgtgaccgccttcttcaagtggctgagagaggccgaggaggagagcgaccacaactag

SEQ ID NO: 10580 - DNA, 4800 bp, synthetic construct; identical to SEQ ID NO: 10578
  misc_feature 1..4800: note = Description of Artificial Sequence: Synthetic coding sequence
  source 1..4800: mol_type = other DNA

SEQ ID NO: 10581 - DNA, 4308 bp, synthetic construct
  misc_feature 1..4308: note = Description of Artificial Sequence: Synthetic coding sequence
  source 1..4308: mol_type = other DNA
atgaaccagcccccccagatcgcccccaagagagagagaaagaccatcagaatcagagaccccaaccagggcggcaaggacatcaccgaggagatcatgagcggcgccagaaccgccagcacccccacccccccccagaccggcggcggcctggagccccaggccaacggcgagaccccccaggtggccgtgatcgtgagacccgacgacagaagccagggcgccatcatcgccgacagacccggcctgcccggccccgagcacagccccagcgagagccagcccagcagccccagccccacccccagccccagccccgtgctggagcccggcagcgagcccaacctggccgtgctgagcatccccggcgacaccatgaccaccatccagatgagcgtggaggagagcacccccatcagcagagagaccggcgagccctacagactgagccccgagcccacccccctggccgagcccatcctggaggtggaggtgaccctgagcaagcccgtgcccgagagcgagttcagcagcagccccctgcaggcccccacccccctggccagccacaccgtggagatccacgagcccaacggcatggtgcccagcgaggacctggagcccgaggtggagagcagccccgagctggcccccccccccgcctgccccagcgagagccccgtgcccatcgcccccaccgcccagcccgaggagctgctgaacggcgcccccagcccccccgccgtggacctgagccccgtgagcgagcccgaggagcaggccaaggaggtgaccgccagcatggccccccccaccatccccagcgccacccccgccaccgcccccagcgccaccagccccgcccaggaggaggagatggaggaggaggaggaggaggaggagggcgaggccggcgaggccggcgaggccgagagcgagaagggcggcgaggagctgctgccccccgagagcacccccatccccgccaacctgagccagaacctggaggccgccgccgccacccaggtggccgtgagcgtgcccaagagaagaagaaagatcaaggagctgaacaagaaggaggccgtgggcgacctgctggacgccttcaaggaggccaaccccgccgtgcccgaggtggagaaccagccccccgccggcagcaaccccggccccgagagcgagggcagcggcgtgccccccagacccgaggaggccgacgagacctgggacagcaaggaggacaagatccacaacgccgagaacatccagcccggcgagcagaagtacgagtacaagagcgaccagtggaagcccctgaacctggaggagaagaagagatacgacagagagttcctgctgggcttccagttcatcttcgccagcatgcagaagcccgagggcctgccccacatcagcgacgtggtgctggacaaggccaacaagacccccctgagacccctggaccccaccagactgcagggcatcaactgcggccccgacttcacccccagcttcgccaacctgggcagaaccaccctgagcaccagaggcccccccagaggcggccccggcggcgagctgcccagaggccccgccggcctgggccccagaagaagccagcagggccccagaaaggagcccagaaagatcatcgccaccgtgctgatgaccgaggacatcaagctgaacaaggccgagaaggcctggaagcccagcagcaagagaaccgccgccgacaaggacagaggcgaggaggacgccgacggcagcaagacccaggacctgttcagaagagtgagaagcatcctgaacaagctgaccccccagatgttccagcagctgatgaagcaggtgacccagctggccatcgacaccgaggagagactgaagggcgtgatcgacctgatcttcgagaaggccatcagcgagcccaacttcagcgtggcctacgccaacatgtgcagatgcctgatggccctgaaggtgcccaccaccgagaagcccaccgtgaccgtgaacttcagaaagctgctgctgaacagatgccagaaggagttcgagaaggacaaggacgacgacgaggtgttcgagaagaagcagaaggagatggacgaggccgccaccgccgaggagagaggcagactgaaggaggagctggaggaggccagagacatcgccagaagaagaagcctgggcaacatcaagttcatcggcgagctgttcaagctgaagatgctgaccgaggccatcatgcacgactgcgtggtgaagctgctgaagaaccacgacgaggagagcctggagtgcctgtgcagactgctgaccaccatcggcaaggacctggacttcgagaaggccaagcccagaatggaccagtacttcaaccagatggagaagatcatcaaggagaagaagaccagcagcagaatcagattcatgctgcaggacgtgctggacctgagaggcagcaactgggtgcccagaagaggcgaccagggccccaagaccatcgaccagatccacaaggaggccgagatggaggagcacagagagcacatcaaggtgcagcagctgatggccaagggcagcgacaagagaagaggcggcccccccggcccccccatcagcagaggcctgcccctggtggacgacggcggctggaacaccgtgcccatcagcaagggcagcagacccatcgacaccagcagactgaccaagatcaccaagcccggcagcatcgacagcaacaaccagctgttcgcccccggcggcagactgagctggggcaagggcagcagcggcggcagcggcgccaagcccagcgacgccgccagcgaggccgccagacccgccaccagcaccctgaacagattcagcgccctgcagcaggccgtgcccaccgagagcaccgacaacagaagagtggtgcagagaagcagcctgagcagagagagaggcgagaaggccggcgacagaggcgacagactggagagaagcgagagaggcggcgacagaggcgacagactggacagagccagaacccccgccaccaagagaagcttcagcaaggaggtggaggagagaagcagagagagacccagccagcccgagggcctgagaaaggccgccagcctgaccgaggacagagacagaggcagagacgccgtgaagagagaggccgccctgccccccgtgagccccctgaaggccgccctgagcgaggaggagctggagaagaagagcaaggccatcatcgaggagtacctgcacctgaacgacatgaaggaggccgtgcagtgcgtgcaggagctggccagccccagcctgctgttcatcttcgtgagacacggcgtggagagcaccctggagagaagcgccatcgccagagagcacatgggccagctgctgcaccagctgctgtgcgccggccacctgagcaccgcccagtactaccagggcctgtacgagatcctggagctggccgaggacatggagatcgacatcccccacgtgtggctgtacctggccgagctggtgacccccatcctgcaggagggcggcgtgcccatgggcgagctgttcagagagatcaccaagcccctgagacccctgggcaaggccgccagcctgctgctggagatcctgggcctgctgtgcaagagcatgggccccaagaaggtgggcaccctgtggagagaggccggcctgagctggaaggagttcctgcccgagggccaggacatcggcgccttcgtggccgagcagaaggtggagtacaccctgggcgaggagagcgaggcccccggccagagagccctgcccagcgaggagctgaacagacagctggagaagctgctgaaggagggcagcagcaaccagagagtgttcgactggatcgaggccaacctgagcgagcagcagatcgtgagcaacaccctggtgagagccctgatgaccgccgtgtgctacagcgccatcatcttcgagacccccctgagagtggacgtggccgtgctgaaggccagagccaagctgctgcagaagtacctgtgcgacgagcagaaggagctgcaggccctgtacgccctgcaggccctggtggtgaccctggagcagccccccaacctgctgagaatgttcttcgacgccctgtacgacgaggacgtggtgaaggaggacgccttctacagctgggagagcagcaaggaccccgccgagcagcagggcaagggcgtggccctgaagagcgtgaccgccttcttcaagtggctgagagaggccgaggaggagagcgaccacaactag

SEQ ID NO: 10582 - DNA, 4821 bp, synthetic construct
  misc_feature 1..4821: note = Description of Artificial Sequence: Synthetic coding sequence
  source 1..4821: mol_type = other DNA
atgaacaaggccccccagagcaccggccccccccccgcccccagccccggcctgccccagcccgccttcccccccggccagaccgcccccgtggtgttcagcaccccccaggccacccagatgaacacccccagccagcccagacagggcggcttcagaagcctgcagcacttctaccccagcagagcccagccccccagcagcgccgccagcagagtgcagagcgccgcccccgccagacccggccccgccgcccacgtgtaccccgccggcagccaggtgatgatgatccccagccagatcagctaccccgccagccagggcgcctactacatccccggccagggcagaagcacctacgtggtgcccacccagcagtaccccgtgcagcccggcgcccccggcttctaccccggcgccagccccaccgagttcggcacctacgccggcgcctactaccccgcccagggcgtgcagcagttccccaccggcgtggcccccacccccgtgctgatgaaccagcccccccagatcgcccccaagagagagagaaagaccatcagaatcagagaccccaaccagggcggcaaggacatcaccgaggagatcatgagcggcgccagaaccgccagcacccccacccccccccagaccggcggcggcctggagccccaggccaacggcgagaccccccaggtggccgtgatcgtgagacccgacgacagaagccagggcgccatcatcgccgacagacccggcctgcccggccccgagcacagccccagcgagagccagcccagcagccccagccccacccccagccccagccccgtgctggagcccggcagcgagcccaacctggccgtgctgagcatccccggcgacaccatgaccaccatccagatgagcgtggaggagagcacccccatcagcagagagaccggcgagccctacagactgagccccgagcccacccccctggccgagcccatcctggaggtggaggtgaccctgagcaagcccgtgcccgagagcgagttcagcagcagccccctgcaggcccccacccccctggccagccacaccgtggagatccacgagcccaacggcatggtgcccagcgaggacctggagcccgaggtggagagcagccccgagctggcccccccccccgcctgccccagcgagagccccgtgcccatcgcccccaccgcccagcccgaggagctgctgaacggcgcccccagcccccccgccgtggacctgagccccgtgagcgagcccgaggagcaggccaaggaggtgaccgccagcatggccccccccaccatccccagcgccacccccgccaccgcccccagcgccaccagccccgcccaggaggaggagatggaggaggaggaggaggaggaggagggcgaggccggcgaggccggcgaggccgagagcgagaagggcggcgaggagctgctgccccccgagagcacccccatccccgccaacctgagccagaacctggaggccgccgccgccacccaggtggccgtgagcgtgcccaagagaagaagaaagatcaaggagctgaacaagaaggaggccgtgggcgacctgctggacgccttcaaggaggccaaccccgccgtgcccgaggtggagaaccagccccccgccggcagcaaccccggccccgagagcgagggcagcggcgtgccccccagacccgaggaggccgacgagacctgggacagcaaggaggacaagatccacaacgccgagaacatccagcccggcgagcagaagtacgagtacaagagcgaccagtggaagcccctgaacctggaggagaagaagagatacgacagagagttcctgctgggcttccagttcatcttcgccagcatgcagaagcccgagggcctgccccacatcagcgacgtggtgctggacaaggccaacaagacccccctgagacccctggaccccaccagactgcagggcatcaactgcggccccgacttcacccccagcttcgccaacctgggcagaaccaccctgagcaccagaggcccccccagaggcggccccggcggcgagctgcccagaggccccgccggcctgggccccagaagaagccagcagggccccagaaaggagcccagaaagatcatcgccaccgtgctgatgaccgaggacatcaagctgaacaaggccgagaaggcctggaagcccagcagcaagagaaccgccgccgacaaggacagaggcgaggaggacgccgacggcagcaagacccaggacctgttcagaagagtgagaagcatcctgaacaagctgaccccccagatgttccagcagctgatgaagcaggtgacccagctggccatcgacaccgaggagagactgaagggcgtgatcgacctgatcttcgagaaggccatcagcgagcccaacttcagcgtggcctacgccaacatgtgcagatgcctgatggccctgaaggtgcccaccaccgagaagcccaccgtgaccgtgaacttcagaaagctgctgctgaacagatgccagaaggagttcgagaaggacaaggacgacgacgaggtgttcgagaagaagcagaaggagatggacgaggccgccaccgccgaggagagaggcagactgaaggaggagctggaggaggccagagacatcgccagaagaagaagcctgggcaacatcaagttcatcggcgagctgttcaagctgaagatgctgaccgaggccatcatgcacgactgcgtggtgaagctgctgaagaaccacgacgaggagagcctggagtgcctgtgcagactgctgaccaccatcggcaaggacctggacttcgagaaggccaagcccagaatggaccagtacttcaaccagatggagaagatcatcaaggagaagaagaccagcagcagaatcagattcatgctgcaggacgtgctggacctgagaggcagcaactgggtgcccagaagaggcgaccagggccccaagaccatcgaccagatccacaaggaggccgagatggaggagcacagagagcacatcaaggtgcagcagctgatggccaagggcagcgacaagagaagaggcggcccccccggcccccccatcagcagaggcctgcccctggtggacgacggcggctggaacaccgtgcccatcagcaagggcagcagacccatcgacaccagcagactgaccaagatcaccaagcccggcagcatcgacagcaacaaccagctgttcgcccccggcggcagactgagctggggcaagggcagcagcggcggcagcggcgccaagcccagcgacgccgccagcgaggccgccagacccgccaccagcaccctgaacagattcagcgccctgcagcaggccgtgcccaccgagagcaccgacaacagaagagtggtgcagagaagcagcctgagcagagagagaggcgagaaggccggcgacagaggcgacagactggagagaagcgagagaggcggcgacagaggcgacagactggacagagccagaacccccgccaccaagagaagcttcagcaaggaggtggaggagagaagcagagagagacccagccagcccgagggcctgagaaaggccgccagcctgaccgaggacagagacagaggcagagacgccgtgaagagagaggccgccctgccccccgtgagccccctgaaggccgccctgagcgaggaggagctggagaagaagagcaaggccatcatcgaggagtacctgcacctgaacgacatgaaggaggccgtgcagtgcgtgcaggagctggccagccccagcctgctgttcatcttcgtgagacacggcgtggagagcaccctggagagaagcgccatcgccagagagcacatgggccagctgctgcaccagctgctgtgcgccggccacctgagcaccgcccagtactaccagggcctgtacgagatcctggagctggccgaggacatggagatcgacatcccccacgtgtggctgtacctggccgagctggtgacccccatcctgcaggagggcggcgtgcccatgggcgagctgttcagagagatcaccaagcccctgagacccctgggcaaggccgccagcctgctgctggagatcctgggcctgctgtgcaagagcatgggccccaagaaggtgggcaccctgtggagagaggccggcctgagctggaaggagttcctgcccgagggccaggacatcggcgccttcgtggccgagcagaaggtggagtacaccctgggcgaggagagcgaggcccccggccagagagccctgcccagcgaggagctgaacagacagctggagaagctgctgaaggagggcagcagcaaccagagagtgttcgactggatcgaggccaacctgagcgagcagcagatcgtgagcaacaccctggtgagagccctgatgaccgccgtgtgctacagcgccatcatcttcgagacccccctgagagtggacgtggccgtgctgaaggccagagccaagctgctgcagaagtacctgtgcgacgagcagaaggagctgcaggccctgtacgccctgcaggccctggtggtgaccctggagcagccccccaacctgctgagaatgttcttcgacgccctgtacgacgaggacgtggtgaaggaggacgccttctacagctgggagagcagcaaggaccccgccgagcagcagggcaagggcgtggccctgaagagcgtgaccgccttcttcaagtggctgagagaggccgaggaggagagcgaccacaactag

SEQ ID NO: 10583 - DNA, 4821 bp, synthetic construct; identical to SEQ ID NO: 10582
  misc_feature 1..4821: note = Description of Artificial Sequence: Synthetic coding sequence
  source 1..4821: mol_type = other DNA

SEQ ID NO: 10584 - DNA, 4539 bp, synthetic construct
  misc_feature 1..4539: note = Description of Artificial Sequence: Synthetic coding sequence
  source 1..4539: mol_type = other DNA
atgatgatccccagccagatcagctaccccgccagccagggcgcctactacatccccggccagggcagaagcacctacgtggtgcccacccagcagtaccccgtgcagcccggcgcccccggcttctaccccggcgccagccccaccgagttcggcacctacgccggcgcctactaccccgcccagggcgtgcagcagttccccaccggcgtggcccccacccccgtgctgatgaaccagcccccccagatcgcccccaagagagagagaaagaccatcagaatcagagaccccaaccagggcggcaaggacatcaccgaggagatcatgagcggcgccagaaccgccagcacccccacccccccccagaccggcggcggcctggagccccaggccaacggcgagaccccccaggtggccgtgatcgtgagacccgacgacagaagccagggcgccatcatcgccgacagacccggcctgcccggccccgagcacagccccagcgagagccagcccagcagccccagccccacccccagccccagccccgtgctggagcccggcagcgagcccaacctggccgtgctgagcatccccggcgacaccatgaccaccatccagatgagcgtggaggagagcacccccatcagcagagagaccggcgagccctacagactgagccccgagcccacccccctggccgagcccatcctggaggtggaggtgaccctgagcaagcccgtgcccgagagcgagttcagcagcagccccctgcaggcccccacccccctggccagccacaccgtggagatccacgagcccaacggcatggtgcccagcgaggacctggagcccgaggtggagagcagccccgagctggcccccccccccgcctgccccagcgagagccccgtgcccatcgcccccaccgcccagcccgaggagctgctgaacggcgcccccagcccccccgccgtggacctgagccccgtgagcgagcccgaggagcaggccaaggaggtgaccgccagcatggccccccccaccatccccagcgccacccccgccaccgcccccagcgccaccagccccgcccaggaggaggagatggaggaggaggaggaggaggaggagggcgaggccggcgaggccggcgaggccgagagcgagaagggcggcgaggagctgctgccccccgagagcacccccatccccgccaacctgagccagaacctggaggccgccgccgccacccaggtggccgtgagcgtgcccaagagaagaagaaagatcaaggagctgaacaagaaggaggccgtgggcgacctgctggacgccttcaaggaggccaaccccgccgtgcccgaggtggagaaccagccccccgccggcagcaaccccggccccgagagcgagggcagcggcgtgccccccagacccgaggaggccgacgagacctgggacagcaaggaggacaagatccacaacgccgagaacatccagcccggcgagcagaagtacgagtacaagagcgaccagtggaagcccctgaacctggaggagaagaagagatacgacagagagttcctgctgggcttccagttcatcttcgccagcatgcagaagcccgagggcctgccccacatcagcgacgtggtgctggacaaggccaacaagacccccctgagacccctggaccccaccagactgcagggcatcaactgcggccccgacttcacccccagcttcgccaacctgggcagaaccaccctgagcaccagaggcccccccagaggcggccccggcggcgagctgcccagaggccccgccggcctgggccccagaagaagccagcagggccccagaaaggagcccagaaagatcatcgccaccgtgctgatgaccgaggacatcaagctgaacaaggccgagaaggcctggaagcccagcagcaagagaaccgccgccgacaaggacagaggcgaggaggacgccgacggcagcaagacccaggacctgttcagaagagtgagaagcatcctgaacaagctgaccccccagatgttccagcagctgatgaagcaggtgacccagctggccatcgacaccgaggagagactgaagggcgtgatcgacctgatcttcgagaaggccatcagcgagcccaacttcagcgtggcctacgccaacatgtgcagatgcctgatggccctgaaggtgcccaccaccgagaagcccaccgtgaccgtgaacttcagaaagctgctgctgaacagatgccagaaggagttcgagaaggacaaggacgacgacgaggtgttcgagaagaagcagaaggagatggacgaggccgccaccgccgaggagagaggcagactgaaggaggagctggaggaggccagagacatcgccagaagaagaagcctgggcaacatcaagttcatcggcgagctgttcaagctgaagatgctgaccgaggccatcatgcacgactgcgtggtgaagctgctgaagaaccacgacgaggagagcctggagtgcctgtgcagactgctgaccaccatcggcaaggacctggacttcgagaaggccaagcccagaatggaccagtacttcaaccagatggagaagatcatcaaggagaagaagaccagcagcagaatcagattcatgctgcaggacgtgctggacctgagaggcagcaactgggtgcccagaagaggcgaccagggccccaagaccatcgaccagatccacaaggaggccgagatggaggagcacagagagcacatcaaggtgcagcagctgatggccaagggcagcgacaagagaagaggcggcccccccggcccccccatcagcagaggcctgcccctggtggacgacggcggctggaacaccgtgcccatcagcaagggcagcagacccatcgacaccagcagactgaccaagatcaccaagcccggcagcatcgacagcaacaaccagctgttcgcccccggcggcagactgagctggggcaagggcagcagcggcggcagcggcgccaagcccagcgacgccgccagcgaggccgccagacccgccaccagcaccctgaacagattcagcgccctgcagcaggccgtgcccaccgagagcaccgacaacagaagagtggtgcagagaagcagcctgagcagagagagaggcgagaaggccggcgacagaggcgacagactggagagaagcgagagaggcggcgacagaggcgacagactggacagagccagaacccccgccaccaagagaagcttcagcaaggaggtggaggagagaagcagagagagacccagccagcccgagggcctgagaaaggccgccagcctgaccgaggacagagacagaggcagagacgccgtgaagagagaggccgccctgccccccgtgagccccctgaaggccgccctgagcgaggaggagctggagaagaagagcaaggccatcatcgaggagtacctgcacctgaacgacatgaaggaggccgtgcagtgcgtgcaggagctggccagccccagcctgctgttcatcttcgtgagacacggcgtggagagcaccctggagagaagcgccatcgccagagagcacatgggccagctgctgcaccagctgctgtgcgccggccacctgagcaccgcccagtactaccagggcctgtacgagatcctggagctggccgaggacatggagatcgacatcccccacgtgtggctgtacctggccgagctggtgacccccatcctgcaggagggcggcgtgcccatgggcgagctgttcagagagatcaccaagcccctgagacccctgggcaaggccgccagcctgctgctggagatcctgggcctgctgtgcaagagcatgggccccaagaaggtgggcaccctgtggagagaggccggcctgagctggaaggagttcctgcccgagggccaggacatcggcgccttcgtggccgagcagaaggtggagtacaccctgggcgaggagagcgaggcccccggccagagagccctgcccagcgaggagctgaacagacagctggagaagctgctgaaggagggcagcagcaaccagagagtgttcgactggatcgaggccaacctgagcgagcagcagatcgtgagcaacaccctggtgagagccctgatgaccgccgtgtgctacagcgccatcatcttcgagacccccctgagagtggacgtggccgtgctgaaggccagagccaagctgctgcagaagtacctgtgcgacgagcagaaggagctgcaggccctgtacgccctgcaggccctggtggtgaccctggagcagccccccaacctgctgagaatgttcttcgacgccctgtacgacgaggacgtggtgaaggaggacgccttctacagctgggagagcagcaaggaccccgccgagcagcagggcaagggcgtggccctgaagagcgtgaccgccttcttcaagtggctgagagaggccgaggaggagagcgaccacaactag

SEQ ID NO: 10585 - DNA, 4539 bp, synthetic construct; identical to SEQ ID NO: 10584
  misc_feature 1..4539: note = Description of Artificial Sequence: Synthetic coding sequence
  source 1..4539: mol_type = other DNA

SEQ ID NO: 10586 - DNA, 4683 bp, synthetic construct
  misc_feature 1..4683: note = Description of Artificial Sequence: Synthetic coding sequence
  source 1..4683: mol_type = other DNA
atgaacacccccagccagcccagacagcacttctaccccagcagagcccagccccccagcagcgccgccagcagagtgcagagcgccgcccccgccagacccggccccgccgcccacgtgtaccccgccggcagccaggtgatgatgatccccagccagatcagctaccccgccagccagggcgcctactacatccccggccagggcagaagcacctacgtggtgcccacccagcagtaccccgtgcagcccggcgcccccggcttctaccccggcgccagccccaccgagttcggcacctacgccggcgcctactaccccgcccagggcgtgcagcagttccccaccggcgtggcccccacccccgtgctgatgaaccagcccccccagatcgcccccaagagagagagaaagaccatcagaatcagagaccccaaccagggcggcaaggacatcaccgaggagatcatgagcggcgccagaaccgccagcacccccacccccccccagaccggcggcggcctggagccccaggccaacggcgagaccccccaggtggccgtgatcgtgagacccgacgacagaagccagggcgccatcatcgccgacagacccggcctgcccggccccgagcacagccccagcgagagccagcccagcagccccagccccacccccagccccagccccgtgctggagcccggcagcgagcccaacctggccgtgctgagcatccccggcgacaccatgaccaccatccagatgagcgtggaggagagcacccccatcagcagagagaccggcgagccctacagactgagccccgagcccacccccctggccgagcccatcctggaggtggaggtgaccctgagcaagcccgtgcccgagagcgagttcagcagcagccccctgcaggcccccacccccctggccagccacaccgtggagatccacgagcccaacggcatggtgcccagcgaggacctggagcccgaggtggagagcagccccgagctggcccccccccccgcctgccccagcgagagccccgtgcccatcgcccccaccgcccagcccgaggagctgctgaacggcgcccccagcccccccgccgtggacctgagccccgtgagcgagcccgaggagcaggccaaggaggtgaccgccagcatggccccccccaccatccccagcgccacccccgccaccgcccccagcgccaccagccccgcccaggaggaggagatggaggaggaggaggaggaggaggagggcgaggccggcgaggccggcgaggccgagagcgagaagggcggcgaggagctgctgccccccgagagcacccccatccccgccaacctgagccagaacctggaggccgccgccgccacccaggtggccgtgagcgtgcccaagagaagaagaaagatcaaggagctgaacaagaaggaggccgtgggcgacctgctggacgccttcaaggaggccaaccccgccgtgcccgaggtggagaaccagccccccgccggcagcaaccccggccccgagagcgagggcagcggcgtgccccccagacccgaggaggccgacgagacctgggacagcaaggaggacaagatccacaacgccgagaacatccagcccggcgagcagaagtacgagtacaagagcgaccagtggaagcccctgaacctggaggagaagaagagatacgacagagagttcctgctgggcttccagttcatcttcgccagcatgcagaagcccgagggcctgccccacatcagcgacgtggtgctggacaaggccaacaagacccccctgagacccctggaccccaccagactgcagggcatcaactgcggccccgacttcacccccagcttcgccaacctgggcagaaccaccctgagcaccagaggcccccccagaggcggccccggcggcgagctgcccagaggcccccaggccggcctgggccccagaagaagccagcagggccccagaaaggagcccagaaagatcatcgccaccgtgctgatgaccgaggacatcaagctgaacaaggccgagaaggcctggaagcccagcagcaagagaaccgccgccgacaaggacagaggcgaggaggacgccgacggcagcaagacccaggacctgttcagaagagtgagaagcatcctgaacaagctgaccccccagatgttccagcagctgatgaagcaggtgacccagctggccatcgacaccgaggagagactgaagggcgtgatcgacctgatcttcgagaaggccatcagcgagcccaacttcagcgtggcctacgccaacatgtgcagatgcctgatggccctgaaggtgcccaccaccgagaagcccaccgtgaccgtgaacttcagaaagctgctgctgaacagatgccagaaggagttcgagaaggacaaggacgacgacgaggtgttcgagaagaagcagaaggagatggacgaggccgccaccgccgaggagagaggcagactgaaggaggagctggaggaggccagagacatcgccagaagaagaagcctgggcaacatcaagttcatcggcgagctgttcaagctgaagatgctgaccgaggccatcatgcacgactgcgtggtgaagctgctgaagaaccacgacgaggagagcctggagtgcctgtgcagactgctgaccaccatcggcaaggacctggacttcgagaaggccaagcccagaatggaccagtacttcaaccagatggagaagatcatcaaggagaagaagaccagcagcagaatcagattcatgctgcaggacgtgctggacctgagaggcagcaactgggtgcccagaagaggcgaccagggccccaagaccatcgaccagatccacaaggaggccgagatggaggagcacagagagcacatcaaggtgcagcagctgatggccaagggcagcgacaagagaagaggcggcccccccggcccccccatcagcagaggcctgcccctggtggacgacggcggctggaacaccgtgcccatcagcaagggcagcagacccatcgacaccagcagactgaccaagatcaccaagcccggcagcatcgacagcaacaaccagctgttcgcccccggcggcagactgagctggggcaagggcagcagcggcggcagcggcgccaagcccagcgacgccgccagcgaggccgccagacccgccaccagcaccctgaacagattcagcgccctgcagcaggccgtgcccaccgagagcaccgacaacagaagagtggtgcagagaagcagcctgagcagagagagaggcgagaaggccggcgacagaggcgacagactggagagaagcgagagaggcggcgacagaggcgacagactggacagagccagaacccccgccaccaagagaagcttcagcaaggaggtggaggagagaagcagagagagacccagccagcccgagggcctgagaaaggccgccagcctgaccgaggacagagacagaggcagagacgccgtgaagagagaggccgccctgccccccgtgagccccctgaaggccgccctgagcgaggaggagctggagaagaagagcaaggccatcatcgaggagtacctgcacctgaacgacatgaaggaggccgtgcagtgcgtgcaggagctggccagccccagcctgctgttcatcttcgtgagacacggcgtggagagcaccctggagagaagcgccatcgccagagagcacatgggccagctgctgcaccagctgctgtgcgccggccacctgagcaccgcccagtactaccagggcctgtacgagatcctggagctggccgaggacatggagatcgacatcccccacgtgtggctgtacctggccgagctggtgacccccatcctgcaggagggcggcgtgcccatgggcgagctgttcagagagatcaccaagcccctgagacccctgggcaaggccgccagcctgctgctggagatcctgggcctgctgtgcaagagcatgggccccaagaaggtgggcaccctgtggagagaggccggcctgagctggaaggagttcctgcccgagggccaggacatcggcgccttcgtggccgagcagaaggtggagtacaccctgggcgaggagagcgaggcccccggccagagagccctgcccagcgaggagctgaacagacagctggagaagctgctgaaggagggcagcagcaaccagagagtgttcgactggatcgaggccaacctgagcgagcagcagatcgtgagcaacaccctggtgagagccctgatgaccgccgtgtgctacagcgccatcatcttcgagacccccctgagagtggacgtggccgtgctgaaggccagagccaagctgctgcagaagtacctgtgcgacgagcagaaggagctgcaggccctgtacgccctgcaggccctggtggtgaccctggagcagccccccaacctgctgagaatgttcttcgacgccctgtacgacgaggacgtggtgaaggaggacgccttctacagctgggagagcagcaaggaccccgccgagcagcagggcaagggcgtggccctgaagagcgtgaccgccttcttcaagtggctgagagaggccgaggaggagagcgaccacaactag

SEQ ID NO: 10587 - DNA, 4680 bp, synthetic construct
  misc_feature 1..4680: note = Description of Artificial Sequence: Synthetic coding sequence
  source 1..4680: mol_type = other DNA
atgaacacccccagccagcccagacagcacttctaccccagcagagcccagccccccagcagcgccgccagcagagtgcagagcgccgcccccgccagacccggccccgccgcccacgtgtaccccgccggcagccaggtgatgatgatccccagccagatcagctaccccgccagccagggcgcctactacatccccggccagggcagaagcacctacgtggtgcccacccagcagtaccccgtgcagcccggcgcccccggcttctaccccggcgccagccccaccgagttcggcacctacgccggcgcctactaccccgcccagggcgtgcagcagttccccaccggcgtggcccccacccccgtgctgatgaaccagcccccccagatcgcccccaagagagagagaaagaccatcagaatcagagaccccaaccagggcggcaaggacatcaccgaggagatcatgagcggcgccagaaccgccagcacccccacccccccccagaccggcggcggcctggagccccaggccaacggcgagaccccccaggtggccgtgatcgtgagacccgacgacagaagccagggcgccatcatcgccgacagacccggcctgcccggccccgagcacagccccagcgagagccagcccagcagccccagccccacccccagccccagccccgtgctggagcccggcagcgagcccaacctggccgtgctgagcatccccggcgacaccatgaccaccatccagatgagcgtggaggagagcacccccatcagcagagagaccggcgagccctacagactgagccccgagcccacccccctggccgagcccatcctggaggtggaggtgaccctgagcaagcccgtgcccgagagcgagttcagcagcagccccctgcaggcccccacccccctggccagccacaccgtggagatccacgagcccaacggcatggtgcccagcgaggacctggagcccgaggtggagagcagccccgagctggcccccccccccgcctgccccagcgagagccccgtgcccatcgcccccaccgcccagcccgaggagctgctgaacggcgcccccagcccccccgccgtggacctgagccccgtgagcgagcccgaggagcaggccaaggaggtgaccgccagcatggccccccccaccatccccagcgccacccccgccaccgcccccagcgccaccagccccgcccaggaggaggagatggaggaggaggaggaggaggaggagggcgaggccggcgaggccggcgaggccgagagcgagaagggcggcgaggagctgctgccccccgagagcacccccatccccgccaacctgagccagaacctggaggccgccgccgccacccaggtggccgtgagcgtgcccaagagaagaagaaagatcaaggagctgaacaagaaggaggccgtgggcgacctgctggacgccttcaaggaggccaaccccgccgtgcccgaggtggagaaccagccccccgccggcagcaaccccggccccgagagcgagggcagcggcgtgccccccagacccgaggaggccgacgagacctgggacagcaaggaggacaagatccacaacgccgagaacatccagcccggcgagcagaagtacgagtacaagagcgaccagtggaagcccctgaacctggaggagaagaagagatacgacagagagttcctgctgggcttccagttcatcttcgccagcatgcagaagcccgagggcctgccccacatcagcgacgtggtgctggacaaggccaacaagacccccctgagacccctggaccccaccagactgcagggcatcaactgcggccccgacttcacccccagcttcgccaacctgggcagaaccaccctgagcaccagaggcccccccagaggcggccccggcggcgagctgcccagaggccccgccggcctgggccccagaagaagccagcagggccccagaaaggagcccagaaagatcatcgccaccgtgctgatgaccgaggacatcaagctgaacaaggccgagaaggcctggaagcccagcagcaagagaaccgccgccgacaaggacagaggcgaggaggacgccgacggcagcaagacccaggacctgttcagaagagtgagaagcatcctgaacaagctgaccccccagatgttccagcagctgatgaagcaggtgacccagctggccatcgacaccgaggagagactgaagggcgtgatcgacctgatcttcgagaaggccatcagcgagcccaacttcagcgtggcctacgccaacatgtgcagatgcctgatggccctgaaggtgcccaccaccgagaagcccaccgtgaccgtgaacttcagaaagctgctgctgaacagatgccagaaggagttcgagaaggacaaggacgacgacgaggtgttcgagaagaagcagaaggagatggacgaggccgccaccgccgaggagagaggcagactgaaggaggagctggaggaggccagagacatcgccagaagaagaagcctgggcaacatcaagttcatcggcgagctgttcaagctgaagatgctgaccgaggccatcatgcacgactgcgtggtgaagctgctgaagaaccacgacgaggagagcctggagtgcctgtgcagactgctgaccaccatcggcaaggacctggacttcgagaaggccaagcccagaatggaccagtacttcaaccagatggagaagatcatcaaggagaagaagaccagcagcagaatcagattcatgctgcaggacgtgctggacctgagaggcagcaactgggtgcccagaagaggcgaccagggccccaagaccatcgaccagatccacaaggaggccgagatggaggagcacagagagcacatcaaggtgcagcagctgatggccaagggcagcgacaagagaagaggcggcccccccggcccccccatcagcagaggcctgcccctggtggacgacggcggctggaacaccgtgcccatcagcaagggcagcagacccatcgacaccagcagactgaccaagatcaccaagcccggcagcatcgacagcaacaaccagctgttcgcccccggcggcagactgagctggggcaagggcagcagcggcggcagcggcgccaagcccagcgacgccgccagcgaggccgccagacccgccaccagcaccctgaacagattcagcgccctgcagcaggccgtgcccaccgagagcaccgacaacagaagagtggtgcagagaagcagcctgagcagagagagaggcgagaaggccggcgacagaggcgacagactggagagaagcgagagaggcggcgacagaggcgacagactggacagagccagaacccccgccaccaagagaagcttcagcaaggaggtggaggagagaagcagagagagacccagccagcccgagggcctgagaaaggccgccagcctgaccgaggacagagacagaggcagagacgccgtgaagagagaggccgccctgccccccgtgagccccctgaaggccgccctgagcgaggaggagctggagaagaagagcaaggccatcatcgaggagtacctgcacctgaacgacatgaaggaggccgtgcagtgcgtgcaggagctggccagccccagcctgctgttcatcttcgtgagacacggcgtggagagcaccctggagagaagcgccatcgccagagagcacatgggccagctgctgcaccagctgctgtgcgccggccacctgagcaccgcccagtactaccagggcctgtacgagatcctggagctggccgaggacatggagatcgacatcccccacgtgtggctgtacctggccgagctggtgacccccatcctgcaggagggcggcgtgcccatgggcgagctgttcagagagatcaccaagcccctgagacccctgggcaaggccgccagcctgctgctggagatcctgggcctgctgtgcaagagcatgggccccaagaaggtgggcaccctgtggagagaggccggcctgagctggaaggagttcctgcccgagggccaggacatcggcgccttcgtggccgagcagaaggtggagtacaccctgggcgaggagagcgaggcccccggccagagagccctgcccagcgaggagctgaacagacagctggagaagctgctgaaggagggcagcagcaaccagagagtgttcgactggatcgaggccaacctgagcgagcagcagatcgtgagcaacaccctggtgagagccctgatgaccgccgtgtgctacagcgccatcatcttcgagacccccctgagagtggacgtggccgtgctgaaggccagagccaagctgctgcagaagtacctgtgcgacgagcagaaggagctgcaggccctgtacgccctgcaggccctggtggtgaccctggagcagccccccaacctgctgagaatgttcttcgacgccctgtacgacgaggacgtggtgaaggaggacgccttctacagctgggagagcagcaaggaccccgccgagcagcagggcaagggcgtggccctgaagagcgtgaccgccttcttcaagtggctgagagaggccgaggaggagagcgaccacaactag

SEQ ID NO: 10588 - DNA, 4821 bp, synthetic construct; identical to SEQ ID NO: 10582
  misc_feature 1..4821: note = Description of Artificial Sequence: Synthetic coding sequence
  source 1..4821: mol_type = other DNA

SEQ ID NO: 10589 - DNA, 492 bp, synthetic construct
  misc_feature 1..492: note = Description of Artificial Sequence: Synthetic coding sequence
  source 1..492: mol_type = other DNA
atgagcggcgccagaaccgccagcacccccacccccccccagaccggcggcggcctggagccccaggccaacggcgagaccccccaggtggccgtgatcgtgagacccgacgacagaagccagggcgccatcatcgccgacagacccggcctgcccggccccgagcacagccccagcgagagccagcccagcagccccagccccacccccagccccagccccgtgctggagcccggcagcgagcccaacctggccgtgctgagcatccccggcgacaccatgaccaccatccagatgagcgtggaggagagcacccccatcagcagagagaccggcgagccctacagactgagccccgagcccacccccctggccgagcccatcctggaggtggaggtgaccctgagcaagcccgtgcccgagagcgagttcagcagcagccccctgcaggcccccacccccctggccagccacaccgtggagatccactag

SEQ ID NO: 10590 - DNA, 4542 bp, synthetic construct
  misc_feature 1..4542: note = Description of Artificial Sequence: Synthetic coding sequence
  source 1..4542: mol_type = other DNA
atgatgatccccagccagatcagctaccccgccagccagggcgcctactacatccccggccagggcagaagcacctacgtggtgcccacccagcagtaccccgtgcagcccggcgcccccggcttctaccccggcgccagccccaccgagttcggcacctacgccggcgcctactaccccgcccagggcgtgcagcagttccccaccggcgtggcccccacccccgtgctgatgaaccagcccccccagatcgcccccaagagagagagaaagaccatcagaatcagagaccccaaccagggcggcaaggacatcaccgaggagatcatgagcggcgccagaaccgccagcacccccacccccccccagaccggcggcggcctggagccccaggccaacggcgagaccccccaggtggccgtgatcgtgagacccgacgacagaagccagggcgccatcatcgccgacagacccggcctgcccggccccgagcacagccccagcgagagccagcccagcagccccagccccacccccagccccagccccgtgctggagcccggcagcgagcccaacctggccgtgctgagcatccccggcgacaccatgaccaccatccagatgagcgtggaggagagcacccccatcagcagagagaccggcgagccctacagactgagccccgagcccacccccctggccgagcccatcctggaggtggaggtgaccctgagcaagcccgtgcccgagagcgagttcagcagcagccccctgcaggcccccacccccctggccagccacaccgtggagatccacgagcccaacggcatggtgcccagcgaggacctggagcccgaggtggagagcagccccgagctggcccccccccccgcctgccccagcgagagccccgtgcccatcgcccccaccgcccagcccgaggagctgctgaacggcgcccccagcccccccgccgtggacctgagccccgtgagcgagcccgaggagcaggccaaggaggtgaccgccagcatggccccccccaccatccccagcgccacccccgccaccgcccccagcgccaccagccccgcccaggaggaggagatggaggaggaggaggaggaggaggagggcgaggccggcgaggccggcgaggccgagagcgagaagggcggcgaggagctgctgccccccgagagcacccccatccccgccaacctgagccagaacctggaggccgccgccgccacccaggtggccgtgagcgtgcccaagagaagaagaaagatcaaggagctgaacaagaaggaggccgtgggcgacctgctggacgccttcaaggaggccaaccccgccgtgcccgaggtggagaaccagccccccgccggcagcaaccccggccccgagagcgagggcagcggcgtgccccccagacccgaggaggccgacgagacctgggacagcaaggaggacaagatccacaacgccgagaacatccagcccggcgagcagaagtacgagtacaagagcgaccagtggaagcccctgaacctggaggagaagaagagatacgacagagagttcctgctgggcttccagttcatcttcgccagcatgcagaagcccgagggcctgccccacatcagcgacgtggtgctggacaaggccaacaagacccccctgagacccctggaccccaccagactgcagggcatcaactgcggccccgacttcacccccagcttcgccaacctgggcagaaccaccctgagcaccagaggcccccccagaggcggccccggcggcgagctgcccagaggcccccaggccggcctgggccccagaagaagccagcagggccccagaaaggagcccagaaagatcatcgccaccgtgctgatgaccgaggacatcaagctgaacaaggccgagaaggcctggaagcccagcagcaagagaaccgccgccgacaaggacagaggcgaggaggacgccgacggcagcaagacccaggacctgttcagaagagtgagaagcatcctgaacaagctgaccccccagatgttccagcagctgatgaagcaggtgacccagctggccatcgacaccgaggagagactgaagggcgtgatcgacctgatcttcgagaaggccatcagcgagcccaacttcagcgtggcctacgccaacatgtgcagatgcctgatggccctgaaggtgcccaccaccgagaagcccaccgtgaccgtgaacttcagaaagctgctgctgaacagatgccagaaggagttcgagaaggacaaggacgacgacgaggtgttcgagaagaagcagaaggagatggacgaggccgccaccgccgaggagagaggcagactgaaggaggagctggaggaggccagagacatcgccagaagaagaagcctgggcaacatcaagttcatcggcgagctgttcaagctgaagatgctgaccgaggccatcatgcacgactgcgtggtgaagctgctgaagaaccacgacgaggagagcctggagtgcctgtgcagactgctgaccaccatcggcaaggacctggacttcgagaaggccaagcccagaatggaccagtacttcaaccagatggagaagatcatcaaggagaagaagaccagcagcagaatcagattcatgctgcaggacgtgctggacctgagaggcagcaactgggtgcccagaagaggcgaccagggccccaagaccatcgaccagatccacaaggaggccgagatggaggagcacagagagcacatcaaggtgcagcagctgatggccaagggcagcgacaagagaagaggcggcccccccggcccccccatcagcagaggcctgcccctggtggacgacggcggctggaacaccgtgcccatcagcaagggcagcagacccatcgacaccagcagactgaccaagatcaccaagcccggcagcatcgacagcaacaaccagctgttcgcccccggcggcagactgagctggggcaagggcagcagcggcggcagcggcgccaagcccagcgacgccgccagcgaggccgccagacccgccaccagcaccctgaacagattcagcgccctgcagcaggccgtgcccaccgagagcaccgacaacagaagagtggtgcagagaagcagcctgagcagagagagaggcgagaaggccggcgacagaggcgacagactggagagaagcgagagaggcggcgacagaggcgacagactggacagagccagaacccccgccaccaagagaagcttcagcaaggaggtggaggagagaagcagagagagacccagccagcccgagggcctgagaaaggccgccagcctgaccgaggacagagacagaggcagagacgccgtgaagagagaggccgccctgccccccgtgagccccctgaaggccgccctgagcgaggaggagctggagaagaagagcaaggccatcatcgaggagtacctgcacctgaacgacatgaaggaggccgtgcagtgcgtgcaggagctggccagccccagcctgctgttcatcttcgtgagacacggcgtggagagcaccctggagagaagcgccatcgccagagagcacatgggccagctgctgcaccagctgctgtgcgccggccacctgagcaccgcccagtactaccagggcctgtacgagatcctggagctggccgaggacatggagatcgacatcccccacgtgtggctgtacctggccgagctggtgacccccatcctgcaggagggcggcgtgcccatgggcgagctgttcagagagatcaccaagcccctgagacccctgggcaaggccgccagcctgctgctggagatcctgggcctgctgtgcaagagcatgggccccaagaaggtgggcaccctgtggagagaggccggcctgagctggaaggagttcctgcccgagggccaggacatcggcgccttcgtggccgagcagaaggtggagtacaccctgggcgaggagagcgaggcccccggccagagagccctgcccagcgaggagctgaacagacagctggagaagctgctgaaggagggcagcagcaaccagagagtgttcgactggatcgaggccaacctgagcgagcagcagatcgtgagcaacaccctggtgagagccctgatgaccgccgtgtgctacagcgccatcatcttcgagacccccctgagagtggacgtggccgtgctgaaggccagagccaagctgctgcagaagtacctgtgcgacgagcagaaggagctgcaggccctgtacgccctgcaggccctggtggtgaccctggagcagccccccaacctgctgagaatgttcttcgacgccctgtacgacgaggacgtggtgaaggaggacgccttctacagctgggagagcagcaaggaccccgccgagcagcagggcaagggcgtggccctgaagagcgtgaccgccttcttcaagtggctgagagaggccgaggaggagagcgaccacaactag

SEQ ID NO: 10591 - DNA, 432 bp, synthetic construct
  misc_feature 1..432: note = Description of Artificial Sequence: Synthetic coding sequence
  source 1..432: mol_type = other DNA
atgagcggcgccagaaccgccagcacccccacccccccccagaccggcggcggcctggagccccaggccaacggcgagaccccccaggtggccgtgatcgtgagacccgacgacagaagccagggcgccatcatcgccgacagacccggcctgcccggccccgagcacagccccagcgagagccagcccagcagccccagccccacccccagccccagccccgtgctggagcccggcagcgagcccaacctggccgtgctgagcatccccggcgacaccatgaccaccatccagatgagcgtggaggagagcacccccatcagcagagagaccggcgagccctacagactgagccccgagcccacccccctggccgagcccatcctggaggtggaggtgaccctgagcaagcccgtgcccgagagcgagtag

SEQ ID NO: 10592 - DNA, 4215 bp, synthetic construct
  misc_feature 1..4215: note = Description of Artificial Sequence: Synthetic coding sequence
  source 1..4215: mol_type = other DNA
atgagcggcgccagaaccgccagcacccccacccccccccagaccggcggcggcctggagccccaggccaacggcgagaccccccaggtggccgtgatcgtgagacccgacgacagaagccagggcgccatcatcgccgacagacccggcctgcccggccccgagcacagccccagcgagagccagcccagcagccccagccccacccccagccccagccccgtgctggagcccggcagcgagcccaacctggccgtgctgagcatccccggcgacaccatgaccaccatccagatgagcgtggaggagagcacccccatcagcagagagaccggcgagccctacagactgagccccgagcccacccccctggccgagcccatcctggaggtggaggtgaccctgagcaagcccgtgcccgagagcgagttcagcagcagccccctgcaggcccccacccccctggccagccacaccgtggagatccacgagcccaacggcatggtgcccagcgaggacctggagcccgaggtggagagcagccccgagctggcccccccccccgcctgccccagcgagagccccgtgcccatcgcccccaccgcccagcccgaggagctgctgaacggcgcccccagcccccccgccgtggacctgagccccgtgagcgagcccgaggagcaggccaaggaggtgaccgccagcatggccccccccaccatccccagcgccacccccgccaccgcccccagcgccaccagccccgcccaggaggaggagatggaggaggaggaggaggaggaggagggcgaggccggcgaggccggcgaggccgagagcgagaagggcggcgaggagctgctgccccccgagagcacccccatccccgccaacctgagccagaacctggaggccgccgccgccacccaggtggccgtgagcgtgcccaagagaagaagaaagatcaaggagctgaacaagaaggaggccgtgggcgacctgctggacgccttcaaggaggccaaccccgccgtgcccgaggtggagaaccagccccccgccggcagcaaccccggccccgagagcgagggcagcggcgtgccccccagacccgaggaggccgacgagacctgggacagcaaggaggacaagatccacaacgccgagaacatccagcccggcgagcagaagtacgagtacaagagcgaccagtggaagcccctgaacctggaggagaagaagagatacgacagagagttcctgctgggcttccagttcatcttcgccagcatgcagaagcccgagggcctgccccacatcagcgacgtggtgctggacaaggccaacaagacccccctgagacccctggaccccaccagactgcagggcatcaactgcggccccgacttcacccccagcttcgccaacctgggcagaaccaccctgagcaccagaggcccccccagaggcggccccggcggcgagctgcccagaggcccccaggccggcctgggccccagaagaagccagcagggccccagaaaggagcccagaaagatcatcgccaccgtgctgatgaccgaggacatcaagctgaacaaggccgagaaggcctggaagcccagcagcaagagaaccgccgccgacaaggacagaggcgaggaggacgccgacggcagcaagacccaggacctgttcagaagagtgagaagcatcctgaacaagctgaccccccagatgttccagcagctgatgaagcaggtgacccagctggccatcgacaccgaggagagactgaagggcgtgatcgacctgatcttcgagaaggccatcagcgagcccaacttcagcgtggcctacgccaacatgtgcagatgcctgatggccctgaaggtgcccaccaccgagaagcccaccgtgaccgtgaacttcagaaagctgctgctgaacagatgccagaaggagttcgagaaggacaaggacgacgacgaggtgttcgagaagaagcagaaggagatggacgaggccgccaccgccgaggagagaggcagactgaaggaggagctggaggaggccagagacatcgccagaagaagaagcctgggcaacatcaagttcatcggcgagctgttcaagctgaagatgctgaccgaggccatcatgcacgactgcgtggtgaagctgctgaagaaccacgacgaggagagcctggagtgcctgtgcagactgctgaccaccatcggcaaggacctggacttcgagaaggccaagcccagaatggaccagtacttcaaccagatggagaagatcatcaaggagaagaagaccagcagcagaatcagattcatgctgcaggacgtgctggacctgagaggcagcaactgggtgcccagaagaggcgaccagggccccaagaccatcgaccagatccacaaggaggccgagatggaggagcacagagagcacatcaaggtgcagcagctgatggccaagggcagcgacaagagaagaggcggcccccccggcccccccatcagcagaggcctgcccctggtggacgacggcggctggaacaccgtgcccatcagcaagggcagcagacccatcgacaccagcagactgaccaagatcaccaagcccggcagcatcgacagcaacaaccagctgttcgcccccggcggcagactgagctggggcaagggcagcagcggcggcagcggcgccaagcccagcgacgccgccagcgaggccgccagacccgccaccagcaccctgaacagattcagcgccctgcagcaggccgtgcccaccgagagcaccgacaacagaagagtggtgcagagaagcagcctgagcagagagagaggcgagaaggccggcgacagaggcgacagactggagagaagcgagagaggcggcgacagaggcgacagactggacagagccagaacccccgccaccaagagaagcttcagcaaggaggtggaggagagaagcagagagagacccagccagcccgagggcctgagaaaggccgccagcctgaccgaggacagagacagaggcagagacgccgtgaagagagaggccgccctgccccccgtgagccccctgaaggccgccctgagcgaggaggagctggagaagaagagcaaggccatcatcgaggagtacctgcacctgaacgacatgaaggaggccgtgcagtgcgtgcaggagctggccagccccagcctgctgttcatcttcgtgagacacggcgtggagagcaccctggagagaagcgccatcgccagagagcacatgggccagctgctgcaccagctgctgtgcgccggccacctgagcaccgcccagtactaccagggcctgtacgagatcctggagctggccgaggacatggagatcgacatcccccacgtgtggctgtacctggccgagctggtgacccccatcctgcaggagggcggcgtgcccatgggcgagctgttcagagagatcaccaagcccctgagacccctgggcaaggccgccagcctgctgctggagatcctgggcctgctgtgcaagagcatgggccccaagaaggtgggcaccctgtggagagaggccggcctgagctggaaggagttcctgcccgagggccaggacatcggcgccttcgtggccgagcagaaggtggagtacaccctgggcgaggagagcgaggcccccggccagagagccctgcccagcgaggagctgaacagacagctggagaagctgctgaaggagggcagcagcaaccagagagtgttcgactggatcgaggccaacctgagcgagcagcagatcgtgagcaacaccctggtgagagccctgatgaccgccgtgtgctacagcgccatcatcttcgagacccccctgagagtggacgtggccgtgctgaaggccagagccaagctgctgcagaagtacctgtgcgacgagcagaaggagctgcaggccctgtacgccctgcaggccctggtggtgaccctggagcagccccccaacctgctgagaatgttcttcgacgccctgtacgacgaggacgtggtgaaggaggacgccttctacagctgggagagcagcaaggaccccgccgagcagcagggcaagggcgtggccctgaagagcgtgaccgccttcttcaagtggctgagagaggccgaggaggagagcgaccacaactag

SEQ ID NO: 10593 - DNA, 4212 bp, synthetic construct
  misc_feature 1..4212: note = Description of Artificial Sequence: Synthetic coding sequence
  source 1..4212: mol_type = other DNA
atgagcggcgccagaaccgccagcacccccacccccccccagaccggcggcggcctggagccccaggccaacggcgagaccccccaggtggccgtgatcgtgagacccgacgacagaagccagggcgccatcatcgccgacagacccggcctgcccggccccgagcacagccccagcgagagccagcccagcagccccagccccacccccagccccagccccgtgctggagcccggcagcgagcccaacctggccgtgctgagcatccccggcgacaccatgaccaccatccagatgagcgtggaggagagcacccccatcagcagagagaccggcgagccctacagactgagccccgagcccacccccctggccgagcccatcctggaggtggaggtgaccctgagcaagcccgtgcccgagagcgagttcagcagcagccccctgcaggcccccacccccctggccagccacaccgtggagatccacgagcccaacggcatggtgcccagcgaggacctggagcccgaggtggagagcagccccgagctggcccccccccccgcctgccccagcgagagccccgtgcccatcgcccccaccgcccagcccgaggagctgctgaacggcgcccccagcccccccgccgtggacctgagccccgtgagcgagcccgaggagcaggccaaggaggtgaccgccagcatggccccccccaccatccccagcgccacccccgccaccgcccccagcgccaccagccccgcccaggaggaggagatggaggaggaggaggaggaggaggagggcgaggccggcgaggccggcgaggccgagagcgagaagggcggcgaggagctgctgccccccgagagcacccccatccccgccaacctgagccagaacctggaggccgccgccgccacccaggtggccgtgagcgtgcccaagagaagaagaaagatcaaggagctgaacaagaaggaggccgtgggcgacctgctggacgccttcaaggaggccaaccccgccgtgcccgaggtggagaaccagccccccgccggcagcaaccccggccccgagagcgagggcagcggcgtgccccccagacccgaggaggccgacgagacctgggacagcaaggaggacaagatccacaacgccgagaacatccagcccggcgagcagaagtacgagtacaagagcgaccagtggaagcccctgaacctggaggagaagaagagatacgacagagagttcctgctgggcttccagttcatcttcgccagcatgcagaagcccgagggcctgccccacatcagcgacgtggtgctggacaaggccaacaagacccccctgagacccctggaccccaccagactgcagggcatcaactgcggccccgacttcacccccagcttcgccaacctgggcagaaccaccctgagcaccagaggcccccccagaggcggccccggcggcgagctgcccagaggccccgccggcctgggccccagaagaagccagcagggccccagaaaggagcccagaaagatcatcgccaccgtgctgatgaccgaggacatcaagctgaacaaggccgagaaggcctggaagcccagcagcaagagaaccgccgccgacaaggacagaggcgaggaggacgccgacggcagcaagacccaggacctgttcagaagagtgagaagcatcctgaacaagctgaccccccagatgttccagcagctgatgaagcaggtgacccagctggccatcgacaccgaggagagactgaagggcgtgatcgacctgatcttcgagaaggccatcagcgagcccaacttcagcgtggcctacgccaacatgtgcagatgcctgatggccctgaaggtgcccaccaccgagaagcccaccgtgaccgtgaacttcagaaagctgctgctgaacagatgccagaaggagttcgagaaggacaaggacgacgacgaggtgttcgagaagaagcagaaggagatggacgaggccgccaccgccgaggagagaggcagactgaaggaggagctggaggaggccagagacatcgccagaagaagaagcctgggcaacatcaagttcatcggcgagctgttcaagctgaagatgctgaccgaggccatcatgcacgactgcgtggtgaagctgctgaagaaccacgacgaggagagcctggagtgcctgtgcagactgctgaccaccatcggcaaggacctggacttcgagaaggccaagcccagaatggaccagtacttcaaccagatggagaagatcatcaaggagaagaagaccagcagcagaatcagattcatgctgcaggacgtgctggacctgagaggcagcaactgggtgcccagaagaggcgaccagggccccaagaccatcgaccagatccacaaggaggccgagatggaggagcacagagagcacatcaaggtgcagcagctgatggccaagggcagcgacaagagaagaggcggcccccccggcccccccatcagcagaggcctgcccctggtggacgacggcggctggaacaccgtgcccatcagcaagggcagcagacccatcgacaccagcagactgaccaagatcaccaagcccggcagcatcgacagcaacaaccagctgttcgcccccggcggcagactgagctggggcaagggcagcagcggcggcagcggcgccaagcccagcgacgccgccagcgaggccgccagacccgccaccagcaccctgaacagattcagcgccctgcagcaggccgtgcccaccgagagcaccgacaacagaagagtggtgcagagaagcagcctgagcagagagagaggcgagaaggccggcgacagaggcgacagactggagagaagcgagagaggcggcgacagaggcgacagactggacagagccagaacccccgccaccaagagaagcttcagcaaggaggtggaggagagaagcagagagagacccagccagcccgagggcctgagaaaggccgccagcctgaccgaggacagagacagaggcagagacgccgtgaagagagaggccgccctgccccccgtgagccccctgaaggccgccctgagcgaggaggagctggagaagaagagcaaggccatcatcgaggagtacctgcacctgaacgacatgaaggaggccgtgcagtgcgtgcaggagctggccagccccagcctgctgttcatcttcgtgagacacggcgtggagagcaccctggagagaagcgccatcgccagagagcacatgggccagctgctgcaccagctgctgtgcgccggccacctgagcaccgcccagtactaccagggcctgtacgagatcctggagctggccgaggacatggagatcgacatcccccacgtgtggctgtacctggccgagctggtgacccccatcctgcaggagggcggcgtgcccatgggcgagctgttcagagagatcaccaagcccctgagacccctgggcaaggccgccagcctgctgctggagatcctgggcctgctgtgcaagagcatgggccccaagaaggtgggcaccctgtggagagaggccggcctgagctggaaggagttcctgcccgagggccaggacatcggcgccttcgtggccgagcagaaggtggagtacaccctgggcgaggagagcgaggcccccggccagagagccctgcccagcgaggagctgaacagacagctggagaagctgctgaaggagggcagcagcaaccagagagtgttcgactggatcgaggccaacctgagcgagcagcagatcgtgagcaacaccctggtgagagccctgatgaccgccgtgtgctacagcgccatcatcttcgagacccccctgagagtggacgtggccgtgctgaaggccagagccaagctgctgcagaagtacctgtgcgacgagcagaaggagctgcaggccctgtacgccctgcaggccctggtggtgaccctggagcagccccccaacctgctgagaatgttcttcgacgccctgtacgacgaggacgtggtgaaggaggacgccttctacagctgggagagcagcaaggaccccgccgagcagcagggcaagggcgtggccctgaagagcgtgaccgccttcttcaagtggctgagagaggccgaggaggagagcgaccacaactag

SEQ ID NO: 10594 - DNA, 4311 bp, synthetic construct
  misc_feature 1..4311: note = Description of Artificial Sequence: Synthetic coding sequence
  source 1..4311: mol_type = other DNA
atgaaccagcccccccagatcgcccccaagagagagagaaagaccatcagaatcagagaccccaaccagggcggcaaggacatcaccgaggagatcatgagcggcgccagaaccgccagcacccccacccccccccagaccggcggcggcctggagccccaggccaacggcgagaccccccaggtggccgtgatcgtgagacccgacgacagaagccagggcgccatcatcgccgacagacccggcctgcccggccccgagcacagccccagcgagagccagcccagcagccccagccccacccccagccccagccccgtgctggagcccggcagcgagcccaacctggccgtgctgagcatccccggcgacaccatgaccaccatccagatgagcgtggaggagagcacccccatcagcagagagaccggcgagccctacagactgagccccgagcccacccccctggccgagcccatcctggaggtggaggtgaccctgagcaagcccgtgcccgagagcgagttcagcagcagccccctgcaggcccccacccccctggccagccacaccgtggagatccacgagcccaacggcatggtgcccagcgaggacctggagcccgaggtggagagcagccccgagctggcccccccccccgcctgccccagcgagagccccgtgcccatcgcccccaccgcccagcccgaggagctgctgaacggcgcccccagcccccccgccgtggacctgagccccgtgagcgagcccgaggagcaggccaaggaggtgaccgccagcatggccccccccaccatccccagcgccacccccgccaccgcccccagcgccaccagccccgcccaggaggaggagatggaggaggaggaggaggaggaggagggcgaggccggcgaggccggcgaggccgagagcgagaagggcggcgaggagctgctgccccccgagagcacccccatccccgccaacctgagccagaacctggaggccgccgccgccacccaggtggccgtgagcgtgcccaagagaagaagaaagatcaaggagctgaacaagaaggaggccgtgggcgacctgctggacgccttcaaggaggccaaccccgccgtgcccgaggtggagaaccagccccccgccggcagcaaccccggccccgagagcgagggcagcggcgtgccccccagacccgaggaggccgacgagacctgggacagcaaggaggacaagatccacaacgccgagaacatccagcccggcgagcagaagtacgagtacaagagcgaccagtggaagcccctgaacctggaggagaagaagagatacgacagagagttcctgctgggcttccagttcatcttcgccagcatgcagaagcccgagggcctgccccacatcagcgacgtggtgctggacaaggccaacaagacccccctgagacccctggaccccaccagactgcagggcatcaactgcggccccgacttcacccccagcttcgccaacctgggcagaaccaccctgagcaccagaggcccccccagaggcggccccggcggcgagctgcccagaggcccccaggccggcctgggccccagaagaagccagcagggccccagaaaggagcccagaaagatcatcgccaccgtgctgatgaccgaggacatcaagctgaacaaggccgagaaggcctggaagcccagcagcaagagaaccgccgccgacaaggacagaggcgaggaggacgccgacggcagcaagacccaggacctgttcagaagagtgagaagcatcctgaacaagctgaccccccagatgttccagcagctgatgaagcaggtgacccagctggccatcgacaccgaggagagactgaagggcgtgatcgacctgatcttcgagaaggccatcagcgagcccaacttcagcgtggcctacgccaacatgtgcagatgcctgatggccctgaaggtgcccaccaccgagaagcccaccgtgaccgtgaacttcagaaagctgctgctgaacagatgccagaaggagttcgagaaggacaaggacgacgacgaggtgttcgagaagaagcagaaggagatggacgaggccgccaccgccgaggagagaggcagactgaaggaggagctggaggaggccagagacatcgccagaagaagaagcctgggcaacatcaagttcatcggcgagctgttcaagctgaagatgctgaccgaggccatcatgcacgactgcgtggtgaagctgctgaagaaccacgacgaggagagcctggagtgcctgtgcagactgctgaccaccatcggcaaggacctggacttcgagaaggccaagcccagaatggaccagtacttcaaccagatggagaagatcatcaaggagaagaagaccagcagcagaatcagattcatgctgcaggacgtgctggacctgagaggcagcaactgggtgcccagaagaggcgaccagggccccaagaccatcgaccagatccacaaggaggccgagatggaggagcacagagagcacatcaaggtgcagcagctgatggccaagggcagcgacaagagaagaggcggcccccccggcccccccatcagcagaggcctgcccctggtggacgacggcggctggaacaccgtgcccatcagcaagggcagcagacccatcgacaccagcagactgaccaagatcaccaagcccggcagcatcgacagcaacaaccagctgttcgcccccggcggcagactgagctggggcaagggcagcagcggcggcagcggcgccaagcccagcgacgccgccagcgaggccgccagacccgccaccagcaccctgaacagattcagcgccctgcagcaggccgtgcccaccgagagcaccgacaacagaagagtggtgcagagaagcagcctgagcagagagagaggcgagaaggccggcgacagaggcgacagactggagagaagcgagagaggcggcgacagaggcgacagactggacagagccagaacccccgccaccaagagaagcttcagcaaggaggtggaggagagaagcagagagagacccagccagcccgagggcctgagaaaggccgccagcctgaccgaggacagagacagaggcagagacgccgtgaagagagaggccgccctgccccccgtgagccccctgaaggccgccctgagcgaggaggagctggagaagaagagcaaggccatcatcgaggagtacctgcacctgaacgacatgaaggaggccgtgcagtgcgtgcaggagctggccagccccagcctgctgttcatcttcgtgagacacggcgtggagagcaccctggagagaagcgccatcgccagagagcacatgggccagctgctgcaccagctgctgtgcgccggccacctgagcaccgcccagtactaccagggcctgtacgagatcctggagctggccgaggacatggagatcgacatcccccacgtgtggctgtacctggccgagctggtgacccccatcctgcaggagggcggcgtgcccatgggcgagctgttcagagagatcaccaagcccctgagacccctgggcaaggccgccagcctgctgctggagatcctgggcctgctgtgcaagagcatgggccccaagaaggtgggcaccctgtggagagaggccggcctgagctggaaggagttcctgcccgagggccaggacatcggcgccttcgtggccgagcagaaggtggagtacaccctgggcgaggagagcgaggcccccggccagagagccctgcccagcgaggagctgaacagacagctggagaagctgctgaaggagggcagcagcaaccagagagtgttcgactggatcgaggccaacctgagcgagcagcagatcgtgagcaacaccctggtgagagccctgatgaccgccgtgtgctacagcgccatcatcttcgagacccccctgagagtggacgtggccgtgctgaaggccagagccaagctgctgcagaagtacctgtgcgacgagcagaaggagctgcaggccctgtacgccctgcaggccctggtggtgaccctggagcagccccccaacctgctgagaatgttcttcgacgccctgtacgacgaggacgtggtgaaggaggacgccttctacagctgggagagcagcaaggaccccgccgagcagcagggcaagggcgtggccctgaagagcgtgaccgccttcttcaagtggctgagagaggccgaggaggagagcgaccacaactag

SEQ ID NO: 10595 - DNA, 384 bp, synthetic construct
  misc_feature 1..384: note = Description of Artificial Sequence: Synthetic coding sequence
  source 1..384: mol_type = other DNA
atgagcggcgccagaaccgccagcacccccacccccccccagaccggcggcggcctggagccccaggccaacggcgagaccccccaggtggccgtgatcgtgagacccgacgacagaagccagggcgccatcatcgccgacagacccggcctgcccggccccgagcacagccccagcgagagccagcccagcagccccagccccacccccagccccagccccgtgctggagcccggcagcgagcccaacctggccgtgctgagcatccccggcgacaccatgaccaccatccagatgagcgtggaggagagcacccccatcagcagagagaccggcgagccctacagactgagccccgagcccacccccctggccgagccctag

SEQ ID NO: 10596 - DNA, 264 bp, synthetic construct
  misc_feature 1..264: note = Description of Artificial Sequence: Synthetic coding sequence
  source 1..264: mol_type = other DNA
atgaacacccccagccagcccagacagcacttctaccccagcagagcccagccccccagcagcgccgccagcagagtgcagagcgccgcccccgccagacccggccccgccgcccacgtgtaccccgccggcagccaggtgatgatgatccccagccagatcagctaccccgccagccagggcgcctactacatccccggccagggcagaagcacctacgtggtgcccacccagcagtaccccgtgcagcccggcgccccctag

SEQ ID NO: 10597 - DNA, 858 bp, synthetic construct
  misc_feature 1..858: note = Description of Artificial Sequence: Synthetic coding sequence
  source 1..858: mol_type = other DNA
atgagcggcgccagaaccgccagcacccccacccccccccagaccggcggcggcctggagccccaggccaacggcgagaccccccaggtggccgtgatcgtgagacccgacgacagaagccagggcgccatcatcgccgacagacccggcctgcccggccccgagcacagccccagcgagagccagcccagcagccccagccccacccccagccccagccccgtgctggagcccggcagcgagcccaacctggccgtgctgagcatccccggcgacaccatgaccaccatccagatgagcgtggaggagagcacccccatcagcagagagaccggcgagccctacagactgagccccgagcccacccccctggccgagcccatcctggaggtggaggtgaccctgagcaagcccgtgcccgagagcgagttcagcagcagccccctgcaggcccccacccccctggccagccacaccgtggagatccacgagcccaacggcatggtgcccagcgaggacctggagcccgaggtggagagcagccccgagctggcccccccccccgcctgccccagcgagagccccgtgcccatcgcccccaccgcccagcccgaggagctgctgaacggcgcccccagcccccccgccgtggacctgagccccgtgagcgagcccgaggagcaggccaaggaggtgaccgccagcatggccccccccaccatccccagcgccacccccgccaccgcccccagcgccaccagccccgcccaggaggaggagatggaggaggaggaggaggaggaggagggcgaggccggcgaggccggcgaggccgagagcgagaagggcggcgagtag

SEQ ID NO: 10598 - DNA, 1836 bp, synthetic construct
  misc_feature 1..1836: note = Description of Artificial Sequence: Synthetic coding sequence
  source 1..1836: mol_type = other DNA
atggccgccagcgccaagaagaagaacaagaagggcaagaccatcagcctgaccgacttcctggccgaggacggcggcaccggcggcggcagcacctacgtgagcaagcccgtgagctgggccgacgagaccgacgacctggagggcgacgtgagcaccacctggcacagcaacgacgacgacgtgtacagagccccccccatcgacagaagcatcctgcccaccgcccccagagccgccagagagcccaacatcgacagaagcagactgcccaagagccccccctacaccgccttcctgggcaacctgccctacgacgtgaccgaggagagcatcaaggagttcttcagaggcctgaacatcagcgccgtgagactgcccagagagcccagcaaccccgagagactgaagggcttcggctacgccgagttcgaggacctggacagcctgctgagcgccctgagcctgaacgaggagagcctgggcaacagaagaatcagagtggacgtggccgaccaggcccaggacaaggacagagacgacagaagcttcggcagagacagaaacagagacagcgacaagaccgacaccgactggagagccagacccgccaccgacagcttcgacgactacccccccagaagaggcgacgacagcttcggcgacaagtacagagacagatacgacagcgacagatacagagacggctacagagacggctacagagacggccccagaagagacatggacagatacggcggcagagacagatacgacgacagaggcagcagagactacgacagaggctacgacagcagaatcggcagcggcagaagagccttcggcagcggctacagaagagacgacgactacagaggcggcggcgacagatacgaggacagatacgacagaagagacgacagaagctggagcagcagagacgactacagcagagacgactacagaagagacgacagaggccccccccagagacccaagctgaacctgaagcccagaagcacccccaaggaggacgacagcagcgccagcaccagccagagcaccagagccgccagcatcttcggcggcgccaagcccgtggacaccgccgccagagagagagaggtggaggagagactgcagaaggagcaggagaagctgcagagacagctggacgagcccaagctggagagaagacccagagagagacaccccagctggagaagcgaggagacccaggagagagagagaagcagaaccggcagcgagagcagccagaccggcaccagcaccaccagcagcagaaacgccagaagaagagagagcgagaagagcctggagaacgagaccctgaacaaggaggaggactgccacagccccaccagcaagccccccaagcccgaccagcccctgaaggtgatgcccgcccccccccccaaggagaacgcctgggtgaagagaagcagcaacccccccgccagaagccagagcagcgacaccgagcagcagagccccaccagcggcggcggcaaggtggcccccgcccagcccagcgaggagggccccggcagaaaggacgagaacaaggtggacggcatgaacgcccccaagggccagaccggcaacagcagcagaggccccggcgacggcggcaacagagaccactggaaggagagcgacagaaaggacggcaagaaggaccaggacagcagaagcgcccccgagcccaagaagcccgaggagaaccccgccagcaagttcagcagcgccagcaagtacgccgccctgagcgtggacggcgaggacgagaacgagggcgaggactacgccgagtag

SEQ ID NO: 10599 - DNA, 1764 bp, synthetic construct
  misc_feature 1..1764: note = Description of Artificial Sequence: Synthetic coding sequence
  source 1..1764: mol_type = other DNA
atggccgccagcgccaagaagaagaacaagaagggcaagaccatcagcctgaccgacttcctggccgaggacggcggcaccggcggcggcagcacctacgtgagcaagcccgtgagctgggccgacgagaccgacgacctggagggcgacgtgagcaccacctggcacagcaacgacgacgacgtgtacagagccccccccatcgacagaagcatcctgcccaccgcccccagagccgccagagagcccaacatcgacagaagcagactgcccaagagccccccctacaccgccttcctgggcaacctgccctacgacgtgaccgaggagagcatcaaggagttcttcagaggcctgaacatcagcgccgtgagactgcccagagagcccagcaaccccgagagactgaagggcttcggctacgccgagttcgaggacctggacagcctgctgagcgccctgagcctgaacgaggagagcctgggcaacagaagaatcagagtggacgtggccgaccaggcccaggacaaggacagagacgacagaagcttcggcagagacagaaacagagacagcgacaagaccgacaccgactggagagccagacccgccaccgacagcttcgacgactacccccccagaagaggcgacgacagcttcggcgacaagtacagagacagatacggcggcagagacagatacgacgacagaggcagcagagactacgacagaggctacgacagcagaatcggcagcggcagaagagccttcggcagcggctacagaagagacgacgactacagaggcggcggcgacagatacgaggacagatacgacagaagagacgacagaagctggagcagcagagacgactacagcagagacgactacagaagagacgacagaggccccccccagagacccaagctgaacctgaagcccagaagcacccccaaggaggacgacagcagcgccagcaccagccagagcaccagagccgccagcatcttcggcggcgccaagcccgtggacaccgccgccagagagagagaggtggaggagagactgcagaaggagcaggagaagctgcagagacagctggacgagcccaagctggagagaagacccagagagagacaccccagctggagaagcgaggagacccaggagagagagagaagcagaaccggcagcgagagcagccagaccggcaccagcaccaccagcagcagaaacgccagaagaagagagagcgagaagagcctggagaacgagaccctgaacaaggaggaggactgccacagccccaccagcaagccccccaagcccgaccagcccctgaaggtgatgcccgcccccccccccaaggagaacgcctgggtgaagagaagcagcaacccccccgccagaagccagagcagcgacaccgagcagcagagccccaccagcggcggcggcaaggtggcccccgcccagcccagcgaggagggccccggcagaaaggacgagaacaaggtggacggcatgaacgcccccaagggccagaccggcaacagcagcagaggccccggcgacggcggcaacagagaccactggaaggagagcgacagaaaggacggcaagaaggaccaggacagcagaagcgcccccgagcccaagaagcccgaggagaaccccgccagcaagttcagcagcgccagcaagtacgccgccctgagcgtggacggcgaggacgagaacgagggcgaggactacgccgagtag

SEQ ID NO: 10600 - DNA, 714 bp, synthetic construct
  misc_feature 1..714: note = Description of Artificial Sequence: Synthetic coding sequence
  source 1..714: mol_type = other DNA
atgctggacctgaccagcagaggccaggtgggcaccagcagaagaatggccgaggccgcctgcagcgcccacttcctggagaccacccccacccccaacccccccaccaccgaggaggagaagaccgagagcaaccaggaggtggccaaccccgagcactacatcaagcaccccctgcagaacagatgggccctgtggttcttcaagaacgacaagagcaagacctggcaggccaacctgagactgatcagcaagttcgacaccgtggaggacttctgggccctgtacaaccacatccagctgagcagcaacctgatgcccggctgcgactacagcctgttcaaggacggcatcgagcccatgtgggaggacgagaagaacaagagaggcggcagatggctgatcaccctgaacaagcagcagagaagaagcgacctggacagattctggctggagaccctgctgtgcctgatcggcgagagcttcgacgactacagcgacgacgtgtgcggcgccgtggtgaacgtgagagccaagggcgacaagatcgccatctggaccaccgagtgcgagaacagagaggccgtgacccacatcggcagagtgtacaaggagagactgggcctgccccccaagatcgtgatcggctaccagagccacgccgacaccgccaccaagagcggcagcaccaccaagaacagattcgtggtgtag

SEQ ID NO: 10601 - DNA, 654 bp, synthetic construct
  misc_feature 1..654: note = Description of Artificial Sequence: Synthetic coding sequence
  source 1..654: mol_type = other DNA
atggccaccgtggagcccgagaccacccccacccccaacccccccaccaccgaggaggagaagaccgagagcaaccaggaggtggccaaccccgagcactacatcaagcaccccctgcagaacagatgggccctgtggttcttcaagaacgacaagagcaagacctggcaggccaacctgagactgatcagcaagttcgacaccgtggaggacttctgggccctgtacaaccacatccagctgagcagcaacctgatgcccggctgcgactacagcctgttcaaggacggcatcgagcccatgtgggaggacgagaagaacaagagaggcggcagatggctgatcaccctgaacaagcagcagagaagaagcgacctggacagattctggctggagaccctgctgtgcctgatcggcgagagcttcgacgactacagcgacgacgtgtgcggcgccgtggtgaacgtgagagccaagggcgacaagatcgccatctggaccaccgagtgcgagaacagagaggccgtgacccacatcggcagagtgtacaaggagagactgggcctgccccccaagatcgtgatcggctaccagagccacgccgacaccgccaccaagagcggcagcaccaccaagaacagattcgtggtgtag

SEQ ID NO: 10602 - DNA, 747 bp, synthetic construct
  misc_feature 1..747: note = Description of Artificial Sequence: Synthetic coding sequence
  source 1..747: mol_type = other DNA
atggccaccgtggagcccgagaccacccccacccccaacccccccaccaccgaggaggagaagaccgagagcaaccaggaggtggccaaccccgagcactacatcaagcaccccctgcagaacagatgggccctgtggttcttcaagaacgacaagagcaagacctggcaggccaacctgagactgatcagcaagttcgacaccgtggaggacttctgggccctgtacaaccacatccagctgagcagcaacctgatgcccggctgcgactacagcctgttcaaggacggcatcgagcccatgtgggaggacgagaagaacaagagaggcggcagatggctgatcaccctgaacaagcagcagagaagaagcgacctggacagattctggctggagaccagatgggacctggccatgctgcccagactggtgagcaacttctggccccaggtgatcctgcccctgcagccccccaaggtgctggagctgcagctgctgtgcctgatcggcgagagcttcgacgactacagcgacgacgtgtgcggcgccgtggtgaacgtgagagccaagggcgacaagatcgccatctggaccaccgagtgcgagaacagagaggccgtgacccacatcggcagagtgtacaaggagagactgggcctgccccccaagatcgtgatcggctaccagagccacgccgacaccgccaccaagagcggcagcaccaccaagaacagattcgtggtgtag

SEQ ID NO: 10603 - DNA, 357 bp, synthetic construct
  misc_feature 1..357: note = Description of Artificial Sequence: Synthetic coding sequence
  source 1..357: mol_type = other DNA
atgagcggcggcagcagctgcagccagacccccagcagagccatccccgccaccagaagagtggtgctgggcgacggcgtgcagctgccccccggcgactacagcaccacccccggcggcaccctgttcagcaccacccccggcggcaccagaatcatctacgacagaaagttcctgatggagtgcagaaacagccccgtgaccaagaccccccccagagacctgcccaccatccccggcgtgaccagccccagcagcgacgagccccccatggaggccagccagagccacctgagaaacagccccgaggacaagagagccggcggcgaggagagccagttcgagatggacatctag

SEQ ID NO: 10604 - DNA, 1857 bp, synthetic construct
  misc_feature 1..1857: note = Description of Artificial Sequence: Synthetic coding sequence
  source 1..1857: mol_type = other DNA
atggccagcaccgactacagcacctacagccaggccgccgcccagcagggctacagcgcctacaccgcccagcccacccagggctacgcccagaccacccaggcctacggccagcagagctacggcacctacggccagcccaccgacgtgagctacacccaggcccagaccaccgccacctacggccagaccgcctacgccaccagctacggccagccccccaccggctacaccacccccaccgccccccaggcctacagccagcccgtgcagggctacggcaccggcgcctacgacaccaccaccgccaccgtgaccaccacccaggccagctacgccgcccagagcgcctacggcacccagcccgcctaccccgcctacggccagcagcccgccgccaccgcccccaccagaccccaggacggcaacaagcccaccgagaccagccagccccagagcagcaccggcggctacaaccagcccagcctgggctacggccagagcaactacagctacccccaggtgcccggcagctaccccatgcagcccgtgaccgccccccccagctacccccccaccagctacagcagcacccagcccaccagctacgaccagagcagctacagccagcagaacacctacggccagcccagcagctacggccagcagagcagctacggccagcagagcagctacggccagcagccccccaccagctaccccccccagaccggcagctacagccaggcccccagccagtacagccagcagagcagcagctacggccagcagagcagcttcagacaggaccaccccagcagcatgggcgtgtacggccaggagagcggcggcttcagcggccccggcgagaacagaagcatgagcggccccgacaacagaggcagaggcagaggcggcttcgacagaggcggcatgagcagagaccccgacgaggacagcgacaacagcgccatctacgtgcagggcctgaacgacagcgtgaccctggacgacctggccgacttcttcaagcagtgcggcgtggtgaagatgaacaagagaaccggccagcccatgatccacatctacctggacaaggagaccggcaagcccaagggcgacgccaccgtgagctacgaggacccccccaccgccaaggccgccgtggagtggttcgacggcaaggacttccagggcagcaagctgaaggtgagcctggccagaaagaagccccccatgaacagcatgagaggcggcctgccccccagagagggcagaggcatgcccccccccctgagaggcggccccggcggccccggcggccccggcggccccatgggcagaatgggcggcagaggcggcgacagaggcggcttcccccccagaggccccagaggcagcagaggcaaccccagcggcggcggcaacgtgcagcacagagccggcgactggcagtgccccaaccccggctgcggcaaccagaacttcgcctggagaaccgagtgcaaccagtgcaaggcccccaagcccgagggcttcctgcccccccccttccccccccccggcggcgacagaggcagaggcggccccggcggcatgagaggcggcagaggcggcctgatggacagaggcggccccggcggcatgttcagaggcggcagaggcggcgacagaggcggcttcagaggcggcagaggcatggacagaggcggcttcggcggcggcagaagaggcggccccggcggcccccccggccccctgatggagcagatgggcggcagaagaggcggcagaggcggccccggcaagatggacaagggcgagcacagacaggagagaagagacagaccctactag

SEQ ID NO: 10605 - DNA, 1803 bp, synthetic construct
  misc_feature 1..1803: note = Description of Artificial Sequence: Synthetic coding sequence
  source 1..1803: mol_type = other DNA
atggccagcaccgactacagcacctacagccaggccgccgcccagcagggctacagcgcctacaccgcccagcccacccagggctacgcccagaccacccaggcctacggccagcagagctacggcacctacggccagcccaccgacgtgagctacacccaggcccagaccaccgccacctacggccagaccgcctacgccaccagctacggccagccccccaccggctacaccacccccaccgccccccaggcctacagccagcccgtgcagggctacggcaccggcgcctacgacaccaccaccgccaccgtgaccaccacccaggccagctacgccgcccagagcgcctacggcacccagcccgcctaccccgcctacggccagcagcccgccgccaccgcccccaccagctacagcagcacccagcccaccagctacgaccagagcagctacagccagcagaacacctacggccagcccagcagctacggccagcagagcagctacggccagcagagcagctacggccagcagccccccaccagctaccccccccagaccggcagctacagccaggcccccagccagtacagccagcagagcagcagctacggccagcagagcagcttcagacaggaccaccccagcagcatgggcgtgtacggccaggagagcggcggcttcagcggccccggcgagaacagaagcatgagcggccccgacaacagaggcagaggcagaggcggcttcgacagaggcggcatgagcagaggcggcagaggcggcggcagaggcggcatgggcagcgccggcgagagaggcggcttcaacaagcccggcggccccatggacgagggccccgacctggacctgggcccccccgtggaccccgacgaggacagcgacaacagcgccatctacgtgcagggcctgaacgacagcgtgaccctggacgacctggccgacttcttcaagcagtgcggcgtggtgaagatgaacaagagaaccggccagcccatgatccacatctacctggacaaggagaccggcaagcccaagggcgacgccaccgtgagctacgaggacccccccaccgccaaggccgccgtggagtggttcgacggcaaggacttccagggcagcaagctgaaggtgagcctggccagaaagaagccccccatgaacagcatgagaggcggcctgccccccagagagggcagaggcatgcccccccccctgagaggcggccccggcggccccggcggccccggcggccccatgggcagaatgggcggcagaggcggcgacagaggcggcttcccccccagaggccccagaggcagcagaggcaaccccagcggcggcggcaacgtgcagcacagagccggcgactggcagtgccccaaccccggctgcggcaaccagaacttcgcctggagaaccgagtgcaaccagtgcaaggcccccaagcccgagggcttcctgcccccccccttccccccccccggcggcgacagaggcagaggcggccccggcggcatgagaggcggcagaggcggcctgatggacagaggcggccccggcggcatgttcagaggcggcagaggcggcgacagaggcggcttcagaggcggcagaggcatggacagaggcggcttcggcggcggcagaagaggcggccccggcggcccccccggccccctgatggagcagatgggcggcagaagaggcggcagaggcggccccggcaagatggacaagggcgagcacagacaggagagaagagacagaccctactag

SEQ ID NO: 10606 - DNA, 1752 bp, synthetic construct
  misc_feature 1..1752: note = Description of Artificial Sequence: Synthetic coding sequence
  source 1..1752: mol_type = other DNA
atggccagcaccgactacagcacctacagccaggccgccgcccagcagggctacagcgcctacaccgcccagcccacccagggctacgcccagaccacccaggcctacggccagcagagctacggcacctacggccagcccaccgacgtgagctacacccaggcccagaccaccgccacctacggccagaccgcctacgccaccagctacggccagccccccaccggctacaccacccccaccgccccccaggcctacagccagcccgtgcagggctacggcaccggcgcctacgacaccaccaccgccaccgtgaccaccacccaggccagctacgccgcccagagcgcctacggcacccagcccgcctaccccgcctacggccagcagcccgccgccaccgcccccaccagaccccaggacggcaacaagcccaccgagaccagccagccccagagcagcaccggcggctacaaccagcccagcctgggctacggccagagcaactacagctacccccaggtgcccggcagctaccccatgcagcccgtgaccgccccccccagctacccccccaccagctacagcagcacccagcccaccagctacgaccagagcagctacagccagcagaacacctacggccagcccagcagctacggccagcagagcagctacggccagcagagcagctacggccagcagccccccaccagctaccccccccagaccggcagctacagccaggcccccagccagtacagccagcagagcagcagctacggccagcagagacccatggacgagggccccgacctggacctgggcccccccgtggaccccgacgaggacagcgacaacagcgccatctacgtgcagggcctgaacgacagcgtgaccctggacgacctggccgacttcttcaagcagtgcggcgtggtgaagatgaacaagagaaccggccagcccatgatccacatctacctggacaaggagaccggcaagcccaagggcgacgccaccgtgagctacgaggacccccccaccgccaaggccgccgtggagtggttcgacggcaaggacttccagggcagcaagctgaaggtgagcctggccagaaagaagccccccatgaacagcatgagaggcggcctgccccccagagagggcagaggcatgcccccccccctgagaggcggccccggcggccccggcggccccggcggccccatgggcagaatgggcggcagaggcggcgacagaggcggcttcccccccagaggccccagaggcagcagaggcaaccccagcggcggcggcaacgtgcagcacagagccggcgactggcagtgccccaaccccggctgcggcaaccagaacttcgcctggagaaccgagtgcaaccagtgcaaggcccccaagcccgagggcttcctgcccccccccttccccccccccggcggcgacagaggcagaggcggccccggcggcatgagaggcggcagaggcggcctgatggacagaggcggccccggcggcatgttcagaggcggcagaggcggcgacagaggcggcttcagaggcggcagaggcatggacagaggcggcttcggcggcggcagaagaggcggccccggcggcccccccggccccctgatggagcagatgggcggcagaagaggcggcagaggcggccccggcaagatggacaagggcgagcacagacaggagagaagagacagaccctactag

SEQ ID NO: 10607 - DNA, 1971 bp, synthetic construct
  misc_feature 1..1971: note = Description of Artificial Sequence: Synthetic coding sequence
  source 1..1971: mol_type = other DNA
atggccagcaccgactacagcacctacagccaggccgccgcccagcagggctacagcgcctacaccgcccagcccacccagggctacgcccagaccacccaggcctacggccagcagagctacggcacctacggccagcccaccgacgtgagctacacccaggcccagaccaccgccacctacggccagaccgcctacgccaccagctacggccagccccccaccggctacaccacccccaccgccccccaggcctacagccagcccgtgcagggctacggcaccggcgcctacgacaccaccaccgccaccgtgaccaccacccaggccagctacgccgcccagagcgcctacggcacccagcccgcctaccccgcctacggccagcagcccgccgccaccgcccccaccagaccccaggacggcaacaagcccaccgagaccagccagccccagagcagcaccggcggctacaaccagcccagcctgggctacggccagagcaactacagctacccccaggtgcccggcagctaccccatgcagcccgtgaccgccccccccagctacccccccaccagctacagcagcacccagcccaccagctacgaccagagcagctacagccagcagaacacctacggccagcccagcagctacggccagcagagcagctacggccagcagagcagctacggccagcagccccccaccagctaccccccccagaccggcagctacagccaggcccccagccagtacagccagcagagcagcagctacggccagcagagcagcttcagacaggaccaccccagcagcatgggcgtgtacggccaggagagcggcggcttcagcggccccggcgagaacagaagcatgagcggccccgacaacagaggcagaggcagaggcggcttcgacagaggcggcatgagcagaggcggcagaggcggcggcagaggcggcatgggcagcgccggcgagagaggcggcttcaacaagcccggcggccccatggacgagggccccgacctggacctgggcccccccgtggaccccgacgaggacagcgacaacagcgccatctacgtgcagggcctgaacgacagcgtgaccctggacgacctggccgacttcttcaagcagtgcggcgtggtgaagatgaacaagagaaccggccagcccatgatccacatctacctggacaaggagaccggcaagcccaagggcgacgccaccgtgagctacgaggacccccccaccgccaaggccgccgtggagtggttcgacggcaaggacttccagggcagcaagctgaaggtgagcctggccagaaagaagccccccatgaacagcatgagaggcggcctgccccccagagagggcagaggcatgcccccccccctgagaggcggccccggcggccccggcggccccggcggccccatgggcagaatgggcggcagaggcggcgacagaggcggcttcccccccagaggccccagaggcagcagaggcaaccccagcggcggcggcaacgtgcagcacagagccggcgactggcagtgccccaaccccggctgcggcaaccagaacttcgcctggagaaccgagtgcaaccagtgcaaggcccccaagcccgagggcttcctgcccccccccttccccccccccggcggcgacagaggcagaggcggccccggcggcatgagaggcggcagaggcggcctgatggacagaggcggccccggcggcatgttcagaggcggcagaggcggcgacagaggcggcttcagaggcggcagaggcatggacagaggcggcttcggcggcggcagaagaggcggccccggcggcccccccggccccctgatggagcagatgggcggcagaagaggcggcagaggcggccccggcaagatggacaagggcgagcacagacaggagagaagagacagaccctactag

SEQ ID NO: 10608 - DNA, 1968 bp, synthetic construct
  misc_feature 1..1968: note = Description of Artificial Sequence: Synthetic coding sequence
  source 1..1968: mol_type = other DNA
atggccagcaccgactacagcacctacagccaggccgccgcccagcagggctacagcgcctacaccgcccagcccacccagggctacgcccagaccacccaggcctacggccagcagagctacggcacctacggccagcccaccgacgtgagctacacccaggcccagaccaccgccacctacggccagaccgcctacgccaccagctacggccagccccccaccggctacaccacccccaccgccccccaggcctacagccagcccgtgcagggctacggcaccggcgcctacgacaccaccaccgccaccgtgaccaccacccaggccagctacgccgcccagagcgcctacggcacccagcccgcctaccccgcctacggccagcagcccgccgccaccgcccccaccagaccccaggacggcaacaagcccaccgagaccagccagccccagagcagcaccggcggctacaaccagcccagcctgggctacggccagagcaactacagctacccccaggtgcccggcagctaccccatgcagcccgtgaccgccccccccagctacccccccaccagctacagcagcacccagcccaccagctacgaccagagcagctacagccagcagaacacctacggccagcccagcagctacggccagcagagcagctacggccagcagagcagctacggccagcagccccccaccagctaccccccccagaccggcagctacagccaggcccccagccagtacagccagcagagcagcagctacggccagcagagcagcttcagacaggaccaccccagcagcatgggcgtgtacggccaggagagcggcggcttcagcggccccggcgagaacagaagcatgagcggccccgacaacagaggcagaggcagaggcggcttcgacagaggcggcatgagcagaggcggcagaggcggcggcagaggcggcatgggcgccggcgagagaggcggcttcaacaagcccggcggccccatggacgagggccccgacctggacctgggcccccccgtggaccccgacgaggacagcgacaacagcgccatctacgtgcagggcctgaacgacagcgtgaccctggacgacctggccgacttcttcaagcagtgcggcgtggtgaagatgaacaagagaaccggccagcccatgatccacatctacctggacaaggagaccggcaagcccaagggcgacgccaccgtgagctacgaggacccccccaccgccaaggccgccgtggagtggttcgacggcaaggacttccagggcagcaagctgaaggtgagcctggccagaaagaagccccccatgaacagcatgagaggcggcctgccccccagagagggcagaggcatgcccccccccctgagaggcggccccggcggccccggcggccccggcggccccatgggcagaatgggcggcagaggcggcgacagaggcggcttcccccccagaggccccagaggcagcagaggcaaccccagcggcggcggcaacgtgcagcacagagccggcgactggcagtgccccaaccccggctgcggcaaccagaacttcgcctggagaaccgagtgcaaccagtgcaaggcccccaagcccgagggcttcctgcccccccccttccccccccccggcggcgacagaggcagaggcggccccggcggcatgagaggcggcagaggcggcctgatggacagaggcggccccggcggcatgttcagaggcggcagaggcggcgacagaggcggcttcagaggcggcagaggcatggacagaggcggcttcggcggcggcagaagaggcggccccggcggcccccccggccccctgatggagcagatgggcggcagaagaggcggcagaggcggccccggcaagatggacaagggcgagcacagacaggagagaagagacagaccctactag

SEQ ID NO: 10609 - DNA, 1986 bp, synthetic construct
  misc_feature 1..1986: note = Description of Artificial Sequence: Synthetic coding sequence
  source 1..1986: mol_type = other DNA
atggccagcaccgactacagcacctacagccaggccgccgcccagcagggctacagcgcctacaccgcccagcccacccagggctacgcccagaccacccaggcctacggccagcagagctacggcacctacggccagcccaccgacgtgagctacacccaggcccagaccaccgccacctacggccagaccgcctacgccaccagctacggccagccccccaccgtggagggcaccagcaccggctacaccacccccaccgccccccaggcctacagccagcccgtgcagggctacggcaccggcgcctacgacaccaccaccgccaccgtgaccaccacccaggccagctacgccgcccagagcgcctacggcacccagcccgcctaccccgcctacggccagcagcccgccgccaccgcccccaccagaccccaggacggcaacaagcccaccgagaccagccagccccagagcagcaccggcggctacaaccagcccagcctgggctacggccagagcaactacagctacccccaggtgcccggcagctaccccatgcagcccgtgaccgccccccccagctacccccccaccagctacagcagcacccagcccaccagctacgaccagagcagctacagccagcagaacacctacggccagcccagcagctacggccagcagagcagctacggccagcagagcagctacggccagcagccccccaccagctaccccccccagaccggcagctacagccaggcccccagccagtacagccagcagagcagcagctacggccagcagagcagcttcagacaggaccaccccagcagcatgggcgtgtacggccaggagagcggcggcttcagcggccccggcgagaacagaagcatgagcggccccgacaacagaggcagaggcagaggcggcttcgacagaggcggcatgagcagaggcggcagaggcggcggcagaggcggcatgggcgccggcgagagaggcggcttcaacaagcccggcggccccatggacgagggccccgacctggacctgggcccccccgtggaccccgacgaggacagcgacaacagcgccatctacgtgcagggcctgaacgacagcgtgaccctggacgacctggccgacttcttcaagcagtgcggcgtggtgaagatgaacaagagaaccggccagcccatgatccacatctacctggacaaggagaccggcaagcccaagggcgacgccaccgtgagctacgaggacccccccaccgccaaggccgccgtggagtggttcgacggcaaggacttccagggcagcaagctgaaggtgagcctggccagaaagaagccccccatgaacagcatgagaggcggcctgccccccagagagggcagaggcatgcccccccccctgagaggcggccccggcggccccggcggccccggcggccccatgggcagaatgggcggcagaggcggcgacagaggcggcttcccccccagaggccccagaggcagcagaggcaaccccagcggcggcggcaacgtgcagcacagagccggcgactggcagtgccccaaccccggctgcggcaaccagaacttcgcctggagaaccgagtgcaaccagtgcaaggcccccaagcccgagggcttcctgcccccccccttccccccccccggcggcgacagaggcagaggcggccccggcggcatgagaggcggcagaggcggcctgatggacagaggcggccccggcggcatgttcagaggcggcagaggcggcgacagaggcggcttcagaggcggcagaggcatggacagaggcggcttcggcggcggcagaagaggcggccccggcggcccccccggccccctgatggagcagatgggcggcagaagaggcggcagaggcggccccggcaagatggacaagggcgagcacagacaggagagaagagacagaccctactag

SEQ ID NO: 10610 - DNA, 543 bp, synthetic construct
  misc_feature 1..543: note = Description of Artificial Sequence: Synthetic coding sequence
  source 1..543: mol_type = other DNA
atggccagcaccgactacagcacctacagccaggccgccgcccagcagggctacagcgcctacaccgcccagcccacccagggctacgcccagaccacccaggccagctacgccgcccagagcgcctacggcacccagcccgcctaccccgcctacggccagcagcccgccgccaccgcccccaccagaccccaggacggcaacaagcccaccgagaccagccagccccagagcagcaccggcggctacaaccagcccagcctgggctacggccagagcaactacagctacccccaggtgcccggcagctaccccatgcagcccgtgaccgccccccccagctacccccccaccagctacagcagcacccagcccaccagctacgaccagagcagctacagccagcagaacacctacggccagcccagcagctacggccagcagagcagctacggccagcagagcagctacggccagcagccccccaccagctaccccccccagaccggcagctacagccaggcccccagccagtacagctag

SEQ ID NO: 10611 - DNA, 1065 bp, synthetic construct
  misc_feature 1..1065: note = Description of Artificial Sequence: Synthetic coding sequence
  source 1..1065: mol_type = other DNA
atggccagcaccgactacagcacctacagccaggccgccgcccagcagggctacagcgcctacaccgcccagcccacccagggctacgcccagaccacccaggcctacggccagcagagctacggcacctacggccagcccaccgacgtgagctacacccaggcccagaccaccgccacctacggccagaccgcctacgccaccagctacggccagccccccaccggctacaccacccccaccgccccccaggcctacagccagcccgtgcagggctacggcaccggcgcctacgacaccaccaccgccaccgtgaccaccacccaggccagctacgccgcccagagcgcctacggcacccagcccgcctaccccgcctacggccagcagcccgccgccaccgcccccaccagaccccaggacggcaacaagcccaccgagaccagccagccccagagcagcaccggcggctacaaccagcccagcctgggctacggccagagcaactacagctacccccaggtgcccggcagctaccccatgcagcccgtgaccgccccccccagctacccccccaccagctacagcagcacccagcccaccagctacgaccagagcagctacagccagcagaacacctacggccagcccagcagctacggccagcagagcagctacggccagcagagcagctacggccagcagccccccaccagctaccccccccagaccggcagctacagccaggcccccagccagtacagccagcagagcagcagctacggccagcagagcagcttcagacaggaccaccccagcagcatgggcgtgtacggccaggagagcggcggcttcagcggccccggcgagaacagaagcatgagcggccccgacaacagaggcagaggcagaggcggcttcgacagaggcggcatgagcagaggcggcagaggcggcggcagaggcggcatgggcctgcagagcgagagcctggtgtacaccagcatcctgaagaagtacccctacagcgtgctgagcagacagcacaacgagaagtgggactag

SEQ ID NO: 10612 - DNA, 972 bp, synthetic construct
  misc_feature 1..972: note = Description of Artificial Sequence: Synthetic coding sequence
  source 1..972: mol_type = other DNA
atggaccccggcaaggacaaggagggcgtgccccagcccagcggcccccccgccagaaagaagttcgtgatccccctggacgaggacgaggtgccccccggcgtggccaagcccctgttcagaagcacccagagcctgcccaccgtggacaccagcgcccaggccgccccccagacctacgccgagtacgccatcagccagcccctggagggcgccggcgccacctgccccaccggcagcgagcccctggccggcgagacccccaaccaggccctgaagcccggcgccaagagcaacagcatcatcgtgagccccagacagagaggcaaccccgtgctgaagttcgtgagaaacgtgccctgggagttcggcgacgtgatccccgactacgtgctgggccagagcacctgcgccctgttcctgagcctgagataccacaacctgcaccccgactacatccacggcagactgcagagcctgggcaagaacttcgccctgagagtgctgctggtgcaggtggacgtgaaggacccccagcaggccctgaaggagctggccaagatgtgcatcctggccgactgcaccctgatcctggcctggagccccgaggaggccggcagatacctggagacctacaaggcctacgagcagaagcccgccgacctgctgatggagaagctggagcaggacttcgtgagcagagtgaccgagtgcctgaccaccgtgaagagcgtgaacaagaccgacagccagaccctgctgaccaccttcggcagcctggagcagctgatcgccgccagcagagaggacctggccctgtgccccggcctgggcccccagaaggtgagagccctgggcaagaaccccagaagctggggcaaggagagagcccccaacaagcacaacctgagaccccagagcttcaaggtgaagaaggagcccaagaccagacacagcggcttcagactgtag

SEQ ID NO: 10613 - DNA, 894 bp, synthetic construct
  misc_feature 1..894: note = Description of Artificial Sequence: Synthetic coding sequence
  source 1..894: mol_type = other DNA
atggaccccggcaaggacaaggagggcgtgccccagcccagcggcccccccgccagaaagaagttcgtgatccccctggacgaggacgaggtgccccccggcgtggccaagcccctgttcagaagcacccagagcctgcccaccgtggacaccagcgcccaggccgccccccagacctacgccgagtacgccatcagccagcccctggagggcgccggcgccacctgccccaccggcagcgagcccctggccggcgagacccccaaccaggccctgaagcccggcgccaagagcaacagcatcatcgtgagccccagacagagaggcaaccccgtgctgaagttcgtgagaaacgtgccctgggagttcggcgacgtgatccccgactacgtgctgggccagagcacctgcgccctgttcctgagcctgagataccacaacctgcaccccgactacatccacggcagactgcagagcctgggcaagaacttcgccctgagagtgctgctggtgcaggtggacgtgaaggacccccagcaggccctgaaggagctggccaagatgtgcatcctggccgactgcaccctgatcctggcctggagccccgaggaggccggcagatacctggagacctacaaggcctacgagcagaagcccgccgacctgctgatggagaagctggagcaggacttcgtgagcagagtgaccgagtgcctgaccaccgtgaagagcgtgaacaagaccgacagccagaccctgctgaccaccttcggcagcctggagcagctgatcgccgccagcagagaggacctggccctgtgccccggcctgggcccccagaaggccagaagactgttcgacgtgctgcacgagcccttcctgaaggtgccctag

SEQ ID NO: 10614 - DNA, 822 bp, synthetic construct
  misc_feature 1..822: note = Description of Artificial Sequence: Synthetic coding sequence
  source 1..822: mol_type = other DNA
atggaccccggcaaggacaaggagggcgtgccccagcccagcggcccccccgccagaaagaagttcgtgatccccctggacgaggacgaggtgccccccggcgtggccaagcccctgttcagaagcacccagagcctgcccaccgtggacaccagcgcccaggccgccccccagacctacgccgagtacgccatcagccagcccctggagggcgccggcgccacctgccccaccggcagcgagcccctggccggcgagacccccaaccaggccctgaagcccggcgccaagagcaacagcatcatcgtgagccccagacagagaggcaaccccgtgctgaagttcgtgagaaacgtgccctgggagttcggcgacgtgatccccgactacgtgctgggccagagcacctgcgccctgttcctgagcctgagataccacaacctgcaccccgactacatccacggcagactgcagagcctgggcaagaacttcgccctgagagtgctgctggtgcaggtggacgtgaaggacccccagcaggccctgaaggagctggccaagatgtgcatcctggccgactgcaccctgatcctggcctggagccccgaggaggccggcagatacctggagacctacaaggcctacgagcagaagcccgccgacctgctgatggagaagctggagcaggacttcgtgagcagaagcctggagcagctgatcgccgccagcagagaggacctggccctgtgccccggcctgggcccccagaaggccagaagactgttcgacgtgctgcacgagcccttcctgaaggtgccctag

SEQ ID NO: 10615 - DNA, 678 bp, synthetic construct
  misc_feature 1..678: note = Description of Artificial Sequence: Synthetic coding sequence
  source 1..678: mol_type = other DNA
atggaccccggcaaggacaaggagggcgtgccccagcccagcggcccccccgccagaaagaagttcgtgatccccctggacgaggacgaggtgccccccggcgtgagaggcaaccccgtgctgaagttcgtgagaaacgtgccctgggagttcggcgacgtgatccccgactacgtgctgggccagagcacctgcgccctgttcctgagcctgagataccacaacctgcaccccgactacatccacggcagactgcagagcctgggcaagaacttcgccctgagagtgctgctggtgcaggtggacgtgaaggacccccagcaggccctgaaggagctggccaagatgtgcatcctggccgactgcaccctgatcctggcctggagccccgaggaggccggcagatacctggagacctacaaggcctacgagcagaagcccgccgacctgctgatggagaagctggagcaggacttcgtgagcagagtgaccgagtgcctgaccaccgtgaagagcgtgaacaagaccgacagccagaccctgctgaccaccttcggcagcctggagcagctgatcgccgccagcagagaggacctggccctgtgccccggcctgggcccccagaaggccagaagactgttcgacgtgctgcacgagcccttcctgaaggtgccctag

SEQ ID NO: 10616 - DNA, 120 bp, synthetic construct
  misc_feature 1..120: note = Description of Artificial Sequence: Synthetic coding sequence
  source 1..120: mol_type = other DNA
atggaccccggcaaggacaaggagggcgtgccccagcccagcggcccccccgccagaaagaagttcgtgatccccctggacgaggacgaggtgccccccggcgtgagcaagcccctgtag

SEQ ID NO: 10617 - DNA, 726 bp, synthetic construct
  misc_feature 1..726: note = Description of Artificial Sequence: Synthetic coding sequence
  source 1..726: mol_type = other DNA
atggccagcctgagcggcctggccagcgccctggagagctacagaggcagagacagactgatcagagtgctgggctactgctgccagctggtgggcggcgtgctggtggagcagtgccccgccagaagcgaggtgggcaccagactgctggtggtgagcacccagctgagccactgcagaaccatcctgagactgttcgacgacctggccatgttcgtgtacaccaagcagtacggcctgggcgcccaggaggaggacgccttcgtgagatgcgtgagcgtgctgggcaacctggccgaccagctgtactacccctgcgagcacgtggcctgggccgccgacgccagagtgctgcacgtggacagcagcagatggtggaccctgagcaccaccctgtgggccctgagcctgctgctgggcgtggccagaagcctgtggatgctgctgaagctgagacagagactgagaagccccaccgcccccttcaccagccccctgcccagaggcaagagaagagccatggaggcccagatgcagagcgaggccctgagcctgctgagcaacctggccgacctggccaacgccgtgcactggctgcccagaggcgtgctgtgggccggcagattccccccctggctggtgggcctgatgggcaccatcagcagcatcctgagcatgtaccaggccgccagagccggcggccaggccgaggccaccaccccctag

SEQ ID NO: 10618 - DNA, 1218 bp, synthetic construct
  misc_feature 1..1218: note = Description of Artificial Sequence: Synthetic coding sequence
  source 1..1218: mol_type = other DNA
atgagagagctgaagagaaccctggacgccaagggccacggcgtgctggagatgcccagcggcaccggcaagaccgtgagcctgctggccctgatcatggcctaccagagagcctaccccctggaggtgaccaagctgatctactgcagcagaaccgtgcccgagatcgagaaggtgatcgaggagctgagaaagctgctgaacttctacgagaagcaggagggcgagaagctgcccttcctgggcctggccctgagcagcagaaagaacctgtgcatccaccccgaggtgacccccctgagattcggcaaggacgtggacggcaagtgccacagcctgaccgccagctacgtgagagcccagtaccagcacgacaccagcctgccccactgcagattctacgaggagttcgacgcccacggcagagaggtgcccctgcccgccggcatctacaacctggacgacctgaaggccctgggcagaagacagggctggtgcccctacttcctggccagatacagcatcctgcacgccaacgtggtggtgtacagctaccactacctgctggaccccaagatcgccgacctggtgagcaaggagctggccagaaaggccgtggtggtgttcgacgaggcccacaacatcgacaacgtgtgcatcgacagcatgagcgtgaacctgaccagaagaaccctggacagatgccagggcaacctggagaccctgcagaagaccgtgctgagaatcaaggagaccgacgagcagagactgagagacgagtacagaagactggtggagggcctgagagaggccagcgccgccagagagaccgacgcccacctggccaaccccgtgctgcccgacgaggtgctgcaggaggccgtgcccggcagcatcagaaccgccgagcacttcctgggcttcctgagaagactgctggagtacgtgaagtggagactgagagtgcagcacgtggtgcaggagagcccccccgccttcctgagcggcctggcccagagagtgtgcatccagagaaagcccctgagattctgcgccgagagactgagaagcctgctgcacaccctggagatcaccgacctggccgacttcagccccctgaccctgctggccaacttcgccaccctggtgagcacctacgccaagggccaggcccagcactgcggcagcagcagaaaccagaagagaagccacccctag

SEQ ID NO: 10619 - DNA, 2133 bp, synthetic construct
  misc_feature 1..2133: note = Description of Artificial Sequence: Synthetic coding sequence
  source 1..2133: mol_type = other DNA
atgagagagctgaagagaaccctggacgccaaggcctaccccctggaggtgaccaagctgatctactgcagcagaaccgtgcccgagatcgagaaggtgatcgaggagctgagaaagctgctgaacttctacgagaagcaggagggcgagaagctgcccttcctgggcctggccctgagcagcagaaagaacctgtgcatccaccccgaggtgacccccctgagattcggcaaggacgtggacggcaagtgccacagcctgaccgccagctacgtgagagcccagtaccagcacgacaccagcctgccccactgcagattctacgaggagttcgacgcccacggcagagaggtgcccctgcccgccggcatctacaacctggacgacctgaaggccctgggcagaagacagggctggtgcccctacttcctggccagatacagcatcctgcacgccaacgtggtggtgtacagctaccactacctgctggaccccaagatcgccgacctggtgagcaaggagctggccagaaaggccgtggtggtgttcgacgaggcccacaacatcgacaacgtgtgcatcgacagcatgagcgtgaacctgaccagaagaaccctggacagatgccagggcaacctggagaccctgcagaagaccgtgctgagaatcaaggagaccgacgagcagagactgagagacgagtacagaagactggtggagggcctgagagaggccagcgccgccagagagaccgacgcccacctggccaaccccgtgctgcccgacgaggtgctgcaggaggccgtgcccggcagcatcagaaccgccgagcacttcctgggcttcctgagaagactgctggagtacgtgaagtggagactgagagtgcagcacgtggtgcaggagagcccccccgccttcctgagcggcctggcccagagagtgtgcatccagagaaagcccctgagattctgcgccgagagactgagaagcctgctgcacaccctggagatcaccgacctggccgacttcagccccctgaccctgctggccaacttcgccaccctggtgagcacctacgccaagggcttcaccatcatcatcgagcccttcgacgacagaacccccaccatcgccaaccccatcctgcacttcagctgcatggacgccagcctggccatcaagcccgtgttcgagagattccagagcgtgatcatcaccagcggcaccctgagccccctggacatctaccccaagatcctggacttccaccccgtgaccatggccaccttcaccatgaccctggccagagtgtgcctgtgccccatgatcatcggcagaggcaacgaccaggtggccatcagcagcaagttcgagaccagagaggacatcgccgtgatcagaaactacggcaacctgctgctggagatgagcgccgtggtgcccgacggcatcgtggccttcttcaccagctaccagtacatggagagcaccgtggccagctggtacgagcagggcatcctggagaacatccagagaaacaagctgctgttcatcgagacccaggacggcgccgagaccagcgtggccctggagaagtaccaggaggcctgcgagaacggcagaggcgccatcctgctgagcgtggccagaggcaaggtgagcgagggcatcgacttcgtgcaccactacggcagagccgtgatcatgttcggcgtgccctacgtgtacacccagagcagaatcctgaaggccagactggagtacctgagagaccagttccagatcagagagaacgacttcctgaccttcgacgccatgagacacgccgcccagtgcgtgggcagagccatcagaggcaagaccgactacggcctgatggtgttcgccgacaagagattcgccagaggcgacaagagaggcaagctgcccagatggatccaggagcacctgaccgacgccaacctgaacctgaccgtggacgagggcgtgcaggtggccaagtacttcctgagacagatggcccagcccttccacagagaggaccagctgggcctgagcctgctgagcctggagcagctggagagcgaggagaccctgaagagaatcgagcagatcgcccagcagctgtag

SEQ ID NO: 10620 - DNA, 2211 bp, synthetic construct
  misc_feature 1..2211: note = Description of Artificial Sequence: Synthetic coding sequence
  source 1..2211: mol_type = other DNA
atgagagagctgaagagaaccctggacgccaagggccacggcgtgctggagatgcccagcggcaccggcaagaccgtgagcctgctggccctgatcatggcctaccagagagcctaccccctggaggtgaccaagctgatctactgcagcagaaccgtgcccgagatcgagaaggtgatcgaggagctgagaaagctgctgaacttctacgagaagcaggagggcgagaagctgcccttcctgggcctggccctgagcagcagaaagaacctgtgcatccaccccgaggtgacccccctgagattcggcaaggacgtggacggcaagtgccacagcctgaccgccagctacgtgagagcccagtaccagcacgacaccagcctgccccactgcagattctacgaggagttcgacgcccacggcagagaggtgcccctgcccgccggcatctacaacctggacgacctgaaggccctgggcagaagacagggctggtgcccctacttcctggccagatacagcatcctgcacgccaacgtggtggtgtacagctaccactacctgctggaccccaagatcgccgacctggtgagcaaggagctggccagaaaggccgtggtggtgttcgacgaggcccacaacatcgacaacgtgtgcatcgacagcatgagcgtgaacctgaccagaagaaccctggacagatgccagggcaacctggagaccctgcagaagaccgtgctgagaatcaaggagaccgacgagcagagactgagagacgagtacagaagactggtggagggcctgagagaggccagcgccgccagagagaccgacgcccacctggccaaccccgtgctgcccgacgaggtgctgcaggaggccgtgcccggcagcatcagaaccgccgagcacttcctgggcttcctgagaagactgctggagtacgtgaagtggagactgagagtgcagcacgtggtgcaggagagcccccccgccttcctgagcggcctggcccagagagtgtgcatccagagaaagcccctgagattctgcgccgagagactgagaagcctgctgcacaccctggagatcaccgacctggccgacttcagccccctgaccctgctggccaacttcgccaccctggtgagcacctacgccaagggcttcaccatcatcatcgagcccttcgacgacagaacccccaccatcgccaaccccatcctgcacttcagctgcatggacgccagcctggccatcaagcccgtgttcgagagattccagagcgtgatcatcaccagcggcaccctgagccccctggacatctaccccaagatcctggacttccaccccgtgaccatggccaccttcaccatgaccctggccagagtgtgcctgtgccccatgatcatcggcagaggcaacgaccaggtggccatcagcagcaagttcgagaccagagaggacatcgccgtgatcagaaactacggcaacctgctgctggagatgagcgccgtggtgcccgacggcatcgtggccttcttcaccagctaccagtacatggagagcaccgtggccagctggtacgagcagggcatcctggagaacatccagagaaacaagctgctgttcatcgagacccaggacggcgccgagaccagcgtggccctggagaagtaccaggaggcctgcgagaacggcagaggcgccatcctgctgagcgtggccagaggcaaggtgagcgagggcatcgacttcgtgcaccactacggcagagccgtgatcatgttcggcgtgccctacgtgtacacccagagcagaatcctgaaggccagactggagtacctgagagaccagttccagatcagagagaacgacttcctgaccttcgacgccatgagacacgccgcccagtgcgtgggcagagccatcagaggcaagaccgactacggcctgatggtgttcgccgacaagagattcgccagaggcgacaagagaggcaagctgcccagatggatccaggagcacctgaccgacgccaacctgaacctgaccgtggacgagggcgtgcaggtggccaagtacttcctgagacagatggcccagcccttccacagagaggaccagctgggcctgagcctgctgagcctggagcagctggagagcgaggagaccctgaagagaatcgagcagatcgcccagcagctgtag

SEQ ID NO: 10621 - DNA, 2049 bp, synthetic construct
  misc_feature 1..2049: note = Description of Artificial Sequence: Synthetic coding sequence
  source 1..2049: mol_type = other DNA
atgaagctgaacgtggacggcctgctggtgtacttcccctacgactacatctaccccgagcagttcagctacatgagagagctgaagagaaccctggacgccaagggccacggcgtgctggagatgcccagcggcaccggcaagaccgtgagcctgctggccctgatcatggcctaccagagagcctaccccctggaggtgaccaagctgatctactgcagcagaaccgtgcccgagatcgagaaggtgatcgaggagctgagaaagctgctgaacttctacgagaagcaggagggcgagaagctgcccttcctgggcctggccctgagcagcagaaagaacctgtgcatccaccccgagatcctgcacgccaacgtggtggtgtacagctaccactacctgctggaccccaagatcgccgacctggtgagcaaggagctggccagaaaggccgtggtggtgttcgacgaggcccacaacatcgacaacgtgtgcatcgacagcatgagcgtgaacctgaccagaagaaccctggacagatgccagggcaacctggagaccctgcagaagaccgtgctgagaatcaaggagaccgacgagcagagactgagagacgagtacagaagactggtggagggcctgagagaggccagcgccgccagagagaccgacgcccacctggccaaccccgtgctgcccgacgaggtgctgcaggaggccgtgcccggcagcatcagaaccgccgagcacttcctgggcttcctgagaagactgctggagtacgtgaagtggagactgagagtgcagcacgtggtgcaggagagcccccccgccttcctgagcggcctggcccagagagtgtgcatccagagaaagcccctgagattctgcgccgagagactgagaagcctgctgcacaccctggagatcaccgacctggccgacttcagccccctgaccctgctggccaacttcgccaccctggtgagcacctacgccaagggcttcaccatcatcatcgagcccttcgacgacagaacccccaccatcgccaaccccatcctgcacttcagctgcatggacgccagcctggccatcaagcccgtgttcgagagattccagagcgtgatcatcaccagcggcaccctgagccccctggacatctaccccaagatcctggacttccaccccgtgaccatggccaccttcaccatgaccctggccagagtgtgcctgtgccccatgatcatcggcagaggcaacgaccaggtggccatcagcagcaagttcgagaccagagaggacatcgccgtgatcagaaactacggcaacctgctgctggagatgagcgccgtggtgcccgacggcatcgtggccttcttcaccagctaccagtacatggagagcaccgtggccagctggtacgagcagggcatcctggagaacatccagagaaacaagctgctgttcatcgagacccaggacggcgccgagaccagcgtggccctggagaagtaccaggaggcctgcgagaacggcagaggcgccatcctgctgagcgtggccagaggcaaggtgagcgagggcatcgacttcgtgcaccactacggcagagccgtgatcatgttcggcgtgccctacgtgtacacccagagcagaatcctgaaggccagactggagtacctgagagaccagttccagatcagagagaacgacttcctgaccttcgacgccatgagacacgccgcccagtgcgtgggcagagccatcagaggcaagaccgactacggcctgatggtgttcgccgacaagagattcgccagaggcgacaagagaggcaagctgcccagatggatccaggagcacctgaccgacgccaacctgaacctgaccgtggacgagggcgtgcaggtggccaagtacttcctgagacagatggcccagcccttccacagagaggaccagctgggcctgagcctgctgagcctggagcagctggagagcgaggagaccctgaagagaatcgagcagatcgcccagcagctgtag

SEQ ID NO: 10622 - DNA, 2283 bp, synthetic construct
  misc_feature 1..2283: note = Description of Artificial Sequence: Synthetic coding sequence
  source 1..2283: mol_type = other DNA
atgaagctgaacgtggacggcctgctggtgtacttcccctacgactacatctaccccgagcagttcagctacatgagagagctgaagagaaccctggacgccaagggccacggcgtgctggagatgcccagcggcaccggcaagaccgtgagcctgctggccctgatcatggcctaccagagagcctaccccctggaggtgaccaagctgatctactgcagcagaaccgtgcccgagatcgagaaggtgatcgaggagctgagaaagctgctgaacttctacgagaagcaggagggcgagaagctgcccttcctgggcctggccctgagcagcagaaagaacctgtgcatccaccccgaggtgacccccctgagattcggcaaggacgtggacggcaagtgccacagcctgaccgccagctacgtgagagcccagtaccagcacgacaccagcctgccccactgcagattctacgaggagttcgacgcccacggcagagaggtgcccctgcccgccggcatctacaacctggacgacctgaaggccctgggcagaagacagggctggtgcccctacttcctggccagatacagcatcctgcacgccaacgtggtggtgtacagctaccactacctgctggaccccaagatcgccgacctggtgagcaaggagctggccagaaaggccgtggtggtgttcgacgaggcccacaacatcgacaacgtgtgcatcgacagcatgagcgtgaacctgaccagaagaaccctggacagatgccagggcaacctggagaccctgcagaagaccgtgctgagaatcaaggagaccgacgagcagagactgagagacgagtacagaagactggtggagggcctgagagaggccagcgccgccagagagaccgacgcccacctggccaaccccgtgctgcccgacgaggtgctgcaggaggccgtgcccggcagcatcagaaccgccgagcacttcctgggcttcctgagaagactgctggagtacgtgaagtggagactgagagtgcagcacgtggtgcaggagagcccccccgccttcctgagcggcctggcccagagagtgtgcatccagagaaagcccctgagattctgcgccgagagactgagaagcctgctgcacaccctggagatcaccgacctggccgacttcagccccctgaccctgctggccaacttcgccaccctggtgagcacctacgccaagggcttcaccatcatcatcgagcccttcgacgacagaacccccaccatcgccaaccccatcctgcacttcagctgcatggacgccagcctggccatcaagcccgtgttcgagagattccagagcgtgatcatcaccagcggcaccctgagccccctggacatctaccccaagatcctggacttccaccccgtgaccatggccaccttcaccatgaccctggccagagtgtgcctgtgccccatgatcatcggcagaggcaacgaccaggtggccatcagcagcaagttcgagaccagagaggacatcgccgtgatcagaaactacggcaacctgctgctggagatgagcgccgtggtgcccgacggcatcgtggccttcttcaccagctaccagtacatggagagcaccgtggccagctggtacgagcagggcatcctggagaacatccagagaaacaagctgctgttcatcgagacccaggacggcgccgagaccagcgtggccctggagaagtaccaggaggcctgcgagaacggcagaggcgccatcctgctgagcgtggccagaggcaaggtgagcgagggcatcgacttcgtgcaccactacggcagagccgtgatcatgttcggcgtgccctacgtgtacacccagagcagaatcctgaaggccagactggagtacctgagagaccagttccagatcagagagaacgacttcctgaccttcgacgccatgagacacgccgcccagtgcgtgggcagagccatcagaggcaagaccgactacggcctgatggtgttcgccgacaagagattcgccagaggcgacaagagaggcaagctgcccagatggatccaggagcacctgaccgacgccaacctgaacctgaccgtggacgagggcgtgcaggtggccaagtacttcctgagacagatggcccagcccttccacagagaggaccagctgggcctgagcctgctgagcctggagcagctggagagcgaggagaccctgaagagaatcgagcagatcgcccagcagctgtag

SEQ ID NO: 10623 - DNA, 2751 bp, synthetic construct
  misc_feature 1..2751: note = Description of Artificial Sequence: Synthetic coding sequence
  source 1..2751: mol_type = other DNA
atggagagcggccagcccgccagaagaatcgccatggcccccctgctggagtacgagagacagctggtgctggagctgctggacaccgacggcctggtggtgtgcgccagaggcctgggcgccgacagactgctgtaccacttcctgcagctgcactgccaccccgcctgcctggtgctggtgctgaacacccagcccgccgaggaggagtacttcatcaaccagctgaagatcgagggcgtggagcacctgcccagaagagtgaccaacgagatcaccagcaacagcagatacgaggtgtacacccagggcggcgtgatcttcgccaccagcagaatcctggtggtggacttcctgaccgacagaatccccagcgacctgatcaccggcatcctggtgtacagagcccacagaatcatcgagagctgccaggaggccttcatcctgagactgttcagacagaagaacaagagaggcttcatcaaggccttcaccgacaacgccgtggccttcgacaccggcttctgccacgtggagagagtgatgagaaacctgttcgtgagaaagctgtacctgtggcccagattccacgtggccgtgaacagcttcctggagcagcacaagcccgaggtggtggagatccacgtgagcatgacccccaccatgctggccatccagaccgccatcctggacatcctgaacgcctgcctgaaggagctgaagtgccacaaccccagcctggaggtggaggacctgagcctggagaacgccatcggcaagcccttcgacaagaccatcagacactacctggaccccctgtggcaccagctgggcgccaagaccaagagcctggtgcaggacctgaagatcctgagaaccctgctgcagtacctgagccagtacgactgcgtgaccttcctgaacctgctggagagcctgagagccaccgagaaggccttcggccagaacagcggctggctgttcctggacagcagcaccagcatgttcatcaacgccagagccagagtgtaccacctgcccgacgccaagatgagcaagaaggagaagatcagcgagaagatggagatcaaggagggcgaggagaccaagaaggagctggtgctggagagcaaccccaagtgggaggccctgaccgaggtgctgaaggagatcgaggccgagaacaaggagagcgaggccctgggcggccccggccaggtgctgatctgcgccagcgacgacagaacctgcagccagctgagagactacatcaccctgggcgccgaggccttcctgctgagactgtacagaaagaccttcgagaaggacagcaaggccgaggaggtgtggatgaagttcagaaaggaggacagcagcaagagaatcagaaagagccacaagagacccaaggacccccagaacaaggagagagccagcaccaaggagagaaccctgaagaagaagaagagaaagctgaccctgacccagatggtgggcaagcccgaggagctggaggaggagggcgacgtggaggagggctacagaagagagatcagcagcagccccgagagctgccccgaggagatcaagcacgaggagttcgacgtgaacctgagcagcgacgccgccttcggcatcctgaaggagcccctgaccatcatccaccccctgctgggctgcagcgacccctacgccctgaccagagtgctgcacgaggtggagcccagatacgtggtgctgtacgacgccgagctgaccttcgtgagacagctggagatctacagagccagcagacccggcaagcccctgagagtgtacttcctgatctacggcggcagcaccgaggagcagagatacctgaccgccctgagaaaggagaaggaggccttcgagaagctgatcagagagaaggccagcatggtggtgcccgaggagagagagggcagagacgagaccaacctggacctggtgagaggcaccgccagcgccgacgtgagcaccgacaccagaaaggccggcggccaggagcagaacggcacccagcagagcatcgtggtggacatgagagagttcagaagcgagctgcccagcctgatccacagaagaggcatcgacatcgagcccgtgaccctggaggtgggcgactacatcctgacccccgagatgtgcgtggagagaaagagcatcagcgacctgatcggcagcctgaacaacggcagactgtacagccagtgcatcagcatgagcagatactacaagagacccgtgctgctgatcgagttcgaccccagcaagcccttcagcctgaccagcagaggcgccctgttccaggagatcagcagcaacgacatcagcagcaagctgaccctgctgaccctgcacttccccagactgagaatcctgtggtgccccagcccccacgccaccgccgagctgttcgaggagctgaagcagagcaagccccagcccgacgccgccaccgccctggccatcaccgccgacagcgagaccctgcccgagagcgagaagtacaaccccggcccccaggacttcctgctgaagatgcccggcgtgaacgccaagaactgcagaagcctgatgcaccacgtgaagaacatcgccgagctggccgccctgagccaggacgagctgaccagcatcctgggcaacgccgccaacgccaagcagctgtacgacttcatccacaccagcttcgccgaggtggtgagcaagggcaagggcaagaagtag

SEQ ID NO: 10624 - DNA, 2715 bp, synthetic construct
  misc_feature 1..2715: note = Description of Artificial Sequence: Synthetic coding sequence
  source 1..2715: mol_type = other DNA
atggcccccctgctggagtacgagagacagctggtgctggagctgctggacaccgacggcctggtggtgtgcgccagaggcctgggcgccgacagactgctgtaccacttcctgcagctgcactgccaccccgcctgcctggtgctggtgctgaacacccagcccgccgaggaggagtacttcatcaaccagctgaagatcgagggcgtggagcacctgcccagaagagtgaccaacgagatcaccagcaacagcagatacgaggtgtacacccagggcggcgtgatcttcgccaccagcagaatcctggtggtggacttcctgaccgacagaatccccagcgacctgatcaccggcatcctggtgtacagagcccacagaatcatcgagagctgccaggaggccttcatcctgagactgttcagacagaagaacaagagaggcttcatcaaggccttcaccgacaacgccgtggccttcgacaccggcttctgccacgtggagagagtgatgagaaacctgttcgtgagaaagctgtacctgtggcccagattccacgtggccgtgaacagcttcctggagcagcacaagcccgaggtggtggagatccacgtgagcatgacccccaccatgctggccatccagaccgccatcctggacatcctgaacgcctgcctgaaggagctgaagtgccacaaccccagcctggaggtggaggacctgagcctggagaacgccatcggcaagcccttcgacaagaccatcagacactacctggaccccctgtggcaccagctgggcgccaagaccaagagcctggtgcaggacctgaagatcctgagaaccctgctgcagtacctgagccagtacgactgcgtgaccttcctgaacctgctggagagcctgagagccaccgagaaggccttcggccagaacagcggctggctgttcctggacagcagcaccagcatgttcatcaacgccagagccagagtgtaccacctgcccgacgccaagatgagcaagaaggagaagatcagcgagaagatggagatcaaggagggcgaggagaccaagaaggagctggtgctggagagcaaccccaagtgggaggccctgaccgaggtgctgaaggagatcgaggccgagaacaaggagagcgaggccctgggcggccccggccaggtgctgatctgcgccagcgacgacagaacctgcagccagctgagagactacatcaccctgggcgccgaggccttcctgctgagactgtacagaaagaccttcgagaaggacagcaaggccgaggaggtgtggatgaagttcagaaaggaggacagcagcaagagaatcagaaagagccacaagagacccaaggacccccagaacaaggagagagccagcaccaaggagagaaccctgaagaagaagaagagaaagctgaccctgacccagatggtgggcaagcccgaggagctggaggaggagggcgacgtggaggagggctacagaagagagatcagcagcagccccgagagctgccccgaggagatcaagcacgaggagttcgacgtgaacctgagcagcgacgccgccttcggcatcctgaaggagcccctgaccatcatccaccccctgctgggctgcagcgacccctacgccctgaccagagtgctgcacgaggtggagcccagatacgtggtgctgtacgacgccgagctgaccttcgtgagacagctggagatctacagagccagcagacccggcaagcccctgagatacttcctgatctacggcggcagcaccgaggagcagagatacctgaccgccctgagaaaggagaaggaggccttcgagaagctgatcagagagaaggccagcatggtggtgcccgaggagagagagggcagagacgagaccaacctggacctggtgagaggcaccgccagcgccgacgtgagcaccgacaccagaaaggccggcggccaggagcagaacggcacccagcagagcatcgtggtggacatgagagagttcagaagcgagctgcccagcctgatccacagaagaggcatcgacatcgagcccgtgaccctggaggtgggcgactacatcctgacccccgagatgtgcgtggagagaaagagcatcagcgacctgatcggcagcctgaacaacggcagactgtacagccagtgcatcagcatgagcagatactacaagagacccgtgctgctgatcgagttcgaccccagcaagcccttcagcctgaccagcagaggcgccctgttccaggagatcagcagcaacgacatcagcagcaagctgaccctgctgaccctgcacttccccagactgagaatcctgtggtgccccagcccccacgccaccgccgagctgttcgaggagctgaagcagagcaagccccagcccgacgccgccaccgccctggccatcaccgccgacagcgagaccctgcccgagagcgagaagtacaaccccggcccccaggacttcctgctgaagatgcccggcgtgaacgccaagaactgcagaagcctgatgcaccacgtgaagaacatcgccgagctggccgccctgagccaggacgagctgaccagcatcctgggcaacgccgccaacgccaagcagctgtacgacttcatccacaccagcttcgccgaggtggtgagcaagggcaagggcaagaagtag

SEQ ID NO: 10625 - DNA, 1071 bp, synthetic construct
  misc_feature 1..1071: note = Description of Artificial Sequence: Synthetic coding sequence
  source 1..1071: mol_type = other DNA
atggcccccctgctggagtacgagagacagctggtgctggagctgctggacaccgacggcctggtggtgtgcgccagaggcctgggcgccgacagactgctgtaccacttcctgcagctgcactgccaccccgcctgcctggtgctggtgctgaacacccagcccgccgaggaggagtacttcatcaaccagctgaagatcgagggcgtggagcacctgcccagaagagtgaccaacgagatcaccagcaacagcagatacgaggtgtacacccagggcggcgtgatcttcgccaccagcagaatcctggtggtggacttcctgaccgacagaatccccagcgacctgatcaccggcatcctggtgtacagagcccacagaatcatcgagagctgccaggaggccttcatcctgagactgttcagacagaagaacaagagaggcttcatcaaggccttcaccgacaacgccgtggccttcgacaccggcttctgccacgtggagagagtgatgagaaacctgttcgtgagaaagctgtacctgtggcccagattccacgtggccgtgaacagcttcctggagcagcacaagcccgaggtggtggagatccacgtgagcatgacccccaccatgctggccatccagaccgccatcctggacatcctgaacgcctgcctgaaggagctgaagtgccacaaccccagcctggaggtggaggacctgagcctggagaacgccatcggcaagcccttcgacaagaccatcagacactacctggaccccctgtggcaccagctgggcgccaagaccaagagcctggtgcaggacctgaagatcctgagaaccctgctgcagtacctgagccagtacgactgcgtgaccttcctgaacctgctggagagcctgagagccaccgagaaggccttcggccagaacagcggctggctgttcctggacagcagcaccagcatgttcatcaacgccagagccagagtgtaccacctgcccgacgccaagatgagcaagaaggagaagatcagcgagaagatcaagaagaagaagaagaagtag

SEQ ID NO: 10626 - DNA, 3561 bp, synthetic construct
  misc_feature 1..3561: note = Description of Artificial Sequence: Synthetic coding sequence
  source 1..3561: mol_type = other DNA
atgggcgtgcagggcctgtggaagctgctggagtgcagcggcagacaggtgagccccgaggccctggagggcaagatcctggccgtggacatcagcatctggctgaaccaggccctgaagggcgtgagagacagacacggcaacagcatcgagaacccccacctgctgaccctgttccacagactgtgcaagctgctgttcttcagaatcagacccatcttcgtgttcgacggcgacgcccccctgctgaagaagcagaccctggtgaagagaagacagagaaaggacctggccagcagcgacagcagaaagaccaccgagaagctgctgaagaccttcctgaagagacaggccatcaagaccgccttcagaagcaagagagacgaggccctgcccagcctgacccaggtgagaagagagaacgacctgtacgtgctgccccccctgcaggaggaggagaagcacagcagcgaggaggaggacgagaaggagtggcaggagagaatgaaccagaagcaggccctgcaggaggagttcttccacaacccccaggccatcgacatcgagagcgaggacttcagcagcctgccccccgaggtgaagcacgagatcctgaccgacatgaaggagttcaccaagagaagaagaaccctgttcgaggccatgcccgaggagagcgacgacttcagccagtaccagctgaagggcctgctgaagaagaactacctgaaccagcacatcgagcacgtgcagaaggagatgaaccagcagcacagcggccacatcagaagacagtacgaggacgagggcggcttcctgaaggaggtggagagcagaagagtggtgagcgaggacaccagccactacatcctgatcaagggcatccaggccaagaccgtggccgaggtggacagcgagagcctgcccagcagcagcaagatgcacggcatgagcttcgacgtgaagagcagcccctgcgagaagctgaagaccgagaaggagcccgacgccaccccccccagccccagaaccctgctggccatgcaggccgccctgctgggcagcagcagcgaggaggagctggagagcgagaacagaagacaggccagaggcagaaacgcccccgccgccgtggacgagggcagcatcagccccagaaccctgagcgccatcaagagagccctggacgacgacgaggacgtgaaggtgtgcgccggcgacgacgtgcagaccggcggccccggcgccgaggagatgagaatcaacagcagcaccgagaacagcgacgagggcctgaaggtgagagacggcaagggcatccccttcaccgccaccctggccagcagcagcgtgaacagcgccgaggagcacgtggccagcaccaacgagggcagagagcccaccgacagcgtgcccaaggagcagatgagcctggtgcacgtgggcaccgaggccttccccatcagcgacgagagcatgatcaaggacagaaaggacagactgcccctggagagcgccgtggtgagacacagcgacgcccccggcctgcccaacggcagagagctgacccccgccagccccacctgcaccaacagcgtgagcaagaacgagacccacgccgaggtgctggagcagcagaacgagctgtgcccctacgagagcaagttcgacagcagcctgctgagcagcgacgacgagaccaagtgcaagcccaacagcgccagcgaggtgatcggccccgtgagcctgcaggagaccagcagcatcgtgagcgtgcccagcgaggccgtggacaacgtggagaacgtggtgagcttcaacgccaaggagcacgagaacttcctggagaccatccaggagcagcagaccaccgagagcgccggccaggacctgatcagcatccccaaggccgtggagcccatggagatcgacagcgaggagagcgagagcgacggcagcttcatcgaggtgcagagcgtgatcagcgacgaggagctgcaggccgagttccccgagaccagcaagccccccagcgagcagggcgaggaggagctggtgggcaccagagagggcgaggcccccgccgagagcgagagcctgctgagagacaacagcgagagagacgacgtggacggcgagccccaggaggccgagaaggacgccgaggacagcctgcacgagtggcaggacatcaacctggaggagctggagaccctggagagcaacctgctggcccagcagaacagcctgaaggcccagaagcagcagcaggagagaatcgccgccaccgtgaccggccagatgttcctggagagccaggagctgctgagactgttcggcatcccctacatccaggcccccatggaggccgaggcccagtgcgccatcctggacctgaccgaccagaccagcggcaccatcaccgacgacagcgacatctggctgttcggcgccagacacgtgtacagaaacttcttcaacaagaacaagttcgtggagtactaccagtacgtggacttccacaaccagctgggcctggacagaaacaagctgatcaacctggcctacctgctgggcagcgactacaccgagggcatccccaccgtgggctgcgtgaccgccatggagatcctgaacgagttccccggccacggcctggagcccctgctgaagttcagcgagtggtggcacgaggcccagaagaaccccaagatcagacccaacccccacgacaccaaggtgaagaagaagctgagaaccctgcagctgacccccggcttccccaaccccgccgtggccgaggcctacctgaagcccgtggtggacgacagcaagggcagcttcctgtggggcaagcccgacctggacaagatcagagagttctgccagagatacttcggctggaacagaaccaagaccgacgagagcctgttccccgtgctgaagcagctggacgcccagcagacccagctgagaatcgacagcttcttcagactggcccagcaggagaaggaggacgccaagagaatcaagagccagagactgaacagagccgtgacctgcatgctgagaaaggagaaggaggccgccgccagcgagatcgaggccgtgagcgtggccatggagaaggagttcgagctgctggacaaggccaagggcaagacccagaagagaggcatcaccaacaccctggaggagagcagcagcctgaagagaaagagactgagcgacagcaagggcaagaacacctgcggcggcttcctgggcgagacctgcctgagcgagagcagcgacggcagcagcagcgaggacgccgagagcagcagcctgatgaacgtgcagagaagaaccgccgccaaggagcccaagaccagcgccagcgacagccagaacagcgtgaaggaggcccccgtgaagaacggcggcgccaccaccagcagcagcagcgacagcgacgacgacggcggcaaggagaagatggtgctggtgaccgccagaagcgtgttcggcaagaagagaagaaagctgagaagagccagaggcagaaagagaaagacctag

SEQ ID NO: 10627 - DNA, 1260 bp, synthetic construct
  misc_feature 1..1260: note = Description of Artificial Sequence: Synthetic coding sequence
  source 1..1260: mol_type = other DNA
atgttcctggagagccaggagctgctgagactgttcggcatcccctacatccaggcccccatggaggccgaggcccagtgcgccatcctggacctgaccgaccagaccagcggcaccatcaccgacgacagcgacatctggctgttcggcgccagacacgtgtacagaaacttcttcaacaagaacaagttcgtggagtactaccagtacgtggacttccacaaccagctgggcctggacagaaacaagctgatcaacctggcctacctgctgggcagcgactacaccgagggcatccccaccgtgggctgcgtgaccgccatggagatcctgaacgagttccccggccacggcctggagcccctgctgaagttcagcgagtggtggcacgaggcccagaagaaccccaagatcagacccaacccccacgacaccaaggtgaagaagaagctgagaaccctgcagctgacccccggcttccccaaccccgccgtggccgaggcctacctgaagcccgtggtggacgacagcaagggcagcttcctgtggggcaagcccgacctggacaagatcagagagttctgccagagatacttcggctggaacagaaccaagaccgacgagagcctgttccccgtgctgaagcagctggacgcccagcagacccagctgagaatcgacagcttcttcagactggcccagcaggagaaggaggacgccaagagaatcaagagccagagactgaacagagccgtgacctgcatgctgagaaaggagaaggaggccgccgccagcgagatcgaggccgtgagcgtggccatggagaaggagttcgagctgctggacaaggccaagggcaagacccagaagagaggcatcaccaacaccctggaggagagcagcagcctgaagagaaagagactgagcgacagcaagggcaagaacacctgcggcggcttcctgggcgagacctgcctgagcgagagcagcgacggcagcagcagcgaggacgccgagagcagcagcctgatgaacgtgcagagaagaaccgccgccaaggagcccaagaccagcgccagcgacagccagaacagcgtgaaggaggcccccgtgaagaacggcggcgccaccaccagcagcagcagcgacagcgacgacgacggcggcaaggagaagatggtgctggtgaccgccagaagcgtgttcggcaagaagagaagaaagctgagaagagccagaggcagaaagagaaagacctag

SEQ ID NO: 10628 - DNA, 3057 bp, synthetic construct
  misc_feature 1..3057: note = Description of Artificial Sequence: Synthetic coding sequence
  source 1..3057: mol_type = other DNA
atgaaccagaagcaggccctgcaggaggagttcttccacaacccccaggccatcgacatcgagagcgaggacttcagcagcctgccccccgaggtgaagcacgagatcctgaccgacatgaaggagttcaccaagagaagaagaaccctgttcgaggccatgcccgaggagagcgacgacttcagccagtaccagctgaagggcctgctgaagaagaactacctgaaccagcacatcgagcacgtgcagaaggagatgaaccagcagcacagcggccacatcagaagacagtacgaggacgagggcggcttcctgaaggaggtggagagcagaagagtggtgagcgaggacaccagccactacatcctgatcaagggcatccaggccaagaccgtggccgaggtggacagcgagagcctgcccagcagcagcaagatgcacggcatgagcttcgacgtgaagagcagcccctgcgagaagctgaagaccgagaaggagcccgacgccaccccccccagccccagaaccctgctggccatgcaggccgccctgctgggcagcagcagcgaggaggagctggagagcgagaacagaagacaggccagaggcagaaacgcccccgccgccgtggacgagggcagcatcagccccagaaccctgagcgccatcaagagagccctggacgacgacgaggacgtgaaggtgtgcgccggcgacgacgtgcagaccggcggccccggcgccgaggagatgagaatcaacagcagcaccgagaacagcgacgagggcctgaaggtgagagacggcaagggcatccccttcaccgccaccctggccagcagcagcgtgaacagcgccgaggagcacgtggccagcaccaacgagggcagagagcccaccgacagcgtgcccaaggagcagatgagcctggtgcacgtgggcaccgaggccttccccatcagcgacgagagcatgatcaaggacagaaaggacagactgcccctggagagcgccgtggtgagacacagcgacgcccccggcctgcccaacggcagagagctgacccccgccagccccacctgcaccaacagcgtgagcaagaacgagacccacgccgaggtgctggagcagcagaacgagctgtgcccctacgagagcaagttcgacagcagcctgctgagcagcgacgacgagaccaagtgcaagcccaacagcgccagcgaggtgatcggccccgtgagcctgcaggagaccagcagcatcgtgagcgtgcccagcgaggccgtggacaacgtggagaacgtggtgagcttcaacgccaaggagcacgagaacttcctggagaccatccaggagcagcagaccaccgagagcgccggccaggacctgatcagcatccccaaggccgtggagcccatggagatcgacagcgaggagagcgagagcgacggcagcttcatcgaggtgcagagcgtgatcagcgacgaggagctgcaggccgagttccccgagaccagcaagccccccagcgagcagggcgaggaggagctggtgggcaccagagagggcgaggcccccgccgagagcgagagcctgctgagagacaacagcgagagagacgacgtggacggcgagccccaggaggccgagaaggacgccgaggacagcctgcacgagtggcaggacatcaacctggaggagctggagaccctggagagcaacctgctggcccagcagaacagcctgaaggcccagaagcagcagcaggagagaatcgccgccaccgtgaccggccagatgttcctggagagccaggagctgctgagactgttcggcatcccctacatccaggcccccatggaggccgaggcccagtgcgccatcctggacctgaccgaccagaccagcggcaccatcaccgacgacagcgacatctggctgttcggcgccagacacgtgtacagaaacttcttcaacaagaacaagttcgtggagtactaccagtacgtggacttccacaaccagctgggcctggacagaaacaagctgatcaacctggcctacctgctgggcagcgactacaccgagggcatccccaccgtgggctgcgtgaccgccatggagatcctgaacgagttccccggccacggcctggagcccctgctgaagttcagcgagtggtggcacgaggcccagaagaaccccaagatcagacccaacccccacgacaccaaggtgaagaagaagctgagaaccctgcagctgacccccggcttccccaaccccgccgtggccgaggcctacctgaagcccgtggtggacgacagcaagggcagcttcctgtggggcaagcccgacctggacaagatcagagagttctgccagagatacttcggctggaacagaaccaagaccgacgagagcctgttccccgtgctgaagcagctggacgcccagcagacccagctgagaatcgacagcttcttcagactggcccagcaggagaaggaggacgccaagagaatcaagagccagagactgaacagagccgtgacctgcatgctgagaaaggagaaggaggccgccgccagcgagatcgaggccgtgagcgtggccatggagaaggagttcgagctgctggacaaggccaagggcaagacccagaagagaggcatcaccaacaccctggaggagagcagcagcctgaagagaaagagactgagcgacagcaagggcaagaacacctgcggcggcttcctgggcgagacctgcctgagcgagagcagcgacggcagcagcagcgaggacgccgagagcagcagcctgatgaacgtgcagagaagaaccgccgccaaggagcccaagaccagcgccagcgacagccagaacagcgtgaaggaggcccccgtgaagaacggcggcgccaccaccagcagcagcagcgacagcgacgacgacggcggcaaggagaagatggtgctggtgaccgccagaagcgtgttcggcaagaagagaagaaagctgagaagagccagaggcagaaagagaaagacctag

SEQ ID NO: 10629 - DNA, 4836 bp, synthetic construct
  misc_feature 1..4836: note = Description of Artificial Sequence: Synthetic coding sequence
  source 1..4836: mol_type = other DNA
cagggcgccgtgaagagcttctgcaccagcgccagcggcgcccccctgggccccaagggcgacggccactacccctggagctgccccgtgacccacaccagagagaagatctacgccatctgcagcgactacgccttcctgaaccaggccaccagcatctacaagacccccaaccccagcagaagcccctgcctgcccgacagcaccagcctgagcgccggcaacaacagcagcagatacatcggcatccccaccagcaccagcgagatcatctacaacgaggagaacagcctggagaacctgagcaacagcctgggcaagctgcccctggcctgggagatcgacaagagcgagttcgacggcgtgaccaccaacagcaagcacaagagcggcaacgccaagaagcaggtgagcaagagaaagaccagcgacaagaagggcagataccagaaggagtgcccccagcacagccccctggaggacatcaagcagagaaaggtgctggacctgagaagatggtactgcatcagcagaccccagtacaagaccagctgcggcatcagcagcctgatcagctgctggaacttcctgtacagcaccatgggcgccggcaacctgccccccatcacccaggaggaggccctgcacatcctgggcttccagccccccttcgaggacatcagattcggccccttcaccggcaacaccaccctgatgagatggttcagacagatcaacgaccacttccacgtgaagggctgcagctacgtgctgtacaagccccacggcaagaacaagaccgccggcgagaccgccagcggcgccctgagcaagctgaccagaggcctgaaggacgagagcctggcctacatctaccactgccagaaccactacttctgccccatcggcttcgaggccacccccgtgaaggccaacaaggccttcagcagaggccccctgagcccccaggaggtggagtactggatcctgatcggcgagagcagcagaaagcaccccgccatccactgcaagaagtgggccgacatcgtgaccgacctgaacacccagaaccccgagtacctggacatcagacacctggagagaggcctgcagtacagaaagaccaagaaggtgggcggcaacctgcactgcatcatcgccttccagagactgaactggcagagattcggcctgtggaacttccccttcggcaccatcagacaggagagccagccccccacccacgcccagggcatcgccaagagcgagagcgaggacaacatcagcaagaagcagcacggcagactgggcagaagcttcagcgccagcttccaccaggacagcgcctggaagaagatgagcaacatcagcatctggctgaaccaggccctgaagggcgtgagagacagacacggcaacagcatcgagaacccccacctgctgaccctgttccacagactgtgcaagctgctgttcttcagaatcagacccatcttcgtgttcgacggcgacgcccccctgctgaagaagcagaccctggtgaagagaagacagagaaaggacctggccagcagcgacagcagaaagaccaccgagaagctgctgaagaccttcctgaagagacaggccatcaagaccgccttcagaagcaagagagacgaggccctgcccagcctgacccaggtgagaagagagaacgacctgtacgtgctgccccccctgcaggaggaggagaagcacagcagcgaggaggaggacgagaaggagtggcaggagagaatgaaccagaagcaggccctgcaggaggagttcttccacaacccccaggccatcgacatcgagagcgaggacttcagcagcctgccccccgaggtgaagcacgagatcctgaccgacatgaaggagttcaccaagagaagaagaaccctgttcgaggccatgcccgaggagagcgacgacttcagccagtaccagctgaagggcctgctgaagaagaactacctgaaccagcacatcgagcacgtgcagaaggagatgaaccagcagcacagcggccacatcagaagacagtacgaggacgagggcggcttcctgaaggaggtggagagcagaagagtggtgagcgaggacaccagccactacatcctgatcaagggcatccaggccaagaccgtggccgaggtggacagcgagagcctgcccagcagcagcaagatgcacggcatgagcttcgacgtgaagagcagcccctgcgagaagctgaagaccgagaaggagcccgacgccaccccccccagccccagaaccctgctggccatgcaggccgccctgctgggcagcagcagcgaggaggagctggagagcgagaacagaagacaggccagaggcagaaacgcccccgccgccgtggacgagggcagcatcagccccagaaccctgagcgccatcaagagagccctggacgacgacgaggacgtgaaggtgtgcgccggcgacgacgtgcagaccggcggccccggcgccgaggagatgagaatcaacagcagcaccgagaacagcgacgagggcctgaaggtgagagacggcaagggcatccccttcaccgccaccctggccagcagcagcgtgaacagcgccgaggagcacgtggccagcaccaacgagggcagagagcccaccgacagcgtgcccaaggagcagatgagcctggtgcacgtgggcaccgaggccttccccatcagcgacgagagcatgatcaaggacagaaaggacagactgcccctggagagcgccgtggtgagacacagcgacgcccccggcctgcccaacggcagagagctgacccccgccagccccacctgcaccaacagcgtgagcaagaacgagacccacgccgaggtgctggagcagcagaacgagctgtgcccctacgagagcaagttcgacagcagcctgctgagcagcgacgacgagaccaagtgcaagcccaacagcgccagcgaggtgatcggccccgtgagcctgcaggagaccagcagcatcgtgagcgtgcccagcgaggccgtggacaacgtggagaacgtggtgagcttcaacgccaaggagcacgagaacttcctggagaccatccaggagcagcagaccaccgagagcgccggccaggacctgatcagcatccccaaggccgtggagcccatggagatcgacagcgaggagagcgagagcgacggcagcttcatcgaggtgcagagcgtgatcagcgacgaggagctgcaggccgagttccccgagaccagcaagccccccagcgagcagggcgaggaggagctggtgggcaccagagagggcgaggcccccgccgagagcgagagcctgctgagagacaacagcgagagagacgacgtggacggcgagccccaggaggccgagaaggacgccgaggacagcctgcacgagtggcaggacatcaacctggaggagctggagaccctggagagcaacctgctggcccagcagaacagcctgaaggcccagaagcagcagcaggagagaatcgccgccaccgtgaccggccagatgttcctggagagccaggagctgctgagactgttcggcatcccctacatccaggcccccatggaggccgaggcccagtgcgccatcctggacctgaccgaccagaccagcggcaccatcaccgacgacagcgacatctggctgttcggcgccagacacgtgtacagaaacttcttcaacaagaacaagttcgtggagtactaccagtacgtggacttccacaaccagctgggcctggacagaaacaagctgatcaacctggcctacctgctgggcagcgactacaccgagggcatccccaccgtgggctgcgtgaccgccatggagatcctgaacgagttccccggccacggcctggagcccctgctgaagttcagcgagtggtggcacgaggcccagaagaaccccaagatcagacccaacccccacgacaccaaggtgaagaagaagctgagaaccctgcagctgacccccggcttccccaaccccgccgtggccgaggcctacctgaagcccgtggtggacgacagcaagggcagcttcctgtggggcaagcccgacctggacaagatcagagagttctgccagagatacttcggctggaacagaaccaagaccgacgagagcctgttccccgtgctgaagcagctggacgcccagcagacccagctgagaatcgacagcttcttcagactggcccagcaggagaaggaggacgccaagagaatcaagagccagagactgaacagagccgtgacctgcatgctgagaaaggagaaggaggccgccgccagcgagatcgaggccgtgagcgtggccatggagaaggagttcgagctgctggacaaggccaagggcaagacccagaagagaggcatcaccaacaccctggaggagagcagcagcctgaagagaaagagactgagcgacagcaagggcaagaacacctgcggcggcttcctgggcgagacctgcctgagcgagagcagcgacggcagcagcagcgaggacgccgagagcagcagcctgatgaacgtgcagagaagaaccgccgccaaggagcccaagaccagcgccagcgacagccagaacagcgtgaaggaggcccccgtgaagaacggcggcgccaccaccagcagcagcagcgacagcgacgacgacggcggcaaggagaagatggtgctggtgaccgccagaagcgtgttcggcaagaagagaagaaagctgagaagagccagaggcagaaagagaaagacctag

SEQ ID NO: 10630 - DNA, 699 bp, synthetic construct
  misc_feature 1..699: note = Description of Artificial Sequence: Synthetic coding sequence
  source 1..699: mol_type = other DNA
atgggcgtgcagggcctgtggaagctgctggagtgcagcggcagacaggtgagccccgaggccctggagggcaagatcctggccgtggacatcagcatctggctgaaccaggccctgaagggcgtgagagacagacacggcaacagcatcgagaacccccacctgctgaccctgttccacagactgtgcaagctgctgttcttcagaatcagacccatcttcgtgttcgacggcgacgcccccctgctgaagaagcagaccctggtgaagagaagacagagaaaggacctggccagcagcgacagcagaaagaccaccgagaagctgctgaagaccttcctgaagagacaggccatcaagaccgccttcagaagcaagagagacgaggccctgcccagcctgacccaggtgagaagagagaacgacctgtacgtgctgccccccctgcaggaggaggagaagcacagcagcgaggaggaggacgagaaggagtggcaggagagaatgaaccagaagcaggccctgcaggaggagttcttccacaacccccaggccatcgacatcgagagcgaggacttcagcagcctgccccccgaggtgaagcacgagatcctgaccgacatgaaggagttcaccaagagaagaagaaccctgttcgaggccatgcccgaggtgtacctgcccctgctgcagccctag

SEQ ID NO: 10631 - DNA, 4482 bp, synthetic construct
  misc_feature 1..4482: note = Description of Artificial Sequence: Synthetic coding sequence
  source 1..4482: mol_type = other DNA
atgcccaacgagggcatcccccacagcagccagacccaggagcaggactgcctgcagagccagcccgtgagcaacaacgaggagatggccatcaagcaggagagcggcggcgacggcgaggtggaggagtacctgagcttcagaagcgtgggcgacggcctgagcaccagcgccgtgggctgcgccagcgccgcccccagaagaggccccgccctgctgcacatcgacagacaccagatccaggccgtggagcccagcgcccaggccctggagctgcagggcctgggcgtggacgtgtacgaccaggacgtgctggagcagggcgtgctgcagcaggtggacaacgccatccacgaggccagcagagccagccagctggtggacgtggagaaggagtacagaagcgtgctggacgacctgaccagctgcaccaccagcctgagacagatcaacaagatcatcgagcagctgagcccccaggccgccaccagcagagacatcaacagaaagctggacagcgtgaagagacagaagtacaacaaggagcagcagctgaagaagatcaccgccaagcagaagcacctgcaggccatcctgggcggcgccgaggtgaagatcgagctggaccacgccagcctggaggaggacgccgagcccggccccagcagcctgggcagcatgctgatgcccgtgcaggagaccgcctgggaggagctgatcagaaccggccagatgacccccttcggcacccagatcccccagaagcaggagaagaagcccagaaagatcatgctgaacgaggccagcggcttcgagaagtacctggccgaccaggccaagctgagcttcgagagaaagaagcagggctgcaacaagagagccgccagaaaggcccccgcccccgtgaccccccccgcccccgtgcagaacaagaacaagcccaacaagaaggccagagtgctgagcaagaaggaggagagactgaagaagcacatcaagaagctgcagaagagagccctgcagttccagggcaaggtgggcctgcccaaggccagaagaccctgggagagcgacatgagacccgaggccgagggcgacagcgagggcgaggagagcgagtacttccccaccgaggaggaggaggaggaggaggacgacgaggtggagggcgccgaggccgacctgagcggcgacggcaccgactacgagctgaagcccctgcccaagggcggcaagagacagaagaaggtgcccgtgcaggagatcgacgacgacttcttccccagcagcggcgaggaggccgaggccgccagcgtgggcgagggcggcggcggcggcagaaaggtgggcagatacagagacgacggcgacgaggactactacaagcagagactgagaagatggaacaagctgagactgcaggacaaggagaagagactgaagctggaggacgacagcgaggagagcgacgccgagttcgacgagggcttcaaggtgcccggcttcctgttcaagaagctgttcaagtaccagcagaccggcgtgagatggctgtgggagctgcactgccagcaggccggcggcatcctgggcgacgagatgggcctgggcaagaccatccagatcatcgccttcctggccggcctgagctacagcaagatcagaaccagaggcagcaactacagattcgagggcctgggccccaccgtgatcgtgtgccccaccaccgtgatgcaccagtgggtgaaggagttccacacctggtggccccccttcagagtggccatcctgcacgagaccggcagctacacccacaagaaggagaagctgatcagagacgtggcccactgccacggcatcctgatcaccagctacagctacatcagactgatgcaggacgacatcagcagatacgactggcactacgtgatcctggacgagggccacaagatcagaaaccccaacgccgccgtgaccctggcctgcaagcagttcagaaccccccacagaatcatcctgagcggcagccccatgcagaacaacctgagagagctgtggagcctgttcgacttcatcttccccggcaagctgggcaccctgcccgtgttcatggagcagttcagcgtgcccatcaccatgggcggctacagcaacgccagccccgtgcaggtgaagaccgcctacaagtgcgcctgcgtgctgagagacaccatcaacccctacctgctgagaagaatgaagagcgacgtgaagatgagcctgagcctgcccgacaagaacgagcaggtgctgttctgcagactgaccgacgagcagcacaaggtgtaccagaacttcgtggacagcaaggaggtgtacagaatcctgaacggcgagatgcagatcttcagcggcctgatcgccctgagaaagatctgcaaccaccccgacctgttcagcggcggccccaagaacctgaagggcctgcccgacgacgagctggaggaggaccagttcggctactggaagagaagcggcaagatgatcgtggtggagagcctgctgaagatctggcacaagcagggccagagagtgctgctgttcagccagagcagacagatgctggacatcctggaggtgttcctgagagcccagaagtacacctacctgaagatggacggcaccaccaccatcgccagcagacagcccctgatcaccagatacaacgaggacaccagcatcttcgtgttcctgctgaccaccagagtgggcggcctgggcgtgaacctgaccggcgccaacagagtggtgatctacgaccccgactggaaccccagcaccgacacccaggccagagagagagcctggagaatcggccagaagaagcaggtgaccgtgtacagactgctgaccgccggcaccatcgaggagaagatctaccacagacagatcttcaagcagttcctgaccaacagagtgctgaaggaccccaagcagagaagattcttcaagagcaacgacctgtacgagctgttcaccctgaccagccccgacgccagccagagcaccgagaccagcgccatcttcgccggcaccggcagcgacgtgcagacccccaagtgccacctgaagagaagaatccagcccgccttcggcgccgaccacgacgtgcccaagagaaagaagttccccgccagcaacatcagcgtgaacgacgccaccagcagcgaggagaagagcgaggccaagggcgccgaggtgaacgccgtgaccagcaacagaagcgaccccctgaaggacgacccccacatgagcagcaacgtgaccagcaacgacagactgggcgaggagaccaacgccgtgagcggccccgaggagctgagcgtgatcagcggcaacggcgagtgcagcaacagcagcggcaccggcaagaccagcatgcccagcggcgacgagagcatcgacgagaagctgggcctgagctacaagagagagagacccagccaggcccagaccgaggccttctgggagaacaagcagatggagaacaacttctacaagcacaagagcaagaccaagcaccacagcgtggccgaggaggagaccctggagaagcacctgagacccaagcagaagcccaagaacagcaagcactgcagagacgccaagttcgagggcaccagaatcccccacctggtgaagaagagaagataccagaagcaggacagcgagaacaagagcgaggccaaggagcagagcaacgacgactacgtgctggagaagctgttcaagaagagcgtgggcgtgcacagcgtgatgaagcacgacgccatcatggacggcgccagccccgactacgtgctggtggaggccgaggccaacagagtggcccaggacgccctgaaggccctgagactgagcagacagagatgcctgggcgccgtgagcggcgtgcccacctggaccggccacagaggcatcagcggcgcccccgccggcaagaagagcagattcggcaagaagagaaacagcaacttcagcgtgcagcaccccagcagcaccagccccaccgagaagtgccaggacggcatcatgaagaaggagggcaaggacaacgtgcccgagcacttcagcggcagagccgaggacgccgacagcagcagcggccccctggccagcagcagcctgctggccaagatgagagccagaaaccacctgatcctgcccgagagactggagagcgagagcggccacctgcaggaggccagcgccctgctgcccaccaccgagcacgacgacctgctggtggagatgagaaacttcatcgccttccaggcccacaccgacggccaggccagcaccagagagatcctgcaggagttcgagagcaagctgagcgccagccagagctgcgtgttcagagagctgctgagaaacctgtgcaccttccacagaaccagcggcggcgagggcatctggaagctgaagcccgagtactgctag

SEQ ID NO: 10632 - DNA, 2613 bp, synthetic construct
  misc_feature 1..2613: note = Description of Artificial Sequence: Synthetic coding sequence
  source 1..2613: mol_type = other DNA
cagcagcccttccacagacacctgctgatgaccaccgccctgcacagcgagaagctgatcagagacgtggcccactgccacggcatcctgatcaccagctacagctacatcagactgatgcaggacgacatcagcagatacgactggcactacgtgatcctggacgagggccacaagatcagaaaccccaacgccgccgtgaccctggcctgcaagcagttcagaaccccccacagaatcatcctgagcggcagccccatgcagaacaacctgagagagctgtggagcctgttcgacttcatcttccccggcaagctgggcaccctgcccgtgttcatggagcagttcagcgtgcccatcaccatgggcggctacagcaacgccagccccgtgcaggtgaagaccgcctacaagtgcgcctgcgtgctgagagacaccatcaacccctacctgctgagaagaatgaagagcgacgtgaagatgagcctgagcctgcccgacaagaacgagcagatcttcagcggcctgatcgccctgagaaagatctgcaaccaccccgacctgttcagcggcggccccaagaacctgaagggcctgcccgacgacgagctggaggaggaccagttcggctactggaagagaagcggcaagatgatcgtggtggagagcctgctgaagatctggcacaagcagggccagagagtgctgctgttcagccagagcagacagatgctggacatcctggaggtgttcctgagagcccagaagtacacctacctgaagatggacggcaccaccaccatcgccagcagacagcccctgatcaccagatacaacgaggacaccagcatcttcgtgttcctgctgaccaccagagtgggcggcctgggcgtgaacctgaccggcgccaacagagtggtgatctacgaccccgactggaaccccagcaccgacacccaggccagagagagagcctggagaatcggccagaagaagcaggtgaccgtgtacagactgctgaccgccggcaccatcgaggagaagatctaccacagacagatcttcaagcagttcctgaccaacagagtgctgaaggaccccaagcagagaagattcttcaagagcaacgacctgtacgagctgttcaccctgaccagccccgacgccagccagagcaccgagaccagcgccatcttcgccggcaccggcagcgacgtgcagacccccaagtgccacctgaagagaagaatccagcccgccttcggcgccgaccacgacgtgcccaagagaaagaagttccccgccagcaacatcagcgtgaacgacgccaccagcagcgaggagaagagcgaggccaagggcgccgaggtgaacgccgtgaccagcaacagaagcgaccccctgaaggacgacccccacatgagcagcaacgtgaccagcaacgacagactgggcgaggagaccaacgccgtgagcggccccgaggagctgagcgtgatcagcggcaacggcgagtgcagcaacagcagcggcaccggcaagaccagcatgcccagcggcgacgagagcatcgacgagaagctgggcctgagctacaagagagagagacccagccaggcccagaccgaggccttctgggagaacaagcagatggagaacaacttctacaagcacaagagcaagaccaagcaccacagcgtggccgaggaggagaccctggagaagcacctgagacccaagcagaagcccaagaacagcaagcactgcagagacgccaagttcgagggcaccagaatcccccacctggtgaagaagagaagataccagaagcaggacagcgagaacaagagcgaggccaaggagcagagcaacgacgactacgtgctggagaagctgttcaagaagagcgtgggcgtgcacagcgtgatgaagcacgacgccatcatggacggcgccagccccgactacgtgctggtggaggccgaggccaacagagtggcccaggacgccctgaaggccctgagactgagcagacagagatgcctgggcgccgtgagcggcgtgcccacctggaccggccacagaggcatcagcggcgcccccgccggcaagaagagcagattcggcaagaagagaaacagcaacttcagcgtgcagcaccccagcagcaccagccccaccgagaagtgccaggacggcatcatgaagaaggagggcaaggacaacgtgcccgagcacttcagcggcagagccgaggacgccgacagcagcagcggccccctggccagcagcagcctgctggccaagatgagagccagaaaccacctgatcctgcccgagagactggagagcgagagcggccacctgcaggaggccagcgccctgctgcccaccaccgagcacgacgacctgctggtggagatgagaaacttcatcgccttccaggcccacaccgacggccaggccagcaccagagagatcctgcaggagttcgagagcaagctgagcgccagccagagctgcgtgttcagagagctgctgagaaacctgtgcaccttccacagaaccagcggcggcgagggcatctggaagctgaagcccgagtactgctag

SEQ ID NO: 10633 - DNA, 540 bp, synthetic construct
  misc_feature 1..540: note = Description of Artificial Sequence: Synthetic coding sequence
  source 1..540: mol_type = other DNA
atgcccaacgagggcatcccccacagcagccagacccaggagcaggactgcctgcagagccagcccgtgagcaacaacgaggagatggccatcaagcaggagagcggcggcgacggcgaggtggaggagtacctgagcttcagaagcgtgggcgacggcctgagcaccagcgccgtgggctgcgccagcgccgcccccagaagaggccccgccctgctgcacatcgacagacaccagatccaggccgtggagcccagcgcccaggccctggagctgcagggcctgggcgtggacgtgtacgaccaggacgtgctggagcagggcgtgctgcagcaggtggacaacgccatccacgaggccagcagagccagccagctggtggacgtggagaaggagtacagaagcgtgctggacgacctgaccagctgcaccaccagcctgagacagatcaacaagatcatcgagcagctgagcccccaggccgccaccagcagagacatcaacagaaagctggacagcgtgaagagacagaagtactag

SEQ ID NO: 10634 - DNA, 318 bp, synthetic construct
  misc_feature 1..318: note = Description of Artificial Sequence: Synthetic coding sequence
  source 1..318: mol_type = other DNA
atgagcctgagcctgcccgacaagaacgagcaggtgctgttctgcagactgaccgacgagcagcacaaggtgtaccagaacttcgtggacagcaaggaggtgtacagaatcctgaacggcgagatgcaggaggtgctgcagagcttcaccagcatccacctgcacgagagccccctgaacttcttcagaagcttccaggtgagaggcagcagaagccactaccccggcaagggcatgcagaccaccctgggcatcgtgaacttcctggtggtgaccctgaagagaaagaagagaaacagattcagccccgacctgtag

SEQ ID NO: 10635 - DNA, 2592 bp, synthetic construct
  misc_feature 1..2592: note = Description of Artificial Sequence: Synthetic coding sequence
  source 1..2592: mol_type = other DNA
atgcaggacgacatcagcagatacgactggcactacgtgatcctggacgagggccacaagatcagaaaccccaacgccgccgtgaccctggcctgcaagcagttcagaaccccccacagaatcatcctgagcggcagccccatgcagaacaacctgagagagctgtggagcctgttcgacttcatcttccccggcaagctgggcaccctgcccgtgttcatggagcagttcagcgtgcccatcaccatgggcggctacagcaacgccagccccgtgcaggtgaagaccgcctacaagtgcgcctgcgtgctgagagacaccatcaacccctacctgctgagaagaatgaagagcgacgtgaagatgagcctgagcctgcccgacaagaacgagcaggtgctgttctgcagactgaccgacgagcagcacaaggtgtaccagaacttcgtggacagcaaggaggtgtacagaatcctgaacggcgagatgcagatcttcagcggcctgatcgccctgagaaagatctgcaaccaccccgacctgttcagcggcggccccaagaacctgaagggcctgcccgacgacgagctggaggaggaccagttcggctactggaagagaagcggcaagatgatcgtggtggagagcctgctgaagatctggcacaagcagggccagagagtgctgctgttcagccagagcagacagatgctggacatcctggaggtgttcctgagagcccagaagtacacctacctgaagatggacggcaccaccaccatcgccagcagacagcccctgatcaccagatacaacgaggacaccagcatcttcgtgttcctgctgaccaccagagtgggcggcctgggcgtgaacctgaccggcgccaacagagtggtgatctacgaccccgactggaaccccagcaccgacacccaggccagagagagagcctggagaatcggccagaagaagcaggtgaccgtgtacagactgctgaccgccggcaccatcgaggagaagatctaccacagacagatcttcaagcagttcctgaccaacagagtgctgaaggaccccaagcagagaagattcttcaagagcaacgacctgtacgagctgttcaccctgaccagccccgacgccagccagagcaccgagaccagcgccatcttcgccggcaccggcagcgacgtgcagacccccaagtgccacctgaagagaagaatccagcccgccttcggcgccgaccacgacgtgcccaagagaaagaagttccccgccagcaacatcagcgtgaacgacgccaccagcagcgaggagaagagcgaggccaagggcgccgaggtgaacgccgtgaccagcaacagaagcgaccccctgaaggacgacccccacatgagcagcaacgtgaccagcaacgacagactgggcgaggagaccaacgccgtgagcggccccgaggagctgagcgtgatcagcggcaacggcgagtgcagcaacagcagcggcaccggcaagaccagcatgcccagcggcgacgagagcatcgacgagaagctgggcctgagctacaagagagagagacccagccaggcccagaccgaggccttctgggagaacaagcagatggagaacaacttctacaagcacaagagcaagaccaagcaccacagcgtggccgaggaggagaccctggagaagcacctgagacccaagcagaagcccaagaacagcaagcactgcagagacgccaagttcgagggcaccagaatcccccacctggtgaagaagagaagataccagaagcaggacagcgagaacaagagcgaggccaaggagcagagcaacgacgactacgtgctggagaagctgttcaagaagagcgtgggcgtgcacagcgtgatgaagcacgacgccatcatggacggcgccagccccgactacgtgctggtggaggccgaggccaacagagtggcccaggacgccctgaaggccctgagactgagcagacagagatgcctgggcgccgtgagcggcgtgcccacctggaccggccacagaggcatcagcggcgcccccgccggcaagaagagcagattcggcaagaagagaaacagcaacttcagcgtgcagcaccccagcagcaccagccccaccgagaagtgccaggacggcatcatgaagaaggagggcaaggacaacgtgcccgagcacttcagcggcagagccgaggacgccgacagcagcagcggccccctggccagcagcagcctgctggccaagatgagagccagaaaccacctgatcctgcccgagagactggagagcgagagcggccacctgcaggaggccagcgccctgctgcccaccaccgagcacgacgacctgctggtggagatgagaaacttcatcgccttccaggcccacaccgacggccaggccagcaccagagagatcctgcaggagttcgagagcaagctgagcgccagccagagctgcgtgttcagagagctgctgagaaacctgtgcaccttccacagaaccagcggcggcgagggcatctggaagctgaagcccgagtactgctag

SEQ ID NO: 10636 - DNA, 1191 bp, synthetic construct
  misc_feature 1..1191: note = Description of Artificial Sequence: Synthetic coding sequence
  source 1..1191: mol_type = other DNA
atgctgggcttcctgagcgccagacagaccggcctggaggaccccctgagactgagaagagccgagagcaccagaagagtgctgggcctggagctgaacaaggacagagacgtggagagaatccacggcggcggcatcaacaccctggacatcgagcccgtggagggcagatacatgctgagcggcggcagcgacggcgtgatcgtgctgtacgacctggagaacagcagcagacagagctactacacctgcaaggccgtgtgcagcatcggcagagaccaccccgacgtgcacagatacagcgtggagaccgtgcagtggtacccccacgacaccggcatgttcaccagcagcagcttcgacaagaccctgaaggtgtgggacaccaacaccctgcagaccgccgacgtgttcaacttcgaggagaccgtgtacagccaccacatgagccccgtgagcaccaagcactgcctggtggccgtgggcaccagaggccccaaggtgcagctgtgcgacctgaagagcggcagctgcagccacatcctgcagggccacagacaggagatcctggccgtgagctggagccccagatacgactacatcctggccaccgccagcgccgacagcagagtgaagctgtgggacgtgagaagagccagcggctgcctgatcaccctggaccagcacaacggcaagaagagccaggccgtggagagcgccaacaccgcccacaacggcaaggtgaacggcctgtgcttcaccagcgacggcctgcacctgctgaccgtgggcaccgacaacagaatgagactgtggaacagcagcaacggcgagaacaccctggtgaactacggcaaggtgtgcaacaacagcaagaagggcctgaagttcaccgtgagctgcggctgcagcagcgagttcgtgttcgtgccctacggcagcaccatcgccgtgtacaccgtgtacagcggcgagcagatcaccatgctgaagggccactacaagaccgtggactgctgcgtgttccagagcaacttccaggagctgtacagcggcagcagagactgcaacatcctggcctgggtgcccagcctgtacgagcccgtgcccgacgacgacgagaccaccaccaagagccagctgaaccccgccttcgaggacgcctggagcagcagcgacgaggagggctag

SEQ ID NO: 10637 - DNA, 1017 bp, synthetic construct
  misc_feature 1..1017: note = Description of Artificial Sequence: Synthetic coding sequence
  source 1..1017: mol_type = other DNA
atgctgagcggcggcagcgacggcgtgatcgtgctgtacgacctggagaacagcagcagacagagctactacacctgcaaggccgtgtgcagcatcggcagagaccaccccgacgtgcacagatacagcgtggagaccgtgcagtggtacccccacgacaccggcatgttcaccagcagcagcttcgacaagaccctgaaggtgtgggacaccaacaccctgcagaccgccgacgtgttcaacttcgaggagaccgtgtacagccaccacatgagccccgtgagcaccaagcactgcctggtggccgtgggcaccagaggccccaaggtgcagctgtgcgacctgaagagcggcagctgcagccacatcctgcagggccacagacaggagatcctggccgtgagctggagccccagatacgactacatcctggccaccgccagcgccgacagcagagtgaagctgtgggacgtgagaagagccagcggctgcctgatcaccctggaccagcacaacggcaagaagagccaggccgtggagagcgccaacaccgcccacaacggcaaggtgaacggcctgtgcttcaccagcgacggcctgcacctgctgaccgtgggcaccgacaacagaatgagactgtggaacagcagcaacggcgagaacaccctggtgaactacggcaaggtgtgcaacaacagcaagaagggcctgaagttcaccgtgagctgcggctgcagcagcgagttcgtgttcgtgccctacggcagcaccatcgccgtgtacaccgtgtacagcggcgagcagatcaccatgctgaagggccactacaagaccgtggactgctgcgtgttccagagcaacttccaggagctgtacagcggcagcagagactgcaacatcctggcctgggtgcccagcctgtacgagcccgtgcccgacgacgacgagaccaccaccaagagccagctgaaccccgccttcgaggacgcctggagcagcagcgacgaggagggctag

SEQ ID NO: 10638 - DNA, 1188 bp, synthetic construct
  misc_feature 1..1188: note = Description of Artificial Sequence: Synthetic coding sequence
  source 1..1188: mol_type = other DNA
atggccaccagcagcgcccccgccggcgtgagaaccagatacgccggcgtgttcgtgagaacccccaacggcttcggcggccccagcagccccagcgagagcagagtgaacaccgagagcttcggcaccggcatcaacaccctggacatcgagcccgtggagggcagatacatgctgagcggcggcagcgacggcgtgatcgtgctgtacgacctggagaacagcagcagacagagctactacacctgcaaggccgtgtgcagcatcggcagagaccaccccgacgtgcacagatacagcgtggagaccgtgcagtggtacccccacgacaccggcatgttcaccagcagcagcttcgacaagaccctgaaggtgtgggacaccaacaccctgcagaccgccgacgtgttcaacttcgaggagaccgtgtacagccaccacatgagccccgtgagcaccaagcactgcctggtggccgtgggcaccagaggccccaaggtgcagctgtgcgacctgaagagcggcagctgcagccacatcctgcagggccacagacaggagatcctggccgtgagctggagccccagatacgactacatcctggccaccgccagcgccgacagcagagtgaagctgtgggacgtgagaagagccagcggctgcctgatcaccctggaccagcacaacggcaagaagagccaggccgtggagagcgccaacaccgcccacaacggcaaggtgaacggcctgtgcttcaccagcgacggcctgcacctgctgaccgtgggcaccgacaacagaatgagactgtggaacagcagcaacggcgagaacaccctggtgaactacggcaaggtgtgcaacaacagcaagaagggcctgaagttcaccgtgagctgcggctgcagcagcgagttcgtgttcgtgccctacggcagcaccatcgccgtgtacaccgtgtacagcggcgagcagatcaccatgctgaagggccactacaagaccgtggactgctgcgtgttccagagcaacttccaggagctgtacagcggcagcagagactgcaacatcctggcctgggtgcccagcctgtacgagcccgtgcccgacgacgacgagaccaccaccaagagccagctgaaccccgccttcgaggacgcctggagcagcagcgacgaggagggctag

SEQ ID NO: 10639 - DNA, 732 bp, synthetic construct
  misc_feature 1..732: note = Description of Artificial Sequence: Synthetic coding sequence
  source 1..732: mol_type = other DNA
atgggctacaagtacatcaccatcggcaccagaggccccaaggtgcagctgtgcgacctgaagagcggcagctgcagccacatcctgcagggccacagacaggagatcctggccgtgagctggagccccagatacgactacatcctggccaccgccagcgccgacagcagagtgaagctgtgggacgtgagaagagccagcggctgcctgatcaccctggaccagcacaacggcaagaagagccaggccgtggagagcgccaacaccgcccacaacggcaaggtgaacggcctgtgcttcaccagcgacggcctgcacctgctgaccgtgggcaccgacaacagaatgagactgtggaacagcagcaacggcgagaacaccctggtgaactacggcaaggtgtgcaacaacagcaagaagggcctgaagttcaccgtgagctgcggctgcagcagcgagttcgtgttcgtgccctacggcagcaccatcgccgtgtacaccgtgtacagcggcgagcagatcaccatgctgaagggccactacaagaccgtggactgctgcgtgttccagagcaacttccaggagctgtacagcggcagcagagactgcaacatcctggcctgggtgcccagcctgtacgagcccgtgcccgacgacgacgagaccaccaccaagagccagctgaaccccgccttcgaggacgcctggagcagcagcgacgaggagggctag

SEQ ID NO: 10640 - DNA, 2541 bp, synthetic construct
  misc_feature 1..2541: note = Description of Artificial Sequence: Synthetic coding sequence
  source 1..2541: mol_type = other DNA
atgggcatccagggcctgctgcagttcatcaaggaggccagcgagcccatccacgtgagaaagtacaagggccaggtggtggccgtggacacctactgctggctgcacaagggcgccatcgcctgcgccgagaagctggccaagggcgagcccaccgacagatacgtgggcttctgcatgaagttcgtgaacatgctgctgagccacggcatcaagcccatcctggtgttcgacggctgcaccctgcccagcaagaaggaggtggagagaagcagaagagagagaagacaggccaacctgctgaagggcaagcagctgctgagagagggcaaggtgagcgaggccagagagtgcttcaccagaagcatcaacatcacccacgccatggcccacaaggtgatcaaggccgccagaagccagggcgtggactgcctggtggccccctacgaggccgacgcccagctggcctacctgaacaaggccggcatcgtgcaggccatcatcaccgaggacagcgacctgctggccttcggctgcaagaaggtgatcctgaagatggaccagttcggcaacggcctggagatcgaccaggccagactgggcatgtgcagacagctgggcgacgtgttcaccgaggagaagttcagatacatgtgcatcctgagcggctgcgactacctgagcagcctgagaggcatcggcctggccaaggcctgcaaggtgctgagactggccaacaaccccgacatcgtgaaggtgatcaagaagatcggccactacctgaagatgaacatcaccgtgcccgaggactacatcaacggcttcatcagagccaacaacaccttcctgtaccagctggtgttcgaccccatcaagagaaagctgatccccctgaacgcctacgaggacgacgtggaccccgagaccctgagctacgccggccagtacgtggacgacagcatcgccctgcagatcgccctgggcaacaaggacatcaacaccttcgagcagatcgacgactacaaccccgacaccgccatgcccgcccacagcagaagccacagctgggacgacaagacctgccagaagagcgccaacgtgagcagcatctggcacagaaactacagccccagacccgagagcggcaccgtgagcgacgccccccagctgaaggagaaccccagcaccgtgggcgtggagagagtgatcagcaccaagggcctgaacctgcccagaaagagcagcatcgtgaagagacccagaagcgccgagctgagcgaggacgacctgctgagccagtacagcctgagcttcaccaagaagaccaagaagaacagcagcgagggcaacaagagcctgagcttcagcgaggtgttcgtgcccgacctggtgaacggccccaccaacaagaagagcgtgagcaccccccccagaaccagaaacaagttcgccaccttcctgcagagaaagaacgaggagagcggcgccgtggtggtgcccggcaccagaagcagattcttctgcagcagcgacagcaccgactgcgtgagcaacaaggtgagcatccagcccctggacgagaccgccgtgaccgacaaggagaacaacctgcacgagagcgagtacggcgaccaggagggcaagagactggtggacaccgacgtggccagaaacagcagcgacgacatccccaacaaccacatccccggcgaccacatccccgacaaggccaccgtgttcaccgacgaggagagctacagcttcgagagcagcaagttcaccagaaccatcagcccccccaccctgggcaccctgagaagctgcttcagctggagcggcggcctgggcgacttcagcagaacccccagccccagccccagcaccgccctgcagcagttcagaagaaagagcgacagccccaccagcctgcccgagaacaacatgagcgacgtgagccagctgaagagcgaggagagcagcgacgacgagagccaccccctgagagaggaggcctgcagcagccagagccaggagagcggcgagttcagcctgcagagcagcaacgccagcaagctgagccagtgcagcagcaaggacagcgacagcgaggagagcgactgcaacatcaagctgctggacagccagagcgaccagaccagcaagctgagactgagccacttcagcaagaaggacacccccctgagaaacaaggtgcccggcctgtacaagagcagcagcgccgacagcctgagcaccaccaagatcaagcccctgggccccgccagagccagcggcctgagcaagaagcccgccagcatccagaagagaaagcaccacaacgccgagaacaagcccggcctgcagatcaagctgaacgagctgtggaagaacttcggcttcaagaaggacagcgagaagctgcccccctgcaagaagcccctgagccccgtgagagacaacatccagctgacccccgaggccgaggaggacatcttcaacaagcccgagtgcggcagagtgcagagagccatcttccagtag

SEQ ID NO: 10641 - DNA, 510 bp, synthetic construct
  misc_feature 1..510: note = Description of Artificial Sequence: Synthetic coding sequence
  source 1..510: mol_type = other DNA
atgggcatccagggcctgctgcagttcatcaaggaggccagcgagcccatccacgtgagaaagtacaagggccaggtggtggccgtggacacctactgctggctgcacaagggcgccatcgcctgcgccgagaagctggccaagggcgagcccaccgacagaagaagacaggccaacctgctgaagggcaagcagctgctgagagagggcaaggtgagcgaggccagagagtgcttcaccagaagcatcaacatcacccacgccatggcccacaaggtgatcaaggccgccagaagccagggcgtggactgcctggtggccccctacgaggccgacgcccagctggcctacctgaacaaggccggcatcgtgcaggccatcatcaccgaggacagcgacctgctggccttcggctgcaagaaggtgatcctgaagatggaccagttcggcaacggcctggagatcgaccaggccagactgggcatgtgcagacagctgggcgacgtgtag

SEQ ID NO: 10642 - DNA, 2541 bp, synthetic construct; identical to SEQ ID NO: 10640
  misc_feature 1..2541: note = Description of Artificial Sequence: Synthetic coding sequence
  source 1..2541: mol_type = other DNA

SEQ ID NO: 10643 - DNA, 408 bp, synthetic construct
  misc_feature 1..408: note = Description of Artificial Sequence: Synthetic coding sequence
  source 1..408: mol_type = other DNA
atgggcatccagggcctgctgcagttcatcaaggaggccagcgagcccatccacgtgagaaagtacaagggccaggtggtggccgtggacacctactgctggctgcacaagggcgccatcgcctgcgccgagaagctggccaagggcgagcccaccgacagatacgtgggcttctgcatgaagttcgtgaacatgctgctgagccacggcatcaagcccatcctggtgttcgacggctgcaccctgcccagcaagaaggaggtggagagaagcagaagagagagaagacaggccaacctgctgaagggcaagcagctgctgagagagggcaaggtgagcgaggccagagagtgcttcaccagaagcatcaacatcacccacgccatggcccacaaggtgatcaagtag

SEQ ID NO: 10644 - DNA, 2412 bp, synthetic construct
  misc_feature 1..2412: note = Description of Artificial Sequence: Synthetic coding sequence
  source 1..2412: mol_type = other DNA
atgggcatccagggcctgctgcagttcatcaaggaggccagcgagcccatccacgtgagaaagtacaagggccaggtggtggccgtggacacctactgctggctgcacaagggcgccatcgcctgcgccgagaagctggccaagggcgagcccaccgacagatacgtgggcttctgcatgaagttcgtgaacatgctgctgagccacggcatcaagcccatcctggtgttcgacggctgcaccctgcccagcaagaaggaggtggagagaagcagaagagagagaagacaggccaacctgctgaagggcaagcagctgctgagagagggcaaggtgagcgaggccagagagtgcttcaccagaagcatcaacatcacccacgccatggcccacaaggtgatcaaggccgccagaagccagggcgtggactgcctggtggccccctacgaggccgacgcccagctggcctacctgaacaaggccggcatcgtgcaggccatcatcaccgaggacagcgacctgctggccttcggctgcaagaaggtgatcctgaagatggaccagttcggcaacggcctggagatcgaccaggccagactgggcatgtgcagacagctgggcgacgtgttcaccgaggagaagttcagatacatgtgcatcctgagcggctgcgactacctgagcagcctgagaggcatcggcctggccaaggcctgcaaggtgctgagactggccaacaaccccgacatcgtgaaggtgatcaagaagatcggccactacctgaagatgaacatcaccgtgcccgaggactacatcaacggcttcatcagagccaacaacaccttcctgtaccagctggtgttcgaccccatcaagagaaagctgatccccctgaacgcctacgaggacgacgtggaccccgagaccctgagctacgccggccagtacgtggacgacagcatcgccctgcagatcgccctgggcaacaaggacatcaacaccttcgagcagatcgacgactacaaccccgacaccgccatgcccgcccacagcagaagccacagctgggacgacaagacctgccagaagagcgccaacgtgagcagcatctggcacagaaactacagccccagacccgagagcggcaccgtgagcgacgccccccagctgaaggagaaccccagcaccgtgggcgtggagagagtgatcagcaccaagggcctgaacctgcccagaaagagcagcatcgtgaagagacccagaagcgccgagctgagcgaggacgacctgctgagccagtacagcctgagcttcaccaagaagaccaagaagaacagcagcgagggcaacaagagcctgagcttcagcgaggtgttcgtgcccgacctggtgaacggccccaccaacaagaagagcgtgagcaccccccccagaaccagaaacaagttcgccaccttcctgcagagaaagaacgaggagagcggcgccgtggtggtgcccggcaccagaagcagattcttctgcagcagcgacagcaccgactgcgtgagcaacaaggtgagcatccagcccctggacgagaccgccgtgaccgacaaggagaacaacctgcacgagagcgagtacggcgaccaggagggcaagagactggtggacaccgacgtggccagaaacagcagcgacgacatccccaacaaccacatccccggcgaccacatccccgacaaggccaccgtgttcaccgacgaggagagctacagcttcgagagcagcaagttcaccagaaccatcagcccccccaccctgggcaccctgagaagctgcttcagctggagcggcggcctgggcgacttcagcagaacccccagccccagccccagcaccgccctgcagcagttcagaagaaagagcgacagccccaccagcctgcccgagaacaacatgagcgacgtgagccagctgaagagcgaggagagcagcgacgacgagagccaccccctgagagaggaggcctgcagcagccagagccaggagagcggcgagttcagcctgcagagcagcaacgccagcaagctgagccagtgcagcagcaaggacagcgacagcgaggagagcgactgcaacatcaagctgctggacagccagagcgaccagaccagcaagctgagactgagccacttcagcaagaaggacacccccctgagaaacaaggtgcccggcctgtacaagagcagcagcgccgacagcctgagcaccaccaagatcaagcccctgggccccgccagagccagcggcctgagcaagaagcccgccagcatccagaagagaaagcaccacaacgccgagaacaagcccggcctgcagatcaagctgaacgagctgtggaagaacttcggcttcaagaagttctag

SEQ ID NO: 10645 - DNA, 36 bp, synthetic construct
  misc_feature 1..36: note = Description of Artificial Sequence: Synthetic coding sequence
  source 1..36: mol_type = other DNA
atgggcatccagggcctgctgcagttcatcaagtag

SEQ ID NO: 10646 - DNA, 2241 bp, synthetic construct
  misc_feature 1..2241: note = Description of Artificial Sequence: Synthetic coding sequence
  source 1..2241: mol_type = other DNA
atgcaggccaagaagagatacttcatcctgctgagcgccggcagctgcctggccctgctgttctacttcggcggcctgcagttcagagccagcagaagccacagcagaagagaggagcacagcggcagaaacggcctgcaccaccccagccccgaccacttctggcccagattccccgacgccctgagacccttcgtgccctgggaccagctggagaacgaggacagcagcgtgcacatcagccccagacagaagagagacgccaacagcagcatctacaagggcaagaagtgcagaatggagagctgcttcgacttcaccctgtgcaagaagaacggcttcaaggtgtacgtgtacccccagcagaagggcgagaagatcgccgagagctaccagaacatcctggccgccatcgagggcagcagattctacaccagcgaccccagccaggcctgcctgttcgtgctgagcctggacaccctggacagagaccagctgagcccccagtacgtgcacaacctgagaagcaaggtgcagagcctgcacctgtggaacaacggcagaaaccacctgatcttcaacctgtacagcggcacctggcccgactacaccgaggacgtgggcttcgacatcggccaggccatgctggccaaggccagcatcagcaccgagaacttcagacccaacttcgacgtgagcatccccctgttcagcaaggaccaccccagaaccggcggcgagagaggcttcctgaagttcaacaccatcccccccctgagaaagtacatgctggtgttcaagggcaagagatacctgaccggcatcggcagcgacaccagaaacgccctgtaccacgtgcacaacggcgaggacgtggtgctgctgaccacctgcaagcacggcaaggactggcagaagcacaaggacagcagatgcgacagagacaacaccgagtacgagaagtacgactacagagagatgctgcacaacgccaccttctgcctggtgcccagaggcagaagactgggcagcttcagattcctggaggccctgcaggccgcctgcgtgcccgtgatgctgagcaacggctgggagctgcccttcagcgaggtgatcaactggaaccaggccgccgtgatcggcgacgagagactgctgctgcagatccccagcaccatcagaagcatccaccaggacaagatcctggccctgagacagcagacccagttcctgtgggaggcctacttcagcagcgtggagaagatcgtgctgaccaccctggagatcatccaggacagaatcttcaagcacatcagcagaaacagcctgatctggaacaagcaccccggcggcctgttcgtgctgccccagtacagcagctacctgggcgacttcccctactactacgccaacctgggcctgaagccccccagcaagttcaccgccgtgatccacgccgtgacccccctggtgagccagagccagcccgtgctgaagctgctggtggccgccgccaagagccagtactgcgcccagatcatcgtgctgtggaactgcgacaagcccctgcccgccaagcacagatggcccgccaccgccgtgcccgtggtggtgatcgagggcgagagcaaggtgatgagcagcagattcctgccctacgacaacatcatcaccgacgccgtgctgagcctggacgaggacaccgtgctgagcaccaccgaggtggacttcgccttcaccgtgtggcagagcttccccgagagaatcgtgggctaccccgccagaagccacttctgggacaacagcaaggagagatggggctacaccagcaagtggaccaacgactacagcatggtgctgaccggcgccgccatctaccacaagtactaccactacctgtacagccactacctgcccgccagcctgaagaacatggtggaccagctggccaactgcgaggacatcctgatgaacttcctggtgagcgccgtgaccaagctgccccccatcaaggtgacccagaagaagcagtacaaggagaccatgatgggccagaccagcagagccagcagatgggccgaccccgaccacttcgcccagagacagagctgcatgaacaccttcgccagctggttcggctacatgcccctgatccacagccagatgagactggaccccgtgctgttcaaggaccaggtgagcatcctgagaaagaagtacagagacatcgagagactgtag

SEQ ID NO: 10647 - DNA, 2157 bp, synthetic construct
  misc_feature 1..2157: note = Description of Artificial Sequence: Synthetic coding sequence
  source 1..2157: mol_type = other DNA
atgtgcgccagcgtgaagtacaacatcagaggccccgccctgatccccagaatgaagaccaagcacagaatctactacatcaccctgttcagcatcgtgctgctgggcctgatcgccaccggcatgttccagttctggccccacagcatcgagagcagcaacgactggaacgtggagaagagaagcatcagagacgtgcccgtggtgagactgcccgccgacagccccatccccgagagaggcgacctgagctgcagaatgcacacctgcttcgacgtgtacagatgcggcttcaaccccaagaacaagatcaaggtgtacatctacgccctgaagaagtacgtggacgacttcggcgtgagcgtgagcaacaccatcagcagagagtacaacgagctgctgatggccatcagcgacagcgactactacaccgacgacatcaacagagcctgcctgttcgtgcccagcatcgacgtgctgaaccagaacaccctgagaatcaaggagaccgcccaggccatggcccagctgagcagatgggacagaggcaccaaccacctgctgttcaacatgctgcccggcggcccccccgactacaacaccgccctggacgtgcccagagacagagccctgctggccggcggcggcttcagcacctggacctacagacagggctacgacgtgagcatccccgtgtacagccccctgagcgccgaggtggacctgcccgagaagggccccggccccagacagtacttcctgctgagcagccaggtgggcctgcaccccgagtacagagaggacctggaggccctgcaggtgaagcacggcgagagcgtgctggtgctggacaagtgcaccaacctgagcgagggcgtgctgagcgtgagaaagagatgccacaagcaccaggtgttcgactacccccaggtgctgcaggaggccaccttctgcgtggtgctgagaggcgccagactgggccaggccgtgctgagcgacgtgctgcaggccggctgcgtgcccgtggtgatcgccgacagctacatcctgcccttcagcgaggtgctggactggaagagagccagcgtggtggtgcccgaggagaagatgagcgacgtgtacagcatcctgcagagcatcccccagagacagatcgaggagatgcagagacaggccagatggttctgggaggcctacttccagagcatcaaggccatcgccctggccaccctgcagatcatcaacgacagaatctacccctacgccgccatcagctacgaggagtggaacgacccccccgccgtgaagtggggcagcgtgagcaaccccctgttcctgcccctgatccccccccagagccagggcttcaccgccatcgtgctgacctacgacagagtggagagcctgttcagagtgatcaccgaggtgagcaaggtgcccagcctgagcaagctgctggtggtgtggaacaaccagaacaagaacccccccgaggacagcctgtggcccaagatcagagtgcccctgaaggtggtgagaaccgccgagaacaagctgagcaacagattcttcccctacgacgagatcgagaccgaggccgtgctggccatcgacgacgacatcatcatgctgaccagcgacgagctgcagttcggctacgaggtgtggagagagttccccgacagactggtgggctaccccggcagactgcacctgtgggaccacgagatgaacaagtggaagtacgagagcgagtggaccaacgaggtgagcatggtgctgaccggcgccgccttctaccacaagtacttcaactacctgtacacctacaagatgcccggcgacatcaagaactgggtggacgcccacatgaactgcgaggacatcgccatgaacttcctggtggccaacgtgaccggcaaggccgtgatcaaggtgacccccagaaagaagttcaagtgccccgagtgcaccgccatcgacggcctgagcctggaccagacccacatggtggagagaagcgagtgcatcaacaagttcgccagcgtgttcggcaccatgcccctgaaggtggtggagcacagagccgaccccgtgctgtacaaggacgacttccccgagaagctgaagagcttccccaacatcggcagcctgtag

SEQ ID NO: 10648 - DNA, 2187 bp, synthetic construct
  misc_feature 1..2187: note = Description of Artificial Sequence: Synthetic coding sequence
  source 1..2187: mol_type = other DNA
atgtgcgccagcgtgaagtacaacatcagaggccccgccctgatccccagaatgaagaccaagcacagaatctactacatcaccctgttcagcatcgtgctgctgggcctgatcgccaccggcatgttccagttctggccccacagcatcgagagcagcaacgactggaacgtggagaagagaagcatcagagacgtgcccgtggtgagactgcccgccgacagccccatccccgagagaggcgacctgagctgcagaatgcacacctgcttcgacgtgtacagatgcggcttcaaccccaagaacaagatcaaggtgtacatctacgccctgaagaagtacgtggacgacttcggcgtgagcgtgagcaacaccatcagcagagagtacaacgagctgctgatggccatcagcgacagcgactactacaccgacgacatcaacagagcctgcctgttcgtgcccagcatcgacgtgctgaaccagaacaccctgagaatcaaggagaccgcccaggccatggcccagctgagcagatgggacagaggcaccaaccacctgctgttcaacatgctgcccggcggcccccccgactacaacaccgccctggacgtgcccagagacagagccctgctggccggcggcggcttcagcacctggacctacagacagggctacgacgtgagcatccccgtgtacagccccctgagcgccgaggtggacctgcccgagaagggccccggccccagacagtacttcctgctgagcagccaggtgggcctgcaccccgagtacagagaggacctggaggccctgcaggtgaagcacggcgagagcgtgctggtgctggacaagtgcaccaacctgagcgagggcgtgctgagcgtgagaaagagatgccacaagcaccaggtgttcgactacccccaggtgctgcaggaggccaccttctgcgtggtgctgagaggcgccagactgggccaggccgtgctgagcgacgtgctgcaggccggctgcgtgcccgtggtgatcgccgacagctacatcctgcccttcagcgaggtgctggactggaagagagccagcgtggtggtgcccgaggagaagatgagcgacgtgtacagcatcctgcagagcatcccccagagacagatcgaggagatgcagagacagctgttcatggagcccgccagaagagagaactggagcgccgccaaccaccagatgaacagcctgatctggcccagagagcagtgggacagccagatcatcaacgacagaatctacccctacgccgccatcagctacgaggagtggaacgacccccccgccgtgaagtggggcagcgtgagcaaccccctgttcctgcccctgatccccccccagagccagggcttcaccgccatcgtgctgacctacgacagagtggagagcctgttcagagtgatcaccgaggtgagcaaggtgcccagcctgagcaagctgctggtggtgtggaacaaccagaacaagaacccccccgaggacagcctgtggcccaagatcagagtgcccctgaaggtggtgagaaccgccgagaacaagctgagcaacagattcttcccctacgacgagatcgagaccgaggccgtgctggccatcgacgacgacatcatcatgctgaccagcgacgagctgcagttcggctacgaggtgtggagagagttccccgacagactggtgggctaccccggcagactgcacctgtgggaccacgagatgaacaagtggaagtacgagagcgagtggaccaacgaggtgagcatggtgctgaccggcgccgccttctaccacaagtacttcaactacctgtacacctacaagatgcccggcgacatcaagaactgggtggacgcccacatgaactgcgaggacatcgccatgaacttcctggtggccaacgtgaccggcaaggccgtgatcaaggtgacccccagaaagaagttcaagtgccccgagtgcaccgccatcgacggcctgagcctggaccagacccacatggtggagagaagcgagtgcatcaacaagttcgccagcgtgttcggcaccatgcccctgaaggtggtggagcacagagccgaccccgtgctgtacaaggacgacttccccgagaagctgaagagcttccccaacatcggcagcctgtag

SEQ ID NO: 10649 - DNA, 2256 bp, synthetic construct
  misc_feature 1..2256: note = Description of Artificial Sequence: Synthetic coding sequence
  source 1..2256: mol_type = other DNA
atgagctgcgccagcggcagcggcggcggcctgagacaccccctgagatgccagaagccctgggacgaggagtgcgaggaggaggccgtgtgcgtgatcatgtgcgccagcgtgaagtacaacatcagaggccccgccctgatccccagaatgaagaccaagcacagaatctactacatcaccctgttcagcatcgtgctgctgggcctgatcgccaccggcatgttccagttctggccccacagcatcgagagcagcaacgactggaacgtggagaagagaagcatcagagacgtgcccgtggtgagactgcccgccgacagccccatccccgagagaggcgacctgagctgcagaatgcacacctgcttcgacgtgtacagatgcggcttcaaccccaagaacaagatcaaggtgtacatctacgccctgaagaagtacgtggacgacttcggcgtgagcgtgagcaacaccatcagcagagagtacaacgagctgctgatggccatcagcgacagcgactactacaccgacgacatcaacagagcctgcctgttcgtgcccagcatcgacgtgctgaaccagaacaccctgagaatcaaggagaccgcccaggccatggcccagctgagcagatgggacagaggcaccaaccacctgctgttcaacatgctgcccggcggcccccccgactacaacaccgccctggacgtgcccagagacagagccctgctggccggcggcggcttcagcacctggacctacagacagggctacgacgtgagcatccccgtgtacagccccctgagcgccgaggtggacctgcccgagaagggccccggccccagacagtacttcctgctgagcagccaggtgggcctgcaccccgagtacagagaggacctggaggccctgcaggtgaagcacggcgagagcgtgctggtgctggacaagtgcaccaacctgagcgagggcgtgctgagcgtgagaaagagatgccacaagcaccaggtgttcgactacccccaggtgctgcaggaggccaccttctgcgtggtgctgagaggcgccagactgggccaggccgtgctgagcgacgtgctgcaggccggctgcgtgcccgtggtgatcgccgacagctacatcctgcccttcagcgaggtgctggactggaagagagccagcgtggtggtgcccgaggagaagatgagcgacgtgtacagcatcctgcagagcatcccccagagacagatcgaggagatgcagagacaggccagatggttctgggaggcctacttccagagcatcaaggccatcgccctggccaccctgcagatcatcaacgacagaatctacccctacgccgccatcagctacgaggagtggaacgacccccccgccgtgaagtggggcagcgtgagcaaccccctgttcctgcccctgatccccccccagagccagggcttcaccgccatcgtgctgacctacgacagagtggagagcctgttcagagtgatcaccgaggtgagcaaggtgcccagcctgagcaagctgctggtggtgtggaacaaccagaacaagaacccccccgaggacagcctgtggcccaagatcagagtgcccctgaaggtggtgagaaccgccgagaacaagctgagcaacagattcttcccctacgacgagatcgagaccgaggccgtgctggccatcgacgacgacatcatcatgctgaccagcgacgagctgcagttcggctacgaggtgtggagagagttccccgacagactggtgggctaccccggcagactgcacctgtgggaccacgagatgaacaagtggaagtacgagagcgagtggaccaacgaggtgagcatggtgctgaccggcgccgccttctaccacaagtacttcaactacctgtacacctacaagatgcccggcgacatcaagaactgggtggacgcccacatgaactgcgaggacatcgccatgaacttcctggtggccaacgtgaccggcaaggccgtgatcaaggtgacccccagaaagaagttcaagtgccccgagtgcaccgccatcgacggcctgagcctggaccagacccacatggtggagagaagcgagtgcatcaacaagttcgccagcgtgttcggcaccatgcccctgaaggtggtggagcacagagccgaccccgtgctgtacaaggacgacttccccgagaagctgaagagcttccccaacatcggcagcctgtag

SEQ ID NO: 10650 - DNA, 339 bp, synthetic construct
  misc_feature 1..339: note = Description of Artificial Sequence: Synthetic coding sequence
  source 1..339: mol_type = other DNA
atgtgcgccagcgtgaagtacaacatcagaggccccgccctgatccccagaatgaagaccaagcacagaatctactacatcaccctgttcagcatcgtgctgctgggcctgatcgccaccggcatgttccagttctggccccacagcatcgagagcagcaacgactggaacgtggagaagagaagcatcagagacgtgcccgtggtgagactgcccgccgacagccccatccccgagagaggcgacctgagctgcagaatgcacacctgcttcgacgtgtacagatgcggcttcaaccccaagaacaagatcaaggtgtacatctacgccctgaagtag

SEQ ID NO: 10651 - DNA, 150 bp, synthetic construct
  misc_feature 1..150: note = Description of Artificial Sequence: Synthetic coding sequence
  source 1..150: mol_type = other DNA
atgtgcgccagcgtgaagtacaacatcagaggccccgccctgatccccagaatgaagaccaagcacagaatctactacatcaccctgttcagcatcgtgctgctgggcctgatcgccaccggcatgttccagttctggccccacagctag

SEQ ID NO: 10652 - DNA, 2157 bp, synthetic construct; identical to SEQ ID NO: 10647
  misc_feature 1..2157: note = Description of Artificial Sequence: Synthetic coding sequence
  source 1..2157: mol_type = other DNA

SEQ ID NO: 10653 - DNA, 1761 bp, synthetic construct
  misc_feature 1..1761: note = Description of Artificial Sequence: Synthetic coding sequence
  source 1..1761: mol_type = other DNA
atgcccaagcccatcaacgtgagagtgaccaccatggacgccgagctggagttcgccatccagcccaacaccaccggcaagcagctgttcgaccaggtggtgaagaccatcggcctgagagaggtgtggtacttcggcctgcactacgtggacaacaagggcttccccacctggctgaagctggacaagaaggtgagcgcccaggaggtgagaaaggagaaccccctgcagttcaagttcagagccaagttctaccccgaggacgtggccgaggagctgatccaggacatcacccagaagctgttcttcctgcaggtgaaggagggcatcctgagcgacgagatctactgcccccccgagaccgccgtgctgctgggcagctacgccgtgcaggccaagttcggcgactacaacaaggaggtgcacaagagcggctacctgagcagcgagagactgatcccccagagagtgatggaccagcacaagctgaccagagaccagtgggaggacagaatccaggtgtggcacgccgagcacagaggcatgctgaaggacaacgccatgctggagtacctgaagatcgcccaggacctggagatgtacggcatcaactacttcgagatcaagaacaagaagggcaccgacctgtggctgggcgtggacgccctgggcctgaacatctacgagaaggacgacaagctgacccccaagatcggcttcccctggagcgagatcagaaacatcagcttcaacgacaagaagttcgtgatcaagcccatcgacaagaaggcccccgacttcgtgttctacgcccccagactgagaatcaacaagagaatcctgcagctgtgcatgggcaaccacgagctgtacatgagaagaagaaagcccgacaccatcgaggtgcagcagatgaaggcccaggccagagaggagaagcaccagaagcagctggagagacagcagctggagaccgagaagaagagaagagagaccgtggagagagagaaggagcagatgatgagagagaaggaggagctgatgctgagactgcaggactacgaggagaagaccaagaaggccgagagagagctgagcgagcagatccagagagccctgcagctggaggaggagagaaagagagcccaggaggaggccgagagactggaggccgacagaatggccgccctgagagccaaggaggagctggagagacaggccgtggaccagatcaagagccaggagcagctggccgccgagctggccgagtacaccgccaagatcgccctgctggaggaggccagaagaagaaaggaggacgaggtggaggagtggcagcacagagccaaggaggcccaggacgacctggtgaagaccaaggaggagctgcacctggtgatgaccgcccccccccccccccccccccccgtgtacgagcccgtgagctaccacgtgcaggagagcctgcaggacgagggcgccgagcccaccggctacagcgccgagctgagcagcgagggcatcagagacgacagaaacgaggagaagagaatcaccgaggccgagaagaacgagagagtgcagagacagctgctgaccctgagcagcgagctgagccaggccagagacgagaacaagagaacccacaacgacatcatccacaacgagaacatgagacagggcagagacaagtacaagaccctgagacagatcagacagggcaacaccaagcagagaatcgacgagttcgaggccctgtag

SEQ ID NO: 10654 - DNA, 1761 bp, synthetic construct; identical to SEQ ID NO: 10653
  misc_feature 1..1761: note = Description of Artificial Sequence: Synthetic coding sequence
  source 1..1761: mol_type = other DNA

SEQ ID NO: 10655 - DNA, 1665 bp, synthetic construct
  misc_feature 1..1665: note = Description of Artificial Sequence: Synthetic coding sequence
  source 1..1665: mol_type = other DNA
atgcccaagcccatcaacgtgagagtgaccaccatggacgccgagctggagttcgccatccagcccaacaccaccggcaagcagctgttcgaccaggtgagcgcccaggaggtgagaaaggagaaccccctgcagttcaagttcagagccaagttctaccccgaggacgtggccgaggagctgatccaggacatcacccagaagctgttcttcctgcaggtgaaggagggcatcctgagcgacgagatctactgcccccccgagaccgccgtgctgctgggcagctacgccgtgcaggccaagttcggcgactacaacaaggaggtgcacaagagcggctacctgagcagcgagagactgatcccccagagagtgatggaccagcacaagctgaccagagaccagtgggaggacagaatccaggtgtggcacgccgagcacagaggcatgctgaaggacaacgccatgctggagtacctgaagatcgcccaggacctggagatgtacggcatcaactacttcgagatcaagaacaagaagggcaccgacctgtggctgggcgtggacgccctgggcctgaacatctacgagaaggacgacaagctgacccccaagatcggcttcccctggagcgagatcagaaacatcagcttcaacgacaagaagttcgtgatcaagcccatcgacaagaaggcccccgacttcgtgttctacgcccccagactgagaatcaacaagagaatcctgcagctgtgcatgggcaaccacgagctgtacatgagaagaagaaagcccgacaccatcgaggtgcagcagatgaaggcccaggccagagaggagaagcaccagaagcagctggagagacagcagctggagaccgagaagaagagaagagagaccgtggagagagagaaggagcagatgatgagagagaaggaggagctgatgctgagactgcaggactacgaggagaagaccaagaaggccgagagagagctgagcgagcagatccagagagccctgcagctggaggaggagagaaagagagcccaggaggaggccgagagactggaggccgacagaatggccgccctgagagccaaggaggagctggagagacaggccgtggaccagatcaagagccaggagcagctggccgccgagctggccgagtacaccgccaagatcgccctgctggaggaggccagaagaagaaaggaggacgaggtggaggagtggcagcacagagccaaggaggcccaggacgacctggtgaagaccaaggaggagctgcacctggtgatgaccgcccccccccccccccccccccccgtgtacgagcccgtgagctaccacgtgcaggagagcctgcaggacgagggcgccgagcccaccggctacagcgccgagctgagcagcgagggcatcagagacgacagaaacgaggagaagagaatcaccgaggccgagaagaacgagagagtgcagagacagctgctgaccctgagcagcgagctgagccaggccagagacgagaacaagagaacccacaacgacatcatccacaacgagaacatgagacagggcagagacaagtacaagaccctgagacagatcagacagggcaacaccaagcagagaatcgacgagttcgaggccctgtag

SEQ ID NO: 10656 - DNA, 900 bp, synthetic construct
  misc_feature 1..900: note = Description of Artificial Sequence: Synthetic coding sequence
  source 1..900: mol_type = other DNA
atgggcaccaaggcccaggtggagagaaagctgctgtgcctgttcatcctggccatcctgctgtgcagcctggccctgggcagcgtgaccgtgcacagcagcgagcccgaggtgagaatccccgagaacaaccccgtgaagctgagctgcgcctacagcggcttcagcagccccagagtggagtggaagttcgaccagggcgacaccaccagactggtgtgctacaacaacaagatcaccgccagctacgaggacagagtgaccttcctgcccaccggcatcaccttcaagagcgtgaccagagaggacaccggcacctacacctgcatggtgagcgaggagggcggcaacagctacggcgaggtgaaggtgaagctgatcgtgctggtgccccccagcaagcccaccgtgaacatccccagcagcgccaccatcggcaacagagccgtgctgacctgcagcgagcaggacggcagcccccccagcgagtacacctggttcaaggacggcatcgtgatgcccaccaaccccaagagcaccagagccttcagcaacagcagctacgtgctgaaccccaccaccggcgagctggtgttcgaccccctgagcgccagcgacaccggcgagtacagctgcgaggccagaaacggctacggcacccccatgaccagcaacgccgtgagaatggaggccgtggagagaaacgtgggcgtgatcgtggccgccgtgctggtgaccctgatcctgctgggcatcctggtgttcggcatctggttcgcctacagcagaggccacttcgacagaaccaagaagggcaccagcagcaagaaggtgatctacagccagcccagcgccagaagcgagggcgagttcaagcagaccagcagcttcctggtgtag

SEQ ID NO: 10657 - DNA, 900 bp, synthetic construct; identical to SEQ ID NO: 10656
  misc_feature 1..900: note = Description of Artificial Sequence: Synthetic coding sequence
  source 1..900: mol_type = other DNA

SEQ ID NO: 10658 - DNA, 900 bp, synthetic construct; identical to SEQ ID NO: 10656
  misc_feature 1..900: note = Description of Artificial Sequence: Synthetic coding sequence
  source 1..900: mol_type = other DNA

SEQ ID NO: 10659 - DNA, 912 bp, synthetic construct
  misc_feature 1..912: note = Description of Artificial Sequence: Synthetic coding sequence
  source 1..912: mol_type = other DNA
atgctgcaggcccccagaggcagagccagagccgccctgagaagactggccgtggccaccagaaccatggccggcggcagcctggccctgggcagcgtgaccgtgcacagcagcgagcccgaggtgagaatccccgagaacaaccccgtgaagctgagctgcgcctacagcggcttcagcagccccagagtggagtggaagttcgaccagggcgacaccaccagactggtgtgctacaacaacaagatcaccgccagctacgaggacagagtgaccttcctgcccaccggcatcaccttcaagagcgtgaccagagaggacaccggcacctacacctgcatggtgagcgaggagggcggcaacagctacggcgaggtgaaggtgaagctgatcgtgctggtgccccccagcaagcccaccgtgaacatccccagcagcgccaccatcggcaacagagccgtgctgacctgcagcgagcaggacggcagcccccccagcgagtacacctggttcaaggacggcatcgtgatgcccaccaaccccaagagcaccagagccttcagcaacagcagctacgtgctgaaccccaccaccggcgagctggtgttcgaccccctgagcgccagcgacaccggcgagtacagctgcgaggccagaaacggctacggcacccccatgaccagcaacgccgtgagaatggaggccgtggagagaaacgtgggcgtgatcgtggccgccgtgctggtgaccctgatcctgctgggcatcctggtgttcggcatctggttcgcctacagcagaggccacttcgacagaaccaagaagggcaccagcagcaagaaggtgatctacagccagcccagcgccagaagcgagggcgagttcaagcagaccagcagcttcctggtgtag

SEQ ID NO: 10660 - DNA, 753 bp, synthetic construct
  misc_feature 1..753: note = Description of Artificial Sequence: Synthetic coding sequence
  source 1..753: mol_type = other DNA
atgggcaccaaggcccaggtggagagaaagctgctgtgcctgttcatcctggccatcctgctgtgcagcctggccctgggcagcgtgaccgtgcacagcagcgagcccgaggtgagaatccccgagaacaaccccgtgaagctgagctgcgcctacagcggcttcagcagccccagagtggagtggaagttcgaccagggcgacaccaccagactggtgtgctacaacaacaagatcaccgtgccccccagcaagcccaccgtgaacatccccagcagcgccaccatcggcaacagagccgtgctgacctgcagcgagcaggacggcagcccccccagcgagtacacctggttcaaggacggcatcgtgatgcccaccaaccccaagagcaccagagccttcagcaacagcagctacgtgctgaaccccaccaccggcgagctggtgttcgaccccctgagcgccagcgacaccggcgagtacagctgcgaggccagaaacggctacggcacccccatgaccagcaacgccgtgagaatggaggccgtggagagaaacgtgggcgtgatcgtggccgccgtgctggtgaccctgatcctgctgggcatcctggtgttcggcatctggttcgcctacagcagaggccacttcgacagaaccaagaagggcaccagcagcaagaaggtgatctacagccagcccagcgccagaagcgagggcgagttcaagcagaccagcagcttcctggtgtag

SEQ ID NO: 10661 - DNA, 3357 bp, synthetic construct
  misc_feature 1..3357: note = Description of Artificial Sequence: Synthetic coding sequence
  source 1..3357: mol_type = other DNA
atgggcgtgcagggcttccaggactacatcgagaagcactgccccagcgccgtggtgcccgtggagctgcagaagctggccagaggcagcctggtgggcggcggcagacagagacccccccagacccccctgagactgctggtggacgccgacaactgcctgcacagactgtacggcggcttctacaccgactgggtgagcggcggccagtggaaccacatgctgggctacctggccgccctggccaaggcctgcttcggcggcaacatcgagctgttcgtgttcttcaacggcgccctggagaaggccagactgcacgagtgggtgaagagacagggcaacgagagacagaccgcccagcagatcgtgagccacgtgcagaacaagggcacccccccccccaaggtgtggttcctgccccccgtgtgcatggcccactgcatcagactggccctgatcagattccacgtgaaggtggcccagagcatcgaggaccaccaccaggaggtgatcggcttctgcagagagaacggcttccacggcctggtggcctacgacagcgactacgccctgtgcaacatcccctactacttcagcgcccacgccctgaagctgagcagaaacggcaagagcctgaccaccagccagtacctgatgcacgaggtggccaagcagctggacctgaaccccaacagattccccatcttcgccgccctgctgggcaaccacatcctgcccgacgaggacctggccagcttccactggagcctgctgggccccgagcaccccctggccagcctgaaggtgagagcccaccagctggtgctgcccccctgcgacgtggtgatcaaggccgtggccgactacgtgagaaacatccaggacaccagcgacctggacgccatcgccaaggacgtgttccagcacagccagagcagaaccgacgacaaggtgatcagattcaagagagccatcggctactacagcgccaccagcaagcccatgagcttccaccccccccactacctggccgccagacccggccccttcggcatgcccggcatggtgcccccccacgtgcccccccagatgctgaacatcccccagaccagcctgcaggccaagcccgtggccccccaggtgcccagccccggcggcgcccccggccagggcccctacccctacagcctgagcgagcccgcccccctgaccctggacaccagcggcaagaacctgaccgagcagaacagctacagcaacatcccccacgagggcaagcacacccccctgtacgagagaagcagccccatcaaccccgcccagagcggcagccccaaccacgtggacagcgcctacttccccggcagcagcaccagcagcagcagcgacaacgacgagggcagcggcggcgccaccaaccacatcagcggcaacaagatcggctgggagaagaccggcagccacagcgagccccaggccagaggcgaccccggcgaccagaccaaggccgagggcagcagcaccgccagcagcggcagccagctggccgagggcaagggcagccagatgggcaccgtgcagcccatcccctgcctgctgagcatgcccaccagaaaccacatggacatcaccaccccccccctgccccccgtggcccccgaggtgctgagagtggccgagcacagacacaagaagggcctgatgtacccctacatcttccacgtgctgaccaagggcgagatcaagatcgccgtgagcatcgaggacgaggccaacaaggacctgccccccgccgccctgctgtacagacccgtgagacagtacgtgtacggcgtgctgttcagcctggccgagagcagaaagaagaccgagagactggccttcagaaagaacagactgccccccgagttcagccccgtgatcatcaaggagtgggccgcctacaagggcaagagcccccagacccccgagctggtggaggccctggccttcagagagtggacctgccccaacctgaagagactgtggctgggcaaggccgtggaggacaagaacagaagaatgagagccttcctggcctgcatgagaagcgacacccccgccatgctgaaccccgccaacgtgcccacccacctgatggtgctgtgctgcgtgctgagatacatggtgcagtggcccggcgccagaatcctgagaagacaggagctggacgccttcctggcccaggccctgagccccaagctgtacgagcccgaccagctgcaggagctgaagatcgagaacctggaccccagaggcatccagctgagcgccctgttcatgagcggcgtggacatggccctgttcgccaacgacgcctgcggccagcccatcccctgggagcactgctgcccctggatgtacttcgacggcaagctgttccagagcaagctgctgaaggccagcagagagaagacccccctgatcgacctgtgcgacggccaggccgaccaggccgccaaggtggagaagatgagacagagcgtgctggagggcctgagcttcagcagacagagccacaccctgcccttcccccccccccccgccctgcccttctaccccgccagcgcctaccccagacacttcggccccgtgccccccagccagggcagaggcagaggcttcgccggcgtgtgcggcttcggcggcccctacggcgagaccgtggccaccggcccctacagagccttcagagtggccgccgccagcggccactgcggcgccttcagcggcagcgacagcagcagaaccagcaagagccagggcggcgtgcagcccatccccagccagggcggcaagctggagatcgccggcaccgtggtgggccactgggccggcagcagaagaggcagaggcggcagaggccccttccccctgcaggtggtgagcgtgggcggccccgccagaggcagacccagaggcgtgatcagcacccccgtgatcagaaccttcggcagaggcggcagatactacggcagaggctacaagaaccaggccgccatccagggcagacccccctacgccgccagcgccgaggaggtggccaaggagctgaagagcaagagcggcgagagcaagagcagcgccatgagcagcgacggcagcctggccgagaacggcgtgatggccgaggagaagcccgccccccagatgaacggcagcaccggcgacgccagagcccccagccacagcgagagcgccctgaacaacgacagcaagacctgcaacaccaacccccacctgaacgccctgagcaccgacagcgcctgcagaagagaggccgccctggaggccgccgtgctgaacaaggaggagtag

SEQ ID NO: 10662 - DNA, 3441 bp, synthetic construct
  misc_feature 1..3441: note = Description of Artificial Sequence: Synthetic coding sequence
  source 1..3441: mol_type = other DNA
atgggcgtgcagggcttccaggactacatcgagaagcactgccccagcgccgtggtgcccgtggagctgcagaagctggccagaggcagcctggtgggcggcggcagacagagacccccccagacccccctgagactgctggtggacgccgacaactgcctgcacagactgtacggcggcttctacaccgactgggtgagcggcggccagtggaaccacatgctgggctacctggccgccctggccaaggcctgcttcggcggcaacatcgagctgttcgtgttcttcaacggcgccctggagaaggccagactgcacgagtgggtgaagagacagggcaacgagagacagaccgcccagcagatcgtgagccacgtgcagaacaagggcacccccccccccaaggtgtggttcctgccccccgtgtgcatggcccactgcatcagactggccctgatcagattccacgtgaaggtggcccagagcatcgaggaccaccaccaggaggtgatcggcttctgcagagagaacggcttccacggcctggtggcctacgacagcgactacgccctgtgcaacatcccctactacttcagcgcccacgccctgaagctgagcagaaacggcaagagcctgaccaccagccagtacctgatgcacgaggtggccaagcagctggacctgaaccccaacagattccccatcttcgccgccctgctgggcaaccacatcctgcccgacgaggacctggccagcttccactggagcctgctgggccccgagcaccccctggccagcctgaaggtgagagcccaccagctggtgctgcccccctgcgacgtggtgatcaaggccgtggccgactacgtgagaaacatccaggacaccagcgacctggacgccatcgccaaggacgtgttccagcacagccagagcagaaccgacgacaaggtgatcagattcaagagagccatcggctactacagcgccaccagcaagcccatgagcttccaccccccccactacctggccgccagacccggccccttcggcatgcccggcatggtgcccccccacgtgcccccccagatgctgaacatcccccagaccagcctgcaggccaagcccgtggccccccaggtgcccagccccggcggcgcccccggccagggcccctacccctacagcctgagcgagcccgcccccctgaccctggacaccagcggcaagaacctgaccgagcagaacagctacagcaacatcccccacgagggcaagcacacccccctgtacgagagaagcagccccatcaaccccgcccagagcggcagccccaaccacgtggacagcgcctacttccccggcagcagcaccagcagcagcagcgacaacgacgagggcagcggcggcgccaccaagcccttccagctgtacctgcagaagaacttcgtgttccacaaggagaacagcatcgtgctgtgcagcagaatcctgagacacggccacatcagcggcaacaagatcggctgggagaagaccggcagccacagcgagccccaggccagaggcgaccccggcgaccagaccaaggccgagggcagcagcaccgccagcagcggcagccagctggccgagggcaagggcagccagatgggcaccgtgcagcccatcccctgcctgctgagcatgcccaccagaaaccacatggacatcaccaccccccccctgccccccgtggcccccgaggtgctgagagtggccgagcacagacacaagaagggcctgatgtacccctacatcttccacgtgctgaccaagggcgagatcaagatcgccgtgagcatcgaggacgaggccaacaaggacctgccccccgccgccctgctgtacagacccgtgagacagtacgtgtacggcgtgctgttcagcctggccgagagcagaaagaagaccgagagactggccttcagaaagaacagactgccccccgagttcagccccgtgatcatcaaggagtgggccgcctacaagggcaagagcccccagacccccgagctggtggaggccctggccttcagagagtggacctgccccaacctgaagagactgtggctgggcaaggccgtggaggacaagaacagaagaatgagagccttcctggcctgcatgagaagcgacacccccgccatgctgaaccccgccaacgtgcccacccacctgatggtgctgtgctgcgtgctgagatacatggtgcagtggcccggcgccagaatcctgagaagacaggagctggacgccttcctggcccaggccctgagccccaagctgtacgagcccgaccagctgcaggagctgaagatcgagaacctggaccccagaggcatccagctgagcgccctgttcatgagcggcgtggacatggccctgttcgccaacgacgcctgcggccagcccatcccctgggagcactgctgcccctggatgtacttcgacggcaagctgttccagagcaagctgctgaaggccagcagagagaagacccccctgatcgacctgtgcgacggccaggccgaccaggccgccaaggtggagaagatgagacagagcgtgctggagggcctgagcttcagcagacagagccacaccctgcccttcccccccccccccgccctgcccttctaccccgccagcgcctaccccagacacttcggccccgtgccccccagccagggcagaggcagaggcttcgccggcgtgtgcggcttcggcggcccctacggcgagaccgtggccaccggcccctacagagccttcagagtggccgccgccagcggccactgcggcgccttcagcggcagcgacagcagcagaaccagcaagagccagggcggcgtgcagcccatccccagccagggcggcaagctggagatcgccggcaccgtggtgggccactgggccggcagcagaagaggcagaggcggcagaggccccttccccctgcaggtggtgagcgtgggcggccccgccagaggcagacccagaggcgtgatcagcacccccgtgatcagaaccttcggcagaggcggcagatactacggcagaggctacaagaaccaggccgccatccagggcagacccccctacgccgccagcgccgaggaggtggccaaggagctgaagagcaagagcggcgagagcaagagcagcgccatgagcagcgacggcagcctggccgagaacggcgtgatggccgaggagaagcccgccccccagatgaacggcagcaccggcgacgccagagcccccagccacagcgagagcgccctgaacaacgacagcaagacctgcaacaccaacccccacctgaacgccctgagcaccgacagcgcctgcagaagagaggccgccctggaggccgccgtgctgaacaaggaggagtag

SEQ ID NO: 10663 - DNA, 3219 bp, synthetic construct
  misc_feature 1..3219: note = Description of Artificial Sequence: Synthetic coding sequence
  source 1..3219: mol_type = other DNA
atgggcgtgcagggcttccaggactacatcgagaagcactgccccagcgccgtggtgcccgtggagctgcagaagctggccagaggcagcctggtgggcggcggcagacagagacccccccagacccccctgagactgctggtggacgccgacaactgcctgcacagactgtacggcggcttctacaccgactgggtgagcggcggccagtggaaccacatgctgggctacctggccgccctggccaaggcctgcttcggcggcaacatcgagctgttcgtgttcttcaacggcgccctggagaaggccagactgcacgagtgggtgaagagacagggcaacgagagacagaccgcccagcagatcgtgagccacgtgcagaacaagggcacccccccccccaaggtgtggttcctgccccccgtgtgcatggcccactgcatcagactggccctgatcagattccacgtgaaggtggcccagagcatcgaggaccaccaccaggaggtgatcggcttctgcagagagaacggcttccacggcctggtggcctacgacagcgactacgccctgtgcaacatcccctactacttcagcgcccacgccctgaagctgagcagaaacggcaagagcctgaccaccagccagtacctgatgcacgaggtggccaagcagctggacctgaaccccaacagattccccatcttcgccgccctgctgggcaaccacatcctgcccgacgaggacctggccagcttccactggagcctgctgggccccgagcaccccctggccagcctgaaggtgagagcccaccagctggtgctgcccccctgcgacgtggtgatcaaggccgtggccgactacgtgagaaacatccaggacaccagcgacctggacgccatcgccaaggacgtgttccagcacagccagagcagaaccgacgacaaggtgatcagattcaagagagccatcggctactacagcgccaccagcaagcccatgagcttccaccccccccactacctggccgccagacccggccccttcggcatgcccggcatggtgcccccccacgtgcccccccagatgctgaacatcccccagaccagcctgcaggccaagcccgtggccccccaggtgcccagccccggcggcgcccccggccagggcccctacccctacagcctgagcgagcccgcccccctgaccctggacaccagcggcaagaacctgaccgagcagaacagctacagcaacatcccccacgagggcaagcacacccccctgtacgagagaagcagccccatcaaccccgcccagagcggcagccccaaccacgtggacagcgcctacttccccggcagcagcaccagcagcagcagcgacaacgacgagggcagcggcggcgccaccaaccacatcagcggcaacaagatcggctgggagaagaccggcagccacagcgagccccaggccagaggcgaccccggcgaccagaccaaggccgagggcagcagcaccgccagcagcggcagccagctggccgagggcaagggcagccagatgggcaccgtgcagcccatcccctgcctgctgagcatgcccaccagaaaccacatggacatcaccaccccccccctgccccccgtggcccccgaggtgctgagagtggccgagcacagacacaagaagggcctgatgtacccctacatcttccacgtgctgaccaagggcgagatcaagatcgccgtgagcatcgaggacgaggccaacaaggacctgccccccgccgccctgctgtacagacccgtgagacagtacgtgtacggcgtgctgttcagcctggccgagagcagaaagaagaccgagagactggccttcagaaagaacagactgccccccgagttcagccccgtgatcatcaaggagtgggccgcctacaagggcaagagcccccagacccccgagctggtggaggccctggccttcagagagtggacctgccccaacctgaagagactgtggctgggcaaggccgtggaggacaagaacagaagaatgagagccttcctggcctgcatgagaagcgacacccccgccatgctgaaccccgccaacgtgcccacccacctgatggtgctgtgctgcgtgctgagatacatggtgcagtggcccggcgccagaatcctgagaagacaggagctggacgccttcctggcccaggccctgagccccaagctgtacgagcccgaccagctgcaggagctgaagatcgagaacctggaccccagaggcatccagctgagcgccctgttcatgagcggcgtggacatggccctgttcgccaacgacgcctgcggccagcccatcccctgggagcactgctgcccctggatgtacttcgacggcaagctgttccagagcaagctgctgaaggccagcagagagaagacccccctgatcgacctgtgcgacggccaggccgaccaggccgccaaggtggagaagatgagacagagcgtgctggagggcctgagcttcagcagacagagccacaccctgcccttcccccccccccccgccctgcccttctaccccgccagcgcctaccccagacacttcggccccgtgccccccagccagggcagaggcagaggcttcgccggcgtgcagcccatccccagccagggcggcaagctggagatcgccggcaccgtggtgggccactgggccggcagcagaagaggcagaggcggcagaggccccttccccctgcaggtggtgagcgtgggcggccccgccagaggcagacccagaggcgtgatcagcacccccgtgatcagaaccttcggcagaggcggcagatactacggcagaggctacaagaaccaggccgccatccagggcagacccccctacgccgccagcgccgaggaggtggccaaggagctgaagagcaagagcggcgagagcaagagcagcgccatgagcagcgacggcagcctggccgagaacggcgtgatggccgaggagaagcccgccccccagatgaacggcagcaccggcgacgccagagcccccagccacagcgagagcgccctgaacaacgacagcaagacctgcaacaccaacccccacctgaacgccctgagcaccgacagcgcctgcagaagagaggccgccctggaggccgccgtgctgaacaaggaggagtag

SEQ ID NO: 10664 - DNA, 1887 bp, synthetic construct
  misc_feature 1..1887: note = Description of Artificial Sequence: Synthetic coding sequence
  source 1..1887: mol_type = other DNA
atgggcgtgcagggcttccaggactacatcgagaagcactgccccagcgccgtggtgcccgtggagctgcagaagctggccagaggcagcctggtgggcggcggcagacagagacccccccagacccccctgagactgctggtggacgccgacaactgcctgcacagactgtacggcggcttctacaccgactgggtgagcggcggccagtggaaccacatgctgggctacctggccgccctggccaaggcctgcttcggcggcaacatcgagctgttcgtgttcttcaacggcgccctggagaaggccagactgcacgagtgggtgaagagacagggcaacgagagacagaccgcccagcagatcgtgagccacgtgcagaacaagggcacccccccccccaaggtgtggttcctgccccccgtgtgcatggcccactgcatcagactggccctgatcagattccacgtgaaggtggcccagagcatcgaggaccaccaccaggaggtgatcggcttctgcagagagaacggcttccacggcctggtggcctacgacagcgactacgccctgtgcaacatcccctactacttcagcgcccacgccctgaagctgagcagaaacggcaagagcctgaccaccagccagtacctgatgcacgaggtggccaagcagctggacctgaaccccaacagattccccatcttcgccgccctgctgggcaaccacatcctgcccgacgaggacctggccagcttccactggagcctgctgggccccgagcaccccctggccagcctgaaggtgagagcccaccagctggtgctgcccccctgcgacgtggtgatcaaggccgtggccgactacgtgagaaacatccaggacaccagcgacctggacgccatcgccaaggacgtgttccagcacagccagagcagaaccgacgacaaggtgatcagattcaagagagccatcggctactacagcgccaccagcaagcccatgagcttccaccccccccactacctggccgccagacccggccccttcggcatgcccggcatggtgcccccccacgtgcccccccagatgctgaacatcccccagaccagcctgcaggccaagcccgtggccccccaggtgcccagccccggcggcgcccccggccagggcccctacccctacagcctgagcgagcccgcccccctgaccctggacaccagcggcaagaacctgaccgagcagaacagctacagcaacatcccccacgagggcaagcacacccccctgtacgagagaagcagccccatcaaccccgcccagagcggcagccccaaccacgtggacagcgcctacttccccggcagcagcaccagcagcagcagcgacaacgacgagggcagcggcggcgccaccaaccacatcagcggcaacaagatcggctgggagaagaccggcagccacagcgagccccaggccagaggcgaccccggcgaccagaccaaggccgagggcagcagcaccgccagcagcggcagccagctggccgagggcaagggcagccagatgggcaccgtgcagcccatcccctgcctgctgagcatgcccaccagaaaccacatggacatcaccaccccccccctgccccccgtggcccccgaggtgctgagagtggccgagcacagacacaagaagggcctgatgtacccctacatcttccacgtgctgaccaaggtgctgagcaagggcccctggagcggcttctgctacctgatgagcggccacagctacggctgcttcgtgctgctgagcttcttcgagcccttcttctgcctgaccaacctgctggagaccaagttcaccttccccttcctgaacatcgagtag

SEQ ID NO: 10665 - DNA, 1485 bp, synthetic construct
  misc_feature 1..1485: note = Description of Artificial Sequence: Synthetic coding sequence
  source 1..1485: mol_type = other DNA
ggcgagatcaagatcgccgtgagcatcgaggacgaggccaacaaggacctgccccccgccgccctgctgtacagacccgtgagacagtacgtgtacggcgtgctgttcagcctggccgagagcagaaagaagaccgagagactggccttcagaaagaacagactgccccccgagttcagccccgtgatcatcaaggagtgggccgcctacaagggcaagagcccccagacccccgagctggtggaggccctggccttcagagagtggacctgccccaacctgaagagactgtggctgggcaaggccgtggaggacaagaacagaagaatgagagccttcctggcctgcatgagaagcgacacccccgccatgctgaaccccgccaacgtgcccacccacctgatggtgctgtgctgcgtgctgagatacatggtgcagtggcccggcgccagaatcctgagaagacaggagctggacgccttcctggcccaggccctgagccccaagctgtacgagcccgaccagctgcaggagctgaagatcgagaacctggaccccagaggcatccagctgagcgccctgttcatgagcggcgtggacatggccctgttcgccaacgacgcctgcggccagcccatcccctgggagcactgctgcccctggatgtacttcgacggcaagctgttccagagcaagctgctgaaggccagcagagagaagacccccctgatcgacctgtgcgacggccaggccgaccaggccgccaaggtggagaagatgagacagagcgtgctggagggcctgagcttcagcagacagagccacaccctgcccttcccccccccccccgccctgcccttctaccccgccagcgcctaccccagacacttcggccccgtgccccccagccagggcagaggcagaggcttcgccggcgtgcagcccatccccagccagggcggcaagctggagatcgccggcaccgtggtgggccactgggccggcagcagaagaggcagaggcggcagaggccccttccccctgcaggtggtgagcgtgggcggccccgccagaggcagacccagaggcgtgatcagcacccccgtgatcagaaccttcggcagaggcggcagatactacggcagaggctacaagaaccaggccgccatccagggcagacccccctacgccgccagcgccgaggaggtggccaaggagctgaagagcaagagcggcgagagcaagagcagcgccatgagcagcgacggcagcctggccgagaacggcgtgatggccgaggagaagcccgccccccagatgaacggcagcaccggcgacgccagagcccccagccacagcgagagcgccctgaacaacgacagcaagacctgcaacaccaacccccacctgaacgccctgagcaccgacagcgcctgcagaagagaggccgccctggaggccgccgtgctgaacaaggaggagtag

SEQ ID NO: 10666 - DNA, 1485 bp, synthetic construct
  misc_feature 1..1485: note = Description of Artificial Sequence: Synthetic coding sequence
  source 1..1485: mol_type = other DNA
tgagtggcccagagcatcgaggaccaccaccaggaggtgatcggcttctgcagagagaacggcttccacggcctggtggcctacgacagcgactacgccctgtgcaacatcccctactacttcagcgcccacgccctgaagctgagcagaaacggcaagagcctgaccaccagccagtacctgatgcacgaggtggccaagcagctggacctgaaccccaacagattccccatcttcgccgccctgctgggcaaccacatcctgcccgacgaggacctggccagcttccactggagcctgctgggccccgagcaccccctggccagcctgaaggtgagagcccaccagctggtgctgcccccctgcgacgtggtgatcaaggccgtggccgactacgtgagaaacatccaggacaccagcgacctggacgccatcgccaaggacgtgttccagcacagccagagcagaaccgacgacaaggtgatcagattcaagagagccatcggctactacagcgccaccagcaagcccatgagcttccaccccccccactacctggccgccagacccggccccttcggcatgcccggcatggtgcccccccacgtgcccccccagatgctgaacatcccccagaccagcctgcaggccaagcccgtggccccccaggtgcccagccccggcggcgcccccggccagggcccctacccctacagcctgagcgagcccgcccccctgaccctggacaccagcggcaagaacctgaccgagcagaacagctacagcaacatcccccacgagggcaagcacacccccctgtacgagagaagcagccccatcaaccccgcccagagcggcagccccaaccacgtggacagcgcctacttccccggcagcagcaccagcagcagcagcgacaacgacgagggcagcggcggcgccaccaaccacatcagcggcaacaagatcggctgggagaagaccggcagccacagcgagccccaggccagaggcgaccccggcgaccagaccaaggccgagggcagcagcaccgccagcagcggcagccagctggccgagggcaagggcagccagatgggcaccgtgcagcccatcccctgcctgctgagcatgcccaccagaaaccacatggacatcaccaccccccccctgccccccgtggcccccgaggtgctgagagtggccgagcacagacacaagaagggcctgatgtacccctacatcttccacgtgctgaccaagggcgagatcaagatcgccgtgagcatcgaggacgaggccaacaaggacctgccccccgccgccctgctgtacagacccgtgagacagtacgtgtacggcgtgctgttcagcctggccgagagcagaaagaagaccgagagactggccttcagaaagaacagactgccccccgagtgcatgtactgcaacaaccccctgttcgtgttcctgggcaccagctag

SEQ ID NO: 10667 - DNA, 969 bp, synthetic construct
  misc_feature 1..969: note = Description of Artificial Sequence: Synthetic coding sequence
  source 1..969: mol_type = other DNA
atggtggccgacctggagctgcagcaggacctgatcgtgcccctgggccacacccccagccaggagcacttcctgttcgagatcttcagaagaagactgcaggccctgaccagcggctggagcgtggccgccagcctgcagagacagagagagctgctgatgtacaagagaatcctgctgagactgcccagcagcgtgctgtgcggcagcagcttccaggccgagcagcccatcaccgccagatgcgagcagttcttccacctggtgaacagcgagatgagaaacttctgcagccacggcggcgccctgacccaggacatcaccgcccacttcttcagaggcctgctgaacgcctgcctgagaagcagagaccccagcctgatggtggacttcatcctggccaagtgccagaccaagtgccccctgatcctgaccagcgccctggtgtggtggcccagcctggagcccgtgctgctgtgcagatggagaagacactgccagagccccctgcccagagagctgcagaagctgcaggagggcagacagttcgccagcgacttcctgagccccgaggccgccagccccgcccccaaccccgactggctgagcgccgccgccctgcacttcgccatccagcaggtgagagaggagaacatcagaaagcagctgaagaagctggactgcgagagagaggagctgctggtgttcctgttcttcttcagcctgatgggcctgctgagcagccacctgaccagcaacagcaccaccgacctgcccaaggccttccacgtgtgcgccgccatcctggagtgcctggagaagagaaagatcagctggctggccctgttccagctgaccgagagcggcaagaagcacgccgccgaggcccagatgagaagagccgccctgttcagaggcatcctgcagatggtgaagaacgagcccagcctgagattcctggccaagtag

SEQ ID NO: 10668 - DNA, 4368 bp, synthetic construct
  misc_feature 1..4368: note = Description of Artificial Sequence: Synthetic coding sequence
  source 1..4368: mol_type = other DNA
atgagcgacagctgggtgcccaacagcgccagcggccaggaccccggcggcagaagaagagcctgggccgagctgctggccggcagagtgaagagagagaagtacaaccccgagagagcccagaagctgaaggagagcgccgtgagactgctgagaagccaccaggacctgaacgccctgctgctggaggtggagggccccctgtgcaagaagctgagcctgagcaaggtgatcgactgcgacagcagcgaggcctacgccaaccacagcagcagcttcatcggcagcgccctgcaggaccaggccagcagactgggcgtgcccgtgggcatcctgagcgccggcatggtggccagcagcgtgggccagatctgcaccgcccccgccgagaccagccaccccgtgctgctgaccgtggagcagagaaagaagctgagcagcctgctggagttcgcccagtacctgctggcccacagcatgttcagcagactgagcttctgccaggagctgtggaagatccagagcagcctgctgctggaggccgtgtggcacctgcacgtgcagggcatcgtgagcctgcaggagctgctggagagccaccccgacatgcacgccgtgggcagctggctgttcagaaacctgtgctgcctgtgcgagcagatggaggccagctgccagcacgccgacgtggccagagccatgctgagcgacttcgtgcagatgttcgtgctgagaggcttccagaagaacagcgacctgagaagaaccgtggagcccgagaagatgccccaggtgaccgtggacgtgctgcagagaatgctgatcttcgccctggacgccctggccgccggcgtgcaggaggagagcagcacccacaagatcgtgagatgctggttcggcgtgttcagcggccacaccctgggcagcgtgatcagcaccgaccccctgaagagattcttcagccacaccctgacccagatcctgacccacagccccgtgctgaaggccagcgacgccgtgcagatgcagagagagtggagcttcgccagaacccaccccctgctgaccagcctgtacagaagactgttcgtgatgctgagcgccgaggagctggtgggccacctgcaggaggtgctggagacccaggaggtgcactggcagagagtgctgagcttcgtgagcgccctggtggtgtgcttccccgaggcccagcagctgctggaggactgggtggccagactgatggcccaggccttcgagagctgccagctggacagcatggtgaccgccttcctggtggtgagacaggccgccctggagggccccagcgccttcctgagctacgccgactggttcaaggccagcttcggcagcaccagaggctaccacggctgcagcaagaaggccctggtgttcctgttcaccttcctgagcgagctggtgcccttcgagagccccagatacctgcaggtgcacatcctgcacccccccctggtgcccggcaagtacagaagcctgctgaccgactacatcagcctggccaagaccagactggccgacctgaaggtgagcatcgagaacatgggcctgtacgaggacctgagcagcgccggcgacatcaccgagccccacagccaggccctgcaggacgtggagaaggccatcatggtgttcgagcacaccggcaacatccccgtgaccgtgatggaggccagcatcttcagaagaccctactacgtgagccacttcctgcccgccctgctgacccccagagtgctgcccaaggtgcccgacagcagagtggccttcatcgagagcctgaagagagccgacaagatcccccccagcctgtacagcacctactgccaggcctgcagcgccgccgaggagaagcccgaggacgccgccctgggcgtgagagccgagcccaacagcgccgaggagcccctgggccagctgaccgccgccctgggcgagctgagagccagcatgaccgaccccagccagagagacgtgatcagcgcccaggtggccgtgatcagcgagagactgagagccgtgctgggccacaacgaggacgacagcagcgtggagatcagcaagatccagctgagcatcaacacccccagactggagcccagagagcacatggccgtggacctgctgctgaccagcttctgccagaacctgatggccgccagcagcgtggccccccccgagagacagggcccctgggccgccctgttcgtgagaaccatgtgcggcagagtgctgcccgccgtgctgaccagactgtgccagctgctgagacaccagggccccagcctgagcgccccccacgtgctgggcctggccgccctggccgtgcacctgggcgagagcagaagcgccctgcccgaggtggacgtgggcccccccgcccccggcgccggcctgcccgtgcccgccctgttcgacagcctgctgacctgcagaaccagagacagcctgttcttctgcctgaagttctgcaccgccgccatcagctacagcctgtgcaagttcagcagccagagcagagacaccctgtgcagctgcctgagccccggcctgatcaagaagttccagttcctgatgttcagactgttcagcgaggccagacagcccctgagcgaggaggacgtggccagcctgagctggagacccctgcacctgcccagcgccgactggcagagagccgccctgagcctgtggacccacagaaccttcagagaggtgctgaaggaggaggacgtgcacctgacctaccaggactggctgcacctggagctggagatccagcccgaggccgacgccctgagcgacaccgagagacaggacttccaccagtgggccatccacgagcacttcctgcccgagagcagcgccagcggcggctgcgacggcgacctgcaggccgcctgcaccatcctggtgaacgccctgatggacttccaccagagcagcagaagctacgaccacagcgagaacagcgacctggtgttcggcggcagaaccggcaacgaggacatcatcagcagactgcaggagatggtggccgacctggagctgcagcaggacctgatcgtgcccctgggccacacccccagccaggagcacttcctgttcgagatcttcagaagaagactgcaggccctgaccagcggctggagcgtggccgccagcctgcagagacagagagagctgctgatgtacaagagaatcctgctgagactgcccagcagcgtgctgtgcggcagcagcttccaggccgagcagcccatcaccgccagatgcgagcagttcttccacctggtgaacagcgagatgagaaacttctgcagccacggcggcgccctgacccaggacatcaccgcccacttcttcagaggcctgctgaacgcctgcctgagaagcagagaccccagcctgatggtggacttcatcctggccaagtgccagaccaagtgccccctgatcctgaccagcgccctggtgtggtggcccagcctggagcccgtgctgctgtgcagatggagaagacactgccagagccccctgcccagagagctgcagaagctgcaggagggcagacagttcgccagcgacttcctgagccccgaggccgccagccccgcccccaaccccgactggctgagcgccgccgccctgcacttcgccatccagcaggtgagagaggagaacatcagaaagcagctgaagaagctggactgcgagagagaggagctgctggtgttcctgttcttcttcagcctgatgggcctgctgagcagccacctgaccagcaacagcaccaccgacctgcccaaggccttccacgtgtgcgccgccatcctggagtgcctggagaagagaaagatcagctggctggccctgttccagctgaccgagagcgacctgagactgggcagactgctgctgagagtggcccccgaccagcacaccagactgctgcccttcgccttctacagcctgctgagctacttccacgaggacgccgccatcagagaggaggccttcctgcacgtggccgtggacatgtacctgaagctggtgcagctgttcgtggccggcgacaccagcaccgtgagcccccccgccggcagaagcctggagctgaagggccagggcaaccccgtggagctgatcaccaaggccagactgttcctgctgcagctgatccccagatgccccaagaagagcttcagccacgtggccgagctgctggccgacagaggcgactgcgaccccgaggtgagcgccgccctgcagagcagacagcaggccgcccccgacgccgacctgagccaggagccccacctgttctag

SEQ ID NO: 10669 - DNA, 894 bp, synthetic construct
  misc_feature 1..894: note = Description of Artificial Sequence: Synthetic coding sequence
  source 1..894: mol_type = other DNA
atgagcgacagctgggtgcccaacagcgccagcggccaggaccccggcggcagaagaagagcctgggccgagctgctggccggcagagtgaagagagagaagtacaaccccgagagagcccagaagctgaaggagagcgccgtgagactgctgagaagccaccaggacctgaacgccctgctgctggaggtggagggccccctgtgcaagaagctgagcctgagcaaggtgatcgactgcgacagcagcgaggcctacgccaaccacagcagcagcttcatcggcagcgccctgcaggaccaggccagcagactgggcgtgcccgtgggcatcctgagcgccggcatggtggccagcagcgtgggccagatctgcaccgcccccgccgagaccagccaccccgtgctgctgaccgtggagcagagaaagaagctgagcagcctgctggagttcgcccagtacctgctggcccacagcatgttcagcagactgagcttctgccaggagctgtggaagatccagagcagcctgctgctggaggccgtgtggcacctgcacgtgcagggcatcgtgagcctgcaggagctgctggagagccaccccgacatgcacgccgtgggcagctggctgttcagaaacctgtgctgcctgtgcgagcagatggaggccagctgccagcacgccgacgtggccagagccatgctgagcgacttcgtgcagatgttcgtgctgagaggcttccagaagaacagcgacctgagaagaaccgtggagcccgagaagatgccccaggtgaccgtggacgtgctgcagagaatgctgatcttcgccctggacgccctggccgccggcgtgcaggaggagagcagcacccacaagatcgtgagatgctag

SEQ ID NO: 10670 - DNA, 909 bp, synthetic construct
  misc_feature 1..909: note = Description of Artificial Sequence: Synthetic coding sequence
  source 1..909: mol_type = other DNA
atgagcgacagctgggtgcccaacagcgccagcggccaggaccccggcggcagaagaagagcctgggccgagctgctggccggcagagtgaagagagagaagtacaaccccgagagagcccagaagctgaaggagagcgccgtgagactgctgagaagccaccaggacctgaacgccctgctgctggaggtggagggccccctgtgcaagaagctgagcctgagcaaggtgatcgactgcgacagcagcgaggcctacgccaaccacagcagcagcttcatcggcagcgccctgcaggaccaggccagcagactgggcgtgcccgtgggcatcctgagcgccggcatggtggccagcagcgtgggccagatctgcaccgcccccgccgagaccagccaccccgtgctgctgaccgtggagcagagaaagaagctgagcagcctgctggagttcgcccagtacctgctggcccacagcatgttcagcagactgagcttctgccaggagctgtggaagatccagagcagcctgctgctggaggccgtgtggcacctgcacgtgcagggcatcgtgagcctgcaggagctgctggagagccaccccgacatgcacgccgtgggcagctggctgttcagaaacctgtgctgcctgtgcgagcagatggaggccagctgccagcacgccgacgtggccagagccatgctgagcgacttcgtgcagatgttcgtgctgagaggcttccagaagaacagcgacctgagaagaaccgtggagcccgagaagatgccccaggtgaccgtggacgtgctgcagagaatgctgatcttcgccctggacgccctggccgccggcgtgcaggaggagagcagcacccacaagatcgtgagagccagcgccgccagaagctag

SEQ ID NO: 10671 - DNA, 798 bp, synthetic construct
  misc_feature 1..798: note = Description of Artificial Sequence: Synthetic coding sequence
  source 1..798: mol_type = other DNA
atgagcgacagctgggtgcccaacagcgccagcggccaggaccccggcggcagaagaagagcctgggccgagctgctggccggcagagtgaagagagagaagtacaaccccgagagagcccagaagctgaaggagagcgccgtgagactgctgagaagccaccaggacctgaacgccctgctgctggaggtggagggccccctgtgcaagaagctgagcctgagcaaggtgatcgactgcgacagcagcgaggcctacgccaaccacagcagcagcttcatcggcagcgccctgcaggaccaggccagcagactgggcgtgcccgtgggcatcctgagcgccggcatggtggccagcagcgtgggccagatctgcaccgcccccgccgagaccagccaccccgtgctgctgaccgtggagcagagaagcagcctgctgctggaggccgtgtggcacctgcacgtgcagggcatcgtgagcctgcaggagctgctggagagccaccccgacatgcacgccgtgggcagctggctgttcagaaacctgtgctgcctgtgcgagcagatggaggccagctgccagcacgccgacgtggccagagccatgctgagcgacttcgtgcagatgttcgtgctgagaggcttccagaagaacagcgacctgagaagaaccgtggagcccgagaagatgccccaggtgaccgtggacgtgctgcagagaatgctgatcttcgccctggacgccctggccgccggcgtgcaggaggagagcagcacccacaagatcgtgagatgctag

SEQ ID NO: 10672 - DNA, 1869 bp, synthetic construct
  misc_feature 1..1869: note = Description of Artificial Sequence: Synthetic coding sequence
  source 1..1869: mol_type = other DNA
atgagcagacagaccaccagcgtgggcagcagctgcctggacctgtggagagagaagaacgacagactggtgagacaggccaaggtggcccagaacagcggcctgaccctgagaagacagcagctggcccaggacgccctggagggcctgagaggcctgctgcacagcctgcagggcctgcccgccgccgtgcccgtgctgcccctggagctgaccgtgacctgcaacttcatcatcctgagagccagcctggcccagggcttcaccgaggaccaggcccaggacatccagagaagcctggagagagtgctggagacccaggagcagcagggccccagactggagcagggcctgagagagctgtgggacagcgtgctgagagccagctgcctgctgcccgagctgctgagcgccctgcacagactggtgggcctgcaggccgccctgtggctgagcgccgacagactgggcgacctggccctgctgctggagaccctgaacggcagccagagcggcgccagcaaggacctgctgctgctgctgaagacctggagcccccccgccgaggagctggacgcccccctgaccctgcaggacgcccagggcctgaaggacgtgctgctgaccgccttcgcctacagacagggcctgcaggagctgatcaccggcaaccccgacaaggccctgagcagcctgcacgaggccgccagcggcctgtgccccagacccgtgctggtgcaggtgtacaccgccctgggcagctgccacagaaagatgggcaacccccagagagccctgctgtacctggtggccgccctgaaggagggcagcgcctggggcccccccctgctggaggccagcagactgtaccagcagctgggcgacaccaccgccgagctggagagcctggagctgctggtggaggccctgaacgtgccctgcagcagcaaggccccccagttcctgatcgaggtggagctgctgctgcccccccccgacctggccagccccctgcactgcggcacccagagccagaccaagcacatcctggccagcagatgcctgcagaccggcagagccggcgacgccgccgagcactacctggacctgctggccctgctgctggacagcagcgagcccagattcagccccccccccagcccccccggcccctgcatgcccgaggtgttcctggaggccgccgtggccctgatccaggccggcagagcccaggacgccctgaccctgtgcgaggagctgctgagcagaaccagcagcctgctgcccaagatgagcagactgtgggaggacgccagaaagggcaccaaggagctgccctactgccccctgtgggtgagcgccacccacctgctgcagggccaggcctgggtgcagctgggcgcccagaaggtggccatcagcgagttcagcagatgcctggagctgctgttcagagccacccccgaggagaaggagcagggcgccgccttcaactgcgagcagggctgcaagagcgacgccgccctgcagcagctgagagccgccgccctgatcagcagaggcctggagtgggtggccagcggccaggacaccaaggccctgcaggacttcctgctgagcgtgcagatgtgccccggcaacagagacacctacttccacctgctgcagaccctgaagagactggacagaagagacgaggccaccgccctgtggtggagactggaggcccagaccaagggcagccacgaggacgccctgtggagcctgcccctgtacctggagagctacctgagctggatcagacccagcgacagagacgccttcctggaggagttcagaaccagcctgcccaagagctgcgacctgtag

SEQ ID NO: 10673 - DNA, 648 bp, synthetic construct
  misc_feature 1..648: note = Description of Artificial Sequence: Synthetic coding sequence
  source 1..648: mol_type = other DNA
atgagcagacagaccaccagcgtgggcagcagctgcctggacctgtggagagagaagaacgacagactggtgagacaggccaaggtggcccagaacagcggcctgaccctgagaagacagcagctggcccaggacgccctggagggcctgagaggcctgctgcacagcctgcagggcctgcccgccgccgtgcccgtgctgcccctggagctgaccgtgacctgcaacttcatcatcctgagagccagcctggcccagggcttcaccgaggaccaggcccaggacatccagagaagcctggagagagtgctggagacccaggagcagcagggccccagactggagcagggcctgagagagctgtgggacagcgtgctgagagccagctgcctgctgcccgagctgctgagcgccctgcacagactggtgggcctgcaggccgccctgtggctgagcgccgacagactgggcgacctggccctgctgctggagaccctgaacggcagccagagcggcgccagcaaggacctgctgctgctgctgaagacctggagcccccccgccgaggagctggacgcccccctgaccctgcaggacgcccagggcctgaaggacgtgctgctgaccgccttcgcctacagacagtag

SEQ ID NO: 10674 - DNA, 1347 bp, synthetic construct
  misc_feature 1..1347: note = Description of Artificial Sequence: Synthetic coding sequence
  source 1..1347: mol_type = other DNA
atgagcagacagaccaccagcgtgggcagcagctgcctggacctgtggagagagaagaacgacagactggtgagacaggccaaggtggcccagaacagcggcctgaccctgagaagacagcagctggcccaggacgccctggagggcctgagaggcctgctgcacagcctgcagggcctgcccgccgccgtgcccgtgctgcccctggagctgaccgtgacctgcaacttcatcatcctgagagccagcctggcccagggcttcaccgaggaccaggcccaggacatccagagaagcctggagagagtgctggagacccaggagcagcagggccccagactggagcagggcctgagagagctgtgggacagcgtgctgagagccagctgcctgctgcccgagctgctgagcgccctgcacagactggtgggcctgcaggccgccctgtggctgagcgccgacagactgggcgacctggccctgctgctggagaccctgaacggcagccagagcggcgccagcaaggacctgctgctgctgctgaagacctggagcccccccgccgaggagctggacgcccccctgaccctgcaggacgcccagggcctgaaggacgtgctgctgaccgccttcgcctacagacagggcctgcaggagctgatcaccggcaaccccgacaaggccctgagcagcctgcacgaggccgccagcggcctgtgccccagacccgtgctggtgcaggtgtacaccgccctgggcagctgccacagaaagatgggcaacccccagagagccctgctgtacctggtggccgccctgaaggagggcagcgcctggggcccccccctgctggaggccagcagactgtaccagcagctgggcgacaccaccgccgagctggagagcctggagctgctggtggaggccctgaacgtgccctgcagcagcaaggccccccagttcctgatcgaggtggagctgctgctgcccccccccgacctggccagccccctgcactgcggcacccagagccagaccaagcacatcctggccagcagatgcctgcagaccggcagagccggcgacgccgccgagcactacctggacctgctggccctgctgctggacagcagcgagcccagattcagccccccccccagcccccccggcccctgcatgcccgaggtgttcctggaggccgccgtggccctgatccaggccggcagagcccaggacgccctgaccctgtgcgaggagctgctgagcagaaccagcagcctgctgcccaagatgagcagactgtgggaggacgccagaaagagaaccagaggcagcttccagctgtag

SEQ ID NO: 10675 - DNA, 663 bp, synthetic construct
  misc_feature 1..663: note = Description of Artificial Sequence: Synthetic coding sequence
  source 1..663: mol_type = other DNA
atgctgggcatctggaccctgctgcccctggtgctgaccagcgtggccagactgagcagcaagagcgtgaacgcccaggtgaccgacatcaacagcaagggcctggagctgagaaagaccgtgaccaccgtggagacccagaacctggagggcctgcaccacgacggccagttctgccacaagccctgcccccccggcgagagaaaggccagagactgcaccgtgaacggcgacgagcccgactgcgtgccctgccaggagggcaaggagtacaccgacaaggcccacttcagcagcaagtgcagaagatgcagactgtgcgacgagggccacggcctggaggtggagatcaactgcaccagaacccagaacaccaagtgcagatgcaagcccaacttcttctgcaacagcaccgtgtgcgagcactgcgacccctgcaccaagtgcgagcacggcatcatcaaggagtgcaccctgaccagcaacaccaagtgcaaggaggagggcagcagaagcaacctgggctggctgtgcctgctgctgctgcccatccccctgatcgtgtgggtgaagagaaaggaggtgcagaagacctgcagaaagcacagaaaggagaaccagggcagccacgagagccccaccctgaaccccatgctgacctag

SEQ ID NO: 10676 - DNA, 1008 bp, synthetic construct
  misc_feature 1..1008: note = Description of Artificial Sequence: Synthetic coding sequence
  source 1..1008: mol_type = other DNA
atgctgggcatctggaccctgctgcccctggtgctgaccagcgtggccagactgagcagcaagagcgtgaacgcccaggtgaccgacatcaacagcaagggcctggagctgagaaagaccgtgaccaccgtggagacccagaacctggagggcctgcaccacgacggccagttctgccacaagccctgcccccccggcgagagaaaggccagagactgcaccgtgaacggcgacgagcccgactgcgtgccctgccaggagggcaaggagtacaccgacaaggcccacttcagcagcaagtgcagaagatgcagactgtgcgacgagggccacggcctggaggtggagatcaactgcaccagaacccagaacaccaagtgcagatgcaagcccaacttcttctgcaacagcaccgtgtgcgagcactgcgacccctgcaccaagtgcgagcacggcatcatcaaggagtgcaccctgaccagcaacaccaagtgcaaggaggagggcagcagaagcaacctgggctggctgtgcctgctgctgctgcccatccccctgatcgtgtgggtgaagagaaaggaggtgcagaagacctgcagaaagcacagaaaggagaaccagggcagccacgagagccccaccctgaaccccgagaccgtggccatcaacctgagcgacgtggacctgagcaagtacatcaccaccatcgccggcgtgatgaccctgagccaggtgaagggcttcgtgagaaagaacggcgtgaacgaggccaagatcgacgagatcaagaacgacaacgtgcaggacaccgccgagcagaaggtgcagctgctgagaaactggcaccagctgcacggcaagaaggaggcctacgacaccctgatcaaggacctgaagaaggccaacctgtgcaccctggccgagaagatccagaccatcatcctgaaggacatcaccagcgacagcgagaacagcaacttcagaaacgagatccagagcctggtgtag

SEQ ID NO: 10677 - DNA, 945 bp, synthetic construct
  misc_feature 1..945: note = Description of Artificial Sequence: Synthetic coding sequence
  source 1..945: mol_type = other DNA
atgctgggcatctggaccctgctgcccctggtgctgaccagcgtggccagactgagcagcaagagcgtgaacgcccaggtgaccgacatcaacagcaagggcctggagctgagaaagaccgtgaccaccgtggagacccagaacctggagggcctgcaccacgacggccagttctgccacaagccctgcccccccggcgagagaaaggccagagactgcaccgtgaacggcgacgagcccgactgcgtgccctgccaggagggcaaggagtacaccgacaaggcccacttcagcagcaagtgcagaagatgcagactgtgcgacgagggccacggcctggaggtggagatcaactgcaccagaacccagaacaccaagtgcagatgcaagcccaacttcttctgcaacagcaccgtgtgcgagcactgcgacccctgcaccaagtgcgagcacggcatcatcaaggagtgcaccctgaccagcaacaccaagtgcaaggaggaggtgaagagaaaggaggtgcagaagacctgcagaaagcacagaaaggagaaccagggcagccacgagagccccaccctgaaccccgagaccgtggccatcaacctgagcgacgtggacctgagcaagtacatcaccaccatcgccggcgtgatgaccctgagccaggtgaagggcttcgtgagaaagaacggcgtgaacgaggccaagatcgacgagatcaagaacgacaacgtgcaggacaccgccgagcagaaggtgcagctgctgagaaactggcaccagctgcacggcaagaaggaggcctacgacaccctgatcaaggacctgaagaaggccaacctgtgcaccctggccgagaagatccagaccatcatcctgaaggacatcaccagcgacagcgagaacagcaacttcagaaacgagatccagagcctggtgtag

SEQ ID NO: 10678 - DNA, 735 bp, synthetic construct
  misc_feature 1..735: note = Description of Artificial Sequence: Synthetic coding sequence
  source 1..735: mol_type = other DNA
atgctgggcatctggaccctgctgcccctggtgctgaccagcgtggccagactgagcagcaagagcgtgaacgcccaggtgaccgacatcaacagcaagggcctggagctgagaaagaccgtgaccaccgtggagacccagaacctggagggcctgcaccacgacggccagttctgccacaagccctgcccccccggcgagagaaaggccagagactgcaccgtgaacggcgacgagcccgactgcgtgccctgccaggagggcaaggagtacaccgacaaggcccacttcagcagcaagtgcagaagatgcagactgtgcgacgagggccacggcctggaggtggagatcaactgcaccagaacccagaacaccaagtgcagatgcaagcccaacttcttctgcaacagcaccgtgtgcgagcactgcgacccctgcaccaagtgcgagcacggcatcatcaaggagtgcaccctgaccagcaacaccaagtgcaaggaggagggcagcagaagcaacctgggctggctgtgcctgctgctgctgcccatccccctgatcgtgtgggtgaagagaaaggaggtgcagaagacctgcagaaagcacagaaaggagaaccagggcagccacgagagccccaccctgaaccccgagaccgtggccatcaacctgagcgacgtggacctgagcaagtaccaccactactgctggagccacgacaccaagagcagctag

SEQ ID NO: 10679 - DNA, 1089 bp, synthetic construct
  misc_feature 1..1089: note = Description of Artificial Sequence: Synthetic coding sequence
  source 1..1089: mol_type = other DNA
atgctgagagtgtgcgcccagggctggcacgcccagggcctgccccacggcaccaacagcctgctgaagggcggcaccgagaccagcctgagcacccccaccagactggtggtgctgaccagcgtggccagactgagcagcaagagcgtgaacgcccaggtgaccgacatcaacagcaagggcctggagctgagaaagaccgtgaccaccgtggagacccagaacctggagggcctgcaccacgacggccagttctgccacaagccctgcccccccggcgagagaaaggccagagactgcaccgtgaacggcgacgagcccgactgcgtgccctgccaggagggcaaggagtacaccgacaaggcccacttcagcagcaagtgcagaagatgcagactgtgcgacgagggccacggcctggaggtggagatcaactgcaccagaacccagaacaccaagtgcagatgcaagcccaacttcttctgcaacagcaccgtgtgcgagcactgcgacccctgcaccaagtgcgagcacggcatcatcaaggagtgcaccctgaccagcaacaccaagtgcaaggaggagggcagcagaagcaacctgggctggctgtgcctgctgctgctgcccatccccctgatcgtgtgggtgaagagaaaggaggtgcagaagacctgcagaaagcacagaaaggagaaccagggcagccacgagagccccaccctgaaccccgtgggcatcgagatcgacttcagcgacgtggacctgagcaagtacatcaccaccatcgccggcgtgatgaccctgagccaggtgaagggcttcgtgagaaagaacggcgtgaacgaggccaagatcgacgagatcaagaacgacaacgtgcaggacaccgccgagcagaaggtgcagctgctgagaaactggcaccagctgcacggcaagaaggaggcctacgacaccctgatcaaggacctgaagaaggccaacctgtgcaccctggccgagaagatccagaccatcatcctgaaggacatcaccagcgacagcgagaacagcaacttcagaaacgagatccagagcctggtgtag

SEQ ID NO: 10680 - DNA, 627 bp, synthetic construct
  misc_feature 1..627: note = Description of Artificial Sequence: Synthetic coding sequence
  source 1..627: mol_type = other DNA
atggaccccttcctggtgctgctgcacagcgtgagcagcagcctgagcagcagcgagctgaccgagctgaagttcctgtgcctgggcagagtgggcaagagaaagctggagagagtgcagagcggcctggacctgttcagcatgctgctggagcagaacgacctggagcccggccacaccgagctgctgagagagctgctggccagcctgagaagacacgacctgctgagaagagtggacgacttcgaggccggcgccgccgccggcgccgcccccggcgaggaggacctgtgcgccgccttcaacgtgatctgcgacaacgtgggcaaggactggagaagactggccagacagctgaaggtgagcgacaccaagatcgacagcatcgaggacagataccccagaaacctgaccgagagagtgagagagagcctgagaatctggaagaacaccgagaaggagaacgccaccgtggcccacctggtgggcgccctgagaagctgccagatgaacctggtggccgacctggtgcaggaggtgcagcaggccagagacctgcagaacagaagcggcgccatgagccccatgagctggaacagcgacgccagcaccagcgaggccagctag

SEQ ID NO: 10681 - DNA, 384 bp, synthetic construct
  misc_feature 1..384: note = Description of Artificial Sequence: Synthetic coding sequence
  source 1..384: mol_type = other DNA
atgcagcagcccttcaactacccctacccccagatctactgggtggacagcagcgccagcagcccctgggccccccccggcaccgtgctgccctgccccaccagcgtgcccagaagacccggccagagaagacccccccccccccccccccccccccccctgccccccccccccccccccccccccctgccccccctgcccctgccccccctgaagaagagaggcaaccacagcaccggcctgtgcctgctggtgatgttcttcatggtgctggtggccctggtgggcctgggcctgggcatgttccagctgttccacctgcagaaggagctggccgagctgagagaggccacccccgtgcaccccctgaagaagagaagctag

SEQ ID NO: 10682 - DNA, 846 bp, synthetic construct
  misc_feature 1..846: note = Description of Artificial Sequence: Synthetic coding sequence
  source 1..846: mol_type = other DNA
atgcagcagcccttcaactacccctacccccagatctactgggtggacagcagcgccagcagcccctgggccccccccggcaccgtgctgccctgccccaccagcgtgcccagaagacccggccagagaagacccccccccccccccccccccccccccctgccccccccccccccccccccccccctgccccccctgcccctgccccccctgaagaagagaggcaaccacagcaccggcctgtgcctgctggtgatgttcttcatggtgctggtggccctggtgggcctgggcctgggcatgttccagctgttccacctgcagaaggagctggccgagctgagagagagcaccagccagatgcacaccgccagcagcctggagaagcagatcggccaccccagccccccccccgagaagaaggagctgagaaaggtggcccacctgaccggcaagagcaacagcagaagcatgcccctggagtgggaggacacctacggcatcgtgctgctgagcggcgtgaagtacaagaagggcggcctggtgatcaacgagaccggcctgtacttcgtgtacagcaaggtgtacttcagaggccagagctgcaacaacctgcccctgagccacaaggtgtacatgagaaacagcaagtacccccaggacctggtgatgatggagggcaagatgatgagctactgcaccaccggccagatgtgggccagaagcagctacctgggcgccgtgttcaacctgaccagcgccgaccacctgtacgtgaacgtgagcgagctgagcctggtgaacttcgaggagagccagaccttcttcggcctgtacaagctgtag

SEQ ID NO: 10683 - DNA, 13773 bp, synthetic construct
  misc_feature 1..13773: note = Description of Artificial Sequence: Synthetic coding sequence
  source 1..13773: mol_type = other DNA
atgggcagacacctggccctgctgctgctgctgctgctgctgttccagcacttcggcgacagcgacggcagccagagactggagcagacccccctgcagttcacccacctggagtacaacgtgaccgtgcaggagaacagcgccgccaagacctacgtgggccaccccgtgaagatgggcgtgtacatcacccaccccgcctgggaggtgagatacaagatcgtgagcggcgacagcgagaacctgttcaaggccgaggagtacatcctgggcgacttctgcttcctgagaatcagaaccaagggcggcaacaccgccatcctgaacagagaggtgaaggaccactacaccctgatcgtgaaggccctggagaagaacaccaacgtggaggccagaaccaaggtgagagtgcaggtgctggacaccaacgacctgagacccctgttcagccccaccagctacagcgtgagcctgcccgagaacaccgccatcagaaccagcatcgccagagtgagcgccaccgacgccgacatcggcaccaacggcgagttctactacagcttcaaggacagaaccgacatgttcgccatccaccccaccagcggcgtgatcgtgctgaccggcagactggactacctggagaccaagctgtacgagatggagatcctggccgccgacagaggcatgaagctgtacggcagcagcggcatcagcagcatggccaagctgaccgtgcacatcgagcaggccaacgagtgcgcccccgtgatcaccgccgtgaccctgagccccagcgagctggacagagaccccgcctacgccatcgtgaccgtggacgactgcgaccagggcgccaacggcgacatcgccagcctgagcatcgtggccggcgacctgctgcagcagttcagaaccgtgagaagcttccccggcagcaaggagtacaaggtgaaggccatcggcggcatcgactgggacagccaccccttcggctacaacctgaccctgcaggccaaggacaagggcacccccccccagttcagcagcgtgaaggtgatccacgtgaccagcccccagttcaaggccggccccgtgaagttcgagaaggacgtgtacagagccgagatcagcgagttcgccccccccaacacccccgtggtgatggtgaaggccatccccgcctacagccacctgagatacgtgttcaagagcacccccggcaaggccaagttcagcctgaactacaacaccggcctgatcagcatcctggagcccgtgaagagacagcaggccgcccacttcgagctggaggtgaccaccagcgacagaaaggccagcaccaaggtgctggtgaaggtgctgggcgccaacagcaacccccccgagttcacccagaccgcctacaaggccgccttcgacgagaacgtgcccatcggcaccaccgtgatgagcctgagcgccgtggaccccgacgagggcgagaacggctacgtgacctacagcatcgccaacctgaaccacgtgcccttcgccatcgaccacttcaccggcgccgtgagcaccagcgagaacctggactacgagctgatgcccagagtgtacaccctgagaatcagagccagcgactggggcctgccctacagaagagaggtggaggtgctggccaccatcaccctgaacaacctgaacgacaacacccccctgttcgagaagatcaactgcgagggcaccatccccagagacctgggcgtgggcgagcagatcaccaccgtgagcgccatcgacgccgacgagctgcagctggtgcagtaccagatcgaggccggcaacgagctggacttcttcagcctgaaccccaacagcggcgtgctgagcctgaagagaagcctgatggacggcctgggcgccaaggtgagcttccacagcctgagaatcaccgccaccgacggcgagaacttcgccacccccctgtacatcaacatcaccgtggccgccagccacaagctggtgaacctgcagtgcgaggagaccggcgtggccaagatgctggccgagaagctgctgcaggccaacaagctgcacaaccagggcgaggtggaggacatcttcttcgacagccacagcgtgaacgcccacatcccccagttcagaagcaccctgcccaccggcatccaggtgaaggagaaccagcccgtgggcagcagcgtgatcttcatgaacagcaccgacctggacaccggcttcaacggcaagctggtgtacgccgtgagcggcggcaacgaggacagctgcttcatgatcgacatggagaccggcatgctgaagatcctgagccccctggacagagagaccaccgacaagtacaccctgaacatcaccgtgtacgacctgggcatcccccagaaggccgcctggagactgctgcacgtggtggtggtggacgccaacgacaacccccccgagttcctgcaggagagctacttcgtggaggtgagcgaggacaaggaggtgcacagcgagatcatccaggtggaggccaccgacaaggacctgggccccaacggccacgtgacctacagcatcgtgaccgacaccgacaccttcagcatcgacagcgtgaccggcgtggtgaacatcgccagacccctggacagagagctgcagcacgagcacagcctgaagatcgaggccagagaccaggccagagaggagccccagctgttcagcaccgtggtggtgaaggtgagcctggaggacgtgaacgacaacccccccaccttcatcccccccaactacagagtgaaggtgagagaggacctgcccgagggcaccgtgatcatgtggctggaggcccacgaccccgacctgggccagagcggccaggtgagatacagcctgctggaccacggcgagggcaacttcgacgtggacaagctgagcggcgccgtgagaatcgtgcagcagctggacttcgagaagaagcaggtgtacaacctgaccgtgagagccaaggacaagggcaagcccgtgagcctgagcagcacctgctacgtggaggtggaggtggtggacgtgaacgagaacctgcacccccccgtgttcagcagcttcgtggagaagggcaccgtgaaggaggacgcccccgtgggcagcctggtgatgaccgtgagcgcccacgacgaggacgccagaagagacggcgagatcagatacagcatcagagacggcagcggcgtgggcgtgttcaagatcggcgaggagaccggcgtgatcgagaccagcgacagactggacagagagagcaccagccactactggctgaccgtgttcgccaccgaccagggcgtggtgcccctgagcagcttcatcgagatctacatcgaggtggaggacgtgaacgacaacgccccccagaccagcgagcccgtgtactaccccgagatcatggagaacagccccaaggacgtgagcgtggtgcagatcgaggccttcgaccccgacagcagcagcaacgacaagctgatgtacaagatcaccagcggcaacccccagggcttcttcagcatccaccccaagaccggcctgatcaccaccaccagcagaaagctggacagagagcagcaggacgagcacatcctggaggtgaccgtgaccgacaacggcagcccccccaagagcaccatcgccagagtgatcgtgaagatcctggacgagaacgacaacaagccccagttcctgcagaagttctacaagatcagactgcccgagagagagaagcccgacagagagagaaacgccagaagagagcccctgtaccacgtgatcgccaccgacaaggacgagggccccaacgccgagatcagctacagcatcgaggacggcaacgagcacggcaagttcttcatcgagcccaagaccggcgtggtgagcagcaagagattcagcgccgccggcgagtacgacatcctgagcatcaaggccgtggacaacggcagaccccagaagagcagcaccaccagactgcacatcgagtggatcagcaagcccaagcccagcctggagcccatcagcttcgaggagagcttcttcaccttcaccgtgatggagagcgaccccgtggcccacatgatcggcgtgatcagcgtggagccccccggcatccccctgtggttcgacatcaccggcggcaactacgacagccacttcgacgtggacaagggcaccggcaccatcatcgtggccaagcccctggacgccgagcagaagagcaactacaacctgaccgtggaggccaccgacggcaccaccaccatcctgacccaggtgttcatcaaggtgatcgacaccaacgaccacagaccccagttcagcaccagcaagtacgaggtggtgatccccgaggacaccgcccccgagaccgagatcctgcagatcagcgccgtggaccaggacgagaagaacaagctgatctacaccctgcagagcagcagagaccccctgagcctgaagaagttcagactggaccccgccaccggcagcctgtacaccagcgagaagctggaccacgaggccgtgcccgcccacctgaccgtgatggtgagagaccaggacgtgcccgtgaagagaaacttcgccagaatcgtggtgaacgtgagcgacaccaacgaccacgccccctggttcaccgccagcagctacaagggcagagtgtacgagagcgccgccgtgggcagcgtggtgctgcaggtgaccgccctggacaaggacaagggcaagaacgccgaggtgctgtacagcatcgagagcggcaccttcggcaacatcggcaacagcttcatgatcgaccccgtgctgggcagcatcaagaccgccaaggagctggacagaagcaaccaggccgagtacgacctgatggtgaaggccaccgacaagggcagcccccccatgagcgagatcaccagcgtgagaatcttcgtgaccatcgccgacaacgccagccccaagttcaccagcaaggagtacagcgtggagctgagcgagaccgtgagcatcggcagcttcgtgggcatggtgaccgcccacagccagagcagcgtggtgtacgagatcaaggacggcaacaccggcgacgccttcgacatcaacccccacagcggcaccatcatcacccagaaggccctggacttcgagaccctgcccatctacaccctgatcatccagggcaccaacatggccggcctgagcaccaacaccaccgtgctggtgcacctgcaggacgagaacgacaacgcccccgtgttcatgcaggccgagtacaccggcctgatcagcgagagcgccagcatcaacagcgtggtgctgaccgacagaaacgtgcccctggtgatcagagccgccgacgccgacaaggacagcaacgccctgctggtgtaccacatcgtggagcccagcgtgcacacctacttcgccatcgacagcagcaccggcgccatccacaccgtgctgagcctggactacgaggagaccagcatcttccacttcaccgtgcaggtgcacgacatgggcacccccagactgttcgccgagtacgccgccaacgtgaccgtgcacgtgatcgacatcaacgactgcccccccgtgttcgccaagcccctgtacgaggccagcctgctgctgcccacctacaagggcgtgaaggtgatcaccgtgaacgccaccgacgccgacagcagcgccttcagccagctgatctacagcatcaccgagggcaacatcggcgagaagttcagcatggactacaagaccggcgccctgaccgtgcagaacaccacccagctgagaagcagatacgagctgaccgtgagagccagcgacggcagattcgccggcctgaccagcgtgaagatcaacgtgaaggagagcaaggagagccacctgaagttcacccaggacgtgtacagcgccgtggtgaaggagaacagcaccgaggccgagaccctggccgtgatcaccgccatcggcaaccccatcaacgagcccctgttctaccacatcctgaaccccgacagaagattcaagatcagcagaaccagcggcgtgctgagcaccaccggcacccccttcgacagagagcagcaggaggccttcgacgtggtggtggaggtgaccgaggagcacaagcccagcgccgtggcccacgtggtggtgaaggtgatcgtggaggaccagaacgacaacgcccccgtgttcgtgaacctgccctactacgccgtggtgaaggtggacaccgaggtgggccacgtgatcagatacgtgaccgccgtggacagagacagcggcagaaacggcgaggtgcactactacctgaaggagcaccacgagcacttccagatcggccccctgggcgagatcagcctgaagaagcagttcgagctggacaccctgaacaaggagtacctggtgaccgtggtggccaaggacggcggcaaccccgccttcagcgccgaggtgatcgtgcccatcaccgtgatgaacaaggccatgcccgtgttcgagaagcccttctacagcgccgagatcgccgagagcatccaggtgcacagccccgtggtgcacgtgcaggccaacagccccgagggcctgaaggtgttctacagcatcaccgacggcgaccccttcagccagttcaccatcaacttcaacaccggcgtgatcaacgtgatcgcccccctggacttcgaggcccaccccgcctacaagctgagcatcagagccaccgacagcctgaccggcgcccacgccgaggtgttcgtggacatcatcgtggacgacatcaacgacaacccccccgtgttcgcccagcagagctacgccgtgaccctgagcgaggccagcgtgatcggcaccagcgtggtgcaggtgagagccaccgacagcgacagcgagcccaacagaggcatcagctaccagatgttcggcaaccacagcaagagccacgaccacttccacgtggacagcagcaccggcctgatcagcctgctgagaaccctggactacgagcagagcagacagcacaccatcttcgtgagagccgtggacggcggcatgcccaccctgagcagcgacgtgatcgtgaccgtggacgtgaccgacctgaacgacaacccccccctgttcgagcagcagatctacgaggccagaatcagcgagcacgccccccacggccacttcgtgacctgcgtgaaggcctacgacgccgacagcagcgacatcgacaagctgcagtacagcatcctgagcggcaacgaccacaagcacttcgtgatcgacagcgccaccggcatcatcaccctgagcaacctgcacagacacgccctgaagcccttctacagcctgaacctgagcgtgagcgacggcgtgttcagaagcagcacccaggtgcacgtgaccgtgatcggcggcaacctgcacagccccgccttcctgcagaacgagtacgaggtggagctggccgagaacgcccccctgcacaccctggtgatggaggtgaagaccaccgacggcgacagcggcatctacggccacgtgacctaccacatcgtgaacgacttcgccaaggacagattctacatcaacgagagaggccagatcttcaccctggagaagctggacagagagacccccgccgagaaggtgatcagcgtgagactgatggccaaggacgccggcggcaaggtggccttctgcaccgtgaacgtgatcctgaccgacgacaacgacaacgccccccagttcagagccaccaagtacgaggtgaacatcggcagcagcgccgccaagggcaccagcgtggtgaaggtgctggccagcgacgccgacgagggcagcaacgccgacatcacctacgccatcgaggccgacagcgagagcgtgaaggagaacctggagatcaacaagctgagcggcgtgatcaccaccaaggagagcctgatcggcctggagaacgagttcttcaccttcttcgtgagagccgtggacaacggcagccccagcaaggagagcgtggtgctggtgtacgtgaagatcctgccccccgagatgcagctgcccaagttcagcgagcccttctacaccttcaccgtgagcgaggacgtgcccatcggcaccgagatcgacctgatcagagccgagcacagcggcaccgtgctgtacagcctggtgaagggcaacacccccgagagcaacagagacgagagcttcgtgatcgacagacagagcggcagactgaagctggagaagagcctggaccacgagaccaccaagtggtaccagttcagcatcctggccagatgcacccaggacgaccacgagatggtggccagcgtggacgtgagcatccaggtgaaggacgccaacgacaacagccccgtgttcgagagcagcccctacgaggccttcatcgtggagaacctgcccggcggcagcagagtgatccagatcagagccagcgacgccgacagcggcaccaacggccaggtgatgtacagcctggaccagagccagagcgtggaggtgatcgagagcttcgccatcaacatggagaccggctggatcaccaccctgaaggagctggaccacgagaagagagacaactaccagatcaaggtggtggccagcgaccacggcgagaagatccagctgagcagcaccgccatcgtggacgtgaccgtgaccgacgtgaacgacagcccccccagattcaccgccgagatctacaagggcaccgtgagcgaggacgacccccagggcggcgtgatcgccatcctgagcaccaccgacgccgacagcgaggagatcaacagacaggtgacctacttcatcaccggcggcgaccccctgggccagttcgccgtggagaccatccagaacgagtggaaggtgtacgtgaagaagcccctggacagagagaagagagacaactacctgctgaccatcaccgccaccgacggcaccttcagcagcaaggccatcgtggaggtgaaggtgctggacgccaacgacaacagccccgtgtgcgagaagaccctgtacagcgacaccatccccgaggacgtgctgcccggcaagctgatcatgcagatcagcgccaccgacgccgacatcagaagcaacgccgagatcacctacaccctgctgggcagcggcgccgagaagttcaagctgaaccccgacaccggcgagctgaagaccagcacccccctggacagagaggagcaggccgtgtaccacctgctggtgagagccaccgacggcggcggcagattctgccaggccagcatcgtgctgaccctggaggacgtgaacgacaacgcccccgagttcagcgccgacccctacgccatcaccgtgttcgagaacaccgagcccggcaccctgctgaccagagtgcaggccaccgacgccgacgccggcctgaacagaaagatcctgtacagcctgatcgacagcgccgacggccagttcagcatcaacgagctgagcggcatcatccagctggagaagcccctggacagagagctgcaggccgtgtacaccctgagcctgaaggccgtggaccagggcctgcccagaagactgaccgccaccggcaccgtgatcgtgagcgtgctggacatcaacgacaacccccccgtgttcgagtacagagagtacggcgccaccgtgagcgaggacatcctggtgggcaccgaggtgctgcaggtgtacgccgccagcagagacatcgaggccaacgccgagatcacctacagcatcatcagcggcaacgagcacggcaagttcagcatcgacagcaagaccggcgccgtgttcatcatcgagaacctggactacgagagcagccacgagtactacctgaccgtggaggccaccgacggcggcacccccagcctgagcgacgtggccaccgtgaacgtgaacgtgaccgacatcaacgacaacacccccgtgttcagccaggacacctacaccaccgtgatcagcgaggacgccgtgctggagcagagcgtgatcaccgtgatggccgacgacgccgacggccccagcaacagccacatccactacagcatcatcgacggcaaccagggcagcagcttcaccatcgaccccgtgagaggcgaggtgaaggtgaccaagctgctggacagagagaccatcagcggctacaccctgaccgtgcaggccagcgacaacggcagcccccccagagtgaacaccaccaccgtgaacatcgacgtgagcgacgtgaacgacaacgcccccgtgttcagcagaggcaactacagcgtgatcatccaggagaacaagcccgtgggcttcagcgtgctgcagctggtggtgaccgacgaggacagcagccacaacggcccccccttcttcttcaccatcgtgaccggcaacgacgagaaggccttcgaggtgaacccccagggcgtgctgctgaccagcagcgccatcaagagaaaggagaaggaccactacctgctgcaggtgaaggtggccgacaacggcaagccccagctgagcagcctgacctacatcgacatcagagtgatcgaggagagcatctacccccccgccatcctgcccctggagatcttcatcaccagcagcggcgaggagtacagcggcggcgtgatcggcaagatccacgccaccgaccaggacgtgtacgacaccctgacctacagcctggacccccagatggacaacctgttcagcgtgagcagcaccggcggcaagctgatcgcccacaagaagctggacatcggccagtacctgctgaacgtgagcgtgaccgacggcaagttcaccaccgtggccgacatcaccgtgcacatcagacaggtgacccaggagatgctgaaccacaccatcgccatcagattcgccaacctgacccccgaggagttcgtgggcgactactggagaaacttccagagagccctgagaaacatcctgggcgtgagaagaaacgacatccagatcgtgagcctgcagagcagcgagccccacccccacctggacgtgctgctgttcgtggagaagcccggcagcgcccagatcagcaccaagcagctgctgcacaagatcaacagcagcgtgaccgacatcgaggagatcatcggcgtgagaatcctgaacgtgttccagaagctgtgcgccggcctggactgcccctggaagttctgcgacgagaaggtgagcgtggacgagagcgtgatgagcacccacagcaccgccagactgagcttcgtgacccccagacaccacagagccgccgtgtgcctgtgcaaggagggcagatgcccccccgtgcaccacggctgcgaggacgacccctgccccgagggcagcgagtgcgtgagcgacccctgggaggagaagcacacctgcgtgtgccccagcggcagattcggccagtgccccggcagcagcagcatgaccctgaccggcaacagctacgtgaagtacagactgaccgagaacgagaacaagctggagatgaagctgaccatgagactgagaacctacagcacccacgccgtggtgatgtacgccagaggcaccgactacagcatcctggagatccaccacggcagactgcagtacaagttcgactgcggcagcggccccggcatcgtgagcgtgcagagcatccaggtgaacgacggccagtggcacgccgtggccctggaggtgaacggcaactacgccagactggtgctggaccaggtgcacaccgccagcggcaccgcccccggcaccctgaagaccctgaacctggacaactacgtgttcttcggcggccacatcagacagcagggcaccagacacggcagaagcccccaggtgggcaacggcttcagaggctgcatggacagcatctacctgaacggccaggagctgcccctgaacagcaagcccagaagctacgcccacatcgaggagagcgtggacgtgagccccggctgcttcctgaccgccaccgaggactgcgccagcaacccctgccagaacggcggcgtgtgcaaccccagccccgccggcggctactactgcaagtgcagcgccctgtacatcggcacccactgcgagatcagcgtgaacccctgcagcagcaagccctgcctgtacggcggcacctgcgtggtggacaacggcggcttcgtgtgccagtgcagaggcctgtacaccggccagagatgccagctgagcccctactgcaaggacgagccctgcaagaacggcggcacctgcttcgacagcctggacggcgccgtgtgccagtgcgacagcggcttcagaggcgagagatgccagagcgacatcgacgagtgcagcggcaacccctgcctgcacggcgccctgtgcgagaacacccacggcagctaccactgcaactgcagccacgagtacagaggcagacactgcgaggacgccgcccccaaccagtacgtgagcaccccctggaacatcggcctggccgagggcatcggcatcgtggtgttcgtggccggcatcttcctgctggtggtggtgttcgtgctgtgcagaaagatgatcagcagaaagaagaagcaccaggccgagcccaaggacaagcacctgggccccgccaccgccttcctgcagagaccctacttcgacagcaagctgaacaagaacatctacagcgacatccccccccaggtgcccgtgagacccatcagctacacccccagcatccccagcgacagcagaaacaacctggacagaaacagcttcgagggcagcgccatccccgagcaccccgagttcagcaccttcaaccccgagagcgtgcacggccacagaaaggccgtggccgtgtgcagcgtggcccccaacctgcccccccccccccccagcaacagccccagcgacagcgacagcatccagaagcccagctgggacttcgactacgacaccaaggtggtggacctggacccctgcctgagcaagaagcccctggaggagaagcccagccagccctacagcgccagagagagcctgagcgaggtgcagagcctgagcagcttccagagcgagagctgcgacgacaacggctaccactgggacaccagcgactggatgcccagcgtgcccctgcccgacatccaggagttccccaactacgaggtgatcgacgagcagacccccctgtacagcgccgaccccaacgccatcgacaccgactactaccccggcggctacgacatcgagagcgacttcccccccccccccgaggacttccccgccgccgacgagctgccccccctgccccccgagttcagcaaccagttcgagagcatccacccccccagagacatgcccgccgccggcagcctgggcagcagcagcagaaacagacagagattcaacctgaaccagtacctgcccaacttctaccccctggacatgagcgagccccagaccaagggcaccggcgagaacagcacctgcagagagccccacgccccctacccccccggctaccagagacacttcgaggcccccgccgtggagagcatgcccatgagcgtgtacgccagcaccgccagctgcagcgacgtgagcgcctgctgcgaggtggagagcgaggtgatgatgagcgactacgagagcggcgacgacggccacttcgaggaggtgaccatcccccccctggacagccagcagcacaccgaggtgtag

SEQ ID NO: 10684 - DNA, 13767 bp, synthetic construct
  misc_feature 1..13767: note = Description of Artificial Sequence: Synthetic coding sequence
  source 1..13767: mol_type = other DNA
atgggcagacacctggccctgctgctgctgctgctgctgctgttccagcacttcggcgacagcgacggcagccagagactggagcagacccccctgcagttcacccacctggagtacaacgtgaccgtgcaggagaacagcgccgccaagacctacgtgggccaccccgtgaagatgggcgtgtacatcacccaccccgcctgggaggtgagatacaagatcgtgagcggcgacagcgagaacctgttcaaggccgaggagtacatcctgggcgacttctgcttcctgagaatcagaaccaagggcggcaacaccgccatcctgaacagagaggtgaaggaccactacaccctgatcgtgaaggccctggagaagaacaccaacgtggaggccagaaccaaggtgagagtgcaggtgctggacaccaacgacctgagacccctgttcagccccaccagctacagcgtgagcctgcccgagaacaccgccatcagaaccagcatcgccagagtgagcgccaccgacgccgacatcggcaccaacggcgagttctactacagcttcaaggacagaaccgacatgttcgccatccaccccaccagcggcgtgatcgtgctgaccggcagactggactacctggagaccaagctgtacgagatggagatcctggccgccgacagaggcatgaagctgtacggcagcagcggcatcagcagcatggccaagctgaccgtgcacatcgagcaggccaacgagtgcgcccccgtgatcaccgccgtgaccctgagccccagcgagctggacagagaccccgcctacgccatcgtgaccgtggacgactgcgaccagggcgccaacggcgacatcgccagcctgagcatcgtggccggcgacctgctgcagcagttcagaaccgtgagaagcttccccggcagcaaggagtacaaggtgaaggccatcggcggcatcgactgggacagccaccccttcggctacaacctgaccctgcaggccaaggacaagggcacccccccccagttcagcagcgtgaaggtgatccacgtgaccagcccccagttcaaggccggccccgtgaagttcgagaaggacgtgtacagagccgagatcagcgagttcgccccccccaacacccccgtggtgatggtgaaggccatccccgcctacagccacctgagatacgtgttcaagagcacccccggcaaggccaagttcagcctgaactacaacaccggcctgatcagcatcctggagcccgtgaagagacagcaggccgcccacttcgagctggaggtgaccaccagcgacagaaaggccagcaccaaggtgctggtgaaggtgctgggcgccaacagcaacccccccgagttcacccagaccgcctacaaggccgccttcgacgagaacgtgcccatcggcaccaccgtgatgagcctgagcgccgtggaccccgacgagggcgagaacggctacgtgacctacagcatcgccaacctgaaccacgtgcccttcgccatcgaccacttcaccggcgccgtgagcaccagcgagaacctggactacgagctgatgcccagagtgtacaccctgagaatcagagccagcgactggggcctgccctacagaagagaggtggaggtgctggccaccatcaccctgaacaacctgaacgacaacacccccctgttcgagaagatcaactgcgagggcaccatccccagagacctgggcgtgggcgagcagatcaccaccgtgagcgccatcgacgccgacgagctgcagctggtgcagtaccagatcgaggccggcaacgagctggacttcttcagcctgaaccccaacagcggcgtgctgagcctgaagagaagcctgatggacggcctgggcgccaaggtgagcttccacagcctgagaatcaccgccaccgacggcgagaacttcgccacccccctgtacatcaacatcaccgtggccgccagccacaagctggtgaacctgcagtgcgaggagaccggcgtggccaagatgctggccgagaagctgctgcaggccaacaagctgcacaaccagggcgaggtggaggacatcttcttcgacagccacagcgtgaacgcccacatcccccagttcagaagcaccctgcccaccggcatccaggtgaaggagaaccagcccgtgggcagcagcgtgatcttcatgaacagcaccgacctggacaccggcttcaacggcaagctggtgtacgccgtgagcggcggcaacgaggacagctgcttcatgatcgacatggagaccggcatgctgaagatcctgagccccctggacagagagaccaccgacaagtacaccctgaacatcaccgtgtacgacctgggcatcccccagaaggccgcctggagactgctgcacgtggtggtggtggacgccaacgacaacccccccgagttcctgcaggagagctacttcgtggaggtgagcgaggacaaggaggtgcacagcgagatcatccaggtggaggccaccgacaaggacctgggccccaacggccacgtgacctacagcatcgtgaccgacaccgacaccttcagcatcgacagcgtgaccggcgtggtgaacatcgccagacccctggacagagagctgcagcacgagcacagcctgaagatcgaggccagagaccaggccagagaggagccccagctgttcagcaccgtggtggtgaaggtgagcctggaggacgtgaacgacaacccccccaccttcatcccccccaactacagagtgaaggtgagagaggacctgcccgagggcaccgtgatcatgtggctggaggcccacgaccccgacctgggccagagcggccaggtgagatacagcctgctggaccacggcgagggcaacttcgacgtggacaagctgagcggcgccgtgagaatcgtgcagcagctggacttcgagaagaagcaggtgtacaacctgaccgtgagagccaaggacaagggcaagcccgtgagcctgagcagcacctgctacgtggaggtggaggtggtggacgtgaacgagaacctgcacccccccgtgttcagcagcttcgtggagaagggcaccgtgaaggaggacgcccccgtgggcagcctggtgatgaccgtgagcgcccacgacgaggacgccagaagagacggcgagatcagatacagcatcagagacggcagcggcgtgggcgtgttcaagatcggcgaggagaccggcgtgatcgagaccagcgacagactggacagagagagcaccagccactactggctgaccgtgttcgccaccgaccagggcgtggtgcccctgagcagcttcatcgagatctacatcgaggtggaggacgtgaacgacaacgccccccagaccagcgagcccgtgtactaccccgagatcatggagaacagccccaaggacgtgagcgtggtgcagatcgaggccttcgaccccgacagcagcagcaacgacaagctgatgtacaagatcaccagcggcaacccccagggcttcttcagcatccaccccaagaccggcctgatcaccaccaccagcagaaagctggacagagagcagcaggacgagcacatcctggaggtgaccgtgaccgacaacggcagcccccccaagagcaccatcgccagagtgatcgtgaagatcctggacgagaacgacaacaagccccagttcctgcagaagttctacaagatcagactgcccgagagagagaagcccgacagagagagaaacgccagaagagagcccctgtaccacgtgatcgccaccgacaaggacgagggccccaacgccgagatcagctacagcatcgaggacggcaacgagcacggcaagttcttcatcgagcccaagaccggcgtggtgagcagcaagagattcagcgccgccggcgagtacgacatcctgagcatcaaggccgtggacaacggcagaccccagaagagcagcaccaccagactgcacatcgagtggatcagcaagcccaagcccagcctggagcccatcagcttcgaggagagcttcttcaccttcaccgtgatggagagcgaccccgtggcccacatgatcggcgtgatcagcgtggagccccccggcatccccctgtggttcgacatcaccggcggcaactacgacagccacttcgacgtggacaagggcaccggcaccatcatcgtggccaagcccctggacgccgagcagaagagcaactacaacctgaccgtggaggccaccgacggcaccaccaccatcctgacccaggtgttcatcaaggtgatcgacaccaacgaccacagaccccagttcagcaccagcaagtacgaggtggtgatccccgaggacaccgcccccgagaccgagatcctgcagatcagcgccgtggaccaggacgagaagaacaagctgatctacaccctgcagagcagcagagaccccctgagcctgaagaagttcagactggaccccgccaccggcagcctgtacaccagcgagaagctggaccacgaggccgtgcaccagcacaccctgaccgtgatggtgagagaccaggacgtgcccgtgaagagaaacttcgccagaatcgtggtgaacgtgagcgacaccaacgaccacgccccctggttcaccgccagcagctacaagggcagagtgtacgagagcgccgccgtgggcagcgtggtgctgcaggtgaccgccctggacaaggacaagggcaagaacgccgaggtgctgtacagcatcgagagcggcaacatcggcaacagcttcatgatcgaccccgtgctgggcagcatcaagaccgccaaggagctggacagaagcaaccaggccgagtacgacctgatggtgaaggccaccgacaagggcagcccccccatgagcgagatcaccagcgtgagaatcttcgtgaccatcgccgacaacgccagccccaagttcaccagcaaggagtacagcgtggagctgagcgagaccgtgagcatcggcagcttcgtgggcatggtgaccgcccacagccagagcagcgtggtgtacgagatcaaggacggcaacaccggcgacgccttcgacatcaacccccacagcggcaccatcatcacccagaaggccctggacttcgagaccctgcccatctacaccctgatcatccagggcaccaacatggccggcctgagcaccaacaccaccgtgctggtgcacctgcaggacgagaacgacaacgcccccgtgttcatgcaggccgagtacaccggcctgatcagcgagagcgccagcatcaacagcgtggtgctgaccgacagaaacgtgcccctggtgatcagagccgccgacgccgacaaggacagcaacgccctgctggtgtaccacatcgtggagcccagcgtgcacacctacttcgccatcgacagcagcaccggcgccatccacaccgtgctgagcctggactacgaggagaccagcatcttccacttcaccgtgcaggtgcacgacatgggcacccccagactgttcgccgagtacgccgccaacgtgaccgtgcacgtgatcgacatcaacgactgcccccccgtgttcgccaagcccctgtacgaggccagcctgctgctgcccacctacaagggcgtgaaggtgatcaccgtgaacgccaccgacgccgacagcagcgccttcagccagctgatctacagcatcaccgagggcaacatcggcgagaagttcagcatggactacaagaccggcgccctgaccgtgcagaacaccacccagctgagaagcagatacgagctgaccgtgagagccagcgacggcagattcgccggcctgaccagcgtgaagatcaacgtgaaggagagcaaggagagccacctgaagttcacccaggacgtgtacagcgccgtggtgaaggagaacagcaccgaggccgagaccctggccgtgatcaccgccatcggcaaccccatcaacgagcccctgttctaccacatcctgaaccccgacagaagattcaagatcagcagaaccagcggcgtgctgagcaccaccggcacccccttcgacagagagcagcaggaggccttcgacgtggtggtggaggtgaccgaggagcacaagcccagcgccgtggcccacgtggtggtgaaggtgatcgtggaggaccagaacgacaacgcccccgtgttcgtgaacctgccctactacgccgtggtgaaggtggacaccgaggtgggccacgtgatcagatacgtgaccgccgtggacagagacagcggcagaaacggcgaggtgcactactacctgaaggagcaccacgagcacttccagatcggccccctgggcgagatcagcctgaagaagcagttcgagctggacaccctgaacaaggagtacctggtgaccgtggtggccaaggacggcggcaaccccgccttcagcgccgaggtgatcgtgcccatcaccgtgatgaacaaggccatgcccgtgttcgagaagcccttctacagcgccgagatcgccgagagcatccaggtgcacagccccgtggtgcacgtgcaggccaacagccccgagggcctgaaggtgttctacagcatcaccgacggcgaccccttcagccagttcaccatcaacttcaacaccggcgtgatcaacgtgatcgcccccctggacttcgaggcccaccccgcctacaagctgagcatcagagccaccgacagcctgaccggcgcccacgccgaggtgttcgtggacatcatcgtggacgacatcaacgacaacccccccgtgttcgcccagcagagctacgccgtgaccctgagcgaggccagcgtgatcggcaccagcgtggtgcaggtgagagccaccgacagcgacagcgagcccaacagaggcatcagctaccagatgttcggcaaccacagcaagagccacgaccacttccacgtggacagcagcaccggcctgatcagcctgctgagaaccctggactacgagcagagcagacagcacaccatcttcgtgagagccgtggacggcggcatgcccaccctgagcagcgacgtgatcgtgaccgtggacgtgaccgacctgaacgacaacccccccctgttcgagcagcagatctacgaggccagaatcagcgagcacgccccccacggccacttcgtgacctgcgtgaaggcctacgacgccgacagcagcgacatcgacaagctgcagtacagcatcctgagcggcaacgaccacaagcacttcgtgatcgacagcgccaccggcatcatcaccctgagcaacctgcacagacacgccctgaagcccttctacagcctgaacctgagcgtgagcgacggcgtgttcagaagcagcacccaggtgcacgtgaccgtgatcggcggcaacctgcacagccccgccttcctgcagaacgagtacgaggtggagctggccgagaacgcccccctgcacaccctggtgatggaggtgaagaccaccgacggcgacagcggcatctacggccacgtgacctaccacatcgtgaacgacttcgccaaggacagattctacatcaacgagagaggccagatcttcaccctggagaagctggacagagagacccccgccgagaaggtgatcagcgtgagactgatggccaaggacgccggcggcaaggtggccttctgcaccgtgaacgtgatcctgaccgacgacaacgacaacgccccccagttcagagccaccaagtacgaggtgaacatcggcagcagcgccgccaagggcaccagcgtggtgaaggtgctggccagcgacgccgacgagggcagcaacgccgacatcacctacgccatcgaggccgacagcgagagcgtgaaggagaacctggagatcaacaagctgagcggcgtgatcaccaccaaggagagcctgatcggcctggagaacgagttcttcaccttcttcgtgagagccgtggacaacggcagccccagcaaggagagcgtggtgctggtgtacgtgaagatcctgccccccgagatgcagctgcccaagttcagcgagcccttctacaccttcaccgtgagcgaggacgtgcccatcggcaccgagatcgacctgatcagagccgagcacagcggcaccgtgctgtacagcctggtgaagggcaacacccccgagagcaacagagacgagagcttcgtgatcgacagacagagcggcagactgaagctggagaagagcctggaccacgagaccaccaagtggtaccagttcagcatcctggccagatgcacccaggacgaccacgagatggtggccagcgtggacgtgagcatccaggtgaaggacgccaacgacaacagccccgtgttcgagagcagcccctacgaggccttcatcgtggagaacctgcccggcggcagcagagtgatccagatcagagccagcgacgccgacagcggcaccaacggccaggtgatgtacagcctggaccagagccagagcgtggaggtgatcgagagcttcgccatcaacatggagaccggctggatcaccaccctgaaggagctggaccacgagaagagagacaactaccagatcaaggtggtggccagcgaccacggcgagaagatccagctgagcagcaccgccatcgtggacgtgaccgtgaccgacgtgaacgacagcccccccagattcaccgccgagatctacaagggcaccgtgagcgaggacgacccccagggcggcgtgatcgccatcctgagcaccaccgacgccgacagcgaggagatcaacagacaggtgacctacttcatcaccggcggcgaccccctgggccagttcgccgtggagaccatccagaacgagtggaaggtgtacgtgaagaagcccctggacagagagaagagagacaactacctgctgaccatcaccgccaccgacggcaccttcagcagcaaggccatcgtggaggtgaaggtgctggacgccaacgacaacagccccgtgtgcgagaagaccctgtacagcgacaccatccccgaggacgtgctgcccggcaagctgatcatgcagatcagcgccaccgacgccgacatcagaagcaacgccgagatcacctacaccctgctgggcagcggcgccgagaagttcaagctgaaccccgacaccggcgagctgaagaccagcacccccctggacagagaggagcaggccgtgtaccacctgctggtgagagccaccgacggcggcggcagattctgccaggccagcatcgtgctgaccctggaggacgtgaacgacaacgcccccgagttcagcgccgacccctacgccatcaccgtgttcgagaacaccgagcccggcaccctgctgaccagagtgcaggccaccgacgccgacgccggcctgaacagaaagatcctgtacagcctgatcgacagcgccgacggccagttcagcatcaacgagctgagcggcatcatccagctggagaagcccctggacagagagctgcaggccgtgtacaccctgagcctgaaggccgtggaccagggcctgcccagaagactgaccgccaccggcaccgtgatcgtgagcgtgctggacatcaacgacaacccccccgtgttcgagtacagagagtacggcgccaccgtgagcgaggacatcctggtgggcaccgaggtgctgcaggtgtacgccgccagcagagacatcgaggccaacgccgagatcacctacagcatcatcagcggcaacgagcacggcaagttcagcatcgacagcaagaccggcgccgtgttcatcatcgagaacctggactacgagagcagccacgagtactacctgaccgtggaggccaccgacggcggcacccccagcctgagcgacgtggccaccgtgaacgtgaacgtgaccgacatcaacgacaacacccccgtgttcagccaggacacctacaccaccgtgatcagcgaggacgccgtgctggagcagagcgtgatcaccgtgatggccgacgacgccgacggccccagcaacagccacatccactacagcatcatcgacggcaaccagggcagcagcttcaccatcgaccccgtgagaggcgaggtgaaggtgaccaagctgctggacagagagaccatcagcggctacaccctgaccgtgcaggccagcgacaacggcagcccccccagagtgaacaccaccaccgtgaacatcgacgtgagcgacgtgaacgacaacgcccccgtgttcagcagaggcaactacagcgtgatcatccaggagaacaagcccgtgggcttcagcgtgctgcagctggtggtgaccgacgaggacagcagccacaacggcccccccttcttcttcaccatcgtgaccggcaacgacgagaaggccttcgaggtgaacccccagggcgtgctgctgaccagcagcgccatcaagagaaaggagaaggaccactacctgctgcaggtgaaggtggccgacaacggcaagccccagctgagcagcctgacctacatcgacatcagagtgatcgaggagagcatctacccccccgccatcctgcccctggagatcttcatcaccagcagcggcgaggagtacagcggcggcgtgatcggcaagatccacgccaccgaccaggacgtgtacgacaccctgacctacagcctggacccccagatggacaacctgttcagcgtgagcagcaccggcggcaagctgatcgcccacaagaagctggacatcggccagtacctgctgaacgtgagcgtgaccgacggcaagttcaccaccgtggccgacatcaccgtgcacatcagacaggtgacccaggagatgctgaaccacaccatcgccatcagattcgccaacctgacccccgaggagttcgtgggcgactactggagaaacttccagagagccctgagaaacatcctgggcgtgagaagaaacgacatccagatcgtgagcctgcagagcagcgagccccacccccacctggacgtgctgctgttcgtggagaagcccggcagcgcccagatcagcaccaagcagctgctgcacaagatcaacagcagcgtgaccgacatcgaggagatcatcggcgtgagaatcctgaacgtgttccagaagctgtgcgccggcctggactgcccctggaagttctgcgacgagaaggtgagcgtggacgagagcgtgatgagcacccacagcaccgccagactgagcttcgtgacccccagacaccacagagccgccgtgtgcctgtgcaaggagggcagatgcccccccgtgcaccacggctgcgaggacgacccctgccccgagggcagcgagtgcgtgagcgacccctgggaggagaagcacacctgcgtgtgccccagcggcagattcggccagtgccccggcagcagcagcatgaccctgaccggcaacagctacgtgaagtacagactgaccgagaacgagaacaagctggagatgaagctgaccatgagactgagaacctacagcacccacgccgtggtgatgtacgccagaggcaccgactacagcatcctggagatccaccacggcagactgcagtacaagttcgactgcggcagcggccccggcatcgtgagcgtgcagagcatccaggtgaacgacggccagtggcacgccgtggccctggaggtgaacggcaactacgccagactggtgctggaccaggtgcacaccgccagcggcaccgcccccggcaccctgaagaccctgaacctggacaactacgtgttcttcggcggccacatcagacagcagggcaccagacacggcagaagcccccaggtgggcaacggcttcagaggctgcatggacagcatctacctgaacggccaggagctgcccctgaacagcaagcccagaagctacgcccacatcgaggagagcgtggacgtgagccccggctgcttcctgaccgccaccgaggactgcgccagcaacccctgccagaacggcggcgtgtgcaaccccagccccgccggcggctactactgcaagtgcagcgccctgtacatcggcacccactgcgagatcagcgtgaacccctgcagcagcaagccctgcctgtacggcggcacctgcgtggtggacaacggcggcttcgtgtgccagtgcagaggcctgtacaccggccagagatgccagctgagcccctactgcaaggacgagccctgcaagaacggcggcacctgcttcgacagcctggacggcgccgtgtgccagtgcgacagcggcttcagaggcgagagatgccagagcgacatcgacgagtgcagcggcaacccctgcctgcacggcgccctgtgcgagaacacccacggcagctaccactgcaactgcagccacgagtacagaggcagacactgcgaggacgccgcccccaaccagtacgtgagcaccccctggaacatcggcctggccgagggcatcggcatcgtggtgttcgtggccggcatcttcctgctggtggtggtgttcgtgctgtgcagaaagatgatcagcagaaagaagaagcaccaggccgagcccaaggacaagcacctgggccccgccaccgccttcctgcagagaccctacttcgacagcaagctgaacaagaacatctacagcgacatccccccccaggtgcccgtgagacccatcagctacacccccagcatccccagcgacagcagaaacaacctggacagaaacagcttcgagggcagcgccatccccgagcaccccgagttcagcaccttcaaccccgagagcgtgcacggccacagaaaggccgtggccgtgtgcagcgtggcccccaacctgcccccccccccccccagcaacagccccagcgacagcgacagcatccagaagcccagctgggacttcgactacgacaccaaggtggtggacctggacccctgcctgagcaagaagcccctggaggagaagcccagccagccctacagcgccagagagagcctgagcgaggtgcagagcctgagcagcttccagagcgagagctgcgacgacaacggctaccactgggacaccagcgactggatgcccagcgtgcccctgcccgacatccaggagttccccaactacgaggtgatcgacgagcagacccccctgtacagcgccgaccccaacgccatcgacaccgactactaccccggcggctacgacatcgagagcgacttcccccccccccccgaggacttccccgccgccgacgagctgccccccctgccccccgagttcagcaaccagttcgagagcatccacccccccagagacatgcccgccgccggcagcctgggcagcagcagcagaaacagacagagattcaacctgaaccagtacctgcccaacttctaccccctggacatgagcgagccccagaccaagggcaccggcgagaacagcacctgcagagagccccacgccccctacccccccggctaccagagacacttcgaggcccccgccgtggagagcatgcccatgagcgtgtacgccagcaccgccagctgcagcgacgtgagcgcctgctgcgaggtggagagcgaggtgatgatgagcgactacgagagcggcgacgacggccacttcgaggaggtgaccatcccccccctggacagccagcagcacaccgaggtgtag

SEQ ID NO: 10685 - DNA, 1467 bp, synthetic construct
  misc_feature 1..1467: note = Description of Artificial Sequence: Synthetic coding sequence
  source 1..1467: mol_type = other DNA
atgggcagacacctggccctgctgctgctgctgctgctgctgttccagcacttcggcgacagcgacggcagccagagactggagcagacccccctgcagttcacccacctggagtacaacgtgaccgtgcaggagaacagcgccgccaagacctacgtgggccaccccgtgaagatgggcgtgtacatcacccaccccgcctgggaggtgagatacaagatcgtgagcggcgacagcgagaacctgttcaaggccgaggagtacatcctgggcgacttctgcttcctgagaatcagaaccaagggcggcaacaccgccatcctgaacagagaggtgaaggaccactacaccctgatcgtgaaggccctggagaagaacaccaacgtggaggccagaaccaaggtgagagtgcaggtgctggacaccaacgacctgagacccctgttcagccccaccagctacagcgtgagcctgcccgagaacaccgccatcagaaccagcatcgccagagtgagcgccaccgacgccgacatcggcaccaacggcgagttctactacagcttcaaggacagaaccgacatgttcgccatccaccccaccagcggcgtgatcgtgctgaccggcagactggactacctggagaccaagctgtacgagatggagatcctggccgccgacagaggcatgaagctgtacggcagcagcggcatcagcagcatggccaagctgaccgtgcacatcgagcaggccaacgagtgcgcccccgtgatcaccgccgtgaccctgagccccagcgagctggacagagaccccgcctacgccatcgtgaccgtggacgactgcgaccagggcgccaacggcgacatcgccagcctgagcatcgtggccggcgacctgctgcagcagttcagaaccgtgagaagcttccccggcagcaaggagtacaaggtgaaggccatcggcggcatcgactgggacagccaccccttcggctacaacctgaccctgcaggccaaggacaagggcacccccccccagttcagcagcgtgaaggtgatccacgtgaccagcccccagttcaaggccggccccgtgaagttcgagaaggacgtgtacagagccgagatcagcgagttcgccccccccaacacccccgtggtgatggtgaaggccatccccgcctacagccacctgagatacgtgttcaagagcacccccggcaaggccaagttcagcctgaactacaacaccggcctgatcagcatcctggagcccgtgaagagacagcaggccgcccacttcgagctggaggtgaccaccagcgacagaaaggccagcaccaaggtgctggtgaaggtgctgggcgccaacagcaacccccccgagttcacccagaccgcctacaaggccgccttcgacgagaacgtgcccatcggcaccaccgtgatgagcctgagcgccgtgtag

SEQ ID NO: 10686 - DNA, 399 bp, synthetic construct
  misc_feature 1..399: note = Description of Artificial Sequence: Synthetic coding sequence
  source 1..399: mol_type = other DNA
atgtgcgacgccttcgtgggcacctggaagctggtgagcagcgagaacttcgacgactacatgaaggaggtgggcgtgggcttcgccaccagaaaggtggccggcatggccaagcccaacatgatcatcagcgtgaacggcgacgtgatcaccatcaagagcgagagcaccttcaagaacaccgagatcagcttcatcctgggccaggagttcgacgaggtgaccgccgacgacagaaaggtgaagagcaccatcaccctggacggcggcgtgctggtgcacgtgcagaagtgggacggcaagagcaccaccatcaagagaaagagagaggacgacaagctggtggtggagtgcgtgatgaagggcgtgaccagcaccagagtgtacgagagagcctag

SEQ ID NO: 10687 - DNA, 7536 bp, synthetic construct
  misc_feature 1..7536: note = Description of Artificial Sequence: Synthetic coding sequence
  source 1..7536: mol_type = other DNA
atggaggaggtggtgatcgccggcatgagcggcaagctgcccgagagcgagaacctgcaggagttctgggacaacctgatcggcggcgtggacatggtgaccgacgacgacagaagatggaaggccggcctgtacggcctgcccagaagaagcggcaagctgaaggacctgagcagattcgacgccagcttcttcggcgtgcaccccaagcaggcccacaccatggacccccagctgagactgctgctggaggtgacctacgaggccatcgtggacggcggcatcaaccccgacagcctgagaggcacccacaccggcgtgtgggtgggcgtgagcggcagcgagaccagcgaggccctgagcagagaccccgagaccctggtgggctacagcatggtgggctgccagagagccatgatggccaacagactgagcttcttcttcgacttcagaggccccagcatcgccctggacaccgcctgcagcagcagcctgatggccctgcagaacgcctaccaggccatccacagcggccagtgccccgccgccatcgtgggcggcatcaacgtgctgctgaagcccaacaccagcgtgcagttcctgagactgggcatgctgagccccgagggcacctgcaaggccttcgacaccgccggcaacggctactgcagaagcgagggcgtggtggccgtgctgctgaccaagaagagcctggccagaagagtgtacgccaccatcctgaacgccggcaccaacaccgacggcttcaaggagcagggcgtgaccttccccagcggcgacatccaggagcagctgatcagaagcctgtaccagagcgccggcgtggcccccgagagcttcgagtacatcgaggcccacggcaccggcaccaaggtgggcgacccccaggagctgaacggcatcaccagagccctgtgcgccaccagacaggagcccctgctgatcggcagcaccaagagcaacatgggccaccccgagcccgccagcggcctggccgccctggccaaggtgctgctgagcctggagcacggcctgtgggcccccaacctgcacttccacagccccaaccccgagatccccgccctgctggacggcagactgcaggtggtggaccagcccctgcccgtgagaggcggcaacgtgggcatcaacagcttcggcttcggcggcagcaacgtgcacatcatcctgagacccaacacccagcccccccccgcccccgccccccacgccaccctgcccagactgctgagagccagcggcagaacccccgaggccgtgcagaagctgctggagcagggcctgagacacagccaggacctggccttcctgagcatgctgaacgacatcgccgccgtgcccgccaccgccatgcccttcagaggctacgccgtgctgggcggcgagagaggcggccccgaggtgcagcaggtgcccgccggcgagagacccctgtggttcatctgcagcggcatgggcacccagtggagaggcatgggcctgagcctgatgagactggacagattcagagacagcatcctgagaagcgacgaggccgtgaagcccttcggcctgaaggtgagccagctgctgctgagcaccgacgagagcaccttcgacgacatcgtgcacagcttcgtgagcctgaccgccatccagatcggcctgatcgacctgctgagctgcatgggcctgagacccgacggcatcgtgggccacagcctgggcgaggtggcctgcggctacgccgacggctgcctgagccaggaggaggccgtgctggccgcctactggagaggccagtgcatcaaggaggcccacctgccccccggcgccatggccgccgtgggcctgagctgggaggagtgcaagcagagatgcccccccggcgtggtgcccgcctgccacaacagcaaggacaccgtgaccatcagcggcccccaggcccccgtgttcgagttcgtggagcagctgagaaaggagggcgtgttcgccaaggaggtgagaaccggcggcatggccttccacagctacttcatggaggccatcgccccccccctgctgcaggagctgaagaaggtgatcagagagcccaagcccagaagcgccagatggctgagcaccagcatccccgaggcccagtggcacagcagcctggccagaaccagcagcgccgagtacaacgtgaacaacctggtgagccccgtgctgttccaggaggccctgtggcacgtgcccgagcacgccgtggtgctggagatcgccccccacgccctgctgcaggccgtgctgaagagaggcctgaagcccagctgcaccatcatccccctgatgaagaaggaccacagagacaacctggagttcttcctggccggcatcggcagactgcacctgagcggcatcgacgccaaccccaacgccctgttcccccccgtggagttccccgcccccagaggcacccccctgatcagccccctgatcaagtgggaccacagcctggcctgggacgtgcccgccgccgaggacttccccaacggcagcggcagccccagcgccgccatctacaacatcgacaccagcagcgagagccccgaccactacctggtggaccacaccctggacggcagagtgctgttccccgccaccggctacctgagcatcgtgtggaagaccctggccagagccctgggcctgggcgtggagcagctgcccgtggtgttcgaggacgtggtgctgcaccaggccaccatcctgcccaagaccggcaccgtgagcctggaggtgagactgctggaggccagcagagccttcgaggtgagcgagaacggcaacctggtggtgagcggcaaggtgtaccagtgggacgaccccgaccccagactgttcgaccaccccgagagccccacccccaaccccaccgagcccctgttcctggcccaggccgaggtgtacaaggagctgagactgagaggctacgactacggcccccacttccagggcatcctggaggccagcctggagggcgacagcggcagactgctgtggaaggacaactgggtgagcttcatggacaccatgctgcagatgagcatcctgggcagcgccaagcacggcctgtacctgcccaccagagtgaccgccatccacatcgaccccgccacccacagacagaagctgtacaccctgcaggacaaggcccaggtggccgacgtggtggtgagcagatggctgagagtgaccgtggccggcggcgtgcacatcagcggcctgcacaccgagagcgcccccagaagacagcaggagcagcaggtgcccatcctggagaagttctgcttcaccccccacaccgaggagggctgcctgagcgagagagccgccctgcaggaggagctgcagctgtgcaagggcctggtgcaggccctgcagaccaaggtgacccagcagggcctgaagatggtggtgcccggcctggacggcgcccagatccccagagaccccagccagcaggagctgcccagactgctgagcgccgcctgcagactgcagctgaacggcaacctgcagctggagctggcccaggtgctggcccaggagagacccaagctgcccgaggaccccctgctgagcggcctgctggacagccccgccctgaaggcctgcctggacaccgccgtggagaacatgcccagcctgaagatgaaggtggtggaggtgctggccggccacggccacctgtacagcagaatccccggcctgctgagcccccaccccctgctgcagctgagctacaccgccaccgacagacacccccaggccctggaggccgcccaggccgagctgcagcagcacgacgtggcccagggccagtgggaccccgccgaccccgcccccagcgccctgggcagcgccgacctgctggtgtgcaactgcgccgtggccgccctgggcgaccccgccagcgccctgagcaacatggtggccgccctgagagagggcggcttcctgctgctgcacaccctgctgagaggccaccccctgggcgacatcgtggccttcctgaccagcaccgagccccagtacggccagggcatcctgagccaggacgcctgggagagcctgttcagcagagtgagcctgagactggtgggcctgaagaagagcttctacggcagcaccctgttcctgtgcagaagacccaccccccaggacagccccatcttcctgcccgtggacgacaccagcttcagatgggtggagagcctgaagggcatcctggccgacgaggacagcagcagacccgtgtggctgaaggccatcaactgcgccaccagcggcgtggtgggcctggtgaactgcctgagaagagagcccggcggcaacagactgagatgcgtgctgctgagcaacctgagcagcaccagccacgtgcccgaggtggaccccggcagcgccgagctgcagaaggtgctgcagggcgacctggtgatgaacgtgtacagagacggcgcctggggcgccttcagacacttcctgctggaggaggacaagcccgaggagcccaccgcccacgccttcgtgagcaccctgaccagaggcgacctgagcagcatcagatgggtgtgcagcagcctgagacacgcccagcccacctgccccggcgcccagctgtgcaccgtgtactacgccagcctgaacttcagagacatcatgctggccaccggcaagctgagccccgacgccatccccggcaagtggaccagccaggacagcctgctgggcatggagttcagcggcagagacgccagcggcaagagagtgatgggcctggtgcccgccaagggcctggccaccagcgtgctgctgagccccgacttcctgtgggacgtgcccagcaactggaccctggaggaggccgccagcgtgcccgtggtgtacagcaccgcctactacgccctggtggtgagaggcagagtgagacccggcgagaccctgctgatccacagcggcagcggcggcgtgggccaggccgccatcgccatcgccctgagcctgggctgcagagtgttcaccaccgtgggcagcgccgagaagagagcctacctgcaggccagattcccccagctggacagcaccagcttcgccaacagcagagacaccagcttcgagcagcacgtgctgtggcacaccggcggcaagggcgtggacctggtgctgaacagcctggccgaggagaagctgcaggccagcgtgagatgcctggccacccacggcagattcctggagatcggcaagttcgacctgagccagaaccaccccctgggcatggccatcttcctgaagaacgtgaccttccacggcgtgctgctggacgccttcttcaacgagagcagcgccgactggagagaggtgtgggccctggtgcaggccggcatcagagacggcgtggtgagacccctgaagtgcaccgtgttccacggcgcccaggtggaggacgccttcagatacatggcccagggcaagcacatcggcaaggtggtggtgcaggtgctggccgaggagcccgaggccgtgctgaagggcgccaagcccaagctgatgagcgccatcagcaagaccttctgccccgcccacaagagctacatcatcgccggcggcctgggcggcttcggcctggagctggcccagtggctgatccagagaggcgtgcagaagctggtgctgaccagcagaagcggcatcagaaccggctaccaggccaagcaggtgagaagatggagaagacagggcgtgcaggtgcaggtgagcaccagcaacatcagcagcctggagggcgccagaggcctgatcgccgaggccgcccagctgggccccgtgggcggcgtgttcaacctggccgtggtgctgagagacggcctgctggagaaccagacccccgagttcttccaggacgtgtgcaagcccaagtacagcggcaccctgaacctggacagagtgaccagagaggcctgccccgagctggactacttcgtggtgttcagcagcgtgagctgcggcagaggcaacgccggccagagcaactacggcttcgccaacagcgccatggagagaatctgcgagaagagaagacacgagggcctgcccggcctggccgtgcagtggggcgccatcggcgacgtgggcatcctggtggagaccatgagcaccaacgacaccatcgtgagcggcaccctgccccagagaatggccagctgcctggaggtgctggacctgttcctgaaccagccccacatggtgctgagcagcttcgtgctggccgagaaggccgccgcctacagagacagagacagccagagagacctggtggaggccgtggcccacatcctgggcatcagagacctggccgccgtgaacctggacagcagcctggccgacctgggcctggacagcctgatgagcgtggaggtgagacagaccctggagagagagctgaacctggtgctgagcgtgagagaggtgagacagctgaccctgagaaagctgcaggagctgagcagcaaggccgacgaggccagcgagctggcctgccccacccccaaggaggacggcctggcccagcagcagacccagctgaacctgagaagcctgctggtgaaccccgagggccccaccctgatgagactgaacagcgtgcagagcagcgagagacccctgttcctggtgcaccccatcgagggcagcaccaccgtgttccacagcctggccagcagactgagcatccccacctacggcctgcagtgcaccagagccgcccccctggacagcatccacagcctggccgcctactacatcgactgcatcagacaggtgcagcccgagggcccctacagagtggccggctacagctacggcgcctgcgtggccttcgagatgtgcagccagctgcaggcccagcagagccccgcccccacccacaacagcctgttcctgttcgacggcagccccacctacgtgctggcctacacccagagctacagagccaagctgacccccggctgcgaggccgaggccgagaccgaggccatctgcttcttcgtgcagcagttcaccgacatggagcacaacagagtgctggaggccctgctgcccctgaagggcctggaggagagagtggccgccgccgtggacctgatcatcaagagccaccagggcctggacagacaggagctgagcttcgccgccagaagcttctactacaagctgagagccgccgagcagtacacccccaaggccaagtaccacggcaacgtgatgctgctgagagccaagaccggcggcgcctacggcgaggacctgggcgccgactacaacctgagccaggtgtgcgacggcaaggtgagcgtgcacgtgatcgagggcgaccacagaaccctgctggagggcagcggcctggagagcatcatcagcatcatccacagcagcctggccgagcccagagtgagcgtgagagagggctag

SEQ ID NO: 10688 - DNA, 2502 bp, synthetic construct
  misc_feature 1..2502: note = Description of Artificial Sequence: Synthetic coding sequence
  source 1..2502: mol_type = other DNA
atgagcatcctgggcagcgccaagcacggcctgtacctgcccaccagagtgaccgccatccacatcgaccccgccacccacagacagaagctgtacaccctgcaggacaaggcccaggtggccgacgtggtggtgagcagatggctgagagtgaccgtggccggcggcgtgcacatcagcggcctgcacaccgagagcgcccccagaagacagcaggagcagcaggtgcccatcctggagaagttctgcttcaccccccacaccgaggagggctgcctgagcgagagagccgccctgcaggaggagctgcagctgtgcaagggcctggtgcaggccctgcagaccaaggtgacccagcagggcctgaagatggtggtgcccggcctggacggcgcccagatccccagagaccccagccagcaggagctgcccagactgctgagcgccgcctgcagactgcagctgaacggcaacctgcagctggagctggcccaggtgctggcccaggagagacccaagctgcccgaggaccccctgctgagcggcctgctggacagccccgccctgaaggcctgcctggacaccgccgtggagaacatgcccagcctgaagatgaaggtggtggaggtgctggccggccacggccacctgtacagcagaatccccggcctgctgagcccccaccccctgctgcagctgagctacaccgccaccgacagacacccccaggccctggaggccgcccaggccgagctgcagcagcacgacgtggcccagggccagtgggaccccgccgaccccgcccccagcgccctgggcagcgccgacctgctggtgtgcaactgcgccgtggccgccctgggcgaccccgccagcgccctgagcaacatggtggccgccctgagagagggcggcttcctgctgctgcacaccctgctgagaggccaccccctgggcgacatcgtggccttcctgaccagcaccgagccccagtacggccagggcatcctgagccaggacgcctgggagagcctgttcagcagagtgagcctgagactggtgggcctgaagaagagcttctacggcagcaccctgttcctgtgcagaagacccaccccccaggacagccccatcttcctgcccgtggacgacaccagcttcagatgggtggagagcctgaagggcatcctggccgacgaggacagcagcagacccgtgtggctgaaggccatcaactgcgccaccagcggcgtggtgggcctggtgaactgcctgagaagagagcccggcggcaacagactgagatgcgtgctgctgagcaacctgagcagcaccagccacgtgcccgaggtggaccccggcagcgccgagctgcagaaggtgctgcagggcgacctggtgatgaacgtgtacagagacggcgcctggggcgccttcagacacttcctgctggaggaggacaagcccgaggagcccaccgcccacgccttcgtgagcaccctgaccagaggcgacctgagcagcatcagatgggtgtgcagcagcctgagacacgcccagcccacctgccccggcgcccagctgtgcaccgtgtactacgccagcctgaacttcagagacatcatgctggccaccggcaagctgagccccgacgccatccccggcaagtggaccagccaggacagcctgctgggcatggagttcagcggcagagacgccagcggcaagagagtgatgggcctggtgcccgccaagggcctggccaccagcgtgctgctgagccccgacttcctgtgggacgtgcccagcaactggaccctggaggaggccgccagcgtgcccgtggtgtacagcaccgcctactacgccctggtggtgagaggcagagtgagacccggcgagaccctgctgatccacagcggcagcggcggcgtgggccaggccgccatcgccatcgccctgagcctgggctgcagagtgttcaccaccgtgggcagcgccgagaagagagcctacctgcaggccagattcccccagctggacagcaccagcttcgccaacagcagagacaccagcttcgagcagcacgtgctgtggcacaccggcggcaagggcgtggacctggtgctgaacagcctggccgaggagaagctgcaggccagcgtgagatgcctggccacccacggcagattcctggagatcggcaagttcgacctgagccagaaccaccccctgggcatggccatcttcctgaagaacgtgaccttccacggcgtgctgctggacgccttcttcaacgagagcagcgccgactggagagaggtgtgggccctggtgcaggccggcatcagagacggcgtggtgagacccctgaagtgcaccgtgttccacggcgcccaggtggaggacgccttcagatacatggcccaggccaaggccagccaggcctggccctgcagcggcgcccccagcgccacctgggccttctggtggagaagatag

SEQ ID NO: 10689 - DNA, 1143 bp, synthetic construct
  misc_feature 1..1143: note = Description of Artificial Sequence: Synthetic coding sequence
  source 1..1143: mol_type = other DNA
atgatgttcagcggcttcaacgccgactacgaggccagcagcagcagatgcagcagcgccagccccgccggcgacagcctgagctactaccacagccccgccgacagcttcagcagcatgggcagccccgtgaacgcccaggacttctgcaccgacctggccgtgagcagcgccaacttcatccccaccgtgaccgccatcagcaccagccccgacctgcagtggctggtgcagcccgccctggtgagcagcgtggcccccagccagaccagagccccccaccccttcggcgtgcccgcccccagcgccggcgcctacagcagagccggcgtggtgaagaccatgaccggcggcagagcccagagcatcggcagaagaggcaaggtggagcagctgagccccgaggaggaggagaagagaagaatcagaagagagagaaacaagatggccgccgccaagtgcagaaacagaagaagagagctgaccgacaccctgcaggccgagaccgaccagctggaggacgagaagagcgccctgcagaccgagatcgccaacctgctgaaggagaaggagaagctggagttcatcctggccgcccacagacccgcctgcaagatccccgacgacctgggcttccccgaggagatgagcgtggccagcctggacctgaccggcggcctgcccgaggtggccacccccgagagcgaggaggccttcaccctgcccctgctgaacgaccccgagcccaagcccagcgtggagcccgtgaagagcatcagcagcatggagctgaagaccgagcccttcgacgacttcctgttccccgccagcagcagacccagcggcagcgagaccgccagaagcgtgcccgacatggacctgagcggcagcttctacgccgccgactgggagcccctgcacagcggcagcctgggcatgggccccatggccaccgagctggagcccctgtgcacccccgtggtgacctgcacccccagctgcaccgcctacaccagcagcttcgtgttcacctaccccgaggccgacagcttccccagctgcgccgccgcccacagaaagggcagcagcagcaacgagcccagcagcgacagcctgagcagccccaccctgctggccctgtag

SEQ ID NO: 10690 - DNA, 966 bp, synthetic construct
  misc_feature 1..966: note = Description of Artificial Sequence: Synthetic coding sequence
  source 1..966: mol_type = other DNA
atggaggagggccagtacagcgagatcgaggagctgcccagaagaagatgctgcagaagaggcacccagatcgtgctgctgggcctggtgaccgccgccctgtgggccggcctgctgaccctgctgctgctgtggcactgggacaccacccagagcctgaagcagctggaggagagagccgccagaaacgtgagccaggtgagcaagaacctggagagccaccacggcgaccagatggcccagaagagccagagcacccagatcagccaggagctggaggagctgagagccgagcagcagagactgaagagccaggacctggagctgagctggaacctgaacggcctgcaggccgacctgagcagcttcaagagccaggagctgaacgagagaaacgaggccagcgacctgctggagagactgagagaggaggtgaccaagctgagaatggagctgcaggtgagcagcggcttcgtgtgcaacacctgccccgagaagtggatcaacttccagagaaagtgctactacttcggcaagggcaccaagcagtgggtgcacgccagatacgcctgcgacgacatggagggccagctggtgagcatccacagccccgaggagcaggacttcctgaccaagcacgccagccacaccggcagctggatcggcctgagaaacctggacctgaagggcgagttcatctgggtggacggcagccacgtggactacagcaactgggcccccggcgagcccaccagcagaagccagggcgaggactgcgtgatgatgagaggcagcggcagatggaacgacgccttctgcgacagaaagctgggcgcctgggtgtgcgacagactggccacctgcaccccccccgccagcgagggcagcgccgagagcatgggccccgacagcagacccgaccccgacggcagactgcccacccccagcgcccccctgcacagctag

SEQ ID NO: 10691 - DNA, 963 bp, synthetic construct
  misc_feature 1..963: note = Description of Artificial Sequence: Synthetic coding sequence
  source 1..963: mol_type = other DNA
atgaacccccccagccaggagatcgaggagctgcccagaagaagatgctgcagaagaggcacccagatcgtgctgctgggcctggtgaccgccgccctgtgggccggcctgctgaccctgctgctgctgtggcactgggacaccacccagagcctgaagcagctggaggagagagccgccagaaacgtgagccaggtgagcaagaacctggagagccaccacggcgaccagatggcccagaagagccagagcacccagatcagccaggagctggaggagctgagagccgagcagcagagactgaagagccaggacctggagctgagctggaacctgaacggcctgcaggccgacctgagcagcttcaagagccaggagctgaacgagagaaacgaggccagcgacctgctggagagactgagagaggaggtgaccaagctgagaatggagctgcaggtgagcagcggcttcgtgtgcaacacctgccccgagaagtggatcaacttccagagaaagtgctactacttcggcaagggcaccaagcagtgggtgcacgccagatacgcctgcgacgacatggagggccagctggtgagcatccacagccccgaggagcaggacttcctgaccaagcacgccagccacaccggcagctggatcggcctgagaaacctggacctgaagggcgagttcatctgggtggacggcagccacgtggactacagcaactgggcccccggcgagcccaccagcagaagccagggcgaggactgcgtgatgatgagaggcagcggcagatggaacgacgccttctgcgacagaaagctgggcgcctgggtgtgcgacagactggccacctgcaccccccccgccagcgagggcagcgccgagagcatgggccccgacagcagacccgaccccgacggcagactgcccacccccagcgcccccctgcacagctag

SEQ ID NO: 10692 - DNA, 1125 bp, synthetic construct
  misc_feature 1..1125: note = Description of Artificial Sequence: Synthetic coding sequence
  source 1..1125: mol_type = other DNA
atgtggttcctgaccaccctgctgctgtgggtgcccgtggacggccaggtggacaccaccaaggccgtgatcaccctgcagcccccctgggtgagcgtgttccaggaggagaccgtgaccctgcactgcgaggtgctgcacctgcccggcagcagcagcacccagtggttcctgaacggcaccgccacccagaccagcacccccagctacagaatcaccagcgccagcgtgaacgacagcggcgagtacagatgccagagaggcctgagcggcagaagcgaccccatccagctggagatccacagaggctggctgctgctgcaggtgagcagcagagtgttcaccgagggcgagcccctggccctgagatgccacgcctggaaggacaagctggtgtacaacgtgctgtactacagaaacggcaaggccttcaagttcttccactggaacagcaacctgaccatcctgaagaccaacatcagccacaacggcacctaccactgcagcggcatgggcaagcacagatacaccagcgccggcatcagcgtgaccgtgaaggagctgttccccgcccccgtgctgaacgccagcgtgaccagccccctgctggagggcaacctggtgaccctgagctgcgagaccaagctgctgctgcagagacccggcctgcagctgtacttcagcttctacatgggcagcaagaccctgagaggcagaaacaccagcagcgagtaccagatcctgaccgccagaagagaggacagcggcctgtactggtgcgaggccgccaccgaggacggcaacgtgctgaagagaagccccgagctggagctgcaggtgctgggcctgcagctgcccacccccgtgtggttccacgtgctgttctacctggccgtgggcatcatgttcctggtgaacaccgtgctgtgggtgaccatcagaaaggagctgaagagaaagaagaagtgggacctggagatcagcctggacagcggccacgagaagaaggtgatcagcagcctgcaggaggacagacacctggaggaggagctgaagtgccaggagcagaaggaggagcagctgcaggagggcgtgcacagaaaggagccccagggcgccacctag

SEQ ID NO: 10693 - DNA, 723 bp, synthetic construct
  misc_feature 1..723: note = Description of Artificial Sequence: Synthetic coding sequence
  source 1..723: mol_type = other DNA
atgtggttcctgaccaccctgctgctgtggggctggctgctgctgcaggtgagcagcagagtgttcaccgagggcgagcccctggccctgagatgccacgcctggaaggacaagctggtgtacaacgtgctgtactacagaaacggcaaggccttcaagttcttccactggaacagcaacctgaccatcctgaagaccaacatcagccacaacggcacctaccactgcagcggcatgggcaagcacagatacaccagcgccggcatcagcgtgaccgtgaaggagctgttccccgcccccgtgctgaacgccagcgtgaccagccccctgctggagggcaacctggtgaccctgagctgcgagaccaagctgctgctgcagagacccggcctgcagctgtacttcagcttctacatgggcagcaagaccctgagaggcagaaacaccagcagcgagtaccagatcctgaccgccagaagagaggacagcggcctgtactggtgcgaggccgccaccgaggacggcaacgtgctgaagagaagccccgagctggagctgcaggtgctgggcctgcagctgcccacccccgtgtggttccacgtgctgttctacctggccgtgggcatcatgttcctggtgaacaccgtgctgtgggtgaccatcagaaaggagctgaagagaaagaagaagtgggacctggagatcagcctggacagcggctag

SEQ ID NO: 10694 - DNA, 2469 bp, synthetic construct
  misc_feature 1..2469: note = Description of Artificial Sequence: Synthetic coding sequence
  source 1..2469: mol_type = other DNA
atgggcttcagcagcgagctgtgcagcccccagggccacggcgtgctgcagcagatgcaggaggccgagctgagactgctggagggcatgagaaagtggatggcccagagagtgaagagcgacagagagtacgccggcctgctgcaccacatgagcctgcaggacagcggcggccagagcagagccatcagccccgacagccccatcagccagagctgggccgagatcaccagccagaccgagggcctgagcagactgctgagacagcacgccgaggacctgaacagcggccccctgagcaagctgagcctgctgatcagagagagacagcagctgagaaagacctacagcgagcagtggcagcagctgcagcaggagctgaccaagacccacagccaggacatcgagaagctgaagagccagtacagagccctggccagagacagcgcccaggccaagagaaagtaccaggaggccagcaaggacaaggacagagacaaggccaaggacaagtacgtgagaagcctgtggaagctgttcgcccaccacaacagatacgtgctgggcgtgagagccgcccagctgcaccaccagcaccaccaccagctgctgctgcccggcctgctgagaagcctgcaggacctgcacgaggagatggcctgcatcctgaaggagatcctgcaggagtacctggagatcagcagcctggtgcaggacgaggtggtggccatccacagagagatggccgccgccgccgccagaatccagcccgaggccgagtaccagggcttcctgagacagtacggcagcgcccccgacgtgcccccctgcgtgaccttcgacgagagcctgctggaggagggcgagcccctggagcccggcgagctgcagctgaacgagctgaccgtggagagcgtgcagcacaccctgaccagcgtgaccgacgagctggccgtggccaccgagatggtgttcagaagacaggagatggtgacccagctgcagcaggagctgagaaacgaggaggagaacacccaccccagagagagagtgcagctgctgggcaagagacaggtgctgcaggaggccctgcagggcctgcaggtggccctgtgcagccaggccaagctgcaggcccagcaggagctgctgcagaccaagctggagcacctgggccccggcgagcccccccccgtgctgctgctgcaggacgacagacacagcaccagcagcagcgagcaggagagagagggcggcagaacccccaccctggagatcctgaagagccacatcagcggcatcttcagacccaagttcagcctgcccccccccctgcagctgatccccgaggtgcagaagcccctgcacgagcagctgtggtaccacggcgccatccccagagccgaggtggccgagctgctggtgcacagcggcgacttcctggtgagagagagccagggcaagcaggagtacgtgctgagcgtgctgtgggacggcctgcccagacacttcatcatccagagcctggacaacctgtacagactggagggcgagggcttccccagcatccccctgctgatcgaccacctgctgagcacccagcagcccctgaccaagaagagcggcgtggtgctgcacagagccgtgcccaaggacaagtgggtgctgaaccacgaggacctggtgctgggcgagcagatcggcagaggcaacttcggcgaggtgttcagcggcagactgagagccgacaacaccctggtggccgtgaagagctgcagagagaccctgccccccgacctgaaggccaagttcctgcaggaggccagaatcctgaagcagtacagccaccccaacatcgtgagactgatcggcgtgtgcacccagaagcagcccatctacatcgtgatggagctggtgcagggcggcgacttcctgaccttcctgagaaccgagggcgccagactgagagtgaagaccctgctgcagatggtgggcgacgccgccgccggcatggagtacctggagagcaagtgctgcatccacagagacctggccgccagaaactgcctggtgaccgagaagaacgtgctgaagatcagcgacttcggcatgagcagagaggaggccgacggcgtgtacgccgccagcggcggcctgagacaggtgcccgtgaagtggaccgcccccgaggccctgaactacggcagatacagcagcgagagcgacgtgtggagcttcggcatcctgctgtgggagaccttcagcctgggcgccagcccctaccccaacctgagcaaccagcagaccagagagttcgtggagaagggcggcagactgccctgccccgagctgtgccccgacgccgtgttcagactgatggagcagtgctgggcctacgagcccggccagagacccagcttcagcaccatctaccaggagctgcagagcatcagaaagagacacagatag

SEQ ID NO: 10695 - DNA, 2295 bp, synthetic construct
  misc_feature 1..2295: note = Description of Artificial Sequence: Synthetic coding sequence
  source 1..2295: mol_type = other DNA
atgggcttcagcagcgagctgtgcagcccccagggccacggcgtgctgcagcagatgcaggaggccgagctgagactgctggagggcatgagaaagtggatggcccagagagtgaagagcgacagagagtacgccggcctgctgcaccacatgagcctgcaggacagcggcggccagagcagagccatcagccccgacagccccatcagccagacccacagccaggacatcgagaagctgaagagccagtacagagccctggccagagacagcgcccaggccaagagaaagtaccaggaggccagcaaggacaaggacagagacaaggccaaggacaagtacgtgagaagcctgtggaagctgttcgcccaccacaacagatacgtgctgggcgtgagagccgcccagctgcaccaccagcaccaccaccagctgctgctgcccggcctgctgagaagcctgcaggacctgcacgaggagatggcctgcatcctgaaggagatcctgcaggagtacctggagatcagcagcctggtgcaggacgaggtggtggccatccacagagagatggccgccgccgccgccagaatccagcccgaggccgagtaccagggcttcctgagacagtacggcagcgcccccgacgtgcccccctgcgtgaccttcgacgagagcctgctggaggagggcgagcccctggagcccggcgagctgcagctgaacgagctgaccgtggagagcgtgcagcacaccctgaccagcgtgaccgacgagctggccgtggccaccgagatggtgttcagaagacaggagatggtgacccagctgcagcaggagctgagaaacgaggaggagaacacccaccccagagagagagtgcagctgctgggcaagagacaggtgctgcaggaggccctgcagggcctgcaggtggccctgtgcagccaggccaagctgcaggcccagcaggagctgctgcagaccaagctggagcacctgggccccggcgagcccccccccgtgctgctgctgcaggacgacagacacagcaccagcagcagcgagcaggagagagagggcggcagaacccccaccctggagatcctgaagagccacatcagcggcatcttcagacccaagttcagcctgcccccccccctgcagctgatccccgaggtgcagaagcccctgcacgagcagctgtggtaccacggcgccatccccagagccgaggtggccgagctgctggtgcacagcggcgacttcctggtgagagagagccagggcaagcaggagtacgtgctgagcgtgctgtgggacggcctgcccagacacttcatcatccagagcctggacaacctgtacagactggagggcgagggcttccccagcatccccctgctgatcgaccacctgctgagcacccagcagcccctgaccaagaagagcggcgtggtgctgcacagagccgtgcccaaggacaagtgggtgctgaaccacgaggacctggtgctgggcgagcagatcggcagaggcaacttcggcgaggtgttcagcggcagactgagagccgacaacaccctggtggccgtgaagagctgcagagagaccctgccccccgacctgaaggccaagttcctgcaggaggccagaatcctgaagcagtacagccaccccaacatcgtgagactgatcggcgtgtgcacccagaagcagcccatctacatcgtgatggagctggtgcagggcggcgacttcctgaccttcctgagaaccgagggcgccagactgagagtgaagaccctgctgcagatggtgggcgacgccgccgccggcatggagtacctggagagcaagtgctgcatccacagagacctggccgccagaaactgcctggtgaccgagaagaacgtgctgaagatcagcgacttcggcatgagcagagaggaggccgacggcgtgtacgccgccagcggcggcctgagacaggtgcccgtgaagtggaccgcccccgaggccctgaactacggcagatacagcagcgagagcgacgtgtggagcttcggcatcctgctgtgggagaccttcagcctgggcgccagcccctaccccaacctgagcaaccagcagaccagagagttcgtggagaagggcggcagactgccctgccccgagctgtgccccgacgccgtgttcagactgatggagcagtgctgggcctacgagcccggccagagacccagcttcagcaccatctaccaggagctgcagagcatcagaaagagacacagatag

SEQ ID NO: 10696 - DNA, 2046 bp, synthetic construct
  misc_feature 1..2046: note = Description of Artificial Sequence: Synthetic coding sequence
  source 1..2046: mol_type = other DNA
atgggcttcagcagcgagctgtgcagcccccagggccacggcgtgctgcagcagatgcaggaggccgagctgagactgctggagggcatgagaaagtggatggcccagagagtgaagagcgacagagagtacgccggcctgctgcaccacatgagcctgcaggacagcggcggccagagcagagccatcagccccgacagccccatcagccagacccacagccaggacatcgagaagctgaagagccagtacagagccctggccagagacagcgcccaggccaagagaaagtaccaggaggccagcaaggacaaggacagagacaaggccaaggacaagtacgtgagaagcctgtggaagctgttcgcccaccacaacagatacgtgctgggcgtgagagccgcccagctgcaccaccagcaccaccaccagctgctgctgcccggcctgctgagaagcctgcaggacctgcacgaggagatggcctgcatcctgaaggagatcctgcaggagtacctggagatcagcagcctggtgcaggacgaggtggtggccatccacagagagatggccgccgccgccgccagaatccagcccgaggccgagtaccagggcttcctgagacagtacggcagcgcccccgacgtgcccccctgcgtgaccttcgacgagagcctgctggaggagggcgagcccctggagcccggcgagctgcagctgaacgagctgaccgtggagagcgtgcagcacaccctgaccagcgtgaccgacgagctggccgtggccaccgagatggtgttcagaagacaggagatggtgacccagctgcagcaggagctgagaaacgaggaggagaacacccaccccagagagagagtgcagctgctgggcaagagacaggtgctgcaggaggccctgcagggcctgcaggtggccctgtgcagccaggccaagctgcaggcccagcaggagctgctgcagaccaagctggagcacctgggccccggcgagcccccccccgtgctgctgctgcaggacgacagacacagcaccagcagcagcgagcaggagagagagggcggcagaacccccaccctggagatcctgaagagccacatcagcggcatcttcagacccaagttcagcaacctgtacagactggagggcgagggcttccccagcatccccctgctgatcgaccacctgctgagcacccagcagcccctgaccaagaagagcggcgtggtgctgcacagagccgtgcccaaggacaagtgggtgctgaaccacgaggacctggtgctgggcgagcagatcggcagaggcaacttcggcgaggtgttcagcggcagactgagagccgacaacaccctggtggccgtgaagagctgcagagagaccctgccccccgacctgaaggccaagttcctgcaggaggccagaagcagccccagcaccagcagctggagcctgtgcagaggcagcagcccccccgccggcggcgacttcctgaccttcctgagaaccgagggcgccagactgagagtgaagaccctgctgcagatggtgggcgacgccgccgccggcatggagtacctggagagcaagtgctgcatccacagagacctggccgccagaaactgcctggtgaccgagaagaacgtgctgaagatcagcgacttcggcatgagcagagaggaggccgacggcgtgtacgccgccagcggcggcctgagacaggtgcccgtgaagtggaccgcccccgaggccctgaactacggcagatacagcagcgagagcgacgtgtggagcttcggcatcctgctgtgggagaccttcagcctgggcgccagcccctaccccaacctgagcaaccagcagaccagagagttcgtggagaagggcggcagactgccctgccccgagctgtgccccgacgccgtgttcagactgatggagcagtgctgggcctacgagcccggccagagacccagcttcagcaccatctaccaggagctgcagagcatcagaaagagacacagatag

SEQ ID NO: 10697 - DNA, 2085 bp, synthetic construct
  misc_feature 1..2085: note = Description of Artificial Sequence: Synthetic coding sequence
  source 1..2085: mol_type = other DNA
atgggcttcagcagcgagctgtgcagcccccagggccacggcgtgctgcagcagatgcaggaggccgagctgagactgctggagggcatgagaaagtggatggcccagagagtgaagagcgacagagagtacgccggcctgctgcaccacatgagcctgcaggacagcggcggccagagcagagccatcagccccgacagccccatcagccagacccacagccaggacatcgagaagctgaagagccagtacagagccctggccagagacagcgcccaggccaagagaaagtaccaggaggccagcaaggacaaggacagagacaaggccaaggacaagtacgtgagaagcctgtggaagctgttcgcccaccacaacagatacgtgctgggcgtgagagccgcccagctgcaccaccagcaccaccaccagctgctgctgcccggcctgctgagaagcctgcaggacctgcacgaggagatggcctgcatcctgaaggagatcctgcaggagtacctggagatcagcagcctggtgcaggacgaggtggtggccatccacagagagatggccgccgccgccgccagaatccagcccgaggccgagtaccagggcttcctgagacagtacggcagcgcccccgacgtgcccccctgcgtgaccttcgacgagagcctgctggaggagggcgagcccctggagcccggcgagctgcagctgaacgagctgaccgtggagagcgtgcagcacaccctgaccagcgtgaccgacgagctggccgtggccaccgagatggtgttcagaagacaggagatggtgacccagctgcagcaggagctgagaaacgaggaggagaacacccaccccagagagagagtgcagctgctgggcaagagacaggtgctgcaggaggccctgcagggcctgcaggtggccctgtgcagccaggccaagctgcaggcccagcaggagctgctgcagaccaagctggagcacctgggccccggcgagcccccccccgtgctgctgctgcaggacgacagacacagcaccagcagcagcgagcaggagagagagggcggcagaacccccaccctggagatcctgaagagccacatcagcggcatcttcagacccaagttcagcaacctgtacagactggagggcgagggcttccccagcatccccctgctgatcgaccacctgctgagcacccagcagcccctgaccaagaagagcggcgtggtgctgcacagagccgtgcccaaggacaagtgggtgctgaaccacgaggacctggtgctgggcgagcagatcggcagaggcaacttcggcgaggtgttcagcggcagactgagagccgacaacaccctggtggccgtgaagagctgcagagagaccctgccccccgacctgaaggccaagttcctgcaggaggccagaatcctgaagcagtacagccaccccaacatcgtgagactgatcggcgtgtgcacccagaagcagcccatctacatcgtgatggagctggtgcagggcggcgacttcctgaccttcctgagaaccgagggcgccagactgagagtgaagaccctgctgcagatggtgggcgacgccgccgccggcatggagtacctggagagcaagtgctgcatccacagagacctggccgccagaaactgcctggtgaccgagaagaacgtgctgaagatcagcgacttcggcatgagcagagaggaggccgacggcgtgtacgccgccagcggcggcctgagacaggtgcccgtgaagtggaccgcccccgaggccctgaactacggcagatacagcagcgagagcgacgtgtggagcttcggcatcctgctgtgggagaccttcagcctgggcgccagcccctaccccaacctgagcaaccagcagaccagagagttcgtggagaagggcggcagactgccctgccccgagctgtgccccgacgccgtgttcagactgatggagcagtgctgggcctacgagcccggccagagacccagcttcagcaccatctaccaggagctgcagagcatcagaaagagacacagatag

SEQ ID NO: 10698 - DNA, 129 bp, synthetic construct
  misc_feature 1..129: note = Description of Artificial Sequence: Synthetic coding sequence
  source 1..129: mol_type = other DNA
atgggcttcagcagcgagctgtgcagcccccagggccacggcgtgctgcagcagatgcaggaggccgagctgagactgctggagggcatgagaaagtggatggcccagagagtgaagagcgacagatag

SEQ ID NO: 10699 - DNA, 348 bp, synthetic construct
  misc_feature 1..348: note = Description of Artificial Sequence: Synthetic coding sequence
  source 1..348: mol_type = other DNA
atgggcttcagcagcgagctgtgcagcccccagggccacggcgtgctgcagcagatgcaggaggccgagctgagactgctggagggcatgagaaagtggatggcccagagagtgaagagcgacagagagtacgccggcctgctgcaccacatgagcctgcaggacagcggcggccagagcagagccatcagccccgacagccccatcagccagagctgggccgagatcaccagccagaccgagggcctgagcagactgctgagacagcacgccgaggacctgaacagcggccccctgagcaagctgagcctgctgatcagagagagacagcagctgagaaagacctag

SEQ ID NO: 10700 - DNA, 2259 bp, synthetic construct
  misc_feature 1..2259: note = Description of Artificial Sequence: Synthetic coding sequence
  source 1..2259: mol_type = other DNA
atgggcttcagcagcgagctgtgcagcccccagggccacggcgtgctgcagcagatgcaggaggccgagctgagactgctggagggcatgagaaagtggatggcccagagagtgaagagcgacagagagtacgccggcctgctgcaccacatgagcctgcaggacagcggcggccagagcagagccatcagccccgacagccccatcagccagagctgggccgagatcaccagccagaccgagggcctgagcagactgctgagacagcacgccgaggacctgaacagcggccccctgagcaagctgagcctgctgatcagagagagacagcagctgagaaagacctacagcgagcagtggcagcagctgcagcaggagctgaccaagacccacagccaggacatcgagaagctgaagagccagtacagagccctggccagagacagcgcccaggccaagagaaagtaccaggaggccagcaaggacaaggacagagacaaggccaaggacaagtacgtgagaagcctgtggaagctgttcgcccaccacaacagatacgtgctgggcgtgagagccgcccagctgcaccaccagcaccaccaccagctgctgctgcccggcctgctgagaagcctgcaggacctgcacgaggagatggcctgcatcctgaaggagatcctgcaggagtacctggagatcagcagcctggtgcaggacgaggtggtggccatccacagagagatggccgccgccgccgccagaatccagcccgaggccgagtaccagggcttcctgagacagtacggcagcgcccccgacgtgcccccctgcgtgaccttcgacgagagcctgctggaggagggcgagcccctggagcccggcgagctgcagctgaacgagctgaccgtggagagcgtgcagcacaccctgaccagcgtgaccgacgagctggccgtggccaccgagatggtgttcagaagacaggagatggtgacccagctgcagcaggagctgagaaacgaggaggagaacacccaccccagagagagagtgcagctgctgggcaagagacaggtgctgcaggaggccctgcagggcctgcaggtggccctgtgcagccaggccaagctgcaggcccagcaggagctgctgcagaccaagctggagcacctgggccccggcgagcccccccccgtgctgctgctgcaggacgacagacacagcaccagcagcagcgagcaggagagagagggcggcagaacccccaccctggagatcctgaagagccacatcagcggcatcttcagacccaagttcagcaacctgtacagactggagggcgagggcttccccagcatccccctgctgatcgaccacctgctgagcacccagcagcccctgaccaagaagagcggcgtggtgctgcacagagccgtgcccaaggacaagtgggtgctgaaccacgaggacctggtgctgggcgagcagatcggcagaggcaacttcggcgaggtgttcagcggcagactgagagccgacaacaccctggtggccgtgaagagctgcagagagaccctgccccccgacctgaaggccaagttcctgcaggaggccagaatcctgaagcagtacagccaccccaacatcgtgagactgatcggcgtgtgcacccagaagcagcccatctacatcgtgatggagctggtgcagggcggcgacttcctgaccttcctgagaaccgagggcgccagactgagagtgaagaccctgctgcagatggtgggcgacgccgccgccggcatggagtacctggagagcaagtgctgcatccacagagacctggccgccagaaactgcctggtgaccgagaagaacgtgctgaagatcagcgacttcggcatgagcagagaggaggccgacggcgtgtacgccgccagcggcggcctgagacaggtgcccgtgaagtggaccgcccccgaggccctgaactacggcagatacagcagcgagagcgacgtgtggagcttcggcatcctgctgtgggagaccttcagcctgggcgccagcccctaccccaacctgagcaaccagcagaccagagagttcgtggagaagggcggcagactgccctgccccgagctgtgccccgacgccgtgttcagactgatggagcagtgctgggcctacgagcccggccagagacccagcttcagcaccatctaccaggagctgcagagcatcagaaagagacacagatag

SEQ ID NO: 10701 - DNA, 2085 bp, synthetic construct; identical to SEQ ID NO: 10697
  misc_feature 1..2085: note = Description of Artificial Sequence: Synthetic coding sequence
  source 1..2085: mol_type = other DNA

SEQ ID NO: 10702 - DNA, 444 bp, synthetic construct
  misc_feature 1..444: note = Description of Artificial Sequence: Synthetic coding sequence
  source 1..444: mol_type = other DNA
atgggcttcagcagcgagctgtgcagcccccagggccacggcgtgctgcagcagatgcaggaggccgagctgagactgctggagggcatgagaaagtggatggcccagagagtgaagagcgacagagagtacgccggcctgctgcaccacatgagcctgcaggacagcggcggccagagcagagccatcagccccgacagccccatcagccagagctgggccgagatcaccagccagaccgagggcctgagcagactgctgagacagcacgccgaggacctgaacagcggccccctgagcaagctgagcctgctgatcagagagagacagcagctgagaaagacctacagcgagcagtggcagcagctgcagcaggagctgaccaagacccacagccaggacatcgagaagctgaagagccagtacagagccctggccagatag

SEQ ID NO: 10703 - DNA, 1638 bp, synthetic construct
  misc_feature 1..1638: note = Description of Artificial Sequence: Synthetic coding sequence
  source 1..1638: mol_type = other DNA
atgggcttcagcagcgagctgtgcagcccccagggccacggcgtgctgcagcagatgcaggaggccgagctgagactgctggagggcatgagaaagtggatggcccagagagtgaagagcgacagagagtacgccggcctgctgcaccacatgagcctgcaggacagcggcggccagagcagagccatcagccccgacagccccatcagccagagctgggccgagatcaccagccagaccgagggcctgagcagactgctgagacagcacgccgaggacctgaacagcggccccctgagcaagctgagcctgctgatcagagagagacagcagctgagaaagacctacagcgagcagtggcagcagctgcagcaggagctgaccaagacccacagccaggacatcgagaagctgaagagccagtacagagccctggccagagacagcgcccaggccaagagaaagtaccaggaggccagcaaggacaaggacagagacaaggccaaggacaagtacgtgagaagcctgtggaagctgttcgcccaccacaacagatacgtgctgggcgtgagagccgcccagctgcaccaccagcaccaccaccagctgctgctgcccggcctgctgagaagcctgcaggacctgcacgaggagatggcctgcatcctgaaggagatcctgcaggagtacctggagatcagcagcctggtgcaggacgaggtggtggccatccacagagagatggccgccgccgccgccagaatccagcccgaggccgagtaccagggcttcctgagacagtacggcagcgcccccgacgtgcccccctgcgtgaccttcgacgagagcctgctggaggagggcgagcccctggagcccggcgagctgcagctgaacgagctgaccgtggagagcgtgcagcacaccctgaccagcgtgaccgacgagctggccgtggccaccgagatggtgttcagaagacaggagatggtgacccagctgcagcaggagctgagaaacgaggaggagaacacccaccccagagagagagtgcagctgctgggcaagagacaggtgctgcaggaggccctgcagggcctgcaggtggccctgtgcagccaggccaagctgcaggcccagcaggagctgctgcagaccaagctggagcacctgggccccggcgagcccccccccgtgctgctgctgcaggacgacagacacagcaccagcagcagcgagcaggagagagagggcggcagaacccccaccctggagatcctgaagagccacatcagcggcatcttcagacccaagttcagcctgcccccccccctgcagctgatccccgaggtgcagaagcccctgcacgagcagctgtggtaccacggcgccatccccagagccgaggtggccgagctgctggtgcacagcggcgacttcctggtgagagagagccagggcaagcaggagtacgtgctgagcgtgctgtgggacggcctgcccagacacttcatcatccaggcccacgcccccagcgagtggagactgctgacccccggccccctgccctgcagaacctgcaccgactggaagggcaaggccttcctggccttcctgtgcagcagcaccacctactag

SEQ ID NO: 10704 - DNA, 366 bp, synthetic construct
  misc_feature 1..366: note = Description of Artificial Sequence: Synthetic coding sequence
  source 1..366: mol_type = other DNA
atgggcttcagcagcgagctgtgcagcccccagggccacggcgtgctgcagcagatgcaggaggccgagctgagactgctggagggcatgagaaagtggatggcccagagagtgaagagcgacagagagtacgccggcctgctgcaccacatgagcctgcaggacagcggcggccagagcagagccatcagccccgacagccccatcagccaggtgggcctgtacggcaccctggtgggcgccggctgcatctgcctgctgctgcccctgctgggcgccctgtggggcagcggctggagaagcggcagacccatgctgggcagccactgcgcccccctgcccgccagccccatctgcgccgtgtag

SEQ ID NO: 10705 - DNA, 510 bp, synthetic construct
  misc_feature 1..510: note = Description of Artificial Sequence: Synthetic coding sequence
  source 1..510: mol_type = other DNA
atgggcttcagcagcgagctgtgcagcccccagggccacggcgtgctgcagcagatgcaggaggccgagctgagactgctggagggcatgagaaagtggatggcccagagagtgaagagcgacagagagtacgccggcctgctgcaccacatgagcctgcaggacagcggcggccagagcagagccatcagccccgacagccccatcagccagagctgggccgagatcaccagccagaccgagggcctgagcagactgctgagacagcacgccgaggacctgaacagcggccccctgagcaagctgagcctgctgatcagagagagacagcagctgagaaagacctacagcgagcagtggcagcagctgcagcaggagctgaccaagacccacagccaggacatcgagaagctgaagagccagtacagagccctggccagagacagcgcccaggccaagagaaagtaccaggaggccagcaaggacaaggacagagacaaggccaagtag

SEQ ID NO: 10706 - DNA, 2283 bp, synthetic construct
  misc_feature 1..2283: note = Description of Artificial Sequence: Synthetic coding sequence
  source 1..2283: mol_type = other DNA
atgaagacctgggtgaagatcgtgttcggcgtggccaccagcgccgtgctggccctgctggtgatgtgcatcgtgctgagacccagcagagtgcacaacagcgaggagaacaccatgagagccctgaccctgaaggacatcctgaacggcaccttcagctacaagaccttcttccccaactggatcagcggccaggagtacctgcaccagagcgccgacaacaacatcgtgctgtacaacatcgagaccggccagagctacaccatcctgagcaacagaaccatgaagagcgtgaacgccagcaactacggcctgagccccgacagacagttcgtgtacctggagagcgactacagcaagctgtggagatacagctacaccgccacctactacatctacgacctgagcaacggcgagttcgtgagaggcaacgagctgcccagacccatccagtacctgtgctggagccccgtgggcagcaagctggcctacgtgtaccagaacaacatctacctgaagcagagacccggcgacccccccttccagatcaccttcaacggcagagagaacaagatcttcaacggcatccccgactgggtgtacgaggaggagatgctggccaccaagtacgccctgtggtggagccccaacggcaagttcctggcctacgccgagttcaacgacaccgacatccccgtgatcgcctacagctactacggcgacgagcagtaccccagaaccatcaacatcccctaccccaaggccggcgccaagaaccccgtggtgagaatcttcatcatcgacaccacctaccccgcctacgtgggcccccaggaggtgcccgtgcccgccatgatcgccagcagcgactactacttcagctggctgacctgggtgaccgacgagagagtgtgcctgcagtggctgaagagagtgcagaacgtgagcgtgctgagcatctgcgacttcagagaggactggcagacctgggactgccccaagacccaggagcacatcgaggagagcagaaccggctgggccggcggcttcttcgtgagcacccccgtgttcagctacgacgccatcagctactacaagatcttcagcgacaaggacggctacaagcacatccactacatcaaggacaccgtggagaacgccatccagatcaccagcggcaagtgggaggccatcaacatcttcagagtgacccaggacagcctgttctacagcagcaacgagttcgaggagtaccccggcagaagaaacatctacagaatcagcatcggcagctacccccccagcaagaagtgcgtgacctgccacctgagaaaggagagatgccagtactacaccgccagcttcagcgactacgccaagtactacgccctggtgtgctacggccccggcatccccatcagcaccctgcacgacggcagaaccgaccaggagatcaagatcctggaggagaacaaggagctggagaacgccctgaagaacatccagctgcccaaggaggagatcaagaagctggaggtggacgagatcaccctgtggtacaagatgatcctgcccccccagttcgacagaagcaagaagtaccccctgctgatccaggtgtacggcggcccctgcagccagagcgtgagaagcgtgttcgccgtgaactggatcagctacctggccagcaaggagggcatggtgatcgccctggtggacggcagaggcaccgccttccagggcgacaagctgctgtacgccgtgtacagaaagctgggcgtgtacgaggtggaggaccagatcaccgccgtgagaaagttcatcgagatgggcttcatcgacgagaagagaatcgccatctggggctggagctacggcggctacgtgagcagcctggccctggccagcggcaccggcctgttcaagtgcggcatcgccgtggcccccgtgagcagctgggagtactacgccagcgtgtacaccgagagattcatgggcctgcccaccaaggacgacaacctggagcactacaagaacagcaccgtgatggccagagccgagtacttcagaaacgtggactacctgctgatccacggcaccgccgacgacaacgtgcacttccagaacagcgcccagatcgccaaggccctggtgaacgcccaggtggacttccaggccatgtggtacagcgaccagaaccacggcctgagcggcctgagcaccaaccacctgtacacccacatgacccacttcctgaagcagtgcttcagcctgagcgactag

SEQ ID NO: 10707 - DNA, 2208 bp, synthetic construct
  misc_feature 1..2208: note = Description of Artificial Sequence: Synthetic coding sequence
  source 1..2208: mol_type = other DNA
atgaagacctgggtgaagatcgtgttcggcgtggccaccagcgccgtgctggccctgctggtgatgtgcatcgtgctgagacccagcagagtgcacaacagcgaggagaacaccatgagagccctgaccctgaaggacatcctgaacggcaccttcagctacaagaccttcttccccaactggatcagcggccaggagtacctgcaccagagcgccgacaacaacatcgtgctgtacaacatcgagaccggccagagctacaccatcctgagcaacagaaccatgctgtggagatacagctacaccgccacctactacatctacgacctgagcaacggcgagttcgtgagaggcaacgagctgcccagacccatccagtacctgtgctggagccccgtgggcagcaagctggcctacgtgtaccagaacaacatctacctgaagcagagacccggcgacccccccttccagatcaccttcaacggcagagagaacaagatcttcaacggcatccccgactgggtgtacgaggaggagatgctggccaccaagtacgccctgtggtggagccccaacggcaagttcctggcctacgccgagttcaacgacaccgacatccccgtgatcgcctacagctactacggcgacgagcagtaccccagaaccatcaacatcccctaccccaaggccggcgccaagaaccccgtggtgagaatcttcatcatcgacaccacctaccccgcctacgtgggcccccaggaggtgcccgtgcccgccatgatcgccagcagcgactactacttcagctggctgacctgggtgaccgacgagagagtgtgcctgcagtggctgaagagagtgcagaacgtgagcgtgctgagcatctgcgacttcagagaggactggcagacctgggactgccccaagacccaggagcacatcgaggagagcagaaccggctgggccggcggcttcttcgtgagcacccccgtgttcagctacgacgccatcagctactacaagatcttcagcgacaaggacggctacaagcacatccactacatcaaggacaccgtggagaacgccatccagatcaccagcggcaagtgggaggccatcaacatcttcagagtgacccaggacagcctgttctacagcagcaacgagttcgaggagtaccccggcagaagaaacatctacagaatcagcatcggcagctacccccccagcaagaagtgcgtgacctgccacctgagaaaggagagatgccagtactacaccgccagcttcagcgactacgccaagtactacgccctggtgtgctacggccccggcatccccatcagcaccctgcacgacggcagaaccgaccaggagatcaagatcctggaggagaacaaggagctggagaacgccctgaagaacatccagctgcccaaggaggagatcaagaagctggaggtggacgagatcaccctgtggtacaagatgatcctgcccccccagttcgacagaagcaagaagtaccccctgctgatccaggtgtacggcggcccctgcagccagagcgtgagaagcgtgttcgccgtgaactggatcagctacctggccagcaaggagggcatggtgatcgccctggtggacggcagaggcaccgccttccagggcgacaagctgctgtacgccgtgtacagaaagctgggcgtgtacgaggtggaggaccagatcaccgccgtgagaaagttcatcgagatgggcttcatcgacgagaagagaatcgccatctggggctggagctacggcggctacgtgagcagcctggccctggccagcggcaccggcctgttcaagtgcggcatcgccgtggcccccgtgagcagctgggagtactacgccagcgtgtacaccgagagattcatgggcctgcccaccaaggacgacaacctggagcactacaagaacagcaccgtgatggccagagccgagtacttcagaaacgtggactacctgctgatccacggcaccgccgacgacaacgtgcacttccagaacagcgcccagatcgccaaggccctggtgaacgcccaggtggacttccaggccatgtggtacagcgaccagaaccacggcctgagcggcctgagcaccaaccacctgtacacccacatgacccacttcctgaagcagtgcttcagcctgagcgactag

SEQ ID NO: 10708 - DNA, 468 bp, synthetic construct
  misc_feature 1..468: note = Description of Artificial Sequence: Synthetic coding sequence
  source 1..468: mol_type = other DNA
atggccgagggcgagatcaccaccttcaccgccctgaccgagaagttcaacctgccccccggcaactacaagaagcccaagctgctgtactgcagcaacggcggccacttcctgagaatcctgcccgacggcaccgtggacggcaccagagacagaagcgaccagcacatccagctgcagctgagcgccgagagcgtgggcgaggtgtacatcaagagcaccgagaccggccagtacctggccatggacaccgacggcctgctgtacggcagccagacccccaacgaggagtgcctgttcctggagagactggaggagaaccactacaacacctacatcagcaagaagcacgccgagaagaactggttcgtgggcctgaagaagaacggcagctgcaagagaggccccagaacccactacggccagaaggccatcctgttcctgcccctgcccgtgagcagcgactag

SEQ ID NO: 10709 - DNA, 468 bp, synthetic construct; identical to SEQ ID NO: 10708
  misc_feature 1..468: note = Description of Artificial Sequence: Synthetic coding sequence
  source 1..468: mol_type = other DNA

SEQ ID NO: 10710 - DNA, 468 bp, synthetic construct; identical to SEQ ID NO: 10708
  misc_feature 1..468: note = Description of Artificial Sequence: Synthetic coding sequence
  source 1..468: mol_type = other DNA

SEQ ID NO: 10711 - DNA, 177 bp, synthetic construct
  misc_feature 1..177: note = Description of Artificial Sequence: Synthetic coding sequence
  source 1..177: mol_type = other DNA
atggccgagggcgagatcaccaccttcaccgccctgaccgagaagttcaacctgccccccggcaactacaagaagcccaagctgctgtactgcagcaacggcggccacttcctgagaatcctgcccgacggcaccgtggacggcaccagagacagaagcgaccagcacatccagtag

SEQ ID NO: 10712 - DNA, 126 bp, synthetic construct
  misc_feature 1..126: note = Description of Artificial Sequence: Synthetic coding sequence
  source 1..126: mol_type = other DNA
atggccgagggcgagatcaccaccttcaccgccctgaccgagaagttcaacctgccccccggcaactacaagaagcccaagctgctgtactgcagcaacggcggccacttcctgagaatcctgtag

SEQ ID NO: 10713 - DNA, 468 bp, synthetic construct; identical to SEQ ID NO: 10708
  misc_feature 1..468: note = Description of Artificial Sequence: Synthetic coding sequence
  source 1..468: mol_type = other DNA

SEQ ID NO: 10714 - DNA, 468 bp, synthetic construct; identical to SEQ ID NO: 10708
  misc_feature 1..468: note = Description of Artificial Sequence: Synthetic coding sequence
  source 1..468: mol_type = other DNA

SEQ ID NO: 10715 - DNA, 183 bp, synthetic construct
  misc_feature 1..183: note = Description of Artificial Sequence: Synthetic coding sequence
  source 1..183: mol_type = other DNA
atggccgagggcgagatcaccaccttcaccgccctgaccgagaagttcaacctgccccccggcaactacaagaagcccaagctgctgtactgcagcaacggcggccacttcctgagaatcctgcccgacggcaccgtggacggcaccagagacagaagcgaccagcacaccgacaccaagtag

SEQ ID NO: 10716 - DNA, 627 bp, synthetic construct
  misc_feature 1..627: note = Description of Artificial Sequence: Synthetic coding sequence
  source 1..627: mol_type = other DNA
atgtggaagtggatcctgacccactgcgccagcgccttcccccacctgcccggctgctgctgctgctgcttcctgctgctgttcctggtgagcagcgtgcccgtgacctgccaggccctgggccaggacatggtgagccccgaggccaccaacagcagcagcagcagcttcagcagccccagcagcgccggcagacacgtgagaagctacaaccacctgcagggcgacgtgagatggagaaagctgttcagcttcaccaagtacttcctgaagatcgagaagaacggcaaggtgagcggcaccaagaaggagaactgcccctacagcatcctggagatcaccagcgtggagatcggcgtggtggccgtgaaggccatcaacagcaactactacctggccatgaacaagaagggcaagctgtacggcagcaaggagttcaacaacgactgcaagctgaaggagagaatcgaggagaacggctacaacacctacgccagcttcaactggcagcacaacggcagacagatgtacgtggccctgaacggcaagggcgcccccagaagaggccagaagaccagaagaaagaacaccagcgcccacttcctgcccatggtggtgcacagctag

SEQ ID NO: 10717 - DNA, 201 bp, synthetic construct
  misc_feature 1..201: note = Description of Artificial Sequence: Synthetic coding sequence
  source 1..201: mol_type = other DNA
atgtggaagtggatcctgacccactgcgccagcgccttcccccacctgcccggctgctgctgctgctgcttcctgctgctgttcctggtgagcagcgtgcccgtgacctgccaggccctgggccaggacatggtgagccccgaggccaccaacagcagcagcagcagcttcagcagccccagcagcgccggcagacactag

SEQ ID NO: 10718 - DNA, 867 bp, synthetic construct
  misc_feature 1..867: note = Description of Artificial Sequence: Synthetic coding sequence
  source 1..867: mol_type = other DNA
ctggtgggcgtgggcggcggcgacgtggaggacgtgacccccagacccggcggctgccagatcagcggcagaggcgccagaggctgcaacggcatccccggcgccgccgcctgggaggccgccctgcccagaagaagacccagaagacaccccagcgtgaaccccagaagcagagccgccggcagccccagaaccagaggcagaagaaccgaggagagacccagcggcagcagactgggcgacagaggcagaggcagagccctgcccggcggcagactgggcggcagaggcagaggcagagcccccgagagagtgggcggcagaggcagaggcagaggcaccgccgcccccagagccgcccccgccgccagaggcagcagacccggccccgccggcaccatggccgccggcagcatcaccaccctgcccgccctgcccgaggacggcggcagcggcgccttcccccccggccacttcaaggaccccaagagactgtactgcaagaacggcggcttcttcctgagaatccaccccgacggcagagtggacggcgtgagagagaagagcgacccccacatcaagctgcagctgcaggccgaggagagaggcgtggtgagcatcaagggcgtgtgcgccaacagatacctggccatgaaggaggacggcagactgctggccagcaagtgcgtgaccgacgagtgcttcttcttcgagagactggagagcaacaactacaacacctacagaagcagaaagtacaccagctggtacgtggccctgaagagaaccggccagtacaagctgggcagcaagaccggccccggccagaaggccatcctgttcctgcccatgagcgccaagagctag

SEQ ID NO: 10719 - DNA, 585 bp, synthetic construct
  misc_feature 1..585: note = Description of Artificial Sequence: Synthetic coding sequence
  source 1..585: mol_type = other DNA
atgcacaagtggatcctgacctggatcctgcccaccctgctgtacagaagctgcttccacatcatctgcctggtgggcaccatcagcctggcctgcaacgacatgacccccgagcagatggccaccaacgtgaactgcagcagccccgagagacacaccagaagctacgactacatggagggcggcgacatcagagtgagaagactgttctgcagaacccagtggtacctgagaatcgacaagagaggcaaggtgaagggcacccaggagatgaagaacaactacaacatcatggagatcagaaccgtggccgtgggcatcgtggccatcaagggcgtggagagcgagttctacctggccatgaacaaggagggcaagctgtacgccaagaaggagtgcaacgaggactgcaacttcaaggagctgatcctggagaaccactacaacacctacgccagcgccaagtggacccacaacggcggcgagatgttcgtggccctgaaccagaagggcatccccgtgagaggcaagaagaccaagaaggagcagaagaccgcccacttcctgcccatggccatcacctag

SEQ ID NO: 10720 - DNA, 585 bp, synthetic construct; identical to SEQ ID NO: 10719
  misc_feature 1..585: note = Description of Artificial Sequence: Synthetic coding sequence
  source 1..585: mol_type = other DNA

SEQ ID NO: 10721 - DNA, 705 bp, synthetic construct
  misc_feature 1..705: note = Description of Artificial Sequence: Synthetic coding sequence
  source 1..705: mol_type = other DNA
atgaagatctgcagcctgaccctgctgagcttcctgctgctggccgcccaggtgctgctggtggagggcaagaagaaggtgaagaacggcctgcacagcaaggtggtgagcgagcagaaggacaccctgggcaacacccagatcaagcagaagagcagacccggcaacaagggcaagttcgtgaccaaggaccaggccaactgcagatgggccgccaccgagcaggaggagggcatcagcctgaaggtggagtgcacccagctggaccacgagttcagctgcgtgttcgccggcaaccccaccagctgcctgaagctgaaggacgagagagtgtactggaagcaggtggccagaaacctgagaagccagaaggacatctgcagatacagcaagaccgccgtgaagaccagagtgtgcagaaaggacttccccgagagcagcctgaagctggtgagcagcaccctgttcggcaacaccaagcccagaaaggagaagaccgagatgagccccagagagcacatcaagggcaaggagaccacccccagcagcctggccgtgacccagaccatggccaccaaggcccccgagtgcgtggaggaccccgacatggccaaccagagaaagaccgccctggagttctgcggcgagacctggagcagcctgtgcaccttcttcctgagcatcgtgcaggacaccagctgctag

SEQ ID NO: 10722 - DNA, 705 bp, synthetic construct; identical to SEQ ID NO: 10721
  misc_feature 1..705: note = Description of Artificial Sequence: Synthetic coding sequence
  source 1..705: mol_type = other DNA

SEQ ID NO: 10723 - DNA, 2421 bp, synthetic construct
  misc_feature 1..2421: note = Description of Artificial Sequence: Synthetic coding sequence
  source 1..2421: mol_type = other DNA
atgggcgcccccgcctgcgccctggccctgtgcgtggccgtggccatcgtggccggcgccagcagcgagagcctgggcaccgagcagagagtggtgggcagagccgccgaggtgcccggccccgagcccggccagcaggagcagctggtgttcggcagcggcgacgccgtggagctgagctgccccccccccggcggcggccccatgggccccaccgtgtgggtgaaggacggcaccggcctggtgcccagcgagagagtgctggtgggcccccagagactgcaggtgctgaacgccagccacgaggacagcggcgcctacagctgcagacagagactgacccagagagtgctgtgccacttcagcgtgagagtgaccgacgcccccagcagcggcgacgacgaggacggcgaggacgaggccgaggacaccggcgtggacaccggcgccccctactggaccagacccgagagaatggacaagaagctgctggccgtgcccgccgccaacaccgtgagattcagatgccccgccgccggcaaccccacccccagcatcagctggctgaagaacggcagagagttcagaggcgagcacagaatcggcggcatcaagctgagacaccagcagtggagcctggtgatggagagcgtggtgcccagcgacagaggcaactacacctgcgtggtggagaacaagttcggcagcatcagacagacctacaccctggacgtgctggagagaagcccccacagacccatcctgcaggccggcctgcccgccaaccagaccgccgtgctgggcagcgacgtggagttccactgcaaggtgtacagcgacgcccagccccacatccagtggctgaagcacgtggaggtgaacggcagcaaggtgggccccgacggcaccccctacgtgaccgtgctgaagaccgccggcgccaacaccaccgacaaggagctggaggtgctgagcctgcacaacgtgaccttcgaggacgccggcgagtacacctgcctggccggcaacagcatcggcttcagccaccacagcgcctggctggtggtgctgcccgccgaggaggagctggtggaggccgacgaggccggcagcgtgtacgccggcatcctgagctacggcgtgggcttcttcctgttcatcctggtggtggccgccgtgaccctgtgcagactgagaagcccccccaagaagggcctgggcagccccaccgtgcacaagatcagcagattccccctgaagagacaggtgagcctggagagcaacgccagcatgagcagcaacacccccctggtgagaatcgccagactgagcagcggcgagggccccaccctggccaacgtgagcgagctggagctgcccgccgaccccaagtgggagctgagcagagccagactgaccctgggcaagcccctgggcgagggctgcttcggccaggtggtgatggccgaggccatcggcatcgacaaggacagagccgccaagcccgtgaccgtggccgtgaagatgctgaaggacgacgccaccgacaaggacctgagcgacctggtgagcgagatggagatgatgaagatgatcggcaagcacaagaacatcatcaacctgctgggcgcctgcacccagggcggccccctgtacgtgctggtggagtacgccgccaagggcaacctgagagagttcctgagagccagaagaccccccggcctggactacagcttcgacacctgcaagccccccgaggagcagctgaccttcaaggacctggtgagctgcgcctaccaggtggccagaggcatggagtacctggccagccagaagtgcatccacagagacctggccgccagaaacgtgctggtgaccgaggacaacgtgatgaagatcgccgacttcggcctggccagagacgtgcacaacctggactactacaagaagaccaccaacggcagactgcccgtgaagtggatggcccccgaggccctgttcgacagagtgtacacccaccagagcgacgtgtggagcttcggcgtgctgctgtgggagatcttcaccctgggcggcagcccctaccccggcatccccgtggaggagctgttcaagctgctgaaggagggccacagaatggacaagcccgccaactgcacccacgacctgtacatgatcatgagagagtgctggcacgccgcccccagccagagacccaccttcaagcagctggtggaggacctggacagagtgctgaccgtgaccagcaccgacgagtacctggacctgagcgcccccttcgagcagtacagccccggcggccaggacacccccagcagcagcagcagcggcgacgacagcgtgttcgcccacgacctgctgccccccgccccccccagcagcggcggcagcagaacctag

SEQ ID NO: 10724 - DNA, 513 bp, synthetic construct
  misc_feature 1..513: note = Description of Artificial Sequence: Synthetic coding sequence
  source 1..513: mol_type = other DNA
gagtacctggacctgagcgcccccttcgagcagtacagccccggcggccaggacacccccagcagcagcagcagcggcgacgacagcgtgttcgcccacgacctgctggccaccggcccccagcagtgcgagggcagcctggccgcccaccccgccgccggcgcccagcccctgcccggcatgagactgagcgccgacggcgagaccgccacccagagcttcggcctgtgcgtgtgcgtgtgcgtgtgcgtgtgctgcaccagcgcctgcgcctgcgtgagagcccacctggccagcagatgcagaggcaccctgggcgtgcccgccgccgtgcagagaagccccgactggtgctgcagcaccgagggccccctgttctggggcgaccccgtgcagaacgtgagcggccccaccagatgggaccccggccagggcgccggccccgacatgagacccctgcccctgcaccacggcaccagccagggcctgggccccagccacacccagagctag

SEQ ID NO: 10725 - DNA, 2427 bp, synthetic construct
  misc_feature 1..2427: note = Description of Artificial Sequence: Synthetic coding sequence
  source 1..2427: mol_type = other DNA
atgggcgcccccgcctgcgccctggccctgtgcgtggccgtggccatcgtggccggcgccagcagcgagagcctgggcaccgagcagagagtggtgggcagagccgccgaggtgcccggccccgagcccggccagcaggagcagctggtgttcggcagcggcgacgccgtggagctgagctgccccccccccggcggcggccccatgggccccaccgtgtgggtgaaggacggcaccggcctggtgcccagcgagagagtgctggtgggcccccagagactgcaggtgctgaacgccagccacgaggacagcggcgcctacagctgcagacagagactgacccagagagtgctgtgccacttcagcgtgagagtgaccgacgcccccagcagcggcgacgacgaggacggcgaggacgaggccgaggacaccggcgtggacaccggcgccccctactggaccagacccgagagaatggacaagaagctgctggccgtgcccgccgccaacaccgtgagattcagatgccccgccgccggcaaccccacccccagcatcagctggctgaagaacggcagagagttcagaggcgagcacagaatcggcggcatcaagctgagacaccagcagtggagcctggtgatggagagcgtggtgcccagcgacagaggcaactacacctgcgtggtggagaacaagttcggcagcatcagacagacctacaccctggacgtgctggagagaagcccccacagacccatcctgcaggccggcctgcccgccaaccagaccgccgtgctgggcagcgacgtggagttccactgcaaggtgtacagcgacgcccagccccacatccagtggctgaagcacgtggaggtgaacggcagcaaggtgggccccgacggcaccccctacgtgaccgtgctgaagagctggatcagcgagagcgtggaggccgacgtgagactgagactggccaacgtgagcgagagagacggcggcgagtacctgtgcagagccaccaacttcatcggcgtggccgagaaggccttctggctgagcgtgcacggccccagagccgccgaggaggagctggtggaggccgacgaggccggcagcgtgtacgccggcatcctgagctacggcgtgggcttcttcctgttcatcctggtggtggccgccgtgaccctgtgcagactgagaagcccccccaagaagggcctgggcagccccaccgtgcacaagatcagcagattccccctgaagagacaggtgagcctggagagcaacgccagcatgagcagcaacacccccctggtgagaatcgccagactgagcagcggcgagggccccaccctggccaacgtgagcgagctggagctgcccgccgaccccaagtgggagctgagcagagccagactgaccctgggcaagcccctgggcgagggctgcttcggccaggtggtgatggccgaggccatcggcatcgacaaggacagagccgccaagcccgtgaccgtggccgtgaagatgctgaaggacgacgccaccgacaaggacctgagcgacctggtgagcgagatggagatgatgaagatgatcggcaagcacaagaacatcatcaacctgctgggcgcctgcacccagggcggccccctgtacgtgctggtggagtacgccgccaagggcaacctgagagagttcctgagagccagaagaccccccggcctggactacagcttcgacacctgcaagccccccgaggagcagctgaccttcaaggacctggtgagctgcgcctaccaggtggccagaggcatggagtacctggccagccagaagtgcatccacagagacctggccgccagaaacgtgctggtgaccgaggacaacgtgatgaagatcgccgacttcggcctggccagagacgtgcacaacctggactactacaagaagaccaccaacggcagactgcccgtgaagtggatggcccccgaggccctgttcgacagagtgtacacccaccagagcgacgtgtggagcttcggcgtgctgctgtgggagatcttcaccctgggcggcagcccctaccccggcatccccgtggaggagctgttcaagctgctgaaggagggccacagaatggacaagcccgccaactgcacccacgacctgtacatgatcatgagagagtgctggcacgccgcccccagccagagacccaccttcaagcagctggtggaggacctggacagagtgctgaccgtgaccagcaccgacgagtacctggacctgagcgcccccttcgagcagtacagccccggcggccaggacacccccagcagcagcagcagcggcgacgacagcgtgttcgcccacgacctgctgccccccgccccccccagcagcggcggcagcagaacctag

SEQ ID NO: 10726 - DNA, 2085 bp, synthetic construct
  misc_feature 1..2085: note = Description of Artificial Sequence: Synthetic coding sequence
  source 1..2085: mol_type = other DNA
atgggcgcccccgcctgcgccctggccctgtgcgtggccgtggccatcgtggccggcgccagcagcgagagcctgggcaccgagcagagagtggtgggcagagccgccgaggtgcccggccccgagcccggccagcaggagcagctggtgttcggcagcggcgacgccgtggagctgagctgccccccccccggcggcggccccatgggccccaccgtgtgggtgaaggacggcaccggcctggtgcccagcgagagagtgctggtgggcccccagagactgcaggtgctgaacgccagccacgaggacagcggcgcctacagctgcagacagagactgacccagagagtgctgtgccacttcagcgtgagagtgaccgacgcccccagcagcggcgacgacgaggacggcgaggacgaggccgaggacaccggcgtggacaccggcgccccctactggaccagacccgagagaatggacaagaagctgctggccgtgcccgccgccaacaccgtgagattcagatgccccgccgccggcaaccccacccccagcatcagctggctgaagaacggcagagagttcagaggcgagcacagaatcggcggcatcaagctgagacaccagcagtggagcctggtgatggagagcgtggtgcccagcgacagaggcaactacacctgcgtggtggagaacaagttcggcagcatcagacagacctacaccctggacgtgctggagagaagcccccacagacccatcctgcaggccggcctgcccgccaaccagaccgccgtgctgggcagcgacgtggagttccactgcaaggtgtacagcgacgcccagccccacatccagtggctgaagcacgtggaggtgaacggcagcaaggtgggccccgacggcaccccctacgtgaccgtgctgaaggtgagcctggagagcaacgccagcatgagcagcaacacccccctggtgagaatcgccagactgagcagcggcgagggccccaccctggccaacgtgagcgagctggagctgcccgccgaccccaagtgggagctgagcagagccagactgaccctgggcaagcccctgggcgagggctgcttcggccaggtggtgatggccgaggccatcggcatcgacaaggacagagccgccaagcccgtgaccgtggccgtgaagatgctgaaggacgacgccaccgacaaggacctgagcgacctggtgagcgagatggagatgatgaagatgatcggcaagcacaagaacatcatcaacctgctgggcgcctgcacccagggcggccccctgtacgtgctggtggagtacgccgccaagggcaacctgagagagttcctgagagccagaagaccccccggcctggactacagcttcgacacctgcaagccccccgaggagcagctgaccttcaaggacctggtgagctgcgcctaccaggtggccagaggcatggagtacctggccagccagaagtgcatccacagagacctggccgccagaaacgtgctggtgaccgaggacaacgtgatgaagatcgccgacttcggcctggccagagacgtgcacaacctggactactacaagaagaccaccaacggcagactgcccgtgaagtggatggcccccgaggccctgttcgacagagtgtacacccaccagagcgacgtgtggagcttcggcgtgctgctgtgggagatcttcaccctgggcggcagcccctaccccggcatccccgtggaggagctgttcaagctgctgaaggagggccacagaatggacaagcccgccaactgcacccacgacctgtacatgatcatgagagagtgctggcacgccgcccccagccagagacccaccttcaagcagctggtggaggacctggacagagtgctgaccgtgaccagcaccgacgagtacctggacctgagcgcccccttcgagcagtacagccccggcggccaggacacccccagcagcagcagcagcggcgacgacagcgtgttcgcccacgacctgctgccccccgccccccccagcagcggcggcagcagaacctag

SEQ ID NO: 10727 - DNA, 2421 bp, synthetic construct; identical to SEQ ID NO: 10723
  misc_feature 1..2421: note = Description of Artificial Sequence: Synthetic coding sequence
  source 1..2421: mol_type = other DNA

SEQ ID NO: 10728 - DNA, 2379 bp, synthetic construct
  misc_feature 1..2379: note = Description of Artificial Sequence: Synthetic coding sequence
  source 1..2379: mol_type = other DNA
atgggcgcccccgcctgcgccctggccctgtgcgtggccgtggccatcgtggccggcgccagcagcgagagcctgggcaccgagcagagagtggtgggcagagccgccgaggtgcccggccccgagcccggccagcaggagcagctggtgttcggcagcggcgacgccgtggagctgagctgccccccccccggcggcggccccatgggccccaccgtgtgggtgaaggacggcaccggcctggtgcccagcgagagagtgctggtgggcccccagagactgcaggtgctgaacgccagccacgaggacagcggcgcctacagctgcagacagagactgacccagagagtgctgtgccacttcagcgtgagagtgaccgacgcccccagcagcggcgacgacgaggacggcgaggacgaggccgaggacaccggcgtggacaccggcgccccctactggaccagacccgagagaatggacaagaagctgctggccgtgcccgccgccaacaccgtgagattcagatgccccgccgccggcaaccccacccccagcatcagctggctgaagaacggcagagagttcagaggcgagcacagaatcggcggcatcaagctgagacaccagcagtggagcctggtgatggagagcgtggtgcccagcgacagaggcaactacacctgcgtggtggagaacaagttcggcagcatcagacagacctacaccctggacgtgctggagagaagcccccacagacccatcctgcaggccggcctgcccgccaaccagaccgccgtgctgggcagcgacgtggagttccactgcaaggtgtacagcgacgcccagccccacatccagtggctgaagcacgtggaggtgaacggcagcaaggtgggccccgacggcaccccctacgtgaccgtgctgaagaccgccggcgccaacaccaccgacaaggagctggaggtgctgagcctgcacaacgtgaccttcgaggacgccggcgagtacacctgcctggccggcaacagcatcggcttcagccaccacagcgcctggctggtggtgctgcccgccgaggaggagctggtggaggccgacgaggccggcagcgtgtacgccggcatcctgagctacggcgtgggcttcttcctgttcatcctggtggtggccgccgtgaccctgtgcagactgagaagcccccccaagaagggcctgggcagccccaccgtgcacaagatcagcagattccccctgaagagacagcaggtgagcctggagagcaacgccagcatgagcagcaacacccccctggtgagaatcgccagactgagcagcggcgagggccccaccctggccaacgtgagcgagctggagctgcccgccgaccccaagtgggagctgagcagagccagactgaccctgggcaagcccctgggcgagggctgcttcggccaggtggtgatggccgaggccatcggcatcgacaaggacagagccgccaagcccgtgaccgtggccgtgaagatgctgaaggacgacgccaccgacaaggacctgagcgacctggtgagcgagatggagatgatgaagatgatcggcaagcacaagaacatcatcaacctgctgggcgcctgcacccagggcggccccctgtacgtgctggtggagtacgccgccaagggcaacctgagagagttcctgagagccagaagaccccccggcctggactacagcttcgacacctgcaagccccccgaggagcagctgaccttcaaggacctggtgagctgcgcctaccaggtggccagaggcatggagtacctggccagccagaagtgcatccacagagacctggccgccagaaacgtgctggtgaccgaggacaacgtgatgaagatcgccgacttcggcctggccagagacgtgcacaacctggactactacaagaagaccaccaacctggtgctgtggggccccgccctgggcgacctgcacgccggcggcctgcccgtgcccagacacccctgcggcggcgccctgcaggccgccgagggcggccccccccacggccaggccagacagctgcacaccagacccgtgcacgaccacgccggcgtgctggcctgcagagccctgcccgaggcccacctgcaggccgccggcggcggccccggcccctgcccctacagagacgtgcacagaagagtgcccggccccgtgggcgccttcagagccgtgctgcccggctggcccggccacccccagctgcagctgctgagaggcagactgagagtgtgccccagacccgccgcccccggccccacccagcagtggggcctggccgacgtgaagggccactggagccccaccatgtag

SEQ ID NO: 10729 - DNA, 2409 bp, synthetic construct
  misc_feature 1..2409: note = Description of Artificial Sequence: Synthetic coding sequence
  source 1..2409: mol_type = other DNA
atgagactgctgctggccctgctgggcgtgctgctgagcgtgcccggcccccccgtgctgagcctggaggccagcgaggaggtggagctggagccctgcctggcccccagcctggagcagcaggagcaggagctgaccgtggccctgggccagcccgtgagactgtgctgcggcagagccgagagaggcggccactggtacaaggagggcagcagactggcccccgccggcagagtgagaggctggagaggcagactggagatcgccagcttcctgcccgaggacgccggcagatacctgtgcctggccagaggcagcatgatcgtgctgcagaacctgaccctgatcaccggcgacagcctgaccagcagcaacgacgacgaggaccccaagagccacagagaccccagcaacagacacagctacccccagcaggccccctactggacccacccccagagaatggagaagaagctgcacgccgtgcccgccggcaacaccgtgaagttcagatgccccgccgccggcaaccccacccccaccatcagatggctgaaggacggccaggccttccacggcgagaacagaatcggcggcatcagactgagacaccagcactggagcctggtgatggagagcgtggtgcccagcgacagaggcacctacacctgcctggtggagaacgccgtgggcagcatcagatacaactacctgctggacgtgctggagagaagcccccacagacccatcctgcaggccggcctgcccgccaacaccaccgccgtggtgggcagcgacgtggagctgctgtgcaaggtgtacagcgacgcccagccccacatccagtggctgaagcacatcgtgatcaacggcagcagcttcggcgccgacggcttcccctacgtgcaggtgctgaagaccgccgacatcaacagcagcgaggtggaggtgctgtacctgagaaacgtgagcgccgaggacgccggcgagtacacctgcctggccggcaacagcatcggcctgagctaccagagcgcctggctgaccgtgctgcccgaggaggaccccacctggaccgccgccgcccccgaggccagatacaccgacatcatcctgtacgccagcggcagcctggccctggccgtgctgctgctgctggccggcctgtacagaggccaggccctgcacggcagacaccccagaccccccgccaccgtgcagaagctgagcagattccccctggccagacagttcagcctggagagcggcagcagcggcaagagcagcagcagcctggtgagaggcgtgagactgagcagcagcggccccgccctgctggccggcctggtgagcctggacctgcccctggaccccctgtgggagttccccagagacagactggtgctgggcaagcccctgggcgagggctgcttcggccaggtggtgagagccgaggccttcggcatggaccccgccagacccgaccaggccagcaccgtggccgtgaagatgctgaaggacaacgccagcgacaaggacctggccgacctggtgagcgagatggaggtgatgaagctgatcggcagacacaagaacatcatcaacctgctgggcgtgtgcacccaggagggccccctgtacgtgatcgtggagtgcgccgccaagggcaacctgagagagttcctgagagccagaagaccccccggccccgacctgagccccgacggccccagaagcagcgagggccccctgagcttccccgtgctggtgagctgcgcctaccaggtggccagaggcatgcagtacctggagagcagaaagtgcatccacagagacctggccgccagaaacgtgctggtgaccgaggacaacgtgatgaagatcgccgacttcggcctggccagaggcgtgcaccacatcgactactacaagaagaccagcaacggcagactgcccgtgaagtggatggcccccgaggccctgttcgacagagtgtacacccaccagagcgacgtgtggagcttcggcatcctgctgtgggagatcttcaccctgggcggcagcccctaccccggcatccccgtggaggagctgttcagcctgctgagagagggccacagaatggacagacccccccactgcccccccgagctgtacggcctgatgagagagtgctggcacgccgcccccagccagagacccaccttcaagcagctggtggaggccctggacaaggtgctgctggccgtgagcgaggagtacctggacctgagactgaccttcggcccctacagccccagcggcggcgacgccagcagcacctgcagcagcagcgacagcgtgttcagccacgaccccctgcccctgggcagcagcagcttccccttcggcagcggcgtgcagacctag

SEQ ID NO: 10730 - DNA, 2289 bp, synthetic construct
  misc_feature 1..2289: note = Description of Artificial Sequence: Synthetic coding sequence
  source 1..2289: mol_type = other DNA
atgagactgctgctggccctgctgggcgtgctgctgagcgtgcccggcccccccgtgctgagcctggaggccagcgaggaggtggagctggagccctgcctggcccccagcctggagcagcaggagcaggagctgaccgtggccctgggccagcccgtgagactgtgctgcggcagagccgagagaggcggccactggtacaaggagggcagcagactggcccccgccggcagagtgagaggctggagaggcagactggagatcgccagcttcctgcccgaggacgccggcagatacctgtgcctggccagaggcagcatgatcgtgctgcagaacctgaccctgatcaccggcgacagcctgaccagcagcaacgacgacgaggaccccaagagccacagagaccccagcaacagacacagctacccccagcaggccccctactggacccacccccagagaatggagaagaagctgcacgccgtgcccgccggcaacaccgtgaagttcagatgccccgccgccggcaaccccacccccaccatcagatggctgaaggacggccaggccttccacggcgagaacagaatcggcggcatcagactgagacaccagcactggagcctggtgatggagagcgtggtgcccagcgacagaggcacctacacctgcctggtggagaacgccgtgggcagcatcagatacaactacctgctggacgtgctggagagaagcccccacagacccatcctgcaggccggcctgcccgccaacaccaccgccgtggtgggcagcgacgtggagctgctgtgcaaggtgtacagcgacgcccagccccacatccagtggctgaagcacatcgtgatcaacggcagcagcttcggcgccgacggcttcccctacgtgcaggtgctgaagaccgccgacatcaacagcagcgaggtggaggtgctgtacctgagaaacgtgagcgccgaggacgccggcgagtacacctgcctggccggcaacagcatcggcctgagctaccagagcgcctggctgaccgtgctgcccggcaccggcagaatcccccacctgacctgcgacagcctgacccccgccggcagaaccaagagccccaccctgcagttcagcctggagagcggcagcagcggcaagagcagcagcagcctggtgagaggcgtgagactgagcagcagcggccccgccctgctggccggcctggtgagcctggacctgcccctggaccccctgtgggagttccccagagacagactggtgctgggcaagcccctgggcgagggctgcttcggccaggtggtgagagccgaggccttcggcatggaccccgccagacccgaccaggccagcaccgtggccgtgaagatgctgaaggacaacgccagcgacaaggacctggccgacctggtgagcgagatggaggtgatgaagctgatcggcagacacaagaacatcatcaacctgctgggcgtgtgcacccaggagggccccctgtacgtgatcgtggagtgcgccgccaagggcaacctgagagagttcctgagagccagaagaccccccggccccgacctgagccccgacggccccagaagcagcgagggccccctgagcttccccgtgctggtgagctgcgcctaccaggtggccagaggcatgcagtacctggagagcagaaagtgcatccacagagacctggccgccagaaacgtgctggtgaccgaggacaacgtgatgaagatcgccgacttcggcctggccagaggcgtgcaccacatcgactactacaagaagaccagcaacggcagactgcccgtgaagtggatggcccccgaggccctgttcgacagagtgtacacccaccagagcgacgtgtggagcttcggcatcctgctgtgggagatcttcaccctgggcggcagcccctaccccggcatccccgtggaggagctgttcagcctgctgagagagggccacagaatggacagacccccccactgcccccccgagctgtacggcctgatgagagagtgctggcacgccgcccccagccagagacccaccttcaagcagctggtggaggccctggacaaggtgctgctggccgtgagcgaggagtacctggacctgagactgaccttcggcccctacagccccagcggcggcgacgccagcagcacctgcagcagcagcgacagcgtgttcagccacgaccccctgcccctgggcagcagcagcttccccttcggcagcggcgtgcagacctag

SEQ ID NO: 10731 - DNA, 3093 bp, synthetic construct
  misc_feature 1..3093: note = Description of Artificial Sequence: Synthetic coding sequence
  source 1..3093: mol_type = other DNA
ccctgcatgtggcaccagcagcacgtgccctgcgtgtgcgtgtgcccctacgtgtgcgtgtgcatgagagtgtgcgtgtgcgtgtgctggcccctgagctgcgccctgaacgccgtgtgcgtgacctgccccaagagcgtggccttcgccctgggcgtggccagcgccgcctgcggctgcgtgggcgtgaaggagtggtggctgctgcagcacgccctgcagagcgcctgcgccctgcacgtgagatgcgtgctgtgcacccaggaggccgccagcgacggcgccgccggcagcgccgacctgtgccccctgcccaccgagccctgcctggcccccagcctggagcagcaggagcaggagctgaccgtggccctgggccagcccgtgagactgtgctgcggcagagccgagagaggcggccactggtacaaggagggcagcagactggcccccgccggcagagtgagaggctggagaggcagactggagatcgccagcttcctgcccgaggacgccggcagatacctgtgcctggccagaggcagcatgatcgtgctgcagaacctgaccctgatcaccggcgacagcccccccgccaccatgatgagaacccccagccccatcggcacccccagaatcggcaccgtgacccccagcaaggtgagcagaagccccagaacctgcgtgcccgccgccgcccacctgatcaccgagaagagaagacccgtgtgggagcacaccgtgatcctgggcgccttcccctgcccccccgccccctactggacccacccccagagaatggagaagaagctgcacgccgtgcccgccggcaacaccgtgaagttcagatgccccgccgccggcaaccccacccccaccatcagatggctgaaggacggccaggccttccacggcgagaacagaatcggcggcatcagactgagacaccagcactggagcctggtgatggagagcgtggtgcccagcgacagaggcacctacacctgcctggtggagaacgccgtgggcagcatcagatacaactacctgctggacgtgctggagagaagcccccacagacccatcctgcaggccggcctgcccgccaacaccaccgccgtggtgggcagcgacgtggagctgctgtgcaaggtgtacagcgacgcccagccccacatccagtggctgaagcacatcgtgatcaacggcagcagcttcggcgccgacggcttcccctacgtgcaggtgctgaagaccgccgacatcaacagcagcgaggtggaggtgctgtacctgagaaacgtgagcgccgaggacgccggcgagtacacctgcctggccggcaacagcatcggcctgagctaccagagcgcctggctgaccgtgctgcccggcgagcacctgaagggccaggagatgctgagagacgcccccctgggccagcagtggggcctgtggcccgtgggctggagcgtgagcgtgggcctgtggggcctggcctggggcgccgtgtgcggcttcgtgggcctgagctgcatgaccgcccccctgtgcctgagcaccagaggcagaccctgcgacagactgctgagatgcggctgcctgggcctgggcatcaccaccgccagcagcgtgtgcgtgcccacctacgtgggcagctgggagggcctgggctgcaccggcagacccgtgagccccctgaccagcctgagcgtgtgcgtgtgcccctgcgccagagccgaggaggaccccacctggaccgccgccgcccccgaggccagatacaccgacatcatcctgtacgccagcggcagcctggccctggccgtgctgctgctgctggccggcctgtacagaggccaggccctgcacggcagacaccccagaccccccgccaccgtgcagaagctgagcagattccccctggccagacagttcagcctggagagcggcagcagcggcaagagcagcagcagcctggtgagaggcgtgagactgagcagcagcggccccgccctgctggccggcctggtgagcctggacctgcccctggaccccctgtgggagttccccagagacagactggtgctgggcaagcccctgggcgagggctgcttcggccaggtggtgagagccgaggccttcggcatggaccccgccagacccgaccaggccagcaccgtggccgtgaagatgctgaaggacaacgccagcgacaaggacctggccgacctggtgagcgagatggaggtgatgaagctgatcggcagacacaagaacatcatcaacctgctgggcgtgtgcacccaggagggccccctgtacgtgatcgtggagtgcgccgccaagggcaacctgagagagttcctgagagccagaagaccccccggccccgacctgagccccgacggccccagaagcagcgagggccccctgagcttccccgtgctggtgagctgcgcctaccaggtggccagaggcatgcagtacctggagagcagaaagtgcatccacagagacctggccgccagaaacgtgctggtgaccgaggacaacgtgatgaagatcgccgacttcggcctggccagaggcgtgcaccacatcgactactacaagaagaccagcaacggcagactgcccgtgaagtggatggcccccgaggccctgttcgacagagtgtacacccaccagagcgacgtgtggagcttcggcatcctgctgtgggagatcttcaccctgggcggcagcccctaccccggcatccccgtggaggagctgttcagcctgctgagagagggccacagaatggacagacccccccactgcccccccgagctgtacggcctgatgagagagtgctggcacgccgcccccagccagagacccaccttcaagcagctggtggaggccctggacaaggtgctgctggccgtgagcgaggagtacctggacctgagactgaccttcggcccctacagccccagcggcggcgacgccagcagcacctgcagcagcagcgacagcgtgttcagccacgaccccctgcccctgggcagcagcagcttccccttcggcagcggcgtgcagacctag

SEQ ID NO: 10732 - DNA, 2289 bp, synthetic construct; identical to SEQ ID NO: 10730
  misc_feature 1..2289: note = Description of Artificial Sequence: Synthetic coding sequence
  source 1..2289: mol_type = other DNA

SEQ ID NO: 10733 - DNA, 2409 bp, synthetic construct; identical to SEQ ID NO: 10729
  misc_feature 1..2409: note = Description of Artificial Sequence: Synthetic coding sequence
  source 1..2409: mol_type = other DNA

SEQ ID NO: 10734 - DNA, 606 bp, synthetic construct
  misc_feature 1..606: note = Description of Artificial Sequence: Synthetic coding sequence
  source 1..606: mol_type = other DNA
atgagactgctgctggccctgctgggcgtgctgctgagcgtgcccggcccccccgtgctgagcctggaggccagcgaggaggtggagctggagccctgcctggcccccagcctggagcagcaggagcaggagctgaccgtggccctgggccagcccgtgagactgtgctgcggcagagccgagagaggcggccactggtacaaggagggcagcagactggcccccgccggcagagtgagaggctggagaggcagactggagatcgccagcttcctgcccgaggacgccggcagatacctgtgcctggccagaggcagcatgatcgtgctgcagaacctgaccctgatcaccggcgacagcctgaccagcagcaacgacgacgaggaccccaagagccacagagaccccagcaacagacacagctacccccagcaggccccctactggacccacccccagagaatggagaagaagctgcacgccgtgcccgccggcaacaccgtgaagttcagatgccccgccgccggcaaccccacccccaccatcagatggctgaaggacggccaggccttccacggcgagaacagaatcggcggcatcagatag

SEQ ID NO: 10735 - DNA, 264 bp, synthetic construct
  misc_feature 1..264: note = Description of Artificial Sequence: Synthetic coding sequence
  source 1..264: mol_type = other DNA
atgagactgctgctggccctgctgggcgtgctgctgagcgtgcccggcccccccgtgctgagcctggaggccagcgaggaggtggagctggagccctgcctggcccccagcctggagcagcaggagcaggagctgaccgtggccctgggccagcccgtgagactgtgctgcggcagagccgagagaggcggccactggtacaaggagggcagcagactggcccccgccggcagagtgagaggctggagaggcagactggagtag

SEQ ID NO: 10736 - DNA, 327 bp, synthetic construct
  misc_feature 1..327: note = Description of Artificial Sequence: Synthetic coding sequence
  source 1..327: mol_type = other DNA
atgagactgctgctggccctgctgggcgtgctgctgagcgtgcccggcccccccgtgctgagcctggaggccagcgaggaggtggagctggagccctgcctggcccccagcctggagcagcaggagcaggagctgaccgtggccctgggccagcccgtgagactgtgctgcggcagagccgagagaggcggccactggtacaaggagggcagcagactggcccccgccggcagagtgagaggctggagaggcagactggagatcgccagcttcctgcccgaggacgccggcagatacctgtgcctggccagaggcagcatgatctag

SEQ ID NO: 10737 - DNA, 345 bp, synthetic construct
  misc_feature 1..345: note = Description of Artificial Sequence: Synthetic coding sequence
  source 1..345: mol_type = other DNA
atgagactgctgctggccctgctgggcgtgctgctgagcgtgcccggcccccccgtgctgagcctggaggccagcgaggaggtggagctggagccctgcctggcccccagcctggagcagcaggagcaggagctgaccgtggccctgggccagcccgtgagactgtgctgcggcagagccgagagaggcggccactggtacaaggagggcagcagactggcccccgccggcagagtgagaggctggagaggcagactggagatcgccagcttcctgcccgaggacgccggcagatacctgtgcctggccagaggcagcatgatcgtgctgcagaacctgacctag

SEQ ID NO: 10738 - DNA, 7164 bp, synthetic construct
  misc_feature 1..7164: note = Description of Artificial Sequence: Synthetic coding sequence
  source 1..7164: mol_type = other DNA
atgctgagaggccccggccccggcctgctgctgctggccgtgcagtgcctgggcaccgccgtgcccagcaccggcgccagcaagagcaagagacaggcccagcagatggtgcagccccagagccccgtggccgtgagccagagcaagcccggctgctacgacaacggcaagcactaccagatcaaccagcagtgggagagaacctacctgggcaacgccctggtgtgcacctgctacggcggcagcagaggcttcaactgcgagagcaagcccgaggccgaggagacctgcttcgacaagtacaccggcaacacctacagagtgggcgacacctacgagagacccaaggacagcatgatctgggactgcacctgcatcggcgccggcagaggcagaatcagctgcaccatcgccaacagatgccacgagggcggccagagctacaagatcggcgacacctggagaagaccccacgagaccggcggctacatgctggagtgcgtgtgcctgggcaacggcaagggcgagtggacctgcaagcccatcgccgagaagtgcttcgaccacgccgccggcaccagctacgtggtgggcgagacctgggagaagccctaccagggctggatgatggtggactgcacctgcctgggcgagggcagcggcagaatcacctgcaccagcagaaacagatgcaacgaccaggacaccagaaccagctacagaatcggcgacacctggagcaagaaggacaacagaggcaacctgctgcagtgcatctgcaccggcaacggcagaggcgagtggaagtgcgagagacacaccagcgtgcagaccaccagcagcggcagcggccccttcaccgacgtgagagccgccgtgtaccagccccagccccacccccagccccccccctacggccactgcgtgaccgacagcggcgtggtgtacagcgtgggcatgcagtggctgaagacccagggcaacaagcagatgctgtgcacctgcctgggcaacggcgtgagctgccaggagaccgccgtgacccagacctacggcggcaacagcaacggcgagccctgcgtgctgcccttcacctacaacggcagaaccttctacagctgcaccaccgagggcagacaggacggccacctgtggtgcagcaccaccagcaactacgagcaggaccagaagtacagcttctgcaccgaccacaccgtgctggtgcagaccagaggcggcaacagcaacggcgccctgtgccacttccccttcctgtacaacaaccacaactacaccgactgcaccagcgagggcagaagagacaacatgaagtggtgcggcaccacccagaactacgacgccgaccagaagttcggcttctgccccatggccgcccacgaggagatctgcaccaccaacgagggcgtgatgtacagaatcggcgaccagtgggacaagcagcacgacatgggccacatgatgagatgcacctgcgtgggcaacggcagaggcgagtggacctgcatcgcctacagccagctgagagaccagtgcatcgtggacgacatcacctacaacgtgaacgacaccttccacaagagacacgaggagggccacatgctgaactgcacctgcttcggccagggcagaggcagatggaagtgcgaccccgtggaccagtgccaggacagcgagaccggcaccttctaccagatcggcgacagctgggagaagtacgtgcacggcgtgagataccagtgctactgctacggcagaggcatcggcgagtggcactgccagcccctgcagacctaccccagcagcagcggccccgtggaggtgttcatcaccgagacccccagccagcccaacagccaccccatccagtggaacgccccccagcccagccacatcagcaagtacatcctgagatggagacccaagaacagcgtgggcagatggaaggaggccaccatccccggccacctgaacagctacaccatcaagggcctgaagcccggcgtggtgtacgagggccagctgatcagcatccagcagtacggccaccaggaggtgaccagattcgacttcaccaccaccagcaccagcacccccgtgaccagcaacaccgtgaccggcgagaccacccccttcagccccctggtggccaccagcgagagcgtgaccgagatcaccgccagcagcttcgtggtgagctgggtgagcgccagcgacaccgtgagcggcttcagagtggagtacgagctgagcgaggagggcgacgagccccagtacctggacctgcccagcaccgccaccagcgtgaacatccccgacctgctgcccggcagaaagtacatcgtgaacgtgtaccagatcagcgaggacggcgagcagagcctgatcctgagcaccagccagaccaccgcccccgacgccccccccgacaccaccgtggaccaggtggacgacaccagcatcgtggtgagatggagcagaccccaggcccccatcaccggctacagaatcgtgtacagccccagcgtggagggcagcagcaccgagctgaacctgcccgagaccgccaacagcgtgaccctgagcgacctgcagcccggcgtgcagtacaacatcaccatctacgccgtggaggagaaccaggagagcacccccgtggtgatccagcaggagaccaccggcacccccagaagcgacaccgtgcccagccccagagacctgcagttcgtggaggtgaccgacgtgaaggtgaccatcatgtggaccccccccgagagcgccgtgaccggctacagagtggacgtgatccccgtgaacctgcccggcgagcacggccagagactgcccatcagcagaaacaccttcgccgaggtgaccggcctgagccccggcgtgacctactacttcaaggtgttcgccgtgagccacggcagagagagcaagcccctgaccgcccagcagaccaccaagctggacgcccccaccaacctgcagttcgtgaacgagaccgacagcaccgtgctggtgagatggaccccccccagagcccagatcaccggctacagactgaccgtgggcctgaccagaagaggccagcccagacagtacaacgtgggccccagcgtgagcaagtaccccctgagaaacctgcagcccgccagcgagtacaccgtgagcctggtggccatcaagggcaaccaggagagccccaaggccaccggcgtgttcaccaccctgcagcccggcagcagcatccccccctacaacaccgaggtgaccgagaccaccatcgtgatcacctggacccccgcccccagaatcggcttcaagctgggcgtgagacccagccagggcggcgaggcccccagagaggtgaccagcgacagcggcagcatcgtggtgagcggcctgacccccggcgtggagtacgtgtacaccatccaggtgctgagagacggccaggagagagacgcccccatcgtgaacaaggtggtgacccccctgagcccccccaccaacctgcacctggaggccaaccccgacaccggcgtgctgaccgtgagctgggagagaagcaccacccccgacatcaccggctacagaatcaccaccacccccaccaacggccagcagggcaacagcctggaggaggtggtgcacgccgaccagagcagctgcaccttcgacaacctgagccccggcctggagtacaacgtgagcgtgtacaccgtgaaggacgacaaggagagcgtgcccatcagcgacaccatcatccccgaggtgccccagctgaccgacctgagcttcgtggacatcaccgacagcagcatcggcctgagatggacccccctgaacagcagcaccatcatcggctacagaatcaccgtggtggccgccggcgagggcatccccatcttcgaggacttcgtggacagcagcgtgggctactacaccgtgaccggcctggagcccggcatcgactacgacatcagcgtgatcaccctgatcaacggcggcgagagcgcccccaccaccctgacccagcagaccgccgtgcccccccccaccgacctgagattcttcagcgacatcaccgccaacagcttcaccgtgcactggatcgcccccagagccaccatcaccggctacagaatcagacaccaccccgagcacttcagcggcagacccagagaggacagagtgccccacagcagaaacagcatcaccctgaccaacctgacccccggcaccgagtacgtggtgagcatcgtggccctgaacggcagagaggagagccccctgctgatcggccagcagagcaccgtgagcgacgtgcccagagacctggaggtggtggccgccacccccaccagcctgctgatcagctgggacgcccccgccgtgaccgtgagatactacagaatcacctacggcgagaccggcggcaacagccccgtgcaggagttcaccgtgcccggcagcaagagcaccgccaccatcagcggcctgaagcccggcgtggactacaccatcaccgtgtacgccgtgaccggcagaggcgacagccccgccagcagcaagcccatcagcatcaactacagaaccgagatcgacaagcccagccagatgcaggtgaccgacgtgcaggacaacagcatcagcgtgaagtggctgcccagcagcagccccgtgaccggctacagagtgaccaccacccccaagaacggccccggccccaccaagaccaagaccgccggccccgaccagaccgagatgaccatcgagggcctgcagcccaccgtggagtacgtggtgagcgtgtacgcccagaaccccagcggcgagagccagcccctggtgcagaccgccgtgaccaacatcgacagacccaagggcctggccttcaccgacgtggacgtggacagcatcaagatcgcctgggagagcccccagggccaggtgagcagatacagagtgacctacagcagccccgaggacggcatccacgagctgttccccgcccccgacggcgaggaggacaccgccgagctgcagggcctgagacccggcagcgagtacaccgtgagcgtggtggccctgcacgacgacatggagagccagcccctgatcggcacccagagcaccgccatccccgcccccaccgacctgaagttcacccaggtgacccccaccagcctgagcgcccagtggaccccccccaacgtgcagctgaccggctacagagtgagagtgacccccaaggagaagaccggccccatgaaggagatcaacctggcccccgacagcagcagcgtggtggtgagcggcctgatggtggccaccaagtacgaggtgagcgtgtacgccctgaaggacaccctgaccagcagacccgcccagggcgtggtgaccaccctggagaacgtgagcccccccagaagagccagagtgaccgacgccaccgagaccaccatcaccatcagctggagaaccaagaccgagaccatcaccggcttccaggtggacgccgtgcccgccaacggccagacccccatccagagaaccatcaagcccgacgtgagaagctacaccatcaccggcctgcagcccggcaccgactacaagatctacctgtacaccctgaacgacaacgccagaagcagccccgtggtgatcgacgccagcaccgccatcgacgcccccagcaacctgagattcctggccaccacccccaacagcctgctggtgagctggcagccccccagagccagaatcaccggctacatcatcaagtacgagaagcccggcagcccccccagagaggtggtgcccagacccagacccggcgtgaccgaggccaccatcaccggcctggagcccggcaccgagtacaccatctacgtgatcgccctgaagaacaaccagaagagcgagcccctgatcggcagaaagaagaccgacgagctgccccagctggtgaccctgccccaccccaacctgcacggccccgagatcctggacgtgcccagcaccgtgcagaagacccccttcgtgacccaccccggctacgacaccggcaacggcatccagctgcccggcaccagcggccagcagcccagcgtgggccagcagatgatcttcgaggagcacggcttcagaagaaccaccccccccaccaccgccacccccatcagacacagacccagaccctacccccccaacgtgggcgaggagatccagatcggccacatccccagagaggacgtggactaccacctgtacccccacggccccggcctgaaccccaacgccagcaccggccaggaggccctgagccagaccaccatcagctgggcccccttccaggacaccagcgagtacatcatcagctgccaccccgtgggcaccgacgaggagcccctgcagttcagagtgcccggcaccagcaccagcgccaccctgaccggcctgaccagaggcgccacctacaacgtgatcgtggaggccctgaaggaccagcagagacacaaggtgagagaggaggtggtgaccgtgggcaacagcgtgaacgagggcctgaaccagcccaccgacgacagctgcttcgacccctacaccgtgagccactacgccgtgggcgacgagtgggagagaatgagcgagagcggcttcaagctgctgtgccagtgcctgggcttcggcagcggccacttcagatgcgacagcagcagatggtgccacgacaacggcgtgaactacaagatcggcgagaagtgggacagacagggcgagaacggccagatgatgagctgcacctgcctgggcaacggcaagggcgagttcaagtgcgacccccacgaggccacctgctacgacgacggcaagacctaccacgtgggcgagcagtggcagaaggagtacctgggcgccatctgcagctgcacctgcttcggcggccagagaggctggagatgcgacaactgcagaagacccggcggcgagcccagccccgagggcaccaccggccagagctacaaccagtacagccagagataccaccagagaaccaacaccaacgtgaactgccccatcgagtgcttcatgcccctggacgtgcaggccgacagagaggacagcagagagtag

SEQ ID NO: 10739 - DNA, 7341 bp, synthetic construct
  misc_feature 1..7341: note = Description of Artificial Sequence: Synthetic coding sequence
  source 1..7341: mol_type = other DNA
atgctgagaggccccggccccggcctgctgctgctggccgtgcagtgcctgggcaccgccgtgcccagcaccggcgccagcaagagcaagagacaggcccagcagatggtgcagccccagagccccgtggccgtgagccagagcaagcccggctgctacgacaacggcaagcactaccagatcaaccagcagtgggagagaacctacctgggcaacgccctggtgtgcacctgctacggcggcagcagaggcttcaactgcgagagcaagcccgaggccgaggagacctgcttcgacaagtacaccggcaacacctacagagtgggcgacacctacgagagacccaaggacagcatgatctgggactgcacctgcatcggcgccggcagaggcagaatcagctgcaccatcgccaacagatgccacgagggcggccagagctacaagatcggcgacacctggagaagaccccacgagaccggcggctacatgctggagtgcgtgtgcctgggcaacggcaagggcgagtggacctgcaagcccatcgccgagaagtgcttcgaccacgccgccggcaccagctacgtggtgggcgagacctgggagaagccctaccagggctggatgatggtggactgcacctgcctgggcgagggcagcggcagaatcacctgcaccagcagaaacagatgcaacgaccaggacaccagaaccagctacagaatcggcgacacctggagcaagaaggacaacagaggcaacctgctgcagtgcatctgcaccggcaacggcagaggcgagtggaagtgcgagagacacaccagcgtgcagaccaccagcagcggcagcggccccttcaccgacgtgagagccgccgtgtaccagccccagccccacccccagccccccccctacggccactgcgtgaccgacagcggcgtggtgtacagcgtgggcatgcagtggctgaagacccagggcaacaagcagatgctgtgcacctgcctgggcaacggcgtgagctgccaggagaccgccgtgacccagacctacggcggcaacagcaacggcgagccctgcgtgctgcccttcacctacaacggcagaaccttctacagctgcaccaccgagggcagacaggacggccacctgtggtgcagcaccaccagcaactacgagcaggaccagaagtacagcttctgcaccgaccacaccgtgctggtgcagaccagaggcggcaacagcaacggcgccctgtgccacttccccttcctgtacaacaaccacaactacaccgactgcaccagcgagggcagaagagacaacatgaagtggtgcggcaccacccagaactacgacgccgaccagaagttcggcttctgccccatggccgcccacgaggagatctgcaccaccaacgagggcgtgatgtacagaatcggcgaccagtgggacaagcagcacgacatgggccacatgatgagatgcacctgcgtgggcaacggcagaggcgagtggacctgcatcgcctacagccagctgagagaccagtgcatcgtggacgacatcacctacaacgtgaacgacaccttccacaagagacacgaggagggccacatgctgaactgcacctgcttcggccagggcagaggcagatggaagtgcgaccccgtggaccagtgccaggacagcgagaccggcaccttctaccagatcggcgacagctgggagaagtacgtgcacggcgtgagataccagtgctactgctacggcagaggcatcggcgagtggcactgccagcccctgcagacctaccccagcagcagcggccccgtggaggtgttcatcaccgagacccccagccagcccaacagccaccccatccagtggaacgccccccagcccagccacatcagcaagtacatcctgagatggagacccaagaacagcgtgggcagatggaaggaggccaccatccccggccacctgaacagctacaccatcaagggcctgaagcccggcgtggtgtacgagggccagctgatcagcatccagcagtacggccaccaggaggtgaccagattcgacttcaccaccaccagcaccagcacccccgtgaccagcaacaccgtgaccggcgagaccacccccttcagccccctggtggccaccagcgagagcgtgaccgagatcaccgccagcagcttcgtggtgagctgggtgagcgccagcgacaccgtgagcggcttcagagtggagtacgagctgagcgaggagggcgacgagccccagtacctggacctgcccagcaccgccaccagcgtgaacatccccgacctgctgcccggcagaaagtacatcgtgaacgtgtaccagatcagcgaggacggcgagcagagcctgatcctgagcaccagccagaccaccgcccccgacgccccccccgacaccaccgtggaccaggtggacgacaccagcatcgtggtgagatggagcagaccccaggcccccatcaccggctacagaatcgtgtacagccccagcgtggagggcagcagcaccgagctgaacctgcccgagaccgccaacagcgtgaccctgagcgacctgcagcccggcgtgcagtacaacatcaccatctacgccgtggaggagaaccaggagagcacccccgtggtgatccagcaggagaccaccggcacccccagaagcgacaccgtgcccagccccagagacctgcagttcgtggaggtgaccgacgtgaaggtgaccatcatgtggaccccccccgagagcgccgtgaccggctacagagtggacgtgatccccgtgaacctgcccggcgagcacggccagagactgcccatcagcagaaacaccttcgccgaggtgaccggcctgagccccggcgtgacctactacttcaaggtgttcgccgtgagccacggcagagagagcaagcccctgaccgcccagcagaccaccaagctggacgcccccaccaacctgcagttcgtgaacgagaccgacagcaccgtgctggtgagatggaccccccccagagcccagatcaccggctacagactgaccgtgggcctgaccagaagaggccagcccagacagtacaacgtgggccccagcgtgagcaagtaccccctgagaaacctgcagcccgccagcgagtacaccgtgagcctggtggccatcaagggcaaccaggagagccccaaggccaccggcgtgttcaccaccctgcagcccggcagcagcatccccccctacaacaccgaggtgaccgagaccaccatcgtgatcacctggacccccgcccccagaatcggcttcaagctgggcgtgagacccagccagggcggcgaggcccccagagaggtgaccagcgacagcggcagcatcgtggtgagcggcctgacccccggcgtggagtacgtgtacaccatccaggtgctgagagacggccaggagagagacgcccccatcgtgaacaaggtggtgacccccctgagcccccccaccaacctgcacctggaggccaaccccgacaccggcgtgctgaccgtgagctgggagagaagcaccacccccgacatcaccggctacagaatcaccaccacccccaccaacggccagcagggcaacagcctggaggaggtggtgcacgccgaccagagcagctgcaccttcgacaacctgagccccggcctggagtacaacgtgagcgtgtacaccgtgaaggacgacaaggagagcgtgcccatcagcgacaccatcatccccgaggtgccccagctgaccgacctgagcttcgtggacatcaccgacagcagcatcggcctgagatggacccccctgaacagcagcaccatcatcggctacagaatcaccgtggtggccgccggcgagggcatccccatcttcgaggacttcgtggacagcagcgtgggctactacaccgtgaccggcctggagcccggcatcgactacgacatcagcgtgatcaccctgatcaacggcggcgagagcgcccccaccaccctgacccagcagaccgccgtgcccccccccaccgacctgagattcaccaacatcggccccgacaccatgagagtgacctgggcccccccccccagcatcgacctgaccaacttcctggtgagatacagccccgtgaagaacgaggaggacgtggccgagctgagcatcagccccagcgacaacgccgtggtgctgaccaacctgctgcccggcaccgagtacgtggtgagcgtgagcagcgtgtacgagcagcacgagagcacccccctgagaggcagacagaagaccggcctggacagccccaccggcatcgacttcagcgacatcaccgccaacagcttcaccgtgcactggatcgcccccagagccaccatcaccggctacagaatcagacaccaccccgagcacttcagcggcagacccagagaggacagagtgccccacagcagaaacagcatcaccctgaccaacctgacccccggcaccgagtacgtggtgagcatcgtggccctgaacggcagagaggagagccccctgctgatcggccagcagagcaccgtgagcgacgtgcccagagacctggaggtggtggccgccacccccaccagcctgctgatcagctgggacgcccccgccgtgaccgtgagatactacagaatcacctacggcgagaccggcggcaacagccccgtgcaggagttcaccgtgcccggcagcaagagcaccgccaccatcagcggcctgaagcccggcgtggactacaccatcaccgtgtacgccgtgaccggcagaggcgacagccccgccagcagcaagcccatcagcatcaactacagaaccgagatcgacaagcccagccagatgcaggtgaccgacgtgcaggacaacagcatcagcgtgaagtggctgcccagcagcagccccgtgaccggctacagagtgaccaccacccccaagaacggccccggccccaccaagaccaagaccgccggccccgaccagaccgagatgaccatcgagggcctgcagcccaccgtggagtacgtggtgagcgtgtacgcccagaaccccagcggcgagagccagcccctggtgcagaccgccgtgaccaacatcgacagacccaagggcctggccttcaccgacgtggacgtggacagcatcaagatcgcctgggagagcccccagggccaggtgagcagatacagagtgacctacagcagccccgaggacggcatccacgagctgttccccgcccccgacggcgaggaggacaccgccgagctgcagggcctgagacccggcagcgagtacaccgtgagcgtggtggccctgcacgacgacatggagagccagcccctgatcggcacccagagcaccgccatccccgcccccaccgacctgaagttcacccaggtgacccccaccagcctgagcgcccagtggaccccccccaacgtgcagctgaccggctacagagtgagagtgacccccaaggagaagaccggccccatgaaggagatcaacctggcccccgacagcagcagcgtggtggtgagcggcctgatggtggccaccaagtacgaggtgagcgtgtacgccctgaaggacaccctgaccagcagacccgcccagggcgtggtgaccaccctggagaacgtgagcccccccagaagagccagagtgaccgacgccaccgagaccaccatcaccatcagctggagaaccaagaccgagaccatcaccggcttccaggtggacgccgtgcccgccaacggccagacccccatccagagaaccatcaagcccgacgtgagaagctacaccatcaccggcctgcagcccggcaccgactacaagatctacctgtacaccctgaacgacaacgccagaagcagccccgtggtgatcgacgccagcaccgccatcgacgcccccagcaacctgagattcctggccaccacccccaacagcctgctggtgagctggcagccccccagagccagaatcaccggctacatcatcaagtacgagaagcccggcagcccccccagagaggtggtgcccagacccagacccggcgtgaccgaggccaccatcaccggcctggagcccggcaccgagtacaccatctacgtgatcgccctgaagaacaaccagaagagcgagcccctgatcggcagaaagaagaccgacgagctgccccagctggtgaccctgccccaccccaacctgcacggccccgagatcctggacgtgcccagcaccgtgcagaagacccccttcgtgacccaccccggctacgacaccggcaacggcatccagctgcccggcaccagcggccagcagcccagcgtgggccagcagatgatcttcgaggagcacggcttcagaagaaccaccccccccaccaccgccacccccatcagacacagacccagaccctacccccccaacgtgggccaggaggccctgagccagaccaccatcagctgggcccccttccaggacaccagcgagtacatcatcagctgccaccccgtgggcaccgacgaggagcccctgcagttcagagtgcccggcaccagcaccagcgccaccctgaccggcctgaccagaggcgccacctacaacgtgatcgtggaggccctgaaggaccagcagagacacaaggtgagagaggaggtggtgaccgtgggcaacagcgtgaacgagggcctgaaccagcccaccgacgacagctgcttcgacccctacaccgtgagccactacgccgtgggcgacgagtgggagagaatgagcgagagcggcttcaagctgctgtgccagtgcctgggcttcggcagcggccacttcagatgcgacagcagcagatggtgccacgacaacggcgtgaactacaagatcggcgagaagtgggacagacagggcgagaacggccagatgatgagctgcacctgcctgggcaacggcaagggcgagttcaagtgcgacccccacgaggccacctgctacgacgacggcaagacctaccacgtgggcgagcagtggcagaaggagtacctgggcgccatctgcagctgcacctgcttcggcggccagagaggctggagatgcgacaactgcagaagacccggcggcgagcccagccccgagggcaccaccggccagagctacaaccagtacagccagagataccaccagagaaccaacaccaacgtgaactgccccatcgagtgcttcatgcccctggacgtgcaggccgacagagaggacagcagagagtag

SEQ ID NO: 10740 - DNA, 7068 bp, synthetic construct
  misc_feature 1..7068: note = Description of Artificial Sequence: Synthetic coding sequence
  source 1..7068: mol_type = other DNA
atgctgagaggccccggccccggcctgctgctgctggccgtgcagtgcctgggcaccgccgtgcccagcaccggcgccagcaagagcaagagacaggcccagcagatggtgcagccccagagccccgtggccgtgagccagagcaagcccggctgctacgacaacggcaagcactaccagatcaaccagcagtgggagagaacctacctgggcaacgccctggtgtgcacctgctacggcggcagcagaggcttcaactgcgagagcaagcccgaggccgaggagacctgcttcgacaagtacaccggcaacacctacagagtgggcgacacctacgagagacccaaggacagcatgatctgggactgcacctgcatcggcgccggcagaggcagaatcagctgcaccatcgccaacagatgccacgagggcggccagagctacaagatcggcgacacctggagaagaccccacgagaccggcggctacatgctggagtgcgtgtgcctgggcaacggcaagggcgagtggacctgcaagcccatcgccgagaagtgcttcgaccacgccgccggcaccagctacgtggtgggcgagacctgggagaagccctaccagggctggatgatggtggactgcacctgcctgggcgagggcagcggcagaatcacctgcaccagcagaaacagatgcaacgaccaggacaccagaaccagctacagaatcggcgacacctggagcaagaaggacaacagaggcaacctgctgcagtgcatctgcaccggcaacggcagaggcgagtggaagtgcgagagacacaccagcgtgcagaccaccagcagcggcagcggccccttcaccgacgtgagagccgccgtgtaccagccccagccccacccccagccccccccctacggccactgcgtgaccgacagcggcgtggtgtacagcgtgggcatgcagtggctgaagacccagggcaacaagcagatgctgtgcacctgcctgggcaacggcgtgagctgccaggagaccgccgtgacccagacctacggcggcaacagcaacggcgagccctgcgtgctgcccttcacctacaacggcagaaccttctacagctgcaccaccgagggcagacaggacggccacctgtggtgcagcaccaccagcaactacgagcaggaccagaagtacagcttctgcaccgaccacaccgtgctggtgcagaccagaggcggcaacagcaacggcgccctgtgccacttccccttcctgtacaacaaccacaactacaccgactgcaccagcgagggcagaagagacaacatgaagtggtgcggcaccacccagaactacgacgccgaccagaagttcggcttctgccccatggccgcccacgaggagatctgcaccaccaacgagggcgtgatgtacagaatcggcgaccagtgggacaagcagcacgacatgggccacatgatgagatgcacctgcgtgggcaacggcagaggcgagtggacctgcatcgcctacagccagctgagagaccagtgcatcgtggacgacatcacctacaacgtgaacgacaccttccacaagagacacgaggagggccacatgctgaactgcacctgcttcggccagggcagaggcagatggaagtgcgaccccgtggaccagtgccaggacagcgagaccggcaccttctaccagatcggcgacagctgggagaagtacgtgcacggcgtgagataccagtgctactgctacggcagaggcatcggcgagtggcactgccagcccctgcagacctaccccagcagcagcggccccgtggaggtgttcatcaccgagacccccagccagcccaacagccaccccatccagtggaacgccccccagcccagccacatcagcaagtacatcctgagatggagacccaagaacagcgtgggcagatggaaggaggccaccatccccggccacctgaacagctacaccatcaagggcctgaagcccggcgtggtgtacgagggccagctgatcagcatccagcagtacggccaccaggaggtgaccagattcgacttcaccaccaccagcaccagcacccccgtgaccagcaacaccgtgaccggcgagaccacccccttcagccccctggtggccaccagcgagagcgtgaccgagatcaccgccagcagcttcgtggtgagctgggtgagcgccagcgacaccgtgagcggcttcagagtggagtacgagctgagcgaggagggcgacgagccccagtacctggacctgcccagcaccgccaccagcgtgaacatccccgacctgctgcccggcagaaagtacatcgtgaacgtgtaccagatcagcgaggacggcgagcagagcctgatcctgagcaccagccagaccaccgcccccgacgccccccccgacaccaccgtggaccaggtggacgacaccagcatcgtggtgagatggagcagaccccaggcccccatcaccggctacagaatcgtgtacagccccagcgtggagggcagcagcaccgagctgaacctgcccgagaccgccaacagcgtgaccctgagcgacctgcagcccggcgtgcagtacaacatcaccatctacgccgtggaggagaaccaggagagcacccccgtggtgatccagcaggagaccaccggcacccccagaagcgacaccgtgcccagccccagagacctgcagttcgtggaggtgaccgacgtgaaggtgaccatcatgtggaccccccccgagagcgccgtgaccggctacagagtggacgtgatccccgtgaacctgcccggcgagcacggccagagactgcccatcagcagaaacaccttcgccgaggtgaccggcctgagccccggcgtgacctactacttcaaggtgttcgccgtgagccacggcagagagagcaagcccctgaccgcccagcagaccaccaagctggacgcccccaccaacctgcagttcgtgaacgagaccgacagcaccgtgctggtgagatggaccccccccagagcccagatcaccggctacagactgaccgtgggcctgaccagaagaggccagcccagacagtacaacgtgggccccagcgtgagcaagtaccccctgagaaacctgcagcccgccagcgagtacaccgtgagcctggtggccatcaagggcaaccaggagagccccaaggccaccggcgtgttcaccaccctgcagcccggcagcagcatccccccctacaacaccgaggtgaccgagaccaccatcgtgatcacctggacccccgcccccagaatcggcttcaagctgggcgtgagacccagccagggcggcgaggcccccagagaggtgaccagcgacagcggcagcatcgtggtgagcggcctgacccccggcgtggagtacgtgtacaccatccaggtgctgagagacggccaggagagagacgcccccatcgtgaacaaggtggtgacccccctgagcccccccaccaacctgcacctggaggccaaccccgacaccggcgtgctgaccgtgagctgggagagaagcaccacccccgacatcaccggctacagaatcaccaccacccccaccaacggccagcagggcaacagcctggaggaggtggtgcacgccgaccagagcagctgcaccttcgacaacctgagccccggcctggagtacaacgtgagcgtgtacaccgtgaaggacgacaaggagagcgtgcccatcagcgacaccatcatccccgccgtgcccccccccaccgacctgagattcaccaacatcggccccgacaccatgagagtgacctgggcccccccccccagcatcgacctgaccaacttcctggtgagatacagccccgtgaagaacgaggaggacgtggccgagctgagcatcagccccagcgacaacgccgtggtgctgaccaacctgctgcccggcaccgagtacgtggtgagcgtgagcagcgtgtacgagcagcacgagagcacccccctgagaggcagacagaagaccggcctggacagccccaccggcatcgacttcagcgacatcaccgccaacagcttcaccgtgcactggatcgcccccagagccaccatcaccggctacagaatcagacaccaccccgagcacttcagcggcagacccagagaggacagagtgccccacagcagaaacagcatcaccctgaccaacctgacccccggcaccgagtacgtggtgagcatcgtggccctgaacggcagagaggagagccccctgctgatcggccagcagagcaccgtgagcgacgtgcccagagacctggaggtggtggccgccacccccaccagcctgctgatcagctgggacgcccccgccgtgaccgtgagatactacagaatcacctacggcgagaccggcggcaacagccccgtgcaggagttcaccgtgcccggcagcaagagcaccgccaccatcagcggcctgaagcccggcgtggactacaccatcaccgtgtacgccgtgaccggcagaggcgacagccccgccagcagcaagcccatcagcatcaactacagaaccgagatcgacaagcccagccagatgcaggtgaccgacgtgcaggacaacagcatcagcgtgaagtggctgcccagcagcagccccgtgaccggctacagagtgaccaccacccccaagaacggccccggccccaccaagaccaagaccgccggccccgaccagaccgagatgaccatcgagggcctgcagcccaccgtggagtacgtggtgagcgtgtacgcccagaaccccagcggcgagagccagcccctggtgcagaccgccgtgaccaacatcgacagacccaagggcctggccttcaccgacgtggacgtggacagcatcaagatcgcctgggagagcccccagggccaggtgagcagatacagagtgacctacagcagccccgaggacggcatccacgagctgttccccgcccccgacggcgaggaggacaccgccgagctgcagggcctgagacccggcagcgagtacaccgtgagcgtggtggccctgcacgacgacatggagagccagcccctgatcggcacccagagcaccgccatccccgcccccaccgacctgaagttcacccaggtgacccccaccagcctgagcgcccagtggaccccccccaacgtgcagctgaccggctacagagtgagagtgacccccaaggagaagaccggccccatgaaggagatcaacctggcccccgacagcagcagcgtggtggtgagcggcctgatggtggccaccaagtacgaggtgagcgtgtacgccctgaaggacaccctgaccagcagacccgcccagggcgtggtgaccaccctggagaacgtgagcccccccagaagagccagagtgaccgacgccaccgagaccaccatcaccatcagctggagaaccaagaccgagaccatcaccggcttccaggtggacgccgtgcccgccaacggccagacccccatccagagaaccatcaagcccgacgtgagaagctacaccatcaccggcctgcagcccggcaccgactacaagatctacctgtacaccctgaacgacaacgccagaagcagccccgtggtgatcgacgccagcaccgccatcgacgcccccagcaacctgagattcctggccaccacccccaacagcctgctggtgagctggcagccccccagagccagaatcaccggctacatcatcaagtacgagaagcccggcagcccccccagagaggtggtgcccagacccagacccggcgtgaccgaggccaccatcaccggcctggagcccggcaccgagtacaccatctacgtgatcgccctgaagaacaaccagaagagcgagcccctgatcggcagaaagaagaccgacgagctgccccagctggtgaccctgccccaccccaacctgcacggccccgagatcctggacgtgcccagcaccgtgcagaagacccccttcgtgacccaccccggctacgacaccggcaacggcatccagctgcccggcaccagcggccagcagcccagcgtgggccagcagatgatcttcgaggagcacggcttcagaagaaccaccccccccaccaccgccacccccatcagacacagacccagaccctacccccccaacgtgggccaggaggccctgagccagaccaccatcagctgggcccccttccaggacaccagcgagtacatcatcagctgccaccccgtgggcaccgacgaggagcccctgcagttcagagtgcccggcaccagcaccagcgccaccctgaccggcctgaccagaggcgccacctacaacgtgatcgtggaggccctgaaggaccagcagagacacaaggtgagagaggaggtggtgaccgtgggcaacagcgtgaacgagggcctgaaccagcccaccgacgacagctgcttcgacccctacaccgtgagccactacgccgtgggcgacgagtgggagagaatgagcgagagcggcttcaagctgctgtgccagtgcctgggcttcggcagcggccacttcagatgcgacagcagcagatggtgccacgacaacggcgtgaactacaagatcggcgagaagtgggacagacagggcgagaacggccagatgatgagctgcacctgcctgggcaacggcaagggcgagttcaagtgcgacccccacgaggccacctgctacgacgacggcaagacctaccacgtgggcgagcagtggcagaaggagtacctgggcgccatctgcagctgcacctgcttcggcggccagagaggctggagatgcgacaactgcagaagacccggcggcgagcccagccccgagggcaccaccggccagagctacaaccagtacagccagagataccaccagagaaccaacaccaacgtgaactgccccatcgagtgcttcatgcccctggacgtgcaggccgacagagaggacagcagagagtag

SEQ ID NO: 10741 - DNA, 6555 bp, synthetic construct
  misc_feature 1..6555: note = Description of Artificial Sequence: Synthetic coding sequence
  source 1..6555: mol_type = other DNA
atgctgagaggccccggccccggcctgctgctgctggccgtgcagtgcctgggcaccgccgtgcccagcaccggcgccagcaagagcaagagacaggcccagcagatggtgcagccccagagccccgtggccgtgagccagagcaagcccggctgctacgacaacggcaagcactaccagatcaaccagcagtgggagagaacctacctgggcaacgccctggtgtgcacctgctacggcggcagcagaggcttcaactgcgagagcaagcccgaggccgaggagacctgcttcgacaagtacaccggcaacacctacagagtgggcgacacctacgagagacccaaggacagcatgatctgggactgcacctgcatcggcgccggcagaggcagaatcagctgcaccatcgccaacagatgccacgagggcggccagagctacaagatcggcgacacctggagaagaccccacgagaccggcggctacatgctggagtgcgtgtgcctgggcaacggcaagggcgagtggacctgcaagcccatcgccgagaagtgcttcgaccacgccgccggcaccagctacgtggtgggcgagacctgggagaagccctaccagggctggatgatggtggactgcacctgcctgggcgagggcagcggcagaatcacctgcaccagcagaaacagatgcaacgaccaggacaccagaaccagctacagaatcggcgacacctggagcaagaaggacaacagaggcaacctgctgcagtgcatctgcaccggcaacggcagaggcgagtggaagtgcgagagacacaccagcgtgcagaccaccagcagcggcagcggccccttcaccgacgtgagagccgccgtgtaccagccccagccccacccccagccccccccctacggccactgcgtgaccgacagcggcgtggtgtacagcgtgggcatgcagtggctgaagacccagggcaacaagcagatgctgtgcacctgcctgggcaacggcgtgagctgccaggagaccgccgtgacccagacctacggcggcaacagcaacggcgagccctgcgtgctgcccttcacctacaacggcagaaccttctacagctgcaccaccgagggcagacaggacggccacctgtggtgcagcaccaccagcaactacgagcaggaccagaagtacagcttctgcaccgaccacaccgtgctggtgcagaccagaggcggcaacagcaacggcgccctgtgccacttccccttcctgtacaacaaccacaactacaccgactgcaccagcgagggcagaagagacaacatgaagtggtgcggcaccacccagaactacgacgccgaccagaagttcggcttctgccccatggccgcccacgaggagatctgcaccaccaacgagggcgtgatgtacagaatcggcgaccagtgggacaagcagcacgacatgggccacatgatgagatgcacctgcgtgggcaacggcagaggcgagtggacctgcatcgcctacagccagctgagagaccagtgcatcgtggacgacatcacctacaacgtgaacgacaccttccacaagagacacgaggagggccacatgctgaactgcacctgcttcggccagggcagaggcagatggaagtgcgaccccgtggaccagtgccaggacagcgagaccggcaccttctaccagatcggcgacagctgggagaagtacgtgcacggcgtgagataccagtgctactgctacggcagaggcatcggcgagtggcactgccagcccctgcagacctaccccagcagcagcggccccgtggaggtgttcatcaccgagacccccagccagcccaacagccaccccatccagtggaacgccccccagcccagccacatcagcaagtacatcctgagatggagacccaagaacagcgtgggcagatggaaggaggccaccatccccggccacctgaacagctacaccatcaagggcctgaagcccggcgtggtgtacgagggccagctgatcagcatccagcagtacggccaccaggaggtgaccagattcgacttcaccaccaccagcaccagcacccccgtgaccagcaacaccgtgaccggcgagaccacccccttcagccccctggtggccaccagcgagagcgtgaccgagatcaccgccagcagcttcgtggtgagctgggtgagcgccagcgacaccgtgagcggcttcagagtggagtacgagctgagcgaggagggcgacgagccccagtacctggacctgcccagcaccgccaccagcgtgaacatccccgacctgctgcccggcagaaagtacatcgtgaacgtgtaccagatcagcgaggacggcgagcagagcctgatcctgagcaccagccagaccaccgcccccgacgccccccccgacaccaccgtggaccaggtggacgacaccagcatcgtggtgagatggagcagaccccaggcccccatcaccggctacagaatcgtgtacagccccagcgtggagggcagcagcaccgagctgaacctgcccgagaccgccaacagcgtgaccctgagcgacctgcagcccggcgtgcagtacaacatcaccatctacgccgtggaggagaaccaggagagcacccccgtggtgatccagcaggagaccaccggcacccccagaagcgacaccgtgcccagccccagagacctgcagttcgtggaggtgaccgacgtgaaggtgaccatcatgtggaccccccccgagagcgccgtgaccggctacagagtggacgtgatccccgtgaacctgcccggcgagcacggccagagactgcccatcagcagaaacaccttcgccgaggtgaccggcctgagccccggcgtgacctactacttcaaggtgttcgccgtgagccacggcagagagagcaagcccctgaccgcccagcagaccaccaagctggacgcccccaccaacctgcagttcgtgaacgagaccgacagcaccgtgctggtgagatggaccccccccagagcccagatcaccggctacagactgaccgtgggcctgaccagaagaggccagcccagacagtacaacgtgggccccagcgtgagcaagtaccccctgagaaacctgcagcccgccagcgagtacaccgtgagcctggtggccatcaagggcaaccaggagagccccaaggccaccggcgtgttcaccaccctgcagcccggcagcagcatccccccctacaacaccgaggtgaccgagaccaccatcgtgatcacctggacccccgcccccagaatcggcttcaagctgggcgtgagacccagccagggcggcgaggcccccagagaggtgaccagcgacagcggcagcatcgtggtgagcggcctgacccccggcgtggagtacgtgtacaccatccaggtgctgagagacggccaggagagagacgcccccatcgtgaacaaggtggtgacccccctgagcccccccaccaacctgcacctggaggccaaccccgacaccggcgtgctgaccgtgagctgggagagaagcaccacccccgacatcaccggctacagaatcaccaccacccccaccaacggccagcagggcaacagcctggaggaggtggtgcacgccgaccagagcagctgcaccttcgacaacctgagccccggcctggagtacaacgtgagcgtgtacaccgtgaaggacgacaaggagagcgtgcccatcagcgacaccatcatccccgccgtgcccccccccaccgacctgagattcaccaacatcggccccgacaccatgagagtgacctgggcccccccccccagcatcgacctgaccaacttcctggtgagatacagccccgtgaagaacgaggaggacgtggccgagctgagcatcagccccagcgacaacgccgtggtgctgaccaacctgctgcccggcaccgagtacgtggtgagcgtgagcagcgtgtacgagcagcacgagagcacccccctgagaggcagacagaagaccggcctggacagccccaccggcatcgacttcagcgacatcaccgccaacagcttcaccgtgcactggatcgcccccagagccaccatcaccggctacagaatcagacaccaccccgagcacttcagcggcagacccagagaggacagagtgccccacagcagaaacagcatcaccctgaccaacctgacccccggcaccgagtacgtggtgagcatcgtggccctgaacggcagagaggagagccccctgctgatcggccagcagagcaccgtgagcgacgtgcccagagacctggaggtggtggccgccacccccaccagcctgctgatcagctgggacgcccccgccgtgaccgtgagatactacagaatcacctacggcgagaccggcggcaacagccccgtgcaggagttcaccgtgcccggcagcaagagcaccgccaccatcagcggcctgaagcccggcgtggactacaccatcaccgtgtacgccgtgaccggcagaggcgacagccccgccagcagcaagcccatcagcatcaactacagaaccgagatcgacaagcccagccagatgcaggtgaccgacgtgcaggacaacagcatcagcgtgaagtggctgcccagcagcagccccgtgaccggctacagagtgaccaccacccccaagaacggccccggccccaccaagaccaagaccgccggccccgaccagaccgagatgaccatcgagggcctgcagcccaccgtggagtacgtggtgagcgtgtacgcccagaaccccagcggcgagagccagcccctggtgcagaccgccgtgaccaacatcgacagacccaagggcctggccttcaccgacgtggacgtggacagcatcaagatcgcctgggagagcccccagggccaggtgagcagatacagagtgacctacagcagccccgaggacggcatccacgagctgttccccgcccccgacggcgaggaggacaccgccgagctgcagggcctgagacccggcagcgagtacaccgtgagcgtggtggccctgcacgacgacatggagagccagcccctgatcggcacccagagcaccgccatccccgcccccaccgacctgaagttcacccaggtgacccccaccagcctgagcgcccagtggaccccccccaacgtgcagctgaccggctacagagtgagagtgacccccaaggagaagaccggccccatgaaggagatcaacctggcccccgacagcagcagcgtggtggtgagcggcctgatggtggccaccaagtacgaggtgagcgtgtacgccctgaaggacaccctgaccagcagacccgcccagggcgtggtgaccaccctggagaacgtgagcccccccagaagagccagagtgaccgacgccaccgagaccaccatcaccatcagctggagaaccaagaccgagaccatcaccggcttccaggtggacgccgtgcccgccaacggccagacccccatccagagaaccatcaagcccgacgtgagaagctacaccatcaccggcctgcagcccggcaccgactacaagatctacctgtacaccctgaacgacaacgccagaagcagccccgtggtgatcgacgccagcaccgccatcgacgcccccagcaacctgagattcctggccaccacccccaacagcctgctggtgagctggcagccccccagagccagaatcaccggctacatcatcaagtacgagaagcccggcagcccccccagagaggtggtgcccagacccagacccggcgtgaccgaggccaccatcaccggcctggagcccggcaccgagtacaccatctacgtgatcgccctgaagaacaaccagaagagcgagcccctgatcggcagaaagaagaccgtgaacgagggcctgaaccagcccaccgacgacagctgcttcgacccctacaccgtgagccactacgccgtgggcgacgagtgggagagaatgagcgagagcggcttcaagctgctgtgccagtgcctgggcttcggcagcggccacttcagatgcgacagcagcagatggtgccacgacaacggcgtgaactacaagatcggcgagaagtgggacagacagggcgagaacggccagatgatgagctgcacctgcctgggcaacggcaagggcgagttcaagtgcgacccccacgaggccacctgctacgacgacggcaagacctaccacgtgggcgagcagtggcagaaggagtacctgggcgccatctgcagctgcacctgcttcggcggccagagaggctggagatgcgacaactgcagaagacccggcggcgagcccagccccgagggcaccaccggccagagctacaaccagtacagccagagataccaccagagaaccaacaccaacgtgaactgccccatcgagtgcttcatgcccctggacgtgcaggccgacagagaggacagcagagagtag

SEQ ID NO: 10742 - DNA, 6636 bp, synthetic construct
  misc_feature 1..6636: note = Description of Artificial Sequence: Synthetic coding sequence
  source 1..6636: mol_type = other DNA
atgctgagaggccccggccccggcctgctgctgctggccgtgcagtgcctgggcaccgccgtgcccagcaccggcgccagcaagagcaagagacaggcccagcagatggtgcagccccagagccccgtggccgtgagccagagcaagcccggctgctacgacaacggcaagcactaccagatcaaccagcagtgggagagaacctacctgggcaacgccctggtgtgcacctgctacggcggcagcagaggcttcaactgcgagagcaagcccgaggccgaggagacctgcttcgacaagtacaccggcaacacctacagagtgggcgacacctacgagagacccaaggacagcatgatctgggactgcacctgcatcggcgccggcagaggcagaatcagctgcaccatcgccaacagatgccacgagggcggccagagctacaagatcggcgacacctggagaagaccccacgagaccggcggctacatgctggagtgcgtgtgcctgggcaacggcaagggcgagtggacctgcaagcccatcgccgagaagtgcttcgaccacgccgccggcaccagctacgtggtgggcgagacctgggagaagccctaccagggctggatgatggtggactgcacctgcctgggcgagggcagcggcagaatcacctgcaccagcagaaacagatgcaacgaccaggacaccagaaccagctacagaatcggcgacacctggagcaagaaggacaacagaggcaacctgctgcagtgcatctgcaccggcaacggcagaggcgagtggaagtgcgagagacacaccagcgtgcagaccaccagcagcggcagcggccccttcaccgacgtgagagccgccgtgtaccagccccagccccacccccagccccccccctacggccactgcgtgaccgacagcggcgtggtgtacagcgtgggcatgcagtggctgaagacccagggcaacaagcagatgctgtgcacctgcctgggcaacggcgtgagctgccaggagaccgccgtgacccagacctacggcggcaacagcaacggcgagccctgcgtgctgcccttcacctacaacggcagaaccttctacagctgcaccaccgagggcagacaggacggccacctgtggtgcagcaccaccagcaactacgagcaggaccagaagtacagcttctgcaccgaccacaccgtgctggtgcagaccagaggcggcaacagcaacggcgccctgtgccacttccccttcctgtacaacaaccacaactacaccgactgcaccagcgagggcagaagagacaacatgaagtggtgcggcaccacccagaactacgacgccgaccagaagttcggcttctgccccatggccgcccacgaggagatctgcaccaccaacgagggcgtgatgtacagaatcggcgaccagtgggacaagcagcacgacatgggccacatgatgagatgcacctgcgtgggcaacggcagaggcgagtggacctgcatcgcctacagccagctgagagaccagtgcatcgtggacgacatcacctacaacgtgaacgacaccttccacaagagacacgaggagggccacatgctgaactgcacctgcttcggccagggcagaggcagatggaagtgcgaccccgtggaccagtgccaggacagcgagaccggcaccttctaccagatcggcgacagctgggagaagtacgtgcacggcgtgagataccagtgctactgctacggcagaggcatcggcgagtggcactgccagcccctgcagacctaccccagcagcagcggccccgtggaggtgttcatcaccgagacccccagccagcccaacagccaccccatccagtggaacgccccccagcccagccacatcagcaagtacatcctgagatggagacccaagaacagcgtgggcagatggaaggaggccaccatccccggccacctgaacagctacaccatcaagggcctgaagcccggcgtggtgtacgagggccagctgatcagcatccagcagtacggccaccaggaggtgaccagattcgacttcaccaccaccagcaccagcacccccgtgaccagcaacaccgtgaccggcgagaccacccccttcagccccctggtggccaccagcgagagcgtgaccgagatcaccgccagcagcttcgtggtgagctgggtgagcgccagcgacaccgtgagcggcttcagagtggagtacgagctgagcgaggagggcgacgagccccagtacctggacctgcccagcaccgccaccagcgtgaacatccccgacctgctgcccggcagaaagtacatcgtgaacgtgtaccagatcagcgaggacggcgagcagagcctgatcctgagcaccagccagaccaccgcccccgacgccccccccgacaccaccgtggaccaggtggacgacaccagcatcgtggtgagatggagcagaccccaggcccccatcaccggctacagaatcgtgtacagccccagcgtggagggcagcagcaccgagctgaacctgcccgagaccgccaacagcgtgaccctgagcgacctgcagcccggcgtgcagtacaacatcaccatctacgccgtggaggagaaccaggagagcacccccgtggtgatccagcaggagaccaccggcacccccagaagcgacaccgtgcccagccccagagacctgcagttcgtggaggtgaccgacgtgaaggtgaccatcatgtggaccccccccgagagcgccgtgaccggctacagagtggacgtgatccccgtgaacctgcccggcgagcacggccagagactgcccatcagcagaaacaccttcgccgaggtgaccggcctgagccccggcgtgacctactacttcaaggtgttcgccgtgagccacggcagagagagcaagcccctgaccgcccagcagaccaccaagctggacgcccccaccaacctgcagttcgtgaacgagaccgacagcaccgtgctggtgagatggaccccccccagagcccagatcaccggctacagactgaccgtgggcctgaccagaagaggccagcccagacagtacaacgtgggccccagcgtgagcaagtaccccctgagaaacctgcagcccgccagcgagtacaccgtgagcctggtggccatcaagggcaaccaggagagccccaaggccaccggcgtgttcaccaccctgcagcccggcagcagcatccccccctacaacaccgaggtgaccgagaccaccatcgtgatcacctggacccccgcccccagaatcggcttcaagctgggcgtgagacccagccagggcggcgaggcccccagagaggtgaccagcgacagcggcagcatcgtggtgagcggcctgacccccggcgtggagtacgtgtacaccatccaggtgctgagagacggccaggagagagacgcccccatcgtgaacaaggtggtgacccccctgagcccccccaccaacctgcacctggaggccaaccccgacaccggcgtgctgaccgtgagctgggagagaagcaccacccccgacatcaccggctacagaatcaccaccacccccaccaacggccagcagggcaacagcctggaggaggtggtgcacgccgaccagagcagctgcaccttcgacaacctgagccccggcctggagtacaacgtgagcgtgtacaccgtgaaggacgacaaggagagcgtgcccatcagcgacaccatcatccccgccgtgcccccccccaccgacctgagattcaccaacatcggccccgacaccatgagagtgacctgggcccccccccccagcatcgacctgaccaacttcctggtgagatacagccccgtgaagaacgaggaggacgtggccgagctgagcatcagccccagcgacaacgccgtggtgctgaccaacctgctgcccggcaccgagtacgtggtgagcgtgagcagcgtgtacgagcagcacgagagcacccccctgagaggcagacagaagaccggcctggacagccccaccggcatcgacttcagcgacatcaccgccaacagcttcaccgtgcactggatcgcccccagagccaccatcaccggctacagaatcagacaccaccccgagcacttcagcggcagacccagagaggacagagtgccccacagcagaaacagcatcaccctgaccaacctgacccccggcaccgagtacgtggtgagcatcgtggccctgaacggcagagaggagagccccctgctgatcggccagcagagcaccgtgagcgacgtgcccagagacctggaggtggtggccgccacccccaccagcctgctgatcagctgggacgcccccgccgtgaccgtgagatactacagaatcacctacggcgagaccggcggcaacagccccgtgcaggagttcaccgtgcccggcagcaagagcaccgccaccatcagcggcctgaagcccggcgtggactacaccatcaccgtgtacgccgtgaccggcagaggcgacagccccgccagcagcaagcccatcagcatcaactacagaaccgagatcgacaagcccagccagatgcaggtgaccgacgtgcaggacaacagcatcagcgtgaagtggctgcccagcagcagccccgtgaccggctacagagtgaccaccacccccaagaacggccccggccccaccaagaccaagaccgccggccccgaccagaccgagatgaccatcgagggcctgcagcccaccgtggagtacgtggtgagcgtgtacgcccagaaccccagcggcgagagccagcccctggtgcagaccgccgtgaccaacatcgacagacccaagggcctggccttcaccgacgtggacgtggacagcatcaagatcgcctgggagagcccccagggccaggtgagcagatacagagtgacctacagcagccccgaggacggcatccacgagctgttccccgcccccgacggcgaggaggacaccgccgagctgcagggcctgagacccggcagcgagtacaccgtgagcgtggtggccctgcacgacgacatggagagccagcccctgatcggcacccagagcaccgccatccccgcccccaccgacctgaagttcacccaggtgacccccaccagcctgagcgcccagtggaccccccccaacgtgcagctgaccggctacagagtgagagtgacccccaaggagaagaccggccccatgaaggagatcaacctggcccccgacagcagcagcgtggtggtgagcggcctgatggtggccaccaagtacgaggtgagcgtgtacgccctgaaggacaccctgaccagcagacccgcccagggcgtggtgaccaccctggagaacgtgagcccccccagaagagccagagtgaccgacgccaccgagaccaccatcaccatcagctggagaaccaagaccgagaccatcaccggcttccaggtggacgccgtgcccgccaacggccagacccccatccagagaaccatcaagcccgacgtgagaagctacaccatcaccggcctgcagcccggcaccgactacaagatctacctgtacaccctgaacgacaacgccagaagcagccccgtggtgatcgacgccagcaccgccatcgacgcccccagcaacctgagattcctggccaccacccccaacagcctgctggtgagctggcagccccccagagccagaatcaccggctacatcatcaagtacgagaagcccggcagcccccccagagaggtggtgcccagacccagacccggcgtgaccgaggccaccatcaccggcctggagcccggcaccgagtacaccatctacgtgatcgccctgaagaacaaccagaagagcgagcccctgatcggcagaaagaagaccggccaggaggccctgagccagaccaccatcagctgggcccccttccaggacaccagcgagtacatcatcagctgccaccccgtgggcaccgacgaggagcccctgcagttcagagtgcccggcaccagcaccagcgccaccctgaccggcctgaccagaggcgccacctacaacgtgatcgtggaggccctgaaggaccagcagagacacaaggtgagagaggaggtggtgaccgtgggcaacagcggctggtgccacgacaacggcgtgaactacaagatcggcgagaagtgggacagacagggcgagaacggccagatgatgagctgcacctgcctgggcaacggcaagggcgagttcaagtgcgacccccacgaggccacctgctacgacgacggcaagacctaccacgtgggcgagcagtggcagaaggagtacctgggcgccatctgcagctgcacctgcttcggcggccagagaggctggagatgcgacaactgcagaagacccggcggcgagcccagccccgagggcaccaccggccagagctacaaccagtacagccagagataccaccagagaaccaacaccaacgtgaactgccccatcgagtgcttcatgcccctggacgtgcaggccgacagagaggacagcagagagtag

SEQ ID NO: 10743 - DNA, 7434 bp, synthetic construct
  misc_feature 1..7434: note = Description of Artificial Sequence: Synthetic coding sequence
  source 1..7434: mol_type = other DNA
atgctgagaggccccggccccggcctgctgctgctggccgtgcagtgcctgggcaccgccgtgcccagcaccggcgccagcaagagcaagagacaggcccagcagatggtgcagccccagagccccgtggccgtgagccagagcaagcccggctgctacgacaacggcaagcactaccagatcaaccagcagtgggagagaacctacctgggcaacgccctggtgtgcacctgctacggcggcagcagaggcttcaactgcgagagcaagcccgaggccgaggagacctgcttcgacaagtacaccggcaacacctacagagtgggcgacacctacgagagacccaaggacagcatgatctgggactgcacctgcatcggcgccggcagaggcagaatcagctgcaccatcgccaacagatgccacgagggcggccagagctacaagatcggcgacacctggagaagaccccacgagaccggcggctacatgctggagtgcgtgtgcctgggcaacggcaagggcgagtggacctgcaagcccatcgccgagaagtgcttcgaccacgccgccggcaccagctacgtggtgggcgagacctgggagaagccctaccagggctggatgatggtggactgcacctgcctgggcgagggcagcggcagaatcacctgcaccagcagaaacagatgcaacgaccaggacaccagaaccagctacagaatcggcgacacctggagcaagaaggacaacagaggcaacctgctgcagtgcatctgcaccggcaacggcagaggcgagtggaagtgcgagagacacaccagcgtgcagaccaccagcagcggcagcggccccttcaccgacgtgagagccgccgtgtaccagccccagccccacccccagccccccccctacggccactgcgtgaccgacagcggcgtggtgtacagcgtgggcatgcagtggctgaagacccagggcaacaagcagatgctgtgcacctgcctgggcaacggcgtgagctgccaggagaccgccgtgacccagacctacggcggcaacagcaacggcgagccctgcgtgctgcccttcacctacaacggcagaaccttctacagctgcaccaccgagggcagacaggacggccacctgtggtgcagcaccaccagcaactacgagcaggaccagaagtacagcttctgcaccgaccacaccgtgctggtgcagaccagaggcggcaacagcaacggcgccctgtgccacttccccttcctgtacaacaaccacaactacaccgactgcaccagcgagggcagaagagacaacatgaagtggtgcggcaccacccagaactacgacgccgaccagaagttcggcttctgccccatggccgcccacgaggagatctgcaccaccaacgagggcgtgatgtacagaatcggcgaccagtgggacaagcagcacgacatgggccacatgatgagatgcacctgcgtgggcaacggcagaggcgagtggacctgcatcgcctacagccagctgagagaccagtgcatcgtggacgacatcacctacaacgtgaacgacaccttccacaagagacacgaggagggccacatgctgaactgcacctgcttcggccagggcagaggcagatggaagtgcgaccccgtggaccagtgccaggacagcgagaccggcaccttctaccagatcggcgacagctgggagaagtacgtgcacggcgtgagataccagtgctactgctacggcagaggcatcggcgagtggcactgccagcccctgcagacctaccccagcagcagcggccccgtggaggtgttcatcaccgagacccccagccagcccaacagccaccccatccagtggaacgccccccagcccagccacatcagcaagtacatcctgagatggagacccaagaacagcgtgggcagatggaaggaggccaccatccccggccacctgaacagctacaccatcaagggcctgaagcccggcgtggtgtacgagggccagctgatcagcatccagcagtacggccaccaggaggtgaccagattcgacttcaccaccaccagcaccagcacccccgtgaccagcaacaccgtgaccggcgagaccacccccttcagccccctggtggccaccagcgagagcgtgaccgagatcaccgccagcagcttcgtggtgagctgggtgagcgccagcgacaccgtgagcggcttcagagtggagtacgagctgagcgaggagggcgacgagccccagtacctggacctgcccagcaccgccaccagcgtgaacatccccgacctgctgcccggcagaaagtacatcgtgaacgtgtaccagatcagcgaggacggcgagcagagcctgatcctgagcaccagccagaccaccgcccccgacgccccccccgacaccaccgtggaccaggtggacgacaccagcatcgtggtgagatggagcagaccccaggcccccatcaccggctacagaatcgtgtacagccccagcgtggagggcagcagcaccgagctgaacctgcccgagaccgccaacagcgtgaccctgagcgacctgcagcccggcgtgcagtacaacatcaccatctacgccgtggaggagaaccaggagagcacccccgtggtgatccagcaggagaccaccggcacccccagaagcgacaccgtgcccagccccagagacctgcagttcgtggaggtgaccgacgtgaaggtgaccatcatgtggaccccccccgagagcgccgtgaccggctacagagtggacgtgatccccgtgaacctgcccggcgagcacggccagagactgcccatcagcagaaacaccttcgccgaggtgaccggcctgagccccggcgtgacctactacttcaaggtgttcgccgtgagccacggcagagagagcaagcccctgaccgcccagcagaccaccaagctggacgcccccaccaacctgcagttcgtgaacgagaccgacagcaccgtgctggtgagatggaccccccccagagcccagatcaccggctacagactgaccgtgggcctgaccagaagaggccagcccagacagtacaacgtgggccccagcgtgagcaagtaccccctgagaaacctgcagcccgccagcgagtacaccgtgagcctggtggccatcaagggcaaccaggagagccccaaggccaccggcgtgttcaccaccctgcagcccggcagcagcatccccccctacaacaccgaggtgaccgagaccaccatcgtgatcacctggacccccgcccccagaatcggcttcaagctgggcgtgagacccagccagggcggcgaggcccccagagaggtgaccagcgacagcggcagcatcgtggtgagcggcctgacccccggcgtggagtacgtgtacaccatccaggtgctgagagacggccaggagagagacgcccccatcgtgaacaaggtggtgacccccctgagcccccccaccaacctgcacctggaggccaaccccgacaccggcgtgctgaccgtgagctgggagagaagcaccacccccgacatcaccggctacagaatcaccaccacccccaccaacggccagcagggcaacagcctggaggaggtggtgcacgccgaccagagcagctgcaccttcgacaacctgagccccggcctggagtacaacgtgagcgtgtacaccgtgaaggacgacaaggagagcgtgcccatcagcgacaccatcatccccgaggtgccccagctgaccgacctgagcttcgtggacatcaccgacagcagcatcggcctgagatggacccccctgaacagcagcaccatcatcggctacagaatcaccgtggtggccgccggcgagggcatccccatcttcgaggacttcgtggacagcagcgtgggctactacaccgtgaccggcctggagcccggcatcgactacgacatcagcgtgatcaccctgatcaacggcggcgagagcgcccccaccaccctgacccagcagaccgccgtgcccccccccaccgacctgagattcaccaacatcggccccgacaccatgagagtgacctgggcccccccccccagcatcgacctgaccaacttcctggtgagatacagccccgtgaagaacgaggaggacgtggccgagctgagcatcagccccagcgacaacgccgtggtgctgaccaacctgctgcccggcaccgagtacgtggtgagcgtgagcagcgtgtacgagcagcacgagagcacccccctgagaggcagacagaagaccggcctggacagccccaccggcatcgacttcagcgacatcaccgccaacagcttcaccgtgcactggatcgcccccagagccaccatcaccggctacagaatcagacaccaccccgagcacttcagcggcagacccagagaggacagagtgccccacagcagaaacagcatcaccctgaccaacctgacccccggcaccgagtacgtggtgagcatcgtggccctgaacggcagagaggagagccccctgctgatcggccagcagagcaccgtgagcgacgtgcccagagacctggaggtggtggccgccacccccaccagcctgctgatcagctgggacgcccccgccgtgaccgtgagatactacagaatcacctacggcgagaccggcggcaacagccccgtgcaggagttcaccgtgcccggcagcaagagcaccgccaccatcagcggcctgaagcccggcgtggactacaccatcaccgtgtacgccgtgaccggcagaggcgacagccccgccagcagcaagcccatcagcatcaactacagaaccgagatcgacaagcccagccagatgcaggtgaccgacgtgcaggacaacagcatcagcgtgaagtggctgcccagcagcagccccgtgaccggctacagagtgaccaccacccccaagaacggccccggccccaccaagaccaagaccgccggccccgaccagaccgagatgaccatcgagggcctgcagcccaccgtggagtacgtggtgagcgtgtacgcccagaaccccagcggcgagagccagcccctggtgcagaccgccgtgaccaacatcgacagacccaagggcctggccttcaccgacgtggacgtggacagcatcaagatcgcctgggagagcccccagggccaggtgagcagatacagagtgacctacagcagccccgaggacggcatccacgagctgttccccgcccccgacggcgaggaggacaccgccgagctgcagggcctgagacccggcagcgagtacaccgtgagcgtggtggccctgcacgacgacatggagagccagcccctgatcggcacccagagcaccgccatccccgcccccaccgacctgaagttcacccaggtgacccccaccagcctgagcgcccagtggaccccccccaacgtgcagctgaccggctacagagtgagagtgacccccaaggagaagaccggccccatgaaggagatcaacctggcccccgacagcagcagcgtggtggtgagcggcctgatggtggccaccaagtacgaggtgagcgtgtacgccctgaaggacaccctgaccagcagacccgcccagggcgtggtgaccaccctggagaacgtgagcccccccagaagagccagagtgaccgacgccaccgagaccaccatcaccatcagctggagaaccaagaccgagaccatcaccggcttccaggtggacgccgtgcccgccaacggccagacccccatccagagaaccatcaagcccgacgtgagaagctacaccatcaccggcctgcagcccggcaccgactacaagatctacctgtacaccctgaacgacaacgccagaagcagccccgtggtgatcgacgccagcaccgccatcgacgcccccagcaacctgagattcctggccaccacccccaacagcctgctggtgagctggcagccccccagagccagaatcaccggctacatcatcaagtacgagaagcccggcagcccccccagagaggtggtgcccagacccagacccggcgtgaccgaggccaccatcaccggcctggagcccggcaccgagtacaccatctacgtgatcgccctgaagaacaaccagaagagcgagcccctgatcggcagaaagaagaccgacgagctgccccagctggtgaccctgccccaccccaacctgcacggccccgagatcctggacgtgcccagcaccgtgcagaagacccccttcgtgacccaccccggctacgacaccggcaacggcatccagctgcccggcaccagcggccagcagcccagcgtgggccagcagatgatcttcgaggagcacggcttcagaagaaccaccccccccaccaccgccacccccatcagacacagacccagaccctacccccccaacgtgggcgaggagatccagatcggccacatccccagagaggacgtggactaccacctgtacccccacggccccggcctgaaccccaacgccagcaccggccaggaggccctgagccagaccaccatcagctgggcccccttccaggacaccagcgagtacatcatcagctgccaccccgtgggcaccgacgaggagcccctgcagttcagagtgcccggcaccagcaccagcgccaccctgaccggcctgaccagaggcgccacctacaacgtgatcgtggaggccctgaaggaccagcagagacacaaggtgagagaggaggtggtgaccgtgggcaacagcgtgaacgagggcctgaaccagcccaccgacgacagctgcttcgacccctacaccgtgagccactacgccgtgggcgacgagtgggagagaatgagcgagagcggcttcaagctgctgtgccagtgcctgggcttcggcagcggccacttcagatgcgacagcagcagatggtgccacgacaacggcgtgaactacaagatcggcgagaagtgggacagacagggcgagaacggccagatgatgagctgcacctgcctgggcaacggcaagggcgagttcaagtgcgacccccacgaggccacctgctacgacgacggcaagacctaccacgtgggcgagcagtggcagaaggagtacctgggcgccatctgcagctgcacctgcttcggcggccagagaggctggagatgcgacaactgcagaagacccggcggcgagcccagccccgagggcaccaccggccagagctacaaccagtacagccagagataccaccagagaaccaacaccaacgtgaactgccccatcgagtgcttcatgcccctggacgtgcaggccgacagagaggacagcagagagtag

SEQ ID NO: 10744 - DNA, 6891 bp, synthetic construct
  misc_feature 1..6891: note = Description of Artificial Sequence: Synthetic coding sequence
  source 1..6891: mol_type = other DNA
atgctgagaggccccggccccggcctgctgctgctggccgtgcagtgcctgggcaccgccgtgcccagcaccggcgccagcaagagcaagagacaggcccagcagatggtgcagccccagagccccgtggccgtgagccagagcaagcccggctgctacgacaacggcaagcactaccagatcaaccagcagtgggagagaacctacctgggcaacgccctggtgtgcacctgctacggcggcagcagaggcttcaactgcgagagcaagcccgaggccgaggagacctgcttcgacaagtacaccggcaacacctacagagtgggcgacacctacgagagacccaaggacagcatgatctgggactgcacctgcatcggcgccggcagaggcagaatcagctgcaccatcgccaacagatgccacgagggcggccagagctacaagatcggcgacacctggagaagaccccacgagaccggcggctacatgctggagtgcgtgtgcctgggcaacggcaagggcgagtggacctgcaagcccatcgccgagaagtgcttcgaccacgccgccggcaccagctacgtggtgggcgagacctgggagaagccctaccagggctggatgatggtggactgcacctgcctgggcgagggcagcggcagaatcacctgcaccagcagaaacagatgcaacgaccaggacaccagaaccagctacagaatcggcgacacctggagcaagaaggacaacagaggcaacctgctgcagtgcatctgcaccggcaacggcagaggcgagtggaagtgcgagagacacaccagcgtgcagaccaccagcagcggcagcggccccttcaccgacgtgagagccgccgtgtaccagccccagccccacccccagccccccccctacggccactgcgtgaccgacagcggcgtggtgtacagcgtgggcatgcagtggctgaagacccagggcaacaagcagatgctgtgcacctgcctgggcaacggcgtgagctgccaggagaccgccgtgacccagacctacggcggcaacagcaacggcgagccctgcgtgctgcccttcacctacaacggcagaaccttctacagctgcaccaccgagggcagacaggacggccacctgtggtgcagcaccaccagcaactacgagcaggaccagaagtacagcttctgcaccgaccacaccgtgctggtgcagaccagaggcggcaacagcaacggcgccctgtgccacttccccttcctgtacaacaaccacaactacaccgactgcaccagcgagggcagaagagacaacatgaagtggtgcggcaccacccagaactacgacgccgaccagaagttcggcttctgccccatggccgcccacgaggagatctgcaccaccaacgagggcgtgatgtacagaatcggcgaccagtgggacaagcagcacgacatgggccacatgatgagatgcacctgcgtgggcaacggcagaggcgagtggacctgcatcgcctacagccagctgagagaccagtgcatcgtggacgacatcacctacaacgtgaacgacaccttccacaagagacacgaggagggccacatgctgaactgcacctgcttcggccagggcagaggcagatggaagtgcgaccccgtggaccagtgccaggacagcgagaccggcaccttctaccagatcggcgacagctgggagaagtacgtgcacggcgtgagataccagtgctactgctacggcagaggcatcggcgagtggcactgccagcccctgcagacctaccccagcagcagcggccccgtggaggtgttcatcaccgagacccccagccagcccaacagccaccccatccagtggaacgccccccagcccagccacatcagcaagtacatcctgagatggagacccaagaacagcgtgggcagatggaaggaggccaccatccccggccacctgaacagctacaccatcaagggcctgaagcccggcgtggtgtacgagggccagctgatcagcatccagcagtacggccaccaggaggtgaccagattcgacttcaccaccaccagcaccagcacccccgtgaccagcaacaccgtgaccggcgagaccacccccttcagccccctggtggccaccagcgagagcgtgaccgagatcaccgccagcagcttcgtggtgagctgggtgagcgccagcgacaccgtgagcggcttcagagtggagtacgagctgagcgaggagggcgacgagccccagtacctggacctgcccagcaccgccaccagcgtgaacatccccgacctgctgcccggcagaaagtacatcgtgaacgtgtaccagatcagcgaggacggcgagcagagcctgatcctgagcaccagccagaccaccgcccccgacgccccccccgacaccaccgtggaccaggtggacgacaccagcatcgtggtgagatggagcagaccccaggcccccatcaccggctacagaatcgtgtacagccccagcgtggagggcagcagcaccgagctgaacctgcccgagaccgccaacagcgtgaccctgagcgacctgcagcccggcgtgcagtacaacatcaccatctacgccgtggaggagaaccaggagagcacccccgtggtgatccagcaggagaccaccggcacccccagaagcgacaccgtgcccagccccagagacctgcagttcgtggaggtgaccgacgtgaaggtgaccatcatgtggaccccccccgagagcgccgtgaccggctacagagtggacgtgatccccgtgaacctgcccggcgagcacggccagagactgcccatcagcagaaacaccttcgccgaggtgaccggcctgagccccggcgtgacctactacttcaaggtgttcgccgtgagccacggcagagagagcaagcccctgaccgcccagcagaccaccaagctggacgcccccaccaacctgcagttcgtgaacgagaccgacagcaccgtgctggtgagatggaccccccccagagcccagatcaccggctacagactgaccgtgggcctgaccagaagaggccagcccagacagtacaacgtgggccccagcgtgagcaagtaccccctgagaaacctgcagcccgccagcgagtacaccgtgagcctggtggccatcaagggcaaccaggagagccccaaggccaccggcgtgttcaccaccctgcagcccggcagcagcatccccccctacaacaccgaggtgaccgagaccaccatcgtgatcacctggacccccgcccccagaatcggcttcaagctgggcgtgagacccagccagggcggcgaggcccccagagaggtgaccagcgacagcggcagcatcgtggtgagcggcctgacccccggcgtggagtacgtgtacaccatccaggtgctgagagacggccaggagagagacgcccccatcgtgaacaaggtggtgacccccctgagcccccccaccaacctgcacctggaggccaaccccgacaccggcgtgctgaccgtgagctgggagagaagcaccacccccgacatcaccggctacagaatcaccaccacccccaccaacggccagcagggcaacagcctggaggaggtggtgcacgccgaccagagcagctgcaccttcgacaacctgagccccggcctggagtacaacgtgagcgtgtacaccgtgaaggacgacaaggagagcgtgcccatcagcgacaccatcatccccgccgtgcccccccccaccgacctgagattcaccaacatcggccccgacaccatgagagtgacctgggcccccccccccagcatcgacctgaccaacttcctggtgagatacagccccgtgaagaacgaggaggacgtggccgagctgagcatcagccccagcgacaacgccgtggtgctgaccaacctgctgcccggcaccgagtacgtggtgagcgtgagcagcgtgtacgagcagcacgagagcacccccctgagaggcagacagaagaccggcctggacagccccaccggcatcgacttcagcgacatcaccgccaacagcttcaccgtgcactggatcgcccccagagccaccatcaccggctacagaatcagacaccaccccgagcacttcagcggcagacccagagaggacagagtgccccacagcagaaacagcatcaccctgaccaacctgacccccggcaccgagtacgtggtgagcatcgtggccctgaacggcagagaggagagccccctgctgatcggccagcagagcaccgtgagcgacgtgcccagagacctggaggtggtggccgccacccccaccagcctgctgatcagctgggacgcccccgccgtgaccgtgagatactacagaatcacctacggcgagaccggcggcaacagccccgtgcaggagttcaccgtgcccggcagcaagagcaccgccaccatcagcggcctgaagcccggcgtggactacaccatcaccgtgtacgccgtgaccggcagaggcgacagccccgccagcagcaagcccatcagcatcaactacagaaccgagatcgacaagcccagccagatgcaggtgaccgacgtgcaggacaacagcatcagcgtgaagtggctgcccagcagcagccccgtgaccggctacagagtgaccaccacccccaagaacggccccggccccaccaagaccaagaccgccggccccgaccagaccgagatgaccatcgagggcctgcagcccaccgtggagtacgtggtgagcgtgtacgcccagaaccccagcggcgagagccagcccctggtgcagaccgccgtgaccaccatccccgcccccaccgacctgaagttcacccaggtgacccccaccagcctgagcgcccagtggaccccccccaacgtgcagctgaccggctacagagtgagagtgacccccaaggagaagaccggccccatgaaggagatcaacctggcccccgacagcagcagcgtggtggtgagcggcctgatggtggccaccaagtacgaggtgagcgtgtacgccctgaaggacaccctgaccagcagacccgcccagggcgtggtgaccaccctggagaacgtgagcccccccagaagagccagagtgaccgacgccaccgagaccaccatcaccatcagctggagaaccaagaccgagaccatcaccggcttccaggtggacgccgtgcccgccaacggccagacccccatccagagaaccatcaagcccgacgtgagaagctacaccatcaccggcctgcagcccggcaccgactacaagatctacctgtacaccctgaacgacaacgccagaagcagccccgtggtgatcgacgccagcaccgccatcgacgcccccagcaacctgagattcctggccaccacccccaacagcctgctggtgagctggcagccccccagagccagaatcaccggctacatcatcaagtacgagaagcccggcagcccccccagagaggtggtgcccagacccagacccggcgtgaccgaggccaccatcaccggcctggagcccggcaccgagtacaccatctacgtgatcgccctgaagaacaaccagaagagcgagcccctgatcggcagaaagaagaccgacgagctgccccagctggtgaccctgccccaccccaacctgcacggccccgagatcctggacgtgcccagcaccgtgcagaagacccccttcgtgacccaccccggctacgacaccggcaacggcatccagctgcccggcaccagcggccagcagcccagcgtgggccagcagatgatcttcgaggagcacggcttcagaagaaccaccccccccaccaccgccacccccatcagacacagacccagaccctacccccccaacgtgggcgaggagatccagatcggccacatccccagagaggacgtggactaccacctgtacccccacggccccggcctgaaccccaacgccagcaccggccaggaggccctgagccagaccaccatcagctgggcccccttccaggacaccagcgagtacatcatcagctgccaccccgtgggcaccgacgaggagcccctgcagttcagagtgcccggcaccagcaccagcgccaccctgaccggcctgaccagaggcgccacctacaacgtgatcgtggaggccctgaaggaccagcagagacacaaggtgagagaggaggtggtgaccgtgggcaacagcgtgaacgagggcctgaaccagcccaccgacgacagctgcttcgacccctacaccgtgagccactacgccgtgggcgacgagtgggagagaatgagcgagagcggcttcaagctgctgtgccagtgcctgggcttcggcagcggccacttcagatgcgacagcagcagatggtgccacgacaacggcgtgaactacaagatcggcgagaagtgggacagacagggcgagaacggccagatgatgagctgcacctgcctgggcaacggcaagggcgagttcaagtgcgacccccacgaggccacctgctacgacgacggcaagacctaccacgtgggcgagcagtggcagaaggagtacctgggcgccatctgcagctgcacctgcttcggcggccagagaggctggagatgcgacaactgcagaagacccggcggcgagcccagccccgagggcaccaccggccagagctacaaccagtacagccagagataccaccagagaaccaacaccaacgtgaactgccccatcgagtgcttcatgcccctggacgtgcaggccgacagagaggacagcagagagtag

SEQ ID NO: 10745 - DNA, 6096 bp, synthetic construct
  misc_feature 1..6096: note = Description of Artificial Sequence: Synthetic coding sequence
  source 1..6096: mol_type = other DNA
atgctgagaggccccggccccggcctgctgctgctggccgtgcagtgcctgggcaccgccgtgcccagcaccggcgccagcaagagcaagagacaggcccagcagatggtgcagccccagagccccgtggccgtgagccagagcaagcccggctgctacgacaacggcaagcactaccagatcaaccagcagtgggagagaacctacctgggcaacgccctggtgtgcacctgctacggcggcagcagaggcttcaactgcgagagcaagcccgaggccgaggagacctgcttcgacaagtacaccggcaacacctacagagtgggcgacacctacgagagacccaaggacagcatgatctgggactgcacctgcatcggcgccggcagaggcagaatcagctgcaccatcgccaacagatgccacgagggcggccagagctacaagatcggcgacacctggagaagaccccacgagaccggcggctacatgctggagtgcgtgtgcctgggcaacggcaagggcgagtggacctgcaagcccatcgccgagaagtgcttcgaccacgccgccggcaccagctacgtggtgggcgagacctgggagaagccctaccagggctggatgatggtggactgcacctgcctgggcgagggcagcggcagaatcacctgcaccagcagaaacagatgcaacgaccaggacaccagaaccagctacagaatcggcgacacctggagcaagaaggacaacagaggcaacctgctgcagtgcatctgcaccggcaacggcagaggcgagtggaagtgcgagagacacaccagcgtgcagaccaccagcagcggcagcggccccttcaccgacgtgagagccgccgtgtaccagccccagccccacccccagccccccccctacggccactgcgtgaccgacagcggcgtggtgtacagcgtgggcatgcagtggctgaagacccagggcaacaagcagatgctgtgcacctgcctgggcaacggcgtgagctgccaggagaccgccgtgacccagacctacggcggcaacagcaacggcgagccctgcgtgctgcccttcacctacaacggcagaaccttctacagctgcaccaccgagggcagacaggacggccacctgtggtgcagcaccaccagcaactacgagcaggaccagaagtacagcttctgcaccgaccacaccgtgctggtgcagaccagaggcggcaacagcaacggcgccctgtgccacttccccttcctgtacaacaaccacaactacaccgactgcaccagcgagggcagaagagacaacatgaagtggtgcggcaccacccagaactacgacgccgaccagaagttcggcttctgccccatggccgcccacgaggagatctgcaccaccaacgagggcgtgatgtacagaatcggcgaccagtgggacaagcagcacgacatgggccacatgatgagatgcacctgcgtgggcaacggcagaggcgagtggacctgcatcgcctacagccagctgagagaccagtgcatcgtggacgacatcacctacaacgtgaacgacaccttccacaagagacacgaggagggccacatgctgaactgcacctgcttcggccagggcagaggcagatggaagtgcgaccccgtggaccagtgccaggacagcgagaccggcaccttctaccagatcggcgacagctgggagaagtacgtgcacggcgtgagataccagtgctactgctacggcagaggcatcggcgagtggcactgccagcccctgcagacctaccccagcagcagcggccccgtggaggtgttcatcaccgagacccccagccagcccaacagccaccccatccagtggaacgccccccagcccagccacatcagcaagtacatcctgagatggagacccaagaacagcgtgggcagatggaaggaggccaccatccccggccacctgaacagctacaccatcaagggcctgaagcccggcgtggtgtacgagggccagctgatcagcatccagcagtacggccaccaggaggtgaccagattcgacttcaccaccaccagcaccagcacccccgtgaccagcaacaccgtgaccggcgagaccacccccttcagccccctggtggccaccagcgagagcgtgaccgagatcaccgccagcagcttcgtggtgagctgggtgagcgccagcgacaccgtgagcggcttcagagtggagtacgagctgagcgaggagggcgacgagccccagtacctggacctgcccagcaccgccaccagcgtgaacatccccgacctgctgcccggcagaaagtacatcgtgaacgtgtaccagatcagcgaggacggcgagcagagcctgatcctgagcaccagccagaccaccgcccccgacgccccccccgacaccaccgtggaccaggtggacgacaccagcatcgtggtgagatggagcagaccccaggcccccatcaccggctacagaatcgtgtacagccccagcgtggagggcagcagcaccgagctgaacctgcccgagaccgccaacagcgtgaccctgagcgacctgcagcccggcgtgcagtacaacatcaccatctacgccgtggaggagaaccaggagagcacccccgtggtgatccagcaggagaccaccggcacccccagaagcgacaccgtgcccagccccagagacctgcagttcgtggaggtgaccgacgtgaaggtgaccatcatgtggaccccccccgagagcgccgtgaccggctacagagtggacgtgatccccgtgaacctgcccggcgagcacggccagagactgcccatcagcagaaacaccttcgccgaggtgaccggcctgagccccggcgtgacctactacttcaaggtgttcgccgtgagccacggcagagagagcaagcccctgaccgcccagcagaccaccaagctggacgcccccaccaacctgcagttcgtgaacgagaccgacagcaccgtgctggtgagatggaccccccccagagcccagatcaccggctacagactgaccgtgggcctgaccagaagaggccagcccagacagtacaacgtgggccccagcgtgagcaagtaccccctgagaaacctgcagcccgccagcgagtacaccgtgagcctggtggccatcaagggcaaccaggagagccccaaggccaccggcgtgttcaccaccctgcagcccggcagcagcatccccccctacaacaccgaggtgaccgagaccaccatcgtgatcacctggacccccgcccccagaatcggcttcaagctgggcgtgagacccagccagggcggcgaggcccccagagaggtgaccagcgacagcggcagcatcgtggtgagcggcctgacccccggcgtggagtacgtgtacaccatccaggtgctgagagacggccaggagagagacgcccccatcgtgaacaaggtggtgacccccctgagcccccccaccaacctgcacctggaggccaaccccgacaccggcgtgctgaccgtgagctgggagagaagcaccacccccgacatcaccggctacagaatcaccaccacccccaccaacggccagcagggcaacagcctggaggaggtggtgcacgccgaccagagcagctgcaccttcgacaacctgagccccggcctggagtacaacgtgagcgtgtacaccgtgaaggacgacaaggagagcgtgcccatcagcgacaccatcatccccgccgtgcccccccccaccgacctgagattcaccaacatcggccccgacaccatgagagtgacctgggcccccccccccagcatcgacctgaccaacttcctggtgagatacagccccgtgaagaacgaggaggacgtggccgagctgagcatcagccccagcgacaacgccgtggtgctgaccaacctgctgcccggcaccgagtacgtggtgagcgtgagcagcgtgtacgagcagcacgagagcacccccctgagaggcagacagaagaccggcctggacagccccaccggcatcgacttcagcgacatcaccgccaacagcttcaccgtgcactggatcgcccccagagccaccatcaccggctacagaatcagacaccaccccgagcacttcagcggcagacccagagaggacagagtgccccacagcagaaacagcatcaccctgaccaacctgacccccggcaccgagtacgtggtgagcatcgtggccctgaacggcagagaggagagccccctgctgatcggccagcagagcaccgtgagcgacgtgcccagagacctggaggtggtggccgccacccccaccagcctgctgatcagctgggacgcccccgccgtgaccgtgagatactacagaatcacctacggcgagaccggcggcaacagccccgtgcaggagttcaccgtgcccggcagcaagagcaccgccaccatcagcggcctgaagcccggcgtggactacaccatcaccgtgtacgccgtgaccggcagaggcgacagccccgccagcagcaagcccatcagcatcaactacagaaccgagatcgacaagcccagccagatgcaggtgaccgacgtgcaggacaacagcatcagcgtgaagtggctgcccagcagcagccccgtgaccggctacagagtgaccaccacccccaagaacggccccggccccaccaagaccaagaccgccggccccgaccagaccgagatgaccatcgagggcctgcagcccaccgtggagtacgtggtgagcgtgtacgcccagaaccccagcggcgagagccagcccctggtgcagaccgccgtgaccaacatcgacagacccaagggcctggccttcaccgacgtggacgtggacagcatcaagatcgcctgggagagcccccagggccaggtgagcagatacagagtgacctacagcagccccgaggacggcatccacgagctgttccccgcccccgacggcgaggaggacaccgccgagctgcagggcctgagacccggcagcgagtacaccgtgagcgtggtggccctgcacgacgacatggagagccagcccctgatcggcacccagagcaccgccatccccgcccccaccgacctgaagttcacccaggtgacccccaccagcctgagcgcccagtggaccccccccaacgtgcagctgaccggctacagagtgagagtgacccccaaggagaagaccggccccatgaaggagatcaacctggcccccgacagcagcagcgtggtggtgagcggcctgatggtggccaccaagtacgaggtgagcgtgtacgccctgaaggacaccctgaccagcagacccgcccagggcgtggtgaccaccctggagaacgtgagcccccccagaagagccagagtgaccgacgccaccgagaccaccatcaccatcagctggagaaccaagaccgagaccatcaccggcttccaggtggacgccgtgcccgccaacggccagacccccatccagagaaccatcaagcccgacgtgagaagctacaccatcaccggcctgcagcccggcaccgactacaagatctacctgtacaccctgaacgacaacgccagaagcagccccgtggtgatcgacgccagcaccgccatcgacgcccccagcaacctgagattcctggccaccacccccaacagcctgctggtgagctggcagccccccagagccagaatcaccggctacatcatcaagtacgagaagcccggcagcccccccagagaggtggtgcccagacccagacccggcgtgaccgaggccaccatcaccggcctggagcccggcaccgagtacaccatctacgtgatcgccctgaagaacaaccagaagagcgagcccctgatcggcagaaagaagaccggccaggaggccctgagccagaccaccatcagctgggcccccttccaggacaccagcgagtacatcatcagctgccaccccgtgggcaccgacgaggagcccctgcagagcaccaaggcctag

SEQ ID NO: 10746 - DNA, 6531 bp, synthetic construct
  misc_feature 1..6531: note = Description of Artificial Sequence: Synthetic coding sequence
  source 1..6531: mol_type = other DNA
atgctgagaggccccggccccggcctgctgctgctggccgtgcagtgcctgggcaccgccgtgcccagcaccggcgccagcaagagcaagagacaggcccagcagatggtgcagccccagagccccgtggccgtgagccagagcaagcccggctgctacgacaacggcaagcactaccagatcaaccagcagtgggagagaacctacctgggcaacgccctggtgtgcacctgctacggcggcagcagaggcttcaactgcgagagcaagcccgaggccgaggagacctgcttcgacaagtacaccggcaacacctacagagtgggcgacacctacgagagacccaaggacagcatgatctgggactgcacctgcatcggcgccggcagaggcagaatcagctgcaccatcgccaacagatgccacgagggcggccagagctacaagatcggcgacacctggagaagaccccacgagaccggcggctacatgctggagtgcgtgtgcctgggcaacggcaagggcgagtggacctgcaagcccatcgccgagaagtgcttcgaccacgccgccggcaccagctacgtggtgggcgagacctgggagaagccctaccagggctggatgatggtggactgcacctgcctgggcgagggcagcggcagaatcacctgcaccagcagaaacagatgcaacgaccaggacaccagaaccagctacagaatcggcgacacctggagcaagaaggacaacagaggcaacctgctgcagtgcatctgcaccggcaacggcagaggcgagtggaagtgcgagagacacaccagcgtgcagaccaccagcagcggcagcggccccttcaccgacgtgagagccgccgtgtaccagccccagccccacccccagccccccccctacggccactgcgtgaccgacagcggcgtggtgtacagcgtgggcatgcagtggctgaagacccagggcaacaagcagatgctgtgcacctgcctgggcaacggcgtgagctgccaggagaccgccgtgacccagacctacggcggcaacagcaacggcgagccctgcgtgctgcccttcacctacaacggcagaaccttctacagctgcaccaccgagggcagacaggacggccacctgtggtgcagcaccaccagcaactacgagcaggaccagaagtacagcttctgcaccgaccacaccgtgctggtgcagaccagaggcggcaacagcaacggcgccctgtgccacttccccttcctgtacaacaaccacaactacaccgactgcaccagcgagggcagaagagacaacatgaagtggtgcggcaccacccagaactacgacgccgaccagaagttcggcttctgccccatggccgcccacgaggagatctgcaccaccaacgagggcgtgatgtacagaatcggcgaccagtgggacaagcagcacgacatgggccacatgatgagatgcacctgcgtgggcaacggcagaggcgagtggacctgcatcgcctacagccagctgagagaccagtgcatcgtggacgacatcacctacaacgtgaacgacaccttccacaagagacacgaggagggccacatgctgaactgcacctgcttcggccagggcagaggcagatggaagtgcgaccccgtggaccagtgccaggacagcgagaccggcaccttctaccagatcggcgacagctgggagaagtacgtgcacggcgtgagataccagtgctactgctacggcagaggcatcggcgagtggcactgccagcccctgcagacctaccccagcagcagcggccccgtggaggtgttcatcaccgagacccccagccagcccaacagccaccccatccagtggaacgccccccagcccagccacatcagcaagtacatcctgagatggagacccaagaacagcgtgggcagatggaaggaggccaccatccccggccacctgaacagctacaccatcaagggcctgaagcccggcgtggtgtacgagggccagctgatcagcatccagcagtacggccaccaggaggtgaccagattcgacttcaccaccaccagcaccagcacccccgtgaccagcaacaccgtgaccggcgagaccacccccttcagccccctggtggccaccagcgagagcgtgaccgagatcaccgccagcagcttcgtggtgagctgggtgagcgccagcgacaccgtgagcggcttcagagtggagtacgagctgagcgaggagggcgacgagccccagtacctggacctgcccagcaccgccaccagcgtgaacatccccgacctgctgcccggcagaaagtacatcgtgaacgtgtaccagatcagcgaggacggcgagcagagcctgatcctgagcaccagccagaccaccgcccccgacgccccccccgacaccaccgtggaccaggtggacgacaccagcatcgtggtgagatggagcagaccccaggcccccatcaccggctacagaatcgtgtacagccccagcgtggagggcagcagcaccgagctgaacctgcccgagaccgccaacagcgtgaccctgagcgacctgcagcccggcgtgcagtacaacatcaccatctacgccgtggaggagaaccaggagagcacccccgtggtgatccagcaggagaccaccggcacccccagaagcgacaccgtgcccagccccagagacctgcagttcgtggaggtgaccgacgtgaaggtgaccatcatgtggaccccccccgagagcgccgtgaccggctacagagtggacgtgatccccgtgaacctgcccggcgagcacggccagagactgcccatcagcagaaacaccttcgccgaggtgaccggcctgagccccggcgtgacctactacttcaaggtgttcgccgtgagccacggcagagagagcaagcccctgaccgcccagcagaccaccaagctggacgcccccaccaacctgcagttcgtgaacgagaccgacagcaccgtgctggtgagatggaccccccccagagcccagatcaccggctacagactgaccgtgggcctgaccagaagaggccagcccagacagtacaacgtgggccccagcgtgagcaagtaccccctgagaaacctgcagcccgccagcgagtacaccgtgagcctggtggccatcaagggcaaccaggagagccccaaggccaccggcgtgttcaccaccctgcagcccggcagcagcatccccccctacaacaccgaggtgaccgagaccaccatcgtgatcacctggacccccgcccccagaatcggcttcaagctgggcgtgagacccagccagggcggcgaggcccccagagaggtgaccagcgacagcggcagcatcgtggtgagcggcctgacccccggcgtggagtacgtgtacaccatccaggtgctgagagacggccaggagagagacgcccccatcgtgaacaaggtggtgacccccctgagcccccccaccaacctgcacctggaggccaaccccgacaccggcgtgctgaccgtgagctgggagagaagcaccacccccgacatcaccggctacagaatcaccaccacccccaccaacggccagcagggcaacagcctggaggaggtggtgcacgccgaccagagcagctgcaccttcgacaacctgagccccggcctggagtacaacgtgagcgtgtacaccgtgaaggacgacaaggagagcgtgcccatcagcgacaccatcatccccgccgtgcccccccccaccgacctgagattcaccaacatcggccccgacaccatgagagtgacctgggcccccccccccagcatcgacctgaccaacttcctggtgagatacagccccgtgaagaacgaggaggacgtggccgagctgagcatcagccccagcgacaacgccgtggtgctgaccaacctgctgcccggcaccgagtacgtggtgagcgtgagcagcgtgtacgagcagcacgagagcacccccctgagaggcagacagaagaccggcctggacagccccaccggcatcgacttcagcgacatcaccgccaacagcttcaccgtgcactggatcgcccccagagccaccatcaccggctacagaatcagacaccaccccgagcacttcagcggcagacccagagaggacagagtgccccacagcagaaacagcatcaccctgaccaacctgacccccggcaccgagtacgtggtgagcatcgtggccctgaacggcagagaggagagccccctgctgatcggccagcagagcaccgtgagcgacgtgcccagagacctggaggtggtggccgccacccccaccagcctgctgatcagctgggacgcccccgccgtgaccgtgagatactacagaatcacctacggcgagaccggcggcaacagccccgtgcaggagttcaccgtgcccggcagcaagagcaccgccaccatcagcggcctgaagcccggcgtggactacaccatcaccgtgtacgccgtgaccggcagaggcgacagccccgccagcagcaagcccatcagcatcaactacagaaccgagatcgacaagcccagccagatgcaggtgaccgacgtgcaggacaacagcatcagcgtgaagtggctgcccagcagcagccccgtgaccggctacagagtgaccaccacccccaagaacggccccggccccaccaagaccaagaccgccggccccgaccagaccgagatgaccatcgagggcctgcagcccaccgtggagtacgtggtgagcgtgtacgcccagaaccccagcggcgagagccagcccctggtgcagaccgccgtgaccaccatccccgcccccaccgacctgaagttcacccaggtgacccccaccagcctgagcgcccagtggaccccccccaacgtgcagctgaccggctacagagtgagagtgacccccaaggagaagaccggccccatgaaggagatcaacctggcccccgacagcagcagcgtggtggtgagcggcctgatggtggccaccaagtacgaggtgagcgtgtacgccctgaaggacaccctgaccagcagacccgcccagggcgtggtgaccaccctggagaacgtgagcccccccagaagagccagagtgaccgacgccaccgagaccaccatcaccatcagctggagaaccaagaccgagaccatcaccggcttccaggtggacgccgtgcccgccaacggccagacccccatccagagaaccatcaagcccgacgtgagaagctacaccatcaccggcctgcagcccggcaccgactacaagatctacctgtacaccctgaacgacaacgccagaagcagccccgtggtgatcgacgccagcaccgccatcgacgcccccagcaacctgagattcctggccaccacccccaacagcctgctggtgagctggcagccccccagagccagaatcaccggctacatcatcaagtacgagaagcccggcagcccccccagagaggtggtgcccagacccagacccggcgtgaccgaggccaccatcaccggcctggagcccggcaccgagtacaccatctacgtgatcgccctgaagaacaaccagaagagcgagcccctgatcggcagaaagaagaccggccaggaggccctgagccagaccaccatcagctgggcccccttccaggacaccagcgagtacatcatcagctgccaccccgtgggcaccgacgaggagcccctgcagttcagagtgcccggcaccagcaccagcgccaccctgaccggcctgaccagaggcgccacctacaacgtgatcgtggaggccctgaaggaccagcagagacacaaggtgagagaggaggtggtgaccgtgggcaacagcgtgaacgagggcctgaaccagcccaccgacgacagctgcttcgacccctacaccgtgagccactacgccgtgggcgacgagtgggagagaatgagcgagagcggcttcaagctgctgtgccagtgcctgggcttcggcagcggccacttcagatgcgacagcagcagatggtgccacgacaacggcgtgaactacaagatcggcgagaagtgggacagacagggcgagaacggccagatgatgagctgcacctgcctgggcaacggcaagggcgagttcaagtgcgacccccacgaggccacctgctacgacgacggcaagacctaccacgtgggcgagcagtggcagaaggagtacctgggcgccatctgcagctgcacctgcttcggcggccagagaggctggagatgcgacaactgcagaagacccggcggcgagcccagccccgagggcaccaccggccagagctacaaccagtacagccagagataccaccagagaaccaacaccaacgtgaactgccccatcgagtgcttcatgcccctggacgtgcaggccgacagagaggacagcagagagtag

SEQ ID NO: 10747 - DNA, 7161 bp, synthetic construct
  misc_feature 1..7161: note = Description of Artificial Sequence: Synthetic coding sequence
  source 1..7161: mol_type = other DNA
atgctgagaggccccggccccggcctgctgctgctggccgtgcagtgcctgggcaccgccgtgcccagcaccggcgccagcaagagcaagagacaggcccagcagatggtgcagccccagagccccgtggccgtgagccagagcaagcccggctgctacgacaacggcaagcactaccagatcaaccagcagtgggagagaacctacctgggcaacgccctggtgtgcacctgctacggcggcagcagaggcttcaactgcgagagcaagcccgaggccgaggagacctgcttcgacaagtacaccggcaacacctacagagtgggcgacacctacgagagacccaaggacagcatgatctgggactgcacctgcatcggcgccggcagaggcagaatcagctgcaccatcgccaacagatgccacgagggcggccagagctacaagatcggcgacacctggagaagaccccacgagaccggcggctacatgctggagtgcgtgtgcctgggcaacggcaagggcgagtggacctgcaagcccatcgccgagaagtgcttcgaccacgccgccggcaccagctacgtggtgggcgagacctgggagaagccctaccagggctggatgatggtggactgcacctgcctgggcgagggcagcggcagaatcacctgcaccagcagaaacagatgcaacgaccaggacaccagaaccagctacagaatcggcgacacctggagcaagaaggacaacagaggcaacctgctgcagtgcatctgcaccggcaacggcagaggcgagtggaagtgcgagagacacaccagcgtgcagaccaccagcagcggcagcggccccttcaccgacgtgagagccgccgtgtaccagccccagccccacccccagccccccccctacggccactgcgtgaccgacagcggcgtggtgtacagcgtgggcatgcagtggctgaagacccagggcaacaagcagatgctgtgcacctgcctgggcaacggcgtgagctgccaggagaccgccgtgacccagacctacggcggcaacagcaacggcgagccctgcgtgctgcccttcacctacaacggcagaaccttctacagctgcaccaccgagggcagacaggacggccacctgtggtgcagcaccaccagcaactacgagcaggaccagaagtacagcttctgcaccgaccacaccgtgctggtgcagaccagaggcggcaacagcaacggcgccctgtgccacttccccttcctgtacaacaaccacaactacaccgactgcaccagcgagggcagaagagacaacatgaagtggtgcggcaccacccagaactacgacgccgaccagaagttcggcttctgccccatggccgcccacgaggagatctgcaccaccaacgagggcgtgatgtacagaatcggcgaccagtgggacaagcagcacgacatgggccacatgatgagatgcacctgcgtgggcaacggcagaggcgagtggacctgcatcgcctacagccagctgagagaccagtgcatcgtggacgacatcacctacaacgtgaacgacaccttccacaagagacacgaggagggccacatgctgaactgcacctgcttcggccagggcagaggcagatggaagtgcgaccccgtggaccagtgccaggacagcgagaccggcaccttctaccagatcggcgacagctgggagaagtacgtgcacggcgtgagataccagtgctactgctacggcagaggcatcggcgagtggcactgccagcccctgcagacctaccccagcagcagcggccccgtggaggtgttcatcaccgagacccccagccagcccaacagccaccccatccagtggaacgccccccagcccagccacatcagcaagtacatcctgagatggagacccaagaacagcgtgggcagatggaaggaggccaccatccccggccacctgaacagctacaccatcaagggcctgaagcccggcgtggtgtacgagggccagctgatcagcatccagcagtacggccaccaggaggtgaccagattcgacttcaccaccaccagcaccagcacccccgtgaccagcaacaccgtgaccggcgagaccacccccttcagccccctggtggccaccagcgagagcgtgaccgagatcaccgccagcagcttcgtggtgagctgggtgagcgccagcgacaccgtgagcggcttcagagtggagtacgagctgagcgaggagggcgacgagccccagtacctggacctgcccagcaccgccaccagcgtgaacatccccgacctgctgcccggcagaaagtacatcgtgaacgtgtaccagatcagcgaggacggcgagcagagcctgatcctgagcaccagccagaccaccgcccccgacgccccccccgacaccaccgtggaccaggtggacgacaccagcatcgtggtgagatggagcagaccccaggcccccatcaccggctacagaatcgtgtacagccccagcgtggagggcagcagcaccgagctgaacctgcccgagaccgccaacagcgtgaccctgagcgacctgcagcccggcgtgcagtacaacatcaccatctacgccgtggaggagaaccaggagagcacccccgtggtgatccagcaggagaccaccggcacccccagaagcgacaccgtgcccagccccagagacctgcagttcgtggaggtgaccgacgtgaaggtgaccatcatgtggaccccccccgagagcgccgtgaccggctacagagtggacgtgatccccgtgaacctgcccggcgagcacggccagagactgcccatcagcagaaacaccttcgccgaggtgaccggcctgagccccggcgtgacctactacttcaaggtgttcgccgtgagccacggcagagagagcaagcccctgaccgcccagcagaccaccaagctggacgcccccaccaacctgcagttcgtgaacgagaccgacagcaccgtgctggtgagatggaccccccccagagcccagatcaccggctacagactgaccgtgggcctgaccagaagaggccagcccagacagtacaacgtgggccccagcgtgagcaagtaccccctgagaaacctgcagcccgccagcgagtacaccgtgagcctggtggccatcaagggcaaccaggagagccccaaggccaccggcgtgttcaccaccctgcagcccggcagcagcatccccccctacaacaccgaggtgaccgagaccaccatcgtgatcacctggacccccgcccccagaatcggcttcaagctgggcgtgagacccagccagggcggcgaggcccccagagaggtgaccagcgacagcggcagcatcgtggtgagcggcctgacccccggcgtggagtacgtgtacaccatccaggtgctgagagacggccaggagagagacgcccccatcgtgaacaaggtggtgacccccctgagcccccccaccaacctgcacctggaggccaaccccgacaccggcgtgctgaccgtgagctgggagagaagcaccacccccgacatcaccggctacagaatcaccaccacccccaccaacggccagcagggcaacagcctggaggaggtggtgcacgccgaccagagcagctgcaccttcgacaacctgagccccggcctggagtacaacgtgagcgtgtacaccgtgaaggacgacaaggagagcgtgcccatcagcgacaccatcatccccgccgtgcccccccccaccgacctgagattcaccaacatcggccccgacaccatgagagtgacctgggcccccccccccagcatcgacctgaccaacttcctggtgagatacagccccgtgaagaacgaggaggacgtggccgagctgagcatcagccccagcgacaacgccgtggtgctgaccaacctgctgcccggcaccgagtacgtggtgagcgtgagcagcgtgtacgagcagcacgagagcacccccctgagaggcagacagaagaccggcctggacagccccaccggcatcgacttcagcgacatcaccgccaacagcttcaccgtgcactggatcgcccccagagccaccatcaccggctacagaatcagacaccaccccgagcacttcagcggcagacccagagaggacagagtgccccacagcagaaacagcatcaccctgaccaacctgacccccggcaccgagtacgtggtgagcatcgtggccctgaacggcagagaggagagccccctgctgatcggccagcagagcaccgtgagcgacgtgcccagagacctggaggtggtggccgccacccccaccagcctgctgatcagctgggacgcccccgccgtgaccgtgagatactacagaatcacctacggcgagaccggcggcaacagccccgtgcaggagttcaccgtgcccggcagcaagagcaccgccaccatcagcggcctgaagcccggcgtggactacaccatcaccgtgtacgccgtgaccggcagaggcgacagccccgccagcagcaagcccatcagcatcaactacagaaccgagatcgacaagcccagccagatgcaggtgaccgacgtgcaggacaacagcatcagcgtgaagtggctgcccagcagcagccccgtgaccggctacagagtgaccaccacccccaagaacggccccggccccaccaagaccaagaccgccggccccgaccagaccgagatgaccatcgagggcctgcagcccaccgtggagtacgtggtgagcgtgtacgcccagaaccccagcggcgagagccagcccctggtgcagaccgccgtgaccaacatcgacagacccaagggcctggccttcaccgacgtggacgtggacagcatcaagatcgcctgggagagcccccagggccaggtgagcagatacagagtgacctacagcagccccgaggacggcatccacgagctgttccccgcccccgacggcgaggaggacaccgccgagctgcagggcctgagacccggcagcgagtacaccgtgagcgtggtggccctgcacgacgacatggagagccagcccctgatcggcacccagagcaccgccatccccgcccccaccgacctgaagttcacccaggtgacccccaccagcctgagcgcccagtggaccccccccaacgtgcagctgaccggctacagagtgagagtgacccccaaggagaagaccggccccatgaaggagatcaacctggcccccgacagcagcagcgtggtggtgagcggcctgatggtggccaccaagtacgaggtgagcgtgtacgccctgaaggacaccctgaccagcagacccgcccagggcgtggtgaccaccctggagaacgtgagcccccccagaagagccagagtgaccgacgccaccgagaccaccatcaccatcagctggagaaccaagaccgagaccatcaccggcttccaggtggacgccgtgcccgccaacggccagacccccatccagagaaccatcaagcccgacgtgagaagctacaccatcaccggcctgcagcccggcaccgactacaagatctacctgtacaccctgaacgacaacgccagaagcagccccgtggtgatcgacgccagcaccgccatcgacgcccccagcaacctgagattcctggccaccacccccaacagcctgctggtgagctggcagccccccagagccagaatcaccggctacatcatcaagtacgagaagcccggcagcccccccagagaggtggtgcccagacccagacccggcgtgaccgaggccaccatcaccggcctggagcccggcaccgagtacaccatctacgtgatcgccctgaagaacaaccagaagagcgagcccctgatcggcagaaagaagaccgacgagctgccccagctggtgaccctgccccaccccaacctgcacggccccgagatcctggacgtgcccagcaccgtgcagaagacccccttcgtgacccaccccggctacgacaccggcaacggcatccagctgcccggcaccagcggccagcagcccagcgtgggccagcagatgatcttcgaggagcacggcttcagaagaaccaccccccccaccaccgccacccccatcagacacagacccagaccctacccccccaacgtgggcgaggagatccagatcggccacatccccagagaggacgtggactaccacctgtacccccacggccccggcctgaaccccaacgccagcaccggccaggaggccctgagccagaccaccatcagctgggcccccttccaggacaccagcgagtacatcatcagctgccaccccgtgggcaccgacgaggagcccctgcagttcagagtgcccggcaccagcaccagcgccaccctgaccggcctgaccagaggcgccacctacaacgtgatcgtggaggccctgaaggaccagcagagacacaaggtgagagaggaggtggtgaccgtgggcaacagcgtgaacgagggcctgaaccagcccaccgacgacagctgcttcgacccctacaccgtgagccactacgccgtgggcgacgagtgggagagaatgagcgagagcggcttcaagctgctgtgccagtgcctgggcttcggcagcggccacttcagatgcgacagcagcagatggtgccacgacaacggcgtgaactacaagatcggcgagaagtgggacagacagggcgagaacggccagatgatgagctgcacctgcctgggcaacggcaagggcgagttcaagtgcgacccccacgaggccacctgctacgacgacggcaagacctaccacgtgggcgagcagtggcagaaggagtacctgggcgccatctgcagctgcacctgcttcggcggccagagaggctggagatgcgacaactgcagaagacccggcggcgagcccagccccgagggcaccaccggccagagctacaaccagtacagccagagataccaccagagaaccaacaccaacgtgaactgccccatcgagtgcttcatgcccctggacgtgcaggccgacagagaggacagcagagagtag

SEQ ID NO: 10748 - DNA, 6723 bp, synthetic construct
  misc_feature 1..6723: note = Description of Artificial Sequence: Synthetic coding sequence
  source 1..6723: mol_type = other DNA
atgctgagaggccccggccccggcctgctgctgctggccgtgcagtgcctgggcaccgccgtgcccagcaccggcgccagcaagagcaagagacaggcccagcagatggtgcagccccagagccccgtggccgtgagccagagcaagcccggctgctacgacaacggcaagcactaccagatcaaccagcagtgggagagaacctacctgggcaacgccctggtgtgcacctgctacggcggcagcagaggcttcaactgcgagagcaagcccgaggccgaggagacctgcttcgacaagtacaccggcaacacctacagagtgggcgacacctacgagagacccaaggacagcatgatctgggactgcacctgcatcggcgccggcagaggcagaatcagctgcaccatcgccaacagatgccacgagggcggccagagctacaagatcggcgacacctggagaagaccccacgagaccggcggctacatgctggagtgcgtgtgcctgggcaacggcaagggcgagtggacctgcaagcccatcgccgagaagtgcttcgaccacgccgccggcaccagctacgtggtgggcgagacctgggagaagccctaccagggctggatgatggtggactgcacctgcctgggcgagggcagcggcagaatcacctgcaccagcagaaacagatgcaacgaccaggacaccagaaccagctacagaatcggcgacacctggagcaagaaggacaacagaggcaacctgctgcagtgcatctgcaccggcaacggcagaggcgagtggaagtgcgagagacacaccagcgtgcagaccaccagcagcggcagcggccccttcaccgacgtgagagccgccgtgtaccagccccagccccacccccagccccccccctacggccactgcgtgaccgacagcggcgtggtgtacagcgtgggcatgcagtggctgaagacccagggcaacaagcagatgctgtgcacctgcctgggcaacggcgtgagctgccaggagaccgccgtgacccagacctacggcggcaacagcaacggcgagccctgcgtgctgcccttcacctacaacggcagaaccttctacagctgcaccaccgagggcagacaggacggccacctgtggtgcagcaccaccagcaactacgagcaggaccagaagtacagcttctgcaccgaccacaccgtgctggtgcagaccagaggcggcaacagcaacggcgccctgtgccacttccccttcctgtacaacaaccacaactacaccgactgcaccagcgagggcagaagagacaacatgaagtggtgcggcaccacccagaactacgacgccgaccagaagttcggcttctgccccatggccgcccacgaggagatctgcaccaccaacgagggcgtgatgtacagaatcggcgaccagtgggacaagcagcacgacatgggccacatgatgagatgcacctgcgtgggcaacggcagaggcgagtggacctgcatcgcctacagccagctgagagaccagtgcatcgtggacgacatcacctacaacgtgaacgacaccttccacaagagacacgaggagggccacatgctgaactgcacctgcttcggccagggcagaggcagatggaagtgcgaccccgtggaccagtgccaggacagcgagaccggcaccttctaccagatcggcgacagctgggagaagtacgtgcacggcgtgagataccagtgctactgctacggcagaggcatcggcgagtggcactgccagcccctgcagacctaccccagcagcagcggccccgtggaggtgttcatcaccgagacccccagccagcccaacagccaccccatccagtggaacgccccccagcccagccacatcagcaagtacatcctgagatggagacccaagaacagcgtgggcagatggaaggaggccaccatccccggccacctgaacagctacaccatcaagggcctgaagcccggcgtggtgtacgagggccagctgatcagcatccagcagtacggccaccaggaggtgaccagattcgacttcaccaccaccagcaccagcacccccgtgaccagcaacaccgtgaccggcgagaccacccccttcagccccctggtggccaccagcgagagcgtgaccgagatcaccgccagcagcttcgtggtgagctgggtgagcgccagcgacaccgtgagcggcttcagagtggagtacgagctgagcgaggagggcgacgagccccagtacctggacctgcccagcaccgccaccagcgtgaacatccccgacctgctgcccggcagaaagtacatcgtgaacgtgtaccagatcagcgaggacggcgagcagagcctgatcctgagcaccagccagaccaccgcccccgacgccccccccgacaccaccgtggaccaggtggacgacaccagcatcgtggtgagatggagcagaccccaggcccccatcaccggctacagaatcgtgtacagccccagcgtggagggcagcagcaccgagctgaacctgcccgagaccgccaacagcgtgaccctgagcgacctgcagcccggcgtgcagtacaacatcaccatctacgccgtggaggagaaccaggagagcacccccgtggtgatccagcaggagaccaccggcacccccagaagcgacaccgtgcccagccccagagacctgcagttcgtggaggtgaccgacgtgaaggtgaccatcatgtggaccccccccgagagcgccgtgaccggctacagagtggacgtgatccccgtgaacctgcccggcgagcacggccagagactgcccatcagcagaaacaccttcgccgaggtgaccggcctgagccccggcgtgacctactacttcaaggtgttcgccgtgagccacggcagagagagcaagcccctgaccgcccagcagaccaccaagctggacgcccccaccaacctgcagttcgtgaacgagaccgacagcaccgtgctggtgagatggaccccccccagagcccagatcaccggctacagactgaccgtgggcctgaccagaagaggccagcccagacagtacaacgtgggccccagcgtgagcaagtaccccctgagaaacctgcagcccgccagcgagtacaccgtgagcctggtggccatcaagggcaaccaggagagccccaaggccaccggcgtgttcaccaccctgcagcccggcagcagcatccccccctacaacaccgaggtgaccgagaccaccatcgtgatcacctggacccccgcccccagaatcggcttcaagctgggcgtgagacccagccagggcggcgaggcccccagagaggtgaccagcgacagcggcagcatcgtggtgagcggcctgacccccggcgtggagtacgtgtacaccatccaggtgctgagagacggccaggagagagacgcccccatcgtgaacaaggtggtgacccccctgagcccccccaccaacctgcacctggaggccaaccccgacaccggcgtgctgaccgtgagctgggagagaagcaccacccccgacatcaccggctacagaatcaccaccacccccaccaacggccagcagggcaacagcctggaggaggtggtgcacgccgaccagagcagctgcaccttcgacaacctgagccccggcctggagtacaacgtgagcgtgtacaccgtgaaggacgacaaggagagcgtgcccatcagcgacaccatcatccccgccgtgcccccccccaccgacctgagattcaccaacatcggccccgacaccatgagagtgacctgggcccccccccccagcatcgacctgaccaacttcctggtgagatacagccccgtgaagaacgaggaggacgtggccgagctgagcatcagccccagcgacaacgccgtggtgctgaccaacctgctgcccggcaccgagtacgtggtgagcgtgagcagcgtgtacgagcagcacgagagcacccccctgagaggcagacagaagaccggcctggacagccccaccggcatcgacttcagcgacatcaccgccaacagcttcaccgtgcactggatcgcccccagagccaccatcaccggctacagaatcagacaccaccccgagcacttcagcggcagacccagagaggacagagtgccccacagcagaaacagcatcaccctgaccaacctgacccccggcaccgagtacgtggtgagcatcgtggccctgaacggcagagaggagagccccctgctgatcggccagcagagcaccgtgagcgacgtgcccagagacctggaggtggtggccgccacccccaccagcctgctgatcagctgggacgcccccgccgtgaccgtgagatactacagaatcacctacggcgagaccggcggcaacagccccgtgcaggagttcaccgtgcccggcagcaagagcaccgccaccatcagcggcctgaagcccggcgtggactacaccatcaccgtgtacgccgtgaccggcagaggcgacagccccgccagcagcaagcccatcagcatcaactacagaaccgagatcgacaagcccagccagatgcaggtgaccgacgtgcaggacaacagcatcagcgtgaagtggctgcccagcagcagccccgtgaccggctacagagtgaccaccacccccaagaacggccccggccccaccaagaccaagaccgccggccccgaccagaccgagatgaccatcgagggcctgcagcccaccgtggagtacgtggtgagcgtgtacgcccagaaccccagcggcgagagccagcccctggtgcagaccgccgtgaccaccatccccgcccccaccgacctgaagttcacccaggtgacccccaccagcctgagcgcccagtggaccccccccaacgtgcagctgaccggctacagagtgagagtgacccccaaggagaagaccggccccatgaaggagatcaacctggcccccgacagcagcagcgtggtggtgagcggcctgatggtggccaccaagtacgaggtgagcgtgtacgccctgaaggacaccctgaccagcagacccgcccagggcgtggtgaccaccctggagaacgtgagcccccccagaagagccagagtgaccgacgccaccgagaccaccatcaccatcagctggagaaccaagaccgagaccatcaccggcttccaggtggacgccgtgcccgccaacggccagacccccatccagagaaccatcaagcccgacgtgagaagctacaccatcaccggcctgcagcccggcaccgactacaagatctacctgtacaccctgaacgacaacgccagaagcagccccgtggtgatcgacgccagcaccgccatcgacgcccccagcaacctgagattcctggccaccacccccaacagcctgctggtgagctggcagccccccagagccagaatcaccggctacatcatcaagtacgagaagcccggcagcccccccagagaggtggtgcccagacccagacccggcgtgaccgaggccaccatcaccggcctggagcccggcaccgagtacaccatctacgtgatcgccctgaagaacaaccagaagagcgagcccctgatcggcagaaagaagaccgtgcagaagacccccttcgtgacccaccccggctacgacaccggcaacggcatccagctgcccggcaccagcggccagcagcccagcgtgggccagcagatgatcttcgaggagcacggcttcagaagaaccaccccccccaccaccgccacccccatcagacacagacccagaccctacccccccaacgtgggccaggaggccctgagccagaccaccatcagctgggcccccttccaggacaccagcgagtacatcatcagctgccaccccgtgggcaccgacgaggagcccctgcagttcagagtgcccggcaccagcaccagcgccaccctgaccggcctgaccagaggcgccacctacaacgtgatcgtggaggccctgaaggaccagcagagacacaaggtgagagaggaggtggtgaccgtgggcaacagcgtgaacgagggcctgaaccagcccaccgacgacagctgcttcgacccctacaccgtgagccactacgccgtgggcgacgagtgggagagaatgagcgagagcggcttcaagctgctgtgccagtgcctgggcttcggcagcggccacttcagatgcgacagcagcagatggtgccacgacaacggcgtgaactacaagatcggcgagaagtgggacagacagggcgagaacggccagatgatgagctgcacctgcctgggcaacggcaagggcgagttcaagtgcgacccccacgaggccacctgctacgacgacggcaagacctaccacgtgggcgagcagtggcagaaggagtacctgggcgccatctgcagctgcacctgcttcggcggccagagaggctggagatgcgacaactgcagaagacccggcggcgagcccagccccgagggcaccaccggccagagctacaaccagtacagccagagataccaccagagaaccaacaccaacgtgaactgccccatcgagtgcttcatgcccctggacgtgcaggccgacagagaggacagcagagagtag

SEQ ID NO: 10749 - DNA, 1974 bp, synthetic construct
  misc_feature 1..1974: note = Description of Artificial Sequence: Synthetic coding sequence
  source 1..1974: mol_type = other DNA
atgctgagaggccccggccccggcctgctgctgctggccgtgcagtgcctgggcaccgccgtgcccagcaccggcgccagcaagagcaagagacaggcccagcagatggtgcagccccagagccccgtggccgtgagccagagcaagcccggctgctacgacaacggcaagcactaccagatcaaccagcagtgggagagaacctacctgggcaacgccctggtgtgcacctgctacggcggcagcagaggcttcaactgcgagagcaagcccgaggccgaggagacctgcttcgacaagtacaccggcaacacctacagagtgggcgacacctacgagagacccaaggacagcatgatctgggactgcacctgcatcggcgccggcagaggcagaatcagctgcaccatcgccaacagatgccacgagggcggccagagctacaagatcggcgacacctggagaagaccccacgagaccggcggctacatgctggagtgcgtgtgcctgggcaacggcaagggcgagtggacctgcaagcccatcgccgagaagtgcttcgaccacgccgccggcaccagctacgtggtgggcgagacctgggagaagccctaccagggctggatgatggtggactgcacctgcctgggcgagggcagcggcagaatcacctgcaccagcagaaacagatgcaacgaccaggacaccagaaccagctacagaatcggcgacacctggagcaagaaggacaacagaggcaacctgctgcagtgcatctgcaccggcaacggcagaggcgagtggaagtgcgagagacacaccagcgtgcagaccaccagcagcggcagcggccccttcaccgacgtgagagccgccgtgtaccagccccagccccacccccagccccccccctacggccactgcgtgaccgacagcggcgtggtgtacagcgtgggcatgcagtggctgaagacccagggcaacaagcagatgctgtgcacctgcctgggcaacggcgtgagctgccaggagaccgccgtgacccagacctacggcggcaacagcaacggcgagccctgcgtgctgcccttcacctacaacggcagaaccttctacagctgcaccaccgagggcagacaggacggccacctgtggtgcagcaccaccagcaactacgagcaggaccagaagtacagcttctgcaccgaccacaccgtgctggtgcagaccagaggcggcaacagcaacggcgccctgtgccacttccccttcctgtacaacaaccacaactacaccgactgcaccagcgagggcagaagagacaacatgaagtggtgcggcaccacccagaactacgacgccgaccagaagttcggcttctgccccatggccgcccacgaggagatctgcaccaccaacgagggcgtgatgtacagaatcggcgaccagtgggacaagcagcacgacatgggccacatgatgagatgcacctgcgtgggcaacggcagaggcgagtggacctgcatcgcctacagccagctgagagaccagtgcatcgtggacgacatcacctacaacgtgaacgacaccttccacaagagacacgaggagggccacatgctgaactgcacctgcttcggccagggcagaggcagatggaagtgcgaccccgtggaccagtgccaggacagcgagaccggcaccttctaccagatcggcgacagctgggagaagtacgtgcacggcgtgagataccagtgctactgctacggcagaggcatcggcgagtggcactgccagcccctgcagacctaccccagcagcagcggccccgtggaggtgttcatcaccgagacccccagccagcccaacagccaccccatccagtggaacgccccccagcccagccacatcagcaagtacatcctgagatggagacccgtgagcatcccccccagaaacctgggctactag

SEQ ID NO: 10750 - DNA, 6804 bp, synthetic construct
  misc_feature 1..6804: note = Description of Artificial Sequence: Synthetic coding sequence
  source 1..6804: mol_type = other DNA
atgctgagaggccccggccccggcctgctgctgctggccgtgcagtgcctgggcaccgccgtgcccagcaccggcgccagcaagagcaagagacaggcccagcagatggtgcagccccagagccccgtggccgtgagccagagcaagcccggctgctacgacaacggcaagcactaccagatcaaccagcagtgggagagaacctacctgggcaacgccctggtgtgcacctgctacggcggcagcagaggcttcaactgcgagagcaagcccgaggccgaggagacctgcttcgacaagtacaccggcaacacctacagagtgggcgacacctacgagagacccaaggacagcatgatctgggactgcacctgcatcggcgccggcagaggcagaatcagctgcaccatcgccaacagatgccacgagggcggccagagctacaagatcggcgacacctggagaagaccccacgagaccggcggctacatgctggagtgcgtgtgcctgggcaacggcaagggcgagtggacctgcaagcccatcgccgagaagtgcttcgaccacgccgccggcaccagctacgtggtgggcgagacctgggagaagccctaccagggctggatgatggtggactgcacctgcctgggcgagggcagcggcagaatcacctgcaccagcagaaacagatgcaacgaccaggacaccagaaccagctacagaatcggcgacacctggagcaagaaggacaacagaggcaacctgctgcagtgcatctgcaccggcaacggcagaggcgagtggaagtgcgagagacacaccagcgtgcagaccaccagcagcggcagcggccccttcaccgacgtgagagccgccgtgtaccagccccagccccacccccagccccccccctacggccactgcgtgaccgacagcggcgtggtgtacagcgtgggcatgcagtggctgaagacccagggcaacaagcagatgctgtgcacctgcctgggcaacggcgtgagctgccaggagaccgccgtgacccagacctacggcggcaacagcaacggcgagccctgcgtgctgcccttcacctacaacggcagaaccttctacagctgcaccaccgagggcagacaggacggccacctgtggtgcagcaccaccagcaactacgagcaggaccagaagtacagcttctgcaccgaccacaccgtgctggtgcagaccagaggcggcaacagcaacggcgccctgtgccacttccccttcctgtacaacaaccacaactacaccgactgcaccagcgagggcagaagagacaacatgaagtggtgcggcaccacccagaactacgacgccgaccagaagttcggcttctgccccatggccgcccacgaggagatctgcaccaccaacgagggcgtgatgtacagaatcggcgaccagtgggacaagcagcacgacatgggccacatgatgagatgcacctgcgtgggcaacggcagaggcgagtggacctgcatcgcctacagccagctgagagaccagtgcatcgtggacgacatcacctacaacgtgaacgacaccttccacaagagacacgaggagggccacatgctgaactgcacctgcttcggccagggcagaggcagatggaagtgcgaccccgtggaccagtgccaggacagcgagaccggcaccttctaccagatcggcgacagctgggagaagtacgtgcacggcgtgagataccagtgctactgctacggcagaggcatcggcgagtggcactgccagcccctgcagacctaccccagcagcagcggccccgtggaggtgttcatcaccgagacccccagccagcccaacagccaccccatccagtggaacgccccccagcccagccacatcagcaagtacatcctgagatggagacccaagaacagcgtgggcagatggaaggaggccaccatccccggccacctgaacagctacaccatcaagggcctgaagcccggcgtggtgtacgagggccagctgatcagcatccagcagtacggccaccaggaggtgaccagattcgacttcaccaccaccagcaccagcacccccgtgaccagcaacaccgtgaccggcgagaccacccccttcagccccctggtggccaccagcgagagcgtgaccgagatcaccgccagcagcttcgtggtgagctgggtgagcgccagcgacaccgtgagcggcttcagagtggagtacgagctgagcgaggagggcgacgagccccagtacctggacctgcccagcaccgccaccagcgtgaacatccccgacctgctgcccggcagaaagtacatcgtgaacgtgtaccagatcagcgaggacggcgagcagagcctgatcctgagcaccagccagaccaccgcccccgacgccccccccgacaccaccgtggaccaggtggacgacaccagcatcgtggtgagatggagcagaccccaggcccccatcaccggctacagaatcgtgtacagccccagcgtggagggcagcagcaccgagctgaacctgcccgagaccgccaacagcgtgaccctgagcgacctgcagcccggcgtgcagtacaacatcaccatctacgccgtggaggagaaccaggagagcacccccgtggtgatccagcaggagaccaccggcacccccagaagcgacaccgtgcccagccccagagacctgcagttcgtggaggtgaccgacgtgaaggtgaccatcatgtggaccccccccgagagcgccgtgaccggctacagagtggacgtgatccccgtgaacctgcccggcgagcacggccagagactgcccatcagcagaaacaccttcgccgaggtgaccggcctgagccccggcgtgacctactacttcaaggtgttcgccgtgagccacggcagagagagcaagcccctgaccgcccagcagaccaccaagctggacgcccccaccaacctgcagttcgtgaacgagaccgacagcaccgtgctggtgagatggaccccccccagagcccagatcaccggctacagactgaccgtgggcctgaccagaagaggccagcccagacagtacaacgtgggccccagcgtgagcaagtaccccctgagaaacctgcagcccgccagcgagtacaccgtgagcctggtggccatcaagggcaaccaggagagccccaaggccaccggcgtgttcaccaccctgcagcccggcagcagcatccccccctacaacaccgaggtgaccgagaccaccatcgtgatcacctggacccccgcccccagaatcggcttcaagctgggcgtgagacccagccagggcggcgaggcccccagagaggtgaccagcgacagcggcagcatcgtggtgagcggcctgacccccggcgtggagtacgtgtacaccatccaggtgctgagagacggccaggagagagacgcccccatcgtgaacaaggtggtgacccccctgagcccccccaccaacctgcacctggaggccaaccccgacaccggcgtgctgaccgtgagctgggagagaagcaccacccccgacatcaccggctacagaatcaccaccacccccaccaacggccagcagggcaacagcctggaggaggtggtgcacgccgaccagagcagctgcaccttcgacaacctgagccccggcctggagtacaacgtgagcgtgtacaccgtgaaggacgacaaggagagcgtgcccatcagcgacaccatcatccccgaggtgccccagctgaccgacctgagcttcgtggacatcaccgacagcagcatcggcctgagatggacccccctgaacagcagcaccatcatcggctacagaatcaccgtggtggccgccggcgagggcatccccatcttcgaggacttcgtggacagcagcgtgggctactacaccgtgaccggcctggagcccggcatcgactacgacatcagcgtgatcaccctgatcaacggcggcgagagcgcccccaccaccctgacccagcagaccgccgtgcccccccccaccgacctgagattcaccaacatcggccccgacaccatgagagtgacctgggcccccccccccagcatcgacctgaccaacttcctggtgagatacagccccgtgaagaacgaggaggacgtggccgagctgagcatcagccccagcgacaacgccgtggtgctgaccaacctgctgcccggcaccgagtacgtggtgagcgtgagcagcgtgtacgagcagcacgagagcacccccctgagaggcagacagaagaccggcctggacagccccaccggcatcgacttcagcgacatcaccgccaacagcttcaccgtgcactggatcgcccccagagccaccatcaccggctacagaatcagacaccaccccgagcacttcagcggcagacccagagaggacagagtgccccacagcagaaacagcatcaccctgaccaacctgacccccggcaccgagtacgtggtgagcatcgtggccctgaacggcagagaggagagccccctgctgatcggccagcagagcaccgtgagcgacgtgcccagagacctggaggtggtggccgccacccccaccagcctgctgatcagctgggacgcccccgccgtgaccgtgagatactacagaatcacctacggcgagaccggcggcaacagccccgtgcaggagttcaccgtgcccggcagcaagagcaccgccaccatcagcggcctgaagcccggcgtggactacaccatcaccgtgtacgccgtgaccggcagaggcgacagccccgccagcagcaagcccatcagcatcaactacagaaccgagatcgacaagcccagccagatgcaggtgaccgacgtgcaggacaacagcatcagcgtgaagtggctgcccagcagcagccccgtgaccggctacagagtgaccaccacccccaagaacggccccggccccaccaagaccaagaccgccggccccgaccagaccgagatgaccatcgagggcctgcagcccaccgtggagtacgtggtgagcgtgtacgcccagaaccccagcggcgagagccagcccctggtgcagaccgccgtgaccaccatccccgcccccaccgacctgaagttcacccaggtgacccccaccagcctgagcgcccagtggaccccccccaacgtgcagctgaccggctacagagtgagagtgacccccaaggagaagaccggccccatgaaggagatcaacctggcccccgacagcagcagcgtggtggtgagcggcctgatggtggccaccaagtacgaggtgagcgtgtacgccctgaaggacaccctgaccagcagacccgcccagggcgtggtgaccaccctggagaacgtgagcccccccagaagagccagagtgaccgacgccaccgagaccaccatcaccatcagctggagaaccaagaccgagaccatcaccggcttccaggtggacgccgtgcccgccaacggccagacccccatccagagaaccatcaagcccgacgtgagaagctacaccatcaccggcctgcagcccggcaccgactacaagatctacctgtacaccctgaacgacaacgccagaagcagccccgtggtgatcgacgccagcaccgccatcgacgcccccagcaacctgagattcctggccaccacccccaacagcctgctggtgagctggcagccccccagagccagaatcaccggctacatcatcaagtacgagaagcccggcagcccccccagagaggtggtgcccagacccagacccggcgtgaccgaggccaccatcaccggcctggagcccggcaccgagtacaccatctacgtgatcgccctgaagaacaaccagaagagcgagcccctgatcggcagaaagaagaccggccaggaggccctgagccagaccaccatcagctgggcccccttccaggacaccagcgagtacatcatcagctgccaccccgtgggcaccgacgaggagcccctgcagttcagagtgcccggcaccagcaccagcgccaccctgaccggcctgaccagaggcgccacctacaacgtgatcgtggaggccctgaaggaccagcagagacacaaggtgagagaggaggtggtgaccgtgggcaacagcgtgaacgagggcctgaaccagcccaccgacgacagctgcttcgacccctacaccgtgagccactacgccgtgggcgacgagtgggagagaatgagcgagagcggcttcaagctgctgtgccagtgcctgggcttcggcagcggccacttcagatgcgacagcagcagatggtgccacgacaacggcgtgaactacaagatcggcgagaagtgggacagacagggcgagaacggccagatgatgagctgcacctgcctgggcaacggcaagggcgagttcaagtgcgacccccacgaggccacctgctacgacgacggcaagacctaccacgtgggcgagcagtggcagaaggagtacctgggcgccatctgcagctgcacctgcttcggcggccagagaggctggagatgcgacaactgcagaagacccggcggcgagcccagccccgagggcaccaccggccagagctacaaccagtacagccagagataccaccagagaaccaacaccaacgtgaactgccccatcgagtgcttcatgcccctggacgtgcaggccgacagagaggacagcagagagtag

SEQ ID NO: 10751 - DNA, 6798 bp, synthetic construct
  misc_feature 1..6798: note = Description of Artificial Sequence: Synthetic coding sequence
  source 1..6798: mol_type = other DNA
atgctgagaggccccggccccggcctgctgctgctggccgtgcagtgcctgggcaccgccgtgcccagcaccggcgccagcaagagcaagagacaggcccagcagatggtgcagccccagagccccgtggccgtgagccagagcaagcccggctgctacgacaacggcaagcactaccagatcaaccagcagtgggagagaacctacctgggcaacgccctggtgtgcacctgctacggcggcagcagaggcttcaactgcgagagcaagcccgaggccgaggagacctgcttcgacaagtacaccggcaacacctacagagtgggcgacacctacgagagacccaaggacagcatgatctgggactgcacctgcatcggcgccggcagaggcagaatcagctgcaccatcgccaacagatgccacgagggcggccagagctacaagatcggcgacacctggagaagaccccacgagaccggcggctacatgctggagtgcgtgtgcctgggcaacggcaagggcgagtggacctgcaagcccatcgccgagaagtgcttcgaccacgccgccggcaccagctacgtggtgggcgagacctgggagaagccctaccagggctggatgatggtggactgcacctgcctgggcgagggcagcggcagaatcacctgcaccagcagaaacagatgcaacgaccaggacaccagaaccagctacagaatcggcgacacctggagcaagaaggacaacagaggcaacctgctgcagtgcatctgcaccggcaacggcagaggcgagtggaagtgcgagagacacaccagcgtgcagaccaccagcagcggcagcggccccttcaccgacgtgagagccgccgtgtaccagccccagccccacccccagccccccccctacggccactgcgtgaccgacagcggcgtggtgtacagcgtgggcatgcagtggctgaagacccagggcaacaagcagatgctgtgcacctgcctgggcaacggcgtgagctgccaggagaccgccgtgacccagacctacggcggcaacagcaacggcgagccctgcgtgctgcccttcacctacaacggcagaaccttctacagctgcaccaccgagggcagacaggacggccacctgtggtgcagcaccaccagcaactacgagcaggaccagaagtacagcttctgcaccgaccacaccgtgctggtgcagaccagaggcggcaacagcaacggcgccctgtgccacttccccttcctgtacaacaaccacaactacaccgactgcaccagcgagggcagaagagacaacatgaagtggtgcggcaccacccagaactacgacgccgaccagaagttcggcttctgccccatggccgcccacgaggagatctgcaccaccaacgagggcgtgatgtacagaatcggcgaccagtgggacaagcagcacgacatgggccacatgatgagatgcacctgcgtgggcaacggcagaggcgagtggacctgcatcgcctacagccagctgagagaccagtgcatcgtggacgacatcacctacaacgtgaacgacaccttccacaagagacacgaggagggccacatgctgaactgcacctgcttcggccagggcagaggcagatggaagtgcgaccccgtggaccagtgccaggacagcgagaccggcaccttctaccagatcggcgacagctgggagaagtacgtgcacggcgtgagataccagtgctactgctacggcagaggcatcggcgagtggcactgccagcccctgcagacctaccccagcagcagcggccccgtggaggtgttcatcaccgagacccccagccagcccaacagccaccccatccagtggaacgccccccagcccagccacatcagcaagtacatcctgagatggagacccaagaacagcgtgggcagatggaaggaggccaccatccccggccacctgaacagctacaccatcaagggcctgaagcccggcgtggtgtacgagggccagctgatcagcatccagcagtacggccaccaggaggtgaccagattcgacttcaccaccaccagcaccagcacccccgtgaccagcaacaccgtgaccggcgagaccacccccttcagccccctggtggccaccagcgagagcgtgaccgagatcaccgccagcagcttcgtggtgagctgggtgagcgccagcgacaccgtgagcggcttcagagtggagtacgagctgagcgaggagggcgacgagccccagtacctggacctgcccagcaccgccaccagcgtgaacatccccgacctgctgcccggcagaaagtacatcgtgaacgtgtaccagatcagcgaggacggcgagcagagcctgatcctgagcaccagccagaccaccgcccccgacgccccccccgacaccaccgtggaccaggtggacgacaccagcatcgtggtgagatggagcagaccccaggcccccatcaccggctacagaatcgtgtacagccccagcgtggagggcagcagcaccgagctgaacctgcccgagaccgccaacagcgtgaccctgagcgacctgcagcccggcgtgcagtacaacatcaccatctacgccgtggaggagaaccaggagagcacccccgtggtgatccagcaggagaccaccggcacccccagaagcgacaccgtgcccagccccagagacctgcagttcgtggaggtgaccgacgtgaaggtgaccatcatgtggaccccccccgagagcgccgtgaccggctacagagtggacgtgatccccgtgaacctgcccggcgagcacggccagagactgcccatcagcagaaacaccttcgccgaggtgaccggcctgagccccggcgtgacctactacttcaaggtgttcgccgtgagccacggcagagagagcaagcccctgaccgcccagcagaccaccaagctggacgcccccaccaacctgcagttcgtgaacgagaccgacagcaccgtgctggtgagatggaccccccccagagcccagatcaccggctacagactgaccgtgggcctgaccagaagaggccagcccagacagtacaacgtgggccccagcgtgagcaagtaccccctgagaaacctgcagcccgccagcgagtacaccgtgagcctggtggccatcaagggcaaccaggagagccccaaggccaccggcgtgttcaccaccctgcagcccggcagcagcatccccccctacaacaccgaggtgaccgagaccaccatcgtgatcacctggacccccgcccccagaatcggcttcaagctgggcgtgagacccagccagggcggcgaggcccccagagaggtgaccagcgacagcggcagcatcgtggtgagcggcctgacccccggcgtggagtacgtgtacaccatccaggtgctgagagacggccaggagagagacgcccccatcgtgaacaaggtggtgacccccctgagcccccccaccaacctgcacctggaggccaaccccgacaccggcgtgctgaccgtgagctgggagagaagcaccacccccgacatcaccggctacagaatcaccaccacccccaccaacggccagcagggcaacagcctggaggaggtggtgcacgccgaccagagcagctgcaccttcgacaacctgagccccggcctggagtacaacgtgagcgtgtacaccgtgaaggacgacaaggagagcgtgcccatcagcgacaccatcatccccgccgtgcccccccccaccgacctgagattcaccaacatcggccccgacaccatgagagtgacctgggcccccccccccagcatcgacctgaccaacttcctggtgagatacagccccgtgaagaacgaggaggacgtggccgagctgagcatcagccccagcgacaacgccgtggtgctgaccaacctgctgcccggcaccgagtacgtggtgagcgtgagcagcgtgtacgagcagcacgagagcacccccctgagaggcagacagaagaccggcctggacagccccaccggcatcgacttcagcgacatcaccgccaacagcttcaccgtgcactggatcgcccccagagccaccatcaccggctacagaatcagacaccaccccgagcacttcagcggcagacccagagaggacagagtgccccacagcagaaacagcatcaccctgaccaacctgacccccggcaccgagtacgtggtgagcatcgtggccctgaacggcagagaggagagccccctgctgatcggccagcagagcaccgtgagcgacgtgcccagagacctggaggtggtggccgccacccccaccagcctgctgatcagctgggacgcccccgccgtgaccgtgagatactacagaatcacctacggcgagaccggcggcaacagccccgtgcaggagttcaccgtgcccggcagcaagagcaccgccaccatcagcggcctgaagcccggcgtggactacaccatcaccgtgtacgccgtgaccggcagaggcgacagccccgccagcagcaagcccatcagcatcaactacagaaccgagatcgacaagcccagccagatgcaggtgaccgacgtgcaggacaacagcatcagcgtgaagtggctgcccagcagcagccccgtgaccggctacagagtgaccaccacccccaagaacggccccggccccaccaagaccaagaccgccggccccgaccagaccgagatgaccatcgagggcctgcagcccaccgtggagtacgtggtgagcgtgtacgcccagaaccccagcggcgagagccagcccctggtgcagaccgccgtgaccaccatccccgcccccaccgacctgaagttcacccaggtgacccccaccagcctgagcgcccagtggaccccccccaacgtgcagctgaccggctacagagtgagagtgacccccaaggagaagaccggccccatgaaggagatcaacctggcccccgacagcagcagcgtggtggtgagcggcctgatggtggccaccaagtacgaggtgagcgtgtacgccctgaaggacaccctgaccagcagacccgcccagggcgtggtgaccaccctggagaacgtgagcccccccagaagagccagagtgaccgacgccaccgagaccaccatcaccatcagctggagaaccaagaccgagaccatcaccggcttccaggtggacgccgtgcccgccaacggccagacccccatccagagaaccatcaagcccgacgtgagaagctacaccatcaccggcctgcagcccggcaccgactacaagatctacctgtacaccctgaacgacaacgccagaagcagccccgtggtgatcgacgccagcaccgccatcgacgcccccagcaacctgagattcctggccaccacccccaacagcctgctggtgagctggcagccccccagagccagaatcaccggctacatcatcaagtacgagaagcccggcagcccccccagagaggtggtgcccagacccagacccggcgtgaccgaggccaccatcaccggcctggagcccggcaccgagtacaccatctacgtgatcgccctgaagaacaaccagaagagcgagcccctgatcggcagaaagaagaccgacgagctgccccagctggtgaccctgccccaccccaacctgcacggccccgagatcctggacgtgcccagcaccgtgcagaagacccccttcgtgacccaccccggctacgacaccggcaacggcatccagctgcccggcaccagcggccagcagcccagcgtgggccagcagatgatcttcgaggagcacggcttcagaagaaccaccccccccaccaccgccacccccatcagacacagacccagaccctacccccccaacgtgggccaggaggccctgagccagaccaccatcagctgggcccccttccaggacaccagcgagtacatcatcagctgccaccccgtgggcaccgacgaggagcccctgcagttcagagtgcccggcaccagcaccagcgccaccctgaccggcctgaccagaggcgccacctacaacgtgatcgtggaggccctgaaggaccagcagagacacaaggtgagagaggaggtggtgaccgtgggcaacagcgtgaacgagggcctgaaccagcccaccgacgacagctgcttcgacccctacaccgtgagccactacgccgtgggcgacgagtgggagagaatgagcgagagcggcttcaagctgctgtgccagtgcctgggcttcggcagcggccacttcagatgcgacagcagcagatggtgccacgacaacggcgtgaactacaagatcggcgagaagtgggacagacagggcgagaacggccagatgatgagctgcacctgcctgggcaacggcaagggcgagttcaagtgcgacccccacgaggccacctgctacgacgacggcaagacctaccacgtgggcgagcagtggcagaaggagtacctgggcgccatctgcagctgcacctgcttcggcggccagagaggctggagatgcgacaactgcagaagacccggcggcgagcccagccccgagggcaccaccggccagagctacaaccagtacagccagagataccaccagagaaccaacaccaacgtgaactgccccatcgagtgcttcatgcccctggacgtgcaggccgacagagaggacagcagagagtag

SEQ ID NO: 10752 - DNA, 6993 bp, synthetic construct
  misc_feature 1..6993: note = Description of Artificial Sequence: Synthetic coding sequence
  source 1..6993: mol_type = other DNA
atgctgagaggccccggccccggcctgctgctgctggccgtgcagtgcctgggcaccgccgtgcccagcaccggcgccagcaagagcaagagacaggcccagcagatggtgcagccccagagccccgtggccgtgagccagagcaagcccggctgctacgacaacggcaagcactaccagatcaaccagcagtgggagagaacctacctgggcaacgccctggtgtgcacctgctacggcggcagcagaggcttcaactgcgagagcaagcccgaggccgaggagacctgcttcgacaagtacaccggcaacacctacagagtgggcgacacctacgagagacccaaggacagcatgatctgggactgcacctgcatcggcgccggcagaggcagaatcagctgcaccatcgccaacagatgccacgagggcggccagagctacaagatcggcgacacctggagaagaccccacgagaccggcggctacatgctggagtgcgtgtgcctgggcaacggcaagggcgagtggacctgcaagcccatcgccgagaagtgcttcgaccacgccgccggcaccagctacgtggtgggcgagacctgggagaagccctaccagggctggatgatggtggactgcacctgcctgggcgagggcagcggcagaatcacctgcaccagcagaaacagatgcaacgaccaggacaccagaaccagctacagaatcggcgacacctggagcaagaaggacaacagaggcaacctgctgcagtgcatctgcaccggcaacggcagaggcgagtggaagtgcgagagacacaccagcgtgcagaccaccagcagcggcagcggccccttcaccgacgtgagagccgccgtgtaccagccccagccccacccccagccccccccctacggccactgcgtgaccgacagcggcgtggtgtacagcgtgggcatgcagtggctgaagacccagggcaacaagcagatgctgtgcacctgcctgggcaacggcgtgagctgccaggagaccgccgtgacccagacctacggcggcaacagcaacggcgagccctgcgtgctgcccttcacctacaacggcagaaccttctacagctgcaccaccgagggcagacaggacggccacctgtggtgcagcaccaccagcaactacgagcaggaccagaagtacagcttctgcaccgaccacaccgtgctggtgcagaccagaggcggcaacagcaacggcgccctgtgccacttccccttcctgtacaacaaccacaactacaccgactgcaccagcgagggcagaagagacaacatgaagtggtgcggcaccacccagaactacgacgccgaccagaagttcggcttctgccccatggccgcccacgaggagatctgcaccaccaacgagggcgtgatgtacagaatcggcgaccagtgggacaagcagcacgacatgggccacatgatgagatgcacctgcgtgggcaacggcagaggcgagtggacctgcatcgcctacagccagctgagagaccagtgcatcgtggacgacatcacctacaacgtgaacgacaccttccacaagagacacgaggagggccacatgctgaactgcacctgcttcggccagggcagaggcagatggaagtgcgaccccgtggaccagtgccaggacagcgagaccggcaccttctaccagatcggcgacagctgggagaagtacgtgcacggcgtgagataccagtgctactgctacggcagaggcatcggcgagtggcactgccagcccctgcagacctaccccagcagcagcggccccgtggaggtgttcatcaccgagacccccagccagcccaacagccaccccatccagtggaacgccccccagcccagccacatcagcaagtacatcctgagatggagacccaagaacagcgtgggcagatggaaggaggccaccatccccggccacctgaacagctacaccatcaagggcctgaagcccggcgtggtgtacgagggccagctgatcagcatccagcagtacggccaccaggaggtgaccagattcgacttcaccaccaccagcaccagcacccccgtgaccagcaacaccgtgaccggcgagaccacccccttcagccccctggtggccaccagcgagagcgtgaccgagatcaccgccagcagcttcgtggtgagctgggtgagcgccagcgacaccgtgagcggcttcagagtggagtacgagctgagcgaggagggcgacgagccccagtacctggacctgcccagcaccgccaccagcgtgaacatccccgacctgctgcccggcagaaagtacatcgtgaacgtgtaccagatcagcgaggacggcgagcagagcctgatcctgagcaccagccagaccaccgcccccgacgccccccccgacaccaccgtggaccaggtggacgacaccagcatcgtggtgagatggagcagaccccaggcccccatcaccggctacagaatcgtgtacagccccagcgtggagggcagcagcaccgagctgaacctgcccgagaccgccaacagcgtgaccctgagcgacctgcagcccggcgtgcagtacaacatcaccatctacgccgtggaggagaaccaggagagcacccccgtggtgatccagcaggagaccaccggcacccccagaagcgacaccgtgcccagccccagagacctgcagttcgtggaggtgaccgacgtgaaggtgaccatcatgtggaccccccccgagagcgccgtgaccggctacagagtggacgtgatccccgtgaacctgcccggcgagcacggccagagactgcccatcagcagaaacaccttcgccgaggtgaccggcctgagccccggcgtgacctactacttcaaggtgttcgccgtgagccacggcagagagagcaagcccctgaccgcccagcagaccaccaagctggacgcccccaccaacctgcagttcgtgaacgagaccgacagcaccgtgctggtgagatggaccccccccagagcccagatcaccggctacagactgaccgtgggcctgaccagaagaggccagcccagacagtacaacgtgggccccagcgtgagcaagtaccccctgagaaacctgcagcccgccagcgagtacaccgtgagcctggtggccatcaagggcaaccaggagagccccaaggccaccggcgtgttcaccaccctgcagcccggcagcagcatccccccctacaacaccgaggtgaccgagaccaccatcgtgatcacctggacccccgcccccagaatcggcttcaagctgggcgtgagacccagccagggcggcgaggcccccagagaggtgaccagcgacagcggcagcatcgtggtgagcggcctgacccccggcgtggagtacgtgtacaccatccaggtgctgagagacggccaggagagagacgcccccatcgtgaacaaggtggtgacccccctgagcccccccaccaacctgcacctggaggccaaccccgacaccggcgtgctgaccgtgagctgggagagaagcaccacccccgacatcaccggctacagaatcaccaccacccccaccaacggccagcagggcaacagcctggaggaggtggtgcacgccgaccagagcagctgcaccttcgacaacctgagccccggcctggagtacaacgtgagcgtgtacaccgtgaaggacgacaaggagagcgtgcccatcagcgacaccatcatccccgccgtgcccccccccaccgacctgagattcaccaacatcggccccgacaccatgagagtgacctgggcccccccccccagcatcgacctgaccaacttcctggtgagatacagccccgtgaagaacgaggaggacgtggccgagctgagcatcagccccagcgacaacgccgtggtgctgaccaacctgctgcccggcaccgagtacgtggtgagcgtgagcagcgtgtacgagcagcacgagagcacccccctgagaggcagacagaagaccggcctggacagccccaccggcatcgacttcagcgacatcaccgccaacagcttcaccgtgcactggatcgcccccagagccaccatcaccggctacagaatcagacaccaccccgagcacttcagcggcagacccagagaggacagagtgccccacagcagaaacagcatcaccctgaccaacctgacccccggcaccgagtacgtggtgagcatcgtggccctgaacggcagagaggagagccccctgctgatcggccagcagagcaccgtgagcgacgtgcccagagacctggaggtggtggccgccacccccaccagcctgctgatcagctgggacgcccccgccgtgaccgtgagatactacagaatcacctacggcgagaccggcggcaacagccccgtgcaggagttcaccgtgcccggcagcaagagcaccgccaccatcagcggcctgaagcccggcgtggactacaccatcaccgtgtacgccgtgaccggcagaggcgacagccccgccagcagcaagcccatcagcatcaactacagaaccgagatcgacaagcccagccagatgcaggtgaccgacgtgcaggacaacagcatcagcgtgaagtggctgcccagcagcagccccgtgaccggctacagagtgaccaccacccccaagaacggccccggccccaccaagaccaagaccgccggccccgaccagaccgagatgaccatcgagggcctgcagcccaccgtggagtacgtggtgagcgtgtacgcccagaaccccagcggcgagagccagcccctggtgcagaccgccgtgaccaacatcgacagacccaagggcctggccttcaccgacgtggacgtggacagcatcaagatcgcctgggagagcccccagggccaggtgagcagatacagagtgacctacagcagccccgaggacggcatccacgagctgttccccgcccccgacggcgaggaggacaccgccgagctgcagggcctgagacccggcagcgagtacaccgtgagcgtggtggccctgcacgacgacatggagagccagcccctgatcggcacccagagcaccgccatccccgcccccaccgacctgaagttcacccaggtgacccccaccagcctgagcgcccagtggaccccccccaacgtgcagctgaccggctacagagtgagagtgacccccaaggagaagaccggccccatgaaggagatcaacctggcccccgacagcagcagcgtggtggtgagcggcctgatggtggccaccaagtacgaggtgagcgtgtacgccctgaaggacaccctgaccagcagacccgcccagggcgtggtgaccaccctggagaacgtgagcccccccagaagagccagagtgaccgacgccaccgagaccaccatcaccatcagctggagaaccaagaccgagaccatcaccggcttccaggtggacgccgtgcccgccaacggccagacccccatccagagaaccatcaagcccgacgtgagaagctacaccatcaccggcctgcagcccggcaccgactacaagatctacctgtacaccctgaacgacaacgccagaagcagccccgtggtgatcgacgccagcaccgccatcgacgcccccagcaacctgagattcctggccaccacccccaacagcctgctggtgagctggcagccccccagagccagaatcaccggctacatcatcaagtacgagaagcccggcagcccccccagagaggtggtgcccagacccagacccggcgtgaccgaggccaccatcaccggcctggagcccggcaccgagtacaccatctacgtgatcgccctgaagaacaaccagaagagcgagcccctgatcggcagaaagaagaccgtgcagaagacccccttcgtgacccaccccggctacgacaccggcaacggcatccagctgcccggcaccagcggccagcagcccagcgtgggccagcagatgatcttcgaggagcacggcttcagaagaaccaccccccccaccaccgccacccccatcagacacagacccagaccctacccccccaacgtgggccaggaggccctgagccagaccaccatcagctgggcccccttccaggacaccagcgagtacatcatcagctgccaccccgtgggcaccgacgaggagcccctgcagttcagagtgcccggcaccagcaccagcgccaccctgaccggcctgaccagaggcgccacctacaacgtgatcgtggaggccctgaaggaccagcagagacacaaggtgagagaggaggtggtgaccgtgggcaacagcgtgaacgagggcctgaaccagcccaccgacgacagctgcttcgacccctacaccgtgagccactacgccgtgggcgacgagtgggagagaatgagcgagagcggcttcaagctgctgtgccagtgcctgggcttcggcagcggccacttcagatgcgacagcagcagatggtgccacgacaacggcgtgaactacaagatcggcgagaagtgggacagacagggcgagaacggccagatgatgagctgcacctgcctgggcaacggcaagggcgagttcaagtgcgacccccacgaggccacctgctacgacgacggcaagacctaccacgtgggcgagcagtggcagaaggagtacctgggcgccatctgcagctgcacctgcttcggcggccagagaggctggagatgcgacaactgcagaagacccggcggcgagcccagccccgagggcaccaccggccagagctacaaccagtacagccagagataccaccagagaaccaacaccaacgtgaactgccccatcgagtgcttcatgcccctggacgtgcaggccgacagagaggacagcagagagtag

SEQ ID NO: 10753 - DNA, 3312 bp, synthetic construct
  misc_feature 1..3312: note = Description of Artificial Sequence: Synthetic coding sequence
  source 1..3312: mol_type = other DNA
ctgagatggacccccctgaacagcagcaccatcatcggctacagaatcaccgtggtggccgccggcgagggcatccccatcttcgaggacttcgtggacagcagcgtgggctactacaccgtgaccggcctggagcccggcatcgactacgacatcagcgtgatcaccctgatcaacggcggcgagagcgcccccaccaccctgacccagcagaccgccgtgcccccccccaccgacctgagattcaccaacatcggccccgacaccatgagagtgacctgggcccccccccccagcatcgacctgaccaacttcctggtgagatacagccccgtgaagaacgaggaggacgtggccgagctgagcatcagccccagcgacaacgccgtggtgctgaccaacctgctgcccggcaccgagtacgtggtgagcgtgagcagcgtgtacgagcagcacgagagcacccccctgagaggcagacagaagaccggcctggacagccccaccggcatcgacttcagcgacatcaccgccaacagcttcaccgtgcactggatcgcccccagagccaccatcaccggctacagaatcagacaccaccccgagcacttcagcggcagacccagagaggacagagtgccccacagcagaaacagcatcaccctgaccaacctgacccccggcaccgagtacgtggtgagcatcgtggccctgaacggcagagaggagagccccctgctgatcggccagcagagcaccgtgagcgacgtgcccagagacctggaggtggtggccgccacccccaccagcctgctgatcagctgggacgcccccgccgtgaccgtgagatactacagaatcacctacggcgagaccggcggcaacagccccgtgcaggagttcaccgtgcccggcagcaagagcaccgccaccatcagcggcctgaagcccggcgtggactacaccatcaccgtgtacgccgtgaccggcagaggcgacagccccgccagcagcaagcccatcagcatcaactacagaaccgagatcgacaagcccagccagatgcaggtgaccgacgtgcaggacaacagcatcagcgtgaagtggctgcccagcagcagccccgtgaccggctacagagtgaccaccacccccaagaacggccccggccccaccaagaccaagaccgccggccccgaccagaccgagatgaccatcgagggcctgcagcccaccgtggagtacgtggtgagcgtgtacgcccagaaccccagcggcgagagccagcccctggtgcagaccgccgtgaccaccatccccgcccccaccgacctgaagttcacccaggtgacccccaccagcctgagcgcccagtggaccccccccaacgtgcagctgaccggctacagagtgagagtgacccccaaggagaagaccggccccatgaaggagatcaacctggcccccgacagcagcagcgtggtggtgagcggcctgatggtggccaccaagtacgaggtgagcgtgtacgccctgaaggacaccctgaccagcagacccgcccagggcgtggtgaccaccctggagaacgtgagcccccccagaagagccagagtgaccgacgccaccgagaccaccatcaccatcagctggagaaccaagaccgagaccatcaccggcttccaggtggacgccgtgcccgccaacggccagacccccatccagagaaccatcaagcccgacgtgagaagctacaccatcaccggcctgcagcccggcaccgactacaagatctacctgtacaccctgaacgacaacgccagaagcagccccgtggtgatcgacgccagcaccgccatcgacgcccccagcaacctgagattcctggccaccacccccaacagcctgctggtgagctggcagccccccagagccagaatcaccggctacatcatcaagtacgagaagcccggcagcccccccagagaggtggtgcccagacccagacccggcgtgaccgaggccaccatcaccggcctggagcccggcaccgagtacaccatctacgtgatcgccctgaagaacaaccagaagagcgagcccctgatcggcagaaagaagaccgacgagctgccccagctggtgaccctgccccaccccaacctgcacggccccgagatcctggacgtgcccagcaccgtgcagaagacccccttcgtgacccaccccggctacgacaccggcaacggcatccagctgcccggcaccagcggccagcagcccagcgtgggccagcagatgatcttcgaggagcacggcttcagaagaaccaccccccccaccaccgccacccccatcagacacagacccagaccctacccccccaacgtgggcgaggagatccagatcggccacatccccagagaggacgtggactaccacctgtacccccacggccccggcctgaaccccaacgccagcaccggccaggaggccctgagccagaccaccatcagctgggcccccttccaggacaccagcgagtacatcatcagctgccaccccgtgggcaccgacgaggagcccctgcagttcagagtgcccggcaccagcaccagcgccaccctgaccggcctgaccagaggcgccacctacaacgtgatcgtggaggccctgaaggaccagcagagacacaaggtgagagaggaggtggtgaccgtgggcaacagcgtgaacgagggcctgaaccagcccaccgacgacagctgcttcgacccctacaccgtgagccactacgccgtgggcgacgagtgggagagaatgagcgagagcggcttcaagctgctgtgccagtgcctgggcttcggcagcggccacttcagatgcgacagcagcagatggtgccacgacaacggcgtgaactacaagatcggcgagaagtgggacagacagggcgagaacggccagatgatgagctgcacctgcctgggcaacggcaagggcgagttcaagtgcgacccccacgaggccacctgctacgacgacggcaagacctaccacgtgggcgagcagtggcagaaggagtacctgggcgccatctgcagctgcacctgcttcggcggccagagaggctggagatgcgacaactgcagaagacccggcggcgagcccagccccgagggcaccaccggccagagctacaaccagtacagccagagataccaccagagaaccaacaccaacgtgaactgccccatcgagtgcttcatgcccctggacgtgcaggccgacagagaggacagcagagagtag

SEQ ID NO: 10754 - DNA, 312 bp, synthetic construct
  misc_feature 1..312: note = Description of Artificial Sequence: Synthetic coding sequence
  source 1..312: mol_type = other DNA
atgcccgtgagcgtgagcagcggcagaaccttccccaagagaggccagacctgcgtggtgcactacaccggcatgctggaggacggcaagaagttcgacagcagcagagacagaaacaagcccttcaagttcatgctgggcaagcaggaggtgatcagaggctgggaggagggcgtggcccagatgagcgtgggccagagagccaagctgaccatcagccccgactacgcctacggcgccaccggccaccccggcatcatccccccccacgccaccctggtgttcgacgtggagctgctgaagctggagtag

SEQ ID NO: 10755 - DNA, 327 bp, synthetic construct
  misc_feature 1..327: note = Description of Artificial Sequence: Synthetic coding sequence
  source 1..327: mol_type = other DNA
atgggcgtgcaggtggagaccatcagccccggcgacggcagaaccttccccaagagaggccagacctgcgtggtgcactacaccggcatgctggaggacggcaagaagttcgacagcagcagagacagaaacaagcccttcaagttcatgctgggcaagcaggaggtgatcagaggctgggaggagggcgtggcccagatgagcgtgggccagagagccaagctgaccatcagccccgactacgcctacggcgccaccggccaccccggcatcatccccccccacgccaccctggtgttcgacgtggagctgctgaagctggagtag

SEQ ID NO: 10756 - DNA, 312 bp, synthetic construct; identical to SEQ ID NO: 10754
  misc_feature 1..312: note = Description of Artificial Sequence: Synthetic coding sequence
  source 1..312: mol_type = other DNA

SEQ ID NO: 10757 - DNA, 327 bp, synthetic construct; identical to SEQ ID NO: 10755
  misc_feature 1..327: note = Description of Artificial Sequence: Synthetic coding sequence
  source 1..327: mol_type = other DNA

SEQ ID NO: 10758 - DNA, 279 bp, synthetic construct
  misc_feature 1..279: note = Description of Artificial Sequence: Synthetic coding sequence
  source 1..279: mol_type = other DNA
atgggcgtgcaggtggagaccatcagccccggcgacggcatgctggaggacggcaagaagttcgacagcagcagagacagaaacaagcccttcaagttcatgctgggcaagcaggaggtgatcagaggctgggaggagggcgtggcccagatgagcgtgggccagagagccaagctgaccatcagccccgactacgcctacggcgccaccggccaccccggcatcatccccccccacgccaccctggtgttcgacgtggagctgctgaagctggagtag

SEQ ID NO: 10759 - DNA, 1143 bp, synthetic construct
  misc_feature 1..1143: note = Description of Artificial Sequence: Synthetic coding sequence
  source 1..1143: mol_type = other DNA
atgggcatccagggcctggccaagctgatcgccgacgtggcccccagcgccatcagagagaacgacatcaagagctacttcggcagaaaggtggccatcgacgccagcatgagcatctaccagttcctgatcgccgtgagacagggcggcgacgtgctgcagaacgaggagggcgagaccaccagccacctgatgggcatgttctacagaaccatcagaatgatggagaacggcatcaagcccgtgtacgtgttcgacggcaagcccccccagctgaagagcggcgagctggccaagagaagcgagagaagagccgaggccgagaagcagctgcagcaggcccaggccgccggcgccgagcaggaggtggagaagttcaccaagagactggtgaaggtgaccaagcagcacaacgacgagtgcaagcacctgctgagcctgatgggcatcccctacctggacgcccccagcgaggccgaggccagctgcgccgccctggtgaaggccggcaaggtgtacgccgccgccaccgaggacatggactgcctgaccttcggcagccccgtgctgatgagacacctgaccgccagcgaggccaagaagctgcccatccaggagttccacctgagcagaatcctgcaggagctgggcctgaaccaggagcagttcgtggacctgtgcatcctgctgggcagcgactactgcgagagcatcagaggcatcggccccaagagagccgtggacctgatccagaagcacaagagcatcgaggagatcgtgagaagactggaccccaacaagtaccccgtgcccgagaactggctgcacaaggaggcccaccagctgttcctggagcccgaggtgctggaccccgagagcgtggagctgaagtggagcgagcccaacgaggaggagctgatcaagttcatgtgcggcgagaagcagttcagcgaggagagaatcagaagcggcgtgaagagactgagcaagagcagacagggcagcacccagggcagactggacgacttcttcaaggtgaccggcagcctgagcagcgccaagagaaaggagcccgagcccaagggcagcaccaagaagaaggccaagaccggcgccgccggcaagttcaagagaggcaagtag

SEQ ID NO: 10760 - DNA, 498 bp, synthetic construct
  misc_feature 1..498: note = Description of Artificial Sequence: Synthetic coding sequence
  source 1..498: mol_type = other DNA
atgggcatccagggcctggccaagctgatcgccgacgtggcccccagcgccatcagagagaacgacatcaagagctacttcggcagaaaggtggccatcgacgccagcatgagcatctaccagttcctgatcgccgtgagacagggcggcgacgtgctgcagaacgaggagggcgagaccaccagccacctgatgggcatgttctacagaaccatcagaatgatggagaacggcatcaagcccgtgtacgtgttcgacggcaagcccccccagctgaagagcggcgagctggccaagagaagcgagagaagagccgaggccgagaagcagctgcagcaggcccaggccgccggcgccgagcaggaggtggagaagttcaccaagagactggtgaaggtgaccaagcagcacaacgacgagtgcaagcacctgctgagcctgatgggcatcccctacctggacgcccccagcgaggccgaggccagctgcgccgcctag

SEQ ID NO: 10761 - DNA, 4017 bp, synthetic construct
  misc_feature 1..4017: note = Description of Artificial Sequence: Synthetic coding sequence
  source 1..4017: mol_type = other DNA
atggtgagctactgggacaccggcgtgctgctgtgcgccctgctgagctgcctgctgctgaccggcagcagcagcggcagcaagctgaaggaccccgagctgagcctgaagggcacccagcacatcatgcaggccggccagaccctgcacctgcagtgcagaggcgaggccgcccacaagtggagcctgcccgagatggtgagcaaggagagcgagagactgagcatcaccaagagcgcctgcggcagaaacggcaagcagttctgcagcaccctgaccctgaacaccgcccaggccaaccacaccggcttctacagctgcaagtacctggccgtgcccaccagcaagaagaaggagaccgagagcgccatctacatcttcatcagcgacaccggcagacccttcgtggagatgtacagcgagatccccgagatcatccacatgaccgagggcagagagctggtgatcccctgcagagtgaccagccccaacatcaccgtgaccctgaagaagttccccctggacaccctgatccccgacggcaagagaatcatctgggacagcagaaagggcttcatcatcagcaacgccacctacaaggagatcggcctgctgacctgcgaggccaccgtgaacggccacctgtacaagaccaactacctgacccacagacagaccaacaccatcatcgacgtgcagatcagcacccccagacccgtgaagctgctgagaggccacaccctggtgctgaactgcaccgccaccacccccctgaacaccagagtgcagatgacctggagctaccccgacgagaagaacaagagagccagcgtgagaagaagaatcgaccagagcaacagccacgccaacatcttctacagcgtgctgaccatcgacaagatgcagaacaaggacaagggcctgtacacctgcagagtgagaagcggccccagcttcaagagcgtgaacaccagcgtgcacatctacgacaaggccttcatcaccgtgaagcacagaaagcagcaggtgctggagaccgtggccggcaagagaagctacagactgagcatgaaggtgaaggccttccccagccccgaggtggtgtggctgaaggacggcctgcccgccaccgagaagagcgccagatacctgaccagaggctacagcctgatcatcaaggacgtgaccgaggaggacgccggcaactacaccatcctgctgagcatcaagcagagcaacgtgttcaagaacctgaccgccaccctgatcgtgaacgtgaagccccagatctacgagaaggccgtgagcagcttccccgaccccgccctgtaccccctgggcagcagacagatcctgacctgcaccgcctacggcatcccccagcccaccatcaagtggttctggcacccctgcaaccacaaccacagcgaggccagatgcgacttctgcagcaacaacgaggagagcttcatcctggacgccgacagcaacatgggcaacagaatcgagagcatcacccagagaatggccatcatcgagggcaagaacaagatggccagcaccctggtggtggccgacagcagaatcagcggcatctacatctgcatcgccagcaacaaggtgggcaccgtgggcagaaacatcagcttctacatcaccgacgtgcccaacggcttccacgtgaacctggagaagatgcccaccgagggcgaggacctgaagctgagctgcaccgtgaacaagttcctgtacagagacgtgacctggatcctgctgagaaccgtgaacaacagaaccatgcactacagcatcagcaagcagaagatggccatcaccaaggagcacagcatcaccctgaacctgaccatcatgaacgtgagcctgcaggacagcggcacctacgcctgcagagccagaaacgtgtacaccggcgaggagatcctgcagaagaaggagatcaccatcagagaccaggaggccccctacctgctgagaaacctgagcgaccacaccgtggccatcagcagcagcaccaccctggactgccacgccaacggcgtgcccgagccccagatcacctggttcaagaacaaccacaagatccagcaggagcccggcatcatcctgggccccggcagcagcaccctgttcatcgagagagtgaccgaggaggacgagggcgtgtaccactgcaaggccaccaaccagaagggcagcgtggagagcagcgcctacctgaccgtgcagggcaccagcgacaagagcaacctggagctgatcaccctgacctgcacctgcgtggccgccaccctgttctggctgctgctgaccctgttcatcagaaagatgaagagaagcagcagcgagatcaagaccgactacctgagcatcatcatggaccccgacgaggtgcccctggacgagcagtgcgagagactgccctacgacgccagcaagtgggagttcgccagagagagactgaagctgggcaagagcctgggcagaggcgccttcggcaaggtggtgcaggccagcgccttcggcatcaagaagagccccacctgcagaaccgtggccgtgaagatgctgaaggagggcgccaccgccagcgagtacaaggccctgatgaccgagctgaagatcctgacccacatcggccaccacctgaacgtggtgaacctgctgggcgcctgcaccaagcagggcggccccctgatggtgatcgtggagtactgcaagtacggcaacctgagcaactacctgaagagcaagagagacctgttcttcctgaacaaggacgccgccctgcacatggagcccaagaaggagaagatggagcccggcctggagcagggcaagaagcccagactggacagcgtgaccagcagcgagagcttcgccagcagcggcttccaggaggacaagagcctgagcgacgtggaggaggaggaggacagcgacggcttctacaaggagcccatcaccatggaggacctgatcagctacagcttccaggtggccagaggcatggagttcctgagcagcagaaagtgcatccacagagacctggccgccagaaacatcctgctgagcgagaacaacgtggtgaagatctgcgacttcggcctggccagagacatctacaagaaccccgactacgtgagaaagggcgacaccagactgcccctgaagtggatggcccccgagagcatcttcgacaagatctacagcaccaagagcgacgtgtggagctacggcgtgctgctgtgggagatcttcagcctgggcggcagcccctaccccggcgtgcagatggacgaggacttctgcagcagactgagagagggcatgagaatgagagcccccgagtacagcacccccgagatctaccagatcatgctggactgctggcacagagaccccaaggagagacccagattcgccgagctggtggagaagctgggcgacctgctgcaggccaacgtgcagcaggacggcaaggactacatccccatcaacgccatcctgaccggcaacagcggcttcacctacagcacccccgccttcagcgaggacttcttcaaggagagcatcagcgcccccaagttcaacagcggcagcagcgacgacgtgagatacgtgaacgccttcaagttcatgagcctggagagaatcaagaccttcgaggagctgctgcccaacgccaccagcatgttcgacgactaccagggcgacagcagcaccctgctggccagccccatgctgaagagattcacctggaccgacagcaagcccaaggccagcctgaagatcgacctgagagtgaccagcaagagcaaggagagcggcctgagcgacgtgagcagacccagcttctgccacagcagctgcggccacgtgagcgagggcaagagaagattcacctacgaccacgccgagctggagagaaagatcgcctgctgcagccccccccccgactacaacagcgtggtgctgtacagcaccccccccatctag

SEQ ID NO: 10762 - DNA, 531 bp, synthetic construct
  misc_feature 1..531: note = Description of Artificial Sequence: Synthetic coding sequence
  source 1..531: mol_type = other DNA
atggtgagctactgggacaccggcgtgctgctgtgcgccctgctgagctgcctgctgctgaccggcagcagcagcggcagcaagctgaaggaccccgagctgagcctgaagggcacccagcacatcatgcaggccggccagaccctgcacctgcagtgcagaggcgaggccgcccacaagtggagcctgcccgagatggtgagcaaggagagcgagagactgagcatcaccaagagcgcctgcggcagaaacggcaagcagttctgcagcaccctgaccctgaacaccgcccaggccaaccacaccggcttctacagctgcaagtacctggccgtgcccaccagcaagaagaaggagaccgagagcgccatctacatcttcatcagcgacaccggcagacccttcgtggagatgtacagcgagatccccgagatcatccacatgaccgagggcagagagctggtgatcccctgcagagtgaccagccccaacatcaccgtgaccctgaagaagaagaacaagagagcctag

SEQ ID NO: 10763 - DNA, 1626 bp, synthetic construct
  misc_feature 1..1626: note = Description of Artificial Sequence: Synthetic coding sequence
  source 1..1626: mol_type = other DNA
atggtgagctactgggacaccggcgtgctgctgtgcgccctgctgagctgcctgctgctgaccggcagcagcagcggcagcaagctgaaggaccccgagctgagcctgaagggcacccagcacatcatgcaggccggccagaccctgcacctgcagtgcagaggcgaggccgcccacaagtggagcctgcccgagatggtgagcaaggagagcgagagactgagcatcaccaagagcgcctgcggcagaaacggcaagcagttctgcagcaccctgaccctgaacaccgcccaggccaaccacaccggcttctacagctgcaagtacctggccgtgcccaccagcaagaagaaggagaccgagagcgccatctacatcttcatcagcgacaccggcagacccttcgtggagatgtacagcgagatccccgagatcatccacatgaccgagggcagagagctggtgatcccctgcagagtgaccagccccaacatcaccgtgaccctgaagaagttccccctggacaccctgatccccgacggcaagagaatcatctgggacagcagaaagggcttcatcatcagcaacgccacctacaaggagatcggcctgctgacctgcgaggccaccgtgaacggccacctgtacaagaccaactacctgacccacagacagaccaacaccatcatcgacgtgcagatcagcacccccagacccgtgaagctgctgagaggccacaccctggtgctgaactgcaccgccaccacccccctgaacaccagagtgcagatgacctggagctaccccgacgagaagaacaagagagccagcgtgagaagaagaatcgaccagagcaacagccacgccaacatcttctacagcgtgctgaccatcgacaagatgcagaacaaggacaagggcctgtacacctgcagagtgagaagcggccccagcttcaagagcgtgaacaccagcgtgcacatctacgacaaggccttcatcaccgtgaagcacagaaagcagcaggtgctggagaccgtggccggcaagagaagctacagactgagcatgaaggtgaaggccttccccagccccgaggtggtgtggctgaaggacggcctgcccgccaccgagaagagcgccagatacctgaccagaggctacagcctgatcatcaaggacgtgaccgaggaggacgccggcaactacaccatcctgctgagcatcaagcagagcaacgtgttcaagaacctgaccgccaccctgatcgtgaacgtgaagccccagatctacgagaaggccgtgagcagcttccccgaccccgccctgtaccccctgggcagcagacagatcctgacctgcaccgcctacggcatcccccagcccaccatcaagtggttctggcacccctgcaaccacaaccacagcgaggccagatgcgacttctgcagcaacaacgaggagagcttcatcctggacgccgacagcaacatgggcaacagaatcgagagcatcacccagagaatggccatcatcgagggcaagaacaagctgccccccgccaacagcagcttcatgctgccccccaccagcttcagcagcaactacttccacttcctgccctag

SEQ ID NO: 10764 - DNA, 1671 bp, synthetic construct
  misc_feature 1..1671: note = Description of Artificial Sequence: Synthetic coding sequence
  source 1..1671: mol_type = other DNA
atgaagagaagcagcagcgagatcaagaccgactacctgagcatcatcatggaccccgacgaggtgcccctggacgagcagtgcgagagactgccctacgacgccagcaagtgggagttcgccagagagagactgaagctgggcaagagcctgggcagaggcgccttcggcaaggtggtgcaggccagcgccttcggcatcaagaagagccccacctgcagaaccgtggccgtgaagatgctgaaggagggcgccaccgccagcgagtacaaggccctgatgaccgagctgaagatcctgacccacatcggccaccacctgaacgtggtgaacctgctgggcgcctgcaccaagcagggcggccccctgatggtgatcgtggagtactgcaagtacggcaacctgagcaactacctgaagagcaagagagacctgttcttcctgaacaaggacgccgccctgcacatggagcccaagaaggagaagatggagcccggcctggagcagggcaagaagcccagactggacagcgtgaccagcagcgagagcttcgccagcagcggcttccaggaggacaagagcctgagcgacgtggaggaggaggaggacagcgacggcttctacaaggagcccatcaccatggaggacctgatcagctacagcttccaggtggccagaggcatggagttcctgagcagcagaaagtgcatccacagagacctggccgccagaaacatcctgctgagcgagaacaacgtggtgaagatctgcgacttcggcctggccagagacatctacaagaaccccgactacgtgagaaagggcgacaccagactgcccctgaagtggatggcccccgagagcatcttcgacaagatctacagcaccaagagcgacgtgtggagctacggcgtgctgctgtgggagatcttcagcctgggcggcagcccctaccccggcgtgcagatggacgaggacttctgcagcagactgagagagggcatgagaatgagagcccccgagtacagcacccccgagatctaccagatcatgctggactgctggcacagagaccccaaggagagacccagattcgccgagctggtggagaagctgggcgacctgctgcaggccaacgtgcagcaggacggcaaggactacatccccatcaacgccatcctgaccggcaacagcggcttcacctacagcacccccgccttcagcgaggacttcttcaaggagagcatcagcgcccccaagttcaacagcggcagcagcgacgacgtgagatacgtgaacgccttcaagttcatgagcctggagagaatcaagaccttcgaggagctgctgcccaacgccaccagcatgttcgacgactaccagggcgacagcagcaccctgctggccagccccatgctgaagagattcacctggaccgacagcaagcccaaggccagcctgaagatcgacctgagagtgaccagcaagagcaaggagagcggcctgagcgacgtgagcagacccagcttctgccacagcagctgcggccacgtgagcgagggcaagagaagattcacctacgaccacgccgagctggagagaaagatcgcctgctgcagccccccccccgactacaacagcgtggtgctgtacagcaccccccccatctag

SEQ ID NO: 10765 - DNA, 45 bp, synthetic construct
  misc_feature 1..45: note = Description of Artificial Sequence: Synthetic coding sequence
  source 1..45: mol_type = other DNA
gagctgagcaacttcgagtgcctgcacccctgcagccaggagtag

SEQ ID NO: 10766 - DNA, 2202 bp, synthetic construct
  misc_feature 1..2202: note = Description of Artificial Sequence: Synthetic coding sequence
  source 1..2202: mol_type = other DNA
atggtgagctactgggacaccggcgtgctgctgtgcgccctgctgagctgcctgctgctgaccggcagcagcagcggcagcaagctgaaggaccccgagctgagcctgaagggcacccagcacatcatgcaggccggccagaccctgcacctgcagtgcagaggcgaggccgcccacaagtggagcctgcccgagatggtgagcaaggagagcgagagactgagcatcaccaagagcgcctgcggcagaaacggcaagcagttctgcagcaccctgaccctgaacaccgcccaggccaaccacaccggcttctacagctgcaagtacctggccgtgcccaccagcaagaagaaggagaccgagagcgccatctacatcttcatcagcgacaccggcagacccttcgtggagatgtacagcgagatccccgagatcatccacatgaccgagggcagagagctggtgatcccctgcagagtgaccagccccaacatcaccgtgaccctgaagaagttccccctggacaccctgatccccgacggcaagagaatcatctgggacagcagaaagggcttcatcatcagcaacgccacctacaaggagatcggcctgctgacctgcgaggccaccgtgaacggccacctgtacaagaccaactacctgacccacagacagaccaacaccatcatcgacgtgcagatcagcacccccagacccgtgaagctgctgagaggccacaccctggtgctgaactgcaccgccaccacccccctgaacaccagagtgcagatgacctggagctaccccgacgagaagaacaagagagccagcgtgagaagaagaatcgaccagagcaacagccacgccaacatcttctacagcgtgctgaccatcgacaagatgcagaacaaggacaagggcctgtacacctgcagagtgagaagcggccccagcttcaagagcgtgaacaccagcgtgcacatctacgacaaggccttcatcaccgtgaagcacagaaagcagcaggtgctggagaccgtggccggcaagagaagctacagactgagcatgaaggtgaaggccttccccagccccgaggtggtgtggctgaaggacggcctgcccgccaccgagaagagcgccagatacctgaccagaggctacagcctgatcatcaaggacgtgaccgaggaggacgccggcaactacaccatcctgctgagcatcaagcagagcaacgtgttcaagaacctgaccgccaccctgatcgtgaacgtgaagccccagatctacgagaaggccgtgagcagcttccccgaccccgccctgtaccccctgggcagcagacagatcctgacctgcaccgcctacggcatcccccagcccaccatcaagtggttctggcacccctgcaaccacaaccacagcgaggccagatgcgacttctgcagcaacaacgaggagagcttcatcctggacgccgacagcaacatgggcaacagaatcgagagcatcacccagagaatggccatcatcgagggcaagaacaagatggccagcaccctggtggtggccgacagcagaatcagcggcatctacatctgcatcgccagcaacaaggtgggcaccgtgggcagaaacatcagcttctacatcaccgacgtgcccaacggcttccacgtgaacctggagaagatgcccaccgagggcgaggacctgaagctgagctgcaccgtgaacaagttcctgtacagagacgtgacctggatcctgctgagaaccgtgaacaacagaaccatgcactacagcatcagcaagcagaagatggccatcaccaaggagcacagcatcaccctgaacctgaccatcatgaacgtgagcctgcaggacagcggcacctacgcctgcagagccagaaacgtgtacaccggcgaggagatcctgcagaagaaggagatcaccatcagagaccaggaggccccctacctgctgagaaacctgagcgaccacaccgtggccatcagcagcagcaccaccctggactgccacgccaacggcgtgcccgagccccagatcacctggttcaagaacaaccacaagatccagcaggagcccgagctgtacaccagcaccagccccagcagcagcagcagcagccccctgagcagcagcagcagcagcagcagcagcagcagcagctag

SEQ ID NO: 10767 - DNA, 1086 bp, synthetic construct
  misc_feature 1..1086: note = Description of Artificial Sequence: Synthetic coding sequence
  source 1..1086: mol_type = other DNA
atgaacagcgacctgctggtggacagcgacggcttctacaaggagcccatcaccatggaggacctgatcagctacagcttccaggtggccagaggcatggagttcctgagcagcagaaagtgcatccacagagacctggccgccagaaacatcctgctgagcgagaacaacgtggtgaagatctgcgacttcggcctggccagagacatctacaagaaccccgactacgtgagaaagggcgacaccagactgcccctgaagtggatggcccccgagagcatcttcgacaagatctacagcaccaagagcgacgtgtggagctacggcgtgctgctgtgggagatcttcagcctgggcggcagcccctaccccggcgtgcagatggacgaggacttctgcagcagactgagagagggcatgagaatgagagcccccgagtacagcacccccgagatctaccagatcatgctggactgctggcacagagaccccaaggagagacccagattcgccgagctggtggagaagctgggcgacctgctgcaggccaacgtgcagcaggacggcaaggactacatccccatcaacgccatcctgaccggcaacagcggcttcacctacagcacccccgccttcagcgaggacttcttcaaggagagcatcagcgcccccaagttcaacagcggcagcagcgacgacgtgagatacgtgaacgccttcaagttcatgagcctggagagaatcaagaccttcgaggagctgctgcccaacgccaccagcatgttcgacgactaccagggcgacagcagcaccctgctggccagccccatgctgaagagattcacctggaccgacagcaagcccaaggccagcctgaagatcgacctgagagtgaccagcaagagcaaggagagcggcctgagcgacgtgagcagacccagcttctgccacagcagctgcggccacgtgagcgagggcaagagaagattcacctacgaccacgccgagctggagagaaagatcgcctgctgcagccccccccccgactacaacagcgtggtgctgtacagcaccccccccatctag

SEQ ID NO: 10768 - DNA, 75 bp, synthetic construct
  misc_feature 1..75: note = Description of Artificial Sequence: Synthetic coding sequence
  source 1..75: mol_type = other DNA
ctgccccccgccaacagcagcttcatgctgccccccaccagcttcagcagcaactacttccacttcctgccctag

SEQ ID NO: 10769 - DNA, 1062 bp, synthetic construct
  misc_feature 1..1062: note = Description of Artificial Sequence: Synthetic coding sequence
  source 1..1062: mol_type = other DNA
atggagctgaccgagctgctgctggtggtgatgctgctgctgaccgccagactgaccctgagcagccccgccccccccgcctgcgacctgagagtgctgagcaagctgctgagagacagccacgtgctgcacagcagactgagccagtgccccgaggtgcaccccctgcccacccccgtgctgctgcccgccgtggacttcagcctgggcgagtggaagacccagatggaggagaccaaggcccaggacatcctgggcgccgtgaccctgctgctggagggcgtgatggccgccagaggccagctgggccccacctgcctgagcagcctgctgggccagctgagcggccaggtgagactgctgctgggcgccctgcagagcctgctgggcacccagctgcccccccagggcagaaccaccgcccacaaggaccccaacgccatcttcctgagcttccagcacctgctgagaggcaaggtgagattcctgatgctggtgggcggcagcaccctgtgcgtgagaagagccccccccaccaccgccgtgcccagcagaaccagcctggtgctgaccctgaacgagctgcccaacagaaccagcggcctgctggagaccaacttcaccgccagcgccagaaccaccggcagcggcctgctgaagtggcagcagggcttcagagccaagatccccggcctgctgaaccagaccagcagaagcctggaccagatccccggctacctgaacagaatccacgagctgctgaacggcaccagaggcctgttccccggccccagcagaagaaccctgggcgcccccgacatcagcagcggcaccagcgacaccggcagcctgccccccaacctgcagcccggctacagccccagccccacccacccccccaccggccagtacaccctgttccccctgccccccaccctgcccacccccgtggtgcagctgcaccccctgctgcccgaccccagcgcccccacccccacccccaccagccccctgctgaacaccagctacacccacagccagaacctgagccaggagggctag

SEQ ID NO: 10770 - DNA, 537 bp, synthetic construct
  misc_feature 1..537: note = Description of Artificial Sequence: Synthetic coding sequence
  source 1..537: mol_type = other DNA
atgaccgtgctggcccccgcctggagccccaccacctacctgctgctgctgctgctgctgagcagcggcctgagcggcacccaggactgcagcttccagcacagccccatcagcagcgacttcgccgtgaagatcagagagctgagcgactacctgctgcaggactaccccgtgaccgtggccagcaacctgcaggacgaggagctgtgcggcggcctgtggagactggtgctggcccagagatggatggagagactgaagaccgtggccggcagcaagatgcagggcctgctggagagagtgaacaccgagatccacttcgtgaccaagtgcgccttccagcccccccccagctgcctgagattcgtgcagaccaacatcagcagactgctgcaggagaccagcgagcagctggtggccctgaagccctggatcaccagacagaacttcagcagatgcctggagctgcagtgccagcccgtggagaccgtgttccacagagtgagccaggacggcctggacctgctgaccagctag

SEQ ID NO: 10771 - DNA, 708 bp, synthetic construct
  misc_feature 1..708: note = Description of Artificial Sequence: Synthetic coding sequence
  source 1..708: mol_type = other DNA
atgaccgtgctggcccccgcctggagccccaccacctacctgctgctgctgctgctgctgagcagcggcctgagcggcacccaggactgcagcttccagcacagccccatcagcagcgacttcgccgtgaagatcagagagctgagcgactacctgctgcaggactaccccgtgaccgtggccagcaacctgcaggacgaggagctgtgcggcggcctgtggagactggtgctggcccagagatggatggagagactgaagaccgtggccggcagcaagatgcagggcctgctggagagagtgaacaccgagatccacttcgtgaccaagtgcgccttccagcccccccccagctgcctgagattcgtgcagaccaacatcagcagactgctgcaggagaccagcgagcagctggtggccctgaagccctggatcaccagacagaacttcagcagatgcctggagctgcagtgccagcccgacagcagcaccctgccccccccctggagccccagacccctggaggccaccgcccccaccgccccccagccccccctgctgctgctgctgctgctgcccgtgggcctgctgctgctggccgccgcctggtgcctgcactggcagagaaccagaagaagaacccccagacccggcgagcaggtgccccccgtgcccagcccccaggacctgctgctggtggagcactag

SEQ ID NO: 10772 - DNA, 4092 bp, synthetic construct
  misc_feature 1..4092: note = Description of Artificial Sequence: Synthetic coding sequence
  source 1..4092: mol_type = other DNA
atgcagagaggcgccgccctgtgcctgagactgtggctgtgcctgggcctgctggacggcctggtgagcggctacagcatgaccccccccaccctgaacatcaccgaggagagccacgtgatcgacaccggcgacagcctgagcatcagctgcagaggccagcaccccctggagtgggcctggcccggcgcccaggaggcccccgccaccggcgacaaggacagcgaggacaccggcgtggtgagagactgcgagggcaccgacgccagaccctactgcaaggtgctgctgctgcacgaggtgcacgccaacgacaccggcagctacgtgtgctactacaagtacatcaaggccagaatcgagggcaccaccgccgccagcagctacgtgttcgtgagagacttcgagcagcccttcatcaacaagcccgacaccctgctggtgaacagaaaggacgccatgtgggtgccctgcctggtgagcatccccggcctgaacgtgaccctgagaagccagagcagcgtgctgtggcccgacggccaggaggtggtgtgggacgacagaagaggcatgctggtgagcacccccctgctgcacgacgccctgtacctgcagtgcgagaccacctggggcgaccaggacttcctgagcaaccccttcctggtgcacatcaccggcaacgagctgtacgacatccagctgctgcccagaaagagcctggagctgctggtgggcgagaagctggtgctgaactgcaccgtgtgggccgagttcaacagcggcgtgaccttcgactgggactaccccggcaagcaggccgagagaggcaagtgggtgcccgagagaagaagccagcagacccacaccgagctgagcagcatcctgaccatccacaacgtgagccagcacgacctgggcagctacgtgtgcaaggccaacaacggcatccagagattcagagagagcaccgaggtgatcgtgcacgagaaccccttcatcagcgtggagtggctgaagggccccatcctggaggccaccgccggcgacgagctggtgaagctgcccgtgaagctggccgcctaccccccccccgagttccagtggtacaaggacggcaaggccctgagcggcagacacagcccccacgccctggtgctgaaggaggtgaccgaggccagcaccggcacctacaccctggccctgtggaacagcgccgccggcctgagaagaaacatcagcctggagctggtggtgaacgtgcccccccagatccacgagaaggaggccagcagccccagcatctacagcagacacagcagacaggccctgacctgcaccgcctacggcgtgcccctgcccctgagcatccagtggcactggagaccctggaccccctgcaagatgttcgcccagagaagcctgagaagaagacagcagcaggacctgatgccccagtgcagagactggagagccgtgaccacccaggacgccgtgaaccccatcgagagcctggacacctggaccgagttcgtggagggcaagaacaagaccgtgagcaagctggtgatccagaacgccaacgtgagcgccatgtacaagtgcgtggtgagcaacaaggtgggccaggacgagagactgatctacttctacgtgaccaccatccccgacggcttcaccatcgagagcaagcccagcgaggagctgctggagggccagcccgtgctgctgagctgccaggccgacagctacaagtacgagcacctgagatggtacagactgaacctgagcaccctgcacgacgcccacggcaaccccctgctgctggactgcaagaacgtgcacctgttcgccacccccctggccgccagcctggaggaggtggcccccggcgccagacacgccaccctgagcctgagcatccccagagtggcccccgagcacgagggccactacgtgtgcgaggtgcaggacagaagaagccacgacaagcactgccacaagaagtacctgagcgtgcaggccctggaggcccccagactgacccagaacctgaccgacctgctggtgaacgtgagcgacagcctggagatgcagtgcctggtggccggcgcccacgcccccagcatcgtgtggtacaaggacgagagactgctggaggagaagagcggcgtggacctggccgacagcaaccagaagctgagcatccagagagtgagagaggaggacgccggcagatacctgtgcagcgtgtgcaacgccaagggctgcgtgaacagcagcgccagcgtggccgtggagggcagcgaggacaagggcagcatggagatcgtgatcctggtgggcaccggcgtgatcgccgtgttcttctgggtgctgctgctgctgatcttctgcaacatgagaagacccgcccacgccgacatcaagaccggctacctgagcatcatcatggaccccggcgaggtgcccctggaggagcagtgcgagtacctgagctacgacgccagccagtgggagttccccagagagagactgcacctgggcagagtgctgggctacggcgccttcggcaaggtggtggaggccagcgccttcggcatccacaagggcagcagctgcgacaccgtggccgtgaagatgctgaaggagggcgccaccgccagcgagcacagagccctgatgagcgagctgaagatcctgatccacatcggcaaccacctgaacgtggtgaacctgctgggcgcctgcaccaagccccagggccccctgatggtgatcgtggagttctgcaagtacggcaacctgagcaacttcctgagagccaagagagacgccttcagcccctgcgccgagaagagccccgagcagagaggcagattcagagccatggtggagctggccagactggacagaagaagacccggcagcagcgacagagtgctgttcgccagattcagcaagaccgagggcggcgccagaagagccagccccgaccaggaggccgaggacctgtggctgagccccctgaccatggaggacctggtgtgctacagcttccaggtggccagaggcatggagttcctggccagcagaaagtgcatccacagagacctggccgccagaaacatcctgctgagcgagagcgacgtggtgaagatctgcgacttcggcctggccagagacatctacaaggaccccgactacgtgagaaagggcagcgccagactgcccctgaagtggatggcccccgagagcatcttcgacaaggtgtacaccacccagagcgacgtgtggagcttcggcgtgctgctgtgggagatcttcagcctgggcgccagcccctaccccggcgtgcagatcaacgaggagttctgccagagactgagagacggcaccagaatgagagcccccgagctggccacccccgccatcagaagaatcatgctgaactgctggagcggcgaccccaaggccagacccgccttcagcgagctggtggagatcctgggcgacctgctgcagggcagaggcctgcaggaggaggaggaggtgtgcatggcccccagaagcagccagagcagcgaggagggcagcttcagccaggtgagcaccatggccctgcacatcgcccaggccgacgccgaggacagcccccccagcctgcagagacacagcctggccgccagatactacaactgggtgagcttccccggctgcctggccagaggcgccgagaccagaggcagcagcagaatgaagaccttcgaggagttccccatgacccccaccacctacaagggcagcgtggacaaccagaccgacagcggcatggtgctggccagcgaggagttcgagcagatcgagagcagacacagacaggagagcggcttcagctgcaagggccccggccagaacgtggccgtgaccagagcccaccccgacagccagggcagaagaagaagacccgagagaggcgccagaggcggccaggtgttctacaacagcgagtacggcgagctgagcgagcccagcgaggaggaccactgcagccccagcgccagagtgaccttcttcaccgacaacagctactag

SEQ ID NO: 10773 - DNA, 2283 bp, synthetic construct
  misc_feature 1..2283: note = Description of Artificial Sequence: Synthetic coding sequence
  source 1..2283: mol_type = other DNA
atgctggtgagcacccccctgctgcacgacgccctgtacctgcagtgcgagaccacctggggcgaccaggacttcctgagcaaccccttcctggtgcacatcaccggcaacgagctgtacgacatccagctgctgcccagaaagagcctggagctgctggtgggcgagaagctggtgctgaactgcaccgtgtgggccgagttcaacagcggcgtgaccttcgactgggactaccccggcaagcaggccgagagaggcaagtgggtgcccgagagaagaagccagcagacccacaccgagctgagcagcatcctgaccatccacaacgtgagccagcacgacctgggcagctacgtgtgcaaggccaacaacggcatccagagattcagagagagcaccgaggtgatcgtgcacgagaaccccttcatcagcgtggagtggctgaagggccccatcctggaggccaccgccggcgacgagctggtgaagctgcccgtgaagctggccgcctaccccccccccgagttccagtggtacaaggacggcaaggccctgagcggcagacacagcccccacgccctggtgctgaaggaggtgaccgaggccagcaccggcacctacaccctggccctgtggaacagcgccgccggcctgagaagaaacatcagcctggagctggtggtgaacgtgcccccccagatccacgagaaggaggccagcagccccagcatctacagcagacacagcagacaggccctgacctgcaccgcctacggcgtgcccctgcccctgagcatccagtggcactggagaccctggaccccctgcaagatgttcgcccagagaagcctgagaagaagacagcagcaggacctgatgccccagtgcagagactggagagccgtgaccacccaggacgccgtgaaccccatcgagagcctggacacctggaccgagttcgtggagggcaagaacaagaccgtgagcaagctggtgatccagaacgccaacgtgagcgccatgtacaagtgcgtggtgagcaacaaggtgggccaggacgagagactgatctacttctacgtgaccaccatccccgacggcttcaccatcgagagcaagcccagcgaggagctgctggagggccagcccgtgctgctgagctgccaggccgacagctacaagtacgagcacctgagatggtacagactgaacctgagcaccctgcacgacgcccacggcaaccccctgctgctggactgcaagaacgtgcacctgttcgccacccccctggccgccagcctggaggaggtggcccccggcgccagacacgccaccctgagcctgagcatccccagagtggcccccgagcacgagggccactacgtgtgcgaggtgcaggacagaagaagccacgacaagcactgccacaagaagtacctgagcgtgcaggccctggaggcccccagactgacccagaacctgaccgacctgctggtgaacgtgagcgacagcctggagatgcagtgcctggtggccggcgcccacgcccccagcatcgtgtggtacaaggacgagagactgctggaggagaagagcggcgtggacctggccgacagcaaccagaagctgagcatccagagagtgagagaggaggacgccggcagatacctgtgcagcgtgtgcaacgccaagggctgcgtgaacagcagcgccagcgtggccgtggagggcagcgaggacaagggcagcatggagatcgtgatcctggtgggcaccggcgtgatcgccgtgttcttctgggtgctgctgctgctgatcttctgcaacatgagaagacccgcccacgccgacatcaagaccggctacctgagcatcatcatggaccccggcgaggtgcccctggaggagcagtgcgagtacctgagctacgacgccagccagtgggagttccccagagagagactgcacctgggcagagtgctgggctacggcgccttcggcaaggtggtggaggccagcgccttcggcatccacaagggcagcagctgcgacaccgtggccgtgaagatgctgaagggcgtgggcagcgccggcggcagaggcagcctggccggcgaggagcagcagctgggcgtgggcagatgggacggcaacagcggcagagagaccgaggccggcagccagagccaccccagattctacagagaggccgccggcttcagagccgagggcccccccgagccccccagcgtgggccccgccggctgccccggcggcccctag

SEQ ID NO: 10774 - DNA, 3897 bp, synthetic construct
  misc_feature 1..3897: note = Description of Artificial Sequence: Synthetic coding sequence
  source 1..3897: mol_type = other DNA
atgcagagaggcgccgccctgtgcctgagactgtggctgtgcctgggcctgctggacggcctggtgagcggctacagcatgaccccccccaccctgaacatcaccgaggagagccacgtgatcgacaccggcgacagcctgagcatcagctgcagaggccagcaccccctggagtgggcctggcccggcgcccaggaggcccccgccaccggcgacaaggacagcgaggacaccggcgtggtgagagactgcgagggcaccgacgccagaccctactgcaaggtgctgctgctgcacgaggtgcacgccaacgacaccggcagctacgtgtgctactacaagtacatcaaggccagaatcgagggcaccaccgccgccagcagctacgtgttcgtgagagacttcgagcagcccttcatcaacaagcccgacaccctgctggtgaacagaaaggacgccatgtgggtgccctgcctggtgagcatccccggcctgaacgtgaccctgagaagccagagcagcgtgctgtggcccgacggccaggaggtggtgtgggacgacagaagaggcatgctggtgagcacccccctgctgcacgacgccctgtacctgcagtgcgagaccacctggggcgaccaggacttcctgagcaaccccttcctggtgcacatcaccggcaacgagctgtacgacatccagctgctgcccagaaagagcctggagctgctggtgggcgagaagctggtgctgaactgcaccgtgtgggccgagttcaacagcggcgtgaccttcgactgggactaccccggcaagcaggccgagagaggcaagtgggtgcccgagagaagaagccagcagacccacaccgagctgagcagcatcctgaccatccacaacgtgagccagcacgacctgggcagctacgtgtgcaaggccaacaacggcatccagagattcagagagagcaccgaggtgatcgtgcacgagaaccccttcatcagcgtggagtggctgaagggccccatcctggaggccaccgccggcgacgagctggtgaagctgcccgtgaagctggccgcctaccccccccccgagttccagtggtacaaggacggcaaggccctgagcggcagacacagcccccacgccctggtgctgaaggaggtgaccgaggccagcaccggcacctacaccctggccctgtggaacagcgccgccggcctgagaagaaacatcagcctggagctggtggtgaacgtgcccccccagatccacgagaaggaggccagcagccccagcatctacagcagacacagcagacaggccctgacctgcaccgcctacggcgtgcccctgcccctgagcatccagtggcactggagaccctggaccccctgcaagatgttcgcccagagaagcctgagaagaagacagcagcaggacctgatgccccagtgcagagactggagagccgtgaccacccaggacgccgtgaaccccatcgagagcctggacacctggaccgagttcgtggagggcaagaacaagaccgtgagcaagctggtgatccagaacgccaacgtgagcgccatgtacaagtgcgtggtgagcaacaaggtgggccaggacgagagactgatctacttctacgtgaccaccatccccgacggcttcaccatcgagagcaagcccagcgaggagctgctggagggccagcccgtgctgctgagctgccaggccgacagctacaagtacgagcacctgagatggtacagactgaacctgagcaccctgcacgacgcccacggcaaccccctgctgctggactgcaagaacgtgcacctgttcgccacccccctggccgccagcctggaggaggtggcccccggcgccagacacgccaccctgagcctgagcatccccagagtggcccccgagcacgagggccactacgtgtgcgaggtgcaggacagaagaagccacgacaagcactgccacaagaagtacctgagcgtgcaggccctggaggcccccagactgacccagaacctgaccgacctgctggtgaacgtgagcgacagcctggagatgcagtgcctggtggccggcgcccacgcccccagcatcgtgtggtacaaggacgagagactgctggaggagaagagcggcgtggacctggccgacagcaaccagaagctgagcatccagagagtgagagaggaggacgccggcagatacctgtgcagcgtgtgcaacgccaagggctgcgtgaacagcagcgccagcgtggccgtggagggcagcgaggacaagggcagcatggagatcgtgatcctggtgggcaccggcgtgatcgccgtgttcttctgggtgctgctgctgctgatcttctgcaacatgagaagacccgcccacgccgacatcaagaccggctacctgagcatcatcatggaccccggcgaggtgcccctggaggagcagtgcgagtacctgagctacgacgccagccagtgggagttccccagagagagactgcacctgggcagagtgctgggctacggcgccttcggcaaggtggtggaggccagcgccttcggcatccacaagggcagcagctgcgacaccgtggccgtgaagatgctgaaggagggcgccaccgccagcgagcacagagccctgatgagcgagctgaagatcctgatccacatcggcaaccacctgaacgtggtgaacctgctgggcgcctgcaccaagccccagggccccctgatggtgatcgtggagttctgcaagtacggcaacctgagcaacttcctgagagccaagagagacgccttcagcccctgcgccgagaagagccccgagcagagaggcagattcagagccatggtggagctggccagactggacagaagaagacccggcagcagcgacagagtgctgttcgccagattcagcaagaccgagggcggcgccagaagagccagccccgaccaggaggccgaggacctgtggctgagccccctgaccatggaggacctggtgtgctacagcttccaggtggccagaggcatggagttcctggccagcagaaagtgcatccacagagacctggccgccagaaacatcctgctgagcgagagcgacgtggtgaagatctgcgacttcggcctggccagagacatctacaaggaccccgactacgtgagaaagggcagcgccagactgcccctgaagtggatggcccccgagagcatcttcgacaaggtgtacaccacccagagcgacgtgtggagcttcggcgtgctgctgtgggagatcttcagcctgggcgccagcccctaccccggcgtgcagatcaacgaggagttctgccagagactgagagacggcaccagaatgagagcccccgagctggccacccccgccatcagaagaatcatgctgaactgctggagcggcgaccccaaggccagacccgccttcagcgagctggtggagatcctgggcgacctgctgcagggcagaggcctgcaggaggaggaggaggtgtgcatggcccccagaagcagccagagcagcgaggagggcagcttcagccaggtgagcaccatggccctgcacatcgcccaggccgacgccgaggacagcccccccagcctgcagagacacagcctggccgccagatactacaactgggtgagcttccccggctgcctggccagaggcgccgagaccagaggcagcagcagaatgaagaccttcgaggagttccccatgacccccaccacctacaagggcagcgtggacaaccagaccgacagcggcatggtgctggccagcgaggagttcgagcagatcgagagcagacacagacaggagagcggcttcagatag

SEQ ID NO: 10775 - DNA, 3921 bp, synthetic construct
  misc_feature 1..3921: note = Description of Artificial Sequence: Synthetic coding sequence
  source 1..3921: mol_type = other DNA
atgcagagaggcgccgccctgtgcctgagactgtggctgtgcctgggcctgctggacggcctggtgagcggctacagcatgaccccccccaccctgaacatcaccgaggagagccacgtgatcgacaccggcgacagcctgagcatcagctgcagaggccagcaccccctggagtgggcctggcccggcgcccaggaggcccccgccaccggcgacaaggacagcgaggacaccggcgtggtgagagactgcgagggcaccgacgccagaccctactgcaaggtgctgctgctgcacgaggtgcacgccaacgacaccggcagctacgtgtgctactacaagtacatcaaggccagaatcgagggcaccaccgccgccagcagctacgtgttcgtgagagacttcgagcagcccttcatcaacaagcccgacaccctgctggtgaacagaaaggacgccatgtgggtgccctgcctggtgagcatccccggcctgaacgtgaccctgagaagccagagcagcgtgctgtggcccgacggccaggaggtggtgtgggacgacagaagaggcatgctggtgagcacccccctgctgcacgacgccctgtacctgcagtgcgagaccacctggggcgaccaggacttcctgagcaaccccttcctggtgcacatcaccggcaacgagctgtacgacatccagctgctgcccagaaagagcctggagctgctggtgggcgagaagctggtgctgaactgcaccgtgtgggccgagttcaacagcggcgtgaccttcgactgggactaccccggcaagcaggccgagagaggcaagtgggtgcccgagagaagaagccagcagacccacaccgagctgagcagcatcctgaccatccacaacgtgagccagcacgacctgggcagctacgtgtgcaaggccaacaacggcatccagagattcagagagagcaccgaggtgatcgtgcacgagaaccccttcatcagcgtggagtggctgaagggccccatcctggaggccaccgccggcgacgagctggtgaagctgcccgtgaagctggccgcctaccccccccccgagttccagtggtacaaggacggcaaggccctgagcggcagacacagcccccacgccctggtgctgaaggaggtgaccgaggccagcaccggcacctacaccctggccctgtggaacagcgccgccggcctgagaagaaacatcagcctggagctggtggtgaacgtgcccccccagatccacgagaaggaggccagcagccccagcatctacagcagacacagcagacaggccctgacctgcaccgcctacggcgtgcccctgcccctgagcatccagtggcactggagaccctggaccccctgcaagatgttcgcccagagaagcctgagaagaagacagcagcaggacctgatgccccagtgcagagactggagagccgtgaccacccaggacgccgtgaaccccatcgagagcctggacacctggaccgagttcgtggagggcaagaacaagaccgtgagcaagctggtgatccagaacgccaacgtgagcgccatgtacaagtgcgtggtgagcaacaaggtgggccaggacgagagactgatctacttctacgtgaccaccatccccgacggcttcaccatcgagagcaagcccagcgaggagctgctggagggccagcccgtgctgctgagctgccaggccgacagctacaagtacgagcacctgagatggtacagactgaacctgagcaccctgcacgacgcccacggcaaccccctgctgctggactgcaagaacgtgcacctgttcgccacccccctggccgccagcctggaggaggtggcccccggcgccagacacgccaccctgagcctgagcatccccagagtggcccccgagcacgagggccactacgtgtgcgaggtgcaggacagaagaagccacgacaagcactgccacaagaagtacctgagcgtgcaggccctggaggcccccagactgacccagaacctgaccgacctgctggtgaacgtgagcgacagcctggagatgcagtgcctggtggccggcgcccacgcccccagcatcgtgtggtacaaggacgagagactgctggaggagaagagcggcgtggacctggccgacagcaaccagaagctgagcatccagagagtgagagaggaggacgccggcagatacctgtgcagcgtgtgcaacgccaagggctgcgtgaacagcagcgccagcgtggccgtggagggcagcgaggacaagggcagcatggagatcgtgatcctggtgggcaccggcgtgatcgccgtgttcttctgggtgctgctgctgctgatcttctgcaacatgagaagacccgcccacgccgacatcaagaccggctacctgagcatcatcatggaccccggcgaggtgcccctggaggagcagtgcgagtacctgagctacgacgccagccagtgggagttccccagagagagactgcacctgggcagagtgctgggctacggcgccttcggcaaggtggtggaggccagcgccttcggcatccacaagggcagcagctgcgacaccgtggccgtgaagatgctgaaggagggcgccaccgccagcgagcacagagccctgatgagcgagctgaagatcctgatccacatcggcaaccacctgaacgtggtgaacctgctgggcgcctgcaccaagccccagggccccctgatggtgatcgtggagttctgcaagtacggcaacctgagcaacttcctgagagccaagagagacgccttcagcccctgcgccgagaagagccccgagcagagaggcagattcagagccatggtggagctggccagactggacagaagaagacccggcagcagcgacagagtgctgttcgccagattcagcaagaccgagggcggcgccagaagagccagccccgaccaggaggccgaggacctgtggctgagccccctgaccatggaggacctggtgtgctacagcttccaggtggccagaggcatggagttcctggccagcagaaagtgcatccacagagacctggccgccagaaacatcctgctgagcgagagcgacgtggtgaagatctgcgacttcggcctggccagagacatctacaaggaccccgactacgtgagaaagggcagcgccagactgcccctgaagtggatggcccccgagagcatcttcgacaaggtgtacaccacccagagcgacgtgtggagcttcggcgtgctgctgtgggagatcttcagcctgggcgccagcccctaccccggcgtgcagatcaacgaggagttctgccagagactgagagacggcaccagaatgagagcccccgagctggccacccccgccatcagaagaatcatgctgaactgctggagcggcgaccccaaggccagacccgccttcagcgagctggtggagatcctgggcgacctgctgcagggcagaggcctgcaggaggaggaggaggtgtgcatggcccccagaagcagccagagcagcgaggagggcagcttcagccaggtgagcaccatggccctgcacatcgcccaggccgacgccgaggacagcccccccagcctgcagagacacagcctggccgccagatactacaactgggtgagcttccccggctgcctggccagaggcgccgagaccagaggcagcagcagaatgaagaccttcgaggagttccccatgacccccaccacctacaagggcagcgtggacaaccagaccgacagcggcatggtgctggccagcgaggagttcgagcagatcgagagcagacacagacaggagagcggcttcagaggcaccagaagaaccagaggcgcctag

SEQ ID NO: 10776 - DNA, 1740 bp, synthetic construct
  misc_feature 1..1740: note = Description of Artificial Sequence: Synthetic coding sequence
  source 1..1740: mol_type = other DNA
atgaacgccatcgtggccctgtgccacttctgcgagctgcacggccccagaaccctgttctgcaccgaggtgctgcacgcccccctgccccagggcgacggcaacgaggacagccccggccagggcgagcaggccgaggaggaggagggcggcatccagatgaacagcagaatgagagcccacagccccgccgagggcgccagcgtggagagcagcagccccggccccaagaagagcgacatgtgcgagggctgcagaagcctggccgccggccaccccggctacatcagccacgacaaggagaccagcatcaagtacgtgagccaccagcaccccagccacccccagctgttcagcatcgtgagacaggcctgcgtgagaagcctgagctgcgaggtgtgccccggcagagagggccccatcttcttcggcgacgagcagcacggcttcgtgttcagccacaccttcttcatcaaggacagcctggccagaggcttccagagatggtacagcatcatcaccatcatgatggacagaatctacctgatcaacagctggcccttcctgctgggcaaggtgagaggcatcatcgacgagctgcagggcaaggccctgaaggtgttcgaggccgagcagttcggctgcccccagagagcccagagaatgaacaccgccttcacccccttcctgcaccagagaaacggcaacgccgccagaagcctgaccagcctgaccagcgacgacaacctgtgggcctgcctgcacaccagcttcgcctggctgctgaaggcctgcggcagcagactgaccgagaagctgctggagggcgcccccaccgaggacaccctggtgcagatggagaagctggccgacctggaggaggagagcgagagctgggacaacagcgaggccgaggaggaggagaaggcccccgtgctgcccgagagcaccgagggcagagagctgacccagggccccgccgagagcagcagcctgagcggctgcggcagctggcagcccagaaagctgcccgtgttcaagagcctgagacacatgagacaggtgctgggcgcccccagcttcagaatgctggcctggcacgtgctgatgggcaaccaggtgatctggaagagcagagacgtggacctggtgcagagcgccttcgaggtgctgagaaccatgctgcccgtgggctgcgtgagaatcatcccctacagcagccagtacgaggaggcctacagatgcaacttcctgggcctgagcccccacgtgcagatccccccccacgtgctgagcagcgagttcgccgtgatcgtggaggtgcacgccgccgccagaagcaccctgcaccccgtgggctgcgaggacgaccagagcctgagcaagtacgagttcgtggtgaccagcggcagccccgtggccgccgacagagtgggccccaccatcctgaacaagatcgaggccgccctgaccaaccagaacctgagcgtggacgtggtggaccagtgcctggtgtgcctgaaggaggagtggatgaacaaggtgaaggtgctgttcaagttcaccaaggtggacagcagacccaaggaggacacccagaagctgctgagcatcctgggcgccagcgaggaggacaacgtgaagctgctgaagttctggatgaccggcctgagcaagacctacaagagccacctgatgagcaccgtgagaagccccaccgccagcgagagcagaaactag

SEQ ID NO: 10777 - DNA, 594 bp, synthetic construct
  misc_feature 1..594: note = Description of Artificial Sequence: Synthetic coding sequence
  source 1..594: mol_type = other DNA
atgaacgccatcgtggccctgtgccacttctgcgagctgcacggccccagaaccctgttctgcaccgaggtgctgcacgcccccctgccccagggcgacggcaacgaggacagccccggccagggcgagcaggccgaggaggaggagggcggcatccagatgaacagcagaatgagagcccacagccccgccgagggcgccagcgtggagagcagcagccccggccccaagaagagcgacatgtgcgagggctgcagaagcctggccgccggccaccccggctacatcagccacgacaaggagaccagcatcaagtacgtgagccaccagcaccccagccacccccagctgttcagcatcgtgagacaggcctgcgtgagaagcctgagctgcgaggtgagcctggtggccaccgagcccgtgagcgtgggcgcccacatgctgcccggcgccctgggcggcctgggcgccagcatcgcccagggcggcagacactggagcagcctgagagccgacccccagatcagcaccgcccagggcaccggcagactgccctgccccgagctgagagaggagagctgctggacctgctag

SEQ ID NO: 10778 - DNA, 1029 bp, synthetic construct
  misc_feature 1..1029: note = Description of Artificial Sequence: Synthetic coding sequence
  source 1..1029: mol_type = other DNA
atgaacgccatcgtggccctgtgccacttctgcgagctgcacggccccagaaccctgttctgcaccgaggtgctgcacgcccccctgccccagggcgacggcaacgaggacagccccggccagggcgagcaggccgaggaggaggagggcggcatccagatgaacagcagaatgagagcccacagccccgccgagggcgccagcgtggagagcagcagccccggccccaagaagagcgacatgtgcgagggctgcagaagcctggccgccggccaccccggctacatcagccacgacaaggagaccagcatcaagtacgtgagccaccagcaccccagccacccccagctgttcagcatcgtgagacaggcctgcgtgagaagcctgagctgcgaggtgtgccccggcagagagggccccatcttcttcggcgacgagcagcacggcttcgtgttcagccacaccttcttcatcaaggacagcctggccagaggcttccagagatggtacagcatcatcaccatcatgatggacagaatctacctgatcaacagctggcccttcctgctgggcaaggtgagaggcatcatcgacgagctgcagggcaaggccctgaaggtgttcgaggccgagcagttcggctgcccccagagagcccagagaatgaacaccgccttcacccccttcctgcaccagagaaacggcaacgccgccagaagcctgaccagcctgaccagcgacgacaacctgtgggcctgcctgcacaccagcttcgcctggctgctgaaggcctgcggcagcagactgaccgagaagctgctggagggcgcccccaccgaggacaccctggtgcagatggagaagctggccggcgaggccggcgtgctgctgcccggcccctggcccggctggccctggggcggcaccagctgcctgctgagctggcaggagagcctgagagagggcaacgccgccctgaaccagcccagaaccagcctgagagaggcccacccccccatcagcgtgtag

SEQ ID NO: 10779 - DNA, 594 bp, synthetic construct; identical to SEQ ID NO: 10777
  misc_feature 1..594: note = Description of Artificial Sequence: Synthetic coding sequence
  source 1..594: mol_type = other DNA

SEQ ID NO: 10780 - DNA, 462 bp, synthetic construct
  misc_feature 1..462: note = Description of Artificial Sequence: Synthetic coding sequence
  source 1..462: mol_type = other DNA
atgaacagcagaatgagagcccacagccccgccgagggcgccagcgtggagagcagcagccccggccccaagaagagcgacatgtgcgagggctgcagaagcctggccgccggccaccccggctacatcagccacgacaaggagaccagcatcaagtacgtgagccaccagcaccccagccacccccagctgttcagcatcgtgagacaggcctgcgtgagaagcctgagctgcgaggtgtgccccggcagagagggccccatcttcttcggcgacgagcagcacggcttcgtgttcagccacaccttcttcatcaaggacagcctggccagaggcttccagagatggtacagcatcatcaccatcatgatggacagaatctacctgatcaacagctggcccttcctgctgggcaaggtgagaggcatcatcgacgagctgcagggcaaggccctgaagtag

SEQ ID NO: 10781 - DNA, 1419 bp, synthetic construct
  misc_feature 1..1419: note = Description of Artificial Sequence: Synthetic coding sequence
  source 1..1419: mol_type = other DNA
atgctgggcaccgtgaagatggagggccacgagaccagcgactggaacagctactacgccgacacccaggaggcctacagcagcgtgcccgtgagcaacatgaacagcggcctgggcagcatgaacagcatgaacacctacatgaccatgaacaccatgaccaccagcggcaacatgacccccgccagcttcaacatgagctacgccaaccccggcctgggcgccggcctgagccccggcgccgtggccggcatgcccggcggcagcgccggcgccatgaacagcatgaccgccgccggcgtgaccgccatgggcaccgccctgagccccagcggcatgggcgccatgggcgcccagcaggccgccagcatgaacggcctgggcccctacgccgccgccatgaacccctgcatgagccccatggcctacgcccccagcaacctgggcagaagcagagccggcggcggcggcgacgccaagaccttcaagagaagctacccccacgccaagcccccctacagctacatcagcctgatcaccatggccatccagcaggcccccagcaagatgctgaccctgagcgagatctaccagtggatcatggacctgttcccctactacagacagaaccagcagagatggcagaacagcatcagacacagcctgagcttcaacgactgcttcgtgaaggtggccagaagccccgacaagcccggcaagggcagctactggaccctgcaccccgacagcggcaacatgttcgagaacggctgctacctgagaagacagaagagattcaagtgcgagaagcagcccggcgccggcggcggcggcggcagcggcagcggcggcagcggcgccaagggcggccccgagagcagaaaggaccccagcggcgccagcaaccccagcgccgacagccccctgcacagaggcgtgcacggcaagaccggccagctggagggcgcccccgcccccggccccgccgccagcccccagaccctggaccacagcggcgccaccgccaccggcggcgccagcgagctgaagacccccgccagcagcaccgccccccccatcagcagcggccccggcgccctggccagcgtgcccgccagccaccccgcccacggcctggccccccacgagagccagctgcacctgaagggcgacccccactacagcttcaaccaccccttcagcatcaacaacctgatgagcagcagcgagcagcagcacaagctggacttcaaggcctacgagcaggccctgcagtacagcccctacggcagcaccctgcccgccagcctgcccctgggcagcgccagcgtgaccaccagaagccccatcgagcccagcgccctggagcccgcctactaccagggcgtgtacagcagacccgtgctgaacaccagctag

SEQ ID NO: 10782 - DNA, 1320 bp, synthetic construct
  misc_feature 1..1320: note = Description of Artificial Sequence: Synthetic coding sequence
  source 1..1320: mol_type = other DNA
atgaacagcggcctgggcagcatgaacagcatgaacacctacatgaccatgaacaccatgaccaccagcggcaacatgacccccgccagcttcaacatgagctacgccaaccccggcctgggcgccggcctgagccccggcgccgtggccggcatgcccggcggcagcgccggcgccatgaacagcatgaccgccgccggcgtgaccgccatgggcaccgccctgagccccagcggcatgggcgccatgggcgcccagcaggccgccagcatgaacggcctgggcccctacgccgccgccatgaacccctgcatgagccccatggcctacgcccccagcaacctgggcagaagcagagccggcggcggcggcgacgccaagaccttcaagagaagctacccccacgccaagcccccctacagctacatcagcctgatcaccatggccatccagcaggcccccagcaagatgctgaccctgagcgagatctaccagtggatcatggacctgttcccctactacagacagaaccagcagagatggcagaacagcatcagacacagcctgagcttcaacgactgcttcgtgaaggtggccagaagccccgacaagcccggcaagggcagctactggaccctgcaccccgacagcggcaacatgttcgagaacggctgctacctgagaagacagaagagattcaagtgcgagaagcagcccggcgccggcggcggcggcggcagcggcagcggcggcagcggcgccaagggcggccccgagagcagaaaggaccccagcggcgccagcaaccccagcgccgacagccccctgcacagaggcgtgcacggcaagaccggccagctggagggcgcccccgcccccggccccgccgccagcccccagaccctggaccacagcggcgccaccgccaccggcggcgccagcgagctgaagacccccgccagcagcaccgccccccccatcagcagcggccccggcgccctggccagcgtgcccgccagccaccccgcccacggcctggccccccacgagagccagctgcacctgaagggcgacccccactacagcttcaaccaccccttcagcatcaacaacctgatgagcagcagcgagcagcagcacaagctggacttcaaggcctacgagcaggccctgcagtacagcccctacggcagcaccctgcccgccagcctgcccctgggcagcgccagcgtgaccaccagaagccccatcgagcccagcgccctggagcccgcctactaccagggcgtgtacagcagacccgtgctgaacaccagctag

SEQ ID NO: 10783 - DNA, 1506 bp, synthetic construct
  misc_feature 1..1506: note = Description of Artificial Sequence: Synthetic coding sequence
  source 1..1506: mol_type = other DNA
atgcaggccagatacagcgtgagcgaccccaacgccctgggcgtggtgccctacctgagcgagcagaactactacagagccgccggcagctacggcggcatggccagccccatgggcgtgtacagcggccaccccgagcagtacagcgccggcatgggcagaagctacgccccctaccaccaccaccagcccgccgcccccaaggacctggtgaagcccccctacagctacatcgccctgatcaccatggccatccagaacgcccccgagaagaagatcaccctgaacggcatctaccagttcatcatggacagattccccttctacagagagaacaagcagggctggcagaacagcatcagacacaacctgagcctgaacgagtgcttcgtgaaggtgcccagagacgacaagaagcccggcaagggcagctactggaccctggaccccgacagctacaacatgttcgagaacggcagcttcctgagaagaagaagaagattcaagaagaaggacgtgagcaaggagaaggaggagagagcccacctgaaggagcccccccccgccgccagcaagggcgcccccgccaccccccacctggccgacgcccccaaggaggccgagaagaaggtggtgatcaagagcgaggccgccagccccgccctgcccgtgatcaccaaggtggagaccctgagccccgagagcgccctgcagggcagccccagaagcgccgccagcacccccgccggcagccccgacggcagcctgcccgagcaccacgccgccgcccccaacggcctgcccggcttcagcgtggagaacatcatgaccctgagaaccagcccccccggcggcgagctgagccccggcgccggcagagccggcctggtggtgccccccctggccctgccctacgccgccgccccccccgccgcctacggccagccctgcgcccagggcctggaggccggcgccgccggcggctaccagtgcagcatgagagccatgagcctgtacaccggcgccgagagacccgcccacatgtgcgtgccccccgccctggacgaggccctgagcgaccaccccagcggccccaccagccccctgagcgccctgaacctggccgccggccaggagggcgccctggccgccaccggccaccaccaccagcaccacggccaccaccacccccaggcccccccccccccccccgccccccagccccagcccaccccccagcccggcgccgccgccgcccaggccgccagctggtacctgaaccacagcggcgacctgaaccacctgcccggccacaccttcgccgcccagcagcagaccttccccaacgtgagagagatgttcaacagccacagactgggcatcgagaacagcaccctgggcgagagccaggtgagcggcaacgccagctgccagctgccctacagaagcaccccccccctgtacagacacgccgccccctacagctacgactgcaccaagtactag

SEQ ID NO: 10784 - DNA, 1968 bp, synthetic construct
  misc_feature 1..1968: note = Description of Artificial Sequence: Synthetic coding sequence
  source 1..1968: mol_type = other DNA
atggccgaggccccccaggtggtggagatcgaccccgacttcgagcccctgcccagacccagaagctgcacctggcccctgcccagacccgagttcagccagagcaacagcgccaccagcagccccgcccccagcggcagcgccgccgccaaccccgacgccgccgccggcctgcccagcgccagcgccgccgccgtgagcgccgacttcatgagcaacctgagcctgctggaggagagcgaggacttcccccaggcccccggcagcgtggccgccgccgtggccgccgccgccgccgccgccgccaccggcggcctgtgcggcgacttccagggccccgaggccggctgcctgcaccccgcccccccccagccccccccccccggccccctgagccagcacccccccgtgccccccgccgccgccggccccctggccggccagcccagaaagagcagcagcagcagaagaaacgcctggggcaacctgagctacgccgacctgatcaccaaggccatcgagagcagcgccgagaagagactgaccctgagccagatctacgagtggatggtgaagagcgtgccctacttcaaggacaagggcgacagcaacagcagcgccggctggaagaacagcatcagacacaacctgagcctgcacagcaagttcatcagagtgcagaacgagggcaccggcaagagcagctggtggatgctgaaccccgagggcggcaagagcggcaagagccccagaagaagagccgccagcatggacaacaacagcaagttcgccaagagcagaagcagagccgccaagaagaaggccagcctgcagagcggccaggagggcgccggcgacagccccggcagccagttcagcaagtggcccgccagccccggcagccacagcaacgacgacttcgacaactggagcaccttcagacccagaaccagcagcaacgccagcaccatcagcggcagactgagccccatcatgaccgagcaggacgacctgggcgagggcgacgtgcacagcatggtgtacccccccagcgccgccaagatggccagcaccctgcccagcctgagcgagatcagcaaccccgagaacatggagaacctgctggacaacctgaacctgctgagcagccccaccagcctgaccgtgagcacccagagcagccccggcaccatgatgcagcagaccccctgctacagcttcgccccccccaacaccagcctgaacagccccagccccaactaccagaagtacacctacggccagagcagcatgagccccctgccccagatgcccatccagaccctgcaggacaacaagagcagctacggcggcatgagccagtacaactgcgcccccggcctgctgaaggagctgctgaccagcgacagccccccccacaacgacatcatgacccccgtggaccccggcgtggcccagcccaacagcagagtgctgggccagaacgtgatgatgggccccaacagcgtgatgagcacctacggcagccaggccagccacaacaagatgatgaaccccagcagccacacccaccccggccacgcccagcagaccagcgccgtgaacggcagacccctgccccacaccgtgagcaccatgccccacaccagcggcatgaacagactgacccaggtgaagacccccgtgcaggtgcccctgccccaccccatgcagatgagcgccctgggcggctacagcagcgtgagcagctgcaacggctacggcagaatgggcctgctgcaccaggagaagctgcccagcgacctggacggcatgttcatcgagagactggactgcgacatggagagcatcatcagaaacgacctgatggacggcgacaccctggacttcaacttcgacaacgtgctgcccaaccagagcttcccccacagcgtgaagaccaccacccacagctgggtgagcggctag

SEQ ID NO: 10785 - DNA, 2022 bp, synthetic construct
  misc_feature 1..2022: note = Description of Artificial Sequence: Synthetic coding sequence
  source 1..2022: mol_type = other DNA
atggccgaggcccccgccagccccgcccccctgagccccctggaggtggagctggaccccgagttcgagccccagagcagacccagaagctgcacctggcccctgcagagacccgagctgcaggccagccccgccaagcccagcggcgagaccgccgccgacagcatgatccccgaggaggaggacgacgaggacgacgaggacggcggcggcagagccggcagcgccatggccatcggcggcggcggcggcagcggcaccctgggcagcggcctgctgctggaggacagcgccagagtgctggcccccggcggccaggaccccggcagcggccccgccaccgccgccggcggcctgagcggcggcacccaggccctgctgcagccccagcagcccctgccccccccccagcccggcgccgccggcggcagcggccagcccagaaagtgcagcagcagaagaaacgcctggggcaacctgagctacgccgacctgatcaccagagccatcgagagcagccccgacaagagactgaccctgagccagatctacgagtggatggtgagatgcgtgccctacttcaaggacaagggcgacagcaacagcagcgccggctggaagaacagcatcagacacaacctgagcctgcacagcagattcatgagagtgcagaacgagggcaccggcaagagcagctggtggatcatcaaccccgacggcggcaagagcggcaaggcccccagaagaagagccgtgagcatggacaacagcaacaagtacaccaagagcagaggcagagccgccaagaagaaggccgccctgcagaccgcccccgagagcgccgacgacagccccagccagctgagcaagtggcccggcagccccaccagcagaagcagcgacgagctggacgcctggaccgacttcagaagcagaaccaacagcaacgccagcaccgtgagcggcagactgagccccatcatggccagcaccgagctggacgaggtgcaggacgacgacgcccccctgagccccatgctgtacagcagcagcgccagcctgagccccagcgtgagcaagccctgcaccgtggagctgcccagactgaccgacatggccggcaccatgaacctgaacgacggcctgaccgagaacctgatggacgacctgctggacaacatcaccctgccccccagccagcccagccccaccggcggcctgatgcagagaagcagcagcttcccctacaccaccaagggcagcggcctgggcagccccaccagcagcttcaacagcaccgtgttcggccccagcagcctgaacagcctgagacagagccccatgcagaccatccaggagaacaagcccgccaccttcagcagcatgagccactacggcaaccagaccctgcaggacctgctgaccagcgacagcctgagccacagcgacgtgatgatgacccagagcgaccccctgatgagccaggccagcaccgccgtgagcgcccagaacagcagaagaaacgtgatgctgagaaacgaccccatgatgagcttcgccgcccagcccaaccagggcagcctggtgaaccagaacctgctgcaccaccagcaccagacccagggcgccctgggcggcagcagagccctgagcaacagcgtgagcaacatgggcctgagcgagagcagcagcctgggcagcgccaagcaccagcagcagagccccgtgagccagagcatgcagaccctgagcgacagcctgagcggcagcagcctgtacagcaccagcgccaacctgcccgtgatgggccacgagaagttccccagcgacctggacctggacatgttcaacggcagcctggagtgcgacatggagagcatcatcagaagcgagctgatggacgccgacggcctggacttcaacttcgacagcctgatcagcacccagaacgtggtgggcctgaacgtgggcaacttcaccggcgccaagcaggccagcagccagagctgggtgcccggctag

SEQ ID NO: 10786 - DNA, 2022 bp, synthetic construct; identical to SEQ ID NO: 10785
  misc_feature 1..2022: note = Description of Artificial Sequence: Synthetic coding sequence
  source 1..2022: mol_type = other DNA

SEQ ID NO: 10787 - DNA, 1302 bp, synthetic construct
  misc_feature 1..1302: note = Description of Artificial Sequence: Synthetic coding sequence
  source 1..1302: mol_type = other DNA
atgagagtgcagaacgagggcaccggcaagagcagctggtggatcatcaaccccgacggcggcaagagcggcaaggcccccagaagaagagccgtgagcatggacaacagcaacaagtacaccaagagcagaggcagagccgccaagaagaaggccgccctgcagaccgcccccgagagcgccgacgacagccccagccagctgagcaagtggcccggcagccccaccagcagaagcagcgacgagctggacgcctggaccgacttcagaagcagaaccaacagcaacgccagcaccgtgagcggcagactgagccccatcatggccagcaccgagctggacgaggtgcaggacgacgacgcccccctgagccccatgctgtacagcagcagcgccagcctgagccccagcgtgagcaagccctgcaccgtggagctgcccagactgaccgacatggccggcaccatgaacctgaacgacggcctgaccgagaacctgatggacgacctgctggacaacatcaccctgccccccagccagcccagccccaccggcggcctgatgcagagaagcagcagcttcccctacaccaccaagggcagcggcctgggcagccccaccagcagcttcaacagcaccgtgttcggccccagcagcctgaacagcctgagacagagccccatgcagaccatccaggagaacaagcccgccaccttcagcagcatgagccactacggcaaccagaccctgcaggacctgctgaccagcgacagcctgagccacagcgacgtgatgatgacccagagcgaccccctgatgagccaggccagcaccgccgtgagcgcccagaacagcagaagaaacgtgatgctgagaaacgaccccatgatgagcttcgccgcccagcccaaccagggcagcctggtgaaccagaacctgctgcaccaccagcaccagacccagggcgccctgggcggcagcagagccctgagcaacagcgtgagcaacatgggcctgagcgagagcagcagcctgggcagcgccaagcaccagcagcagagccccgtgagccagagcatgcagaccctgagcgacagcctgagcggcagcagcctgtacagcaccagcgccaacctgcccgtgatgggccacgagaagttccccagcgacctggacctggacatgagcatgggcgcctggaacgtgacctggagccccctgagcgtggtgaacagctggatgctgatgggctggatcctgaccctgatccccagcagcccccacagaatgctgctggtgtag

SEQ ID NO: 10788 - DNA, 1362 bp, synthetic construct
  misc_feature 1..1362: note = Description of Artificial Sequence: Synthetic coding sequence
  source 1..1362: mol_type = other DNA
atgagagtgcagaacgagggcaccggcaagagcagctggtggatcatcaaccccgacggcggcaagagcggcaaggcccccagaagaagagccgtgagcatggacaacagcaacaagtacaccaagagcagaggcagagccgccaagaagaaggccgccctgcagaccgcccccgagagcgccgacgacagccccagccagctgagcaagtggcccggcagccccaccagcagaagcagcgacgagctggacgcctggaccgacttcagaagcagaaccaacagcaacgccagcaccgtgagcggcagactgagccccatcatggccagcaccgagctggacgaggtgcaggacgacgacgcccccctgagccccatgctgtacagcagcagcgccagcctgagccccagcgtgagcaagccctgcaccgtggagctgcccagactgaccgacatggccggcaccatgaacctgaacgacggcctgaccgagaacctgatggacgacctgctggacaacatcaccctgccccccagccagcccagccccaccggcggcctgatgcagagaagcagcagcttcccctacaccaccaagggcagcggcctgggcagccccaccagcagcttcaacagcaccgtgttcggccccagcagcctgaacagcctgagacagagccccatgcagaccatccaggagaacaagcccgccaccttcagcagcatgagccactacggcaaccagaccctgcaggacctgctgaccagcgacagcctgagccacagcgacgtgatgatgacccagagcgaccccctgatgagccaggccagcaccgccgtgagcgcccagaacagcagaagaaacgtgatgctgagaaacgaccccatgatgagcttcgccgcccagcccaaccagggcagcctggtgaaccagaacctgctgcaccaccagcaccagacccagggcgccctgggcggcagcagagccctgagcaacagcgtgagcaacatgggcctgagcgagagcagcagcctgggcagcgccaagcaccagcagcagagccccgtgagccagagcatgcagaccctgagcgacagcctgagcggcagcagcctgtacagcaccagcgccaacctgcccgtgatgggccacgagaagttccccagcgacctggacctggacatgttcaacggcagcctggagtgcgacatggagagcatcatcagaagcgagctgatggacgccgacggcctggacttcaacttcgacagcctgatcagcacccagaacgtggtgggcctgaacgtgggcaacttcaccggcgccaagcaggccagcagccagagctgggtgcccggctag

SEQ ID NO: 10789 - DNA, 444 bp, synthetic construct
  misc_feature 1..444: note = Description of Artificial Sequence: Synthetic coding sequence
  source 1..444: mol_type = other DNA
atgagcttcagattcggccagcacctgatcaagcccagcgtggtgttcctgaagaccgagctgagcttcgccctggtgaacagaaagcccgtggtgcccggccacgtgctggtgtgccccctgagacccgtggagagattccacgacctgagacccgacgaggtggccgacctgttccagaccacccagagagtgggcaccgtggtggagaagcacttccacggcaccagcctgaccttcagcatgcaggacggccccgaggccggccagaccgtgaagcacgtgcacgtgcacgtgctgcccagaaaggccggcgacttccacagaaacgacagcatctacgaggagctgcagaagcacgacaaggaggacttccccgccagctggagaagcgaggaggagatggccgccgaggccgccgccctgagagtgtacttccagtag

SEQ ID NO: 10790 - DNA, 444 bp, synthetic construct; identical to SEQ ID NO: 10789
  misc_feature 1..444: note = Description of Artificial Sequence: Synthetic coding sequence
  source 1..444: mol_type = other DNA

SEQ ID NO: 10791 - DNA, 444 bp, synthetic construct; identical to SEQ ID NO: 10789
  misc_feature 1..444: note = Description of Artificial Sequence: Synthetic coding sequence
  source 1..444: mol_type = other DNA

SEQ ID NO: 10792 - DNA, 240 bp, synthetic construct
  misc_feature 1..240: note = Description of Artificial Sequence: Synthetic coding sequence
  source 1..240: mol_type = other DNA
atgagcttcagattcggccagcacctgatcaagcccagcgtggtgttcctgaagaccgagctgagcttcgccctggtgaacagaaagcccgtggtgcccggccacgtgctggtgtgccccctgagacccgtggagagattccacgacctgagacccgacgaggtggccgacctgttccagaccacccagagagtgggcaccgtggtggagaagcacttccacggcaccagcctgacctag

SEQ ID NO: 10793 - DNA, 444 bp, synthetic construct; identical to SEQ ID NO: 10789
  misc_feature 1..444: note = Description of Artificial Sequence: Synthetic coding sequence
  source 1..444: mol_type = other DNA

SEQ ID NO: 10794 - DNA, 1725 bp, synthetic construct
  misc_feature 1..1725: note = Description of Artificial Sequence: Synthetic coding sequence
  source 1..1725: mol_type = other DNA
atgagagaccccggcgccgccgcccccctgagcagcctgggcctgtgcgccctggtgctggccctgctgggcgccctgagcgccggcgccggcgcccagccctaccacggcgagaagggcatcagcgtgcccgaccacggcttctgccagcccatcagcatccccctgtgcaccgacatcgcctacaaccagaccatcctgcccaacctgctgggccacaccaaccaggaggacgccggcctggaggtgcaccagttctaccccctggtgaaggtgcagtgcagccccgagctgagattcttcctgtgcagcatgtacgcccccgtgtgcaccgtgctggaccaggccatccccccctgcagaagcctgtgcgagagagccagacagggctgcgaggccctgatgaacaagttcggcttccagtggcccgagagactgagatgcgagaacttccccgtgcacggcgccggcgagatctgcgtgggccagaacaccagcgacggcagcggcggccccggcggcggccccaccgcctaccccaccgccccctacctgcccgacctgcccttcaccgccctgccccccggcgccagcgacggcagaggcagacccgccttccccttcagctgccccagacagctgaaggtgcccccctacctgggctacagattcctgggcgagagagactgcggcgccccctgcgagcccggcagagccaacggcctgatgtacttcaaggaggaggagagaagattcgccagactgtgggtgggcgtgtggagcgtgctgtgctgcgccagcaccctgttcaccgtgctgacctacctggtggacatgagaagattcagctaccccgagagacccatcatcttcctgagcggctgctacttcatggtggccgtggcccacgtggccggcttcctgctggaggacagagccgtgtgcgtggagagattcagcgacgacggctacagaaccgtggcccagggcaccaagaaggagggctgcaccatcctgttcatggtgctgtacttcttcggcatggccagcagcatctggtgggtgatcctgagcctgacctggttcctggccgccggcatgaagtggggccacgaggccatcgaggccaacagccagtacttccacctggccgcctgggccgtgcccgccgtgaagaccatcaccatcctggccatgggccaggtggacggcgacctgctgagcggcgtgtgctacgtgggcctgagcagcgtggacgccctgagaggcttcgtgctggcccccctgttcgtgtacctgttcatcggcaccagcttcctgctggccggcttcgtgagcctgttcagaatcagaaccatcatgaagcacgacggcaccaagaccgagaagctggagaagctgatggtgagaatcggcgtgttcagcgtgctgtacaccgtgcccgccaccatcgtgctggcctgctacttctacgagcaggccttcagagagcactgggagagaacctggctgctgcagacctgcaagagctacgccgtgccctgcccccccggccacttcccccccatgagccccgacttcaccgtgttcatgatcaagtacctgatgaccatgatcgtgggcatcaccaccggcttctggatctggagcggcaagaccctgcagagctggagaagattctaccacagactgagccacagcagcaagggcgagaccgccgtgtag

SEQ ID NO: 10795 - DNA, 654 bp, synthetic construct
  misc_feature 1..654: note = Description of Artificial Sequence: Synthetic coding sequence
  source 1..654: mol_type = other DNA
atgagcttcagaggcggcggcagaggcggcttcaacagaggcggcggcggcggcggcttcaacagaggcggcagcagcaaccacttcagaggcggcggcggcggcggcggcggcggcaacttcagaggcggcggcagaggcggcttcggcagaggcggcggcagaggcggcttcaacaagggccaggaccagggcccccccgagagagtggtgctgctgggcgagttcctgcacccctgcgaggacgacatcgtgtgcaagtgcaccaccgacgagaacaaggtgccctacttcaacgcccccgtgtacctggagaacaaggagcagatcggcaaggtggacgagatcttcggccagctgagagacttctacttcagcgtgaagctgagcgagaacatgaaggccagcagcttcaagaagctgcagaagttctacatcgacccctacaagctgctgcccctgcagagattcctgcccagaccccccggcgagaagggcccccccagaggcggcggcagaggcggcagaggcggcggcagaggcggcggcggcagaggcggcggcagaggcggcggcttcagaggcggcagaggcggcggcggcggcggcttcagaggcggcagaggcggcggcttcagaggcagaggccactag

SEQ ID NO: 10796 - DNA, 1533 bp, synthetic construct
  misc_feature 1..1533: note = Description of Artificial Sequence: Synthetic coding sequence
  source 1..1533: mol_type = other DNA
atgtacagagccctgagactgctggccagaagcagacccctggtgagagcccccgccgccgccctggccagcgcccccggcctgggcggcgccgccgtgcccagcttctggccccccaacgccgccagaatggccagccagaacagcttcagaatcgagtacgacaccttcggcgagctgaaggtgcccaacgacaagtactacggcgcccagaccgtgagaagcaccatgaacttcaagatcggcggcgtgaccgagagaatgcccacccccgtgatcaaggccttcggcatcctgaagagagccgccgccgaggtgaaccaggactacggcctggaccccaagatcgccaacgccatcatgaaggccgccgacgaggtggccgagggcaagctgaacgaccacttccccctggtggtgtggcagaccggcagcggcacccagaccaacatgaacgtgaacgaggtgatcagcaacagagccatcgagatgctgggcggcgagctgggcagcaagatccccgtgcaccccaacgaccacgtgaacaagagccagagcagcaacgacaccttccccaccgccatgcacatcgccgccgccatcgaggtgcacgaggtgctgctgcccggcctgcagaagctgcacgacgccctggacgccaagagcaaggagttcgcccagatcatcaagatcggcagaacccacacccaggacgccgtgcccctgaccctgggccaggagttcagcggctacgtgcagcaggtgaagtacgccatgaccagaatcaaggccgccatgcccagaatctacgagctggccgccggcggcaccgccgtgggcaccggcctgaacaccagaatcggcttcgccgagaaggtggccgccaaggtggccgccctgaccggcctgcccttcgtgaccgcccccaacaagttcgaggccctggccgcccacgacgccctggtggagctgagcggcgccatgaacaccaccgcctgcagcctgatgaagatcgccaacgacatcagattcctgggcagcggccccagaagcggcctgggcgagctgatcctgcccgagaacgagcccggcagcagcatcatgcccggcaaggtgaaccccacccagtgcgaggccatgaccatggtggccgcccaggtgatgggcaaccacgtggccgtgaccgtgggcggcagcaacggccacttcgagctgaacgtgttcaagcccatgatgatcaagaacgtgctgcacagcgccagactgctgggcgacgccagcgtgagcttcaccgagaactgcgtggtgggcatccaggccaacaccgagagaatcaacaagctgatgaacgagagcctgatgctggtgaccgccctgaacccccacatcggctacgacaaggccgccaagatcgccaagaccgcccacaagaacggcagcaccctgaaggagaccgccatcgagctgggctacctgaccgccgagcagttcgacgagtgggtgaagcccaaggacatgctgggccccaagtag

SEQ ID NO: 10797 - DNA, 537 bp, synthetic construct
  misc_feature 1..537: note = Description of Artificial Sequence: Synthetic coding sequence
  source 1..537: mol_type = other DNA
atgagccccagcggcagactgtgcctgctgaccatcgtgggcctgatcctgcccaccagaggccagaccctgaaggacaccaccagcagcagcagcgccgacagcaccatcatggacatccaggtgcccaccagagcccccgacgccgtgtacaccgagctgcagcccaccagccccacccccacctggcccgccgacgagaccccccagccccagacccagacccagcagctggagggcaccgacggccccctggtgaccgaccccgagacccacaagagcaccaaggccgcccaccccaccgacgacaccaccaccctgagcgagagacccagccccagcaccgacgtgcagaccgacccccagaccctgaagcccagcggcttccacgaggacgaccccttcttctacgacgagcacaccctgagaaagagaggcctgctggtggccgccgtgctgttcatcaccggcatcatcatcctgaccagcggcaagtgcagacagctgagcagactgtgcagaaacagatgcagatag

SEQ ID NO: 10798 - DNA, 324 bp, synthetic construct
  misc_feature 1..324: note = Description of Artificial Sequence: Synthetic coding sequence
  source 1..324: mol_type = other DNA
atgcagaccctgagcaacatcccctgcttctgcctgcacggcagcctgctgcccagcaccgacctggccaccctgagcgcccaccccaccgacgacaccaccaccctgagcgagagacccagccccagcaccgacgtgcagaccgacccccagaccctgaagcccagcggcttccacgaggacgaccccttcttctacgacgagcacaccctgagaaagagaggcctgctggtggccgccgtgctgttcatcaccggcatcatcatcctgaccagcggcaagtgcagacagctgagcagactgtgcagaaacagatgcagatag

SEQ ID NO: 10799 - DNA, 291 bp, synthetic construct
  misc_feature 1..291: note = Description of Artificial Sequence: Synthetic coding sequence
  source 1..291: mol_type = other DNA
atgagccccagcggcagactgtgcctgctgaccatcgtgggcctgatcctgcccaccagaggccagaccctgaaggacaccaccagcagcagcagcgccgacagcaccatcatggacatccaggtgcccaccagagcccccgacgccgtgtacaccgagctgcagcccaccagccccacccccacctggcccgccgacggcgcctacatcaccgcctacggcgtgacccacttcctgatgaacatgctggccgtgagcagcttcttctgcctgcacaccgccccccagtag

SEQ ID NO: 10800 - DNA, 537 bp, synthetic construct; identical to SEQ ID NO: 10797
  misc_feature 1..537: note = Description of Artificial Sequence: Synthetic coding sequence
  source 1..537: mol_type = other DNA

SEQ ID NO: 10801 - DNA, 537 bp, synthetic construct; identical to SEQ ID NO: 10797
  misc_feature 1..537: note = Description of Artificial Sequence: Synthetic coding sequence
  source 1..537: mol_type = other DNA

SEQ ID NO: 10802 - DNA, 537 bp, synthetic construct; identical to SEQ ID NO: 10797
  misc_feature 1..537: note = Description of Artificial Sequence: Synthetic coding sequence
  source 1..537: mol_type = other DNA

SEQ ID NO: 10803 - DNA, 585 bp, synthetic construct
  misc_feature 1..585: note = Description of Artificial Sequence: Synthetic coding sequence
  source 1..585: mol_type = other DNA
atgagccccagcggcagactgtgcctgctgaccatcgtgggcctgatcctgcccaccagaggccagaccctgaaggacaccaccagcagcagcagcgccgacagcaccatcatggacatccaggtgcccaccagagcccccgacgccgtgtacaccgagctgcagcccaccagccccacccccacctggcccgccgacgagaccccccagccccagacccagacccagcagctggagggcaccgacggccccctggtgaccgaccccgagacccacaagagcaccaaggccgcccaccccaccgacgacaccaccaccctgagcgagagacccagccccagcaccgacgtgcagaccgacccccagaccctgaagcccagcggcttccacgaggacgaccccttcttctacgacgagcacaccctgagaaagagaggcctgctggtggccgccgtgctgttcatcaccggcatcatcatcctgaccagcgagaactggggctgggtgggcagaacccccagacccggcggcggcctgatgaccgagggctgggtgctgaagggcccctgggccatcctgttctag

SEQ ID NO: 10804 - DNA, 1518 bp, synthetic construct
  misc_feature 1..1518: note = Description of Artificial Sequence: Synthetic coding sequence
  source 1..1518: mol_type = other DNA
atgagcaacatctgccagagactgtgggagtacctggagccctacctgccctgcctgagcaccgaggccgacaagagcaccgtgatcgagaaccccggcgccctgtgcagcccccagagccagagacacggccactacttcgtggccctgttcgactaccaggccagaaccgccgaggacctgagcttcagagccggcgacaagctgcaggtgctggacaccctgcacgagggctggtggttcgccagacacctggagaagagaagagacggcagcagccagcagctgcagggctacatccccagcaactacgtggccgaggacagaagcctgcaggccgagccctggttcttcggcgccatcggcagaagcgacgccgagaagcagctgctgtacagcgagaacaagaccggcagcttcctgatcagagagagcgagagccagaagggcgagttcagcctgagcgtgctggacggcgccgtggtgaagcactacagaatcaagagactggacgagggcggcttcttcctgaccagaagaagaatcttcagcaccctgaacgagttcgtgagccactacaccaagaccagcgacggcctgtgcgtgaagctgggcaagccctgcctgaagatccaggtgcccgcccccttcgacctgagctacaagaccgtggaccagtgggagatcgacagaaacagcatccagctgctgaagagactgggcagcggccagttcggcgaggtgtgggagggcctgtggaacaacaccacccccgtggccgtgaagaccctgaagcccggcagcatggaccccaacgacttcctgagagaggcccagatcatgaagaacctgagacaccccaagctgatccagctgtacgccgtgtgcaccctggaggaccccatctacatcatcaccgagctgatgagacacggcagcctgcaggagtacctgcagaacgacaccggcagcaagatccacctgacccagcaggtggacatggccgcccaggtggccagcggcatggcctacctggagagcagaaactacatccacagagacctggccgccagaaacgtgctggtgggcgagcacaacatctacaaggtggccgacttcggcctggccagagtgttcaaggtggacaacgaggacatctacgagagcagacacgagatcaagctgcccgtgaagtggaccgcccccgaggccatcagaagcaacaagttcagcatcaagagcgacgtgtggagcttcggcatcctgctgtacgagatcatcacctacggcaagatgccctacagcggcatgaccggcgcccaggtgatccagatgctggcccagaactacagactgccccagcccagcaactgcccccagcagttctacaacatcatgctggagtgctggaacgccgagcccaaggagagacccaccttcgagaccctgagatggaagctggaggactacttcgagaccgacagcagctacagcgacgccaacaacttcatcagatag

SEQ ID NO: 10805 - DNA, 1092 bp, synthetic construct
  misc_feature 1..1092: note = Description of Artificial Sequence: Synthetic coding sequence
  source 1..1092: mol_type = other DNA
atggacagcaccagcctgctgcccaacccctggatcagagtgctggacggcgccgtggtgaagcactacagaatcaagagactggacgagggcggcttcttcctgaccagaagaagaatcttcagcaccctgaacgagttcgtgagccactacaccaagaccagcgacggcctgtgcgtgaagctgggcaagccctgcctgaagatccaggtgcccgcccccttcgacctgagctacaagaccgtggaccagtgggagatcgacagaaacagcatccagctgctgaagagactgggcagcggccagttcggcgaggtgtgggagggcctgtggaacaacaccacccccgtggccgtgaagaccctgaagcccggcagcatggaccccaacgacttcctgagagaggcccagatcatgaagaacctgagacaccccaagctgatccagctgtacgccgtgtgcaccctggaggaccccatctacatcatcaccgagctgatgagacacggcagcctgcaggagtacctgcagaacgacaccggcagcaagatccacctgacccagcaggtggacatggccgcccaggtggccagcggcatggcctacctggagagcagaaactacatccacagagacctggccgccagaaacgtgctggtgggcgagcacaacatctacaaggtggccgacttcggcctggccagagtgttcaaggtggacaacgaggacatctacgagagcagacacgagatcaagctgcccgtgaagtggaccgcccccgaggccatcagaagcaacaagttcagcatcaagagcgacgtgtggagcttcggcatcctgctgtacgagatcatcacctacggcaagatgccctacagcggcatgaccggcgcccaggtgatccagatgctggcccagaactacagactgccccagcccagcaactgcccccagcagttctacaacatcatgctggagtgctggaacgccgagcccaaggagagacccaccttcgagaccctgagatggaagctggaggactacttcgagaccgacagcagctacagcgacgccaacaacttcatcagatag

SEQ ID NO: 10806 - DNA, 1128 bp, synthetic construct
  misc_feature 1..1128: note = Description of Artificial Sequence: Synthetic coding sequence
  source 1..1128: mol_type = other DNA
atgagaagcgtggcccccagcggccccaagatgggcaacatcaccgccgacaacagcagcatgagctgcaccatcgaccacaccatccaccagaccctggcccccgtggtgtacgtgaccgtgctggtggtgggcttccccgccaactgcctgagcctgtacttcggctacctgcagatcaaggccagaaacgagctgggcgtgtacctgtgcaacctgaccgtggccgacctgttctacatctgcagcctgcccttctggctgcagtacgtgctgcagcacgacaactggagccacggcgacctgagctgccaggtgtgcggcatcctgctgtacgagaacatctacatcagcgtgggcttcctgtgctgcatcagcgtggacagatacctggccgtggcccaccccttcagattccaccagttcagaaccctgaaggccgccgtgggcgtgagcgtggtgatctgggccaaggagctgctgaccagcatctacttcctgatgcacgaggaggtgatcgaggacgagaaccagcacagagtgtgcttcgagcactaccccatccaggcctggcagagagccatcaactactacagattcctggtgggcttcctgttccccatctgcctgctgctggccagctaccagggcatcctgagagccgtgagaagaagccacggcacccagaagagcagaaaggaccagatccagagactggtgctgagcaccgtggtgatcttcctggcctgcttcctgccctaccacgtgctgctgctggtgagaagcgtgtgggaggccagctgcgacttcgccaagggcgtgttcaacgcctaccacttcagcctgctgctgaccagcttcaactgcgtggccgaccccgtgctgtactgcttcgtgagcgagaccacccacagagacctggccagactgagaggcgcctgcctggccttcctgacctgcagcagaaccggcagagccagagaggcctaccccctgggcgcccccgaggccagcggcaagagcggcgcccagggcgaggagcccgagctgctgaccaagctgcaccccgccttccagacccccaacagccccggcagcggcggcttccccaccggcagactggcctag

SEQ ID NO: 10807 - DNA, 1017 bp, synthetic construct
  misc_feature 1..1017: note = Description of Artificial Sequence: Synthetic coding sequence
  source 1..1017: mol_type = other DNA
atgggcaacatcaccgccgacaacagcagcatgagctgcaccatcgaccacaccatccaccagaccctggcccccgtggtgtacgtgaccgtgctggtggtgggcttccccgccaactgcctgagcctgtacttcggctacctgcagatcaaggccagaaacgagctgggcgtgtacctgtgcaacctgaccgtggccgacctgttctacatctgcagcctgcccttctggctgcagtacgtgctgcagcacgacaactggagccacggcgacctgagctgccaggtgtgcggcatcctgctgtacgagaacatctacatcagcgtgggcttcctgtgctgcatcagcgtggacagatacctggccgtggcccaccccttcagattccaccagttcagaaccctgaaggccgccgtgggcgtgagcgtggtgatctgggccaaggagctgctgaccagcatctacttcctgatgcacgaggaggtgatcgaggacgagaaccagcacagagtgtgcttcgagcactaccccatccaggcctggcagagagccatcaactactacagattcctggtgggcttcctgttccccatctgcctgctgctggccagctaccagggcatcctgagagccgtgagaagaagccacggcacccagaagagcagaaaggaccagatccagagactggtgctgagcaccgtggtgatcttcctggcctgcttcctgccctaccacgtgctgctgctggtgagaagcgtgtgggaggccagctgcgacttcgccaagggcgtgttcaacgcctaccacttcagcctgctgctgaccagcttcaactgcgtggccgaccccgtgctgtactgcttcgtgagcgagaccacccacagagacctggccagactgagaggcgcctgcctggccttcctgacctgcagcagaaccggcagagccagagaggcctaccccctgggcgcccccgaggccagcggcaagagcggcgcccagggcgaggagccctag

SEQ ID NO: 10808 - DNA, 1098 bp, synthetic construct
  misc_feature 1..1098: note = Description of Artificial Sequence: Synthetic coding sequence
  source 1..1098: mol_type = other DNA
atgggcaacatcaccgccgacaacagcagcatgagctgcaccatcgaccacaccatccaccagaccctggcccccgtggtgtacgtgaccgtgctggtggtgggcttccccgccaactgcctgagcctgtacttcggctacctgcagatcaaggccagaaacgagctgggcgtgtacctgtgcaacctgaccgtggccgacctgttctacatctgcagcctgcccttctggctgcagtacgtgctgcagcacgacaactggagccacggcgacctgagctgccaggtgtgcggcatcctgctgtacgagaacatctacatcagcgtgggcttcctgtgctgcatcagcgtggacagatacctggccgtggcccaccccttcagattccaccagttcagaaccctgaaggccgccgtgggcgtgagcgtggtgatctgggccaaggagctgctgaccagcatctacttcctgatgcacgaggaggtgatcgaggacgagaaccagcacagagtgtgcttcgagcactaccccatccaggcctggcagagagccatcaactactacagattcctggtgggcttcctgttccccatctgcctgctgctggccagctaccagggcatcctgagagccgtgagaagaagccacggcacccagaagagcagaaaggaccagatccagagactggtgctgagcaccgtggtgatcttcctggcctgcttcctgccctaccacgtgctgctgctggtgagaagcgtgtgggaggccagctgcgacttcgccaagggcgtgttcaacgcctaccacttcagcctgctgctgaccagcttcaactgcgtggccgaccccgtgctgtactgcttcgtgagcgagaccacccacagagacctggccagactgagaggcgcctgcctggccttcctgacctgcagcagaaccggcagagccagagaggcctaccccctgggcgcccccgaggccagcggcaagagcggcgcccagggcgaggagcccgagctgctgaccaagctgcaccccgccttccagacccccaacagccccggcagcggcggcttccccaccggcagactggcctag

SEQ ID NO: 10809 - DNA, 1098 bp, synthetic construct; identical to SEQ ID NO: 10808
  misc_feature 1..1098: note = Description of Artificial Sequence: Synthetic coding sequence
  source 1..1098: mol_type = other DNA

SEQ ID NO: 10810 - DNA, 2100 bp, synthetic construct
  misc_feature 1..2100: note = Description of Artificial Sequence: Synthetic coding sequence
  source 1..2100: mol_type = other DNA
atgaccctgagaagaaagtgcaacgaggacgacgaggtgttcttcggccccttcggccacaaggagagatgcatcgccgccagcctggagctgaacaaccccgtgcccgagcagccccccctgcccaccagcgagagccccttcgcctggagccccctggccggcgagaagttcgtggaggtgtacaaggaggcccacctgctggccctgcacatcgagagcagcagcagaaaccaggccgcccaggccgccaagcccgaggaccccagaagccagggcgtggagagattcatccaggagagcaagctgaagatcaacctgttcgagaaggagaaggagatgaagaagagccccaccagcctgaagagagagacctactacctgagcgacagccccctgctgggcccccccgtgggcgagcccagactgctggccagcagccccgccctgcccagcagcggcgcccaggccagactgaccagagcccccggccccccccacagcgcccacgccctgcccagagagagctgcaccgcccacgccgccagccaggccgccacccagagaaagcccggcaccaagctgctgctgcccagagccgccagcgtgagaggcagaagcatccccggcgccgccgagaagcccaagaaggagatccccgccagccccagcagaaccaagatccccgccgagaaggagagccacagagacgtgctgcccgacaagcccgcccccggcgccgtgaacgtgcccgccgccggcagccacctgggccagggcaagagagccatccccgtgcccaacaagctgggcctgaagaagaccctgctgaaggcccccggcagcaccagcaacctggccagaaagagcagcagcggccccgtgtggagcggcgccagcagcgcctgcaccagccccgccgtgggcaaggccaagagcagcgagttcgccagcatccccgccaacagcagcagacccctgagcaacatcagcaagagcggcagaatgggccccgccatgctgagacccgccctgcccgccggccccgtgggcgccagcagctggcaggccaagagagtggacgtgagcgagctggccgccgagcagctgaccgccccccccagcgccagccccacccagccccagacccccgagggcggcggccagtggctgaacagcagctgcgcctggagcgagagcagccagctgaacaagaccagaagcatcagaagaagagacagctgcctgaacagcaagaccaaggtgatgcccacccccaccaaccagttcaagatccccaagttcagcatcggcgacagccccgacagcagcacccccaagctgagcagagcccagagaccccagagctgcaccagcgtgggcagagtgaccgtgcacagcacccccgtgagaagaagcagcggccccgccccccagagcctgctgagcgcctggagagtgagcgccctgcccacccccgccagcagaagatgcagcggcctgccccccatgacccccaagaccatgcccagagccgtgggcagccccctgtgcgtgcccgccagaagaagaagcagcgagcccagaaagaacagcgccatgagaaccgagcccaccagagagagcaacagaaagaccgacagcagactggtggacgtgagccccgacagaggcagcccccccagcagagtgccccaggccctgaacttcagccccgaggagagcgacagcaccttcagcaagagcaccgccaccgaggtggccagagaggaggccaagcccggcggcgacgccgcccccagcgaggccctgctggtggacatcaagctggagcccctggccgtgacccccgacgccgccagccagcccctgatcgacctgcccctgatcgacttctgcgacacccccgaggcccacgtggccgtgggcagcgagagcagacccctgatcgacctgatgaccaacacccccgacatgaacaagaacgtggccaagcccagccccgtggtgggccagctgatcgacctgagcagccccctgatccagctgagccccgaggccgacaaggagaacgtggacagccccctgctgaagttctag

SEQ ID NO: 10811 - DNA, 2220 bp, synthetic construct
  misc_feature 1..2220: note = Description of Artificial Sequence: Synthetic coding sequence
  source 1..2220: mol_type = other DNA
atggagggcggcggcggcagagacgagcccagcgcctgcagagccggcgacgtgaacatggacgaccccaagaaggaggacatcctgctgctggccgacgagaagttcgacttcgacctgagcctgagcagcagcagcgccaacgaggacgacgaggtgttcttcggccccttcggccacaaggagagatgcatcgccgccagcctggagctgaacaaccccgtgcccgagcagccccccctgcccaccagcgagagccccttcgcctggagccccctggccggcgagaagttcgtggaggtgtacaaggaggcccacctgctggccctgcacatcgagagcagcagcagaaaccaggccgcccaggccgccaagcccgaggaccccagaagccagggcgtggagagattcatccaggagagcaagctgaagatcaacctgttcgagaaggagaaggagatgaagaagagccccaccagcctgaagagagagacctactacctgagcgacagccccctgctgggcccccccgtgggcgagcccagactgctggccagcagccccgccctgcccagcagcggcgcccaggccagactgaccagagcccccggccccccccacagcgcccacgccctgcccagagagagctgcaccgcccacgccgccagccaggccgccacccagagaaagcccggcaccaagctgctgctgcccagagccgccagcgtgagaggcagaagcatccccggcgccgccgagaagcccaagaaggagatccccgccagccccagcagaaccaagatccccgccgagaaggagagccacagagacgtgctgcccgacaagcccgcccccggcgccgtgaacgtgcccgccgccggcagccacctgggccagggcaagagagccatccccgtgcccaacaagctgggcctgaagaagaccctgctgaaggcccccggcagcaccagcaacctggccagaaagagcagcagcggccccgtgtggagcggcgccagcagcgcctgcaccagccccgccgtgggcaaggccaagagcagcgagttcgccagcatccccgccaacagcagcagacccctgagcaacatcagcaagagcggcagaatgggccccgccatgctgagacccgccctgcccgccggccccgtgggcgccagcagctggcaggccaagagagtggacgtgagcgagctggccgccgagcagctgaccgccccccccagcgccagccccacccagccccagacccccgagggcggcggccagtggctgaacagcagctgcgcctggagcgagagcagccagctgaacaagaccagaagcatcagaagaagagacagctgcctgaacagcaagaccaaggtgatgcccacccccaccaaccagttcaagatccccaagttcagcatcggcgacagccccgacagcagcacccccaagctgagcagagcccagagaccccagagctgcaccagcgtgggcagagtgaccgtgcacagcacccccgtgagaagaagcagcggccccgccccccagagcctgctgagcgcctggagagtgagcgccctgcccacccccgccagcagaagatgcagcggcctgccccccatgacccccaagaccatgcccagagccgtgggcagccccctgtgcgtgcccgccagaagaagaagcagcgagcccagaaagaacagcgccatgagaaccgagcccaccagagagagcaacagaaagaccgacagcagactggtggacgtgagccccgacagaggcagcccccccagcagagtgccccaggccctgaacttcagccccgaggagagcgacagcaccttcagcaagagcaccgccaccgaggtggccagagaggaggccaagcccggcggcgacgccgcccccagcgaggccctgctggtggacatcaagctggagcccctggccgtgacccccgacgccgccagccagcccctgatcgacctgcccctgatcgacttctgcgacacccccgaggcccacgtggccgtgggcagcgagagcagacccctgatcgacctgatgaccaacacccccgacatgaacaagaacgtggccaagcccagccccgtggtgggccagctgatcgacctgagcagccccctgatccagctgagccccgaggccgacaaggagaacgtggacagccccctgctgaagttctag

SEQ ID NO: 10812 - DNA, 1149 bp, synthetic construct
  misc_feature 1..1149: note = Description of Artificial Sequence: Synthetic coding sequence
  source 1..1149: mol_type = other DNA
atgggcgactggagcgccctgggcaagctgctggacaaggtgcaggcctacagcaccgccggcggcaaggtgtggctgagcgtgctgttcatcttcagaatcctgctgctgggcaccgccgtggagagcgcctggggcgacgagcagagcgccttcagatgcaacacccagcagcccggctgcgagaacgtgtgctacgacaagagcttccccatcagccacgtgagattctgggtgctgcagatcatcttcgtgagcgtgcccaccctgctgtacctggcccacgtgttctacgtgatgagaaaggaggagaagctgaacaagaaggaggaggagctgaaggtggcccagaccgacggcgtgaacgtggacatgcacctgaagcagatcgagatcaagaagttcaagtacggcatcgaggagcacggcaaggtgaagatgagaggcggcctgctgagaacctacatcatcagcatcctgttcaagagcatcttcgaggtggccttcctgctgatccagtggtacatctacggcttcagcctgagcgccgtgtacacctgcaagagagacccctgcccccaccaggtggactgcttcctgagcagacccaccgagaagaccatcttcatcatcttcatgctggtggtgagcctggtgagcctggccctgaacatcatcgagctgttctacgtgttcttcaagggcgtgaaggacagagtgaagggcaagagcgacccctaccacgccaccagcggcgccctgagccccgccaaggactgcggcagccagaagtacgcctacttcaacggctgcagcagccccaccgcccccctgagccccatgagcccccccggctacaagctggtgaccggcgacagaaacaacagcagctgcagaaactacaacaagcaggccagcgagcagaactgggccaactacagcgccgagcagaacagaatgggccaggccggcagcaccatcagcaacagccacgcccagcccttcgacttccccgacgacaaccagaacagcaagaagctggccgccggccacgagctgcagcccctggccatcgtggaccagagacccagcagcagagccagcagcagagccagcagcagacccagacccgacgacctggagatctag

SEQ ID NO: 10813 - DNA, 1101 bp, synthetic construct
  misc_feature 1..1101: note = Description of Artificial Sequence: Synthetic coding sequence
  source 1..1101: mol_type = other DNA
atgggcgactggagcgccctgggcaagctgctggacaaggtgcaggcctacagcaccgccggcggcaaggtgtggctgagcgcctggggcgacgagcagagcgccttcagatgcaacacccagcagcccggctgcgagaacgtgtgctacgacaagagcttccccatcagccacgtgagattctgggtgctgcagatcatcttcgtgagcgtgcccaccctgctgtacctggcccacgtgttctacgtgatgagaaaggaggagaagctgaacaagaaggaggaggagctgaaggtggcccagaccgacggcgtgaacgtggacatgcacctgaagcagatcgagatcaagaagttcaagtacggcatcgaggagcacggcaaggtgaagatgagaggcggcctgctgagaacctacatcatcagcatcctgttcaagagcatcttcgaggtggccttcctgctgatccagtggtacatctacggcttcagcctgagcgccgtgtacacctgcaagagagacccctgcccccaccaggtggactgcttcctgagcagacccaccgagaagaccatcttcatcatcttcatgctggtggtgagcctggtgagcctggccctgaacatcatcgagctgttctacgtgttcttcaagggcgtgaaggacagagtgaagggcaagagcgacccctaccacgccaccagcggcgccctgagccccgccaaggactgcggcagccagaagtacgcctacttcaacggctgcagcagccccaccgcccccctgagccccatgagcccccccggctacaagctggtgaccggcgacagaaacaacagcagctgcagaaactacaacaagcaggccagcgagcagaactgggccaactacagcgccgagcagaacagaatgggccaggccggcagcaccatcagcaacagccacgcccagcccttcgacttccccgacgacaaccagaacagcaagaagctggccgccggccacgagctgcagcccctggccatcgtggaccagagacccagcagcagagccagcagcagagccagcagcagacccagacccgacgacctggagatctag

SEQ ID NO: 10814 - DNA, 2673 bp, synthetic construct
  misc_feature 1..2673: note = Description of Artificial Sequence: Synthetic coding sequence
  source 1..2673: mol_type = other DNA
atggacagcaacaccgcccccctgggccccagctgcccccagcccccccccgccccccagccccaggccagaagcagactgaacgccaccgccagcctggagcaggagagaagcgagagacccagagcccccggcccccaggccggccccggccccggcgtgagagacgccgccgcccccgccgagccccaggcccagcacaccagaagcagagagagagccgacggcaccggccccaccaagggcgacatggagatccccttcgaggaggtgctggagagagccaaggccggcgaccccaaggcccagaccgaggtgggcaagcactacctgcagctggccggcgacaccgacgaggagctgaacagctgcaccgccgtggactggctggtgctggccgccaagcagggcagaagagaggccgtgaagctgctgagaagatgcctggccgacagaagaggcatcaccagcgagaacgagagagaggtgagacagctgagcagcgagaccgacctggagagagccgtgagaaaggccgccctggtgatgtactggaagctgaaccccaagaagaagaagcaggtggccgtggccgagctgctggagaacgtgggccaggtgaacgagcacgacggcggcgcccagcccggccccgtgcccaagagcctgcagaagcagagaagaatgctggagagactggtgagcagcgagagcaagaactacatcgccctggacgacttcgtggagatcaccaagaagtacgccaagggcgtgatccccagcagcctgttcctgcaggacgacgaggacgacgacgagctggccggcaagagccccgaggacctgcccctgagactgaaggtggtgaagtaccccctgcacgccatcatggagatcaaggagtacctgatcgacatggccagcagagccggcatgcactggctgagcaccatcatccccacccaccacatcaacgccctgatcttcttcttcatcgtgagcaacctgaccatcgacttcttcgccttcttcatccccctggtgatcttctacctgagcttcatcagcatggtgatctgcaccctgaaggtgttccaggacagcaaggcctgggagaacttcagaaccctgaccgacctgctgctgagattcgagcccaacctggacgtggagcaggccgaggtgaacttcggctggaaccacctggagccctacgcccacttcctgctgagcgtgttcttcgtgatcttcagcttccccatcgccagcaaggactgcatcccctgcagcgagctggccgtgatcaccggcttcttcaccgtgaccagctacctgagcctgagcacccacgccgagccctacaccagaagagccctggccaccgaggtgaccgccggcctgctgagcctgctgcccagcatgcccctgaactggccctacctgaaggtgctgggccagaccttcatcaccgtgcccgtgggccacctggtggtgctgaacgtgagcgtgccctgcctgctgtacgtgtacctgctgtacctgttcttcagaatggcccagctgagaaacttcaagggcacctactgctacctggtgccctacctggtgtgcttcatgtggtgcgagctgagcgtggtgatcctgctggagagcaccggcctgggcctgctgagagccagcatcggctacttcctgttcctgttcgccctgcccatcctggtggccggcctggccctggtgggcgtgctgcagttcgccagatggttcaccagcctggagctgaccaagatcgccgtgaccgtggccgtgtgcagcgtgcccctgctgctgagatggtggaccaaggccagcttcagcgtggtgggcatggtgaagagcctgaccagaagcagcatggtgaagctgatcctggtgtggctgaccgccatcgtgctgttctgctggttctacgtgtacagaagcgagggcatgaaggtgtacaacagcaccctgacctggcagcagtacggcgccctgtgcggccccagagcctggaaggagaccaacatggccagaacccagatcctgtgcagccacctggagggccacagagtgacctggaccggcagattcaagtacgtgagagtgaccgacatcgacaacagcgccgagagcgccatcaacatgctgcccttcttcatcggcgactggatgagatgcctgtacggcgaggcctaccccgcctgcagccccggcaacaccagcaccgccgaggaggagctgtgcagactgaagctgctggccaagcacccctgccacatcaagaagttcgacagatacaagttcgagatcaccgtgggcatgcccttcagcagcggcgccgacggcagcagaagcagagaggaggacgacgtgaccaaggacatcgtgctgagagccagcagcgagttcaagagcgtgctgctgagcctgagacagggcagcctgatcgagttcagcaccatcctggagggcagactgggcagcaagtggcccgtgttcgagctgaaggccatcagctgcctgaactgcatggcccagctgagccccaccagaagacacgtgaagatcgagcacgactggagaagcaccgtgcacggcgccgtgaagttcgccttcgacttcttcttcttccccttcctgagcgccgcctag

SEQ ID NO: 10815 - DNA, 654 bp, synthetic construct; identical to SEQ ID NO: 10795
  misc_feature 1..654: note = Description of Artificial Sequence: Synthetic coding sequence
  source 1..654: mol_type = other DNA

SEQ ID NO: 10816 - DNA, 1590 bp, synthetic construct
  misc_feature 1..1590: note = Description of Artificial Sequence: Synthetic coding sequence
  source 1..1590: mol_type = other DNA
atgggctgcgtgttctgcaagaagctggagcccgtggccaccgccaaggaggacgccggcctggagggcgacttcagaagctacggcgccgccgaccactacggccccgaccccaccaaggccagacccgccagcagcttcgcccacatccccaactacagcaacttcagcagccaggccatcaaccccggcttcctggacagcggcaccatcagaggcgtgagcggcatcggcgtgaccctgttcatcgccctgtacgactacgaggccagaaccgaggacgacctgaccttcaccaagggcgagaagttccacatcctgaacaacaccgagggcgactggtgggaggccagaagcctgagcagcggcaagaccggctgcatccccagcaactacgtggcccccgtggacagcatccaggccgaggagtggtacttcggcaagatcggcagaaaggacgccgagagacagctgctgagccccggcaacccccagggcgccttcctgatcagagagagcgagaccaccaagggcgcctacagcctgagcatcagagactgggaccagaccagaggcgaccacgtgaagcactacaagatcagaaagctggacatgggcggctactacatcaccaccagagtgcagttcaacagcgtgcaggagctggtgcagcactacatggaggtgaacgacggcctgtgcaacctgctgatcgccccctgcaccatcatgaagccccagaccctgggcctggccaaggacgcctgggagatcagcagaagcagcatcaccctggagagaagactgggcaccggctgcttcggcgacgtgtggctgggcacctggaacggcagcaccaaggtggccgtgaagaccctgaagcccggcaccatgagccccaaggccttcctggaggaggcccaggtgatgaagctgctgagacacgacaagctggtgcagctgtacgccgtggtgagcgaggagcccatctacatcgtgaccgagttcatgtgccacggcagcctgctggacttcctgaagaaccccgagggccaggacctgagactgccccagctggtggacatggccgcccaggtggccgagggcatggcctacatggagagaatgaactacatccacagagacctgagagccgccaacatcctggtgggcgagagactggcctgcaagatcgccgacttcggcctggccagactgatcaaggacgacgagtacaacccctgccagggcagcaagttccccatcaagtggaccgcccccgaggccgccctgttcggcagattcaccatcaagagcgacgtgtggagcttcggcatcctgctgaccgagctgatcaccaagggcagaatcccctaccccggcatgaacaagagagaggtgctggagcaggtggagcagggctaccacatgccctgcccccccggctgccccgccagcctgtacgaggccatggagcagacctggagactggaccccgaggagagacccaccttcgagtacctgcagagcttcctggaggactacttcaccagcgccgagccccagtaccagcccggcgaccagacctag

SEQ ID NO: 10817 - DNA, 1590 bp, synthetic construct; identical to SEQ ID NO: 10816
  misc_feature 1..1590: note = Description of Artificial Sequence: Synthetic coding sequence
  source 1..1590: mol_type = other DNA

SEQ ID NO: 10818 - DNA, 1590 bp, synthetic construct; identical to SEQ ID NO: 10816
  misc_feature 1..1590: note = Description of Artificial Sequence: Synthetic coding sequence
  source 1..1590: mol_type = other DNA

SEQ ID NO: 10819 - DNA, 1590 bp, synthetic construct; identical to SEQ ID NO: 10816
  misc_feature 1..1590: note = Description of Artificial Sequence: Synthetic coding sequence
  source 1..1590: mol_type = other DNA

SEQ ID NO: 10820 - DNA, 942 bp, synthetic construct
  misc_feature 1..942: note = Description of Artificial Sequence: Synthetic coding sequence
  source 1..942: mol_type = other DNA
atgggctgcgtgttctgcaagaagctggagcccgtggccaccgccaaggaggacgccggcctggagggcgacttcagaagctacggcgccgccgaccactacggccccgaccccaccaaggccagacccgccagcagcttcgcccacatccccaactacagcaacttcagcagccaggccatcaaccccggcttcctggacagcggcaccatcagaggcgtgagcggcatcggcgtgaccctgttcatcgccctgtacgactacgaggccagaaccgaggacgacctgaccttcaccaagggcgagaagttccacatcctgaacaacaccgagggcgactggtgggaggccagaagcctgagcagcggcaagaccggctgcatccccagcaactacgtggcccccgtggacagcatccaggccgaggagtggtacttcggcaagatcggcagaaaggacgccgagagacagctgctgagccccggcaacccccagggcgccttcctgatcagagagagcgagaccaccaagggcgcctacagcctgagcatcagagactgggaccagaccagaggcgaccacgtgaagcactacaagatcagaaagctggacatgggcggctactacatcaccaccagagtgcagttcaacagcgtgcaggagctggtgcagcactacatggaggtgaacgacggcctgtgcaacctgctgatcgccccctgcaccatcatgaagccccagaccctgggcctggccaaggacgcctgggagatcagcagaagcagcatcaccctggagagaagactgggcaccggctgcttcggcgacgtgtggctgggcacctggaacggcagcaccaaggtggccgtgaagaccctgaagcccggcaccatgagccccaaggccttcctggaggaggcccaggtgatgaagctgctgtag

SEQ ID NO: 10821 - DNA, 1392 bp, synthetic construct
  misc_feature 1..1392: note = Description of Artificial Sequence: Synthetic coding sequence
  source 1..1392: mol_type = other DNA
atgggctgcgtgttctgcaagaagctggagcccgtggccaccgccaaggaggacgccggcctggagggcgacttcagaagctacggcgccgccgaccactacggccccgaccccaccaaggccagacccgccagcagcttcgcccacatccccaactacagcaacttcagcagccaggccatcaaccccggcttcctggacagcggcaccatcagaggcgtgagcggcatcggcgtgaccctgttcatcgccctgtacgactacgaggccagaaccgaggacgacctgaccttcaccaagggcgagaagttccacatcctgaacaacaccgagggcgcctacagcctgagcatcagagactgggaccagaccagaggcgaccacgtgaagcactacaagatcagaaagctggacatgggcggctactacatcaccaccagagtgcagttcaacagcgtgcaggagctggtgcagcactacatggaggtgaacgacggcctgtgcaacctgctgatcgccccctgcaccatcatgaagccccagaccctgggcctggccaaggacgcctgggagatcagcagaagcagcatcaccctggagagaagactgggcaccggctgcttcggcgacgtgtggctgggcacctggaacggcagcaccaaggtggccgtgaagaccctgaagcccggcaccatgagccccaaggccttcctggaggaggcccaggtgatgaagctgctgagacacgacaagctggtgcagctgtacgccgtggtgagcgaggagcccatctacatcgtgaccgagttcatgtgccacggcagcctgctggacttcctgaagaaccccgagggccaggacctgagactgccccagctggtggacatggccgcccaggtggccgagggcatggcctacatggagagaatgaactacatccacagagacctgagagccgccaacatcctggtgggcgagagactggcctgcaagatcgccgacttcggcctggccagactgatcaaggacgacgagtacaacccctgccagggcagcaagttccccatcaagtggaccgcccccgaggccgccctgttcggcagattcaccatcaagagcgacgtgtggagcttcggcatcctgctgaccgagctgatcaccaagggcagaatcccctaccccggcatgaacaagagagaggtgctggagcaggtggagcagggctaccacatgccctgcccccccggctgccccgccagcctgtacgaggccatggagcagacctggagactggaccccgaggagagacccaccttcgagtacctgcagagcttcctggaggactacttcaccagcgccgagccccagtaccagcccggcgaccagacctag

SEQ ID NO: 10822 - DNA, 1005 bp, synthetic construct
  misc_feature 1..1005: note = Description of Artificial Sequence: Synthetic coding sequence
  source 1..1005: mol_type = other DNA
atggagttccccggcctgggcagcctgggcaccagcgagcccctgccccagttcgtggaccccgccctggtgagcagcacccccgagagcggcgtgttcttccccagcggccccgagggcctggacgccgccgccagcagcaccgcccccagcaccgccaccgccgccgccgccgccctggcctactacagagacgccgaggcctacagacacagccccgtgttccaggtgtaccccctgctgaactgcatggagggcatccccggcggcagcccctacgccggctgggcctacggcaagaccggcctgtaccccgccagcaccgtgtgccccaccagagaggacagccccccccaggccgtggaggacctggacggcaagggcagcaccagcttcctggagaccctgaagaccgagagactgagccccgacctgctgaccctgggccccgccctgcccagcagcctgcccgtgcccaacagcgcctacggcggccccgacttcagcagcaccttcttcagccccaccggcagccccctgaacagcgccgcctacagcagccccaagctgagaggcaccctgcccctgcccccctgcgaggccagagagtgcgtgaactgcggcgccaccgccacccccctgtggagaagagacagaaccggccactacctgtgcaacgcctgcggcctgtaccacaagatgaacggccagaacagacccctgatcagacccaagaagagactgatcgtgagcaagagagccggcacccagtgcaccaactgccagaccaccaccaccaccctgtggagaagaaacgccagcggcgaccccgtgtgcaacgcctgcggcctgtactacaagctgcaccagcactactgcggcggcagcgcccagctgatgagagcccagagcatggccagcagaggcggcgtggtgagcttcagcagctgcagccagaacagcggccagcccaagagcctgggccccagacaccccctggcctag

SEQ ID NO: 10823 - DNA, 1242 bp, synthetic construct
  misc_feature 1..1242: note = Description of Artificial Sequence: Synthetic coding sequence
  source 1..1242: mol_type = other DNA
atggagttccccggcctgggcagcctgggcaccagcgagcccctgccccagttcgtggaccccgccctggtgagcagcacccccgagagcggcgtgttcttccccagcggccccgagggcctggacgccgccgccagcagcaccgcccccagcaccgccaccgccgccgccgccgccctggcctactacagagacgccgaggcctacagacacagccccgtgttccaggtgtaccccctgctgaactgcatggagggcatccccggcggcagcccctacgccggctgggcctacggcaagaccggcctgtaccccgccagcaccgtgtgccccaccagagaggacagccccccccaggccgtggaggacctggacggcaagggcagcaccagcttcctggagaccctgaagaccgagagactgagccccgacctgctgaccctgggccccgccctgcccagcagcctgcccgtgcccaacagcgcctacggcggccccgacttcagcagcaccttcttcagccccaccggcagccccctgaacagcgccgcctacagcagccccaagctgagaggcaccctgcccctgcccccctgcgaggccagagagtgcgtgaactgcggcgccaccgccacccccctgtggagaagagacagaaccggccactacctgtgcaacgcctgcggcctgtaccacaagatgaacggccagaacagacccctgatcagacccaagaagagactgatcgtgagcaagagagccggcacccagtgcaccaactgccagaccaccaccaccaccctgtggagaagaaacgccagcggcgaccccgtgtgcaacgcctgcggcctgtactacaagctgcaccaggtgaacagacccctgaccatgagaaaggacggcatccagaccagaaacagaaaggccagcggcaagggcaagaagaagagaggcagcagcctgggcggcaccggcgccgccgagggccccgccggcggcttcatggtggtggccggcggcagcggcagcggcaactgcggcgaggtggccagcggcctgaccctgggcccccccggcaccgcccacctgtaccagggcctgggccccgtggtgctgagcggccccgtgagccacctgatgcccttccccggccccctgctgggcagccccaccggcagcttccccaccggccccatgccccccaccaccagcaccaccgtggtggcccccctgagcagctag

SEQ ID NO: 10824 - DNA, 369 bp, synthetic construct
  misc_feature 1..369: note = Description of Artificial Sequence: Synthetic coding sequence
  source 1..369: mol_type = other DNA
tgacagaacagacccctgatcagacccaagaagagactgatcgtgagcaagagagccggcacccagtgcaccaactgccagaccaccaccaccaccctgtggagaagaaacgccagcggcgaccccgtgtgcaacgcctgcggcctgtactacaagctgcaccaggtgaacagacccctgaccatgagaaaggacggcatccagaccagaaacagaaaggccagcggcaagggcaagaagaagagaggcagcagcctgggcggcaccggcgccgccgagggccccgccctgctgtggtggctgagaagcgcccacgagggcaccgagcacggcctgcagagaagaggcggcgtgctgctgctgctgtag

SEQ ID NO: 10825 - DNA, 1332 bp, synthetic construct
  misc_feature 1..1332: note = Description of Artificial Sequence: Synthetic coding sequence
  source 1..1332: mol_type = other DNA
atggaggtgaccgccgaccagcccagatgggtgagccaccaccaccccgccgtgctgaacggccagcaccccgacacccaccaccccggcctgagccacagctacatggacgccgcccagtaccccctgcccgaggaggtggacgtgctgttcaacatcgacggccagggcaaccacgtgcccccctactacggcaacagcgtgagagccaccgtgcagagatacccccccacccaccacggcagccaggtgtgcagaccccccctgctgcacggcagcctgccctggctggacggcggcaaggccctgggcagccaccacaccgccagcccctggaacctgagccccttcagcaagaccagcatccaccacggcagccccggccccctgagcgtgtacccccccgccagcagcagcagcctgagcggcggccacgccagcccccacctgttcaccttcccccccaccccccccaaggacgtgagccccgaccccagcctgagcacccccggcagcgccggcagcgccagacaggacgagaaggagtgcctgaagtaccaggtgcccctgcccgacagcatgaagctggagagcagccacagcagaggcagcatgaccgccctgggcggcgccagcagcagcacccaccaccccatcaccacctaccccccctacgtgcccgagtacagcagcggcctgttcccccccagcagcctgctgggcggcagccccaccggcttcggctgcaagagcagacccaaggccagaagcagcaccggcagagagtgcgtgaactgcggcgccaccagcacccccctgtggagaagagacggcaccggccactacctgtgcaacgcctgcggcctgtaccacaagatgaacggccagaacagacccctgatcaagcccaagagaagactgagcgccgccagaagagccggcaccagctgcgccaactgccagaccaccaccaccaccctgtggagaagaaacgccaacggcgaccccgtgtgcaacgcctgcggcctgtactacaagctgcacaacatcaacagacccctgaccatgaagaaggagggcatccagaccagaaacagaaagatgagcagcaagagcaagaagtgcaagaaggtgcacgacagcctggaggacttccccaagaacagcagcttcaaccccgccgccctgagcagacacatgagcagcctgagccacatcagccccttcagccacagcagccacatgctgaccacccccacccccatgcacccccccagcagcctgagcttcggcccccaccaccccagcagcatggtgaccgccatgggctag

SEQ ID NO: 10826 - DNA, 1335 bp, synthetic construct
  misc_feature 1..1335: note = Description of Artificial Sequence: Synthetic coding sequence
  source 1..1335: mol_type = other DNA
atggaggtgaccgccgaccagcccagatgggtgagccaccaccaccccgccgtgctgaacggccagcaccccgacacccaccaccccggcctgagccacagctacatggacgccgcccagtaccccctgcccgaggaggtggacgtgctgttcaacatcgacggccagggcaaccacgtgcccccctactacggcaacagcgtgagagccaccgtgcagagatacccccccacccaccacggcagccaggtgtgcagaccccccctgctgcacggcagcctgccctggctggacggcggcaaggccctgggcagccaccacaccgccagcccctggaacctgagccccttcagcaagaccagcatccaccacggcagccccggccccctgagcgtgtacccccccgccagcagcagcagcctgagcggcggccacgccagcccccacctgttcaccttcccccccaccccccccaaggacgtgagccccgaccccagcctgagcacccccggcagcgccggcagcgccagacaggacgagaaggagtgcctgaagtaccaggtgcccctgcccgacagcatgaagctggagagcagccacagcagaggcagcatgaccgccctgggcggcgccagcagcagcacccaccaccccatcaccacctaccccccctacgtgcccgagtacagcagcggcctgttcccccccagcagcctgctgggcggcagccccaccggcttcggctgcaagagcagacccaaggccagaagcagcaccgagggcagagagtgcgtgaactgcggcgccaccagcacccccctgtggagaagagacggcaccggccactacctgtgcaacgcctgcggcctgtaccacaagatgaacggccagaacagacccctgatcaagcccaagagaagactgagcgccgccagaagagccggcaccagctgcgccaactgccagaccaccaccaccaccctgtggagaagaaacgccaacggcgaccccgtgtgcaacgcctgcggcctgtactacaagctgcacaacatcaacagacccctgaccatgaagaaggagggcatccagaccagaaacagaaagatgagcagcaagagcaagaagtgcaagaaggtgcacgacagcctggaggacttccccaagaacagcagcttcaaccccgccgccctgagcagacacatgagcagcctgagccacatcagccccttcagccacagcagccacatgctgaccacccccacccccatgcacccccccagcagcctgagcttcggcccccaccaccccagcagcatggtgaccgccatgggctag

SEQ ID NO: 10827 - DNA, 393 bp, synthetic construct
  misc_feature 1..393: note = Description of Artificial Sequence: Synthetic coding sequence
  source 1..393: mol_type = other DNA
atggaggtgaccgccgaccagcccagatgggtgagccaccaccaccccgccgtgctgaacggccagcaccccgacacccaccaccccggcctgagccacagctacatggacgccgcccagtaccccctgcccgaggaggtggacgtgctgttcaacatcgacggccagggcaaccacgtgcccccctactacggcaacagcgtgagagccaccgtgcagagatacccccccacccaccacggcagccaggtgtgcagaccccccctgctgcacggcagcctgccctggctggacggcggcaaggccctgggcagccaccacaccgccagcccctggaacctgagaccctgcctgcagtgcctgtgggccctgctgcaggccagccagtgctag

SEQ ID NO: 10828 - DNA, 798 bp, synthetic construct
  misc_feature 1..798: note = Description of Artificial Sequence: Synthetic coding sequence
  source 1..798: mol_type = other DNA
atgagaagagccgagctggccggcctgaagaccatggcctgggtgcccgccgagagcgccgtggaggagctgatgcccagactgctgcccgtggagccctgcgacctgaccgagggcttcgaccccagcgtgccccccagaaccccccaggagtacctgagaagagtgcagatcgaggccgcccagtgccccgacgtggtggtggcccagatcgaccccaagaagctgaagagaaagcagagcgtgaacatcagcctgagcggctgccagcccgcccccgagggctacagccccaccctgcagtggcagcagcagcaggtggcccagttcagcaccgtgagacagaacgtgaacaagcacagaagccactggaagagccagcagctggacagcaacgtgaccatgcccaagagcgaggacgaggagggctggaagaagttctgcctgggcgagaagctgtgcgccgacggcgccgtgggccccgccaccaacgagagccccggcatcgactacgtgcaggccaccgtgaccagcgtgctggagtacctgagcaactggttcggcgagagagacttcacccccgagctgggcagatggctgtacgccctgctggcctgcctggagaagcccctgctgcccgaggcccacagcctgatcagacagctggccagaagatgcagcgaggtgagactgctggtggacagcaaggacgacgagagagtgcccgccctgaacctgctgatctgcctggtgagcagatacttcgaccagagagacctggccgacgagcccagctag

SEQ ID NO: 10829 - DNA, 843 bp, synthetic construct
  misc_feature 1..843: note = Description of Artificial Sequence: Synthetic coding sequence
  source 1..843: mol_type = other DNA
atgagaagagccgagctggccggcctgaagaccatggcctgggtgcccgccgagagcgccgtggaggagctgatgcccagactgctgcccgtggagccctgcgacctgaccgagggcttcgaccccagcgtgccccccagaaccccccaggagtacctgagaagagtgcagatcgaggccgcccagtgccccgacgtggtggtggcccagatcgaccccaagaagctgaagagaaagcagagcgtgaacatcagcctgagcggctgccagcccgcccccgagggctacagccccaccctgcagtggcagcagcagcaggtggcccagttcagcaccgtgagacagaacgtgaacaagcacagaagccactggaagagccagcagctggacagcaacgtgaccatgcccaagagcgaggacgaggagggctggaagaagttctgcctgggcgagaagctgtgcgccgacggcgccgtgggccccgccaccaacgagagccccggcatcgactacgtgcagatcggcttcccccccctgctgagcatcgtgagcagaatgaaccaggccaccgtgaccagcgtgctggagtacctgagcaactggttcggcgagagagacttcacccccgagctgggcagatggctgtacgccctgctggcctgcctggagaagcccctgctgcccgaggcccacagcctgatcagacagctggccagaagatgcagcgaggtgagactgctggtggacagcaaggacgacgagagagtgcccgccctgaacctgctgatctgcctggtgagcagatacttcgaccagagagacctggccgacgagcccagctag

SEQ ID NO: 10830 - DNA, 753 bp, synthetic construct
  misc_feature 1..753: note = Description of Artificial Sequence: Synthetic coding sequence
  source 1..753: mol_type = other DNA
atgagaagagccgagctggccggcctgaagaccatggcctgggtgcccgccgagagcgccgtggaggagctgatgcccagactgctgcccgtggagccctgcgacctgaccgagggcttcgaccccagcgtgccccccagaaccccccaggagtacctgagaagagtgcagatcgaggccgcccagtgccccgacgtggtggtggcccagatcgaccccaagaagctgaagagaaagcagagcgtgaacatcagcctgagcggctgccagcccgcccccgagggctacagccccaccctgcagtggcagcagcagcaggtggcccagttcagcaccgtgagacagaacgtgaacaagcacagaagccactggaagagccagcagctggacagcaacgtgaccatgcccaagagcgaggacgaggagggctggaagaagttctgcctgggcgagaagctgtgcgccgacggcgccgtgggccccgccaccaacgagagccccggcatcgactacgtgcagatcggcttcccccccctgctgagcatcgtgagcagaatgaaccaggccaccgtgaccagcgtgctggagtacctgagcaactggttcggcgagagagacttcacccccgagctgggcagatggctgtacgccctgctggcctgcctggagaagcccctgctgcccgaggcccacagcctgatcagacagctggccagaagatgcagcgaggtgagactgctggtggtgttctag

SEQ ID NO: 10831 - DNA, 768 bp, synthetic construct
  misc_feature 1..768: note = Description of Artificial Sequence: Synthetic coding sequence
  source 1..768: mol_type = other DNA
atggacgtgatggacggctgccagttcagccccagcgagtacttctacgacggcagctgcatccccagccccgagggcgagttcggcgacgagttcgtgcccagagtggccgccttcggcgcccacaaggccgagctgcagggcagcgacgaggacgagcacgtgagagcccccaccggccaccaccaggccggccactgcctgatgtgggcctgcaaggcctgcaagagaaagagcaccaccatggacagaagaaaggccgccaccatgagagagagaagaagactgaagaaggtgaaccaggccttcgagaccctgaagagatgcaccaccaccaaccccaaccagagactgcccaaggtggagatcctgagaaacgccatcagatacatcgagagcctgcaggagctgctgagagagcaggtggagaactactacagcctgcccggccagagctgcagcgagcccaccagccccaccagcaactgcagcgacggcatgcccgagtgcaacagccccgtgtggagcagaaagagcagcaccttcgacagcatctactgccccgacgtgagcaacgtgtacgccaccgacaagaacagcctgagcagcctggactgcctgagcaacatcgtggacagaatcaccagcagcgagcagcccggcctgcccctgcaggacctggccagcctgagccccgtggccagcaccgacagccagcccgccacccccggcgccagcagcagcagactgatctaccacgtgctgtag

SEQ ID NO: 10832 - DNA, 1725 bp, synthetic construct
  misc_feature 1..1725: note = Description of Artificial Sequence: Synthetic coding sequence
  source 1..1725: mol_type = other DNA
ctgagccccagcctgggcttccccgcccagatgaaccaccagaagggccccagccccagcttcggcgtgcagccctgcggcccccacgacagcgccagaggcggcatgatcccccacccccagagcagaggccccttccccacctgccagctgaagagcgagctggacatgctggtgggcaagtgcagagaggagcccctggagggcgacatgagcagccccaacagcaccggcatccaggaccccctgctgggcatgctggacggcagagaggacctggagagagaggagaagagagagcccgagagcgtgtacgagaccgactgcagatgggacggctgcagccaggagttcgacagccaggagcagctggtgcaccacatcaacagcgagcacatccacggcgagagaaaggagttcgtgtgccactggggcggctgcagcagagagctgagacccttcaaggcccagtacatgctggtggtgcacatgagaagacacaccggcgagaagccccacaagtgcaccttcgagggctgcagaaagagctacagcagactggagaacctgaagacccacctgagaagccacaccggcgagaagccctacatgtgcgagcacgagggctgcagcaaggccttcagcaacgccagcgacagagccaagcaccagaacagaacccacagcaacgagaagccctacgtgtgcaagctgcccggctgcaccaagagatacaccgaccccagcagcctgagaaagcacgtgaagaccgtgcacggccccgacgcccacgtgaccaagagacacagaggcgacggccccctgcccagagcccccagcatcagcaccgtggagcccaagagagagagagagggcggccccatcagagaggagagcagactgaccgtgcccgagggcgccatgcccccccacccccagcccctgttcagccactacccccagcccagccccccccagtacctgcagagcggcccctacacccagcccccccccgactacctgcccagcgagcccagaccctgcctggacttcgacagccccacccacagcaccggccagctgaaggcccagctggtgtgcaactacgtgcagagccagcaggagctgctgtgggagggcggcggcagagaggacgcccccgcccaggagcccagctaccagagccccaagttcctgggcggcagccaggtgagccccagcagagccaaggcccccgtgaacacctacggccccggcttcggccccaacctgcccaaccacaagagcggcagctaccccacccccagcccctgccacgagaacttcgtggtgggcgccaacagagccagccacagagccgccgccccccccagactgctgccccccctgcccacctgctacggccccctgaaggtgggcggcaccaaccccagctgcggccaccccgaggtgggcagactgggcggcggccccgccctgtaccccccccccgagggccaggtgtgcaaccccctggacagcctggacctggacaacacccagctggacttcgtggccatcctggacgagccccagggcctgagccccccccccagccacgaccagagaggcagcagcggccacacccccccccccagcggcccccccaacatggccgtgggcaacatgagcgtgctgctgagaagcctgcccggcgagaccgagttcctgaacagcagcgcctag

SEQ ID NO: 10833 - DNA, 390 bp, synthetic construct
  misc_feature 1..390: note = Description of Artificial Sequence: Synthetic coding sequence
  source 1..390: mol_type = other DNA
atgttcaacagcatgacccccccccccatcagcagctacggcgagccctgctgcctgagacccctgcccagccagggcgcccccagcgtgggcaccgagggcctgagcggcccccccttctgccaccaggccaacctgatgagcggcccccacagctacggccccgccagagagaccaacagctgcaccgagggccccctgttcagcagccccagaagcgccgtgaagctgaccaagaagagagccctgagcatcagccccctgagcgacgccagcctggacctgcagaccgtgatcagaaccagccccagcagcctggtggccttcatcaacagcagatgcaccagccccggcggcagctacggccacctgagcatcggcaccatgtag

SEQ ID NO: 10834 - DNA, 3198 bp, synthetic construct
  misc_feature 1..3198: note = Description of Artificial Sequence: Synthetic coding sequence
  source 1..3198: mol_type = other DNA
atgttcaacagcatgacccccccccccatcagcagctacggcgagccctgctgcctgagacccctgcccagccagggcgcccccagcgtgggcaccgaggtgaagctgaccaagaagagagccctgagcatcagccccctgagcgacgccagcctggacctgcagaccgtgatcagaaccagccccagcagcctggtggccttcatcaacagcagatgcaccagccccggcggcagctacggccacctgagcatcggcaccatgagccccagcctgggcttccccgcccagatgaaccaccagaagggccccagccccagcttcggcgtgcagccctgcggcccccacgacagcgccagaggcggcatgatcccccacccccagagcagaggccccttccccacctgccagctgaagagcgagctggacatgctggtgggcaagtgcagagaggagcccctggagggcgacatgagcagccccaacagcaccggcatccaggaccccctgctgggcatgctggacggcagagaggacctggagagagaggagaagagagagcccgagagcgtgtacgagaccgactgcagatgggacggctgcagccaggagttcgacagccaggagcagctggtgcaccacatcaacagcgagcacatccacggcgagagaaaggagttcgtgtgccactggggcggctgcagcagagagctgagacccttcaaggcccagtacatgctggtggtgcacatgagaagacacaccggcgagaagccccacaagtgcaccttcgagggctgcagaaagagctacagcagactggagaacctgaagacccacctgagaagccacaccggcgagaagccctacatgtgcgagcacgagggctgcagcaaggccttcagcaacgccagcgacagagccaagcaccagaacagaacccacagcaacgagaagccctacgtgtgcaagctgcccggctgcaccaagagatacaccgaccccagcagcctgagaaagcacgtgaagaccgtgcacggccccgacgcccacgtgaccaagagacacagaggcgacggccccctgcccagagcccccagcatcagcaccgtggagcccaagagagagagagagggcggccccatcagagaggagagcagactgaccgtgcccgagggcgccatgaagccccagcccagccccggcgcccagagcagctgcagcagcgaccacagccccgccggcagcgccgccaacaccgacagcggcgtggagatgaccggcaacgccggcggcagcaccgaggacctgagcagcctggacgagggcccctgcatcgccggcaccggcctgagcaccctgagaagactggagaacctgagactggaccagctgcaccagctgagacccatcggcaccagaggcctgaagctgcccagcctgagccacaccggcaccaccgtgagcagaagagtgggcccccccgtgagcctggagagaagaagcagcagcagcagcagcatcagcagcgcctacaccgtgagcagaagaagcagcctggccagccccttcccccccggcagcccccccgagaacggcgccagcagcctgcccggcctgatgcccgcccagcactacctgctgagagccagatacgccagcgccagaggcggcggcaccagccccaccgccgccagcagcctggacagaatcggcggcctgcccatgcccccctggagaagcagagccgagtaccccggctacaaccccaacgccggcgtgaccagaagagccagcgaccccgcccaggccgccgacagacccgcccccgccagagtgcagagattcaagagcctgggctgcgtgcacaccccccccaccgtggccggcggcggccagaacttcgacccctacctgcccaccagcgtgtacagcccccagccccccagcatcaccgagaacgccgccatggacgccagaggcctgcaggaggagcccgaggtgggcaccagcatggtgggcagcggcctgaacccctacatggacttcccccccaccgacaccctgggctacggcggccccgagggcgccgccgccgagccctacggcgccagaggccccggcagcctgcccctgggccccggcccccccaccaactacggccccaacccctgcccccagcaggccagctaccccgaccccacccaggagacctggggcgagttccccagccacagcggcctgtaccccggccccaaggccctgggcggcacctacagccagtgccccagactggagcactacggccaggtgcaggtgaagcccgagcagggctgccccgtgggcagcgacagcaccggcctggccccctgcctgaacgcccaccccagcgagggccccccccacccccagcccctgttcagccactacccccagcccagccccccccagtacctgcagagcggcccctacacccagcccccccccgactacctgcccagcgagcccagaccctgcctggacttcgacagccccacccacagcaccggccagctgaaggcccagctggtgtgcaactacgtgcagagccagcaggagctgctgtgggagggcggcggcagagaggacgcccccgcccaggagcccagctaccagagccccaagttcctgggcggcagccaggtgagccccagcagagccaaggcccccgtgaacacctacggccccggcttcggccccaacctgcccaaccacaagagcggcagctaccccacccccagcccctgccacgagaacttcgtggtgggcgccaacagagccagccacagagccgccgccccccccagactgctgccccccctgcccacctgctacggccccctgaaggtgggcggcaccaaccccagctgcggccaccccgaggtgggcagactgggcggcggccccgccctgtaccccccccccgagggccaggtgtgcaaccccctggacagcctggacctggacaacacccagctggacttcgtggccatcctggacgagccccagggcctgagccccccccccagccacgaccagagaggcagcagcggccacacccccccccccagcggcccccccaacatggccgtgggcaacatgagcgtgctgctgagaagcctgcccggcgagaccgagttcctgaacagcagcgcctag

SEQ ID NO: 10835 - DNA, 528 bp, synthetic construct
  misc_feature 1..528: note = Description of Artificial Sequence: Synthetic coding sequence
  source 1..528: mol_type = other DNA
atgagccccagcctgggcttccccgcccagatgaaccaccagaagggccccagccccagcttcggcgtgcagccctgcggcccccacgacagcgccagaggcggcatgatcccccacccccagagcagaggccccttccccacctgccagctgaagagcgagctggacatgctggtgggcaagtgcagagaggagcccctggagggcgacatgagcagccccaacagcaccggcatccaggaccccctgctgggcatgctggacggcagagaggacctggagagagaggagaagagagagcccgagagcgtgtacgagaccgactgcagatgggacggctgcagccaggagttcgacagccaggagcagctggtgcaccacatcaacagcgagcacatccacggcgagagaaaggagttcgtgtgccactggggcggctgcagcagagagctgagacccttcaaggcccagtacatgctggtggtgcacatgagaagacacaccggcgagaagccccacaagtgctag

SEQ ID NO: 10836 - DNA, 2937 bp, synthetic construct
  misc_feature 1..2937: note = Description of Artificial Sequence: Synthetic coding sequence
  source 1..2937: mol_type = other DNA
atgagccccagcctgggcttccccgcccagatgaaccaccagaagggccccagccccagcttcggcgtgcagccctgcggcccccacgacagcgccagaggcggcatgatcccccacccccagagcagaggccccttccccacctgccagctgaagagcgagctggacatgctggtgggcaagtgcagagaggagcccctggagggcgacatgagcagccccaacagcaccggcatccaggaccccctgctgggcatgctggacggcagagaggacctggagagagaggagaagagagagcccgagagcgtgtacgagaccgactgcagatgggacggctgcagccaggagttcgacagccaggagcagctggtgcaccacatcaacagcgagcacatccacggcgagagaaaggagttcgtgtgccactggggcggctgcagcagagagctgagacccttcaaggcccagtacatgctggtggtgcacatgagaagacacaccggcgagaagccccacaagtgcaccttcgagggctgcagaaagagctacagcagactggagaacctgaagacccacctgagaagccacaccggcgagaagccctacatgtgcgagcacgagggctgcagcaaggccttcagcaacgccagcgacagagccaagcaccagaacagaacccacagcaacgagaagccctacgtgtgcaagctgcccggctgcaccaagagatacaccgaccccagcagcctgagaaagcacgtgaagaccgtgcacggccccgacgcccacgtgaccaagagacacagaggcgacggccccctgcccagagcccccagcatcagcaccgtggagcccaagagagagagagagggcggccccatcagagaggagagcagactgaccgtgcccgagggcgccatgaagccccagcccagccccggcgcccagagcagctgcagcagcgaccacagccccgccggcagcgccgccaacaccgacagcggcgtggagatgaccggcaacgccggcggcagcaccgaggacctgagcagcctggacgagggcccctgcatcgccggcaccggcctgagcaccctgagaagactggagaacctgagactggaccagctgcaccagctgagacccatcggcaccagaggcctgaagctgcccagcctgagccacaccggcaccaccgtgagcagaagagtgggcccccccgtgagcctggagagaagaagcagcagcagcagcagcatcagcagcgcctacaccgtgagcagaagaagcagcctggccagccccttcccccccggcagcccccccgagaacggcgccagcagcctgcccggcctgatgcccgcccagcactacctgctgagagccagatacgccagcgccagaggcggcggcaccagccccaccgccgccagcagcctggacagaatcggcggcctgcccatgcccccctggagaagcagagccgagtaccccggctacaaccccaacgccggcgtgaccagaagagccagcgaccccgcccaggccgccgacagacccgcccccgccagagtgcagagattcaagagcctgggctgcgtgcacaccccccccaccgtggccggcggcggccagaacttcgacccctacctgcccaccagcgtgtacagcccccagccccccagcatcaccgagaacgccgccatggacgccagaggcctgcaggaggagcccgaggtgggcaccagcatggtgggcagcggcctgaacccctacatggacttcccccccaccgacaccctgggctacggcggccccgagggcgccgccgccgagccctacggcgccagaggccccggcagcctgcccctgggccccggcccccccaccaactacggccccaacccctgcccccagcaggccagctaccccgaccccacccaggagacctggggcgagttccccagccacagcggcctgtaccccggccccaaggccctgggcggcacctacagccagtgccccagactggagcactacggccaggtgcaggtgaagcccgagcagggctgccccgtgggcagcgacagcaccggcctggccccctgcctgaacgcccaccccagcgagggccccccccacccccagcccctgttcagccactacccccagcccagccccccccagtacctgcagagcggcccctacacccagcccccccccgactacctgcccagcgagcccagaccctgcctggacttcgacagccccacccacagcaccggccagctgaaggcccagctggtgtgcaactacgtgcagagccagcaggagctgctgtgggagggcggcggcagagaggacgcccccgcccaggagcccagctaccagagccccaagttcctgggcggcagccaggtgagccccagcagagccaaggcccccgtgaacacctacggccccggcttcggccccaacctgcccaaccacaagagcggcagctaccccacccccagcccctgccacgagaacttcgtggtgggcgccaacagagccagccacagagccgccgccccccccagactgctgccccccctgcccacctgctacggccccctgaaggtgggcggcaccaaccccagctgcggccaccccgaggtgggcagactgggcggcggccccgccctgtaccccccccccgagggccaggtgtgcaaccccctggacagcctggacctggacaacacccagctggacttcgtggccatcctggacgagccccagggcctgagccccccccccagccacgaccagagaggcagcagcggccacacccccccccccagcggcccccccaacatggccgtgggcaacatgagcgtgctgctgagaagcctgcccggcgagaccgagttcctgaacagcagcgcctag

SEQ ID NO: 10837 - DNA, 135 bp, synthetic construct
  misc_feature 1..135: note = Description of Artificial Sequence: Synthetic coding sequence
  source 1..135: mol_type = other DNA
atgagcggcccccacagctacggccccgccagagagaccaacagctgcaccgagggccccctgttcagcagccccagaagcgccgtgaagctgaccaagaagagagccctgagcatcagccccctgagcgactag

SEQ ID NO: 10838 - DNA, 3198 bp, synthetic construct; identical to SEQ ID NO: 10834
  misc_feature 1..3198: note = Description of Artificial Sequence: Synthetic coding sequence
  source 1..3198: mol_type = other DNA

SEQ ID NO: 10839 - DNA, 1548 bp, synthetic construct
  misc_feature 1..1548: note = Description of Artificial Sequence: Synthetic coding sequence
  source 1..1548: mol_type = other DNA
atggccgagcaggtggccctgagcagaacccaggtgtgcggcatcctgagagaggagctgttccagggcgacgccttccaccagagcgacacccacatcttcatcatcatgggcgccagcggcgacctggccaagaagaagatctaccccaccatctggtggctgttcagagacggcctgctgcccgagaacaccttcatcgtgggctacgccagaagcagactgaccgtggccgacatcagaaagcagagcgagcccttcttcaaggccacccccgaggagaagctgaagctggaggacttcttcgccagaaacagctacgtggccggccagtacgacgacgccgccagctaccagagactgaacagccacatgaacgccctgcacctgggcagccaggccaacagactgttctacctggccctgccccccaccgtgtacgaggccgtgaccaagaacatccacgagagctgcatgagccagatcggctggaacagaatcatcgtggagaagcccttcggcagagacctgcagagcagcgacagactgagcaaccacatcagcagcctgttcagagaggaccagatctacagaatcgaccactacctgggcaaggagatggtgcagaacctgatggtgctgagattcgccaacagaatcttcggccccatctggaacagagacaacatcgcctgcgtgatcctgaccttcaaggagcccttcggcaccgagggcagaggcggctacttcgacgagttcggcatcatcagagacgtgatgcagaaccacctgctgcagatgctgtgcctggtggccatggagaagcccgccagcaccaacagcgacgacgtgagagacgagaaggtgaaggtgctgaagtgcatcagcgaggtgcaggccaacaacgtggtgctgggccagtacgtgggcaaccccgacggcgagggcgaggccaccaagggctacctggacgaccccaccgtgcccagaggcagcaccaccgccaccttcgccgccgtggtgctgtacgtggagaacgagagatgggacggcgtgcccttcatcctgagatgcggcaaggccctgaacgagagaaaggccgaggtgagactgcagttccacgacgtggccggcgacatcttccaccagcagtgcaagagaaacgagctggtgatcagagtgcagcccaacgaggccgtgtacaccaagatgatgaccaagaagcccggcatgttcttcaaccccgaggagagcgagctggacctgacctacggcaacagatacaagaacgtgaagctgcccgacgcctacgagagactgatcctggacgtgttctgcggcagccagatgcacttcgtgagaagcgacgagctgagagaggcctggagaatcttcacccccctgctgcaccagatcgagctggagaagcccaagcccatcccctacatctacggcagcagaggccccaccgaggccgacgagctgatgaagagagtgggcttccagtacgagggcacctacaagtgggtgaacccccacaagctgtag

SEQ ID NO: 10840 - DNA, 1686 bp, synthetic construct
  misc_feature 1..1686: note = Description of Artificial Sequence: Synthetic coding sequence
  source 1..1686: mol_type = other DNA
atggccgagcaggtggccctgagcagaacccaggtgtgcggcatcctgagagaggagctgttccagggcgacgccttccaccagagcgacacccacatcttcatcatcatgggcgccagcggcgacctggccaagaagaagatctaccccaccatctggtggctgttcagagacggcctgctgcccgagaacaccttcatcgtgggctacgccagaagcagactgaccgtggccgacatcagaaagcagagcgagcccttcttcaaggccacccccgaggagaagctgaagctggaggacttcttcgccagaaacagctacgtggccggccagtacgacgacgccgccagctaccagagactgaacagccacatgaacgccctgcacctgggcagccaggccaacagactgttctacctggccctgccccccaccgtgtacgaggccgtgaccaagaacatccacgagagctgcatgagccagatcggctggaacagaatcatcgtggagaagcccttcggcagagacctgcagagcagcgacagactgagcaaccacatcagcagcctgttcagagaggaccagatctacagaatcgaccactacctgggcaaggagatggtgcagaacctgatggtgctgagattcgccaacagaatcttcggccccatctggaacagagacaacatcgcctgcgtgatcctgaccttcaaggagcccttcggcaccgagggcagaggcggctacttcgacgagttcggcatcatcagaggccccggcagacagggcggcagcggcagcgagagctgcagcctgagcctgggcagcctggtgtggggcccccacgccctggagcccggcgagcagggcggcgagctgagaagagccctggccagcagcgtgcccagagacgtgatgcagaaccacctgctgcagatgctgtgcctggtggccatggagaagcccgccagcaccaacagcgacgacgtgagagacgagaaggtgaaggtgctgaagtgcatcagcgaggtgcaggccaacaacgtggtgctgggccagtacgtgggcaaccccgacggcgagggcgaggccaccaagggctacctggacgaccccaccgtgcccagaggcagcaccaccgccaccttcgccgccgtggtgctgtacgtggagaacgagagatgggacggcgtgcccttcatcctgagatgcggcaaggccctgaacgagagaaaggccgaggtgagactgcagttccacgacgtggccggcgacatcttccaccagcagtgcaagagaaacgagctggtgatcagagtgcagcccaacgaggccgtgtacaccaagatgatgaccaagaagcccggcatgttcttcaaccccgaggagagcgagctggacctgacctacggcaacagatacaagaacgtgaagctgcccgacgcctacgagagactgatcctggacgtgttctgcggcagccagatgcacttcgtgagaagcgacgagctgagagaggcctggagaatcttcacccccctgctgcaccagatcgagctggagaagcccaagcccatcccctacatctacggcagcagaggccccaccgaggccgacgagctgatgaagagagtgggcttccagtacgagggcacctacaagtgggtgaacccccacaagctgtag

SEQ ID NO: 10841 - DNA, 1638 bp, synthetic construct
  misc_feature 1..1638: note = Description of Artificial Sequence: Synthetic coding sequence
  source 1..1638: mol_type = other DNA
atgggcagaagaggcagcgcccccggcaacggcagaaccctgagaggctgcgagagaggcggcagaagaagaagaagcgccgacagcgtgatggccgagcaggtggccctgagcagaacccaggtgtgcggcatcctgagagaggagctgttccagggcgacgccttccaccagagcgacacccacatcttcatcatcatgggcgccagcggcgacctggccaagaagaagatctaccccaccatctggtggctgttcagagacggcctgctgcccgagaacaccttcatcgtgggctacgccagaagcagactgaccgtggccgacatcagaaagcagagcgagcccttcttcaaggccacccccgaggagaagctgaagctggaggacttcttcgccagaaacagctacgtggccggccagtacgacgacgccgccagctaccagagactgaacagccacatgaacgccctgcacctgggcagccaggccaacagactgttctacctggccctgccccccaccgtgtacgaggccgtgaccaagaacatccacgagagctgcatgagccagatcggctggaacagaatcatcgtggagaagcccttcggcagagacctgcagagcagcgacagactgagcaaccacatcagcagcctgttcagagaggaccagatctacagaatcgaccactacctgggcaaggagatggtgcagaacctgatggtgctgagattcgccaacagaatcttcggccccatctggaacagagacaacatcgcctgcgtgatcctgaccttcaaggagcccttcggcaccgagggcagaggcggctacttcgacgagttcggcatcatcagagacgtgatgcagaaccacctgctgcagatgctgtgcctggtggccatggagaagcccgccagcaccaacagcgacgacgtgagagacgagaaggtgaaggtgctgaagtgcatcagcgaggtgcaggccaacaacgtggtgctgggccagtacgtgggcaaccccgacggcgagggcgaggccaccaagggctacctggacgaccccaccgtgcccagaggcagcaccaccgccaccttcgccgccgtggtgctgtacgtggagaacgagagatgggacggcgtgcccttcatcctgagatgcggcaaggccctgaacgagagaaaggccgaggtgagactgcagttccacgacgtggccggcgacatcttccaccagcagtgcaagagaaacgagctggtgatcagagtgcagcccaacgaggccgtgtacaccaagatgatgaccaagaagcccggcatgttcttcaaccccgaggagagcgagctggacctgacctacggcaacagatacaagaacgtgaagctgcccgacgcctacgagagactgatcctggacgtgttctgcggcagccagatgcacttcgtgagaagcgacgagctgagagaggcctggagaatcttcacccccctgctgcaccagatcgagctggagaagcccaagcccatcccctacatctacggcagcagaggccccaccgaggccgacgagctgatgaagagagtgggcttccagtacgagggcacctacaagtgggtgaacccccacaagctgtag

SEQ ID NO: 10842 - DNA, 1548 bp, synthetic construct; identical to SEQ ID NO: 10839
  misc_feature 1..1548: note = Description of Artificial Sequence: Synthetic coding sequence
  source 1..1548: mol_type = other DNA

SEQ ID NO: 10843 - DNA, 771 bp, synthetic construct
  misc_feature 1..771: note = Description of Artificial Sequence: Synthetic coding sequence
  source 1..771: mol_type = other DNA
atggccgagcaggtggccctgagcagaacccaggtgtgcggcatcctgagagaggagctgttccagggcgacgccttccaccagagcgacacccacatcttcatcatcatgggcgccagcggcgacctggccaagaagaagatctaccccaccatctggtggctgttcagagacggcctgctgcccgagaacaccttcatcgtgggctacgccagaagcagactgaccgtggccgacatcagaaagcagagcgagcccttcttcaaggccacccccgaggagaagctgaagctggaggacttcttcgccagaaacagctacgtggccggccagtacgacgacgccgccagctaccagagactgaacagccacatgaacgccctgcacctgggcagccaggccaacagactgttctacctggccctgccccccaccgtgtacgaggccgtgaccaagaacatccacgagagctgcatgagccagatcggctggaacagaatcatcgtggagaagcccttcggcagagacctgcagagcagcgacagactgagcaaccacatcagcagcctgttcagagaggaccagatctacagaatcgaccactacctgggcaaggagatggtgcagaacctgatggtgctgagattcgccaacagaatcttcggccccatctggaacagagacaacatcgcctgcgtgatcctgaccttcaaggagcccttcggcaccgagggcagaggcggctacttcgacgagttcggcatcatctag

SEQ ID NO: 10844 - DNA, 681 bp, synthetic construct
  misc_feature 1..681: note = Description of Artificial Sequence: Synthetic coding sequence
  source 1..681: mol_type = other DNA
  modified_base 217: mod_base = OTHER; note = uracil
atggccagactgctgcaggccagctgcctgctgagcctgctgctggccggcttcgtgagccagagcagaggccaggagaagagcaagatggactgccacggcggcatcagcggcaccatctacgagtacggcgccctgaccatcgacggcgaggagtacatccccttcaagcagtacgccggcaagtacgtgctgttcgtgaacgtggccagctactgaggcctgaccggccagtacatcgagctgaacgccctgcaggaggagctggcccccttcggcctggtgatcctgggcttcccctgcaaccagttcggcaagcaggagcccggcgagaacagcgagatcctgcccaccctgaagtacgtgagacccggcggcggcttcgtgcccaacttccagctgttcgagaagggcgacgtgaacggcgagaaggagcagaagttctacaccttcctgaagaacagctgcccccccaccagcgagctgctgggcaccagcgacagactgttctgggagcccatgaaggtgcacgacatcagatggaacttcgagaagttcctggtgggccccgacggcatccccatcatgagatggcaccacagaaccaccgtgagcaacgtgaagatggacatcctgagctacatgagaagacaggccgccctgggcgtgaagagaaagtag

SEQ ID NO: 10845 - DNA, 219 bp, synthetic construct
  misc_feature 1..219: note = Description of Artificial Sequence: Synthetic coding sequence
  source 1..219: mol_type = other DNA
atggccagactgctgcaggccagctgcctgctgagcctgctgctggccggcttcgtgagccagagcagaggccaggagaagagcaagatggactgccacggcggcatcagcggcaccatctacgagtacggcgccctgaccatcgacggcgaggagtacatccccttcaagcagtacgccggcaagtacgtgctgttcgtgaacgtggccagctactag

SEQ ID NO: 10846 - DNA, 633 bp, synthetic construct
  misc_feature 1..633: note = Description of Artificial Sequence: Synthetic coding sequence
  source 1..633: mol_type = other DNA
atgcccccctacaccgtggtgtacttccccgtgagaggcagatgcgccgccctgagaatgctgctggccgaccagggccagagctggaaggaggaggtggtgaccgtggagacctggcaggagggcagcctgaaggccagctgcctgtacggccagctgcccaagttccaggacggcgacctgaccctgtaccagagcaacaccatcctgagacacctgggcagaaccctgggcctgtacggcaaggaccagcaggaggccgccctggtggacatggtgaacgacggcgtggaggacctgagatgcaagtacatcagcctgatctacaccaactacgaggccggcaaggacgactacgtgaaggccctgcccggccagctgaagcccttcgagaccctgctgagccagaaccagggcggcaagaccttcatcgtgggcgaccagatcagcttcgccgactacaacctgctggacctgctgctgatccacgaggtgctggcccccggctgcctggacgccttccccctgctgagcgcctacgtgggcagactgagcgccagacccaagctgaaggccttcctggccagccccgagtacgtgaacctgcccatcaacggcaacggcaagcagtag

SEQ ID NO: 10847 - DNA, 2184 bp, synthetic construct
  misc_feature 1..2184: note = Description of Artificial Sequence: Synthetic coding sequence
  source 1..2184: mol_type = other DNA
atggccttccagaaggccgtgaagggcaccatcctggtgggcggcggcgccctggccaccgtgctgggcctgagccagttcgcccactacagaagaaagcagatgaacctggcctacgtgaaggccgccgactgcatcagcgagcccgtgaacagagagccccccagcagagaggcccagctgctgaccctgcagaacaccagcgagttcgacatcctggtgatcggcggcggcgccaccggcagcggctgcgccctggacgccgtgaccagaggcctgaagaccgccctggtggagagagacgacttcagcagcggcaccagcagcagaagcaccaagctgatccacggcggcgtgagatacctgcagaaggccatcatgaagctggacatcgagcagtacagaatggtgaaggaggccctgcacgagagagccaacctgctggagatcgccccccacctgagcgcccccctgcccatcatgctgcccgtgtacaagtggtggcagctgccctactactgggtgggcatcaagctgtacgacctggtggccggcagcaactgcctgaagagcagctacgtgctgagcaagagcagagccctggagcacttccccatgctgcagaaggacaagctggtgggcgccatcgtgtactacgacggccagcacaacgacgccagaatgaacctggccatcgccctgaccgccgccagatacggcgccgccaccgccaactacatggaggtggtgagcctgctgaagaagaccgacccccagaccggcaaggtgagagtgagcggcgccagatgcaaggacgtgctgaccggccaggagttcgacgtgagagccaagtgcgtgatcaacgccaccggccccttcaccgacagcgtgagaaagatggacgacaaggacgccgccgccatctgccagcccagcgccggcgtgcacatcgtgatgcccggctactacagccccgagagcatgggcctgctggaccccgccaccagcgacggcagagtgatcttcttcctgccctggcagaagatgaccatcgccggcaccaccgacacccccaccgacgtgacccaccaccccatccccagcgaggaggacatcaacttcatcctgaacgaggtgagaaactacctgagctgcgacgtggaggtgagaagaggcgacgtgctggccgcctggagcggcatcagacccctggtgaccgaccccaagagcgccgacacccagagcatcagcagaaaccacgtggtggacatcagcgagagcggcctgatcaccatcgccggcggcaagtggaccacctacagaagcatggccgaggacaccatcaacgccgccgtgaagacccacaacctgaaggccggccccagcagaaccgtgggcctgttcctgcagggcggcaaggactggagccccaccctgtacatcagactggtgcaggactacggcctggagagcgaggtggcccagcacctggccgccacctacggcgacaaggccttcgaggtggccaagatggccagcgtgaccggcaagagatggcccatcgtgggcgtgagactggtgagcgagttcccctacatcgaggccgaggtgaagtacggcatcaaggagtacgcctgcaccgccgtggacatgatcagcagaagaaccagactggccttcctgaacgtgcaggccgccgaggaggccctgcccagaatcgtggagctgatgggcagagagctgaactgggacgactacaagaagcaggagcagctggagaccgccagaaagttcctgtactacgagatgggctacaagagcagaagcgagcagctgaccgacagaagcgagatcagcctgctgcccagcgacatcgacagatacaagaagagattccacaagttcgacgccgaccagaagggcttcatcaccatcgtggacgtgcagagagtgctggagagcatcaacgtgcagatggacgagaacaccctgcacgagatcctgaacgaggtggacctgaacaagaacggccaggtggagctgaacgagttcctgcagctgatgagcgccatccagaagggcagagtgagcggcagcagactggccatcctgatgaagaccgccgaggagaacctggacagaagagtgcccatccccgtggacagaagctgcggcggcctgtag

SEQ ID NO: 10848 - DNA, 1503 bp, synthetic construct
  misc_feature 1..1503: note = Description of Artificial Sequence: Synthetic coding sequence
  source 1..1503: mol_type = other DNA
atgaacctggccatcgccctgaccgccgccagatacggcgccgccaccgccaactacatggaggtggtgagcctgctgaagaagaccgacccccagaccggcaaggtgagagtgagcggcgccagatgcaaggacgtgctgaccggccaggagttcgacgtgagagccaagtgcgtgatcaacgccaccggccccttcaccgacagcgtgagaaagatggacgacaaggacgccgccgccatctgccagcccagcgccggcgtgcacatcgtgatgcccggctactacagccccgagagcatgggcctgctggaccccgccaccagcgacggcagagtgatcttcttcctgccctggcagaagatgaccatcgccggcaccaccgacacccccaccgacgtgacccaccaccccatccccagcgaggaggacatcaacttcatcctgaacgaggtgagaaactacctgagctgcgacgtggaggtgagaagaggcgacgtgctggccgcctggagcggcatcagacccctggtgaccgaccccaagagcgccgacacccagagcatcagcagaaaccacgtggtggacatcagcgagagcggcctgatcaccatcgccggcggcaagtggaccacctacagaagcatggccgaggacaccatcaacgccgccgtgaagacccacaacctgaaggccggccccagcagaaccgtgggcctgttcctgcagggcggcaaggactggagccccaccctgtacatcagactggtgcaggactacggcctggagagcgaggtggcccagcacctggccgccacctacggcgacaaggccttcgaggtggccaagatggccagcgtgaccggcaagagatggcccatcgtgggcgtgagactggtgagcgagttcccctacatcgaggccgaggtgaagtacggcatcaaggagtacgcctgcaccgccgtggacatgatcagcagaagaaccagactggccttcctgaacgtgcaggccgccgaggaggccctgcccagaatcgtggagctgatgggcagagagctgaactgggacgactacaagaagcaggagcagctggagaccgccagaaagttcctgtactacgagatgggctacaagagcagaagcgagcagctgaccgacagaagcgagatcagcctgctgcccagcgacatcgacagatacaagaagagattccacaagttcgacgccgaccagaagggcttcatcaccatcgtggacgtgcagagagtgctggagagcatcaacgtgcagatggacgagaacaccctgcacgagatcctgaacgaggtggacctgaacaagaacggccaggtggagctgaacgagttcctgcagctgatgagcgccatccagaagggcagagtgagcggcagcagactggccatcctgatgaagaccgccgaggagaacctggacagaagagtgcccatccccgtggacagaagctgcggcggcctgtag

SEQ ID NO: 10849 - DNA, 2184 bp, synthetic construct; identical to SEQ ID NO: 10847
  misc_feature 1..2184: note = Description of Artificial Sequence: Synthetic coding sequence
  source 1..2184: mol_type = other DNA

SEQ ID NO: 10850 - DNA, 2184 bp, synthetic construct; identical to SEQ ID NO: 10847
  misc_feature 1..2184: note = Description of Artificial Sequence: Synthetic coding sequence
  source 1..2184: mol_type = other DNA

SEQ ID NO: 10851 - DNA, 330 bp, synthetic construct
  misc_feature 1..330: note = Description of Artificial Sequence: Synthetic coding sequence
  source 1..330: mol_type = other DNA
atggccttccagaaggccgtgaagggcaccatcctggtgggcggcggcgccctggccaccgtgctgggcctgagccagttcgcccactacagaagaaagcagatgaacctggcctacgtgaaggccgccgactgcatcagcgagcccgtgaacagagagccccccagcagagaggcccagctgctgaccctgcagaacaccagcgagttcgacatcctggtgatcggcggcggcgccaccggcagcggctgcgccctggacgccgtgaccagaggcctgaagaccgccctggtggagagagacgacttcagcagcggcaccagcagctag

SEQ ID NO: 10852 - DNA, 2184 bp, synthetic construct; identical to SEQ ID NO: 10847
  misc_feature 1..2184: note = Description of Artificial Sequence: Synthetic coding sequence
  source 1..2184: mol_type = other DNA

SEQ ID NO: 10853 - DNA, 1140 bp, synthetic construct
  misc_feature 1..1140: note = Description of Artificial Sequence: Synthetic coding sequence
  source 1..1140: mol_type = other DNA
atggccttccagaaggccgtgaagggcaccatcctggtgggcggcggcgccctggccaccgtgctgggcctgagccagttcgcccactacagaagaaagcagatgaacctggcctacgtgaaggccgccgactgcatcagcgagcccgtgaacagagagccccccagcagagaggcccagctgctgaccctgcagaacaccagcgagttcgacatcctggtgatcggcggcggcgccaccggcagcggctgcgccctggacgccgtgaccagaggcctgaagaccgccctggtggagagagacgacttcagcagcggcaccagcagcagaagcaccaagctgatccacggcggcgtgagatacctgcagaaggccatcatgaagctggacatcgagcagtacagaatggtgaaggaggccctgcacgagagagccaacctgctggagatcgccccccacctgagcgcccccctgcccatcatgctgcccgtgtacaagtggtggcagctgccctactactgggtgggcatcaagctgtacgacctggtggccggcagcaactgcctgaagagcagctacgtgctgagcaagagcagagccctggagcacttccccatgctgcagaaggacaagctggtgggcgccatcgtgtactacgacggccagcacaacgacgccagaatgaacctggccatcgccctgaccgccgccagatacggcgccgccaccgccaactacatggaggtggtgagcctgctgaagaagaccgacccccagaccggcaaggtgagagtgagcggcgccagatgcaaggacgtgctgaccggccaggagttcgacgtgagagccaagtgcgtgatcaacgccaccggccccttcaccgacagcgtgagaaagatggacgacaaggacgccgccgccatctgccagcccagcgccggcgtgcacatcgtgatgcccggctactacagccccgagagcatgggcctgctggaccccgccaccagcgacggcagagtgatcttcttcctgccctggcagaagatgaccatcgccggcaccaccgacacccccaccgacgtgacccaccaccccatccccagcgaggaggacatcaacttcatcctgaacgaggtgtag

SEQ ID NO: 10854 - DNA, 1263 bp, synthetic construct
  misc_feature 1..1263: note = Description of Artificial Sequence: Synthetic coding sequence
  source 1..1263: mol_type = other DNA
atgagcggcagacccagaaccaccagcttcgccgagagctgcaagcccgtgcagcagcccagcgccttcggcagcatgaaggtgagcagagacaaggacggcagcaaggtgaccaccgtggtggccacccccggccagggccccgacagaccccaggaggtgagctacaccgacaccaaggtgatcggcaacggcagcttcggcgtggtgtaccaggccaagctgtgcgacagcggcgagctggtggccatcaagaaggtgctgcaggacaagagattcaagaacagagagctgcagatcatgagaaagctggaccactgcaacatcgtgagactgagatacttcttctacagcagcggcgagaagaaggacgaggtgtacctgaacctggtgctggactacgtgcccgagaccgtgtacagagtggccagacactacagcagagccaagcagaccctgcccgtgatctacgtgaagctgtacatgtaccagctgttcagaagcctggcctacatccacagcttcggcatctgccacagagacatcaagccccagaacctgctgctggaccccgacaccgccgtgctgaagctgtgcgacttcggcagcgccaagcagctggtgagaggcgagcccaacgtgagctacatctgcagcagatactacagagcccccgagctgatcttcggcgccaccgactacaccagcagcatcgacgtgtggagcgccggctgcgtgctggccgagctgctgctgggccagcccatcttccccggcgacagcggcgtggaccagctggtggagatcatcaaggtgctgggcacccccaccagagagcagatcagagagatgaaccccaactacaccgagttcaagttcccccagatcaaggcccacccctggaccaaggtgttcagacccagaaccccccccgaggccatcgccctgtgcagcagactgctggagtacacccccaccgccagactgacccccctggaggcctgcgcccacagcttcttcgacgagctgagagaccccaacgtgaagctgcccaacggcagagacacccccgccctgttcaacttcaccacccaggagctgagcagcaacccccccctggccaccatcctgatccccccccacgccagaatccaggccgccgccagcacccccaccaacgccaccgccgccagcgacgccaacaccggcgacagaggccagaccaacaacgccgccagcgccagcgccagcaacagcacctag

SEQ ID NO: 10855 - DNA, 1302 bp, synthetic construct
  misc_feature 1..1302: note = Description of Artificial Sequence: Synthetic coding sequence
  source 1..1302: mol_type = other DNA
atgagcggcagacccagaaccaccagcttcgccgagagctgcaagcccgtgcagcagcccagcgccttcggcagcatgaaggtgagcagagacaaggacggcagcaaggtgaccaccgtggtggccacccccggccagggccccgacagaccccaggaggtgagctacaccgacaccaaggtgatcggcaacggcagcttcggcgtggtgtaccaggccaagctgtgcgacagcggcgagctggtggccatcaagaaggtgctgcaggacaagagattcaagaacagagagctgcagatcatgagaaagctggaccactgcaacatcgtgagactgagatacttcttctacagcagcggcgagaagaaggacgaggtgtacctgaacctggtgctggactacgtgcccgagaccgtgtacagagtggccagacactacagcagagccaagcagaccctgcccgtgatctacgtgaagctgtacatgtaccagctgttcagaagcctggcctacatccacagcttcggcatctgccacagagacatcaagccccagaacctgctgctggaccccgacaccgccgtgctgaagctgtgcgacttcggcagcgccaagcagctggtgagaggcgagcccaacgtgagctacatctgcagcagatactacagagcccccgagctgatcttcggcgccaccgactacaccagcagcatcgacgtgtggagcgccggctgcgtgctggccgagctgctgctgggccagcccatcttccccggcgacagcggcgtggaccagctggtggagatcatcaaggtgctgggcacccccaccagagagcagatcagagagatgaaccccaactacaccgagttcaagttcccccagatcaaggcccacccctggaccaaggacagcagcggcaccggccacttcaccagcggcgtgagagtgttcagacccagaaccccccccgaggccatcgccctgtgcagcagactgctggagtacacccccaccgccagactgacccccctggaggcctgcgcccacagcttcttcgacgagctgagagaccccaacgtgaagctgcccaacggcagagacacccccgccctgttcaacttcaccacccaggagctgagcagcaacccccccctggccaccatcctgatccccccccacgccagaatccaggccgccgccagcacccccaccaacgccaccgccgccagcgacgccaacaccggcgacagaggccagaccaacaacgccgccagcgccagcgccagcaacagcacctag

SEQ ID NO: 10856 - DNA, 315 bp, synthetic construct
  misc_feature 1..315: note = Description of Artificial Sequence: Synthetic coding sequence
  source 1..315: mol_type = other DNA
atgaaccccaactacaccgagttcaagttcccccagatcaaggcccacccctggaccaaggtgttcagacccagaaccccccccgaggccatcgccctgtgcagcagactgctggagtacacccccaccgccagactgacccccctggaggcctgcgcccacagcttcttcgacgagctgagagaccccaacgtgaagctgcccaacggcagagacacccccgccctgttcaacttcaccacccaggacgccaacaccggcgacagaggccagaccaacaacgccgccagcgccagcgccagcaacagcacctag

SEQ ID NO: 10857 - DNA, 837 bp, synthetic construct
  misc_feature 1..837: note = Description of Artificial Sequence: Synthetic coding sequence
  source 1..837: mol_type = other DNA
atggaggagaacatggaggagggccagacccagaagggctgcttcgagtgctgcatcaagtgcctgggcggcatcccctacgccagcctgatcgccaccatcctgctgtacgccggcgtggccctgttctgcggctgcggccacgaggccctgagcggcaccgtgaacatcctgcagacctacttcgagatggccagaaccgccggcgacaccctggacgtgttcaccatgatcgacatcttcaagtacgtgatctacggcatcgccgccgccttcttcgtgtacggcatcctgctgatggtggagggcttcttcaccaccggcgccatcaaggacctgtacggcgacttcaagatcaccacctgcggcagatgcgtgagcgcctggttcatcatgctgacctacctgttcatgctggcctggctgggcgtgaccgccttcaccagcctgcccgtgtacatgtacttcaacctgtggaccatctgcagaaacaccaccctggtggagggcgccaacctgtgcctggacctgagacagttcggcatcgtgaccatcggcgaggagaagaagatctgcaccgtgagcgagaacttcctgagaatgtgcgagagcaccgagctgaacatgaccttccacctgttcatcgtggccctggccggcgccggcgccgccgtgatcgccatggtgcactacctgatggtgctgagcgccaactgggcctacgtgaaggacgcctgcagaatgcagaagtacgaggacatcaagagcaaggaggagcaggagctgcacgacatccacagcaccagaagcaaggagagactgaacgcctacacctag

SEQ ID NO: 10858 - DNA, 837 bp, synthetic construct; identical to SEQ ID NO: 10857
  misc_feature 1..837: note = Description of Artificial Sequence: Synthetic coding sequence
  source 1..837: mol_type = other DNA

SEQ ID NO: 10859 - DNA, 33 bp, synthetic construct
  misc_feature 1..33: note = Description of Artificial Sequence: Synthetic coding sequence
  source 1..33: mol_type = other DNA
atggaggagaacatggaggagggccagacctag

SEQ ID NO: 10860 - DNA, 804 bp, synthetic construct
  misc_feature 1..804: note = Description of Artificial Sequence: Synthetic coding sequence
  source 1..804: mol_type = other DNA
atgggctgcttcgagtgctgcatcaagtgcctgggcggcatcccctacgccagcctgatcgccaccatcctgctgtacgccggcgtggccctgttctgcggctgcggccacgaggccctgagcggcaccgtgaacatcctgcagacctacttcgagatggccagaaccgccggcgacaccctggacgtgttcaccatgatcgacatcttcaagtacgtgatctacggcatcgccgccgccttcttcgtgtacggcatcctgctgatggtggagggcttcttcaccaccggcgccatcaaggacctgtacggcgacttcaagatcaccacctgcggcagatgcgtgagcgcctggttcatcatgctgacctacctgttcatgctggcctggctgggcgtgaccgccttcaccagcctgcccgtgtacatgtacttcaacctgtggaccatctgcagaaacaccaccctggtggagggcgccaacctgtgcctggacctgagacagttcggcatcgtgaccatcggcgaggagaagaagatctgcaccgtgagcgagaacttcctgagaatgtgcgagagcaccgagctgaacatgaccttccacctgttcatcgtggccctggccggcgccggcgccgccgtgatcgccatggtgcactacctgatggtgctgagcgccaactgggcctacgtgaaggacgcctgcagaatgcagaagtacgaggacatcaagagcaaggaggagcaggagctgcacgacatccacagcaccagaagcaaggagagactgaacgcctacacctag

SEQ ID NO: 10861 - DNA, 390 bp, synthetic construct
  misc_feature 1..390: note = Description of Artificial Sequence: Synthetic coding sequence
  source 1..390: mol_type = other DNA
atggaggagaacatggaggagggccagacccagaagggctgcttcgagtgctgcatcaagtgcctgggcggcatcccctacgccagcctgatcgccaccatcctgctgtacgccggcgtggccctgttctgcggctgcggccacgaggccctgagcggcaccgtgaacatcctgcagacctacttcgagatggccagaaccgccggcgacaccctggacgtgttcaccatgatcgacatcttcaagtacgtgatctacggcatcgccgccgccttcttcgtgtacggcatcctgctgatggtggagggcttcttcaccaccggcgccatcaaggacctgtacggcgacttcaagatcaccacctgcggcagatgcgtgagcgcctggtag

SEQ ID NO: 10862 - DNA, 816 bp, synthetic construct
  misc_feature 1..816: note = Description of Artificial Sequence: Synthetic coding sequence
  source 1..816: mol_type = other DNA
atgaccgacctggagggctgcttcgagtgctgcatcaagtgcctgggcggcatcccctacgccagcctgatcgccaccatcctgctgtacgccggcgtggccctgttctgcggctgcggccacgaggccctgagcggcaccgtgaacatcctgcagacctacttcgagatggccagaaccgccggcgacaccctggacgtgttcaccatgatcgacatcttcaagtacgtgatctacggcatcgccgccgccttcttcgtgtacggcatcctgctgatggtggagggcttcttcaccaccggcgccatcaaggacctgtacggcgacttcaagatcaccacctgcggcagatgcgtgagcgcctggttcatcatgctgacctacctgttcatgctggcctggctgggcgtgaccgccttcaccagcctgcccgtgtacatgtacttcaacctgtggaccatctgcagaaacaccaccctggtggagggcgccaacctgtgcctggacctgagacagttcggcatcgtgaccatcggcgaggagaagaagatctgcaccgtgagcgagaacttcctgagaatgtgcgagagcaccgagctgaacatgaccttccacctgttcatcgtggccctggccggcgccggcgccgccgtgatcgccatggtgcactacctgatggtgctgagcgccaactgggcctacgtgaaggacgcctgcagaatgcagaagtacgaggacatcaagagcaaggaggagcaggagctgcacgacatccacagcaccagaagcaaggagagactgaacgcctacacctag

SEQ ID NO: 10863 - DNA, 1206 bp, synthetic construct
  misc_feature 1..1206: note = Description of Artificial Sequence: Synthetic coding sequence
  source 1..1206: mol_type = other DNA
atgatgggcctgggcaacggcagaagaagcatgaagagcccccccctggtgctggccgccctggtggcctgcatcatcgtgctgggcttcaactactggatcgccagcagcagaagcgtggacctgcagaccagaatcatggagctggagggcagagtgagaagagccgccgccgagagaggcgccgtggagctgaagaagaacgagttccagggcgagctggagaagcagagagagcagctggacaagatccagagcagccacaacttccagctggagagcgtgaacaagctgtaccaggacgagaaggccgtgctggtgaacaacatcaccaccggcgagagactgatcagagtgctgcaggaccagctgaagaccctgcagagaaactacggcagactgcagcaggacgtgctgcagttccagaagaaccagaccaacctggagagaaagttcagctacgacctgagccagtgcatcaaccagatgaaggaggtgaaggagcagtgcgaggagagaatcgaggaggtgaccaagaagggcaacgaggccgtggccagcagagacctgagcgagaacaacgaccagagacagcagctgcaggccctgagcgagccccagcccagactgcaggccgccggcctgccccacaccgaggtgccccagggcaagggcaacgtgctgggcaacagcaagagccagacccccgcccccagcagcgaggtggtgctggacagcaagagacaggtggagaaggaggagaccaacgagatccaggtggtgaacgaggagccccagagagacagactgccccaggagcccggcagagagcaggtggtggaggacagacccgtgggcggcagaggcttcggcggcgccggcgagctgggccagaccccccaggtgcaggccgccctgagcgtgagccaggagaaccccgagatggagggccccgagagagaccagctggtgatccccgacggccaggaggaggagcaggaggccgccggcgagggcagaaaccagcagaagctgagaggcgaggacgactacaacatggacgagaacgaggccgagagcgagaccgacaagcaggccgccctggccggcaacgacagaaacatcgacgtgttcaacgtggaggaccagaagagagacaccatcaacctgctggaccagagagagaagagaaaccacaccctgtag

SEQ ID NO: 10864 - DNA, 1206 bp, synthetic construct; identical to SEQ ID NO: 10863
  misc_feature 1..1206: note = Description of Artificial Sequence: Synthetic coding sequence
  source 1..1206: mol_type = other DNA

SEQ ID NO: 10865 - DNA, 243 bp, synthetic construct
  misc_feature 1..243: note = Description of Artificial Sequence: Synthetic coding sequence
  source 1..243: mol_type = other DNA
atgatgggcctgggcaacggcagaagaagcatgaagagcccccccctggtgctggccgccctggtggcctgcatcatcgtgctgggcttcaactactggatcgccagcagcagaagcgtggacctgcagaccagaatcatggagctggagggcagagtgagaagagccgccgccgagagaggcgccgtggagctgaagaagaacgagttccagggcgagctggagaagcagagagagcagtag

SEQ ID NO: 10866 - DNA, 366 bp, synthetic construct
  misc_feature 1..366: note = Description of Artificial Sequence: Synthetic coding sequence
  source 1..366: mol_type = other DNA
atgatgggcctgggcaacggcagaagaagcatgaagagcccccccctggtgctggccgccctggtggcctgcatcatcgtgctgggcttcaactactggatcgccagcagcagaagcgtggacctgcagaccagaatcatggagctggagggcagagtgagaagagccgccgccgagagaggcgccgtggagctgaagaagaacgagttccagggcgagctggagaagcagagagagcagctggacaagatccagagcagccacaacttccagctggagagcgtgaacaagctgtaccaggacgagaaggccgtgctggtgaacaacatcaccaccggcgagagactgatcagagtgctgcagtag

SEQ ID NO: 10867 - DNA, 279 bp, synthetic construct
  misc_feature 1..279: note = Description of Artificial Sequence: Synthetic coding sequence
  source 1..279: mol_type = other DNA
atgaagcccatccagaagctgctggccggcctgatcctgctgacctggtgcgtggagggctgcagcagccagcactggagctacggcctgagacccggcggcaagagagacgccgagaacctgatcgacagcttccaggagatcgtgaaggaggtgggccagctggccgagacccagagattcgagtgcaccacccaccagcccagaagccccctgagagacctgaagggcgccctggagagcctgatcgaggaggagaccggccagaagaagatctag

SEQ ID NO: 10868 - DNA, 279 bp, synthetic construct; identical to SEQ ID NO: 10867
  misc_feature 1..279: note = Description of Artificial Sequence: Synthetic coding sequence
  source 1..279: mol_type = other DNA

SEQ ID NO: 10869 - DNA, 774 bp, synthetic construct
  misc_feature 1..774: note = Description of Artificial Sequence: Synthetic coding sequence
  source 1..774: mol_type = other DNA
atgcccgccagcatgttcagcatcgacaacatcctggccgccagacccagatgcaaggacagcgtgctgcccgtggcccacagcgccgccgcccccgtggtgttccccgccctgcacggcgacagcctgtacggcgccagcggcggcgccagcagcgactacggcgccttctaccccagacccgtggcccccggcggcgccggcctgcccgccgccgtgagcggcagcagactgggctacaacaactacttctacggccagctgcacgtgcaggccgcccccgtgggccccgcctgctgcggcgccgtgccccccctgggcgcccagcagtgcagctgcgtgcccaccccccccggctacgagggccccggcagcgtgctggtgagccccgtgccccaccagatgctgccctacatgaacgtgggcaccctgagcagaaccgagctgcagctgctgaaccagctgcactgcagaagaaagagaagacacagaaccatcttcaccgacgagcagctggaggccctggagaacctgttccaggagaccaagtaccccgacgtgggcaccagagagcagctggccagaaaggtgcacctgagagaggagaaggtggaggtgtggttcaagaacagaagagccaagtggagaagacagaagagaagcagcagcgaggagagcgagaacgccgagaagtggaacaagaccagcagcagcaaggccagccccgagaagagagaggaggagggcaagagcgacctggacagcgacagctag

SEQ ID NO: 10870 - DNA, 654 bp, synthetic construct
  misc_feature 1..654: note = Description of Artificial Sequence: Synthetic coding sequence
  source 1..654: mol_type = other DNA
atggcctaccccggctacggcggcggcttcggcaacttcagcatccaggtgcccggcatgcagatgggccagcccgtgcccgagaccggccccgccatcctgctggacggctacagcggccccgcctacagcgacacctacagcagcgccggcgacagcgtgtacacctacttcagcgccgtggccggccaggacggcgaggtggacgccgaggagctgcagagatgcctgacccagagcggcatcaacggcacctacagccccttcagcctggagacctgcagaatcatgatcgccatgctggacagagaccacaccggcaagatgggcttcaacgccttcaaggagctgtgggccgccctgaacgcctggaaggagaacttcatgaccgtggaccaggacggcagcggcaccgtggagcaccacgagctgagacaggccatcggcctgatgggctacagactgagcccccagaccctgaccaccatcgtgaagagatacagcaagaacggcagaatcttcttcgacgactacgtggcctgctgcgtgaagctgagagccctgaccgacttcttcagaaagagagaccacctgcagcagggcagcgccaacttcatctacgacgacttcctgcagggcaccatggccatctag

SEQ ID NO: 10871 - DNA, 438 bp, synthetic construct
  misc_feature 1..438: note = Description of Artificial Sequence: Synthetic coding sequence
  source 1..438: mol_type = other DNA
atggccacctgggccctgctgctgctggccgccatgctgctgggcaaccccggcctggtgttcagcagactgagccccgagtactacgacctggccagagcccacctgagagacgaggagaagagctgcccctgcctggcccaggagggcccccagggcgacctgctgaccaagacccaggagctgggcagagactacagaacctgcctgaccatcgtgcagaagctgaagaagatggtggacaagcccacccagagaagcgtgagcaacgccgccaccagagtgtgcagaaccggcagaagcagatggagagacgtgtgcagaaacttcatgagaagataccagagcagagtgacccagggcctggtggccggcgagaccgcccagcagatctgcgaggacctgagactgtgcatccccagcaccggccccctgtag

SEQ ID NO: 10872 - DNA, 393 bp, synthetic construct
  misc_feature 1..393: note = Description of Artificial Sequence: Synthetic coding sequence
  source 1..393: mol_type = other DNA
atggagggcctggtgttcagcagactgagccccgagtactacgacctggccagagcccacctgagagacgaggagaagagctgcccctgcctggcccaggagggcccccagggcgacctgctgaccaagacccaggagctgggcagagactacagaacctgcctgaccatcgtgcagaagctgaagaagatggtggacaagcccacccagagaagcgtgagcaacgccgccaccagagtgtgcagaaccggcagaagcagatggagagacgtgtgcagaaacttcatgagaagataccagagcagagtgacccagggcctggtggccggcgagaccgcccagcagatctgcgaggacctgagactgtgcatccccagcaccggccccctgtag

SEQ ID NO: 10873 - DNA, 555 bp, synthetic construct
  misc_feature 1..555: note = Description of Artificial Sequence: Synthetic coding sequence
  source 1..555: mol_type = other DNA
atgagcagaaccgcctacaccgtgggcgccctgctgctgctgctgggcaccctgctgcccgccgccgagggcaagaagaagggcagccagggcgccatccccccccccgacaaggcccagcacaacgacagcgagcagacccagagcccccagcagcccggcagcagaaacagaggcagaggccagggcagaggcaccgccatgcccggcgaggaggtgctggagagcagccaggaggccctgcacgtgaccgagagaaagtacctgaagagagactggtgcaagacccagcccctgaagcagaccatccacgaggagggctgcaacagcagaaccatcatcaacagattctgctacggccagtgcaacagcttctacatccccagacacatcagaaaggaggagggcagcttccagagctgcagcttctgcaagcccaagaagttcaccaccatgatggtgaccctgaactgccccgagctgcagccccccaccaagaagaagagagtgaccagagtgaagcagtgcagatgcatcagcatcgacctggactag

SEQ ID NO: 10874 - DNA, 432 bp, synthetic construct
  misc_feature 1..432: note = Description of Artificial Sequence: Synthetic coding sequence
  source 1..432: mol_type = other DNA
atgagcagaaccgcctacaccgtgggcgccctgctgctgctgctgggcaccctgctgcccgccgccgagggcaagaagaagggcagccagggcgccatccccccccccgacaaggccctgcacgtgaccgagagaaagtacctgaagagagactggtgcaagacccagcccctgaagcagaccatccacgaggagggctgcaacagcagaaccatcatcaacagattctgctacggccagtgcaacagcttctacatccccagacacatcagaaaggaggagggcagcttccagagctgcagcttctgcaagcccaagaagttcaccaccatgatggtgaccctgaactgccccgagctgcagccccccaccaagaagaagagagtgaccagagtgaagcagtgcagatgcatcagcatcgacctggactag

SEQ ID NO: 10875 - DNA, 432 bp, synthetic construct; identical to SEQ ID NO: 10874
  misc_feature 1..432: note = Description of Artificial Sequence: Synthetic coding sequence
  source 1..432: mol_type = other DNA

SEQ ID NO: 10876 - DNA, 396 bp, synthetic construct
  misc_feature 1..396: note = Description of Artificial Sequence: Synthetic coding sequence
  source 1..396: mol_type = other DNA
atgaccctggaggagttcagcgccggcgagcagaagaccgagagcgaccccgacaacgtggtgctgtgcctgctggccgccgacgaggacgacgacagagacgtggccctgcagatccacttcaccctgatccaggccttctgctgcgagaacgacatcaacatcctgagagtgagcaaccccggcagactggccgagctgctgctgctggagaccgacgccggccccgccgccagcgagggcgccgagcagccccccgacctgcactgcgtgctggtgaccaacccccacagcagccagtggaaggaccccgccctgagccagctgatctgcttctgcagagagagcagatacatggaccagtgggtgcccgtgatcaacctgcccgagagatag

SEQ ID NO: 10877 - DNA, 498 bp, synthetic construct
  misc_feature 1..498: note = Description of Artificial Sequence: Synthetic coding sequence
  source 1..498: mol_type = other DNA
atgaccctggaggagttcagcgccggcgagcagaagaccgagagaatggacaaggtgggcgacgccctggaggaggtgctgagcaaggccctgagccagagaaccatcaccgtgggcgtgtacgaggccgccaagctgctgaacgtggaccccgacaacgtggtgctgtgcctgctggccgccgacgaggacgacgacagagacgtggccctgcagatccacttcaccctgatccaggccttctgctgcgagaacgacatcaacatcctgagagtgagcaaccccggcagactggccgagctgctgctgctggagaccgacgccggccccgccgccagcgagggcgccgagcagccccccgacctgcactgcgtgctggtgaccaacccccacagcagccagtggaaggaccccgccctgagccagctgatctgcttctgcagagagagcagatacatggaccagtgggtgcccgtgatcaacctgcccgagagatag

SEQ ID NO: 10878 - DNA, 3693 bp, synthetic construct
  misc_feature 1..3693: note = Description of Artificial Sequence: Synthetic coding sequence
  source 1..3693: mol_type = other DNA
atgagcgccctgtgctggggcagaggcgccgccggcctgaagagagccctgagaccctgcggcagacccggcctgcccggcaaggagggcaccgccggcggcgtgtgcggccccagaagaagcagcagcgccagcccccaggagcaggaccaggacagaagaaaggactggggccacgtggagctgctggaggtgctgcaggccagagtgagacagctgcaggccgagagcgtgagcgaggtggtggtgaacagagtggacgtggccagactgcccgagtgcggcagcggcgacggcagcctgcagccccccagaaaggtgcagatgggcgccaaggacgccacccccgtgccctgcggcagatgggccaagatcctggagaaggacaagagaacccagcagatgagaatgcagagactgaaggccaagctgcagatgcccttccagagcggcgagttcaaggccctgaccagaagactgcaggtggagcccagactgctgagcaagcagatggccggctgcctggaggactgcaccagacaggcccccgagagcccctgggaggagcagctggccagactgctgcaggaggcccccggcaagctgagcctggacgtggagcaggcccccagcggccagcacagccaggcccagctgagcggccagcagcagagactgctggccttcttcaagtgctgcctgctgaccgaccagctgcccctggcccaccacctgctggtggtgcaccacggccagagacagaagagaaagctgctgaccctggacatgtacaacgccgtgatgctgggctgggccagacagggcgccttcaaggagctggtgtacgtgctgttcatggtgaaggacgccggcctgacccccgacctgctgagctacgccgccgccctgcagtgcatgggcagacaggaccaggacgccggcaccatcgagagatgcctggagcagatgagccaggagggcctgaagctgcaggccctgttcaccgccgtgctgctgagcgaggaggacagagccaccgtgctgaaggccgtgcacaaggtgaagcccaccttcagcctgcccccccagctgcccccccccgtgaacaccagcaagctgctgagagacgtgtacgccaaggacggcagagtgagctaccccaagctgcacctgcccctgaagaccctgcagtgcctgttcgagaagcagctgcacatggagctggccagcagagtgtgcgtggtgagcgtggagaagcccaccctgcccagcaaggaggtgaagcacgccagaaagaccctgaagaccctgagagaccagtgggagaaggccctgtgcagagccctgagagagaccaagaacagactggagagagaggtgtacgagggcagattcagcctgtaccccttcctgtgcctgctggacgagagagaggtggtgagaatgctgctgcaggtgctgcaggccctgcccgcccagggcgagagcttcaccaccctggccagagagctgagcgccagaaccttcagcagacacgtggtgcagagacagagagtgagcggccaggtgcaggccctgcagaaccactacagaaagtacctgtgcctgctggccagcgacgccgaggtgcccgagccctgcctgcccagacagtactgggaggagctgggcgcccccgaggccctgagagagcagccctggcccctgcccgtgcagatggagctgggcaagctgctggccgagatgctggtgcaggccacccagatgccctgcagcctggacaagccccacagaagcagcagactggtgcccgtgctgtaccacgtgtacagcttcagaaacgtgcagcagatcggcatcctgaagccccaccccgcctacgtgcagctgctggagaaggccgccgagcccaccctgaccttcgaggccgtggacgtgcccatgctgtgcccccccctgccctggaccagcccccacagcggcgccttcctgctgagccccaccaagctgatgagaaccgtggagggcgccacccagcaccaggagctgctggagacctgcccccccaccgccctgcacggcgccctggacgccctgacccagctgggcaactgcgcctggagagtgaacggcagagtgctggacctggtgctgcagctgttccaggccaagggctgcccccagctgggcgtgcccgccccccccagcgaggccccccagccccccgaggcccacctgccccacagcgccgcccccgccagaaaggccgagctgagaagagagctggcccactgccagaaggtggccagagagatgcacagcctgagagccgaggccctgtacagactgagcctggcccagcacctgagagacagagtgttctggctgccccacaacatggacttcagaggcagaacctacccctgccccccccacttcaaccacctgggcagcgacgtggccagagccctgctggagttcgcccagggcagacccctgggcccccacggcctggactggctgaagatccacctggtgaacctgaccggcctgaagaagagagagcccctgagaaagagactggccttcgccgaggaggtgatggacgacatcctggacagcgccgaccagcccctgaccggcagaaagtggtggatgggcgccgaggagccctggcagaccctggcctgctgcatggaggtggccaacgccgtgagagccagcgaccccgccgcctacgtgagccacctgcccgtgcaccaggacggcagctgcaacggcctgcagcactacgccgccctgggcagagacagcgtgggcgccgccagcgtgaacctggagcccagcgacgtgccccaggacgtgtacagcggcgtggccgcccaggtggaggtgttcagaagacaggacgcccagagaggcatgagagtggcccaggtgctggagggcttcatcaccagaaaggtggtgaagcagaccgtgatgaccgtggtgtacggcgtgaccagatacggcggcagactgcagatcgagaagagactgagagagctgagcgacttcccccaggagttcgtgtgggaggccagccactacctggtgagacaggtgttcaagagcctgcaggagatgttcagcggcaccagagccatccagcactggctgaccgagagcgccagactgatcagccacatgggcagcgtggtggagtgggtgacccccctgggcgtgcccgtgatccagccctacagactggacagcaaggtgaagcagatcggcggcggcatccagagcatcacctacacccacaacggcgacatcagcagaaagcccaacaccagaaagcagaagaacggcttcccccccaacttcatccacagcctggacagcagccacatgatgctgaccgccctgcactgctacagaaagggcctgaccttcgtgagcgtgcacgactgctactggacccacgccgccgacgtgagcgtgatgaaccaggtgtgcagagagcagttcgtgagactgcacagcgagcccatcctgcaggacctgagcagattcctggtgaagagattctgcagcgagccccagaagatcctggaggccagccagctgaaggagaccctgcaggccgtgcccaagcccggcgccttcgacctggagcaggtgaagagaagcacctacttcttcagctag

SEQ ID NO: 10879 - DNA, 480 bp, synthetic construct
  misc_feature 1..480: note = Description of Artificial Sequence: Synthetic coding sequence
  source 1..480: mol_type = other DNA
atgaccctggaggaggtgagaggccaggacaccgtgcccgagagcaccgccagaatgcagggcgccggcaaggccctgcacgagctgctgctgagcgcccagagacagggctgcctgaccgccggcgtgtacgagagcgccaaggtgctgaacgtggaccccgacaacgtgaccttctgcgtgctggccgccggcgaggaggacgagggcgacatcgccctgcagatccacttcaccctgatccaggccttctgctgcgagaacgacatcgacatcgtgagagtgggcgacgtgcagagactggccgccatcgtgggcgccggcgaggaggccggcgcccccggcgacctgcactgcatcctgatcagcaaccccaacgaggacgcctggaaggaccccgccctggagaagctgagcctgttctgcgaggagagcagaagcgtgaacgactgggtgcccagcatcaccctgcccgagtag

SEQ ID NO: 10880 - DNA, 426 bp, synthetic construct
  misc_feature 1..426: note = Description of Artificial Sequence: Synthetic coding sequence
  source 1..426: mol_type = other DNA
atgcagggcgccggcaaggccctgcacgagctgctgctgagcgcccagagacagggctgcctgaccgccggcgtgtacgagagcgccaaggtgctgaacgtggaccccgacaacgtgaccttctgcgtgctggccgccggcgaggaggacgagggcgacatcgccctgcagatccacttcaccctgatccaggccttctgctgcgagaacgacatcgacatcgtgagagtgggcgacgtgcagagactggccgccatcgtgggcgccggcgaggaggccggcgcccccggcgacctgcactgcatcctgatcagcaaccccaacgaggacgcctggaaggaccccgccctggagaagctgagcctgttctgcgaggagagcagaagcgtgaacgactgggtgcccagcatcaccctgcccgagtag

SEQ ID NO: 10881 - DNA, 2085 bp, synthetic construct
  misc_feature 1..2085: note = Description of Artificial Sequence: Synthetic coding sequence
  source 1..2085: mol_type = other DNA
atgcagcccgccatccaggtgtggttcggcgaggacctgcccctgagccccagaagccccctgacccccagacacggccccggcctggccaacgtgtgccagtacgacgagtggatcgccgtgagacacgaggccaccctgctgcccatgcaggaggacctgagcatctggctgagcggcctgctgggcatcaaggtgaaggccgagaagctgctggaggagctggacaacggcgtgctgctgtgccagctgatcgacgtgctgcagaacatggtgaagacctgcaacagcgaggagagcggcaacttccccatgagaaaggtgccctgcaagaaggacgccgccagcggcagcttcttcgccagagacaacaccgccaacttcctgcactggtgcagagacatcggcgtggacgagacctacctgttcgagagcgagggcctggtgctgcacaaggaccccagacaggtgtacctgtgcctgctggagatcggcagaatcgtgagcagatacggcgtggagccccccgtgctggtgaagctggagaaggagatcgagctggaggagaccctgctgaacaccagcggccccgaggacagcatcagcatccccaagagctgctgcagacacgaggagctgcacgaggccgtgaagcacatcgccgaggaccccccctgcagctgcagccacagattcagcatcgagtacctgagcgagggcagatacagactgggcgacaagatcctgttcatcagaatgctgcacggcaagcacgtgatggtgagagtgggcggcggctgggacaccctgcagggcttcctgctgaagtacgacccctgcagaatcctgcagttcgccaccctggagcagaagatcctggccttccagaagggcgtgagcaacgagagcgtgcccgacagccccgccagaaccccccagccccccgagatgaaccccctgagcgccgtgaacatgttccagaagcagaacagcaagcccagcgtgcccgtgagcatccccaagagcaaggagaagcagggcagaccccccggcgccctggtgcccgccagcagcctgaagggcggcaacctgggcagcatgagcgtgagaagcaagctgcccaacagccccgccgccagcagccaccccaagctgaagagcagcaagggcatcaccaagaagccccaggcccccagcaacaacgccagcagcagcctggccagcctgaaccccgtgggcaagaacaccagcagccccgccctgcccagaaccgccccctgcatcagcgagagccccagaaagtgcatcagcagccccaacacccccaaggccaaggtgatccccgcccagaacagcgccgacctgcccgagagcaccctgctgcccaacaagtgcagcggcaagacccagcccaagtacctgaagcacaaccacatcagcagcagagacaacgccgtgagccacctggccgcccacagcaacagcagcagcaagtgccccaagctgcccaaggccaacatccccgtgagacccaagcccagcttccagagcagcgccaagatgaccaagaccagcagcaagaccatcgccaccggcctgggcacccagagccagcccagcgacggcgccccccaggccaagcccgtgcccgcccagaagctgaagagcgccctgaacctgaaccagcccgtgagcgtgagcagcgtgagccccgtgaaggccacccagaagagcaaggacaagaacatcgtgagcgccaccaagaagcagccccagaacaagagcgccttccagaagaccggccccagcagcctgaagagccccggcagaacccccctgagcatcgtgagcctgccccagagcagcaccaagacccagaccgcccccaagagcgcccagaccgtggccaagagccagcacagcaccaagggcccccccagaagcggcaagacccccgccagcatcagaaagccccccagcagcgtgaaggacgccgacagcggcgacaagaagcccaccgccaagaagaaggaggacgacgaccactacttcgtgatgaccggcagcaagaagcccagaaagtag

SEQ ID NO: 10882 - DNA, 2085 bp, synthetic construct; identical to SEQ ID NO: 10881
  misc_feature 1..2085: note = Description of Artificial Sequence: Synthetic coding sequence
  source 1..2085: mol_type = other DNA

SEQ ID NO: 10883 - DNA, 2085 bp, synthetic construct; identical to SEQ ID NO: 10881
  misc_feature 1..2085: note = Description of Artificial Sequence: Synthetic coding sequence
  source 1..2085: mol_type = other DNA

SEQ ID NO: 10884 - DNA, 150 bp, synthetic construct
  misc_feature 1..150: note = Description of Artificial Sequence: Synthetic coding sequence
  source 1..150: mol_type = other DNA
atgcagcccgccatccaggtgtggttcggcgaggacctgcccctgagccccagaagccccctgacccccagacacggccccggcctggccaacgtgtgccagtacgacgagtggatcgccgtgagacacgaggccaccctgctgccctag

SEQ ID NO: 10885 - DNA, 1611 bp, synthetic construct
  misc_feature 1..1611: note = Description of Artificial Sequence: Synthetic coding sequence
  source 1..1611: mol_type = other DNA
atgaacgccagcctggagagcctgtacagcgcctgcagcatgcagagcgacaccgtgcccctgctgcagaacggccagcacgccagaagccagcccagagccagcggcccccccagaagcatccagccccaggtgagccccagacagagagtgcagagaagccagcccgtgcacatcctggccgtgagaagactgcaggaggaggaccagcagttcagaaccagcagcctgcccgccatccccaaccccttccccgagctgtgcggccccggcagcccccccgtgctgacccccggcagcctgccccccagccaggccgccgccaagcaggacgtgaaggtgttcagcgaggacggcaccagcaaggtggtggagatcctggccgacatgaccgccagagacctgtgccagctgctggtgtacaagagccactgcgtggacgacaacagctggaccctggtggagcaccacccccacctgggcctggagagatgcctggaggaccacgagctggtggtgcaggtggagagcaccatggccagcgagagcaagttcctgttcagaaagaactacgccaagtacgagttcttcaagaaccccatgaacttcttccccgagcagatggtgacctggtgccagcagagcaacggcagccagacccagctgctgcagaacttcctgaacagcagcagctgccccgagatccagggcttcctgcacgtgaaggagctgggcaagaagagctggaagaagctgtacgtgtgcctgagaagaagcggcctgtactgcagcaccaagggcaccagcaaggagcccagacacctgcagctgctggccgacctggaggacagcaacatcttcagcctgatcgccggcagaaagcagtacaacgcccccaccgaccacggcctgtgcatcaagcccaacaaggtgagaaacgagaccaaggagctgagactgctgtgcgccgaggacgagcagaccagaacctgctggatgaccgccttcagactgctgaagtacggcatgctgctgtaccagaactacagaatcccccagcagagaaaggccctgctgagccccttcagcacccccgtgagaagcgtgagcgagaacagcctggtggccatggacttcagcggccagaccggcagagtgatcgagaaccccgccgaggcccagagcgccgccctggaggagggccacgcctggagaaagagaagcaccagaatgaacatcctgggcagccagagccccctgcaccccagcaccctgagcaccgtgatccacagaacccagcactggttccacggcagaatcagcagagaggagagccacagaatcatcaagcagcagggcctggtggacggcctgttcctgctgagagacagccagagcaaccccaaggccttcgtgctgaccctgtgccaccaccagaagatcaagaacttccagatcctgccctgcgaggacgacggccagaccttcttcagcctggacgacggcaacaccaagttcagcgacctgatccagctggtggacttctaccagctgaacaagggcgtgctgccctgcaagctgaagcaccactgcatcagagtggccctgtag

SEQ ID NO: 10886 - DNA, 1647 bp, synthetic construct
  misc_feature 1..1647: note = Description of Artificial Sequence: Synthetic coding sequence
  source 1..1647: mol_type = other DNA
atggccctggccggctgccccgacagcttcctgcaccacccctactaccaggacaaggtggagcagacccccagaagccagcaggaccccgccggccccggcctgcccgcccagagcgacagactggccaaccaccaggaggacgacgtggacctggaggccctggtgaacgacatgaacgccagcctggagagcctgtacagcgcctgcagcatgcagagcgacaccgtgcccctgctgcagaacggccagcacgccagaagccagcccagagccagcggcccccccagaagcatccagccccaggtgagccccagacagagagtgcagagaagccagcccgtgcacatcctggccgtgagaagactgcaggaggaggaccagcagttcagaaccagcagcctgcccgccatccccaaccccttccccgagctgtgcggccccggcagcccccccgtgctgacccccggcagcctgccccccagccaggccgccgccaagcaggacgtgaaggtgttcagcgaggacggcaccagcaaggtggtggagatcctggccgacatgaccgccagagacctgtgccagctgctggtgtacaagagccactgcgtggacgacaacagctggaccctggtggagcaccacccccacctgggcctggagagatgcctggaggaccacgagctggtggtgcaggtggagagcaccatggccagcgagagcaagttcctgttcagaaagaactacgccaagtacgagttcttcaagaaccccatgaacttcttccccgagcagatggtgacctggtgccagcagagcaacggcagccagacccagctgctgcaggagcccagacacctgcagctgctggccgacctggaggacagcaacatcttcagcctgatcgccggcagaaagcagtacaacgcccccaccgaccacggcctgtgcatcaagcccaacaaggtgagaaacgagaccaaggagctgagactgctgtgcgccgaggacgagcagaccagaacctgctggatgaccgccttcagactgctgaagtacggcatgctgctgtaccagaactacagaatcccccagcagagaaaggccctgctgagccccttcagcacccccgtgagaagcgtgagcgagaacagcctggtggccatggacttcagcggccagaccggcagagtgatcgagaaccccgccgaggcccagagcgccgccctggaggagggccacgcctggagaaagagaagcaccagaatgaacatcctgggcagccagagccccctgcaccccagcaccctgagcaccgtgatccacagaacccagcactggttccacggcagaatcagcagagaggagagccacagaatcatcaagcagcagggcctggtggacggcctgttcctgctgagagacagccagagcaaccccaaggccttcgtgctgaccctgtgccaccaccagaagatcaagaacttccagatcctgccctgcgaggacgacggccagaccttcttcagcctggacgacggcaacaccaagttcagcgacctgatccagctggtggacttctaccagctgaacaagggcgtgctgccctgcaagctgaagcaccactgcatcagagtggccctgtag

SEQ ID NO: 10887 - DNA, 381 bp, synthetic construct
  misc_feature 1..381: note = Description of Artificial Sequence: Synthetic coding sequence
  source 1..381: mol_type = other DNA
atgaacatcctgggcagccagagccccctgcaccccagcaccctgagcaccgtgatccacagaacccagcactggttccacggcagaatcagcagagaggagagccacagaatcatcaagcagcagggcctggtggacggcctgttcctgctgagagacagccagagcaaccccaaggccttcgtgctgaccctgtgccaccaccagaagatcaagaacttccagatcctgccctgcgaggacgacggccagaccttcttcagcctggacgacggcaacaccaagttcagcgacctgatccagctggtggacttctaccagctgaacaagggcgtgctgccctgcaagctgaagcaccactgcatcagagtggccctgtag

SEQ ID NO: 10888 - DNA, 1611 bp, synthetic construct; identical to SEQ ID NO: 10885
  misc_feature 1..1611: note = Description of Artificial Sequence: Synthetic coding sequence
  source 1..1611: mol_type = other DNA

SEQ ID NO: 10889 - DNA, 1785 bp, synthetic construct
  misc_feature 1..1785: note = Description of Artificial Sequence: Synthetic coding sequence
  source 1..1785: mol_type = other DNA
atggccctggccggctgccccgacagcttcctgcaccacccctactaccaggacaaggtggagcagacccccagaagccagcaggaccccgccggccccggcctgcccgcccagagcgacagactggccaaccaccaggaggacgacgtggacctggaggccctggtgaacgacatgaacgccagcctggagagcctgtacagcgcctgcagcatgcagagcgacaccgtgcccctgctgcagaacggccagcacgccagaagccagcccagagccagcggcccccccagaagcatccagccccaggtgagccccagacagagagtgcagagaagccagcccgtgcacatcctggccgtgagaagactgcaggaggaggaccagcagttcagaaccagcagcctgcccgccatccccaaccccttccccgagctgtgcggccccggcagcccccccgtgctgacccccggcagcctgccccccagccaggccgccgccaagcaggacgtgaaggtgttcagcgaggacggcaccagcaaggtggtggagatcctggccgacatgaccgccagagacctgtgccagctgctggtgtacaagagccactgcgtggacgacaacagctggaccctggtggagcaccacccccacctgggcctggagagatgcctggaggaccacgagctggtggtgcaggtggagagcaccatggccagcgagagcaagttcctgttcagaaagaactacgccaagtacgagttcttcaagaaccccatgaacttcttccccgagcagatggtgacctggtgccagcagagcaacggcagccagacccagctgctgcagaacttcctgaacagcagcagctgccccgagatccagggcttcctgcacgtgaaggagctgggcaagaagagctggaagaagctgtacgtgtgcctgagaagaagcggcctgtactgcagcaccaagggcaccagcaaggagcccagacacctgcagctgctggccgacctggaggacagcaacatcttcagcctgatcgccggcagaaagcagtacaacgcccccaccgaccacggcctgtgcatcaagcccaacaaggtgagaaacgagaccaaggagctgagactgctgtgcgccgaggacgagcagaccagaacctgctggatgaccgccttcagactgctgaagtacggcatgctgctgtaccagaactacagaatcccccagcagagaaaggccctgctgagccccttcagcacccccgtgagaagcgtgagcgagaacagcctggtggccatggacttcagcggccagaccggcagagtgatcgagaaccccgccgaggcccagagcgccgccctggaggagggccacgcctggagaaagagaagcaccagaatgaacatcctgggcagccagagccccctgcaccccagcaccctgagcaccgtgatccacagaacccagcactggttccacggcagaatcagcagagaggagagccacagaatcatcaagcagcagggcctggtggacggcctgttcctgctgagagacagccagagcaaccccaaggccttcgtgctgaccctgtgccaccaccagaagatcaagaacttccagatcctgccctgcgaggacgacggccagaccttcttcagcctggacgacggcaacaccaagttcagcgacctgatccagctggtggacttctaccagctgaacaagggcgtgctgccctgcaagctgaagcaccactgcatcagagtggccctgtag

SEQ ID NO: 10890 - DNA, 1785 bp, synthetic construct; identical to SEQ ID NO: 10889
  misc_feature 1..1785: note = Description of Artificial Sequence: Synthetic coding sequence
  source 1..1785: mol_type = other DNA

SEQ ID NO: 10891 - DNA, 1611 bp, synthetic construct; identical to SEQ ID NO: 10885
  misc_feature 1..1611: note = Description of Artificial Sequence: Synthetic coding sequence
  source 1..1611: mol_type = other DNA

SEQ ID NO: 10892 - DNA, 1611 bp, synthetic construct; identical to SEQ ID NO: 10885
  misc_feature 1..1611: note = Description of Artificial Sequence: Synthetic coding sequence
  source 1..1611: mol_type = other DNA

SEQ ID NO: 10893 - DNA, 1767 bp, synthetic construct
  misc_feature 1..1767: note = Description of Artificial Sequence: Synthetic coding sequence
  source 1..1767: mol_type = other DNA
atgcaggccgccggccccctgttcagaagcaaggacaaggtggagcagacccccagaagccagcaggaccccgccggccccggcctgcccgcccagagcgacagactggccaaccaccaggaggacgacgtggacctggaggccctggtgaacgacatgaacgccagcctggagagcctgtacagcgcctgcagcatgcagagcgacaccgtgcccctgctgcagaacggccagcacgccagaagccagcccagagccagcggcccccccagaagcatccagccccaggtgagccccagacagagagtgcagagaagccagcccgtgcacatcctggccgtgagaagactgcaggaggaggaccagcagttcagaaccagcagcctgcccgccatccccaaccccttccccgagctgtgcggccccggcagcccccccgtgctgacccccggcagcctgccccccagccaggccgccgccaagcaggacgtgaaggtgttcagcgaggacggcaccagcaaggtggtggagatcctggccgacatgaccgccagagacctgtgccagctgctggtgtacaagagccactgcgtggacgacaacagctggaccctggtggagcaccacccccacctgggcctggagagatgcctggaggaccacgagctggtggtgcaggtggagagcaccatggccagcgagagcaagttcctgttcagaaagaactacgccaagtacgagttcttcaagaaccccatgaacttcttccccgagcagatggtgacctggtgccagcagagcaacggcagccagacccagctgctgcagaacttcctgaacagcagcagctgccccgagatccagggcttcctgcacgtgaaggagctgggcaagaagagctggaagaagctgtacgtgtgcctgagaagaagcggcctgtactgcagcaccaagggcaccagcaaggagcccagacacctgcagctgctggccgacctggaggacagcaacatcttcagcctgatcgccggcagaaagcagtacaacgcccccaccgaccacggcctgtgcatcaagcccaacaaggtgagaaacgagaccaaggagctgagactgctgtgcgccgaggacgagcagaccagaacctgctggatgaccgccttcagactgctgaagtacggcatgctgctgtaccagaactacagaatcccccagcagagaaaggccctgctgagccccttcagcacccccgtgagaagcgtgagcgagaacagcctggtggccatggacttcagcggccagaccggcagagtgatcgagaaccccgccgaggcccagagcgccgccctggaggagggccacgcctggagaaagagaagcaccagaatgaacatcctgggcagccagagccccctgcaccccagcaccctgagcaccgtgatccacagaacccagcactggttccacggcagaatcagcagagaggagagccacagaatcatcaagcagcagggcctggtggacggcctgttcctgctgagagacagccagagcaaccccaaggccttcgtgctgaccctgtgccaccaccagaagatcaagaacttccagatcctgccctgcgaggacgacggccagaccttcttcagcctggacgacggcaacaccaagttcagcgacctgatccagctggtggacttctaccagctgaacaagggcgtgctgccctgcaagctgaagcaccactgcatcagagtggccctgtag

SEQ ID NO: 10894 - DNA, 1611 bp, synthetic construct; identical to SEQ ID NO: 10885
  misc_feature 1..1611: note = Description of Artificial Sequence: Synthetic coding sequence
  source 1..1611: mol_type = other DNA

SEQ ID NO: 10895 - DNA, 1611 bp, synthetic construct; identical to SEQ ID NO: 10885
  misc_feature 1..1611: note = Description of Artificial Sequence: Synthetic coding sequence
  source 1..1611: mol_type = other DNA

SEQ ID NO: 10896 - DNA, 345 bp, synthetic construct
  misc_feature 1..345: note = Description of Artificial Sequence: Synthetic coding sequence
  source 1..345: mol_type = other DNA
atgcaggccgccggccccctgttcagaagcaaggacaaggtggagcagacccccagaagccagcaggaccccgccggccccggcctgcccgcccagagcgacagactggccaaccaccaggaggacgacgtggacctggaggccctggtgaacgacatgaacgccagcctggagagcctgtacagcgcctgcagcatgcagagcgacaccgtgcccctgctgcagaacggccagcacgccagaagccagcccagagccagcggcccccccagaagcatccagccccaggtgagccccagacagagagtgcagagaagccagcccgtgcacatcctggccgtgtag

SEQ ID NO: 10897 - DNA, 1767 bp, synthetic construct; identical to SEQ ID NO: 10893
  misc_feature 1..1767: note = Description of Artificial Sequence: Synthetic coding sequence
  source 1..1767: mol_type = other DNA

SEQ ID NO: 10898 - DNA, 531 bp, synthetic construct
  misc_feature 1..531: note = Description of Artificial Sequence: Synthetic coding sequence
  source 1..531: mol_type = other DNA
atggaggccatcgccaagtacgacttcaaggccaccgccgacgacgagctgagcttcaagagaggcgacatcctgaaggtgctgaacgaggagtgcgaccagaactggtacaaggccgagctgaacggcaaggacggcttcatccccaagaactacatcgagatgaagccccaccccttcggcaacgacgtgcagcacttcaaggtgctgagagacggcgccggcaagtacttcctgtgggtggtgaagttcaacagcctgaacgagctggtggactaccacagaagcaccagcgtgagcagaaaccagcagatcttcctgagagacatcgagcaggtgccccagcagcccacctacgtgcaggccctgttcgacttcgacccccaggaggacggcgagctgggcttcagaagaggcgacttcatccacgtgatggacaacagcgaccccaactggtggaagggcgcctgccacggccagaccggcatgttccccagaaactacgtgacccccgtgaacagaaacgtgtag

SEQ ID NO: 10899 - DNA, 654 bp, synthetic construct
  misc_feature 1..654: note = Description of Artificial Sequence: Synthetic coding sequence
  source 1..654: mol_type = other DNA
atggaggccatcgccaagtacgacttcaaggccaccgccgacgacgagctgagcttcaagagaggcgacatcctgaaggtgctgaacgaggagtgcgaccagaactggtacaaggccgagctgaacggcaaggacggcttcatccccaagaactacatcgagatgaagccccacccctggttcttcggcaagatccccagagccaaggccgaggagatgctgagcaagcagagacacgacggcgccttcctgatcagagagagcgagagcgcccccggcgacttcagcctgagcgtgaagttcggcaacgacgtgcagcacttcaaggtgctgagagacggcgccggcaagtacttcctgtgggtggtgaagttcaacagcctgaacgagctggtggactaccacagaagcaccagcgtgagcagaaaccagcagatcttcctgagagacatcgagcaggtgccccagcagcccacctacgtgcaggccctgttcgacttcgacccccaggaggacggcgagctgggcttcagaagaggcgacttcatccacgtgatggacaacagcgaccccaactggtggaagggcgcctgccacggccagaccggcatgttccccagaaactacgtgacccccgtgaacagaaacgtgtag

SEQ ID NO: 10900 - DNA, 654 bp, synthetic construct; identical to SEQ ID NO: 10899
  misc_feature 1..654: note = Description of Artificial Sequence: Synthetic coding sequence
  source 1..654: mol_type = other DNA

SEQ ID NO: 10901 - DNA, 654 bp, synthetic construct; identical to SEQ ID NO: 10899
  misc_feature 1..654: note = Description of Artificial Sequence: Synthetic coding sequence
  source 1..654: mol_type = other DNA

SEQ ID NO: 10902 - DNA, 222 bp, synthetic construct
  misc_feature 1..222: note = Description of Artificial Sequence: Synthetic coding sequence
  source 1..222: mol_type = other DNA
atgcccgccctgcacatcgaggacctgcccgagaaggagaagctgaagatggaggtggagcagctgagaaaggaggtgaagctgcagagacagcaggtgagcaagtgcagcgaggagatcaagaactacatcgaggagagaagcggcgaggaccccctggtgaagggcatccccgaggacaagaaccccttcaaggagaagggcagctgcgtgatcagctag

SEQ ID NO: 10903 - DNA, 432 bp, synthetic construct
  misc_feature 1..432: note = Description of Artificial Sequence: Synthetic coding sequence
  source 1..432: mol_type = other DNA
atgagcggcagaggcaagaccggcggcaaggccagagccaaggccaagagcagaagcagcagagccggcctgcagttccccgtgggcagagtgcacagactgctgagaaagggccactacgccgagagagtgggcgccggcgcccccgtgtacctggccgccgtgctggagtacctgaccgccgagatcctggagctggccggcaacgccgccagagacaacaagaagaccagaatcatccccagacacctgcagctggccatcagaaacgacgaggagctgaacaagctgctgggcggcgtgaccatcgcccagggcggcgtgctgcccaacatccaggccgtgctgctgcccaagaagaccagcgccaccgtgggccccaaggcccccagcggcggcaagaaggccacccaggccagccaggagtactag

SEQ ID NO: 10904 - DNA, 432 bp, synthetic construct; identical to SEQ ID NO: 10903
  misc_feature 1..432: note = Description of Artificial Sequence: Synthetic coding sequence
  source 1..432: mol_type = other DNA

SEQ ID NO: 10905 - DNA, 276 bp, synthetic construct
  misc_feature 1..276: note = Description of Artificial Sequence: Synthetic coding sequence
  source 1..276: mol_type = other DNA
atgtgcccctgccccctgcacagaggcagaggcccccccgccgtgtgcgcctgcagcgccggcagactgggcctgagaagcagcgccgcccagctgaccgccgccagactgaaggccctgggcgacgagctgcaccagagaaccatgtggagaagaagagccagaagcagaagagcccccgcccccggcgccctgcccacctactggccctggctgtgcgccgccgcccaggtggccgccctggccgcctggctgctgggcagaagaaacctgtag

SEQ ID NO: 10906 - DNA, 618 bp, synthetic construct
  misc_feature 1..618: note = Description of Artificial Sequence: Synthetic coding sequence
  source 1..618: mol_type = other DNA
atgaccgagagaagagtgcccttcagcctgctgagaggccccagctgggaccccttcagagactggtacccccacagcagactgttcgaccaggccttcggcctgcccagactgcccgaggagtggagccagtggctgggcggcagcagctggcccggctacgtgagacccctgccccccgccgccatcgagagccccgccgtggccgcccccgcctacagcagagccctgagcagacagctgagcagcggcgtgagcgagatcagacacaccgccgacagatggagagtgagcctggacgtgaaccacttcgcccccgacgagctgaccgtgaagaccaaggacggcgtggtggagatcaccggcaagcacgaggagagacaggacgagcacggctacatcagcagatgcttcaccagaaagtacaccctgccccccggcgtggaccccacccaggtgagcagcagcctgagccccgagggcaccctgaccgtggaggcccccatgcccaagctggccacccagagcaacgagatcaccatccccgtgaccttcgagagcagagcccagctgggcggccccgaggccgccaagagcgacgagaccgccgccaagtag

SEQ ID NO: 10907 - DNA, 513 bp, synthetic construct
  misc_feature 1..513: note = Description of Artificial Sequence: Synthetic coding sequence
  source 1..513: mol_type = other DNA
atgaccgagagaagagtgcccttcagcctgctgagaggccccagctggcccggctacgtgagacccctgccccccgccgccatcgagagccccgccgtggccgcccccgcctacagcagagccctgagcagacagctgagcagcggcgtgagcgagatcagacacaccgccgacagatggagagtgagcctggacgtgaaccacttcgcccccgacgagctgaccgtgaagaccaaggacggcgtggtggagatcaccggcaagcacgaggagagacaggacgagcacggctacatcagcagatgcttcaccagaaagtacaccctgccccccggcgtggaccccacccaggtgagcagcagcctgagccccgagggcaccctgaccgtggaggcccccatgcccaagctggccacccagagcaacgagatcaccatccccgtgaccttcgagagcagagcccagctgggcggccccgaggccgccaagagcgacgagaccgccgccaagtag

SEQ ID NO: 10908 - DNA, 1926 bp, synthetic construct
  misc_feature 1..1926: note = Description of Artificial Sequence: Synthetic coding sequence
  source 1..1926: mol_type = other DNA
atggccaccgccaagggcatcgccatcggcatcgacctgggcaccacctacagctgcgtgggcgtgttccagcacggcaaggtggagatcatcgccaacgaccagggcaacagaaccacccccagctacgtggccttcaccgacaccgagagactgatcggcgacgccgccaagaaccaggtggccatgaacccccagaacaccgtgttcgacgccaagagactgatcggcagaaagttcaacgaccccgtggtgcaggccgacatgaagctgtggcccttccaggtgatcaacgagggcggcaagcccaaggtgctggtgagctacaagggcgagaacaaggccttctaccccgaggagatcagcagcatggtgctgaccaagctgaaggagaccgccgaggccttcctgggccaccccgtgaccaacgccgtgatcaccgtgcccgcctacttcaacgacagccagagacaggccaccaaggacgccggcgtgatcgccggcctgaacgtgctgagaatcatcaacgagcccaccgccgccgccatcgcctacggcctggacaagggcggccagggcgagagacacgtgctgatcttcgacctgggcggcggcaccttcgacgtgagcatcctgaccatcgacgacggcatcttcgaggtgaaggccaccgccggcgacacccacctgggcggcgaggacttcgacaacagactggtgagccacttcgtggaggagttcaagagaaagcacaagaaggacatcagccagaacaagagagccgtgagaagactgagaaccgcctgcgagagagccaagagaaccctgagcagcagcacccaggccaacctggagatcgacagcctgtacgagggcatcgacttctacaccagcatcaccagagccagattcgaggagctgtgcgccgacctgttcagaggcaccctggagcccgtggagaaggccctgagagacgccaagatggacaaggccaagatccacgacatcgtgctggtgggcggcagcaccagaatccccaaggtgcagagactgctgcaggactacttcaacggcagagacctgaacaagagcatcaaccccgacgaggccgtggcctacggcgccgccgtgcaggccgccatcctgatgggcgacaagagcgagaaggtgcaggacctgctgctgctggacgtggcccccctgagcctgggcctggagaccgccggcggcgtgatgaccgccctgatcaagagaaacagcaccatccccaccaagcagacccagatcttcaccacctacagcgacaaccagcccggcgtgctgatccaggtgtacgagggcgagagagccatgaccaaggacaacaacctgctgggcagattcgacctgaccggcatcccccccgcccccagaggcgtgccccagatcgaggtgaccttcgacatcgacgccaacggcatcctgaacgtgaccgccatggacaagagcaccggcaaggtgaacaagatcaccatcaccaacgacaagggcagactgagcaaggaggagatcgagagaatggtgctggacgccgagaagtacaaggccgaggacgaggtgcagagagagaagatcgccgccaagaacgccctggagagctacgccttcaacatgaagagcgtggtgagcgacgagggcctgaagggcaagatcagcgagagcgacaagaacaagatcctggacaagtgcaacgagctgctgagctggctggaggtgaaccagctggccgagaaggacgagttcgaccacaagagaaaggagctgaagcagatgtgcaaccccatcatcaccaagctgtaccagggcggctgcaccggccccgcctgcggcaccggctacgtgcccggcagacccgccaccggccccaccatcgaggaggtggactag

SEQ ID NO: 10909 - DNA, 1599 bp, synthetic construct
  misc_feature 1..1599: note = Description of Artificial Sequence: Synthetic coding sequence
  source 1..1599: mol_type = other DNA
atggccaccgccaagggcatcgccatcggcatcgacctgggcaccacctacagctgcgtgggcgtgttccagcacggcaaggtggagatcatcgccaacgaccagggcaacagaaccacccccagctacgtggccttcaccgacaccgagagactgatcggcgacgccgccaagaaccaggtggccatgaacccccagaacaccgtgttcgacgccaagagactgatcggcagaaagttcaacgaccccgtggtgcaggccgacatgaagctgtggcccttccaggtgatcaacgagggcggcaagcccaaggtgctggtgagctacaagggcgagaacaaggccttctaccccgaggagatcagcagcatggtgctgaccaagctgaaggagaccgccgaggccttcctgggccaccccgtgaccaacgccgtgatcaccgtgcccgcctacttcaacgacagccagagacaggccaccaaggacgccggcgtgatcgccggcctgaacgtgctgagaatcatcaacgagcccaccgccgccgccatcgcctacggcctggacaagggcggccagggcgagagacacgtgctgatcttcgacctgggcggcggcaccttcgacgtgagcatcctgaccatcgacgacggcatcttcgaggtgaaggccaccgccggcgacacccacctgggcggcgaggacttcgacaacagactggtgagccacttcgtggaggagttcaagagaaagcacaagaaggacatcagccagaacaagagagccgtgagaagactgagaaccgcctgcgagagagccaagagaaccctgagcagcagcacccaggccaacctggagatcgacagcctgtacgagggcatcgacttctacaccagcatcaccagagccagattcgaggagctgtgcgccgacctgttcagaggcaccctggagcccgtggagaaggccctgagagacgccaagatggacaaggccaagatccacgacatcgtgctggtgggcggcagcaccagaatccccaaggtgcagagactgctgcaggactacttcaacggcagagacctgaacaagagcatcaaccccgacgaggccgtggcctacggcgccgccgtgcaggccgccatcctgatgggcgacaagagcgagaaggtgcaggacctgctgctgctggacgtggcccccctgagcctgggcctggagaccgccggcggcgtgatgaccgccctgatcaagagaaacagcaccatccccaccaagcagacccagatcttcaccacctacagcgacaaccagcccggcgtgctgatccaggtgtacgagggcgagagagccatgaccaaggacaacaacctgctgggcagattcgacctgaccggcatcccccccgcccccagaggcgtgccccagatcgaggtgaccttcgacatcgacgccaacggcatcctgaacgtgaccgccatggacaagagcaccggcaaggtgaacaagatcaccatcaccaacgacaagggcagactgagcaaggaggagatcgagagaatggtgctggacgccgagaagtacaaggccgaggacgtgtag

SEQ ID NO: 10910 - DNA, 1926 bp, synthetic construct; identical to SEQ ID NO: 10908
  misc_feature 1..1926: note = Description of Artificial Sequence: Synthetic coding sequence
  source 1..1926: mol_type = other DNA

SEQ ID NO: 10911 - DNA, 699 bp, synthetic construct
  misc_feature 1..699: note = Description of Artificial Sequence: Synthetic coding sequence
  source 1..699: mol_type = other DNA
gccaagggcatcgccatcggcatcgacctgggcaccacctacagctgcgtgggcgtgttccagcacggcaaggtggagatcatcgccaacgaccagggcaacagaaccacccccagctacgtggccttcaccgacaccgagagactgatcggcgacgccggcgtgatcgccggcctgaacgtgctgagaatcatcaacgagcccaccgccgccgccatcgcctacggcctggacaagggcggccagggcgagagacacgtgctgatcttcgacctgggcggcggcaccttcgacgtgagcatcctgaccatcgacgacggcatcttcgaggtgaaggccaccgccggcgacacccacctgggcggcgaggacttcgacaacagactggtgagccacttcgtggaggagttcaagagaaagcacaagaaggacatcagccagaacaagagagccgtgagaagactgagaaccgcctgcgagagagccaagagaaccctgagcagcagcacccaggccaacctggagatcgacagcctgtacgagggcatcgacttctacaccagcatcaccagagccagattcgaggagctgtgcgccgacctgttcagaggcaccctggagcccgtggagaagggcgccccccccgccagccccagatgcagcggctgcttcagaaccaccagcatggacgtgatctag

SEQ ID NO: 10912 - DNA, 1074 bp, synthetic construct
  misc_feature 1..1074: note = Description of Artificial Sequence: Synthetic coding sequence
  source 1..1074: mol_type = other DNA
atgaaggagaacaaggagaacagcagccccagcgtgaccagcgccaacctggaccacaccaagccctgctggtactgggacaagaaggacctggcccacacccccagccagctggagggcctggaccccgccaccgaggccagatacagaagagagggcgccagattcatcttcgacgtgggcaccagactgggcctgcactacgacaccctggccaccggcatcatctacttccacagattctacatgttccacagcttcaagcagttccccagatacgtgaccggcgcctgctgcctgttcctggccggcaaggtggaggagacccccaagaagtgcaaggacatcatcaagaccgccagaagcctgctgaacgacgtgcagttcggccagttcggcgacgaccccaaggaggaggtgatggtgctggagagaatcctgctgcagaccatcaagttcgacctgcaggtggagcacccctaccagttcctgctgaagtacgccaagcagctgaagggcgacaagaacaagatccagaagctggtgcagatggcctggaccttcgtgaacgacagaaccagcctgtgcaccaccctgagcctgcagtgggagcccgagatcatcgccgtggccgtgatgtacctggccggcagactgtgcaagttcgagatccaggagtggaccagcaagcccatgtacagaagatggtgggagcagttcgtgcaggacgtgcccgtggacgtgctggaggacatctgccaccagatcctggacctgtacagccagggcaagcagcagatgccccaccacaccccccaccagctgcagcagccccccagcctgcagcccaccccccaggtgccccaggtgcagcagagccagcccagccagagcagcgagcccagccagccccagcagaaggacccccccctgatcctgctgcagggctgggcctgcagacagcccgccacccacctgctgcccagccccctggaggacagcctgctgtgccccagacccttcccccaccccgcctgcctgcagctgggcggctggggcggccagcccggctag

SEQ ID NO: 10913 - DNA, 2565 bp, synthetic construct
  misc_feature 1..2565: note = Description of Artificial Sequence: Synthetic coding sequence
  source 1..2565: mol_type = other DNA
atgcccccctgcagcggcggcgacggcagcaccccccccggccccagcctgagagacagagactgccccgcccagagcgccgagtaccccagagacagactggaccccagacccggcagccccagcgaggccagcagcccccccttcctgagaagcagagcccccgtgaactggtaccaggagaaggcccaggtgttcctgtggcacctgatggtgagcggcagcaccaccctgctgtgcctgtggaagcagcccttccacgtgagcgccttccccgtgaccgccagcctggccttcagacagagccagggcgccggccagcacctgtacaaggacctgcagcccttcatcctgctgagactgctgatgcccgaggagacccagacccaggaccagcccatggaggaggaggaggtggagaccttcgccttccaggccgagatcgcccagctgatgagcctgatcatcaacaccttctacagcaacaaggagatcttcctgagagagctgatcagcaacagcagcgacgccctggacaagatcagatacgagagcctgaccgaccccagcaagctggacagcggcaaggagctgcacatcaacctgatccccaacaagcaggacagaaccctgaccatcgtggacaccggcatcggcatgaccaaggccgacctgatcaacaacctgggcaccatcgccaagagcggcaccaaggccttcatggaggccctgcaggccggcgccgacatcagcatgatcggccagttcggcgtgggcttctacagcgcctacctggtggccgagaaggtgaccgtgatcaccaagcacaacgacgacgagcagtacgcctgggagagcagcgccggcggcagcttcaccgtgagaaccgacaccggcgagcccatgggcagaggcaccaaggtgatcctgcacctgaaggaggaccagaccgagtacctggaggagagaagaatcaaggagatcgtgaagaagcacagccagttcatcggctaccccatcaccctgttcgtggagaaggagagagacaaggaggtgagcgacgacgaggccgaggagaaggaggacaaggaggaggagaaggagaaggaggagaaggagagcgaggacaagcccgagatcgaggacgtgggcagcgacgaggaggaggagaagaaggacggcgacaagaagaagaagaagaagatcaaggagaagtacatcgaccaggaggagctgaacaagaccaagcccatctggaccagaaaccccgacgacatcaccaacgaggagtacggcgagttctacaagagcctgaccaacgactgggaggaccacctggccgtgaagcacttcagcgtggagggccagctggagttcagagccctgctgttcgtgcccagaagagcccccttcgacctgttcgagaacagaaagaagaagaacaacatcaagctgtacgtgagaagagtgttcatcatggacaactgcgaggagctgatccccgagtacctgaacttcatcagaggcgtggtggacagcgaggacctgcccctgaacatcagcagagagatgctgcagcagagcaagatcctgaaggtgatcagaaagaacctggtgaagaagtgcctggagctgttcaccgagctggccgaggacaaggagaactacaagaagttctacgagcagttcagcaagaacatcaagctgggcatccacgaggacagccagaacagaaagaagctgagcgagctgctgagatactacaccagcgccagcggcgacgagatggtgagcctgaaggactactgcaccagaatgaaggagaaccagaagcacatctactacatcaccggcgagaccaaggaccaggtggccaacagcgccttcgtggagagactgagaaagcacggcctggaggtgatctacatgatcgagcccatcgacgagtactgcgtgcagcagctgaaggagttcgagggcaagaccctggtgagcgtgaccaaggagggcctggagctgcccgaggacgaggaggagaagaagaagcaggaggagaagaagaccaagttcgagaacctgtgcaagatcatgaaggacatcctggagaagaaggtggagaaggtggtggtgagcaacagactggtgaccagcccctgctgcatcgtgaccagcacctacggctggaccgccaacatggagagaatcatgaaggcccaggccctgagagacaacagcaccatgggctacatggccgccaagaagcacctggagatcaaccccgaccacagcatcatcgagaccctgagacagaaggccgaggccgacaagaacgacaagagcgtgaaggacctggtgatcctgctgtacgagaccgccctgctgagcagcggcttcagcctggaggacccccagacccacgccaacagaatctacagaatgatcaagctgggcctgggcatcgacgaggacgaccccaccgccgacgacaccagcgccgccgtgaccgaggagatgccccccctggagggcgacgacgacaccagcagaatggaggaggtggactag

SEQ ID NO: 10914 - DNA, 1242 bp, synthetic construct
  misc_feature 1..1242: note = Description of Artificial Sequence: Synthetic coding sequence
  source 1..1242: mol_type = other DNA
atgggcagaggcaccaaggtgatcctgcacctgaaggaggaccagaccgagtacctggaggagagaagaatcaaggagatcgtgaagaagcacagccagttcatcggctaccccatcaccctgttcgtggagaaggagagagacaaggaggtgagcgacgacgaggccgaggagaaggaggacaaggaggaggagaaggagaaggaggagaaggagagcgaggacaagcccgagatcgaggacgtgggcagcgacgaggaggaggagaagaaggacggcgacaagaagaagaagaagaagatcaaggagaagtacatcgaccaggaggagctgaacaagaccaagcccatctggaccagaaaccccgacgacatcaccaacgaggagtacggcgagttctacaagagcctgaccaacgactgggaggaccacctggccgtgaagcacttcagcgtggagggccagctggagttcagagccctgctgttcgtgcccagaagagcccccttcgacctgttcgagaacagaaagaagaagaacaacatcaagctgtacgtgagaagagtgttcatcatggacaactgcgaggagctgatccccgagtacctgaacttcatcagaggcgtggtggacagcgaggacctgcccctgaacatcagcagagagatgctgcagcagagcaagatcctgaaggtgatcagaaagaacctggtgaagaagtgcctggagctgttcaccgagctggccgaggacaaggagaactacaagaagttctacgagcagttcagcaagaacatcaagctgggcatccacgaggacagccagaacagaaagaagctgagcgagctgctgagatactacaccagcgccagcggcgacgagatggtgagcctgaaggactactgcaccagaatgaaggagaaccagaagcacatctactacatcaccggcgagaccaaggaccaggtggccaacagcgccttcgtggagagactgagaaagcacggcctggaggtgatctacatgatcgagcccatcgacgagtactgcgtgcagcagctgaaggagttcgagggcaagaccctggtgagcgtgaccaaggagggcctggagctgcccgaggacgaggaggagaagaagaagcaggaggagaagaagaccaagttcgagaacctgtgcaagatcatgaaggacatcctggagaagaaggtggagaaggtgtgcgagtacagcatcagctag

SEQ ID NO: 10915 - DNA, 2412 bp, synthetic construct
  misc_feature 1..2412: note = Description of Artificial Sequence: Synthetic coding sequence
  source 1..2412: mol_type = other DNA
atgagagccctgtgggtgctgggcctgtgctgcgtgctgctgaccttcggcagcgtgagagccgacgacgaggtggacgtggacggcaccgtggaggaggacctgggcaagagcagagagggcagcagaaccgacgacgaggtggtgcagagagaggaggaggccatccagctggacggcctgaacgccagccagatcagagagctgagagagaagagcgagaagttcgccttccaggccgaggtgaacagaatgatgaagctgatcatcaacagcctgtacaagaacaaggagatcttcctgagagagctgatcagcaacgccagcgacgccctggacaagatcagactgatcagcctgaccgacgagaacgccctgagcggcaacgaggagctgaccgtgaagatcaagtgcgacaaggagaagaacctgctgcacgtgaccgacaccggcgtgggcatgaccagagaggagctggtgaagaacctgggcaccatcgccaagagcggcaccagcgagttcctgaacaagatgaccgaggcccaggaggacggccagagcaccagcgagctgatcggccagttcggcgtgggcttctacagcgccttcctggtggccgacaaggtgatcgtgaccagcaagcacaacaacgacacccagcacatctgggagagcgacagcaacgagttcagcgtgatcgccgaccccagaggcaacaccctgggcagaggcaccaccatcaccctggtgctgaaggaggaggccagcgactacctggagctggacaccatcaagaacctggtgaagaagtacagccagttcatcaacttccccatctacgtgtggagcagcaagaccgagaccgtggaggagcccatggaggaggaggaggccgccaaggaggagaaggaggagagcgacgacgaggccgccgtggaggaggaggaggaggagaagaagcccaagaccaagaaggtggagaagaccgtgtgggactgggagctgatgaacgacatcaagcccatctggcagagacccagcaaggaggtggaggaggacgagtacaaggccttctacaagagcttcagcaaggagagcgacgaccccatggcctacatccacttcaccgccgagggcgaggtgaccttcaagagcatcctgttcgtgcccaccagcgcccccagaggcctgttcgacgagtacggcagcaagaagagcgactacatcaagctgtacgtgagaagagtgttcatcaccgacgacttccacgacatgatgcccaagtacctgaacttcgtgaagggcgtggtggacagcgacgacctgcccctgaacgtgagcagagagaccctgcagcagcacaagctgctgaaggtgatcagaaagaagctggtgagaaagaccctggacatgatcaagaagatcgccgacgacaagtacaacgacaccttctggaaggagttcggcaccaacatcaagctgggcgtgatcgaggaccacagcaacagaaccagactggccaagctgctgagattccagagcagccaccaccccaccgacatcaccagcctggaccagtacgtggagagaatgaaggagaagcaggacaagatctacttcatggccggcagcagcagaaaggaggccgagagcagccccttcgtggagagactgctgaagaagggctacgaggtgatctacctgaccgagcccgtggacgagtactgcatccaggccctgcccgagttcgacggcaagagattccagaacgtggccaaggagggcgtgaagttcgacgagagcgagaagaccaaggagagcagagaggccgtggagaaggagttcgagcccctgctgaactggatgaaggacaaggccctgaaggacaagatcgagaaggccgtggtgagccagagactgaccgagagcccctgcgccctggtggccagccagtacggctggagcggcaacatggagagaatcatgaaggcccaggcctaccagaccggcaaggacatcagcaccaactactacgccagccagaagaagaccttcgagatcaaccccagacaccccctgatcagagacatgctgagaagaatcaaggaggacgaggacgacaagaccgtgctggacctggccgtggtgctgttcgagaccgccaccctgagaagcggctacctgctgcccgacaccaaggcctacggcgacagaatcgagagaatgctgagactgagcctgaacatcgaccccgacgccaaggtggaggaggagcccgaggaggagcccgaggagaccgccgaggacaccaccgaggacaccgagcaggacgaggacgaggagatggacgtgggcaccgacgaggaggaggagaccgccaaggagagcaccgccgagaaggacgagctgtag

SEQ ID NO: 10916 - DNA, 1662 bp, synthetic construct
  misc_feature 1..1662: note = Description of Artificial Sequence: Synthetic coding sequence
  source 1..1662: mol_type = other DNA
atgagagccctgtgggtgctgggcctgtgctgcgtgctgctgaccttcggcagcgtgagagccgacgacgaggtggacgtggacggcaccgtggaggaggacctgggcaagagcagagagggcagcagaaccgacgacgaggccgccaaggaggagaaggaggagagcgacgacgaggccgccgtggaggaggaggaggaggagaagaagcccaagaccaagaaggtggagaagaccgtgtgggactgggagctgatgaacgacatcaagcccatctggcagagacccagcaaggaggtggaggaggacgagtacaaggccttctacaagagcttcagcaaggagagcgacgaccccatggcctacatccacttcaccgccgagggcgaggtgaccttcaagagcatcctgttcgtgcccaccagcgcccccagaggcctgttcgacgagtacggcagcaagaagagcgactacatcaagctgtacgtgagaagagtgttcatcaccgacgacttccacgacatgatgcccaagtacctgaacttcgtgaagggcgtggtggacagcgacgacctgcccctgaacgtgagcagagagaccctgcagcagcacaagctgctgaaggtgatcagaaagaagctggtgagaaagaccctggacatgatcaagaagatcgccgacgacaagtacaacgacaccttctggaaggagttcggcaccaacatcaagctgggcgtgatcgaggaccacagcaacagaaccagactggccaagctgctgagattccagagcagccaccaccccaccgacatcaccagcctggaccagtacgtggagagaatgaaggagaagcaggacaagatctacttcatggccggcagcagcagaaaggaggccgagagcagccccttcgtggagagactgctgaagaagggctacgaggtgatctacctgaccgagcccgtggacgagtactgcatccaggccctgcccgagttcgacggcaagagattccagaacgtggccaaggagggcgtgaagttcgacgagagcgagaagaccaaggagagcagagaggccgtggagaaggagttcgagcccctgctgaactggatgaaggacaaggccctgaaggacaagatcgagaaggccgtggtgagccagagactgaccgagagcccctgcgccctggtggccagccagtacggctggagcggcaacatggagagaatcatgaaggcccaggcctaccagaccggcaaggacatcagcaccaactactacgccagccagaagaagaccttcgagatcaaccccagacaccccctgatcagagacatgctgagaagaatcaaggaggacgaggacgacaagaccgtgctggacctggccgtggtgctgttcgagaccgccaccctgagaagcggctacctgctgcccgacaccaaggcctacggcgacagaatcgagagaatgctgagactgagcctgaacatcgaccccgacgccaaggtggaggaggagcccgaggaggagcccgaggagaccgccgaggacaccaccgaggacaccgagcaggacgaggacgaggagatggacgtgggcaccgacgaggaggaggagaccgccaaggagagcaccgccgagaaggacgagctgtag

SEQ ID NO: 10917 - DNA, 948 bp, synthetic construct
  misc_feature 1..948: note = Description of Artificial Sequence: Synthetic coding sequence
  source 1..948: mol_type = other DNA
atgagagccctgtgggtgctgggcctgtgctgcgtgctgctgaccttcggcagcgtgagagccgacgacgaggtggacgtggacggcaccgtggaggaggacctgggcaagagcagagagggcagcagaaccgacgacgaggtggtgcagagagaggaggaggccatccagctggacggcctgaacgccagccagatcagagagctgagagagaagagcgagaagttcgccttccaggccgaggtgaacagaatgatgaagctgatcatcaacagcctgtacaagaacaaggagatcttcctgagagagctgatcagcaacgccagcgacgccctggacaagatcagactgatcagcctgaccgacgagaacgccctgagcggcaacgaggagctgaccgtgaagatcaagtgcgacaaggagaagaacctgctgcacgtgaccgacaccggcgtgggcatgaccagagaggagctggtgaagaacctgggcaccatcgccaagagcggcaccagcgagttcctgaacaagatgaccgaggcccaggaggacggccagagcaccagcgagctgatcggccagttcggcgtgggcttctacagcgccttcctggtggccgacaaggtgatcgtgaccagcaagcacaacaacgacacccagcacatctgggagagcgacagcaacgagttcagcgtgatcgccgaccccagaggcaacaccctgggcagaggcaccaccatcaccctggtgctgaaggaggaggccagcgactacctggagctggacaccatcaagaacctggtgaagaagtacagccagttcatcaacttccccatctacgtgtggagcagcaagaccgagaccgtggaggagcccatggaggaggaggaggccgccaaggaggagaaggaggagagcgacgacgaggccgccgccagaagaagatag

SEQ ID NO: 10918 - DNA, 483 bp, synthetic construct
  misc_feature 1..483: note = Description of Artificial Sequence: Synthetic coding sequence
  source 1..483: mol_type = other DNA
atgagcgaggtgagacccctgagcagagacatcctgatggagaccctgctgtacgagcagctgctggagccccccaccatggaggtgctgggcatgaccgacagcgaggaggacctggaccccatggaggacttcgacagcctggagtgcatggagggcagcgacgccctggccctgagactggcctgcatcggcgacgagatggacgtgagcctgagagcccccagactggcccagctgagcgaggtggccatgcacagcctgggcctggccttcatctacgaccagaccgaggacatcagagacgtgctgagaagcttcatggacggcttcaccaccctgaaggagaacatcatgagattctggagaagccccaaccccggcagctgggtgagctgcgagcaggtgctgctggccctgctgctgctgctggccctgctgctgcccctgctgagcggcggcctgcacctgctgctgaagtag

SEQ ID NO: 10919 - DNA, 564 bp, synthetic construct
  misc_feature 1..564: note = Description of Artificial Sequence: Synthetic coding sequence
  source 1..564: mol_type = other DNA
atggagagaccccagcccgacagcatgccccaggacctgagcgaggccctgaaggaggccaccaaggaggtgcacacccaggccgagaacgccgagttcatgagaaacttccagaagggccaggtgaccagagacggcttcaagctggtgatggccagcctgtaccacatctacgtggccctggaggaggagatcgagagaaacaaggagagccccgtgttcgcccccgtgtacttccccgaggagctgcacagaaaggccgccctggagcaggacctggccttctggtacggccccagatggcaggaggtgatcccctacacccccgccatgcagagatacgtgaagagactgcacgaggtgggcagaaccgagcccgagctgctggtggcccacgcctacaccagatacctgggcgacctgagcggcggccaggtgctgaagaagatcgcccagaaggccctggacctgcccagcagcggcgagggcctggccttcttcaccttccccaacatcgccagcgccaccaagttcaagcagctgtacagaagcagaatgaactag

SEQ ID NO: 10920 - DNA, 1581 bp, synthetic construct
  misc_feature 1..1581: note = Description of Artificial Sequence: Synthetic coding sequence
  source 1..1581: mol_type = other DNA
ctgggcggcagaagcagctgcgaggaccccggctgccccagagacgaggagagagcccccagaatgggctgcatgaagagcaagttcctgcaggtgggcggcaacaccttcagcaagaccgagaccagcgccagcccccactgccccgtgtacgtgcccgaccccaccagcaccatcaagcccggccccaacagccacaacagcaacacccccggcatcagagaggccggcagcgaggacatcatcgtggtggccctgtacgactacgaggccatccaccacgaggacctgagcttccagaagggcgaccagatggtggtgctggaggagagcggcgagtggtggaaggccagaagcctggccaccagaaaggagggctacatccccagcaactacgtggccagagtggacagcctggagaccgaggagtggttcttcaagggcatcagcagaaaggacgccgagagacagctgctggcccccggcaacatgctgggcagcttcatgatcagagacagcgagaccaccaagggcagctacagcctgagcgtgagagactacgaccccagacagggcgacaccgtgaagcactacaagatcagaaccctggacaacggcggcttctacatcagccccagaagcaccttcagcaccctgcaggagctggtggaccactacaagaagggcaacgacggcctgtgccagaagctgagcgtgccctgcatgagcagcaagccccagaagccctgggagaaggacgcctgggagatccccagagagagcctgaagctggagaagaagctgggcgccggccagttcggcgaggtgtggatggccacctacaacaagcacaccaaggtggccgtgaagaccatgaagcccggcagcatgagcgtggaggccttcctggccgaggccaacgtgatgaagaccctgcagcacgacaagctggtgaagctgcacgccgtggtgaccaaggagcccatctacatcatcaccgagttcatggccaagggcagcctgctggacttcctgaagagcgacgagggcagcaagcagcccctgcccaagctgatcgacttcagcgcccagatcgccgagggcatggccttcatcgagcagagaaactacatccacagagacctgagagccgccaacatcctggtgagcgccagcctggtgtgcaagatcgccgacttcggcctggccagagtgatcgaggacaacgagtacaccgccagagagggcgccaagttccccatcaagtggaccgcccccgaggccatcaacttcggcagcttcaccatcaagagcgacgtgtggagcttcggcatcctgctgatggagatcgtgacctacggcagaatcccctaccccggcatgagcaaccccgaggtgatcagagccctggagagaggctacagaatgcccagacccgagaactgccccgaggagctgtacaacatcatgatgagatgctggaagaacagacccgaggagagacccaccttcgagtacatccagagcgtgctggacgacttctacaccgccaccgagagccagtaccagcagcagccctag

SEQ ID NO: 10921 - DNA, 1578 bp, synthetic construct
  misc_feature 1..1578: note = Description of Artificial Sequence: Synthetic coding sequence
  source 1..1578: mol_type = other DNA
ctgggcggcagaagcagctgcgaggaccccggctgccccagagacgaggagagagcccccagaatgggctgcatgaagagcaagttcctgcaggtgggcggcaacaccttcagcaagaccgagaccagcgccagcccccactgccccgtgtacgtgcccgaccccaccagcaccatcaagcccggccccaacagccacaacagcaacacccccggcatcagagagggcagcgaggacatcatcgtggtggccctgtacgactacgaggccatccaccacgaggacctgagcttccagaagggcgaccagatggtggtgctggaggagagcggcgagtggtggaaggccagaagcctggccaccagaaaggagggctacatccccagcaactacgtggccagagtggacagcctggagaccgaggagtggttcttcaagggcatcagcagaaaggacgccgagagacagctgctggcccccggcaacatgctgggcagcttcatgatcagagacagcgagaccaccaagggcagctacagcctgagcgtgagagactacgaccccagacagggcgacaccgtgaagcactacaagatcagaaccctggacaacggcggcttctacatcagccccagaagcaccttcagcaccctgcaggagctggtggaccactacaagaagggcaacgacggcctgtgccagaagctgagcgtgccctgcatgagcagcaagccccagaagccctgggagaaggacgcctgggagatccccagagagagcctgaagctggagaagaagctgggcgccggccagttcggcgaggtgtggatggccacctacaacaagcacaccaaggtggccgtgaagaccatgaagcccggcagcatgagcgtggaggccttcctggccgaggccaacgtgatgaagaccctgcagcacgacaagctggtgaagctgcacgccgtggtgaccaaggagcccatctacatcatcaccgagttcatggccaagggcagcctgctggacttcctgaagagcgacgagggcagcaagcagcccctgcccaagctgatcgacttcagcgcccagatcgccgagggcatggccttcatcgagcagagaaactacatccacagagacctgagagccgccaacatcctggtgagcgccagcctggtgtgcaagatcgccgacttcggcctggccagagtgatcgaggacaacgagtacaccgccagagagggcgccaagttccccatcaagtggaccgcccccgaggccatcaacttcggcagcttcaccatcaagagcgacgtgtggagcttcggcatcctgctgatggagatcgtgacctacggcagaatcccctaccccggcatgagcaaccccgaggtgatcagagccctggagagaggctacagaatgcccagacccgagaactgccccgaggagctgtacaacatcatgatgagatgctggaagaacagacccgaggagagacccaccttcgagtacatccagagcgtgctggacgacttctacaccgccaccgagagccagtaccagcagcagccctag

SEQ ID NO: 10922 - DNA, 1515 bp, synthetic construct
  misc_feature 1..1515: note = Description of Artificial Sequence: Synthetic coding sequence
  source 1..1515: mol_type = other DNA
atgggctgcatgaagagcaagttcctgcaggtgggcggcaacaccttcagcaagaccgagaccagcgccagcccccactgccccgtgtacgtgcccgaccccaccagcaccatcaagcccggccccaacagccacaacagcaacacccccggcatcagagagggcagcgaggacatcatcgtggtggccctgtacgactacgaggccatccaccacgaggacctgagcttccagaagggcgaccagatggtggtgctggaggagagcggcgagtggtggaaggccagaagcctggccaccagaaaggagggctacatccccagcaactacgtggccagagtggacagcctggagaccgaggagtggttcttcaagggcatcagcagaaaggacgccgagagacagctgctggcccccggcaacatgctgggcagcttcatgatcagagacagcgagaccaccaagggcagctacagcctgagcgtgagagactacgaccccagacagggcgacaccgtgaagcactacaagatcagaaccctggacaacggcggcttctacatcagccccagaagcaccttcagcaccctgcaggagctggtggaccactacaagaagggcaacgacggcctgtgccagaagctgagcgtgccctgcatgagcagcaagccccagaagccctgggagaaggacgcctgggagatccccagagagagcctgaagctggagaagaagctgggcgccggccagttcggcgaggtgtggatggccacctacaacaagcacaccaaggtggccgtgaagaccatgaagcccggcagcatgagcgtggaggccttcctggccgaggccaacgtgatgaagaccctgcagcacgacaagctggtgaagctgcacgccgtggtgaccaaggagcccatctacatcatcaccgagttcatggccaagggcagcctgctggacttcctgaagagcgacgagggcagcaagcagcccctgcccaagctgatcgacttcagcgcccagatcgccgagggcatggccttcatcgagcagagaaactacatccacagagacctgagagccgccaacatcctggtgagcgccagcctggtgtgcaagatcgccgacttcggcctggccagagtgatcgaggacaacgagtacaccgccagagagggcgccaagttccccatcaagtggaccgcccccgaggccatcaacttcggcagcttcaccatcaagagcgacgtgtggagcttcggcatcctgctgatggagatcgtgacctacggcagaatcccctaccccggcatgagcaaccccgaggtgatcagagccctggagagaggctacagaatgcccagacccgagaactgccccgaggagctgtacaacatcatgatgagatgctggaagaacagacccgaggagagacccaccttcgagtacatccagagcgtgctggacgacttctacaccgccaccgagagccagtaccagcagcagccctag

SEQ ID NO: 10923 - DNA, 1518 bp, synthetic construct
  misc_feature 1..1518: note = Description of Artificial Sequence: Synthetic coding sequence
  source 1..1518: mol_type = other DNA
atgggctgcatgaagagcaagttcctgcaggtgggcggcaacaccttcagcaagaccgagaccagcgccagcccccactgccccgtgtacgtgcccgaccccaccagcaccatcaagcccggccccaacagccacaacagcaacacccccggcatcagagaggccggcagcgaggacatcatcgtggtggccctgtacgactacgaggccatccaccacgaggacctgagcttccagaagggcgaccagatggtggtgctggaggagagcggcgagtggtggaaggccagaagcctggccaccagaaaggagggctacatccccagcaactacgtggccagagtggacagcctggagaccgaggagtggttcttcaagggcatcagcagaaaggacgccgagagacagctgctggcccccggcaacatgctgggcagcttcatgatcagagacagcgagaccaccaagggcagctacagcctgagcgtgagagactacgaccccagacagggcgacaccgtgaagcactacaagatcagaaccctggacaacggcggcttctacatcagccccagaagcaccttcagcaccctgcaggagctggtggaccactacaagaagggcaacgacggcctgtgccagaagctgagcgtgccctgcatgagcagcaagccccagaagccctgggagaaggacgcctgggagatccccagagagagcctgaagctggagaagaagctgggcgccggccagttcggcgaggtgtggatggccacctacaacaagcacaccaaggtggccgtgaagaccatgaagcccggcagcatgagcgtggaggccttcctggccgaggccaacgtgatgaagaccctgcagcacgacaagctggtgaagctgcacgccgtggtgaccaaggagcccatctacatcatcaccgagttcatggccaagggcagcctgctggacttcctgaagagcgacgagggcagcaagcagcccctgcccaagctgatcgacttcagcgcccagatcgccgagggcatggccttcatcgagcagagaaactacatccacagagacctgagagccgccaacatcctggtgagcgccagcctggtgtgcaagatcgccgacttcggcctggccagagtgatcgaggacaacgagtacaccgccagagagggcgccaagttccccatcaagtggaccgcccccgaggccatcaacttcggcagcttcaccatcaagagcgacgtgtggagcttcggcatcctgctgatggagatcgtgacctacggcagaatcccctaccccggcatgagcaaccccgaggtgatcagagccctggagagaggctacagaatgcccagacccgagaactgccccgaggagctgtacaacatcatgatgagatgctggaagaacagacccgaggagagacccaccttcgagtacatccagagcgtgctggacgacttctacaccgccaccgagagccagtaccagcagcagccctag

SEQ ID NO: 10924 - DNA, 1521 bp, synthetic construct
  misc_feature 1..1521: note = Description of Artificial Sequence: Synthetic coding sequence
  source 1..1521: mol_type = other DNA
atgatgggctgcatgaagagcaagttcctgcaggtgggcggcaacaccttcagcaagaccgagaccagcgccagcccccactgccccgtgtacgtgcccgaccccaccagcaccatcaagcccggccccaacagccacaacagcaacacccccggcatcagagaggccggcagcgaggacatcatcgtggtggccctgtacgactacgaggccatccaccacgaggacctgagcttccagaagggcgaccagatggtggtgctggaggagagcggcgagtggtggaaggccagaagcctggccaccagaaaggagggctacatccccagcaactacgtggccagagtggacagcctggagaccgaggagtggttcttcaagggcatcagcagaaaggacgccgagagacagctgctggcccccggcaacatgctgggcagcttcatgatcagagacagcgagaccaccaagggcagctacagcctgagcgtgagagactacgaccccagacagggcgacaccgtgaagcactacaagatcagaaccctggacaacggcggcttctacatcagccccagaagcaccttcagcaccctgcaggagctggtggaccactacaagaagggcaacgacggcctgtgccagaagctgagcgtgccctgcatgagcagcaagccccagaagccctgggagaaggacgcctgggagatccccagagagagcctgaagctggagaagaagctgggcgccggccagttcggcgaggtgtggatggccacctacaacaagcacaccaaggtggccgtgaagaccatgaagcccggcagcatgagcgtggaggccttcctggccgaggccaacgtgatgaagaccctgcagcacgacaagctggtgaagctgcacgccgtggtgaccaaggagcccatctacatcatcaccgagttcatggccaagggcagcctgctggacttcctgaagagcgacgagggcagcaagcagcccctgcccaagctgatcgacttcagcgcccagatcgccgagggcatggccttcatcgagcagagaaactacatccacagagacctgagagccgccaacatcctggtgagcgccagcctggtgtgcaagatcgccgacttcggcctggccagagtgatcgaggacaacgagtacaccgccagagagggcgccaagttccccatcaagtggaccgcccccgaggccatcaacttcggcagcttcaccatcaagagcgacgtgtggagcttcggcatcctgctgatggagatcgtgacctacggcagaatcccctaccccggcatgagcaaccccgaggtgatcagagccctggagagaggctacagaatgcccagacccgagaactgccccgaggagctgtacaacatcatgatgagatgctggaagaacagacccgaggagagacccaccttcgagtacatccagagcgtgctggacgacttctacaccgccaccgagagccagtaccagcagcagccctag

SEQ ID NO: 10925 - DNA, 1518 bp, synthetic construct; identical to SEQ ID NO: 10923
  misc_feature 1..1518: note = Description of Artificial Sequence: Synthetic coding sequence
  source 1..1518: mol_type = other DNA

SEQ ID NO: 10926 - DNA, 1632 bp, synthetic construct
  misc_feature 1..1632: note = Description of Artificial Sequence: Synthetic coding sequence
  source 1..1632: mol_type = other DNA
atgctgctgagaagcaagcccgccctgcccccccccctgatgctgctgctgctgggccccctgggccccctgagccccggcgccctgcccagacccgcccaggcccaggacgtggtggacctggacttcttcacccaggagcccctgcacctggtgagccccagcttcctgagcgtgaccatcgacgccaacctggccaccgaccccagattcctgatcctgctgggcagccccaagctgagaaccctggccagaggcctgagccccgcctacctgagattcggcggcaccaagaccgacttcctgatcttcgaccccaagaaggagagcaccttcgaggagagaagctactggcagagccaggtgaaccaggacatctgcaagtacggcagcatcccccccgacgtggaggagaagctgagactggagtggccctaccaggagcagctgctgctgagagagcactaccagaagaagttcaagaacagcacctacagcagaagcagcgtggacgtgctgtacaccttcgccaactgcagcggcctggacctgatcttcggcctgaacgccctgctgagaaccgccgacctgcagtggaacagcagcaacgcccagctgctgctggactactgcagcagcaagggctacaacatcagctgggagctgggcaacgagcccaacagcttcctgaagaaggccgacatcttcatcaacggcagccagctgggcgaggacttcatccagctgcacaagctgctgagaaagagcaccttcaagaacgccaagctgtacggccccgacgtgggccagcccagaagaaagaccgccaagatgctgaagagcttcctgaaggccggcggcgaggtgatcgacagcgtgacctggcaccactactacctgaacggcagaaccgccaccaaggaggacttcctgaaccccgacgtgctggacatcttcatcagcagcgtgcagaaggtgttccaggtggtggagagcaccagacccggcaagaaggtgtggctgggcgagaccagcagcgcctacggcggcggcgcccccctgctgagcgacaccttcgccgccggcttcatgtggctggacaagctgggcctgagcgccagaatgggcatcgaggtggtgatgagacaggtgttcttcggcgccggcaactaccacctggtggacgagaacttcgaccccctgcccgactactggctgagcctgctgttcaagaagctggtgggcaccaaggtgctgatggccagcgtgcagggcagcaagagaagaaagctgagagtgtacctgcactgcaccaacaccgacaaccccagatacaaggagggcgacctgaccctgtacgccatcaacctgcacaacgtgaccaagtacctgagactgccctaccccttcagcaacaagcaggtggacaagtacctgctgagacccctgggcccccacggcctgctgagcaagagcgtgcagctgaacggcctgaccctgaagatggtggacgaccagaccctgccccccctgatggagaagcccctgagacccggcagcagcctgggcctgcccgccttcagctacagcttcttcgtgatcagaaacgccaaggtggccgcctgcatctag

SEQ ID NO: 10927 - DNA, 1632 bp, synthetic construct; identical to SEQ ID NO: 10926
  misc_feature 1..1632: note = Description of Artificial Sequence: Synthetic coding sequence
  source 1..1632: mol_type = other DNA

SEQ ID NO: 10928 - DNA, 294 bp, synthetic construct
  misc_feature 1..294: note = Description of Artificial Sequence: Synthetic coding sequence
  source 1..294: mol_type = other DNA
atgctgctgctgctgggccccctgggccccctgagccccggcgccctgcccagacccgcccaggcccaggacgtggtggacctggacttcttcacccaggagcccctgcacctggtgagccccagcttcctgagcgtgaccagacccggcaagaaggtgtggctgggcgagaccagcagcgcctacggcggcggcgcccccctgctgagcgacaccttcgccgccggcttcatgtggctggacaagctgggcctgagcgccagaatgggcatcgaggtggtgatgagacagtag

SEQ ID NO: 10929 - DNA, 1410 bp, synthetic construct
  misc_feature 1..1410: note = Description of Artificial Sequence: Synthetic coding sequence
  source 1..1410: mol_type = other DNA
atgctgctgagaagcaagcccgccctgcccccccccctgatgctgctgctgctgggccccctgggccccctgagccccggcgccctgcccagacccgcccaggcccaggacgtggtggacctggacttcttcacccaggagcccctgcacctggtgagccccagcttcctgagcgtgaccatcgacgccaacctggccaccgaccccagattcctgatcctgctgggcagccccaagctgagaaccctggccagaggcctgagccccgcctacctgagattcggcggcaccaagaccgacttcctgatcttcgaccccaagaaggagagcaccttcgaggagagaagctactggcagagccaggtgaaccaggacatctgcaagtacggcagcatcccccccgacgtggaggagaagctgagactggagtggccctaccaggagcagctgctgctgagagagcactaccagaagaagttcaagaacagcacctacagcagaagcagcgtggacgtgctgtacaccttcgccaactgcagcggcctggacctgatcttcggcctgaacgccctgctgagaaccgccgacctgcagtggaacagcagcaacgcccagctgctgctggactactgcagcagcaagggctacaacatcagctgggagctgggcaacgagcccaacagcttcctgaagaaggccgacatcttcatcaacggcagccagctgggcgaggacttcatccagctgcacaagctgctgagaaagagcaccttcaagaacgccaagctgtacggccccgacgtgggccagcccagaagaaagaccgccaagatgctgaagagcttcctgaaggccggcggcgaggtgatcgacagcgtgacctggcaccactactacctgaacggcagaaccgccaccaaggaggacttcctgaaccccgacgtgctggacatcttcatcagcagcgtgcagaaggtgttccaggactactggctgagcctgctgttcaagaagctggtgggcaccaaggtgctgatggccagcgtgcagggcagcaagagaagaaagctgagagtgtacctgcactgcaccaacaccgacaaccccagatacaaggagggcgacctgaccctgtacgccatcaacctgcacaacgtgaccaagtacctgagactgccctaccccttcagcaacaagcaggtggacaagtacctgctgagacccctgggcccccacggcctgctgagcaagagcgtgcagctgaacggcctgaccctgaagatggtggacgaccagaccctgccccccctgatggagaagcccctgagacccggcagcagcctgggcctgcccgccttcagctacagcttcttcgtgatcagaaacgccaaggtggccgcctgcatctag

SEQ ID NO: 10930 - DNA, 1458 bp, synthetic construct
  misc_feature 1..1458: note = Description of Artificial Sequence: Synthetic coding sequence
  source 1..1458: mol_type = other DNA
atgctgctgagaagcaagcccgccctgcccccccccctgatgctgctgctgctgggccccctgggccccctgagccccggcgccctgcccagacccgcccaggcccaggacgtggtggacctggacttcttcacccaggagcccctgcacctggtgagccccagcttcctgagcgtgaccatcgacgccaacctggccaccgaccccagattcctgatcctgctgggcagccccaagctgagaaccctggccagaggcctgagccccgcctacctgagattcggcggcaccaagaccgacttcctgatcttcgaccccaagaaggagagcaccttcgaggagagaagctactggcagagccaggtgaaccaggacatctgcaagtacggcagcatcccccccgacgtggaggagaagctgagactggagtggccctaccaggagcagctgctgctgagagagcactaccagaagaagttcaagaacagcacctacagcaagcccaacagcttcctgaagaaggccgacatcttcatcaacggcagccagctgggcgaggacttcatccagctgcacaagctgctgagaaagagcaccttcaagaacgccaagctgtacggccccgacgtgggccagcccagaagaaagaccgccaagatgctgaagagcttcctgaaggccggcggcgaggtgatcgacagcgtgacctggcaccactactacctgaacggcagaaccgccaccaaggaggacttcctgaaccccgacgtgctggacatcttcatcagcagcgtgcagaaggtgttccaggtggtggagagcaccagacccggcaagaaggtgtggctgggcgagaccagcagcgcctacggcggcggcgcccccctgctgagcgacaccttcgccgccggcttcatgtggctggacaagctgggcctgagcgccagaatgggcatcgaggtggtgatgagacaggtgttcttcggcgccggcaactaccacctggtggacgagaacttcgaccccctgcccgactactggctgagcctgctgttcaagaagctggtgggcaccaaggtgctgatggccagcgtgcagggcagcaagagaagaaagctgagagtgtacctgcactgcaccaacaccgacaaccccagatacaaggagggcgacctgaccctgtacgccatcaacctgcacaacgtgaccaagtacctgagactgccctaccccttcagcaacaagcaggtggacaagtacctgctgagacccctgggcccccacggcctgctgagcaagagcgtgcagctgaacggcctgaccctgaagatggtggacgaccagaccctgccccccctgatggagaagcccctgagacccggcagcagcctgggcctgcccgccttcagctacagcttcttcgtgatcagaaacgccaaggtggccgcctgcatctag

SEQ ID NO: 10931 - DNA, 1062 bp, synthetic construct
  misc_feature 1..1062: note = Description of Artificial Sequence: Synthetic coding sequence
  source 1..1062: mol_type = other DNA
atggagaagaccctggagaccgtgcccctggagagaaagaagagagagaaggagcagttcagaaagctgttcatcggcggcctgagcttcgagaccaccgaggagagcctgagaaactactacgagcagtggggcaagctgaccgactgcgtggtgatgagagaccccgccagcaagagaagcagaggcttcggcttcgtgaccttcagcagcatggccgaggtggacgccgccatggccgccagaccccacagcatcgacggcagagtggtggagcccaagagagccgtggccagagaggagagcggcaagcccggcgcccacgtgaccgtgaagaagctgttcgtgggcggcatcaaggaggacaccgaggagcaccacctgagagactacttcgaggagtacggcaagatcgacaccatcgagatcatcaccgacagacagagcggcaagaagagaggcttcggcttcgtgaccttcgacgaccacgaccccgtggacaagatcgtgctgcagaagtaccacaccatcaacggccacaacgccgaggtgagaaaggccctgagcagacaggagatgcaggaggtgcagagcagcagaagcggcagaggcggcaacttcggcttcggcgacagcagaggcggcggcggcaacttcggccccggccccggcagcaacttcagaggcggcagcgacggctacggcagcggcagaggcttcggcgacggctacaacggctacggcggcggccccggcggcggcaacttcggcggcagccccggctacggcggcggcagaggcggctacggcggcggcggccccggctacggcaaccagggcggcggctacggcggcggctacgacaactacggcggcggcaactacggcagcggcaactacaacgacttcggcaactacaaccagcagcccagcaactacggccccatgaagagcggcaacttcggcggcagcagaaacatgggcggcccctacggcggcggcaactacggccccggcggcagcggcggcagcggcggctacggcggcagaagcagatactag

SEQ ID NO: 10932 - DNA, 1026 bp, synthetic construct
  misc_feature 1..1026: note = Description of Artificial Sequence: Synthetic coding sequence
  source 1..1026: mol_type = other DNA
atggagagagagaaggagcagttcagaaagctgttcatcggcggcctgagcttcgagaccaccgaggagagcctgagaaactactacgagcagtggggcaagctgaccgactgcgtggtgatgagagaccccgccagcaagagaagcagaggcttcggcttcgtgaccttcagcagcatggccgaggtggacgccgccatggccgccagaccccacagcatcgacggcagagtggtggagcccaagagagccgtggccagagaggagagcggcaagcccggcgcccacgtgaccgtgaagaagctgttcgtgggcggcatcaaggaggacaccgaggagcaccacctgagagactacttcgaggagtacggcaagatcgacaccatcgagatcatcaccgacagacagagcggcaagaagagaggcttcggcttcgtgaccttcgacgaccacgaccccgtggacaagatcgtgctgcagaagtaccacaccatcaacggccacaacgccgaggtgagaaaggccctgagcagacaggagatgcaggaggtgcagagcagcagaagcggcagaggcggcaacttcggcttcggcgacagcagaggcggcggcggcaacttcggccccggccccggcagcaacttcagaggcggcagcgacggctacggcagcggcagaggcttcggcgacggctacaacggctacggcggcggccccggcggcggcaacttcggcggcagccccggctacggcggcggcagaggcggctacggcggcggcggccccggctacggcaaccagggcggcggctacggcggcggctacgacaactacggcggcggcaactacggcagcggcaactacaacgacttcggcaactacaaccagcagcccagcaactacggccccatgaagagcggcaacttcggcggcagcagaaacatgggcggcccctacggcggcggcaactacggccccggcggcagcggcggcagcggcggctacggcggcagaagcagatactag

SEQ ID NO: 10933 - DNA, 1062 bp, synthetic construct; identical to SEQ ID NO: 10931
  misc_feature 1..1062: note = Description of Artificial Sequence: Synthetic coding sequence
  source 1..1062: mol_type = other DNA

SEQ ID NO: 10934 - DNA, 750 bp, synthetic construct
  misc_feature 1..750: note = Description of Artificial Sequence: Synthetic coding sequence
  source 1..750: mol_type = other DNA
atggagagagagaaggagcagttcagaaagctgttcatcggcggcctgagcttcgagaccaccgaggagagcctgagaaactactacgagcagtggggcaagctgaccgactgcgtggtgatgagagaccccgccagcaagagaagcagaggcttcggcttcgtgaccttcagcagcatggccgaggtggacgccgccatggccgccagaccccacagcatcgacggcagagtggtggagcccaagagagccgtggccagagaggagagcggcaagcccggcgcccacgtgaccgtgaagaagctgttcgtgggcggcatcaaggaggacaccgaggagcaccacctgagagactacttcgaggagtacggcaagatcgacaccatcgagatcatcaccgacagacagagcggcaagaagagaggcttcggcttcgtgaccttcgacgaccacgaccccgtggacaagatcgtgctgcagaagtaccacaccatcaacggccacaacgccgaggtgagaaaggccctgagcagacaggagatgcaggaggacctggaggtggccatcctggaggtggcccccgtgatggaggaggaggaggaggacatggtggtggaggacctggacatggccaccagagtgggcgccaccgaggtggtgatgaccaccatggaggaggagatcatggaggtggagatcaccatgatcctggagatcatcaccagcaacctgctgaccaccgtgcagtag

SEQ ID NO: 10935 - DNA, 846 bp, synthetic construct
  misc_feature 1..846: note = Description of Artificial Sequence: Synthetic coding sequence
  source 1..846: mol_type = other DNA
atgagcgaggagcagttcggcggcgacggcgccgccggcaacggcggcggcagaagagccggcgagcaggagggcgccatggtggccgccacccagggcgccgccgccagagaggccgagcccggccccggcgccgagcccagactggaggcccccaagggcgccgagagcgagggcgccaagatcgacgccagcaagaacgaggaggacgagggcaagatgttcatcggcggcctgagctgggacaccaccaagaaggacctgaaggactacttcagcaagttcggcgaggtggtggactgcaccctgaagctggaccccatcaccggcagaagcagaggcttcggcttcgtgctgttcaaggagagcgagagcgtggacaaggtgatggaccagaaggagcacaagctgaacggcaaggtgatcgaccccaagagagccaaggccatgaagaccaaggagcccgtgaagaagatcttcgtgggcggcctgagccccgacacccccgaggagaagatcagagagtacttcggcggcttcggcgaggtggagagcatcgagctgcccatggacaacaagaccaacaagagaagaggcttctgcttcatcaccttcaaggaggaggagcccgtgaagaagatcatggagaagaagtaccacaacgtgggcctgagcaagtgcgagatcaaggtggccatgagcaaggagcagtaccagcagcagcagcagtggggcagcagaggcggcttcgccggcagagccagaggcagaggcggcgaccagcagagcggctacggcaaggtgagcagaagaggcggccaccagaacagctacaagccctactag

SEQ ID NO: 10936 - DNA, 1068 bp, synthetic construct
  misc_feature 1..1068: note = Description of Artificial Sequence: Synthetic coding sequence
  source 1..1068: mol_type = other DNA
atgagcgaggagcagttcggcggcgacggcgccgccgccgccgccaccgccgccgtgggcggcagcgccggcgagcaggagggcgccatggtggccgccacccagggcgccgccgccgccgccggcagcggcgccggcaccggcggcggcaccgccagcggcggcaccgagggcggcagcgccgagagcgagggcgccaagatcgacgccagcaagaacgaggaggacgagggccacagcaacagcagccccagacacagcgaggccgccaccgcccagagagaggagtggaagatgttcatcggcggcctgagctgggacaccaccaagaaggacctgaaggactacttcagcaagttcggcgaggtggtggactgcaccctgaagctggaccccatcaccggcagaagcagaggcttcggcttcgtgctgttcaaggagagcgagagcgtggacaaggtgatggaccagaaggagcacaagctgaacggcaaggtgatcgaccccaagagagccaaggccatgaagaccaaggagcccgtgaagaagatcttcgtgggcggcctgagccccgacacccccgaggagaagatcagagagtacttcggcggcttcggcgaggtggagagcatcgagctgcccatggacaacaagaccaacaagagaagaggcttctgcttcatcaccttcaaggaggaggagcccgtgaagaagatcatggagaagaagtaccacaacgtgggcctgagcaagtgcgagatcaaggtggccatgagcaaggagcagtaccagcagcagcagcagtggggcagcagaggcggcttcgccggcagagccagaggcagaggcggcggccccagccagaactggaaccagggctacagcaactactggaaccagggctacggcaactacggctacaacagccagggctacggcggctacggcggctacgactacaccggctacaacaactactacggctacggcgactacagcaaccagcagagcggctacggcaaggtgagcagaagaggcggccaccagaacagctacaagccctactag

SEQ ID NO: 10937 - DNA, 1011 bp, synthetic construct
  misc_feature 1..1011: note = Description of Artificial Sequence: Synthetic coding sequence
  source 1..1011: mol_type = other DNA
atgagcgaggagcagttcggcggcgacggcgccgccgccgccgccaccgccgccgtgggcggcagcgccggcgagcaggagggcgccatggtggccgccacccagggcgccgccgccgccgccggcagcggcgccggcaccggcggcggcaccgccagcggcggcaccgagggcggcagcgccgagagcgagggcgccaagatcgacgccagcaagaacgaggaggacgagggcaagatgttcatcggcggcctgagctgggacaccaccaagaaggacctgaaggactacttcagcaagttcggcgaggtggtggactgcaccctgaagctggaccccatcaccggcagaagcagaggcttcggcttcgtgctgttcaaggagagcgagagcgtggacaaggtgatggaccagaaggagcacaagctgaacggcaaggtgatcgaccccaagagagccaaggccatgaagaccaaggagcccgtgaagaagatcttcgtgggcggcctgagccccgacacccccgaggagaagatcagagagtacttcggcggcttcggcgaggtggagagcatcgagctgcccatggacaacaagaccaacaagagaagaggcttctgcttcatcaccttcaaggaggaggagcccgtgaagaagatcatggagaagaagtaccacaacgtgggcctgagcaagtgcgagatcaaggtggccatgagcaaggagcagtaccagcagcagcagcagtggggcagcagaggcggcttcgccggcagagccagaggcagaggcggcggccccagccagaactggaaccagggctacagcaactactggaaccagggctacggcaactacggctacaacagccagggctacggcggctacggcggctacgactacaccggctacaacaactactacggctacggcgactacagcaaccagcagagcggctacggcaaggtgagcagaagaggcggccaccagaacagctacaagccctactag

SEQ ID NO: 10938 - DNA, 921 bp, synthetic construct
  misc_feature 1..921: note = Description of Artificial Sequence: Synthetic coding sequence
  source 1..921: mol_type = other DNA
atgagcgaggagcagttcggcggcgacggcgccgccgccgccgccaccgccgccgtgggcggcagcgccggcgagcaggagggcgccatggtggccgccacccagggcgccgccgccgccgccggcagcggcgccggcaccggcggcggcaccgccagcggcggcaccgagggcggcagcgccgagagcgagggcgccaagatcgacgccagcaagaacgaggaggacgagggccacagcaacagcagccccagacacagcgaggccgccaccgcccagagagaggagtggaagatgttcatcggcggcctgagctgggacaccaccaagaaggacctgaaggactacttcagcaagttcggcgaggtggtggactgcaccctgaagctggaccccatcaccggcagaagcagaggcttcggcttcgtgctgttcaaggagagcgagagcgtggacaaggtgatggaccagaaggagcacaagctgaacggcaaggtgatcgaccccaagagagccaaggccatgaagaccaaggagcccgtgaagaagatcttcgtgggcggcctgagccccgacacccccgaggagaagatcagagagtacttcggcggcttcggcgaggtggagagcatcgagctgcccatggacaacaagaccaacaagagaagaggcttctgcttcatcaccttcaaggaggaggagcccgtgaagaagatcatggagaagaagtaccacaacgtgggcctgagcaagtgcgagatcaaggtggccatgagcaaggagcagtaccagcagcagcagcagtggggcagcagaggcggcttcgccggcagagccagaggcagaggcggcgaccagcagagcggctacggcaaggtgagcagaagaggcggccaccagaacagctacaagccctactag

SEQ ID NO: 10939 - DNA, 468 bp, synthetic construct
  misc_feature 1..468: note = Description of Artificial Sequence: Synthetic coding sequence
  source 1..468: mol_type = other DNA
atgagcgaggagcagttcggcggcgacggcgccgccgccgccgccaccgccgccgtgggcggcagcgccggcgagcaggagggcgccatggtggccgccacccagggcgccgccgccgccgccggcagcggcgccggcaccggcggcggcaccgccagcggcggcaccgagggcggcagcgccgagagcgagggcgccaagatcgacgccagcaagaacgaggaggacgagggcaagatgttcatcggcggcctgagctgggacaccaccaagaaggacctgaaggactacttcagcaagttcggcgaggtggtggactgcaccctgaagctggaccccatcaccggcagaagcagaggcttcggcttcgtgctgttcaaggagagcgagagcgtggacaaggtgatggaccagaaggagcacaagctgaacggcaaggtgatcgaccccaagagagccaaggcctag

SEQ ID NO: 10940 - DNA, 666 bp, synthetic construct
  misc_feature 1..666: note = Description of Artificial Sequence: Synthetic coding sequence
  source 1..666: mol_type = other DNA
atgagcgaggagcagttcggcggcgacggcgccgccgccgccgccaccgccgccgtgggcggcagcgccggcgagcaggagggcgccatggtggccgccacccagggcgccgccgccgccgccggcagcggcgccggcaccggcggcggcaccgccagcggcggcaccgagggcggcagcgccgagagcgagggcgccaagatcgacgccagcaagaacgaggaggacgagggccacagcaacagcagccccagacacagcgaggccgccaccgcccagagagaggagtggaagatgttcatcggcggcctgagctgggacaccaccaagaaggacctgaaggactacttcagcaagttcggcgaggtggtggactgcaccctgaagctggaccccatcaccggcagaagcagaggcttcggcttcgtgctgttcaaggagagcgagagcgtggacaaggtgatggaccagaaggagcacaagctgaacggcaaggtgatcgaccccaagagagccaaggccatgaagaccaaggagcccgtgaagaagatcttcgtgggcggcctgagccccgacacccccgaggagaagatcagagagtacttcggcggcttcggcgaggtggagagcatcgagctgcccatggacaacaagaccaacaagtag

SEQ ID NO: 10941 - DNA, 633 bp, synthetic construct
  misc_feature 1..633: note = Description of Artificial Sequence: Synthetic coding sequence
  source 1..633: mol_type = other DNA
tgaaagatgttcatcggcggcctgagctgggacaccaccaagaaggacctgaaggactacttcagcaagttcggcgaggtggtggactgcaccctgaagctggaccccatcaccggcagaagcagaggcttcggcttcgtgctgttcaaggagagcgagagcgtggacaaggtgatggaccagaaggagcacaagctgaacggcaaggtgatcgaccccaagagagccaaggccatgaagaccaaggagcccgtgaagaagatcttcgtgggcggcctgagccccgacacccccgaggagaagatcagagagtacttcggcggcttcggcgaggtggagagcatcgagctgcccatggacaacaagaccaacaagagaagaggcttctgcttcatcaccttcaaggaggaggagcccgtgaagaagatcatggagaagaagtaccacaacgtgggcctgagcaagtgcgagatcaaggtggccatgagcaaggagcagtaccagcagcagcagcagtggggcagcagaggcggcttcgccggcagagccagaggcagaggcggcgaccagcagagcggctacggcaaggtgagcagaagaggcggccaccagaacagctacaagccctactag

SEQ ID NO: 10942 - DNA, 606 bp, synthetic construct
  misc_feature 1..606: note = Description of Artificial Sequence: Synthetic coding sequence
  source 1..606: mol_type = other DNA
atggaccagaaggagcacaagctgaacggcaaggtgatcgaccccaagagagccaaggccatgaagaccaaggagcccgtgaagaagatcttcgtgggcggcctgagccccgacacccccgaggagaagatcagagagtacttcggcggcttcggcgaggtggagagcatcgagctgcccatggacaacaagaccaacaagagaagaggcttctgcttcatcaccttcaaggaggaggagcccgtgaagaagatcatggagaagaagtaccacaacgtgggcctgagcaagtgcgagatcaaggtggccatgagcaaggagcagtaccagcagcagcagcagtggggcagcagaggcggcttcgccggcagagccagaggcagaggcggcggccccagccagaactggaaccagggctacagcaactactggaaccagggctacggcaactacggctacaacagccagggctacggcggctacggcggctacgactacaccggctacaacaactactacggctacggcgactacagcaaccagcagagcggctacggcaaggtgagcagaagaggcggccaccagaacagctacaagccctactag

SEQ ID NO: 10943 - DNA, 912 bp, synthetic construct
  misc_feature 1..912: note = Description of Artificial Sequence: Synthetic coding sequence
  source 1..912: mol_type = other DNA
atgagcgaggagcagttcggcggcgacggcgccgccgccgccgccaccgccgccgccagcggcggcaccgagggcggcagcgccgagagcgagggcgccaagatcgacgccagcaagaacgaggaggacgagggcaagatgttcatcggcggcctgagctgggacaccaccaagaaggacctgaaggactacttcagcaagttcggcgaggtggtggactgcaccctgaagctggaccccatcaccggcagaagcagaggcttcggcttcgtgctgttcaaggagagcgagagcgtggacaaggtgatggaccagaaggagcacaagctgaacggcaaggtgatcgaccccaagagagccaaggccatgaagaccaaggagcccgtgaagaagatcttcgtgggcggcctgagccccgacacccccgaggagaagatcagagagtacttcggcggcttcggcgaggtggagagcatcgagctgcccatggacaacaagaccaacaagagaagaggcttctgcttcatcaccttcaaggaggaggagcccgtgaagaagatcatggagaagaagtaccacaacgtgggcctgagcaagtgcgagatcaaggtggccatgagcaaggagcagtaccagcagcagcagcagtggggcagcagaggcggcttcgccggcagagccagaggcagaggcggcggccccagccagaactggaaccagggctacagcaactactggaaccagggctacggcaactacggctacaacagccagggctacggcggctacggcggctacgactacaccggctacaacaactactacggctacggcgactacagcaaccagcagagcggctacggcaaggtgagcagaagaggcggccaccagaacagctacaagccctactag

SEQ ID NO: 10944 - DNA, 1974 bp, synthetic construct
  misc_feature 1..1974: note = Description of Artificial Sequence: Synthetic coding sequence
  source 1..1974: mol_type = other DNA
atgcccagatacaccgtgcacgtgagaggcgagtggctggccgtgccctgccaggacgcccagctgaccgtgggctggctgggcagagaggccgtgagaagatacatcaagaacaagcccgacaacggcggcttcaccagcgtggacgacgcccacttcctggtgagaagatgcaagggcctgggcctgctggacaacgaggacagactggaggtggccctggagaacaacgagttcgtggaggtggtgatcgagggcgacgccatgagccccgacttcatccccagccagcccgagggcgtgtacctgtacagcaagtacagagagcccgagaagtacatcgagctggacggcgacagactgaccaccgaggacctggtgaacctgggcaagggcagatacaagatcaagctgacccccaccgccgagaagagagtgcagaagagcagagaggtgatcgacagcatcatcaaggagaagaccgtggtgtacggcatcaccaccggcttcggcaagttcgccagaaccgtgatccccatcaacaagctgcaggagctgcaggtgaacctggtgagaagccacagcagcggcgtgggcaagcccctgagccccgagagatgcagaatgctgctggccctgagaatcaacgtgctggccaagggctacagcggcatcagcctggagaccctgaagcaggtgatcgagatgttcaacgccagctgcctgccctacgtgcccgagaagggcaccgtgggcgccagcggcgacctggcccccctgagccacctggccctgggcctggtgggcgagggcaagatgtggagccccaagagcggctgggccgacgccaagtacgtgctggaggcccacggcctgaagcccgtgatcctgaagcccaaggagggcctggccctgatcaacggcacccagatgatcaccagcctgggctgcgaggccgtggagagagccagcgccatcgccagacaggccgacatcgtggccgccctgaccctggaggtgctgaagggcaccaccaaggccttcgacaccgacatccacgccctgagaccccacagaggccagatcgaggtggccttcagattcagaagcctgctggacagcgaccaccaccccagcgagatcgccgagagccacagattctgcgacagagtgcaggacgcctacaccctgagatgctgcccccaggtgcacggcgtggtgaacgacaccatcgccttcgtgaagaacatcatcaccaccgagctgaacagcgccaccgacaaccccatggtgttcgccaacagaggcgagaccgtgagcggcggcaacttccacggcgagtaccccgccaaggccctggactacctggccatcggcatccacgagctggccgccatcagcgagagaagaatcgagagactgtgcaaccccagcctgagcgagctgcccgccttcctggtggccgagggcggcctgaacagcggcttcatgatcgcccactgcaccgccgccgccctggtgagcgagaacaaggccctgtgccaccccagcagcgtggacagcctgagcaccagcgccgccaccgaggaccacgtgagcatgggcggctgggccgccagaaaggccctgagagtgatcgagcacgtggagcaggtgctggccatcgagctgctggccgcctgccagggcatcgagttcctgagacccctgaagaccaccacccccctggagaaggtgtacgacctggtgagaagcgtggtgagaccctggatcaaggacagattcatggcccccgacatcgaggccgcccacagactgctgctggagcagaaggtgtgggaggtggccgccccctacatcgagaagtacagaatggagcacatccccgagagcagacccctgagccccaccgccttcagcctgcagttcctgcacaagaagagcaccaagatccccgagagcgaggacctgtag

SEQ ID NO: 10945 - DNA, 1776 bp, synthetic construct
  misc_feature 1..1776: note = Description of Artificial Sequence: Synthetic coding sequence
  source 1..1776: mol_type = other DNA
atgcccagatacaccgtgcacgtgagaggcgagtggctggccgtgccctgccaggacgcccagctgaccgtgggctggctgggcagagaggccgtgagaagatacatcaagaacaagcccgacaacggcggcttcaccagcgtggacgacgcccacttcctggtgagaagatgcaagggcctgggcctgctggacaacgaggacagactggaggtggccctggagaacaacgagttcgtggaggtggtgatcgagggcgacgccatgagccccgacttcatccccagccagcccgagggcgtgtacctgtacagcaagtacagagagcccgagaagtacatcgagctggacggcgacagactgaccaccgaggacctggtgaacctgggcaagggcagatacaagatcaagctgacccccaccgccgagaagagagtgcagaagagcagagaggtgatcgacagcatcatcaaggagaagaccgtggtgtacggcatcaccaccggcttcggcaagttcgccagaaccgtgatccccatcaacaagctgcaggagctgcaggtgaacctggtgagaagccacagcagcggcgtgggcaagcccctgagccccgagagatgcagaatgctgctggccctgagaatcaacgtgctggccaagggctacagcggcatcagcctggagaccctgaagcaggtgatcgagatgttcaacgccagctgcctgccctacgtgcccgagaagggcaccgtgggcgccagcggcgacctggcccccctgagccacctggccctgggcctggtgggcgagggcaagatgtggagccccaagagcggctgggccgacgccaagtacgtgctggaggcccacggcctgaagcccgtgatcctgaagcccaaggagggcctggccctgatcaacggcacccagatgatcaccagcctgggctgcgaggccgtggagagagccagcgccatcgccagacaggccgacatcgtggccgccctgaccctggaggtgctgaagggcaccaccaaggccttcgacaccgacatccacgccctgagaccccacagaggccagatcgaggtggccttcagattcagaagcctgctggacagcgaccaccaccccagcgagatcgccgagagccacagattctgcgacagagtgcaggacgcctacaccctgagatgctgcccccaggtgcacggcgtggtgaacgacaccatcgccttcgtgaagaacatcatcaccaccgagctgaacagcgccaccgacaaccccatggtgttcgccaacagaggcgagaccgtgagcggcggcaacttccacggcgagtaccccgccaaggccctggactacctggccatcggcatccacgagctggccgccatcagcgagagaagaatcgagagactgtgcaaccccagcctgagcgagctgcccgccttcctggtggccgagggcggcctgaacagcggcttcatgatcgcccactgcaccgccgccgccctggtgagcgagaacaaggccctgtgccaccccagcagcgtggacagcctgagcaccagcgccgccaccgaggaccacgtgagcatgggcggctgggccgccagaaaggccctgagagtgatcgagcacgtggagcaggtgctggccatcgagctgctggccgcctgccagggcatcgagttcctgagacccctgaagaccaccacccccctggagaaggtgtacgacctggtgagaagcgtggtgagattcggcaagtag

SEQ ID NO: 10946 - DNA, 1350 bp, synthetic construct
  misc_feature 1..1350: note = Description of Artificial Sequence: Synthetic coding sequence
  source 1..1350: mol_type = other DNA
atgctgctggccctgagaatcaacgtgctggccaagggctacagcggcatcagcctggagaccctgaagcaggtgatcgagatgttcaacgccagctgcctgccctacgtgcccgagaagggcaccgtgggcgccagcggcgacctggcccccctgagccacctggccctgggcctggtgggcgagggcaagatgtggagccccaagagcggctgggccgacgccaagtacgtgctggaggcccacggcctgaagcccgtgatcctgaagcccaaggagggcctggccctgatcaacggcacccagatgatcaccagcctgggctgcgaggccgtggagagagccagcgccatcgccagacaggccgacatcgtggccgccctgaccctggaggtgctgaagggcaccaccaaggccttcgacaccgacatccacgccctgagaccccacagaggccagatcgaggtggccttcagattcagaagcctgctggacagcgaccaccaccccagcgagatcgccgagagccacagattctgcgacagagtgcaggacgcctacaccctgagatgctgcccccaggtgcacggcgtggtgaacgacaccatcgccttcgtgaagaacatcatcaccaccgagctgaacagcgccaccgacaaccccatggtgttcgccaacagaggcgagaccgtgagcggcggcaacttccacggcgagtaccccgccaaggccctggactacctggccatcggcatccacgagctggccgccatcagcgagagaagaatcgagagactgtgcaaccccagcctgagcgagctgcccgccttcctggtggccgagggcggcctgaacagcggcttcatgatcgcccactgcaccgccgccgccctggtgagcgagaacaaggccctgtgccaccccagcagcgtggacagcctgagcaccagcgccgccaccgaggaccacgtgagcatgggcggctgggccgccagaaaggccctgagagtgatcgagcacgtggagcaggtgctggccatcgagctgctggccgcctgccagggcatcgagttcctgagacccctgaagaccaccacccccctggagaaggtgtacgacctggtgagaagcgtggtgagaccctggatcaaggacagattcatggcccccgacatcgaggccgcccacagactgctgctggagcagaaggtgtgggaggtggccgccccctacatcgagaagtacagaatggagcacatccccgagagcagacccctgagccccaccgccttcagcctgcagttcctgcacaagaagagcaccaagatccccgagagcgaggacctgtag

SEQ ID NO: 10947 - DNA, 1260 bp, synthetic construct
  misc_feature 1..1260: note = Description of Artificial Sequence: Synthetic coding sequence
  source 1..1260: mol_type = other DNA
atggccggcttcggcgccatggagaagttcctggtggagtacaagagcgccgtggagaagaagctggccgagtacaagtgcaacaccaacaccgccatcgagctgaagctggtgagattccccgaggacctggagaacgacatcagaaccttcttccccgagtacacccaccagctgttcggcgacgacgagaccgccttcggctacaagggcctgaagatcctgctgtactacatcgccggcagcctgagcaccatgttcagagtggagtacgccagcaaggtggacgagaacttcgactgcgtggaggccgacgacgtggagggcaagatcagacagatcatcccccccggcttctgcaccaacaccaacgacttcctgagcctgctggagaaggaggtggacttcaagcccttcggcaccctgctgcacacctacagcgtgctgagccccaccggcggcgagaacttcaccttccagatctacaaggccgacatgacctgcagaggcttcagagagtaccacgagagactgcagaccttcctgatgtggttcatcgagaccgccagcttcatcgacgtggacgacgagagatggcactacttcctggtgttcgagaagtacaacaaggacggcgccaccctgttcgccaccgtgggctacatgaccgtgtacaactactacgtgtaccccgacaagaccagacccagagtgagccagatgctgatcctgacccccttccagggccagggccacggcgcccagctgctggagaccgtgcacagatactacaccgagttccccaccgtgctggacatcaccgccgaggaccccagcaagagctacgtgaagctgagagacttcgtgctggtgaagctgtgccaggacctgccctgcttcagcagagagaagctgatgcagggcttcaacgaggacatggccatcgaggcccagcagaagttcaagatcaacaagcagcacgccagaagagtgtacgagatcctgagactgctggtgaccgacatgagcgacgccgagcagtacagaagctacagactggacatcaagagaagactgatcagcccctacaagaagaagcagagagacctggccaagatgagaaagtgcctgagacccgaggagctgaccaaccagatgaaccagatcgagatcagcatgcagcacgagcagctggaggagagcttccaggagctggtggaggactacagaagagtgatcgagagactggcccaggagtag

SEQ ID NO: 10948 - DNA, 1005 bp, synthetic construct
  misc_feature 1..1005: note = Description of Artificial Sequence: Synthetic coding sequence
  source 1..1005: mol_type = other DNA
atgttcagagtggagtacgccagcaaggtggacgagaacttcgactgcgtggaggccgacgacgtggagggcaagatcagacagatcatcccccccggcttctgcaccaacaccaacgacttcctgagcctgctggagaaggaggtggacttcaagcccttcggcaccctgctgcacacctacagcgtgctgagccccaccggcggcgagaacttcaccttccagatctacaaggccgacatgacctgcagaggcttcagagagtaccacgagagactgcagaccttcctgatgtggttcatcgagaccgccagcttcatcgacgtggacgacgagagatggcactacttcctggtgttcgagaagtacaacaaggacggcgccaccctgttcgccaccgtgggctacatgaccgtgtacaactactacgtgtaccccgacaagaccagacccagagtgagccagatgctgatcctgacccccttccagggccagggccacggcgcccagctgctggagaccgtgcacagatactacaccgagttccccaccgtgctggacatcaccgccgaggaccccagcaagagctacgtgaagctgagagacttcgtgctggtgaagctgtgccaggacctgccctgcttcagcagagagaagctgatgcagggcttcaacgaggacatggccatcgaggcccagcagaagttcaagatcaacaagcagcacgccagaagagtgtacgagatcctgagactgctggtgaccgacatgagcgacgccgagcagtacagaagctacagactggacatcaagagaagactgatcagcccctacaagaagaagcagagagacctggccaagatgagaaagtgcctgagacccgaggagctgaccaaccagatgaaccagatcgagatcagcatgcagcacgagcagctggaggagagcttccaggagctggtggaggactacagaagagtgatcgagagactggcccaggagtag

SEQ ID NO: 10949 - DNA, 870 bp, synthetic construct
  misc_feature 1..870: note = Description of Artificial Sequence: Synthetic coding sequence
  source 1..870: mol_type = other DNA
atgaccgtgagcttccacaagtacggcgagtacttccccggcaccggcgacctgagagacatcggcgccggcaagggcaagtactacgccgtgaactaccccctgagagacggcatcgacgacgagagctacgaggccatcttcaagcccgtgatgagcaaggtgatggagatgttccagcccagcgccgtggtgctgcagtgcggcagcgacagcctgagcggcgacagactgggctgcttcaacctgaccatcaagggccacgccaagtgcgtggagttcgtgaagagcttcaacctgcccatgctgatgctgggcggcggcggctacaccatcagaaacgtggccagatgctggacctacgagaccgccgtggccctggacaccgagatccccaacgagctgccctacaacgactacttcgagtacttcggccccgacttcaagctgcacatcagccccagcaacatgaccaaccagaacaccaacgagtacctggagaagatcaagcagagactgttcgagaacctgagaatgctgccccacgcccccggcgtgcagatgcaggccatccccgaggacgccatccccgaggagagcggcgacgaggacgaggacgaccccgacaagagaatcagcatctgcagcagcgacaagagaatcgcctgcgaggaggagttcagcgacagcgaggaggagggcgagggcggcagaaagaacagcagcaacttcaagaaggccaagagagtgaagaccgaggacgagaaggagaaggaccccgaggagaagaaggaggtgaccgaggaggagaagaccaaggaggagaagcccgaggccaagggcgtgaaggaggaggtgaagctggcctag

SEQ ID NO: 10950 - DNA, 1449 bp, synthetic construct
  misc_feature 1..1449: note = Description of Artificial Sequence: Synthetic coding sequence
  source 1..1449: mol_type = other DNA
atggcccagacccagggcaccagaagaaaggtgtgctactactacgacggcgacgtgggcaactactactacggccagggccaccccatgaagccccacagaatcagaatgacccacaacctgctgctgaactacggcctgtacagaaagatggagatctacagaccccacaaggccaacgccgaggagatgaccaagtaccacagcgacgactacatcaagttcctgagaagcatcagacccgacaacatgagcgagtacagcaagcagatgcagagattcaacgtgggcgaggactgccccgtgttcgacggcctgttcgagttctgccagctgagcaccggcggcagcgtggccagcgccgtgaagctgaacaagcagcagaccgacatcgccgtgaactgggccggcggcctgcaccacgccaagaagagcgaggccagcggcttctgctacgtgaacgacatcgtgctggccatcctggagctgctgaagtaccaccagagagtgctgtacatcgacatcgacatccaccacggcgacggcgtggaggaggccttctacaccaccgacagagtgatgaccgtgagcttccacaagtacggcgagtacttccccggcaccggcgacctgagagacatcggcgccggcaagggcaagtactacgccgtgaactaccccctgagagacggcatcgacgacgagagctacgaggccatcttcaagcccgtgatgagcaaggtgatggagatgttccagcccagcgccgtggtgctgcagtgcggcagcgacagcctgagcggcgacagactgggctgcttcaacctgaccatcaagggccacgccaagtgcgtggagttcgtgaagagcttcaacctgcccatgctgatgctgggcggcggcggctacaccatcagaaacgtggccagatgctggacctacgagaccgccgtggccctggacaccgagatccccaacgagctgccctacaacgactacttcgagtacttcggccccgacttcaagctgcacatcagccccagcaacatgaccaaccagaacaccaacgagtacctggagaagatcaagcagagactgttcgagaacctgagaatgctgccccacgcccccggcgtgcagatgcaggccatccccgaggacgccatccccgaggagagcggcgacgaggacgaggacgaccccgacaagagaatcagcatctgcagcagcgacaagagaatcgcctgcgaggaggagttcagcgacagcgaggaggagggcgagggcggcagaaagaacagcagcaacttcaagaaggccaagagagtgaagaccgaggacgagaaggagaaggaccccgaggagaagaaggaggtgaccgaggaggagaagaccaaggaggagaagcccgaggccaagggcgtgaaggaggaggtgaagctggcctag

SEQ ID NO: 10951 - DNA, 636 bp, synthetic construct
  misc_feature 1..636: note = Description of Artificial Sequence: Synthetic coding sequence
  source 1..636: mol_type = other DNA
atggcccagacccagggcaccagaagaaaggtgtgctactactacgacggcgacgtgggcaactactactacggccagggccaccccatgaagccccacagaatcagaatgacccacaacctgctgctgaactacggcctgtacagaaagatggagatctacagaccccacaaggccaacgccgaggagatgaccaagtaccacagcgacgactacatcaagttcctgagaagcatcagacccgacaacatgagcgagtacagcaagcagatgcagagaagcagcgccgtgaagctgaacaagcagcagaccgacatcgccgtgaactgggccggcggcctgcaccacgccaagaagagcgaggccagcggcttctgctacgtgaacgacatcgtgctggccatcctggagctgctgaagtaccaccagagagtgctgtacatcgacatcgacatccaccacggcgacggcgtggaggaggccttctacaccaccgacagagtgatgaccgtgagcttccacaagtacggcgagtacttccccggcaccggcgacctgagagacatcggcgccggcaagggcaagtactacgccgtgaactaccccctgagagacggcatcgacgacgagagctag

SEQ ID NO: 10952 - DNA, 1044 bp, synthetic construct
  misc_feature 1..1044: note = Description of Artificial Sequence: Synthetic coding sequence
  source 1..1044: mol_type = other DNA
atgctgcacaccacccagctgtaccagcacgtgcccgagaccagatggcccatcgtgtacagccccagatacaacatcaccttcatgggcctggagaagctgcaccccttcgacgccggcaagtggggcaaggtgatcaacttcctgaaggaggagaagctgctgagcgacagcatgctggtggaggccagagaggccagcgaggaggacctgctggtggtgcacaccagaagatacctgaacgagctgaagtggagcttcgccgtggccaccatcaccgagatcccccccgtgatcttcctgcccaacttcctggtgcagagaaaggtgctgagacccctgagaacccagaccggcggcaccatcatggccggcaagctggccgtggagagaggctgggccatcaacgtgggcggcggcttccaccactgcagcagcgacagaggcggcggcttctgcgcctacgccgacatcaccctggccatcaagttcctgttcgagagagtggagggcatcagcagagccaccatcatcgacctggacgcccaccagggcaacggccacgagagagacttcatggacgacaagagagtgtacatcatggacgtgtacaacagacacatctaccccggcgacagattcgccaagcaggccatcagaagaaaggtggagctggagtggggcaccgaggacgacgagtacctggacaaggtggagagaaacatcaagaagagcctgcaggagcacctgcccgacgtggtggtgtacaacgccggcaccgacatcctggagggcgacagactgggcggcctgagcatcagccccgccggcatcgtgaagagagacgagctggtgttcagaatggtgagaggcagaagagtgcccatcctgatggtgaccagcggcggctaccagaagagaaccgccagaatcatcgccgacagcatcctgaacctgttcggcctgggcctgatcggccccgagagccccagcgtgagcgcccagaacagcgacacccccctgctgccccccgccgtgccctag

SEQ ID NO: 10953 - DNA, 711 bp, synthetic construct
  misc_feature 1..711: note = Description of Artificial Sequence: Synthetic coding sequence
  source 1..711: mol_type = other DNA
atgggcctggagaagctgcaccccttcgacgccggcaagtggggcaaggtgatcaacttcctgaaggaggagaagctgctgagcgacagcatgctggtggaggccagagaggccagcgaggaggacctgctggtggtgcacaccagaagatacctgaacgagctgaagtggagcttcgccgtggccaccatcaccgagatcccccccgtgatcttcctgcccaacttcctggtgcagagaaaggtgctgagacccctgagaacccagaccggcggcaccatcatgggcgtggccagcaccaccgcccccgccaccgtggccggcgccagcgtgcccatgagaaccagcagaagccccagcagcttctgcctgagcgtgtggagagccagccccggcctgcccagcctgatcctgatgcccatcagagccatgggcatgagcgagaccagctggaccaccagcgtgtgcaccagctggatgagcaccaccgccaccagcacccagggcaccgccctgcccagcagacccagcggcggcagatggagctggagcggcgcccagagaatgatgagcacctggatcagatggagaggcaccagcagaaaccccagcagaagcacctgccccacctggtggtacaccatgcaggcccccaccagcagcagaggcaccgccctgggcggctgccccagcgcccagagagccagctag

SEQ ID NO: 10954 - DNA, 960 bp, synthetic construct
  misc_feature 1..960: note = Description of Artificial Sequence: Synthetic coding sequence
  source 1..960: mol_type = other DNA
atgggcctggagaagctgcaccccttcgacgccggcaagtggggcaaggtgatcaacttcctgaaggaggagaagctgctgagcgacagcatgctggtggaggccagagaggccagcgaggaggacctgctggtggtgcacaccagaagatacctgaacgagctgaagtggagcttcgccgtggccaccatcaccgagatcccccccgtgatcttcctgcccaacttcctggtgcagagaaaggtgctgagacccctgagaacccagaccggcggcaccatcatggccggcaagctggccgtggagagaggctgggccatcaacgtgggcggcggcttccaccactgcagcagcgacagaggcggcggcttctgcgcctacgccgacatcaccctggccatcaagttcctgttcgagagagtggagggcatcagcagagccaccatcatcgacctggacgcccaccagggcaacggccacgagagagacttcatggacgacaagagagtgtacatcatggacgtgtacaacagacacatctaccccggcgacagattcgccaagcaggccatcagaagaaaggtggagctggagtggggcaccgaggacgacgagtacctggacaaggtggagagaaacatcaagaagagcctgcaggagcacctgcccgacgtggtggtgtacaacgccggcaccgacatcctggagggcgacagactgggcggcctgagcatcagccccgccggcatcgtgaagagagacgagctggtgttcagaatggtgagaggcagaagagtgcccatcctgatggtgaccagcggcggctaccagaagagaaccgccagaatcatcgccgacagcatcctgaacctgttcggcctgggcctgatcggccccgagagccccagcgtgagcgcccagaacagcgacacccccctgctgccccccgccgtgccctag

SEQ ID NO: 10955 - DNA, 468 bp, synthetic construct
  misc_feature 1..468: note = Description of Artificial Sequence: Synthetic coding sequence
  source 1..468: mol_type = other DNA
atggacgacaagagagtgtacatcatggacgtgtacaacagacacatctaccccggcgacagattcgccaagcaggccatcagaagaaaggtggagctggagtggggcaccgaggacgacgagtacctggacaaggtggagagaaacatcaagaagagcctgcaggagcacctgcccgacgtggtggtgtacaacgccggcaccgacatcctggagggcgacagactgggcggcctgagcatcagccccgccggcatcgtgaagagagacgagctggtgttcagaatggtgagaggcagaagagtgcccatcctgatggtgaccagcggcggctaccagaagagaaccgccagaatcatcgccgacagcatcctgaacctgttcggcctgggcctgatcggccccgagagccccagcgtgagcgcccagaacagcgacacccccctgctgccccccgccgtgccctag

SEQ ID NO: 10956 - DNA, 891 bp, synthetic construct
  misc_feature 1..891: note = Description of Artificial Sequence: Synthetic coding sequence
  source 1..891: mol_type = other DNA
atgggcctggagaagctgcaccccttcgacgccggcaagtggggcaaggtgatcaacttcctgaaggaggagaagctgctgagcgacagcatgctggtggaggccagagaggccagcgaggaggacctgctggtggtgcacaccagaagatacctgaacgagctgaagagaaaggtgctgagacccctgagaacccagaccggcggcaccatcatggccggcaagctggccgtggagagaggctgggccatcaacgtgggcggcggcttccaccactgcagcagcgacagaggcggcggcttctgcgcctacgccgacatcaccctggccatcaagttcctgttcgagagagtggagggcatcagcagagccaccatcatcgacctggacgcccaccagggcaacggccacgagagagacttcatggacgacaagagagtgtacatcatggacgtgtacaacagacacatctaccccggcgacagattcgccaagcaggccatcagaagaaaggtggagctggagtggggcaccgaggacgacgagtacctggacaaggtggagagaaacatcaagaagagcctgcaggagcacctgcccgacgtggtggtgtacaacgccggcaccgacatcctggagggcgacagactgggcggcctgagcatcagccccgccggcatcgtgaagagagacgagctggtgttcagaatggtgagaggcagaagagtgcccatcctgatggtgaccagcggcggctaccagaagagaaccgccagaatcatcgccgacagcatcctgaacctgttcggcctgggcctgatcggccccgagagccccagcgtgagcgcccagaacagcgacacccccctgctgccccccgccgtgccctag

SEQ ID NO: 10957 - DNA, 1377 bp, synthetic construct
  misc_feature 1..1377: note = Description of Artificial Sequence: Synthetic coding sequence
  source 1..1377: mol_type = other DNA
atgaagccccacagaatcagaatgacccacaacctgctgctgaactacggcctgtacagaaagatggagatctacagaccccacaaggccaccgccgaggagatgaccaagtaccacagcgacgagtacatcaagttcctgagaagcatcagacccgacaacatgagcgagtacagcaagcagatgcagagattcaacgtgggcgaggactgccccgtgttcgacggcctgttcgagttctgccagctgagcaccggcggcagcgtggccggcgccgtgaagctgaacagacagcagaccgacatggccgtgaactgggccggcggcctgcaccacgccaagaagagcgaggccagcggcttctgctacgtgaacgacatcgtgctggccatcctggagctgctgaagtaccaccagagagtgctgtacatcgacatcgacatccaccacggcgacggcgtggaggaggccttctacaccaccgacagagtgatgaccgtgagcttccacaagtacggcgagtacttccccggcaccggcgacctgagagacatcggcgccggcaagggcaagtactacgccgtgaacttccccatgagagacggcatcgacgacgagagctacggccagatcttcaagcccatcatcagcaaggtgatggagatgtaccagcccagcgccgtggtgctgcagtgcggcgccgacagcctgagcggcgacagactgggctgcttcaacctgaccgtgaagggccacgccaagtgcgtggaggtggtgaagaccttcaacctgcccctgctgatgctgggcggcggcggctacaccatcagaaacgtggccagatgctggacctacgagaccgccgtggccctggactgcgagatccccaacgagctgccctacaacgactacttcgagtacttcggccccgacttcaagctgcacatcagccccagcaacatgaccaaccagaacacccccgagtacatggagaagatcaagcagagactgttcgagaacctgagaatgctgccccacgcccccggcgtgcagatgcaggccatccccgaggacgccgtgcacgaggacagcggcgacgaggacggcgaggaccccgacaagagaatcagcatcagagccagcgacaagagaatcgcctgcgacgaggagttcagcgacagcgaggacgagggcgagggcggcagaagaaacgtggccgaccacaagaagggcgccaagaaggccagaatcgaggaggacaagaaggagaccgaggacaagaagaccgacgtgaaggaggaggacaagagcaaggacaacagcggcgagaagaccgacaccaagggcaccaagagcgagcagctgagcaacccctag

SEQ ID NO: 10958 - DNA, 1749 bp, synthetic construct
  misc_feature 1..1749: note = Description of Artificial Sequence: Synthetic coding sequence
  source 1..1749: mol_type = other DNA
atgagaagccccccctgcggcctgctgagatggttcggcggccccctgctggccagctggtgcagatgccacctgagattcagagccttcggcaccagcgccggctggtacagagccttccccgcccccccccccctgctgccccccgcctgccccagccccagagactacagaccccacgtgagcctgagccccttcctgagcagacccagcagaggcggcagcagcagcagcagcagcagcagaagaagaagccccgtggccgccgtggccggcgagcccatggcctacagccagggcggcggcaagaagaaggtgtgctactactacgacggcgacatcggcaactactactacggccagggccaccccatgaagccccacagaatcagaatgacccacaacctgctgctgaactacggcctgtacagaaagatggagatctacagaccccacaaggccaccgccgaggagatgaccaagtaccacagcgacgagtacatcaagttcctgagaagcatcagacccgacaacatgagcgagtacagcaagcagatgcagagattcaacgtgggcgaggactgccccgtgttcgacggcctgttcgagttctgccagctgagcaccggcggcagcgtggccggcgccgtgaagctgaacagacagcagaccgacatggccgtgaactgggccggcggcctgcaccacgccaagaagagcgaggccagcggcttctgctacgtgaacgacatcgtgctggccatcctggagctgctgaagtaccaccagagagtgctgtacatcgacatcgacatccaccacggcgacggcgtggaggaggccttctacaccaccgacagagtgatgaccgtgagcttccacaagtacggcgagtacttccccggcaccggcgacctgagagacatcggcgccggcaagggcaagtactacgccgtgaacttccccatgagagacggcatcgacgacgagagctacggccagatcttcaagcccatcatcagcaaggtgatggagatgtaccagcccagcgccgtggtgctgcagtgcggcgccgacagcctgagcggcgacagactgggctgcttcaacctgaccgtgaagggccacgccaagtgcgtggaggtggtgaagaccttcaacctgcccctgctgatgctgggcggcggcggctacaccatcagaaacgtggccagatgctggacctacgagaccgccgtggccctggactgcgagatccccaacgagctgccctacaacgactacttcgagtacttcggccccgacttcaagctgcacatcagccccagcaacatgaccaaccagaacacccccgagtacatggagaagatcaagcagagactgttcgagaacctgagaatgctgccccacgcccccggcgtgcagatgcaggccatccccgaggacgccgtgcacgaggacagcggcgacgaggacggcgaggaccccgacaagagaatcagcatcagagccagcgacaagagaatcgcctgcgacgaggagttcagcgacagcgaggacgagggcgagggcggcagaagaaacgtggccgaccacaagaagggcgccaagaaggccagaatcgaggaggacaagaaggagaccgaggacaagaagaccgacgtgaaggaggaggacaagagcaaggacaacagcggcgagaagaccgacaccaagggcaccaagagcgagcagctgagcaacccctag

SEQ ID NO: 10959 - DNA, 1467 bp, synthetic construct
  misc_feature 1..1467: note = Description of Artificial Sequence: Synthetic coding sequence
  source 1..1467: mol_type = other DNA
atggcctacagccagggcggcggcaagaagaaggtgtgctactactacgacggcgacatcggcaactactactacggccagggccaccccatgaagccccacagaatcagaatgacccacaacctgctgctgaactacggcctgtacagaaagatggagatctacagaccccacaaggccaccgccgaggagatgaccaagtaccacagcgacgagtacatcaagttcctgagaagcatcagacccgacaacatgagcgagtacagcaagcagatgcagagattcaacgtgggcgaggactgccccgtgttcgacggcctgttcgagttctgccagctgagcaccggcggcagcgtggccggcgccgtgaagctgaacagacagcagaccgacatggccgtgaactgggccggcggcctgcaccacgccaagaagagcgaggccagcggcttctgctacgtgaacgacatcgtgctggccatcctggagctgctgaagtaccaccagagagtgctgtacatcgacatcgacatccaccacggcgacggcgtggaggaggccttctacaccaccgacagagtgatgaccgtgagcttccacaagtacggcgagtacttccccggcaccggcgacctgagagacatcggcgccggcaagggcaagtactacgccgtgaacttccccatgagagacggcatcgacgacgagagctacggccagatcttcaagcccatcatcagcaaggtgatggagatgtaccagcccagcgccgtggtgctgcagtgcggcgccgacagcctgagcggcgacagactgggctgcttcaacctgaccgtgaagggccacgccaagtgcgtggaggtggtgaagaccttcaacctgcccctgctgatgctgggcggcggcggctacaccatcagaaacgtggccagatgctggacctacgagaccgccgtggccctggactgcgagatccccaacgagctgccctacaacgactacttcgagtacttcggccccgacttcaagctgcacatcagccccagcaacatgaccaaccagaacacccccgagtacatggagaagatcaagcagagactgttcgagaacctgagaatgctgccccacgcccccggcgtgcagatgcaggccatccccgaggacgccgtgcacgaggacagcggcgacgaggacggcgaggaccccgacaagagaatcagcatcagagccagcgacaagagaatcgcctgcgacgaggagttcagcgacagcgaggacgagggcgagggcggcagaagaaacgtggccgaccacaagaagggcgccaagaaggccagaatcgaggaggacaagaaggagaccgaggacaagaagaccgacgtgaaggaggaggacaagagcaaggacaacagcggcgagaagaccgacaccaagggcaccaagagcgagcagctgagcaacccctag

SEQ ID NO: 10960 - DNA, 1377 bp, synthetic construct; identical to SEQ ID NO: 10957
  misc_feature 1..1377: note = Description of Artificial Sequence: Synthetic coding sequence
  source 1..1377: mol_type = other DNA

SEQ ID NO: 10961 - DNA, 1287 bp, synthetic construct
  misc_feature 1..1287: note = Description of Artificial Sequence: Synthetic coding sequence
  source 1..1287: mol_type = other DNA
atggccaagaccgtggcctacttctacgaccccgacgtgggcaacttccactacggcgccggccaccccatgaagccccacagactggccctgacccacagcctggtgctgcactacggcctgtacaagaagatgatcgtgttcaagccctaccaggccagccagcacgacatgtgcagattccacagcgaggactacatcgacttcctgcagagagtgagccccaccaacatgcagggcttcaccaagagcctgaacgccttcaacgtgggcgacgactgccccgtgttccccggcctgttcgagttctgcagcagatacaccggcgccagcctgcagggcgccacccagctgaacaacaagatctgcgacatcgccatcaactgggccggcggcctgcaccacgccaagaagttcgaggccagcggcttctgctacgtgaacgacatcgtgatcggcatcctggagctgctgaagtaccaccccagagtgctgtacatcgacatcgacatccaccacggcgacggcgtgcaggaggccttctacctgaccgacagagtgatgaccgtgagcttccacaagtacggcaactacttcttccccggcaccggcgacatgtacgaggtgggcgccgagagcggcagatactactgcctgaacgtgcccctgagagacggcatcgacgaccagagctacaagcacctgttccagcccgtgatcaaccaggtggtggacttctaccagcccacctgcatcgtgctgcagtgcggcgccgacagcctgggctgcgacagactgggctgcttcaacctgagcatcagaggccacggcgagtgcgtggagtacgtgaagagcttcaacatccccctgctggtgctgggcggcggcggctacaccgtgagaaacgtggccagatgctggacctacgagaccagcctgctggtggaggaggccatcagcgaggagctgccctacagcgagtacttcgagtacttcgcccccgacttcaccctgcaccccgacgtgagcaccagaatcgagaaccagaacagcagacagtacctggaccagatcagacagaccatcttcgagaacctgaagatgctgaaccacgcccccagcgtgcagatccacgacgtgcccgccgacctgctgacctacgacagaaccgacgaggccgacgccgaggagagaggccccgaggagaactacagcagacccgaggcccccaacgagttctacgacggcgaccacgacaacgacaaggagagcgacgtggagatctag

SEQ ID NO: 10962 - DNA, 3255 bp, synthetic construct
  misc_feature 1..3255: note = Description of Artificial Sequence: Synthetic coding sequence
  source 1..3255: mol_type = other DNA
atgagcagccagagccaccccgacggcctgagcggcagagaccagcccgtggagctgctgaaccccgccagagtgaaccacatgcccagcaccgtggacgtggccaccgccctgcccctgcaggtggcccccagcgccgtgcccatggacctgagactggaccaccagttcagcctgcccgtggccgagcccgccctgagagagcagcagctgcagcaggagctgctggccctgaagcagaagcagcagatccagagacagatcctgatcgccgagttccagagacagcacgagcagctgagcagacagcacgaggcccagctgcacgagcacatcaagcagcagcaggagatgctggccatgaagcaccagcaggagctgctggagcaccagagaaagctggagagacacagacaggagcaggagctggagaagcagcacagagagcagaagctgcagcagctgaagaacaaggagaagggcaaggagagcgccgtggccagcaccgaggtgaagatgaagctgcaggagttcgtgctgaacaagaagaaggccctggcccacagaaacctgaaccactgcatcagcagcgaccccagatactggtacggcaagacccagcacagcagcctggaccagagcagccccccccagagcggcgtgagcaccagctacaaccaccccgtgctgggcatgtacgacgccaaggacgacttccccctgagaaagaccgccagcgagcccaacctgaagctgagaagcagactgaagcagaaggtggccgagagaagaagcagccccctgctgagaagaaaggacggccccgtggtgaccgccctgaagaagagacccctggacgtgaccgacagcgcctgcagcagcgcccccggcagcggccccagcagccccaacaacagcagcggcagcgtgagcgccgagaacggcatcgcccccgccgtgcccagcatccccgccgagaccagcctggcccacagactggtggccagagagggcagcgccgcccccctgcccctgtacaccagccccagcctgcccaacatcaccctgggcctgcccgccaccggccccagcgccggcaccgccggccagcaggacgccgagagactgaccctgcccgccctgcagcagagactgagcctgttccccggcacccacctgaccccctacctgagcaccagccccctggagagagacggcggcgccgcccacagccccctgctgcagcacatggtgctgctggagcagccccccgcccaggcccccctggtgaccggcctgggcgccctgcccctgcacgcccagagcctggtgggcgccgacagagtgagccccagcatccacaagctgagacagcacagacccctgggcagaacccagagcgcccccctgccccagaacgcccaggccctgcagcacctggtgatccagcagcagcaccagcagttcctggagaagcacaagcagcagttccagcagcagcagctgcagatgaacaagatcatccccaagcccagcgagcccgccagacagcccgagagccaccccgaggagaccgaggaggagctgagagagcaccaggccctgctggacgagccctacctggacagactgcccggccagaaggaggcccacgcccaggccggcgtgcaggtgaagcaggagcccatcgagagcgacgaggaggaggccgagccccccagagaggtggagcccggccagagacagcccagcgagcaggagctgctgttcagacagcaggccctgctgctggagcagcagagaatccaccagctgagaaactaccaggccagcatggaggccgccggcatccccgtgagcttcggcggccacagacccctgagcagagcccagagcagccccgccagcgccaccttccccgtgagcgtgcaggagccccccaccaagcccagattcaccaccggcctggtgtacgacaccctgatgctgaagcaccagtgcacctgcggcagcagcagcagccaccccgagcacgccggcagaatccagagcatctggagcagactgcaggagaccggcctgagaggcaagtgcgagtgcatcagaggcagaaaggccaccctggaggagctgcagaccgtgcacagcgaggcccacaccctgctgtacggcaccaaccccctgaacagacagaagctggacagcaagaagctgctgggcagcctggccagcgtgttcgtgagactgccctgcggcggcgtgggcgtggacagcgacaccatctggaacgaggtgcacagcgccggcgccgccagactggccgtgggctgcgtggtggagctggtgttcaaggtggccaccggcgagctgaagaacggcttcgccgtggtgagaccccccggccaccacgccgaggagagcacccccatgggcttctgctacttcaacagcgtggccgtggccgccaagctgctgcagcagagactgagcgtgagcaagatcctgatcgtggactgggacgtgcaccacggcaacggcacccagcaggccttctacagcgaccccagcgtgctgtacatgagcctgcacagatacgacgacggcaacttcttccccggcagcggcgcccccgacgaggtgggcaccggccccggcgtgggcttcaacgtgaacatggccttcaccggcggcctggacccccccatgggcgacgccgagtacctggccgccttcagaaccgtggtgatgcccatcgccagcgagttcgcccccgacgtggtgctggtgagcagcggcttcgacgccgtggagggccaccccacccccctgggcggctacaacctgagcgccagatgcttcggctacctgaccaagcagctgatgggcctggccggcggcagaatcgtgctggccctggagggcggccacgacctgaccgccatctgcgacgccagcgaggcctgcgtgagcgccctgctgggcaacgagctggaccccctgcccgagaaggtgctgcagcagagacccaacgccaacgccgtgagaagcatggagaaggtgatggagatccacagcaagtactggagatgcctgcagagaaccaccagcaccgccggcagaagcctgatcgaggcccagacctgcgagaacgaggaggccgagaccgtgaccgccatggccagcctgagcgtgggcgtgaagcccgccgagaagagacccgacgaggagcccatggaggaggagccccccctgtag

SEQ ID NO: 10963 - DNA, 1941 bp, synthetic construct
  misc_feature 1..1941: note = Description of Artificial Sequence: Synthetic coding sequence
  source 1..1941: mol_type = other DNA
atgctggccatgaagcaccagcaggagctgctggagcaccagagaaagctggagagacacagacaggagcaggagctggagaagcagcacagagagcagaagctgcagcagctgaagaacaaggagaagggcaaggagagcgccgtggccagcaccgaggtgaagatgaagctgcaggagttcgtgctgaacaagaagaaggccctggcccacagaaacctgaaccactgcatcagcagcgaccccagatactggtacggcaagacccagcacagcagcctggaccagagcagccccccccagagcggcgtgagcaccagctacaaccaccccgtgctgggcatgtacgacgccaaggacgacttccccctgagaaagaccgccagcgagcccaacctgaagctgagaagcagactgaagcagaaggtggccgagagaagaagcagccccctgctgagaagaaaggacggccccgtggtgaccgccctgaagaagagacccctggacgtgaccgacagcgcctgcagcagcgcccccggcagcggccccagcagccccaacaacagcagcggcagcgtgagcgccgagaacggcatcgcccccgccgtgcccagcatccccgccgagaccagcctggcccacagactggtggccagagagggcagcgccgcccccctgcccctgtacaccagccccagcctgcccaacatcaccctgggcctgcccgccaccggccccagcgccggcaccgccggccagcaggacgccgagagactgaccctgcccgccctgcagcagagactgagcctgttccccggcacccacctgaccccctacctgagcaccagccccctggagagagacggcggcgccgcccacagccccctgctgcagcacatggtgctgctggagcagccccccgcccaggcccccctggtgaccggcctgggcgccctgcccctgcacgcccagagcctggtgggcgccgacagagtgagccccagcatccacaagctgagacagcacagacccctgggcagaacccagagcgcccccctgccccagaacgcccaggccctgcagcacctggtgatccagcagcagcaccagcagttcctggagaagcacaagcagcagttccagcagcagcagctgcagatgaacaagatcatccccaagcccagcgagcccgccagacagcccgagagccaccccgaggagaccgaggaggagctgagagagcaccaggccctgctggacgagccctacctggacagactgcccggccagaaggaggcccacgcccaggccggcgtgcaggtgaagcaggagcccatcgagagcgacgaggaggaggccgagccccccagagaggtggagcccggccagagacagcccagcgagcaggagctgctgttcagacagcaggccctgctgctggagcagcagagaatccaccagctgagaaactaccaggccagcatggaggccgccggcatccccgtgagcttcggcggccacagacccctgagcagagcccagagcagccccgccagcgccaccttccccgtgagcgtgcaggagccccccaccaagcccagattcaccaccggcctggtgtacgacaccctgatgctgaagcaccagtgcacctgcggcagcagcagcagccaccccgagcacgccggcagaatccagagcatctggagcagactgcaggagaccggcctgagaggcaagtgcgagtgcatcagaggcagaaaggccaccctggaggagctgcagaccgtgcacagcgaggcccacaccctgctgtacggcaccaaccccctgaacagacagaagctggacagcaagaagctgctgggcagcctggccagcgtgttcgtgagactgccctgcggcggcgtgggcgtgagcgtgcccctgatgtgcaagtag

SEQ ID NO: 10964 - DNA, 2919 bp, synthetic construct
  misc_feature 1..2919: note = Description of Artificial Sequence: Synthetic coding sequence
  source 1..2919: mol_type = other DNA
atgctggccatgaagcaccagcaggagctgctggagcaccagagaaagctggagagacacagacaggagcaggagctggagaagcagcacagagagcagaagctgcagcagctgaagaacaaggagaagggcaaggagagcgccgtggccagcaccgaggtgaagatgaagctgcaggagttcgtgctgaacaagaagaaggccctggcccacagaaacctgaaccactgcatcagcagcgaccccagatactggtacggcaagacccagcacagcagcctggaccagagcagccccccccagagcggcgtgagcaccagctacaaccaccccgtgctgggcatgtacgacgccaaggacgacttccccctgagaaagaccgccagcgagcccaacctgaagctgagaagcagactgaagcagaaggtggccgagagaagaagcagccccctgctgagaagaaaggacggccccgtggtgaccgccctgaagaagagacccctggacgtgaccgacagcgcctgcagcagcgcccccggcagcggccccagcagccccaacaacagcagcggcagcgtgagcgccgagaacggcatcgcccccgccgtgcccagcatccccgccgagaccagcctggcccacagactggtggccagagagggcagcgccgcccccctgcccctgtacaccagccccagcctgcccaacatcaccctgggcctgcccgccaccggccccagcgccggcaccgccggccagcaggacgccgagagactgaccctgcccgccctgcagcagagactgagcctgttccccggcacccacctgaccccctacctgagcaccagccccctggagagagacggcggcgccgcccacagccccctgctgcagcacatggtgctgctggagcagccccccgcccaggcccccctggtgaccgactggtacctgagcggcctgggcgccctgcccctgcacgcccagagcctggtgggcgccgacagagtgagccccagcatccacaagctgagacagcacagacccctgggcagaacccagagcgcccccctgccccagaacgcccaggccctgcagcacctggtgatccagcagcagcaccagcagttcctggagaagcacaagcagcagttccagcagcagcagctgcagatgaacaagatcatccccaagcccagcgagcccgccagacagcccgagagccaccccgaggagaccgaggaggagctgagagagcaccaggccctgctggacgagccctacctggacagactgcccggccagaaggaggcccacgcccaggccggcgtgcaggtgaagcaggagcccatcgagagcgacgaggaggaggccgagccccccagagaggtggagcccggccagagacagcccagcgagcaggagctgctgttcagacagcaggccctgctgctggagcagcagagaatccaccagctgagaaactaccaggccagcatggaggccgccggcatccccgtgagcttcggcggccacagacccctgagcagagcccagagcagccccgccagcgccaccttccccgtgagcgtgcaggagccccccaccaagcccagattcaccaccggcctggtgtacgacaccctgatgctgaagcaccagtgcacctgcggcagcagcagcagccaccccgagcacgccggcagaatccagagcatctggagcagactgcaggagaccggcctgagaggcaagtgcgagtgcatcagaggcagaaaggccaccctggaggagctgcagaccgtgcacagcgaggcccacaccctgctgtacggcaccaaccccctgaacagacagaagctggacagcaagaagctgctgggcagcctggccagcgtgttcgtgagactgccctgcggcggcgtgggcgtggacagcgacaccatctggaacgaggtgcacagcgccggcgccgccagactggccgtgggctgcgtggtggagctggtgttcaaggtggccaccggcgagctgaagaacggcttcgccgtggtgagaccccccggccaccacgccgaggagagcacccccatgggcttctgctacttcaacagcgtggccgtggccgccaagctgctgcagcagagactgagcgtgagcaagatcctgatcgtggactgggacgtgcaccacggcaacggcacccagcaggccttctacagcgaccccagcgtgctgtacatgagcctgcacagatacgacgacggcaacttcttccccggcagcggcgcccccgacgaggtgggcaccggccccggcgtgggcttcaacgtgaacatggccttcaccggcggcctggacccccccatgggcgacgccgagtacctggccgccttcagaaccgtggtgatgcccatcgccagcgagttcgcccccgacgtggtgctggtgagcagcggcttcgacgccgtggagggccaccccacccccctgggcggctacaacctgagcgccagatgcttcggctacctgaccaagcagctgatgggcctggccggcggcagaatcgtgctggccctggagggcggccacgacctgaccgccatctgcgacgccagcgaggcctgcgtgagcgccctgctgggcaacgagctggaccccctgcccgagaaggtgctgcagcagagacccaacgccaacgccgtgagaagcatggagaaggtgatggagatccacagcaagtactggagatgcctgcagagaaccaccagcaccgccggcagaagcctgatcgaggcccagacctgcgagaacgaggaggccgagaccgtgaccgccatggccagcctgagcgtgggcgtgaagcccgccgagaagagacccgacgaggagcccatggaggaggagccccccctgtag

SEQ ID NO: 10965 - DNA, 2214 bp, synthetic construct
  misc_feature 1..2214: note = Description of Artificial Sequence: Synthetic coding sequence
  source 1..2214: mol_type = other DNA
atggacgtggccaccgccctgcccctgcaggtggcccccagcgccgtgcccatggacctgagactggaccaccagttcagcctgcccgtggccgagcccgccctgagagagcagcagctgcagcaggagctgctggccctgaagcagaagcagcagatccagagacagatcctgatcgccgagttccagagacagcacgagcagctgagcagacagcacgaggcccagctgcacgagcacatcaagcagcagcaggagatgctggccatgaagcaccagcaggagctgctggagcaccagagaaagctggagagacacagacaggagcaggagctggagaagcagcacagagagcagaagctgcagcagctgaagaacaaggagaagggcaaggagagcgccgtggccagcaccgaggtgaagatgaagctgcaggagttcgtgctgaacaagaagaaggccctggcccacagaaacctgaaccactgcatcagcagcgaccccagatactggtacggcaagacccagcacagcagcctggaccagagcagccccccccagagcggcgtgagcaccagctacaaccaccccgtgctgggcatgtacgacgccaaggacgacttccccctgagaaagaccgccagcgagcccaacctgaagctgagaagcagactgaagcagaaggtggccgagagaagaagcagccccctgctgagaagaaaggacggccccgtggtgaccgccctgaagaagagacccctggacgtgaccgacagcgcctgcagcagcgcccccggcagcggccccagcagccccaacaacagcagcggcagcgtgagcgccgagaacggcatcgcccccgccgtgcccagcatccccgccgagaccagcctggcccacagactggtggccagagagggcagcgccgcccccctgcccctgtacaccagccccagcctgcccaacatcaccctgggcctgcccgccaccggccccagcgccggcaccgccggccagcaggacgccgagagactgaccctgcccgccctgcagcagagactgagcctgttccccggcacccacctgaccccctacctgagcaccagccccctggagagagacggcggcgccgcccacagccccctgctgcagcacatggtgctgctggagcagccccccgcccaggcccccctggtgaccgactggtacctgagcggcctgggcgccctgcccctgcacgcccagagcctggtgggcgccgacagagtgagccccagcatccacaagctgagacagcacagacccctgggcagaacccagagcgcccccctgccccagaacgcccaggccctgcagcacctggtgatccagcagcagcaccagcagttcctggagaagcacaagcagcagttccagcagcagcagctgcagatgaacaagatcatccccaagcccagcgagcccgccagacagcccgagagccaccccgaggagaccgaggaggagctgagagagcaccaggccctgctggacgagccctacctggacagactgcccggccagaaggaggcccacgcccaggccggcgtgcaggtgaagcaggagcccatcgagagcgacgaggaggaggccgagccccccagagaggtggagcccggccagagacagcccagcgagcaggagctgctgttcagacagcaggccctgctgctggagcagcagagaatccaccagctgagaaactaccaggccagcatggaggccgccggcatccccgtgagcttcggcggccacagacccctgagcagagcccagagcagccccgccagcgccaccttccccgtgagcgtgcaggagccccccaccaagcccagattcaccaccggcctggtgtacgacaccctgatgctgaagcaccagtgcacctgcggcagcagcagcagccaccccgagcacgccggcagaatccagagcatctggagcagactgcaggagaccggcctgagaggcaagtgcgagtgcatcagaggcagaaaggccaccctggaggagctgcagaccgtgcacagcgaggcccacaccctgctgtacggcaccaaccccctgaacagacagaagctggacagcaagaagctgctgggcagcctggccagcgtgttcgtgagactgccctgcggcggcgtgggcgtgagcgtgcccctgatgtgcaagtag

SEQ ID NO: 10966 - DNA, 2007 bp, synthetic construct
  misc_feature 1..2007: note = Description of Artificial Sequence: Synthetic coding sequence
  source 1..2007: mol_type = other DNA
atggtgctgctggagcagccccccgcccaggcccccctggtgaccggcctgggcgccctgcccctgcacgcccagagcctggtgggcgccgacagagtgagccccagcatccacaagctgagacagcacagacccctgggcagaacccagagcgcccccctgccccagaacgcccaggccctgcagcacctggtgatccagcagcagcaccagcagttcctggagaagcacaagcagcagttccagcagcagcagctgcagatgaacaagatcatccccaagcccagcgagcccgccagacagcccgagagccaccccgaggagaccgaggaggagctgagagagcaccaggccctgctggacgagccctacctggacagactgcccggccagaaggaggcccacgcccaggccggcgtgcaggtgaagcaggagcccatcgagagcgacgaggaggaggccgagccccccagagaggtggagcccggccagagacagcccagcgagcaggagctgctgttcagacagcaggccctgctgctggagcagcagagaatccaccagctgagaaactaccaggccagcatggaggccgccggcatccccgtgagcttcggcggccacagacccctgagcagagcccagagcagccccgccagcgccaccttccccgtgagcgtgcaggagccccccaccaagcccagattcaccaccggcctggtgtacgacaccctgatgctgaagcaccagtgcacctgcggcagcagcagcagccaccccgagcacgccggcagaatccagagcatctggagcagactgcaggagaccggcctgagaggcaagtgcgagtgcatcagaggcagaaaggccaccctggaggagctgcagaccgtgcacagcgaggcccacaccctgctgtacggcaccaaccccctgaacagacagaagctggacagcaagaagctgctgggcagcctggccagcgtgttcgtgagactgccctgcggcggcgtgggcgtggacagcgacaccatctggaacgaggtgcacagcgccggcgccgccagactggccgtgggctgcgtggtggagctggtgttcaaggtggccaccggcgagctgaagaacggcttcgccgtggtgagaccccccggccaccacgccgaggagagcacccccatgggcttctgctacttcaacagcgtggccgtggccgccaagctgctgcagcagagactgagcgtgagcaagatcctgatcgtggactgggacgtgcaccacggcaacggcacccagcaggccttctacagcgaccccagcgtgctgtacatgagcctgcacagatacgacgacggcaacttcttccccggcagcggcgcccccgacgaggtgggcaccggccccggcgtgggcttcaacgtgaacatggccttcaccggcggcctggacccccccatgggcgacgccgagtacctggccgccttcagaaccgtggtgatgcccatcgccagcgagttcgcccccgacgtggtgctggtgagcagcggcttcgacgccgtggagggccaccccacccccctgggcggctacaacctgagcgccagatgcttcggctacctgaccaagcagctgatgggcctggccggcggcagaatcgtgctggccctggagggcggccacgacctgaccgccatctgcgacgccagcgaggcctgcgtgagcgccctgctgggcaacgagctggaccccctgcccgagaaggtgctgcagcagagacccaacgccaacgccgtgagaagcatggagaaggtgatggagatccacagcaagtactggagatgcctgcagagaaccaccagcaccgccggcagaagcctgatcgaggcccagacctgcgagaacgaggaggccgagaccgtgaccgccatggccagcctgagcgtgggcgtgaagcccgccgagaagagacccgacgaggagcccatggaggaggagccccccctgtag

SEQ ID NO: 10967 - DNA, 90 bp, synthetic construct
  misc_feature 1..90: note = Description of Artificial Sequence: Synthetic coding sequence
  source 1..90: mol_type = other DNA
atgagcagccagagccaccccgacggcctgagcggcagagaccagcccgtggagctgctgaaccccgccagagtgaaccacatgccctag

SEQ ID NO: 10968 - DNA, 3648 bp, synthetic construct
  misc_feature 1..3648: note = Description of Artificial Sequence: Synthetic coding sequence
  source 1..3648: mol_type = other DNA
atgaccagcaccggccaggacagcaccaccaccagacagagaagaagcagacagaacccccagagccccccccaggacagcagcgtgaccagcaagagaaacatcaagaagggcgccgtgcccagaagcatccccaacctggccgaggtgaagaagaagggcaagatgaagaagctgggccaggccatggaggaggacctgatcgtgggcctgcagggcatggacctgaacctggaggccgaggccctggccggcaccggcctggtgctggacgagcagctgaacgagttccactgcctgtgggacgacagcttccccgagggccccgagagactgcacgccatcaaggagcagctgatccaggagggcctgctggacagatgcgtgagcttccaggccagattcgccgagaaggaggagctgatgctggtgcacagcctggagtacatcgacctgatggagaccacccagtacatgaacgagggcgagctgagagtgctggccgacacctacgacagcgtgtacctgcaccccaacagctacagctgcgcctgcctggccagcggcagcgtgctgagactggtggacgccgtgctgggcgccgagatcagaaacggcatggccatcatcagaccccccggccaccacgcccagcacagcctgatggacggctactgcatgttcaaccacgtggccgtggccgccagatacgcccagcagaagcacagaatcagaagagtgctgatcgtggactgggacgtgcaccacggccagggcacccagttcaccttcgaccaggaccccagcgtgctgtacttcagcatccacagatacgagcagggcagattctggccccacctgaaggccagcaactggagcaccaccggcttcggccagggccagggctacaccatcaacgtgccctggaaccaggtgggcatgagagacgccgactacatcgccgccttcctgcacgtgctgctgcccgtggccctggagttccagccccagctggtgctggtggccgccggcttcgacgccctgcagggcgaccccaagggcgagatggccgccacccccgccggcttcgcccagctgacccacctgctgatgggcctggccggcggcaagctgatcctgagcctggagggcggctacaacctgagagccctggccgagggcgtgagcgccagcctgcacaccctgctgggcgacccctgccccatgctggagagccccggcgccccctgcagaagcgcccaggccagcgtgagctgcgccctggaggccctggagcccttctgggaggtgctggtgagaagcaccgagaccgtggagagagacaacatggaggaggacaacgtggaggagagcgaggaggagggcccctgggagccccccgtgctgcccatcctgacctggcccgtgctgcagagcagaaccggcctggtgtacgaccagaacatgatgaaccactgcaacctgtgggacagccaccaccccgaggtgccccagagaatcctgagaatcatgtgcagactggaggagctgggcctggccggcagatgcctgaccctgacccccagacccgccaccgaggccgagctgctgacctgccacagcgccgagtacgtgggccacctgagagccaccgagaagatgaagaccagagagctgcacagagagagcagcaacttcgacagcatctacatctgccccagcaccttcgcctgcgcccagctggccaccggcgccgcctgcagactggtggaggccgtgctgagcggcgaggtgctgaacggcgccgccgtggtgagaccccccggccaccacgccgagcaggacgccgcctgcggcttctgcttcttcaacagcgtggccgtggccgccagacacgcccagaccatcagcggccacgccctgagaatcctgatcgtggactgggacgtgcaccacggcaacggcacccagcacatgttcgaggacgaccccagcgtgctgtacgtgagcctgcacagatacgaccacggcaccttcttccccatgggcgacgagggcgccagcagccagatcggcagagccgccggcaccggcttcaccgtgaacgtggcctggaacggccccagaatgggcgacgccgactacctggccgcctggcacagactggtgctgcccatcgcctacgagttcaaccccgagctggtgctggtgagcgccggcttcgacgccgccagaggcgaccccctgggcggctgccaggtgagccccgagggctacgcccacctgacccacctgctgatgggcctggccagcggcagaatcatcctgatcctggagggcggctacaacctgaccagcatcagcgagagcatggccgcctgcaccagaagcctgctgggcgaccccccccccctgctgaccctgcccagaccccccctgagcggcgccctggccagcatcaccgagaccatccaggtgcacagaagatactggagaagcctgagagtgatgaaggtggaggacagagagggccccagcagcagcaagctggtgaccaagaaggccccccagcccgccaagcccagactggccgagagaatgaccaccagagagaagaaggtgctggaggccggcatgggcaaggtgaccagcgccagcttcggcgaggagagcacccccggccagaccaacagcgagaccgccgtggtggccctgacccaggaccagcccagcgaggccgccaccggcggcgccaccctggcccagaccatcagcgaggccgccatcggcggcgccatgctgggccagaccaccagcgaggaggccgtgggcggcgccacccccgaccagaccaccagcgaggagaccgtgggcggcgccatcctggaccagaccaccagcgaggacgccgtgggcggcgccaccctgggccagaccaccagcgaggaggccgtgggcggcgccaccctggcccagaccaccagcgaggccgccatggagggcgccaccctggaccagaccaccagcgaggaggcccccggcggcaccgagctgatccagacccccctggccagcagcaccgaccaccagaccccccccaccagccccgtgcagggcaccaccccccagatcagccccagcaccctgatcggcagcctgagaaccctggagctgggcagcgagagccagggcgccagcgagagccaggcccccggcgaggagaacctgctgggcgaggccgccggcggccaggacatggccgacagcatgctgatgcagggcagcagaggcctgaccgaccaggccatcttctacgccgtgacccccctgccctggtgcccccacctggtggccgtgtgccccatccccgccgccggcctggacgtgacccagccctgcggcgactgcggcaccatccaggagaactgggtgtgcctgagctgctaccaggtgtactgcggcagatacatcaacggccacatgctgcagcaccacggcaacagcggccaccccctggtgctgagctacatcgacctgagcgcctggtgctactactgccaggcctacgtgcaccaccaggccctgctggacgtgaagaacatcgcccaccagaacaagttcggcgaggacatgccccacccccactag

SEQ ID NO: 10969 - DNA, 633 bp, synthetic construct
  misc_feature 1..633: note = Description of Artificial Sequence: Synthetic coding sequence
  source 1..633: mol_type = other DNA
atgaccagcaccggccaggacagcaccaccaccagacagagaagaagcagacagaacccccagagccccccccaggacagcagcgtgaccagcaagagaaacatcaagaagggcgccgtgcccagaagcatccccaacctggccgaggtgaagaagaagggcaagatgaagaagctgggccaggccatggaggaggacctgatcgtgggcctgcagggcatggacctgaacctggaggccgaggccctggccggcaccggcctggtgctggacgagcagctgaacgagttccactgcctgtgggacgacagcttccccgagggccccgagagactgcacgccatcaaggagcagctgatccaggagggcctgctggacagatgcgtgagcttccaggccagattcgccgagaaggaggagctgatgctggtgcacagcctggagtacatcgacctgatggagaccacccagtacatgaacgagggcgagctgagagtgctggccgacacctacgacagcgtgtacctgcaccccaacagctacagctgcgcctgcctggccagcggcagcgtgctgagactggtggacgccgtgctgggcgccgagatcagaaacggcatggccatcatctag

SEQ ID NO: 10970 - DNA, 3648 bp, synthetic construct; identical to SEQ ID NO: 10968
  misc_feature 1..3648: note = Description of Artificial Sequence: Synthetic coding sequence
  source 1..3648: mol_type = other DNA

SEQ ID NO: 10971 - DNA, 633 bp, synthetic construct; identical to SEQ ID NO: 10969
  misc_feature 1..633: note = Description of Artificial Sequence: Synthetic coding sequence
  source 1..633: mol_type = other DNA

SEQ ID NO: 10972 - DNA, 891 bp, synthetic construct
  misc_feature 1..891: note = Description of Artificial Sequence: Synthetic coding sequence
  source 1..891: mol_type = other DNA
atgaagaagctgggccaggccatggaggaggacctgatcgtgggcctgcagggcatggacctgaacctggaggccgaggccctggccggcaccggcctggtgctggacgagcagctgaacgagttccactgcctgtgggacgacagcttccccgagggccccgagagactgcacgccatcaaggagcagctgatccaggagggcctgctggacagatgcgtgagcttccaggccagattcgccgagaaggaggagctgatgctggtgcacagcctggagtacatcgacctgatggagaccacccagtacatgaacgagggcgagctgagagtgctggccgacacctacgacagcgtgtacctgcaccccaacagctacagctgcgcctgcctggccagcggcagcgtgctgagactggtggacgccgtgctgggcgccgagatcagaaacggcatggccatcatcagaccccccggccaccacgcccagcacagcctgatggacggctactgcatgttcaaccacgtggccgtggccgccagatacgcccagcagaagcacagaatcagaagagtgctgatcgtggactgggacgtgcaccacggccagggcacccagttcaccttcgaccaggaccccagcgtgctgtacttcagcatccacagatacgagcagggcagattctggccccacctgaaggccagcaactggagcaccaccggcttcggccagggccagggctacaccatcaacgtgccctggaaccaggtgggcatgagagacgccgactacatcgccgccttcctgcacgtgctgctgcccgtggccctggaggtgctgggcatctggggcgtgctgggcggcggcgtggccctgaaggtgagactgtag

SEQ ID NO: 10973 - DNA, 429 bp, synthetic construct
  misc_feature 1..429: note = Description of Artificial Sequence: Synthetic coding sequence
  source 1..429: mol_type = other DNA
atgaccagcaccggccaggacagcaccaccaccagacagagaagaagcagacagaacccccagagccccccccaggacagcagcgtgaccagcaagagaaacatcaagaagggcgccgtgcccagaagcatccccaacctggccgaggtgaagaagaagggcaagatgaagaagctgggccaggccatggaggaggacctgatcgtgggcctgcagggcatggacctgaacctggaggccgaggccctggccggcaccggcctggtgctggacgagcagctgaacgagttccactgcctgtgggacgacagcttccccgagggccccgagagactgcacgccatcaaggagcagctgatccaggagggcctgctggacagatgcgtgagcttccaggccagattcgccgagaaggaggagctgatgtag

SEQ ID NO: 10974 - DNA, 810 bp, synthetic construct
  misc_feature 1..810: note = Description of Artificial Sequence: Synthetic coding sequence
  source 1..810: mol_type = other DNA
atgaccagcaccggccaggacagcaccaccaccagacagagaagaagcagacagaacccccagagccccccccaggacagcagcgtgaccagcaagagaaacatcaagaagggcgccgtgcccagaagcatccccaacctggccgaggtgaagaagaagggcaagatgaagaagctgggccaggccatggaggaggacctgatcgtgggcctgcagggcatggacctgaacctggaggccgaggccctggccggcaccggcctggtgctggacgagcagctgaacgagttccactgcctgtgggacgacagcttccccgagggccccgagagactgcacgccatcaaggagcagctgatccaggagggcctgctggacagatgcgtgagcttccaggccagattcgccgagaaggaggagctgatgctggtgcacagcctggagtacatcgacctgatggagaccacccagtacatgaacgagggcgagctgagagtgctggccgacacctacgacagcgtgtacctgcaccccaacagctacagctgcgcctgcctggccagcggcagcgtgctgagactggtggacgccgtgctgggcgccgagatcagaaacggcatggccatcatcagaccccccggccaccacgcccagcacagcctgatggacggctactgcatgttcaaccacgtggccgtggccgccagatacgcccagcagaagcacagaatcagaagagtgctgatcgtggactgggacgtgcaccacggccagggcacccagttcaccttcgaccaggaccccagatag

SEQ ID NO: 10975 - DNA, 2454 bp, synthetic construct
  misc_feature 1..2454: note = Description of Artificial Sequence: Synthetic coding sequence
  source 1..2454: mol_type = other DNA
atgaccagcaccggccaggacagcaccaccaccagacagagaagaagcagacagaacccccagagccccccccaggacagcagcgtgaccagcaagagaaacatcaagaagggcgccgtgcccagaagcatccccaacctggccgaggtgaagaagaagggcaagatgaagaagctgggccaggccatggaggaggacctgatcgtgggcctgcagggcatggacctgaacctggaggccgaggccctggccggcaccggcctggtgctggacgagcagctgaacgagttccactgcctgtgggacgacagcttccccgagggccccgagagactgcacgccatcaaggagcagctgatccaggagggcctgctggacagatgcgtgagcttccaggccagattcgccgagaaggaggagctgatgctggtgcacagcctggagtacatcgacctgatggagaccacccagtacatgaacgagggcgagctgagagtgctggccgacacctacgacagcgtgtacctgcaccccaacagctacagctgcgcctgcctggccagcggcagcgtgctgagactggtggacgccgtgctgggcgccgagatcagaaacggcatggccatcatcagaccccccggccaccacgcccagcacagcctgatggacggctactgcatgttcaaccacgtggccgtggccgccagatacgcccagcagaagcacagaatcagaagagtgctgatcgtggactgggacgtgcaccacggccagggcacccagttcaccttcgaccaggaccccagcgtgctgtacttcagcatccacagatacgagcagggcagattctggccccacctgaaggccagcaactggagcaccaccggcttcggccagggccagggctacaccatcaacgtgccctggaaccaggtgggcatgagagacgccgactacatcgccgccttcctgcacgtgctgctgcccgtggccctggagttccagccccagctggtgctggtggccgccggcttcgacgccctgcagggcgaccccaagggcgagatggccgccacccccgccggcttcgcccagctgacccacctgctgatgggcctggccggcggcaagctgatcctgagcctggagggcggctacaacctgagagccctggccgagggcgtgagcgccagcctgcacaccctgctgggcgacccctgccccatgctggagagccccggcgccccctgcagaagcgcccaggccagcgtgagctgcgccctggaggccctggagcccttctgggaggtgctggtgagaagcaccgagaccgtggagagagacaacatggaggaggacaacgtggaggagagcgaggaggagggcccctgggagccccccgtgctgcccatcctgacctggcccgtgctgcagagcagaaccggcctggtgtacgaccagaacatgatgaaccactgcaacctgtgggacagccaccaccccgaggtgccccagagaatcctgagaatcatgtgcagactggaggagctgggcctggccggcagatgcctgaccctgacccccagacccgccaccgaggccgagctgctgacctgccacagcgccgagtacgtgggccacctgagagccaccgagaagatgaagaccagagagctgcacagagagagcagcaacttcgacagcatctacatctgccccagcaccttcgcctgcgcccagctggccaccggcgccgcctgcagactggtggaggccgtgctgagcggcgaggtgctgaacggcgccgccgtggtgagaccccccggccaccacgccgagcaggacgccgcctgcggcttctgcttcttcaacagcgtggccgtggccgccagacacgcccagaccatcagcggccacgccctgagaatcctgatcgtggactgggacgtgcaccacggcaacggcacccagcacatgttcgaggacgaccccagcgtgctgtacgtgagcctgcacagatacgaccacggcaccttcttccccatgggcgacgagggcgccagcagccagatcggcagagccgccggcaccggcttcaccgtgaacgtggcctggaacggccccagaatgggcgacgccgactacctggccgcctggcacagactggtgctgcccatcgcctacgagttcaaccccgagctggtgctggtgagcgccggcttcgacgccgccagaggcgaccccctgggcggctgccaggtgagccccgagggctacgcccacctgaccctgcccatcgcctgcctgagaggcaccaccacccccgcccagaaggagagaggcgccgcccagtggccccaggagggcgccgacatcatgagaatcaccctggccggcggcgagctgaccggcagacacggcaaggtggcctacgtgatcaagtacaagctgtag

SEQ ID NO: 10976 - DNA, 156 bp, synthetic construct
  misc_feature 1..156: note = Description of Artificial Sequence: Synthetic coding sequence
  source 1..156: mol_type = other DNA
atgaccagcaccggccaggacagcaccaccaccagacagagaagaagcagacagaacccccagagccccccccaggacagcagcgtgaccagcaagagaaacatcaagaagggcgccgtgcccagaagcatccccaacctggccgaggtgaagtag

SEQ ID NO: 10977 - DNA, 516 bp, synthetic construct
  misc_feature 1..516: note = Description of Artificial Sequence: Synthetic coding sequence
  source 1..516: mol_type = other DNA
atgaccagcaccggccaggacagcaccaccaccagacagagaagaagcagacagaacccccagagccccccccaggacagcagcgtgaccagcaagagaaacatcaagaagggcgccgtgcccagaagcatccccaacctggccgaggtgaagaagaagggcaagatgaagaagctgggccaggccatggaggaggacctgatcgtgggcctgcagggcatggacctgaacctggaggccgaggccctggccggcaccggcctggtgctggacgagcagctgaacgagttccactgcctgtgggacgacagcttccccgagggccccgagagactgcacgccatcaaggagcagctgatccaggagggcctgctggacagatgcgtgagcttccaggccagattcgccgagaaggaggagctgatgctggtgcacagcctggagtacatcgacctgatggagaccacccagtacatgaacgagggcgagctgagagtgctggccgacacctactag

SEQ ID NO: 10978 - DNA, 486 bp, synthetic construct
  misc_feature 1..486: note = Description of Artificial Sequence: Synthetic coding sequence
  source 1..486: mol_type = other DNA
atgaccagcaccggccaggacagcaccaccaccagacagagaagaagcagacagaacccccagagccccccccaggacagcagcgtgaccagcaagagaaacatcaagaagggcgccgtgcccagaagcatccccaacctggccgaggtgaagaagaagggcaagatgaagaagctgggccaggccatggaggaggacctgatcgtgggcctgcagggcatggacctgaacctggaggccgaggccctggccggcaccggcctggtgctggacgagcagctgaacgagttccactgcctgtgggacgacagcttccccgagggccccgagagactgcacgccatcaaggagcagctgatccaggagggcctgctggacagatgcgtgagcttccaggccagattcgccgagaaggaggagctgatgctggtgcacagcctggagtacatcgacctgatggagaccacccagtacatgaacgagtag

SEQ ID NO: 10979 - DNA, 504 bp, synthetic construct
  misc_feature 1..504: note = Description of Artificial Sequence: Synthetic coding sequence
  source 1..504: mol_type = other DNA
atgaccagcaccggccaggacagcaccaccaccagacagagaagaagcagacagaacccccagagccccccccaggacagcagcgtgaccagcaagagaaacatcaagaagggcgccgtgcccagaagcatccccaacctggccgaggtgaagaagaagggcaagatgaagaagctgggccaggccatggaggaggacctgatcgtgggcctgcagggcatggacctgaacctggaggccgaggccctggccggcaccggcctggtgctggacgagcagctgaacgagttccactgcctgtgggacgacagcttccccgagggccccgagagactgcacgccatcaaggagcagctgatccaggagggcctgctggacagatgcgtgagcttccaggccagattcgccgagaaggaggagctgatgctggtgcacagcctggagtacatcgacctgatggagaccacccagtacatgaacgagggcgagctgagagtgctgtag

SEQ ID NO: 10980 - DNA, 3690 bp, synthetic construct
  misc_feature 1..3690: note = Description of Artificial Sequence: Synthetic coding sequence
  source 1..3690: mol_type = other DNA
atgagcggcgccaacagaggcagaggccaggccagcagcaccatgaccagcaccggccaggacagcaccaccaccagacagagaagaagcagacagaacccccagagccccccccaggacagcagcgtgaccagcaagagaaacatcaagaagggcgccgtgcccagaagcatccccaacctggccgaggtgaagaagaagggcaagatgaagaagctgggccaggccatggaggaggacctgatcgtgggcctgcagggcatggacctgaacctggaggccgaggccctggccggcaccggcctggtgctggacgagcagctgaacgagttccactgcctgtgggacgacagcttccccgagggccccgagagactgcacgccatcaaggagcagctgatccaggagggcctgctggacagatgcgtgagcttccaggccagattcgccgagaaggaggagctgatgctggtgcacagcctggagtacatcgacctgatggagaccacccagtacatgaacgagggcgagctgagagtgctggccgacacctacgacagcgtgtacctgcaccccaacagctacagctgcgcctgcctggccagcggcagcgtgctgagactggtggacgccgtgctgggcgccgagatcagaaacggcatggccatcatcagaccccccggccaccacgcccagcacagcctgatggacggctactgcatgttcaaccacgtggccgtggccgccagatacgcccagcagaagcacagaatcagaagagtgctgatcgtggactgggacgtgcaccacggccagggcacccagttcaccttcgaccaggaccccagcgtgctgtacttcagcatccacagatacgagcagggcagattctggccccacctgaaggccagcaactggagcaccaccggcttcggccagggccagggctacaccatcaacgtgccctggaaccaggtgggcatgagagacgccgactacatcgccgccttcctgcacgtgctgctgcccgtggccctggagttccagccccagctggtgctggtggccgccggcttcgacgccctgcagggcgaccccaagggcgagatggccgccacccccgccggcttcgcccagctgacccacctgctgatgggcctggccggcggcaagctgatcctgagcctggagggcggctacaacctgagagccctggccgagggcgtgagcgccagcctgcacaccctgctgggcgacccctgccccatgctggagagccccggcgccccctgcagaagcgcccaggccagcgtgagctgcgccctggaggccctggagcccttctgggaggtgctggtgagaagcaccgagaccgtggagagagacaacatggaggaggacaacgtggaggagagcgaggaggagggcccctgggagccccccgtgctgcccatcctgacctggcccgtgctgcagagcagaaccggcctggtgtacgaccagaacatgatgaaccactgcaacctgtgggacagccaccaccccgaggtgccccagagaatcctgagaatcatgtgcagactggaggagctgggcctggccggcagatgcctgaccctgacccccagacccgccaccgaggccgagctgctgacctgccacagcgccgagtacgtgggccacctgagagccaccgagaagatgaagaccagagagctgcacagagagagcagcaacttcgacagcatctacatctgccccagcaccttcgcctgcgcccagctggccaccggcgccgcctgcagactggtggaggccgtgctgagcggcgaggtgctgaacggcgccgccgtggtgagaccccccggccaccacgccgagcaggacgccgcctgcggcttctgcttcttcaacagcgtggccgtggccgccagacacgcccagaccatcagcggccacgccctgagaatcctgatcgtggactgggacgtgcaccacggcaacggcacccagcacatgttcgaggacgaccccagcgtgctgtacgtgagcctgcacagatacgaccacggcaccttcttccccatgggcgacgagggcgccagcagccagatcggcagagccgccggcaccggcttcaccgtgaacgtggcctggaacggccccagaatgggcgacgccgactacctggccgcctggcacagactggtgctgcccatcgcctacgagttcaaccccgagctggtgctggtgagcgccggcttcgacgccgccagaggcgaccccctgggcggctgccaggtgagccccgagggctacgcccacctgacccacctgctgatgggcctggccagcggcagaatcatcctgatcctggagggcggctacaacctgaccagcatcagcgagagcatggccgcctgcaccagaagcctgctgggcgaccccccccccctgctgaccctgcccagaccccccctgagcggcgccctggccagcatcaccgagaccatccaggtgcacagaagatactggagaagcctgagagtgatgaaggtggaggacagagagggccccagcagcagcaagctggtgaccaagaaggccccccagcccgccaagcccagactggccgagagaatgaccaccagagagaagaaggtgctggaggccggcatgggcaaggtgaccagcgccagcttcggcgaggagagcacccccggccagaccaacagcgagaccgccgtggtggccctgacccaggaccagcccagcgaggccgccaccggcggcgccaccctggcccagaccatcagcgaggccgccatcggcggcgccatgctgggccagaccaccagcgaggaggccgtgggcggcgccacccccgaccagaccaccagcgaggagaccgtgggcggcgccatcctggaccagaccaccagcgaggacgccgtgggcggcgccaccctgggccagaccaccagcgaggaggccgtgggcggcgccaccctggcccagaccaccagcgaggccgccatggagggcgccaccctggaccagaccaccagcgaggaggcccccggcggcaccgagctgatccagacccccctggccagcagcaccgaccaccagaccccccccaccagccccgtgcagggcaccaccccccagatcagccccagcaccctgatcggcagcctgagaaccctggagctgggcagcgagagccagggcgccagcgagagccaggcccccggcgaggagaacctgctgggcgaggccgccggcggccaggacatggccgacagcatgctgatgcagggcagcagaggcctgaccgaccaggccatcttctacgccgtgacccccctgccctggtgcccccacctggtggccgtgtgccccatccccgccgccggcctggacgtgacccagccctgcggcgactgcggcaccatccaggagaactgggtgtgcctgagctgctaccaggtgtactgcggcagatacatcaacggccacatgctgcagcaccacggcaacagcggccaccccctggtgctgagctacatcgacctgagcgcctggtgctactactgccaggcctacgtgcaccaccaggccctgctggacgtgaagaacatcgcccaccagaacaagttcggcgaggacatgccccacccccactag

SEQ ID NO: 10981 - DNA, 2976 bp, synthetic construct
  misc_feature 1..2976: note = Description of Artificial Sequence: Synthetic coding sequence
  source 1..2976: mol_type = other DNA
atgcacagccccggcgccgacggcacccaggtgagccccggcgcccactactgcagccccaccggcgccggctgccccagaccctgcgccgacacccccggcccccagccccagcccatggacctgagagtgggccagagaccccccgtggagcccccccccgagcccaccctgctggccctgcagagaccccagagactgcaccaccacctgttcctggccggcctgcagcagcagagaagcgtggagcccatgagactgagcatggacacccccatgcccgagctgcaggtgggcccccaggagcaggagctgagacagctgctgcacaaggacaagagcaagagaagcgccgtggccagcagcgtggtgaagcagaagctggccgaggtgatcctgaagaagcagcaggccgccctggagagaaccgtgcaccccaacagccccggcatcccctacagaaccctggagcccctggagaccgagggcgccaccagaagcatgctgagcagcttcctgccccccgtgcccagcctgcccagcgacccccccgagcacttccccctgagaaagaccgtgagcgagcccaacctgaagctgagatacaagcccaagaagagcctggagagaagaaagaaccccctgctgagaaaggagagcgccccccccagcctgagaagaagacccgccgagaccctgggcgacagcagccccagcagcagcagcacccccgccagcggctgcagcagccccaacgacagcgagcacggccccaaccccatcctgggcagcgaggccctgctgggccagagactgagactgcaggagaccagcgtggcccccttcgccctgcccaccgtgagcctgctgcccgccatcaccctgggcctgcccgcccccgccagagccgacagcgacagaagaacccaccccaccctgggccccagaggccccatcctgggcagcccccacacccccctgttcctgccccacggcctggagcccgaggccggcggcaccctgcccagcagactgcagcccatcctgctgctggaccccagcggcagccacgcccccctgctgaccgtgcccggcctgggccccctgcccttccacttcgcccagagcctgatgaccaccgagagactgagcggcagcggcctgcactggcccctgagcagaaccagaagcgagcccctgccccccagcgccaccgccccccccccccccggccccatgcagcccagactggagcagctgaagacccacgtgcaggtgatcaagagaagcgccaagcccagcgagaagcccagactgagacagatccccagcgccgaggacctggagaccgacggcggcggccccggccaggtggtggacgacggcctggagcacagagagctgggccacggccagcccgaggccagaggccccgcccccctgcagcagcacccccaggtgctgctgtgggagcagcagagactggccggcagactgcccagaggcagcaccggcgacaccgtgctgctgcccctggcccagggcggccacagacccctgagcagagcccagagcagccccgccgcccccgccagcctgagcgcccccgagcccgccagccaggccagagtgctgagcagcagcgagacccccgccagaaccctgcccttcaccaccggcctgatctacgacagcgtgatgctgaagcaccagtgcagctgcggcgacaacagcagacaccccgagcacgccggcagaatccagagcatctggagcagactgcaggagagaggcctgagaagccagtgcgagtgcctgagaggcagaaaggccagcctggaggagctgcagagcgtgcacagcgagagacacgtgctgctgtacggcaccaaccccctgagcagactgaagctggacaacggcaagctggccggcctgctggcccagagaatgttcgtgatgctgccctgcggcggcgtgggcgtggacaccgacaccatctggaacgagctgcacagcagcaacgccgccagatgggccgccggcagcgtgaccgacctggccttcaaggtggccagcagagagctgaagaacggcttcgccgtggtgagaccccccggccaccacgccgaccacagcaccgccatgggcttctgcttcttcaacagcgtggccatcgcctgcagacagctgcagcagcagagcaaggccagcaagatcctgatcgtggactgggacgtgcaccacggcaacggcacccagcagaccttctaccaggaccccagcgtgctgtacatcagcctgcacagacacgacgacggcaacttcttccccggcagcggcgccgtggacgaggtgggcgccggcagcggcgagggcttcaacgtgaacgtggcctgggccggcggcctggacccccccatgggcgaccccgagtacctggccgccttcagaatcgtggtgatgcccatcgccagagagttcagccccgacctggtgctggtgagcgccggcttcgacgccgccgagggccaccccgcccccctgggcggctaccacgtgagcgccaagtgcttcggctacatgacccagcagctgatgaacctggccggcggcgccgtggtgctggccctggagggcggccacgacctgaccgccatctgcgacgccagcgaggcctgcgtggccgccctgctgggcaacagagtggaccccctgagcgaggagggctggaagcagaagcccaacctgaacgccatcagaagcctggaggccgtgatcagagtgcacagcaagtactggggctgcatgcagagactggccagctgccccgacagctgggtgcccagagtgcccggcgccgacaaggaggaggtggaggccgtgaccgccctggccagcctgagcgtgggcatcctggccgaggacagacccagcgagcagctggtggaggaggaggagcccatgaacctgtag

SEQ ID NO: 10982 - DNA, 2865 bp, synthetic construct
  misc_feature 1..2865: note = Description of Artificial Sequence: Synthetic coding sequence
  source 1..2865: mol_type = other DNA
atgcacagccccggcgccgacggcacccaggtgagccccggcgcccactactgcagccccaccggcgccggctgccccagaccctgcgccgacacccccggcccccagccccagcccatggacctgagagtgggccagagaccccccgtggagcccccccccgagcccaccctgctggccctgcagagaccccagagactgcaccaccacctgttcctggccggcctgcagcagcagagaagcgtggagcccatgagactgagcatggacacccccatgcccgagctgcaggtgggcccccaggagcaggagctgagacagctgctgcacaaggacaagagcaagagaagcgccgtggccagcagcgtggtgaagcagaagctggccgaggtgatcctgaagaagcagcaggccgccctggagagaaccgtgcaccccaacagccccggcatcccctacagaaccctggagcccctggagaccgagggcgccaccagaagcatgctgagcagcttcctgccccccgtgcccagcctgcccagcgacccccccgagcacttccccctgagaaagaccgtgagcgagcccaacctgaagctgagatacaagcccaagaagagcctggagagaagaaagaaccccctgctgagaaaggagagcgccccccccagcctgagaagaagacccgccgagaccctgggcgacagcagccccagcagcagcagcacccccgccagcggctgcagcagccccaacgacagcgagcacggccccaaccccatcctgggcagcgaggccgacagcgacagaagaacccaccccaccctgggccccagaggccccatcctgggcagcccccacacccccctgttcctgccccacggcctggagcccgaggccggcggcaccctgcccagcagactgcagcccatcctgctgctggaccccagcggcagccacgcccccctgctgaccgtgcccggcctgggccccctgcccttccacttcgcccagagcctgatgaccaccgagagactgagcggcagcggcctgcactggcccctgagcagaaccagaagcgagcccctgccccccagcgccaccgccccccccccccccggccccatgcagcccagactggagcagctgaagacccacgtgcaggtgatcaagagaagcgccaagcccagcgagaagcccagactgagacagatccccagcgccgaggacctggagaccgacggcggcggccccggccaggtggtggacgacggcctggagcacagagagctgggccacggccagcccgaggccagaggccccgcccccctgcagcagcacccccaggtgctgctgtgggagcagcagagactggccggcagactgcccagaggcagcaccggcgacaccgtgctgctgcccctggcccagggcggccacagacccctgagcagagcccagagcagccccgccgcccccgccagcctgagcgcccccgagcccgccagccaggccagagtgctgagcagcagcgagacccccgccagaaccctgcccttcaccaccggcctgatctacgacagcgtgatgctgaagcaccagtgcagctgcggcgacaacagcagacaccccgagcacgccggcagaatccagagcatctggagcagactgcaggagagaggcctgagaagccagtgcgagtgcctgagaggcagaaaggccagcctggaggagctgcagagcgtgcacagcgagagacacgtgctgctgtacggcaccaaccccctgagcagactgaagctggacaacggcaagctggccggcctgctggcccagagaatgttcgtgatgctgccctgcggcggcgtgggcgtggacaccgacaccatctggaacgagctgcacagcagcaacgccgccagatgggccgccggcagcgtgaccgacctggccttcaaggtggccagcagagagctgaagaacggcttcgccgtggtgagaccccccggccaccacgccgaccacagcaccgccatgggcttctgcttcttcaacagcgtggccatcgcctgcagacagctgcagcagcagagcaaggccagcaagatcctgatcgtggactgggacgtgcaccacggcaacggcacccagcagaccttctaccaggaccccagcgtgctgtacatcagcctgcacagacacgacgacggcaacttcttccccggcagcggcgccgtggacgaggtgggcgccggcagcggcgagggcttcaacgtgaacgtggcctgggccggcggcctggacccccccatgggcgaccccgagtacctggccgccttcagaatcgtggtgatgcccatcgccagagagttcagccccgacctggtgctggtgagcgccggcttcgacgccgccgagggccaccccgcccccctgggcggctaccacgtgagcgccaagtgcttcggctacatgacccagcagctgatgaacctggccggcggcgccgtggtgctggccctggagggcggccacgacctgaccgccatctgcgacgccagcgaggcctgcgtggccgccctgctgggcaacagagtggaccccctgagcgaggagggctggaagcagaagcccaacctgaacgccatcagaagcctggaggccgtgatcagagtgcacagcaagtactggggctgcatgcagagactggccagctgccccgacagctgggtgcccagagtgcccggcgccgacaaggaggaggtggaggccgtgaccgccctggccagcctgagcgtgggcatcctggccgaggacagacccagcgagcagctggtggaggaggaggagcccatgaacctgtag

SEQ ID NO: 10983 - DNA, 3045 bp, synthetic construct
  misc_feature 1..3045: note = Description of Artificial Sequence: Synthetic coding sequence
  source 1..3045: mol_type = other DNA
atgagcgacctgagaaagagagagctgggcgccctgttcaccagcagaggcaccggcggcgtggagtgggacggcacccaggtgagccccggcgcccactactgcagccccaccggcgccggctgccccagaccctgcgccgacacccccggcccccagccccagcccatggacctgagagtgggccagagaccccccgtggagcccccccccgagcccaccctgctggccctgcagagaccccagagactgcaccaccacctgttcctggccggcctgcagcagcagagaagcgtggagcccatgagactgagcatggacacccccatgcccgagctgcaggtgggcccccaggagcaggagctgagacagctgctgcacaaggacaagagcaagagaagcgccgtggccagcagcgtggtgaagcagaagctggccgaggtgatcctgaagaagcagcaggccgccctggagagaaccgtgcaccccaacagccccggcatcccctacagaaccctggagcccctggagaccgagggcgccaccagaagcatgctgagcagcttcctgccccccgtgcccagcctgcccagcgacccccccgagcacttccccctgagaaagaccgtgagcgagcccaacctgaagctgagatacaagcccaagaagagcctggagagaagaaagaaccccctgctgagaaaggagagcgccccccccagcctgagaagaagacccgccgagaccctgggcgacagcagccccagcagcagcagcacccccgccagcggctgcagcagccccaacgacagcgagcacggccccaaccccatcctgggcagcgaggccctgctgggccagagactgagactgcaggagaccagcgtggcccccttcgccctgcccaccgtgagcctgctgcccgccatcaccctgggcctgcccgcccccgccagagccgacagcgacagaagaacccaccccaccctgggccccagaggccccatcctgggcagcccccacacccccctgttcctgccccacggcctggagcccgaggccggcggcaccctgcccagcagactgcagcccatcctgctgctggaccccagcggcagccacgcccccctgctgaccgtgcccggcctgggccccctgcccttccacttcgcccagagcctgatgaccaccgagagactgagcggcagcggcctgcactggcccctgagcagaaccagaagcgagcccctgccccccagcgccaccgccccccccccccccggccccatgcagcccagactggagcagctgaagacccacgtgcaggtgatcaagagaagcgccaagcccagcgagaagcccagactgagacagatccccagcgccgaggacctggagaccgacggcggcggccccggccaggtggtggacgacggcctggagcacagagagctgggccacggccagcccgaggccagaggccccgcccccctgcagcagcacccccaggtgctgctgtgggagcagcagagactggccggcagactgcccagaggcagcaccggcgacaccgtgctgctgcccctggcccagggcggccacagacccctgagcagagcccagagcagccccgccgcccccgccagcctgagcgcccccgagcccgccagccaggccagagtgctgagcagcagcgagacccccgccagaaccctgcccttcaccaccggcctgatctacgacagcgtgatgctgaagcaccagtgcagctgcggcgacaacagcagacaccccgagcacgccggcagaatccagagcatctggagcagactgcaggagagaggcctgagaagccagtgcgagtgcctgagaggcagaaaggccagcctggaggagctgcagagcgtgcacagcgagagacacgtgctgctgtacggcaccaaccccctgagcagactgaagctggacaacggcaagctggccggcctgctggcccagagaatgttcgtgatgctgccctgcggcggcgtgggcgtggacaccgacaccatctggaacgagctgcacagcagcaacgccgccagatgggccgccggcagcgtgaccgacctggccttcaaggtggccagcagagagctgaagaacggcttcgccgtggtgagaccccccggccaccacgccgaccacagcaccgccatgggcttctgcttcttcaacagcgtggccatcgcctgcagacagctgcagcagcagagcaaggccagcaagatcctgatcgtggactgggacgtgcaccacggcaacggcacccagcagaccttctaccaggaccccagcgtgctgtacatcagcctgcacagacacgacgacggcaacttcttccccggcagcggcgccgtggacgaggtgggcgccggcagcggcgagggcttcaacgtgaacgtggcctgggccggcggcctggacccccccatgggcgaccccgagtacctggccgccttcagaatcgtggtgatgcccatcgccagagagttcagccccgacctggtgctggtgagcgccggcttcgacgccgccgagggccaccccgcccccctgggcggctaccacgtgagcgccaagtgcttcggctacatgacccagcagctgatgaacctggccggcggcgccgtggtgctggccctggagggcggccacgacctgaccgccatctgcgacgccagcgaggcctgcgtggccgccctgctgggcaacagagtggaccccctgagcgaggagggctggaagcagaagcccaacctgaacgccatcagaagcctggaggccgtgatcagagtgcacatgggcgccctgaccctgagccagatccccggccacggcagcagccagcagcaggccggcggcgccttcagctggcccggccacccctgcagagccgccgtggtgatggtgaacaccggcgccgcctgcagcgcctggccccccgtgcagacccccggctgcctggagtgccagggcctgaccaagaagaagtggagacagtag

SEQ ID NO: 10984 - DNA, 402 bp, synthetic construct
  misc_feature 1..402: note = Description of Artificial Sequence: Synthetic coding sequence
  source 1..402: mol_type = other DNA
atgcacagccccggcgccggctgccccagaccctgcgccgacacccccggcccccagccccagcccatggacctgagagtgggccagagaccccccgtggagcccccccccgagcccaccctgctggccctgcagagaccccagagactgcaccaccacctgttcctggccggcctgcagcagcagagaagcgtggagcccatgagactgagcatggacacccccatgcccgagctgcaggtgggcccccaggagcaggagctgagacagctgctgcacaaggacaagagcaagagaagcgccgtggccagcagcgtggtgaagcagaagctggccgaggtgatcctgaagaagcagcaggccgccctggagagaaccgtgcaccccaacagccccggctag

SEQ ID NO: 10985 - DNA, 2859 bp, synthetic construct
  misc_feature 1..2859: note = Description of Artificial Sequence: Synthetic coding sequence
  source 1..2859: mol_type = other DNA
atggacctgagagtgggccagagaccccccgtggagcccccccccgagcccaccctgctggccctgcagagaccccagagactgcaccaccacctgttcctggccggcctgcagcagcagagaagcgtggagcccatgagactgagcatggacacccccatgcccgagctgcaggtgggcccccaggagcaggagctgagacagctgctgcacaaggacaagagcaagagaagcgccgtggccagcagcgtggtgaagcagaagctggccgaggtgatcctgaagaagcagcaggccgccctggagagaaccgtgcaccccaacagccccggcatcccctacagaaccctggagcccctggagaccgagggcgccaccagaagcatgctgagcagcttcctgccccccgtgcccagcctgcccagcgacccccccgagcacttccccctgagaaagaccgtgagcgagcccaacctgaagctgagatacaagcccaagaagagcctggagagaagaaagaaccccctgctgagaaaggagagcgccccccccagcctgagaagaagacccgccgagaccctgggcgacagcagccccagcagcagcagcacccccgccagcggctgcagcagccccaacgacagcgagcacggccccaaccccatcctgggcagcgaggccctgctgggccagagactgagactgcaggagaccagcgtggcccccttcgccctgcccaccgtgagcctgctgcccgccatcaccctgggcctgcccgcccccgccagagccgacagcgacagaagaacccaccccaccctgggccccagaggccccatcctgggcagcccccacacccccctgttcctgccccacggcctggagcccgaggccggcggcaccctgcccagcagactgcagcccatcctgctgctggaccccagcggcagccacgcccccctgctgaccgtgcccggcctgggccccctgcccttccacttcgcccagagcctgatgaccaccgagagactgagcggcagcggcctgcactggcccctgagcagaaccagaagcgagcccctgccccccagcgccaccgccccccccccccccggccccatgcagcccagactggagcagctgaagacccacgtgcaggtgatcaagagaagcgccaagcccagcgagaagcccagactgagacagatccccagcgccgaggacctggagaccgacggcggcggccccggccaggtggtggacgacggcctggagcacagagagctgggccacggccagcccgaggccagaggccccgcccccctgcagcagcacccccaggtgctgctgtgggagcagcagagactggccggcagactgcccagaggcagcaccggcgacaccgtgctgctgcccctggcccagggcggccacagacccctgagcagagcccagagcagccccgccgcccccgccagcctgagcgcccccgagcccgccagccaggccagagtgctgagcagcagcgagacccccgccagaaccctgcccttcaccaccggcctgatctacgacagcgtgatgctgaagcaccagtgcagctgcggcgacaacagcagacaccccgagcacgccggcagaatccagagcatctggagcagactgcaggagagaggcctgagaagccagtgcgagtgcctgagaggcagaaaggccagcctggaggagctgcagagcgtgcacagcgagagacacgtgctgctgtacggcaccaaccccctgagcagactgaagctggacaacggcaagctggccggcctgctggcccagagaatgttcgtgatgctgccctgcggcggcgtgggcgtggacaccgacaccatctggaacgagctgcacagcagcaacgccgccagatgggccgccggcagcgtgaccgacctggccttcaaggtggccagcagagagctgaagaacggcttcgccgtggtgagaccccccggccaccacgccgaccacagcaccgccatgggcttctgcttcttcaacagcgtggccatcgcctgcagacagctgcagcagcagagcaaggccagcaagatcctgatcgtggactgggacgtgcaccacggcaacggcacccagcagaccttctaccaggaccccagcgtgctgtacatcagcctgcacagacacgacgacggcaacttcttccccggcagcggcgccgtggacgaggtgggcgccggcagcggcgagggcttcaacgtgaacgtggcctgggccggcggcctggacccccccatgggcgaccccgagtacctggccgccttcagaatcgtggtgatgcccatcgccagagagttcagccccgacctggtgctggtgagcgccggcttcgacgccgccgagggccaccccgcccccctgggcggctaccacgtgagcgccaagtgcttcggctacatgacccagcagctgatgaacctggccggcggcgccgtggtgctggccctggagggcggccacgacctgaccgccatctgcgacgccagcgaggcctgcgtggccgccctgctgggcaacagagtggaccccctgagcgaggagggctggaagcagaagcccaacctgaacgccatcagaagcctggaggccgtgatcagagtgcacagcaagtactggggctgcatgcagagactggccagctgccccgacagctgggtgcccagagtgcccggcgccgacaaggaggaggtggaggccgtgaccgccctggccagcctgagcgtgggcatcctggccgaggacagacccagcgagcagctggtggaggaggaggagcccatgaacctgtag

SEQ ID NO: 10986 - DNA, 2925 bp, synthetic construct
  misc_feature 1..2925: note = Description of Artificial Sequence: Synthetic coding sequence
  source 1..2925: mol_type = other DNA
atgcacagccccggcgccggctgccccagaccctgcgccgacacccccggcccccagccccagcccatggacctgagagtgggccagagaccccccgtggagcccccccccgagcccaccctgctggccctgcagagaccccagagactgcaccaccacctgttcctggccggcctgcagcagcagagaagcgtggagcccatgagactgagcatggacacccccatgcccgagctgcaggtgggcccccaggagcaggagctgagacagctgctgcacaaggacaagagcaagagaagcgccgtggccagcagcgtggtgaagcagaagctggccgaggtgatcctgaagaagcagcaggccgccctggagagaaccgtgcaccccaacagccccggcatcccctacagaaccctggagcccctggagaccgagggcgccaccagaagcatgctgagcagcttcctgccccccgtgcccagcctgcccagcgacccccccgagcacttccccctgagaaagaccgtgagcgagcccaacctgaagctgagatacaagcccaagaagagcctggagagaagaaagaaccccctgctgagaaaggagagcgccccccccagcctgagaagaagacccgccgagaccctgggcgacagcagccccagcagcagcagcacccccgccagcggctgcagcagccccaacgacagcgagcacggccccaaccccatcctgggcagcgaggccctgctgggccagagactgagactgcaggagaccagcgtggcccccttcgccctgcccaccgtgagcctgctgcccgccatcaccctgggcctgcccgcccccgccagagccgacagcgacagaagaacccaccccaccctgggccccagaggccccatcctgggcagcccccacacccccctgttcctgccccacggcctggagcccgaggccggcggcaccctgcccagcagactgcagcccatcctgctgctggaccccagcggcagccacgcccccctgctgaccgtgcccggcctgggccccctgcccttccacttcgcccagagcctgatgaccaccgagagactgagcggcagcggcctgcactggcccctgagcagaaccagaagcgagcccctgccccccagcgccaccgccccccccccccccggccccatgcagcccagactggagcagctgaagacccacgtgcaggtgatcaagagaagcgccaagcccagcgagaagcccagactgagacagatccccagcgccgaggacctggagaccgacggcggcggccccggccaggtggtggacgacggcctggagcacagagagctgggccacggccagcccgaggccagaggccccgcccccctgcagcagcacccccaggtgctgctgtgggagcagcagagactggccggcagactgcccagaggcagcaccggcgacaccgtgctgctgcccctggcccagggcggccacagacccctgagcagagcccagagcagccccgccgcccccgccagcctgagcgcccccgagcccgccagccaggccagagtgctgagcagcagcgagacccccgccagaaccctgcccttcaccaccggcctgatctacgacagcgtgatgctgaagcaccagtgcagctgcggcgacaacagcagacaccccgagcacgccggcagaatccagagcatctggagcagactgcaggagagaggcctgagaagccagtgcgagtgcctgagaggcagaaaggccagcctggaggagctgcagagcgtgcacagcgagagacacgtgctgctgtacggcaccaaccccctgagcagactgaagctggacaacggcaagctggccggcctgctggcccagagaatgttcgtgatgctgccctgcggcggcgtgggcgtggacaccgacaccatctggaacgagctgcacagcagcaacgccgccagatgggccgccggcagcgtgaccgacctggccttcaaggtggccagcagagagctgaagaacggcttcgccgtggtgagaccccccggccaccacgccgaccacagcaccgccatgggcttctgcttcttcaacagcgtggccatcgcctgcagacagctgcagcagcagagcaaggccagcaagatcctgatcgtggactgggacgtgcaccacggcaacggcacccagcagaccttctaccaggaccccagcgtgctgtacatcagcctgcacagacacgacgacggcaacttcttccccggcagcggcgccgtggacgaggtgggcgccggcagcggcgagggcttcaacgtgaacgtggcctgggccggcggcctggacccccccatgggcgaccccgagtacctggccgccttcagaatcgtggtgatgcccatcgccagagagttcagccccgacctggtgctggtgagcgccggcttcgacgccgccgagggccaccccgcccccctgggcggctaccacgtgagcgccaagtgcttcggctacatgacccagcagctgatgaacctggccggcggcgccgtggtgctggccctggagggcggccacgacctgaccgccatctgcgacgccagcgaggcctgcgtggccgccctgctgggcaacagagtggaccccctgagcgaggagggctggaagcagaagcccaacctgaacgccatcagaagcctggaggccgtgatcagagtgcacagcaagtactggggctgcatgcagagactggccagctgccccgacagctgggtgcccagagtgcccggcgccgacaaggaggaggtggaggccgtgaccgccctggccagcctgagcgtgggcatcctggccgaggacagacccagcgagcagctggtggaggaggaggagcccatgaacctgtag

SEQ ID NO: 10987 - DNA, 819 bp, synthetic construct
  misc_feature 1..819: note = Description of Artificial Sequence: Synthetic coding sequence
  source 1..819: mol_type = other DNA
atggaggagcccgaggagcccgccgacagcggccagagcctggtgcccgtgtacatctacagccccgagtacgtgagcatgtgcgacagcctggccaagatccccaagagagccagcatggtgcacagcctgatcgaggcctacgccctgcacaagcagatgagaatcgtgaagcccaaggtggccagcatggaggagatggccaccttccacaccgacgcctacctgcagcacctgcagaaggtgagccaggagggcgacgacgaccaccccgacagcatcgagtacggcctgggctacgactgccccgccaccgagggcatcttcgactacgccgccgccatcggcggcgccaccatcaccgccgcccagtgcctgatcgacggcatgtgcaaggtggccatcaactggagcggcggctggcaccacgccaagaaggacgaggccagcggcttctgctacctgaacgacgccgtgctgggcatcctgagactgagaagaaagttcgagagaatcctgtacgtggacctggacctgcaccacggcgacggcgtggaggacgccttcagcttcaccagcaaggtgatgaccgtgagcctgcacaagttcagccccggcttcttccccggcaagagcgacgtgagcgacgtgggcctgggcaagggcagatactacagcgtgaacgtgcccatccaggacggcatccaggacgagaagtactaccagatctgcgagagcgtgagaaccagctgccccaagagcagacccgtggaggccgccgccgccgcctgcctgccccacctgcacagcctggtgtag

SEQ ID NO: 10988 - DNA, 1134 bp, synthetic construct
  misc_feature 1..1134: note = Description of Artificial Sequence: Synthetic coding sequence
  source 1..1134: mol_type = other DNA
atggaggagcccgaggagcccgccgacagcggccagagcctggtgcccgtgtacatctacagccccgagtacgtgagcatgtgcgacagcctggccaagatccccaagagagccagcatggtgcacagcctgatcgaggcctacgccctgcacaagcagatgagaatcgtgaagcccaaggtggccagcatggaggagatggccaccttccacaccgacgcctacctgcagcacctgcagaaggtgagccaggagggcgacgacgaccaccccgacagcatcgagtacggcctgggctacgactgccccgccaccgagggcatcttcgactacgccgccgccatcggcggcgccaccatcaccgccgcccagtgcctgatcgacggcatgtgcaaggtggccatcaactggagcggcggctggcaccacgccaagaaggacgaggccagcggcttctgctacctgaacgacgccgtgctgggcatcctgagactgagaagaaagttcgagagaatcctgtacgtggacctggacctgcaccacggcgacggcgtggaggacgccttcagcttcaccagcaaggtgatgaccgtgagcctgcacaagttcagccccggcttcttccccggcaccggcgacgtgagcgacgtgggcctgggcaagggcagatactacagcgtgaacgtgcccatccaggacggcatccaggacgagaagtactaccagatctgcgagagcgtgctgaaggaggtgtaccaggccttcaaccccaaggccgtggtgctgcagctgggcgccgacaccatcgccggcgaccccatgtgcagcttcaacatgacccccgtgggcatcggcaagtgcctgaagtacatcctgcagtggcagctggccaccctgatcctgggcggcggcggctacaacctggccaacaccgccagatgctggacctacctgaccggcgtgatcctgggcaagaccctgagcagcgagatccccgaccacgagttcttcaccgcctacggccccgactacgtgctggagatcacccccagctgcagacccgacagaaacgagccccacagaatccagcagatcctgaactacatcaagggcaacctgaagcacgtggtgtag

SEQ ID NO: 10989 - DNA, 861 bp, synthetic construct
  misc_feature 1..861: note = Description of Artificial Sequence: Synthetic coding sequence
  source 1..861: mol_type = other DNA
atggaggagcccgaggagcccgccgacagcggccagagcctggtgcccgtgtacatctacagccccgagtacgtgagcatgtgcgacagcctggccaagatccccaagagagccagcatggtgcacagcctgatcgaggcctacgccctgcacaagcagatgagagacgaggccagcggcttctgctacctgaacgacgccgtgctgggcatcctgagactgagaagaaagttcgagagaatcctgtacgtggacctggacctgcaccacggcgacggcgtggaggacgccttcagcttcaccagcaaggtgatgaccgtgagcctgcacaagttcagccccggcttcttccccggcaccggcgacgtgagcgacgtgggcctgggcaagggcagatactacagcgtgaacgtgcccatccaggacggcatccaggacgagaagtactaccagatctgcgagagcgtgctgaaggaggtgtaccaggccttcaaccccaaggccgtggtgctgcagctgggcgccgacaccatcgccggcgaccccatgtgcagcttcaacatgacccccgtgggcatcggcaagtgcctgaagtacatcctgcagtggcagctggccaccctgatcctgggcggcggcggctacaacctggccaacaccgccagatgctggacctacctgaccggcgtgatcctgggcaagaccctgagcagcgagatccccgaccacgagttcttcaccgcctacggccccgactacgtgctggagatcacccccagctgcagacccgacagaaacgagccccacagaatccagcagatcctgaactacatcaagggcaacctgaagcacgtggtgtag

SEQ ID NO: 10990 - DNA, 549 bp, synthetic construct
  misc_feature 1..549: note = Description of Artificial Sequence: Synthetic coding sequence
  source 1..549: mol_type = other DNA
atgaccgtgagcctgcacaagttcagccccggcttcttccccggcaccggcgacgtgagcgacgtgggcctgggcaagggcagatactacagcgtgaacgtgcccatccaggacggcatccaggacgagaagtactaccagatctgcgagagcgtgctgaaggaggtgtaccaggccttcaaccccaaggccgtggtgctgcagctgggcgccgacaccatcgccggcgaccccatgtgcagcttcaacatgacccccgtgggcatcggcaagtgcctgaagtacatcctgcagtggcagctggccaccctgatcctgggcggcggcggctacaacctggccaacaccgccagatgctggacctacctgaccggcgtgatcctgggcaagaccctgagcagcgagatccccgaccacgagttcttcaccgcctacggccccgactacgtgctggagatcacccccagctgcagacccgacagaaacgagccccacagaatccagcagatcctgaactacatcaagggcaacctgaagcacgtggtgtag

SEQ ID NO: 10991 - DNA, 441 bp, synthetic construct
  misc_feature 1..441: note = Description of Artificial Sequence: Synthetic coding sequence
  source 1..441: mol_type = other DNA
atggaggagcccgaggagcccgccgacagcggccagagcctggtgcccgtgtacatctacagccccgagtacgtgagcatgtgcgacagcctggccaagatccccaagagagccagcatggtgcacagcctgatcgaggcctacgccctgcacaagcagatgagaatcgtgaagcccaaggtggccagcatggaggagatggccaccttccacaccgacgcctacctgcagcacctgcagaaggtgagccaggagggcgacgacgaccaccccgacagcatcgagtacggcctgggctacgactgccccgccaccgagggcatcttcgactacgccgccgccatcggcggcgccaccatcaccgccgcccagtgcctgatcgacggcatgtgcaaggtggccatcaactggagcggcggctggcaccacgccaagaagtag

SEQ ID NO: 10992 - DNA, 477 bp, synthetic construct
  misc_feature 1..477: note = Description of Artificial Sequence: Synthetic coding sequence
  source 1..477: mol_type = other DNA
atggaggagcccgaggagcccgccgacagcggccagagcctggtgcccgtgtacatctacagccccgagtacgtgagcatgtgcgacagcctggccaagatccccaagagagccagcatggtgcacagcctgatcgaggcctacgccctgcacaagcagatgagaatcgtgaagcccaaggtggccagcatggaggagatggccaccttccacaccgacgcctacctgcagcacctgcagaaggtgagccaggagggcgacgacgaccaccccgacagcatcgagtacggcctgggctacgactgccccgccaccgagggcatcttcgactacgccgccgccatcggcggcgccaccatcaccgccgcccagtgcctgatcgacggcatgtgcaaggtggccatcaactggagcggcggctggcaccacgccaagaaggagacctgcgtgtacgtggccctgtacaaggccttctag

SEQ ID NO: 10993 - DNA, 420 bp, synthetic construct
  misc_feature 1..420: note = Description of Artificial Sequence: Synthetic coding sequence
  source 1..420: mol_type = other DNA
atggaggagcccgaggagcccgccgacagcggccagagcctggtgcccgtgtacatctacagccccgagtacgtgagcatgtgcgacagcctggccaagatccccaagagagccagcatggtgcacagcctgatcgaggcctacgccctgcacaagcagatgagagacgaggccagcggcttctgctacctgaacgacgccgtgctgggcatcctgagactgagaagaaagttcgagagaatcctgtacgtggacctggacctgcaccacggcgacggcaccggcgacgtgagcgacgtgggcctgggcaagggcagatactacagcgtgaacgtgcccatccaggacggcatccaggacgagaagtactaccagatctgcgagagatacgagccccccgcccccaaccccggcctgtag

SEQ ID NO: 10994 - DNA, 771 bp, synthetic construct
  misc_feature 1..771: note = Description of Artificial Sequence: Synthetic coding sequence
  source 1..771: mol_type = other DNA
atggaggagcccgaggagcccgccgacagcggccagagcctggtgcccgtgtacatctacagccccgagtacgtgagcatgtgcgacagcctggccaagatccccaagagagccagcatggtgcacagcctgatcgaggcctacgccctgcacaagcagatgagaatcgtgaagcccaaggtggccagcatggaggagatggccaccttccacaccgacgcctacctgcagcacctgcagaaggtgagccaggagggcgacgacgaccaccccgacagcatcgagtacggcctgggctacgactgccccgccaccgagggcatcttcgactacgccgccgccatcggcggcgccaccatcaccgccgcccagtgcctgatcgacggcatgtgcaaggtggccatcaactggagcggcggctggcaccacgccaagaaggacgaggccagcggcttctgctacctgaacgacgccgtgctgggcatcctgagactgagaagaaagttcgagagaatcctgtacgtggacctggacctgcaccacggcgacggcgtggaggacgccttcagcttcaccagcaaggtgatgaccgtgagcctgcacaagttcagccccggcttcttccccggcaccggcgacgtgagcgacgtgggcctgggcaagggcagatactacagcgtgaacgtgcccatccaggacggcatccaggacgagaagtactaccagatctgcgagagatacgagccccccgcccccaaccccggcctgtag

SEQ ID NO: 10995 - DNA, 831 bp, synthetic construct
  misc_feature 1..831: note = Description of Artificial Sequence: Synthetic coding sequence
  source 1..831: mol_type = other DNA
atggccggccccgccgccctgagcgccgccgccgccgccgccctggccgccgccctgctgctgctgagaagagaggaccccggccccggcgccggccccagcatggccgagaccgaggccctgagcaagctgagagaggacttcagaatgcagaacaagagcgtgttcatcctgggcgccagcggcgagaccggcagagtgctgctgaaggagatcctggagcagggcctgttcagcaaggtgaccctgatcggcagaagaaagctgaccttcgacgaggaggcctacaagaacgtgaaccaggaggtggtggacttcgagaagctggacgactacgccagcgccttccagggccacgacgtgggcttctgctgcctgggcaccaccagaggcaaggccggcgccgagggcttcgtgagagtggacagagactacgtgctgaagagcgccgagctggccaaggccggcggctgcaagcacttcaacctgctgagcagcaagggcgccgacaagagcagcaacttcctgtacctgcaggtgaagggcgaggtggaggccaaggtggaggagctgaagttcgacagatacagcgtgttcagacccggcgtgctgctgtgcgacagacaggagagcagacccggcgagtggctggtgagaaagttcttcggcagcctgcccgacagctgggccagcggccacagcgtgcccgtggtgaccgtggtgagagccatgctgaacaacgtggtgagacccagagacaagcagatggagctgctggagaacaaggccatccacgacctgggcaaggcccacggcagcctgaagccctag

SEQ ID NO: 10996 - DNA, 729 bp, synthetic construct
  misc_feature 1..729: note = Description of Artificial Sequence: Synthetic coding sequence
  source 1..729: mol_type = other DNA
atggccgagaccgaggccctgagcaagctgagagaggacttcagaatgcagaacaagagcgtgttcatcctgggcgccagcggcgagaccggcagagtgctgctgaaggagatcctggagcagggcctgttcagcaaggtgaccctgatcggcagaagaaagctgaccttcgacgaggaggcctacaagaacgtgaaccaggaggtggtggacttcgagaagctggacgactacgccagcgccttccagggccacgacgtgggcttctgctgcctgggcaccaccagaggcaaggccggcgccgagggcttcgtgagagtggacagagactacgtgctgaagagcgccgagctggccaaggccggcggctgcaagcacttcaacctgctgagcagcaagggcgccgacaagagcagcaacttcctgtacctgcaggtgaagggcgaggtggaggccaaggtggaggagctgaagttcgacagatacagcgtgttcagacccggcgtgctgctgtgcgacagacaggagagcagacccggcgagtggctggtgagaaagttcttcggcagcctgcccgacagctgggccagcggccacagcgtgcccgtggtgaccgtggtgagagccatgctgaacaacgtggtgagacccagagacaagcagatggagctgctggagaacaaggccatccacgacctgggcaaggcccacggcagcctgaagccctag

SEQ ID NO: 10997 - DNA, 729 bp, synthetic construct; identical to SEQ ID NO: 10996
  misc_feature 1..729: note = Description of Artificial Sequence: Synthetic coding sequence
  source 1..729: mol_type = other DNA

SEQ ID NO: 10998 - DNA, 729 bp, synthetic construct; identical to SEQ ID NO: 10996
  misc_feature 1..729: note = Description of Artificial Sequence: Synthetic coding sequence
  source 1..729: mol_type = other DNA

SEQ ID NO: 10999 - DNA, 402 bp, synthetic construct
  misc_feature 1..402: note = Description of Artificial Sequence: Synthetic coding sequence
  source 1..402: mol_type = other DNA
atggccgagaccgaggccctgagcaagctgagagaggacttcagaatgcagaacaagagcgtgttcatcctgggcgccagcggcgagaccggcagagtgctgctgaaggagatcctggagcagggcctgttcagcaaggtgaccctgatcggcagaagaaagctgaccttcgacgaggaggcctacaagaacgtgaaccaggaggtggtggacttcgagaagctggacgactacgccagcgccttccagggccacgacgtgggcttctgctgcctgggcaccaccagaggcaaggccggcgccgtgagaaaggcctacgccctgttccccttctgctggcccgtgatcagcagaatcctgttcctgctgaccctgttcctgtgcgcctgctgcaacgcctag

SEQ ID NO: 11000 - DNA, 402 bp, synthetic construct; identical to SEQ ID NO: 10999
  misc_feature 1..402: note = Description of Artificial Sequence: Synthetic coding sequence
  source 1..402: mol_type = other DNA

SEQ ID NO: 11001 - DNA, 402 bp, synthetic construct; identical to SEQ ID NO: 10999
  misc_feature 1..402: note = Description of Artificial Sequence: Synthetic coding sequence
  source 1..402: mol_type = other DNA

SEQ ID NO: 11002 - DNA, 1080 bp, synthetic construct
  misc_feature 1..1080: note = Description of Artificial Sequence: Synthetic coding sequence
  source 1..1080: mol_type = other DNA
atggccgagcacggcgcccacttcaccgccgccagcgtggccgacgaccagcccagcatcttcgaggtggtggcccaggacagcctgatgaccgccgtgagacccgccctgcagcacgtggtgaaggtgctggccgagagcaaccccacccactacggcttcctgtggagatggttcgacgagatcttcaccctgctggacctgctgctgcagcagcactacctgagcagaaccagcgccagcttcagcgagaacttctacggcctgaagagaatcgtgatgggcgacacccacaagagccagagactggccagcgccggcctgcccaagcagcagctgtggaagagcatcatgttcctggtgctgctgccctacctgaaggtgaagctggagaagctggtgagcagcctgagagaggaggacgagtacagcatccacccccccagcagcagatggaagagattctacagagccttcctggccgcctaccccttcgtgaacatggcctgggagggctggttcctggtgcagcagctgagatacatcctgggcaaggcccagcaccacagccccctgctgagactggccggcgtgcagctgggcagactgaccgtgcaggacatccaggccctggagcacaagcccgccaaggccagcatgatgcagcagcccgccagaagcgtgagcgagaagatcaacagcgccctgaagaaggccgtgggcggcgtggccctgagcctgagcaccggcctgagcgtgggcgtgttcttcctgcagttcctggactggtggtacagcagcgagaaccaggagaccatcaagagcctgaccgccctgcccaccccccccccccccgtgcacctggactacaacagcgacagccccctgctgcccaagatgaagaccgtgtgccccctgtgcagaaagaccagagtgaacgacaccgtgctggccaccagcggctacgtgttctgctacagatgcgtgttccactacgtgagaagccaccaggcctgccccatcaccggctaccccaccgaggtgcagcacctgatcaagctgtacagccccgagaactag

SEQ ID NO: 11003 - DNA, 1374 bp, synthetic construct
  misc_feature 1..1374: note = Description of Artificial Sequence: Synthetic coding sequence
  source 1..1374: mol_type = other DNA
atggtgagcaagctgaccagcctgcagcaggagctgctgagcgccctgctgagcagcggcgtgaccaaggaggtgctggtgcaggccctggaggagctgctgcccagccccaacttcggcgtgaagctggagaccctgcccctgagccccggcagcggcgccgagcccgacaccaagcccgtgttccacaccctgaccaacggccacgccaagggcagactgagcggcgacgagggcagcgaggacggcgacgactacgacaccccccccatcctgaaggagctgcaggccctgaacaccgaggaggccgccgagcagagagccgaggtggacagaatgctgagcgaggacccctggagagccgccaagatgatcaagggctacatgcagcagcacaacatcccccagagagaggtggtggacgtgaccggcctgaaccagagccacctgagccagcacctgaacaagggcacccccatgaagacccagaagagagccgccctgtacacctggtacgtgagaaagcagagagagatcctgagacagttcagccagcagagccacggccccggccagagcgacgacgcctgcagcgagcccaccaacaagaagatgagaagaaacagattcaagtggggccccgccagccagcagatcctgtaccaggcctacgacagacagaagaaccccagcaaggaggagagagaggccctggtggaggagtgcaacagagccgagtgcctgcagagaggcgtgagccccagcaaggcccacggcctgggcagcaacctggtgaccgaggtgagagtgtacaactggttcgccaacagaagaaaggaggaggccttcagacagaagctggccatggacgcctacagcagcaaccagacccacagcctgaaccccctgctgagccacggcagcccccaccaccagcccagcagcagcccccccaacaagctgagcggcgtgagatacagccagcagggcaacaacgagatcaccagcagcagcaccatcagccaccacggcaacagcgccatggtgaccagccagagcgtgctgcagcaggtgagccccgccagcctggaccccggccacaacctgctgagccccgacggcaagatgatcagcgtgagcggcggcggcctgccccccgtgagcaccctgaccaacatccacagcctgagccaccacaacccccagcagagccagaacctgatcatgacccccctgagcggcgtgatggccatcgcccagatgagcagcaccagcctggtgatgcccacccaccacctgctgagagcccagcagcagggcccctgcttcccccaccaccaccccctgggcagctgccacggcaaggcccagtag

SEQ ID NO: 11004 - DNA, 1338 bp, synthetic construct
  misc_feature 1..1338: note = Description of Artificial Sequence: Synthetic coding sequence
  source 1..1338: mol_type = other DNA
atgctgagcgaggacccctggagagccgccaagatgatcaagggctacatgcagcagcacaacatcccccagagagaggtggtggacgtgaccggcctgaaccagagccacctgagccagcacctgaacaagggcacccccatgaagacccagaagagagccgccctgtacacctggtacgtgagaaagcagagagagatcctgagacagttcaaccagaccgtgcagagcagcggcaacatgaccgacaagagcagccaggaccagctgctgttcctgttccccgagttcagccagcagagccacggccccggccagagcgacgacgcctgcagcgagcccaccaacaagaagatgagaagaaacagattcaagtggggccccgccagccagcagatcctgtaccaggcctacgacagacagaagaaccccagcaaggaggagagagaggccctggtggaggagtgcaacagagccgagtgcctgcagagaggcgtgagccccagcaaggcccacggcctgggcagcaacctggtgaccgaggtgagagtgtacaactggttcgccaacagaagaaaggaggaggccttcagacagaagctggccatggacgcctacagcagcaaccagacccacagcctgaaccccctgctgagccacggcagcccccaccaccagcccagcagcagcccccccaacaagctgagcggcgtgagatacagccagcagggcaacaacgagatcaccagcagcagcaccatcagccaccacggcaacagcgccatggtgaccagccagagcgtgctgcagcaggtgagccccgccagcctggaccccggccacaacctgctgagccccgacggcaagatgatcagcgtgagcggcggcggcctgccccccgtgagcaccctgaccaacatccacagcctgagccaccacaacccccagcagagccagaacctgatcatgacccccctgagcggcgtgatggccatcgcccagagcctgaacaccagccaggcccagagcgtgcccgtgatcaacagcgtggccggcagcctggccgccctgcagcccgtgcagttcagccagcagctgcacagcccccaccagcagcccctgatgcagcagagccccggcagccacatggcccagcagcccttcatggccgccgtgacccagctgcagaacagccacatgtacgcccacaagcaggagcccccccagtacagccacaccagcagattccccagcgccatggtggtgaccgacaccagcagcatcagcaccctgaccaacatgagcagcagcaagcagtgccccctgcaggcctggtag

SEQ ID NO: 11005 - DNA, 1278 bp, synthetic construct
  misc_feature 1..1278: note = Description of Artificial Sequence: Synthetic coding sequence
  source 1..1278: mol_type = other DNA
atggtgagcaagctgaccagcctgcagcaggagctgctgagcgccctgctgagcagcggcgtgaccaaggaggtgctggtgcaggccctggaggagctgctgcccagccccaacttcggcgtgaagctggagaccctgcccctgagccccggcagcggcgccgagcccgacaccaagcccgtgttccacaccctgaccaacggccacgccaagggcagactgagcggcgacgagggcagcgaggacggcgacgactacgacaccccccccatcctgaaggagctgcaggccctgaacaccgaggaggccgccgagcagagagccgaggtggacagaatgctgagcgaggacccctggagagccgccaagatgatcaagggctacatgcagcagcacaacatcccccagagagaggtggtggacgtgaccggcctgaaccagagccacctgagccagcacctgaacaagggcacccccatgaagacccagaagagagccgccctgtacacctggtacgtgagaaagcagagagagatcctgagacagttcaaccagaccgtgcagagcagcggcaacatgaccgacaagagcagccaggaccagctgctgttcctgttccccgagttcagccagcagagccacggccccggccagagcgacgacgcctgcagcgagcccaccaacaagaagatgagaagaaacagattcaagtggggccccgccagccagcagatcctgtaccaggcctacgacagacagaagaaccccagcaaggaggagagagaggccctggtggaggagtgcaacagagccgagtgcctgcagagaggcgtgagccccagcaaggcccacggcctgggcagcaacctggtgaccgaggtgagagtgtacaactggttcgccaacagaagaaaggaggaggccttcagacagaagctggccatggacgcctacagcagcaaccagacccacagcctgaaccccctgctgagccacggcagcccccaccaccagcccagcagcagcccccccaacaagctgagcggcgtgagatacagccagcagggcaacaacgagatcaccagcagcagcaccatcagccaccacggcaacagcgccatggtgaccagccagagcgtgctgcagcaggtgagccccgccagcctggaccccggccacaacctgctgagccccgacggcaagatggacctgagcctgagaagaagattcgcccccagccagcacctggacgagtacccccagcccctgcccccctag

SEQ ID NO: 11006 - DNA, 1596 bp, synthetic construct
  misc_feature 1..1596: note = Description of Artificial Sequence: Synthetic coding sequence
  source 1..1596: mol_type = other DNA
atggtgagcaagctgaccagcctgcagcaggagctgctgagcgccctgctgagcagcggcgtgaccaaggaggtgctggtgcaggccctggaggagctgctgcccagccccaacttcggcgtgaagctggagaccctgcccctgagccccggcagcggcgccgagcccgacaccaagcccgtgttccacaccctgaccaacggccacgccaagggcagactgagcggcgacgagggcagcgaggacggcgacgactacgacaccccccccatcctgaaggagctgcaggccctgaacaccgaggaggccgccgagcagagagccgaggtggacagaatgctgagcgaggacccctggagagccgccaagatgatcaagggctacatgcagcagcacaacatcccccagagagaggtggtggacgtgaccggcctgaaccagagccacctgagccagcacctgaacaagggcacccccatgaagacccagaagagagccgccctgtacacctggtacgtgagaaagcagagagagatcctgagacagttcagccagcagagccacggccccggccagagcgacgacgcctgcagcgagcccaccaacaagaagatgagaagaaacagattcaagtggggccccgccagccagcagatcctgtaccaggcctacgacagacagaagaaccccagcaaggaggagagagaggccctggtggaggagtgcaacagagccgagtgcctgcagagaggcgtgagccccagcaaggcccacggcctgggcagcaacctggtgaccgaggtgagagtgtacaactggttcgccaacagaagaaaggaggaggccttcagacagaagctggccatggacgcctacagcagcaaccagacccacagcctgaaccccctgctgagccacggcagcccccaccaccagcccagcagcagcccccccaacaagctgagcggcgtgagatacagccagcagggcaacaacgagatcaccagcagcagcaccatcagccaccacggcaacagcgccatggtgaccagccagagcgtgctgcagcaggtgagccccgccagcctggaccccggccacaacctgctgagccccgacggcaagatgatcagcgtgagcggcggcggcctgccccccgtgagcaccctgaccaacatccacagcctgagccaccacaacccccagcagagccagaacctgatcatgacccccctgagcggcgtgatggccatcgcccagagcctgaacaccagccaggcccagagcgtgcccgtgatcaacagcgtggccggcagcctggccgccctgcagcccgtgcagttcagccagcagctgcacagcccccaccagcagcccctgatgcagcagagccccggcagccacatggcccagcagcccttcatggccgccgtgacccagctgcagaacagccacatgtacgcccacaagcaggagcccccccagtacagccacaccagcagattccccagcgccatggtggtgaccgacaccagcagcatcagcaccctgaccaacatgagcagcagcaagcagtgccccctgcaggcctggtag

SEQ ID NO: 11007 - DNA, 843 bp, synthetic construct
  misc_feature 1..843: note = Description of Artificial Sequence: Synthetic coding sequence
  source 1..843: mol_type = other DNA
atgaagttcagagccaagatcgtggacggcgcctgcctgaaccacttcaccagaatcagcaacatgatcgccaagctggccaagacctgcaccctgagaatcagccccgacaagctgaacttcatcctgtgcgacaagctggccaacggcggcgtgagcatgtggtgcgagctggagcaggagaacttcttcaacgagttccagatggagggcgtgagcgccgagaacaacgagatctacctggagctgaccagcgagaacctgagcagagccctgaagaccgcccagaacgccagagccctgaagatcaagctgaccaacaagcacttcccctgcctgaccgtgagcgtggagctgctgagcatgagcagcagcagcagaatcgtgacccacgacatccccatcaaggtgatccccagaaagctgtggaaggacctgcaggagcccgtggtgcccgaccccgacgtgagcatctacctgcccgtgctgaagaccatgaagagcgtggtggagaagatgaagaacatcagcaaccacctggtgatcgaggccaacctggacggcgagctgaacctgaagatcgagaccgagctggtgtgcgtgaccacccacttcaaggacctgggcaacccccccctggccagcgagagcacccacgaggacagaaacgtggagcacatggccgaggtgcacatcgacatcagaaagctgctgcagttcctggccggccagcaggtgaaccccaccaaggccctgtgcaacatcgtgaacaacaagatggtgcacttcgacctgctgcacgaggacgtgagcctgcagtacttcatccccgccctgagctag

SEQ ID NO: 11008 - DNA, 780 bp, synthetic construct
  misc_feature 1..780: note = Description of Artificial Sequence: Synthetic coding sequence
  source 1..780: mol_type = other DNA
atgatcgccaagctggccaagacctgcaccctgagaatcagccccgacaagctgaacttcatcctgtgcgacaagctggccaacggcggcgtgagcatgtggtgcgagctggagcaggagaacttcttcaacgagttccagatggagggcgtgagcgccgagaacaacgagatctacctggagctgaccagcgagaacctgagcagagccctgaagaccgcccagaacgccagagccctgaagatcaagctgaccaacaagcacttcccctgcctgaccgtgagcgtggagctgctgagcatgagcagcagcagcagaatcgtgacccacgacatccccatcaaggtgatccccagaaagctgtggaaggacctgcaggagcccgtggtgcccgaccccgacgtgagcatctacctgcccgtgctgaagaccatgaagagcgtggtggagaagatgaagaacatcagcaaccacctggtgatcgaggccaacctggacggcgagctgaacctgaagatcgagaccgagctggtgtgcgtgaccacccacttcaaggacctgggcaacccccccctggccagcgagagcacccacgaggacagaaacgtggagcacatggccgaggtgcacatcgacatcagaaagctgctgcagttcctggccggccagcaggtgaaccccaccaaggccctgtgcaacatcgtgaacaacaagatggtgcacttcgacctgctgcacgaggacgtgagcctgcagtacttcatccccgccctgagctag

SEQ ID NO: 11009 - DNA, 843 bp, synthetic construct; identical to SEQ ID NO: 11007
  misc_feature 1..843: note = Description of Artificial Sequence: Synthetic coding sequence
  source 1..843: mol_type = other DNA

SEQ ID NO: 11010 - DNA, 780 bp, synthetic construct; identical to SEQ ID NO: 11008
  misc_feature 1..780: note = Description of Artificial Sequence: Synthetic coding sequence
  source 1..780: mol_type = other DNA

SEQ ID NO: 11011 - DNA, 2130 bp, synthetic construct
  misc_feature 1..2130: note = Description of Artificial Sequence: Synthetic coding sequence
  source 1..2130: mol_type = other DNA
atgagcttccccaaggcccccctgaagagattcaacgaccccagcggctgcgcccccagccccggcgcctacgacgtgaagaccctggaggtgctgaagggccccgtgagcttccagaagagccagagattcaagcagcagaaggagagcaagcagaacctgaacgtggacaaggacaccaccctgcccgccagcgccagaaaggtgaagagcagcgagagcaagatcagagtgctgctgcaggagagaggcgcccaggacagaagaatccaggacctggagaccgagctggagaagatggaggccagactgaacgccgccctgagagagaagaccagcctgagcgccaacaacgccaccctggagaagcagctgatcgagctgaccagaaccaacgagctgctgaagagcaagttcagcgagaacggcaaccagaagaacctgagaatcctgagcctggagctgatgaagctgagaaacaagagagagaccaagatgagaggcatgatggccaagcaggagggcatggagatgaagctgcaggtgacccagagaagcctggaggagagccagggcaagatcgcccagctggagggcaagctggtgagcatcgagaaggagaagatcgacgagaagagcgagaccgagaagctgctggagtacatcgaggagatcagctgcgccagcgaccaggtggagaagtacaagctggacatcgcccagctggaggagaacctgaaggagaagaacgacgagatcctgagcctgaagcagagcctggaggagaacatcgtgatcctgagcaagcaggtggaggacctgaacgtgaagtgccagctgctggagaaggagaaggaggaccacgtgaacagaaacagagagcacaacgagaacctgaacgccgagatgcagaacctgaagcagaagttcatcctggagcagcaggagagagagaagctgcagcagaaggagctgcagatcgacagcctgctgcagcaggagaaggagctgagcagcagcctgcaccagaagctgtgcagcttccaggaggagatggtgaaggagaagaacctgttcgaggaggagctgaagcagaccctggacgagctggacaagctgcagcagaaggaggagcaggccgagagactggtgaagcagctggaggaggaggccaagagcagagccgaggagctgaagctgctggaggagaagctgaagggcaaggaggccgagctggagaagagcagcgccgcccacacccaggccaccctgctgctgcaggagaagtacgacagcatggtgcagagcctggaggacgtgaccgcccagttcgagagctacaaggccctgaccgccagcgagatcgaggacctgaagctggagaacagcagcctgcaggagaaggccgccaaggccggcaagaacgccgaggacgtgcagcaccagatcctggccaccgagagcagcaaccaggagtacgtgagaatgctgctggacctgcagaccaagagcgccctgaaggagaccgagatcaaggagatcaccgtgagcttcctgcagaagatcaccgacctgcagaaccagctgaagcagcaggaggaggacttcagaaagcagctggaggacgaggagggcagaaaggccgagaaggagaacaccaccgccgagctgaccgaggagatcaacaagtggagactgctgtacgaggagctgtacaacaagaccaagcccttccagctgcagctggacgccttcgaggtggagaagcaggccctgctgaacgagcacggcgccgcccaggagcagctgaacaagatcagagacagctacgccaagctgctgggccaccagaacctgaagcagaagatcaagcacgtggtgaagctgaaggacgagaacagccagctgaagagcgaggtgagcaagctgagatgccagctggccaagaagaagcagagcgagaccaagctgcaggaggagctgaacaaggtgctgggcatcaagcacttcgaccccagcaaggccttccaccacgagagcaaggagaacttcgccctgaagacccccctgaaggagggcaacaccaactgctacagagcccccatggagtgccaggagagctggaagtag

SEQ ID NO: 11012 - DNA, 2175 bp, synthetic construct
  misc_feature 1..2175: note = Description of Artificial Sequence: Synthetic coding sequence
  source 1..2175: mol_type = other DNA
atgagcttccccaaggcccccctgaagagattcaacgaccccagcggctgcgcccccagccccggcgcctacgacgtgaagaccctggaggtgctgaagggccccgtgagcttccagaagagccagagattcaagcagcagaaggagagcaagcagaacctgaacgtggacaaggacaccaccctgcccgccagcgccagaaaggtgaagagcagcgagagcaaggagagccagaagaacgacaaggacctgaagatcctggagaaggagatcagagtgctgctgcaggagagaggcgcccaggacagaagaatccaggacctggagaccgagctggagaagatggaggccagactgaacgccgccctgagagagaagaccagcctgagcgccaacaacgccaccctggagaagcagctgatcgagctgaccagaaccaacgagctgctgaagagcaagttcagcgagaacggcaaccagaagaacctgagaatcctgagcctggagctgatgaagctgagaaacaagagagagaccaagatgagaggcatgatggccaagcaggagggcatggagatgaagctgcaggtgacccagagaagcctggaggagagccagggcaagatcgcccagctggagggcaagctggtgagcatcgagaaggagaagatcgacgagaagagcgagaccgagaagctgctggagtacatcgaggagatcagctgcgccagcgaccaggtggagaagtacaagctggacatcgcccagctggaggagaacctgaaggagaagaacgacgagatcctgagcctgaagcagagcctggaggagaacatcgtgatcctgagcaagcaggtggaggacctgaacgtgaagtgccagctgctggagaaggagaaggaggaccacgtgaacagaaacagagagcacaacgagaacctgaacgccgagatgcagaacctgaagcagaagttcatcctggagcagcaggagagagagaagctgcagcagaaggagctgcagatcgacagcctgctgcagcaggagaaggagctgagcagcagcctgcaccagaagctgtgcagcttccaggaggagatggtgaaggagaagaacctgttcgaggaggagctgaagcagaccctggacgagctggacaagctgcagcagaaggaggagcaggccgagagactggtgaagcagctggaggaggaggccaagagcagagccgaggagctgaagctgctggaggagaagctgaagggcaaggaggccgagctggagaagagcagcgccgcccacacccaggccaccctgctgctgcaggagaagtacgacagcatggtgcagagcctggaggacgtgaccgcccagttcgagagctacaaggccctgaccgccagcgagatcgaggacctgaagctggagaacagcagcctgcaggagaaggccgccaaggccggcaagaacgccgaggacgtgcagcaccagatcctggccaccgagagcagcaaccaggagtacgtgagaatgctgctggacctgcagaccaagagcgccctgaaggagaccgagatcaaggagatcaccgtgagcttcctgcagaagatcaccgacctgcagaaccagctgaagcagcaggaggaggacttcagaaagcagctggaggacgaggagggcagaaaggccgagaaggagaacaccaccgccgagctgaccgaggagatcaacaagtggagactgctgtacgaggagctgtacaacaagaccaagcccttccagctgcagctggacgccttcgaggtggagaagcaggccctgctgaacgagcacggcgccgcccaggagcagctgaacaagatcagagacagctacgccaagctgctgggccaccagaacctgaagcagaagatcaagcacgtggtgaagctgaaggacgagaacagccagctgaagagcgaggtgagcaagctgagatgccagctggccaagaagaagcagagcgagaccaagctgcaggaggagctgaacaaggtgctgggcatcaagcacttcgaccccagcaaggccttccaccacgagagcaaggagaacttcgccctgaagacccccctgaaggagggcaacaccaactgctacagagcccccatggagtgccaggagagctggaagtag

SEQ ID NO: 11013 - DNA, 2178 bp, synthetic construct
  misc_feature 1..2178: note = Description of Artificial Sequence: Synthetic coding sequence
  source 1..2178: mol_type = other DNA
atgagcttccccaaggcccccctgaagagattcaacgaccccagcggctgcgcccccagccccggcgcctacgacgtgaagaccctggaggtgctgaagggccccgtgagcttccagaagagccagagattcaagcagcagaaggagagcaagcagaacctgaacgtggacaaggacaccaccctgcccgccagcgccagaaaggtgaagagcagcgagagcaagaaggagagccagaagaacgacaaggacctgaagatcctggagaaggagatcagagtgctgctgcaggagagaggcgcccaggacagaagaatccaggacctggagaccgagctggagaagatggaggccagactgaacgccgccctgagagagaagaccagcctgagcgccaacaacgccaccctggagaagcagctgatcgagctgaccagaaccaacgagctgctgaagagcaagttcagcgagaacggcaaccagaagaacctgagaatcctgagcctggagctgatgaagctgagaaacaagagagagaccaagatgagaggcatgatggccaagcaggagggcatggagatgaagctgcaggtgacccagagaagcctggaggagagccagggcaagatcgcccagctggagggcaagctggtgagcatcgagaaggagaagatcgacgagaagagcgagaccgagaagctgctggagtacatcgaggagatcagctgcgccagcgaccaggtggagaagtacaagctggacatcgcccagctggaggagaacctgaaggagaagaacgacgagatcctgagcctgaagcagagcctggaggagaacatcgtgatcctgagcaagcaggtggaggacctgaacgtgaagtgccagctgctggagaaggagaaggaggaccacgtgaacagaaacagagagcacaacgagaacctgaacgccgagatgcagaacctgaagcagaagttcatcctggagcagcaggagagagagaagctgcagcagaaggagctgcagatcgacagcctgctgcagcaggagaaggagctgagcagcagcctgcaccagaagctgtgcagcttccaggaggagatggtgaaggagaagaacctgttcgaggaggagctgaagcagaccctggacgagctggacaagctgcagcagaaggaggagcaggccgagagactggtgaagcagctggaggaggaggccaagagcagagccgaggagctgaagctgctggaggagaagctgaagggcaaggaggccgagctggagaagagcagcgccgcccacacccaggccaccctgctgctgcaggagaagtacgacagcatggtgcagagcctggaggacgtgaccgcccagttcgagagctacaaggccctgaccgccagcgagatcgaggacctgaagctggagaacagcagcctgcaggagaaggccgccaaggccggcaagaacgccgaggacgtgcagcaccagatcctggccaccgagagcagcaaccaggagtacgtgagaatgctgctggacctgcagaccaagagcgccctgaaggagaccgagatcaaggagatcaccgtgagcttcctgcagaagatcaccgacctgcagaaccagctgaagcagcaggaggaggacttcagaaagcagctggaggacgaggagggcagaaaggccgagaaggagaacaccaccgccgagctgaccgaggagatcaacaagtggagactgctgtacgaggagctgtacaacaagaccaagcccttccagctgcagctggacgccttcgaggtggagaagcaggccctgctgaacgagcacggcgccgcccaggagcagctgaacaagatcagagacagctacgccaagctgctgggccaccagaacctgaagcagaagatcaagcacgtggtgaagctgaaggacgagaacagccagctgaagagcgaggtgagcaagctgagatgccagctggccaagaagaagcagagcgagaccaagctgcaggaggagctgaacaaggtgctgggcatcaagcacttcgaccccagcaaggccttccaccacgagagcaaggagaacttcgccctgaagacccccctgaaggagggcaacaccaactgctacagagcccccatggagtgccaggagagctggaagtag

SEQ ID NO: 11014 - DNA, 2106 bp, synthetic construct
  misc_feature 1..2106: note = Description of Artificial Sequence: Synthetic coding sequence
  source 1..2106: mol_type = other DNA
atgagcttccccaaggcccccctgaagagattcaacgaccccagcggctgcgcccccagccccggcgcctacgacgtgaagaccctggaggtgctgaagggccccgtgagcttccagaagagccagagattcaagcagcagaaggagagcaagcagaacctgaacgtggacaaggacaccaccctgcccgccagcgccagaaaggtgaagagcagcgagagcaagaaggagagccagaagaacgacaaggacctgaagatcctggagaaggagatcagagtgctgctgcaggagagaggcgcccaggacagaagaatccaggacctggagaccgagctggagaagcagctgatcgagctgaccagaaccaacgagctgctgaagagcaagttcagcgagaacggcaaccagaagaacctgagaatcctgagcctggagctgatgaagctgagaaacaagagagagaccaagatgagaggcatgatggccaagcaggagggcatggagatgaagctgcaggtgacccagagaagcctggaggagagccagggcaagatcgcccagctggagggcaagctggtgagcatcgagaaggagaagatcgacgagaagagcgagaccgagaagctgctggagtacatcgaggagatcagctgcgccagcgaccaggtggagaagtacaagctggacatcgcccagctggaggagaacctgaaggagaagaacgacgagatcctgagcctgaagcagagcctggaggagaacatcgtgatcctgagcaagcaggtggaggacctgaacgtgaagtgccagctgctggagaaggagaaggaggaccacgtgaacagaaacagagagcacaacgagaacctgaacgccgagatgcagaacctgaagcagaagttcatcctggagcagcaggagagagagaagctgcagcagaaggagctgcagatcgacagcctgctgcagcaggagaaggagctgagcagcagcctgcaccagaagctgtgcagcttccaggaggagatggtgaaggagaagaacctgttcgaggaggagctgaagcagaccctggacgagctggacaagctgcagcagaaggaggagcaggccgagagactggtgaagcagctggaggaggaggccaagagcagagccgaggagctgaagctgctggaggagaagctgaagggcaaggaggccgagctggagaagagcagcgccgcccacacccaggccaccctgctgctgcaggagaagtacgacagcatggtgcagagcctggaggacgtgaccgcccagttcgagagctacaaggccctgaccgccagcgagatcgaggacctgaagctggagaacagcagcctgcaggagaaggccgccaaggccggcaagaacgccgaggacgtgcagcaccagatcctggccaccgagagcagcaaccaggagtacgtgagaatgctgctggacctgcagaccaagagcgccctgaaggagaccgagatcaaggagatcaccgtgagcttcctgcagaagatcaccgacctgcagaaccagctgaagcagcaggaggaggacttcagaaagcagctggaggacgaggagggcagaaaggccgagaaggagaacaccaccgccgagctgaccgaggagatcaacaagtggagactgctgtacgaggagctgtacaacaagaccaagcccttccagctgcagctggacgccttcgaggtggagaagcaggccctgctgaacgagcacggcgccgcccaggagcagctgaacaagatcagagacagctacgccaagctgctgggccaccagaacctgaagcagaagatcaagcacgtggtgaagctgaaggacgagaacagccagctgaagagcgaggtgagcaagctgagatgccagctggccaagaagaagcagagcgagaccaagctgcaggaggagctgaacaaggtgctgggcatcaagcacttcgaccccagcaaggccttccaccacgagagcaaggagaacttcgccctgaagacccccctgaaggagggcaacaccaactgctacagagcccccatggagtgccaggagagctggaagtag

SEQ ID NO: 11015 - DNA, 1917 bp, synthetic construct
  misc_feature 1..1917: note = Description of Artificial Sequence: Synthetic coding sequence
  source 1..1917: mol_type = other DNA
atgaccctgctgatcagagtgctgctgcaggagagaggcgcccaggacagaagaatccaggacctggagaccgagctggagaagatggaggccagactgaacgccgccctgagagagaagaccagcctgagcgccaacaacgccaccctggagaagcagctgatcgagctgaccagaaccaacgagctgctgaagagcaagttcagcgagaacggcaaccagaagaacctgagaatcctgagcctggagctgatgaagctgagaaacaagagagagaccaagatgagaggcatgatggccaagcaggagggcatggagatgaagctgcaggtgacccagagaagcctggaggagagccagggcaagatcgcccagctggagggcaagctggtgagcatcgagaaggagaagatcgacgagaagagcgagaccgagaagctgctggagtacatcgaggagatcagctgcgccagcgaccaggtggagaagtacaagctggacatcgcccagctggaggagaacctgaaggagaagaacgacgagatcctgagcctgaagcagagcctggaggagaacatcgtgatcctgagcaagcaggtggaggacctgaacgtgaagtgccagctgctggagaaggagaaggaggaccacgtgaacagaaacagagagcacaacgagaacctgaacgccgagatgcagaacctgaagcagaagttcatcctggagcagcaggagagagagaagctgcagcagaaggagctgcagatcgacagcctgctgcagcaggagaaggagctgagcagcagcctgcaccagaagctgtgcagcttccaggaggagatggtgaaggagaagaacctgttcgaggaggagctgaagcagaccctggacgagctggacaagctgcagcagaaggaggagcaggccgagagactggtgaagcagctggaggaggaggccaagagcagagccgaggagctgaagctgctggaggagaagctgaagggcaaggaggccgagctggagaagagcagcgccgcccacacccaggccaccctgctgctgcaggagaagtacgacagcatggtgcagagcctggaggacgtgaccgcccagttcgagagctacaaggccctgaccgccagcgagatcgaggacctgaagctggagaacagcagcctgcaggagaaggccgccaaggccggcaagaacgccgaggacgtgcagcaccagatcctggccaccgagagcagcaaccaggagtacgtgagaatgctgctggacctgcagaccaagagcgccctgaaggagaccgagatcaaggagatcaccgtgagcttcctgcagaagatcaccgacctgcagaaccagctgaagcagcaggaggaggacttcagaaagcagctggaggacgaggagggcagaaaggccgagaaggagaacaccaccgccgagctgaccgaggagatcaacaagtggagactgctgtacgaggagctgtacaacaagaccaagcccttccagctgcagctggacgccttcgaggtggagaagcaggccctgctgaacgagcacggcgccgcccaggagcagctgaacaagatcagagacagctacgccaagctgctgggccaccagaacctgaagcagaagatcaagcacgtggtgaagctgaaggacgagaacagccagctgaagagcgaggtgagcaagctgagatgccagctggccaagaagaagcagagcgagaccaagctgcaggaggagctgaacaaggtgctgggcatcaagcacttcgaccccagcaaggccttccaccacgagagcaaggagaacttcgccctgaagacccccctgaaggagggcaacaccaactgctacagagcccccatggagtgccaggagagctggaagtag

SEQ ID NO: 11016 - DNA, 996 bp, synthetic construct
  misc_feature 1..996: note = Description of Artificial Sequence: Synthetic coding sequence
  source 1..996: mol_type = other DNA
atgagcttccccaaggcccccctgaagagattcaacgaccccagcggctgcgcccccagccccggcgcctacgacgtgaagaccctggaggtgctgaagggccccgtgagcttccagaagagccagagattcaagcagcagaaggagagcaagcagaacctgaacgtggacaaggacaccaccctgcccgccagcgccagaaaggtgaagagcagcgagagcaagatcagagtgctgctgcaggagagaggcgcccaggacagaagaatccaggacctggagaccgagctggagaagatggaggccagactgaacgccgccctgagagagaagaccagcctgagcgccaacaacgccaccctggagaagcagctgatcgagctgaccagaaccaacgagctgctgaagagcaagttcagcgagaacggcaaccagaagaacctgagaatcctgagcctggagctgatgaagctgagaaacaagagagagaccaagatgagaggcatgatggccaagcaggagggcatggagatgaagctgcaggtgacccagagaagcctggaggagagccagggcaagatcgcccagctggagggcaagctggtgagcatcgagaaggagaagatcgacgagaagagcgagaccgagaagctgctggagtacatcgaggagatcagctgcgccagcgaccaggtggagaagtacaagctggacatcgcccagctggaggagaacctgaaggagaagaacgacgagatcctgagcctgaagcagagcctggaggagaacatcgtgatcctgagcaagcaggtggaggacctgaacgtgaagtgccagctgctggagaaggagaaggaggaccacgtgaacagaaacagagagcacaacgagaacctgaacgccgagatgcagaacctgaagcagaagttcatcctggagcagcaggagagagagaagctgcagcagaagaagaagcagatgagaagaaagaagtag

SEQ ID NO: 11017 - DNA, 537 bp, synthetic construct
  misc_feature 1..537: note = Description of Artificial Sequence: Synthetic coding sequence
  source 1..537: mol_type = other DNA
atgcacgtgaacggcaaggtggccctggtgaccggcgccgcccagggcatcggcagagccttcgccgaggccctgctgctgaagggcgccaaggtggccctggtggactggaacctggaggccggcgtgcagtgcaaggccgccctggacgagcagttcgagccccagaagaccctgttcatccagtgcgacgtggccgaccagcagcagctgagagacaccttcagaaaggtggtggaccacttcggcagactggacatcctggtgaacaacgccggcgtgaacaacgagaagaactgggagaagaccctgcagatcaacctggtgagcgtgatcagcggcacctacctgggcctggactacatgagcaagcagaacggcggcgagggcggcatcatcatcaacatgagcagcctggccggcctgatgcccgtggcccagcagcccgtgtactgcgccagcaagcacggcatcgtgggcttcaccagaagcgccgcccccaccatcgactgccagtggatcgacaacacccactag

SEQ ID NO: 11018 - DNA, 801 bp, synthetic construct
  misc_feature 1..801: note = Description of Artificial Sequence: Synthetic coding sequence
  source 1..801: mol_type = other DNA
atgcacgtgaacggcaaggtggccctggtgaccggcgccgcccagggcatcggcagagccttcgccgaggccctgctgctgaagggcgccaaggtggccctggtggactggaacctggaggccggcgtgcagtgcaaggccgccctggacgagcagttcgagccccagaagaccctgttcatccagtgcgacgtggccgaccagcagcagctgagagacaccttcagaaaggtggtggaccacttcggcagactggacatcctggtgaacaacgccggcgtgaacaacgagaagaactgggagaagaccctgcagatcaacctggtgagcgtgatcagcggcacctacctgggcctggactacatgagcaagcagaacggcggcgagggcggcatcatcatcaacatgagcagcctggccggcctgatgcccgtggcccagcagcccgtgtactgcgccagcaagcacggcatcgtgggcttcaccagaagcgccgccctggccgccaacctgatgaacagcggcgtgagactgaacgccatctgccccggcttcgtgaacaccgccatcctggagagcatcgagaaggaggagaacatgggccagtacatcgagtacaaggaccacatcaaggacatgatcaagtactacggcatcctggacccccccctgatcgccaacggcctgatcaccctgatcgaggacgacgccctgaacggcgccatcatgaagatcaccaccagcaagggcatccacttccaggactacgacaccacccccttccaggccaagacccagtag

SEQ ID NO: 11019 - DNA, 438 bp, synthetic construct
  misc_feature 1..438: note = Description of Artificial Sequence: Synthetic coding sequence
  source 1..438: mol_type = other DNA
atgagcaagcagaacggcggcgagggcggcatcatcatcaacatgagcagcctggccggcctgatgcccgtggcccagcagcccgtgtactgcgccagcaagcacggcatcgtgggcttcaccagaagcgccgccctggccgccaacctgatgaacagcggcgtgagactgaacgccatctgccccggcttcgtgaacaccgccatcctggagagcatcgagaaggaggagaacatgggccagtacatcgagtacaaggaccacatcaaggacatgatcaagtactacggcatcctggacccccccctgatcgccaacggcctgatcaccctgatcgaggacgacgccctgaacggcgccatcatgaagatcaccaccagcaagggcatccacttccaggactacgacaccacccccttccaggccaagacccagtag

SEQ ID NO: 11020 - DNA, 438 bp, synthetic construct; identical to SEQ ID NO: 11019
  misc_feature 1..438: note = Description of Artificial Sequence: Synthetic coding sequence
  source 1..438: mol_type = other DNA

SEQ ID NO: 11021 - DNA, 432 bp, synthetic construct
  misc_feature 1..432: note = Description of Artificial Sequence: Synthetic coding sequence
  source 1..432: mol_type = other DNA
atgcacgtgaacggcaaggtggccctggtgaccggcgccgcccagggcatcggcagagccttcgccgaggccctgctgctgaagggcgccaaggtggccctggtggactggaacctggaggccggcgtgcagtgcaaggccgccctggacgagcagttcgagccccagaagaccctgttcatccagtgcgacgtggccgaccagcagcagctgagagacaccttcagaaaggtggtggaccacttcggcagactggacatcctggtgaacaacgccggcgtgaacaacgagaagaactgggagaagaccctgcagatcaacctggtgagcgtgatcagcggcacctacctgggcctggactacatgagcaagcagaacggcggcgagggcggcatcatcatcaacatgagcagcctggccgcccaccactag

SEQ ID NO: 11022 - DNA, 2202 bp, synthetic construct
  misc_feature 1..2202: note = Description of Artificial Sequence: Synthetic coding sequence
  source 1..2202: mol_type = other DNA
atgaccttccccgaggccgacatcctgctgaagagcggcgagtgcgccggccagaccatgctggacaccatggaggcccccggccacagcagacagctgctgctgcagctgaacaaccagagaaccaagggcttcctgtgcgacgtgatcatcgtggtgcagaacgccctgttcagagcccacaagaacgtgctggccgccagcagcgcctacctgaagagcctggtggtgcacgacaacctgctgaacctggaccacgacatggtgagccccgccgtgttcagactggtgctggacttcatctacaccggcagactggccgacggcgccgaggccgccgccgccgccgccgtggcccccggcgccgagcccagcctgggcgccgtgctggccgccgccagctacctgcagatccccgacctggtggccctgtgcaagaagagactgaagagacacggcaagtactgccacctgagaggcggcggcggcggcggcggcggctacgccccctacggcagacccggcagaggcctgagagccgccacccccgtgatccaggcctgctaccccagccccgtgggccccccccccccccccgccgccgagccccccagcggccccgaggccgccgtgaacacccactgcgccgagctgtacgccagcggccccggccccgccgccgccctgtgcgccagcgagagaagatgcagccccctgtgcggcctggacctgagcaagaagagcccccccggcagcgccgcccccgagagacccctggccgagagagagctgccccccagacccgacagcccccccagcgccggccccgccgcctacaaggagccccccctggccctgcccagcctgccccccctgcccttccagaagctggaggaggccgccccccccagcgaccccttcagaggcggcagcggcagccccggccccgagccccccggcagacccgacggccccagcctgctgtacagatggatgaagcacgagcccggcctgggcagctacggcgacgagctgggcagagagagaggcagccccagcgagagatgcgaggagagaggcggcgacgccgccgtgagccccggcggcccccccctgggcctggcccccccccccagataccccggcagcctggacggccccggcgccggcggcgacggcgacgactacaagagcagcagcgaggagaccggcagcagcgaggaccccagcccccccggcggccacctggagggctacccctgcccccacctggcctacggcgagcccgagagcttcggcgacaacctgtacgtgtgcatcccctgcggcaagggcttccccagcagcgagcagctgaacgcccacgtggaggcccacgtggaggaggaggaggccctgtacggcagagccgaggccgccgaggtggccgccggcgccgccggcctgggcccccccttcggcggcggcggcgacaaggtggccggcgcccccggcggcctgggcgagctgctgagaccctacagatgcgccagctgcgacaagagctacaaggaccccgccaccctgagacagcacgagaagacccactggctgaccagaccctacccctgcaccatctgcggcaagaagttcacccagagaggcaccatgaccagacacatgagaagccacctgggcctgaagcccttcgcctgcgacgcctgcggcatgagattcaccagacagtacagactgaccgagcacatgagaatccacagcggcgagaagccctacgagtgccaggtgtgcggcggcaagttcgcccagcagagaaacctgatcagccacatgaagatgcacgccgtgggcggcgccgccggcgccgccggcgccctggccggcctgggcggcctgcccggcgtgcccggccccgacggcaagggcaagctggacttccccgagggcgtgttcgccgtggccagactgaccgccgagcagctgagcctgaagcagcaggacaaggccgccgccgccgagctgctggcccagaccacccacttcctgcacgaccccaaggtggccctggagagcctgtaccccctggccaagttcaccgccgagctgggcctgagccccgacaaggccgccgaggtgctgagccagggcgcccacctggccgccggccccgacggcagaaccatcgacagattcagccccacctag

SEQ ID NO: 11023 - DNA, 2145 bp, synthetic construct
  misc_feature 1..2145: note = Description of Artificial Sequence: Synthetic coding sequence
  source 1..2145: mol_type = other DNA
atgctggacaccatggaggcccccggccacagcagacagctgctgctgcagctgaacaaccagagaaccaagggcttcctgtgcgacgtgatcatcgtggtgcagaacgccctgttcagagcccacaagaacgtgctggccgccagcagcgcctacctgaagagcctggtggtgcacgacaacctgctgaacctggaccacgacatggtgagccccgccgtgttcagactggtgctggacttcatctacaccggcagactggccgacggcgccgaggccgccgccgccgccgccgtggcccccggcgccgagcccagcctgggcgccgtgctggccgccgccagctacctgcagatccccgacctggtggccctgtgcaagaagagactgaagagacacggcaagtactgccacctgagaggcggcggcggcggcggcggcggctacgccccctacggcagacccggcagaggcctgagagccgccacccccgtgatccaggcctgctaccccagccccgtgggccccccccccccccccgccgccgagccccccagcggccccgaggccgccgtgaacacccactgcgccgagctgtacgccagcggccccggccccgccgccgccctgtgcgccagcgagagaagatgcagccccctgtgcggcctggacctgagcaagaagagcccccccggcagcgccgcccccgagagacccctggccgagagagagctgccccccagacccgacagcccccccagcgccggccccgccgcctacaaggagccccccctggccctgcccagcctgccccccctgcccttccagaagctggaggaggccgccccccccagcgaccccttcagaggcggcagcggcagccccggccccgagccccccggcagacccgacggccccagcctgctgtacagatggatgaagcacgagcccggcctgggcagctacggcgacgagctgggcagagagagaggcagccccagcgagagatgcgaggagagaggcggcgacgccgccgtgagccccggcggcccccccctgggcctggcccccccccccagataccccggcagcctggacggccccggcgccggcggcgacggcgacgactacaagagcagcagcgaggagaccggcagcagcgaggaccccagcccccccggcggccacctggagggctacccctgcccccacctggcctacggcgagcccgagagcttcggcgacaacctgtacgtgtgcatcccctgcggcaagggcttccccagcagcgagcagctgaacgcccacgtggaggcccacgtggaggaggaggaggccctgtacggcagagccgaggccgccgaggtggccgccggcgccgccggcctgggcccccccttcggcggcggcggcgacaaggtggccggcgcccccggcggcctgggcgagctgctgagaccctacagatgcgccagctgcgacaagagctacaaggaccccgccaccctgagacagcacgagaagacccactggctgaccagaccctacccctgcaccatctgcggcaagaagttcacccagagaggcaccatgaccagacacatgagaagccacctgggcctgaagcccttcgcctgcgacgcctgcggcatgagattcaccagacagtacagactgaccgagcacatgagaatccacagcggcgagaagccctacgagtgccaggtgtgcggcggcaagttcgcccagcagagaaacctgatcagccacatgaagatgcacgccgtgggcggcgccgccggcgccgccggcgccctggccggcctgggcggcctgcccggcgtgcccggccccgacggcaagggcaagctggacttccccgagggcgtgttcgccgtggccagactgaccgccgagcagctgagcctgaagcagcaggacaaggccgccgccgccgagctgctggcccagaccacccacttcctgcacgaccccaaggtggccctggagagcctgtaccccctggccaagttcaccgccgagctgggcctgagccccgacaaggccgccgaggtgctgagccagggcgcccacctggccgccggccccgacggcagaaccatcgacagattcagccccacctag

SEQ ID NO: 11024 - DNA, 2208 bp, synthetic construct
  misc_feature 1..2208: note = Description of Artificial Sequence: Synthetic coding sequence
  source 1..2208: mol_type = other DNA
atggagggcgccggcggcgccaacgacaagaagaagatcagcagcgagagaagaaaggagaagagcagagacgccgccagaagcagaagaagcaaggagagcgaggtgttctacgagctggcccaccagctgcccctgccccacaacgtgagcagccacctggacaaggccagcgtgatgagactgaccatcagctacctgagagtgagaaagctgctggacgccggcgacctggacatcgaggacgacatgaaggcccagatgaactgcttctacctgaaggccctggacggcttcgtgatggtgctgaccgacgacggcgacatgatctacatcagcgacaacgtgaacaagtacatgggcctgacccagttcgagctgaccggccacagcgtgttcgacttcacccacccctgcgaccacgaggagatgagagagatgctgacccacagaaacggcctggtgaagaagggcaaggagcagaacacccagagaagcttcttcctgagaatgaagtgcaccctgaccagcagaggcagaaccatgaacatcaagagcgccacctggaaggtgctgcactgcaccggccacatccacgtgtacgacaccaacagcaaccagccccagtgcggctacaagaagccccccatgacctgcctggtgctgatctgcgagcccatcccccaccccagcaacatcgagatccccctggacagcaagaccttcctgagcagacacagcctggacatgaagttcagctactgcgacgagagaatcaccgagctgatgggctacgagcccgaggagctgctgggcagaagcatctacgagtactaccacgccctggacagcgaccacctgaccaagacccaccacgacatgttcaccaagggccaggtgaccaccggccagtacagaatgctggccaagagaggcggctacgtgtgggtggagacccaggccaccgtgatctacaacaccaagaacagccagccccagtgcatcgtgtgcgtgaactacgtggtgagcggcatcatccagcacgacctgatcttcagcctgcagcagaccgagtgcgtgctgaagcccgtggagagcagcgacatgaagatgacccagctgttcaccaaggtggagagcgaggacaccagcagcctgttcgacaagctgaagaaggagcccgacgccctgaccctgctggcccccgccgccggcgacaccatcatcagcctggacttcggcagcaacgacaccgagaccgacgaccagcagctggaggaggtgcccctgtacaacgacgtgatgctgcccagccccaacgagaagctgcagaacatcaacctggccatgagccccctgcccaccgccgagacccccaagcccctgagaagcagcgccgaccccgccctgaaccaggaggtggccctgaagctggagcccaaccccgagagcctggagctgagcttcaccatgccccagatccaggaccagacccccagccccagcgacggcagcaccagacagagcagccccgagcccaacagccccagcgagtactgcttctacgtggacagcgacatggtgaacgagttcaagctggagctggtggagaagctgttcgccgaggacaccgaggccaagaaccccttcagcacccaggacaccgacctggacctggagatgctggccccctacatccccatggacgacgacttccagctgagaagcttcgaccagctgagccccctggagagcagcagcgccagccccgagagcgccagcccccagagcaccgtgaccgtgttccagcagacccagatccaggagcccaccgccaacgccaccaccaccaccgccaccaccgacgagctgaagaccgtgaccaaggacagaatggaggacatcaagatcctgatcgccagccccagccccacccacatccacaaggagaccaccagcgccaccagcagcccctacagagacacccagagcagaaccgccagccccaacagagccggcaagggcgtgatcgagcagaccgagaagagccaccccagaagccccaacgtgctgagcgtggccctgagccagagaaccaccgtgcccgaggaggagctgaaccccaagatcctggccctgcagaacgcccagagaaagagaaagatggagcacgacggcagcctgttccaggccgtgggcatcatctag

SEQ ID NO: 11025 - DNA, 2481 bp, synthetic construct
  misc_feature 1..2481: note = Description of Artificial Sequence: Synthetic coding sequence
  source 1..2481: mol_type = other DNA
atggagggcgccggcggcgccaacgacaagaagaagatcagcagcgagagaagaaaggagaagagcagagacgccgccagaagcagaagaagcaaggagagcgaggtgttctacgagctggcccaccagctgcccctgccccacaacgtgagcagccacctggacaaggccagcgtgatgagactgaccatcagctacctgagagtgagaaagctgctggacgccggcgacctggacatcgaggacgacatgaaggcccagatgaactgcttctacctgaaggccctggacggcttcgtgatggtgctgaccgacgacggcgacatgatctacatcagcgacaacgtgaacaagtacatgggcctgacccagttcgagctgaccggccacagcgtgttcgacttcacccacccctgcgaccacgaggagatgagagagatgctgacccacagaaacggcctggtgaagaagggcaaggagcagaacacccagagaagcttcttcctgagaatgaagtgcaccctgaccagcagaggcagaaccatgaacatcaagagcgccacctggaaggtgctgcactgcaccggccacatccacgtgtacgacaccaacagcaaccagccccagtgcggctacaagaagccccccatgacctgcctggtgctgatctgcgagcccatcccccaccccagcaacatcgagatccccctggacagcaagaccttcctgagcagacacagcctggacatgaagttcagctactgcgacgagagaatcaccgagctgatgggctacgagcccgaggagctgctgggcagaagcatctacgagtactaccacgccctggacagcgaccacctgaccaagacccaccacgacatgttcaccaagggccaggtgaccaccggccagtacagaatgctggccaagagaggcggctacgtgtgggtggagacccaggccaccgtgatctacaacaccaagaacagccagccccagtgcatcgtgtgcgtgaactacgtggtgagcggcatcatccagcacgacctgatcttcagcctgcagcagaccgagtgcgtgctgaagcccgtggagagcagcgacatgaagatgacccagctgttcaccaaggtggagagcgaggacaccagcagcctgttcgacaagctgaagaaggagcccgacgccctgaccctgctggcccccgccgccggcgacaccatcatcagcctggacttcggcagcaacgacaccgagaccgacgaccagcagctggaggaggtgcccctgtacaacgacgtgatgctgcccagccccaacgagaagctgcagaacatcaacctggccatgagccccctgcccaccgccgagacccccaagcccctgagaagcagcgccgaccccgccctgaaccaggaggtggccctgaagctggagcccaaccccgagagcctggagctgagcttcaccatgccccagatccaggaccagacccccagccccagcgacggcagcaccagacagagcagccccgagcccaacagccccagcgagtactgcttctacgtggacagcgacatggtgaacgagttcaagctggagctggtggagaagctgttcgccgaggacaccgaggccaagaaccccttcagcacccaggacaccgacctggacctggagatgctggccccctacatccccatggacgacgacttccagctgagaagcttcgaccagctgagccccctggagagcagcagcgccagccccgagagcgccagcccccagagcaccgtgaccgtgttccagcagacccagatccaggagcccaccgccaacgccaccaccaccaccgccaccaccgacgagctgaagaccgtgaccaaggacagaatggaggacatcaagatcctgatcgccagccccagccccacccacatccacaaggagaccaccagcgccaccagcagcccctacagagacacccagagcagaaccgccagccccaacagagccggcaagggcgtgatcgagcagaccgagaagagccaccccagaagccccaacgtgctgagcgtggccctgagccagagaaccaccgtgcccgaggaggagctgaaccccaagatcctggccctgcagaacgcccagagaaagagaaagatggagcacgacggcagcctgttccaggccgtgggcatcggcaccctgctgcagcagcccgacgaccacgccgccaccaccagcctgagctggaagagagtgaagggctgcaagagcagcgagcagaacggcatggagcagaagaccatcatcctgatccccagcgacctggcctgcagactgctgggccagagcatggacgagagcggcctgccccagctgaccagctacgactgcgaggtgaacgcccccatccagggcagcagaaacctgctgcagggcgaggagctgctgagagccctggaccaggtgaactag

SEQ ID NO: 11026 - DNA, 2304 bp, synthetic construct
  misc_feature 1..2304: note = Description of Artificial Sequence: Synthetic coding sequence
  source 1..2304: mol_type = other DNA
atgagactgaccatcagctacctgagagtgagaaagctgctggacgccggcgacctggacatcgaggacgacatgaaggcccagatgaactgcttctacctgaaggccctggacggcttcgtgatggtgctgaccgacgacggcgacatgatctacatcagcgacaacgtgaacaagtacatgggcctgacccagttcgagctgaccggccacagcgtgttcgacttcacccacccctgcgaccacgaggagatgagagagatgctgacccacagaaacggcctggtgaagaagggcaaggagcagaacacccagagaagcttcttcctgagaatgaagtgcaccctgaccagcagaggcagaaccatgaacatcaagagcgccacctggaaggtgctgcactgcaccggccacatccacgtgtacgacaccaacagcaaccagccccagtgcggctacaagaagccccccatgacctgcctggtgctgatctgcgagcccatcccccaccccagcaacatcgagatccccctggacagcaagaccttcctgagcagacacagcctggacatgaagttcagctactgcgacgagagaatcaccgagctgatgggctacgagcccgaggagctgctgggcagaagcatctacgagtactaccacgccctggacagcgaccacctgaccaagacccaccacgacatgttcaccaagggccaggtgaccaccggccagtacagaatgctggccaagagaggcggctacgtgtgggtggagacccaggccaccgtgatctacaacaccaagaacagccagccccagtgcatcgtgtgcgtgaactacgtggtgagcggcatcatccagcacgacctgatcttcagcctgcagcagaccgagtgcgtgctgaagcccgtggagagcagcgacatgaagatgacccagctgttcaccaaggtggagagcgaggacaccagcagcctgttcgacaagctgaagaaggagcccgacgccctgaccctgctggcccccgccgccggcgacaccatcatcagcctggacttcggcagcaacgacaccgagaccgacgaccagcagctggaggaggtgcccctgtacaacgacgtgatgctgcccagccccaacgagaagctgcagaacatcaacctggccatgagccccctgcccaccgccgagacccccaagcccctgagaagcagcgccgaccccgccctgaaccaggaggtggccctgaagctggagcccaaccccgagagcctggagctgagcttcaccatgccccagatccaggaccagacccccagccccagcgacggcagcaccagacagagcagccccgagcccaacagccccagcgagtactgcttctacgtggacagcgacatggtgaacgagttcaagctggagctggtggagaagctgttcgccgaggacaccgaggccaagaaccccttcagcacccaggacaccgacctggacctggagatgctggccccctacatccccatggacgacgacttccagctgagaagcttcgaccagctgagccccctggagagcagcagcgccagccccgagagcgccagcccccagagcaccgtgaccgtgttccagcagacccagatccaggagcccaccgccaacgccaccaccaccaccgccaccaccgacgagctgaagaccgtgaccaaggacagaatggaggacatcaagatcctgatcgccagccccagccccacccacatccacaaggagaccaccagcgccaccagcagcccctacagagacacccagagcagaaccgccagccccaacagagccggcaagggcgtgatcgagcagaccgagaagagccaccccagaagccccaacgtgctgagcgtggccctgagccagagaaccaccgtgcccgaggaggagctgaaccccaagatcctggccctgcagaacgcccagagaaagagaaagatggagcacgacggcagcctgttccaggccgtgggcatcggcaccctgctgcagcagcccgacgaccacgccgccaccaccagcctgagctggaagagagtgaagggctgcaagagcagcgagcagaacggcatggagcagaagaccatcatcctgatccccagcgacctggcctgcagactgctgggccagagcatggacgagagcggcctgccccagctgaccagctacgactgcgaggtgaacgcccccatccagggcagcagaaacctgctgcagggcgaggagctgctgagagccctggaccaggtgaactag

SEQ ID NO: 11027 - DNA, 2484 bp, synthetic construct
  misc_feature 1..2484: note = Description of Artificial Sequence: Synthetic coding sequence
  source 1..2484: mol_type = other DNA
atggagggcgccggcggcgccaacgacaagaagaacagaatcagcagcgagagaagaaaggagaagagcagagacgccgccagaagcagaagaagcaaggagagcgaggtgttctacgagctggcccaccagctgcccctgccccacaacgtgagcagccacctggacaaggccagcgtgatgagactgaccatcagctacctgagagtgagaaagctgctggacgccggcgacctggacatcgaggacgacatgaaggcccagatgaactgcttctacctgaaggccctggacggcttcgtgatggtgctgaccgacgacggcgacatgatctacatcagcgacaacgtgaacaagtacatgggcctgacccagttcgagctgaccggccacagcgtgttcgacttcacccacccctgcgaccacgaggagatgagagagatgctgacccacagaaacggcctggtgaagaagggcaaggagcagaacacccagagaagcttcttcctgagaatgaagtgcaccctgaccagcagaggcagaaccatgaacatcaagagcgccacctggaaggtgctgcactgcaccggccacatccacgtgtacgacaccaacagcaaccagccccagtgcggctacaagaagccccccatgacctgcctggtgctgatctgcgagcccatcccccaccccagcaacatcgagatccccctggacagcaagaccttcctgagcagacacagcctggacatgaagttcagctactgcgacgagagaatcaccgagctgatgggctacgagcccgaggagctgctgggcagaagcatctacgagtactaccacgccctggacagcgaccacctgaccaagacccaccacgacatgttcaccaagggccaggtgaccaccggccagtacagaatgctggccaagagaggcggctacgtgtgggtggagacccaggccaccgtgatctacaacaccaagaacagccagccccagtgcatcgtgtgcgtgaactacgtggtgagcggcatcatccagcacgacctgatcttcagcctgcagcagaccgagtgcgtgctgaagcccgtggagagcagcgacatgaagatgacccagctgttcaccaaggtggagagcgaggacaccagcagcctgttcgacaagctgaagaaggagcccgacgccctgaccctgctggcccccgccgccggcgacaccatcatcagcctggacttcggcagcaacgacaccgagaccgacgaccagcagctggaggaggtgcccctgtacaacgacgtgatgctgcccagccccaacgagaagctgcagaacatcaacctggccatgagccccctgcccaccgccgagacccccaagcccctgagaagcagcgccgaccccgccctgaaccaggaggtggccctgaagctggagcccaaccccgagagcctggagctgagcttcaccatgccccagatccaggaccagacccccagccccagcgacggcagcaccagacagagcagccccgagcccaacagccccagcgagtactgcttctacgtggacagcgacatggtgaacgagttcaagctggagctggtggagaagctgttcgccgaggacaccgaggccaagaaccccttcagcacccaggacaccgacctggacctggagatgctggccccctacatccccatggacgacgacttccagctgagaagcttcgaccagctgagccccctggagagcagcagcgccagccccgagagcgccagcccccagagcaccgtgaccgtgttccagcagacccagatccaggagcccaccgccaacgccaccaccaccaccgccaccaccgacgagctgaagaccgtgaccaaggacagaatggaggacatcaagatcctgatcgccagccccagccccacccacatccacaaggagaccaccagcgccaccagcagcccctacagagacacccagagcagaaccgccagccccaacagagccggcaagggcgtgatcgagcagaccgagaagagccaccccagaagccccaacgtgctgagcgtggccctgagccagagaaccaccgtgcccgaggaggagctgaaccccaagatcctggccctgcagaacgcccagagaaagagaaagatggagcacgacggcagcctgttccaggccgtgggcatcggcaccctgctgcagcagcccgacgaccacgccgccaccaccagcctgagctggaagagagtgaagggctgcaagagcagcgagcagaacggcatggagcagaagaccatcatcctgatccccagcgacctggcctgcagactgctgggccagagcatggacgagagcggcctgccccagctgaccagctacgactgcgaggtgaacgcccccatccagggcagcagaaacctgctgcagggcgaggagctgctgagagccctggaccaggtgaactag

SEQ ID NO: 11028 - DNA, 2553 bp, synthetic construct
  misc_feature 1..2553: note = Description of Artificial Sequence: Synthetic coding sequence
  source 1..2553: mol_type = other DNA
atgagcagccagtgcagaagcctggagaacaagttcgtgttcctgaaggagggcctgggcaacagcaagcccgaggagctggaggagatcagaatcgagaacggcagaatcagcagcgagagaagaaaggagaagagcagagacgccgccagaagcagaagaagcaaggagagcgaggtgttctacgagctggcccaccagctgcccctgccccacaacgtgagcagccacctggacaaggccagcgtgatgagactgaccatcagctacctgagagtgagaaagctgctggacgccggcgacctggacatcgaggacgacatgaaggcccagatgaactgcttctacctgaaggccctggacggcttcgtgatggtgctgaccgacgacggcgacatgatctacatcagcgacaacgtgaacaagtacatgggcctgacccagttcgagctgaccggccacagcgtgttcgacttcacccacccctgcgaccacgaggagatgagagagatgctgacccacagaaacggcctggtgaagaagggcaaggagcagaacacccagagaagcttcttcctgagaatgaagtgcaccctgaccagcagaggcagaaccatgaacatcaagagcgccacctggaaggtgctgcactgcaccggccacatccacgtgtacgacaccaacagcaaccagccccagtgcggctacaagaagccccccatgacctgcctggtgctgatctgcgagcccatcccccaccccagcaacatcgagatccccctggacagcaagaccttcctgagcagacacagcctggacatgaagttcagctactgcgacgagagaatcaccgagctgatgggctacgagcccgaggagctgctgggcagaagcatctacgagtactaccacgccctggacagcgaccacctgaccaagacccaccacgacatgttcaccaagggccaggtgaccaccggccagtacagaatgctggccaagagaggcggctacgtgtgggtggagacccaggccaccgtgatctacaacaccaagaacagccagccccagtgcatcgtgtgcgtgaactacgtggtgagcggcatcatccagcacgacctgatcttcagcctgcagcagaccgagtgcgtgctgaagcccgtggagagcagcgacatgaagatgacccagctgttcaccaaggtggagagcgaggacaccagcagcctgttcgacaagctgaagaaggagcccgacgccctgaccctgctggcccccgccgccggcgacaccatcatcagcctggacttcggcagcaacgacaccgagaccgacgaccagcagctggaggaggtgcccctgtacaacgacgtgatgctgcccagccccaacgagaagctgcagaacatcaacctggccatgagccccctgcccaccgccgagacccccaagcccctgagaagcagcgccgaccccgccctgaaccaggaggtggccctgaagctggagcccaaccccgagagcctggagctgagcttcaccatgccccagatccaggaccagacccccagccccagcgacggcagcaccagacagagcagccccgagcccaacagccccagcgagtactgcttctacgtggacagcgacatggtgaacgagttcaagctggagctggtggagaagctgttcgccgaggacaccgaggccaagaaccccttcagcacccaggacaccgacctggacctggagatgctggccccctacatccccatggacgacgacttccagctgagaagcttcgaccagctgagccccctggagagcagcagcgccagccccgagagcgccagcccccagagcaccgtgaccgtgttccagcagacccagatccaggagcccaccgccaacgccaccaccaccaccgccaccaccgacgagctgaagaccgtgaccaaggacagaatggaggacatcaagatcctgatcgccagccccagccccacccacatccacaaggagaccaccagcgccaccagcagcccctacagagacacccagagcagaaccgccagccccaacagagccggcaagggcgtgatcgagcagaccgagaagagccaccccagaagccccaacgtgctgagcgtggccctgagccagagaaccaccgtgcccgaggaggagctgaaccccaagatcctggccctgcagaacgcccagagaaagagaaagatggagcacgacggcagcctgttccaggccgtgggcatcggcaccctgctgcagcagcccgacgaccacgccgccaccaccagcctgagctggaagagagtgaagggctgcaagagcagcgagcagaacggcatggagcagaagaccatcatcctgatccccagcgacctggcctgcagactgctgggccagagcatggacgagagcggcctgccccagctgaccagctacgactgcgaggtgaacgcccccatccagggcagcagaaacctgctgcagggcgaggagctgctgagagccctggaccaggtgaactag

SEQ ID NO: 11029 - DNA, 1734 bp, synthetic construct
  misc_feature 1..1734: note = Description of Artificial Sequence: Synthetic coding sequence
  source 1..1734: mol_type = other DNA
atgaagttcagctactgcgacgagagaatcaccgagctgatgggctacgagcccgaggagctgctgggcagaagcatctacgagtactaccacgccctggacagcgaccacctgaccaagacccaccacgacatgttcaccaagggccaggtgaccaccggccagtacagaatgctggccaagagaggcggctacgtgtgggtggagacccaggccaccgtgatctacaacaccaagaacagccagccccagtgcatcgtgtgcgtgaactacgtggtgagcggcatcatccagcacgacctgatcttcagcctgcagcagaccgagtgcgtgctgaagcccgtggagagcagcgacatgaagatgacccagctgttcaccaaggtggagagcgaggacaccagcagcctgttcgacaagctgaagaaggagcccgacgccctgaccctgctggcccccgccgccggcgacaccatcatcagcctggacttcggcagcaacgacaccgagaccgacgaccagcagctggaggaggtgcccctgtacaacgacgtgatgctgcccagccccaacgagaagctgcagaacatcaacctggccatgagccccctgcccaccgccgagacccccaagcccctgagaagcagcgccgaccccgccctgaaccaggaggtggccctgaagctggagcccaaccccgagagcctggagctgagcttcaccatgccccagatccaggaccagacccccagccccagcgacggcagcaccagacagagcagccccgagcccaacagccccagcgagtactgcttctacgtggacagcgacatggtgaacgagttcaagctggagctggtggagaagctgttcgccgaggacaccgaggccaagaaccccttcagcacccaggacaccgacctggacctggagatgctggccccctacatccccatggacgacgacttccagctgagaagcttcgaccagctgagccccctggagagcagcagcgccagccccgagagcgccagcccccagagcaccgtgaccgtgttccagcagacccagatccaggagcccaccgccaacgccaccaccaccaccgccaccaccgacgagctgaagaccgtgaccaaggacagaatggaggacatcaagatcctgatcgccagccccagccccacccacatccacaaggagaccaccagcgccaccagcagcccctacagagacacccagagcagaaccgccagccccaacagagccggcaagggcgtgatcgagcagaccgagaagagccaccccagaagccccaacgtgctgagcgtggccctgagccagagaaccaccgtgcccgaggaggagctgaaccccaagatcctggccctgcagaacgcccagagaaagagaaagatggagcacgacggcagcctgttccaggccgtgggcatcggcaccctgctgcagcagcccgacgaccacgccgccaccaccagcctgagctggaagagagtgaagggctgcaagagcagcgagcagaacggcatggagcagaagaccatcatcctgatccccagcgacctggcctgcagactgctgggccagagcatggacgagagcggcctgccccagctgaccagctacgactgcgaggtgaacgcccccatccagggcagcagaaacctgctgcagggcgaggagctgctgagagccctggaccaggtgaactag

SEQ ID NO: 11030 - DNA, 2304 bp, synthetic construct; identical to SEQ ID NO: 11026
  misc_feature 1..2304: note = Description of Artificial Sequence: Synthetic coding sequence
  source 1..2304: mol_type = other DNA

SEQ ID NO: 11031 - DNA, 1296 bp, synthetic construct
  misc_feature 1..1296: note = Description of Artificial Sequence: Synthetic coding sequence
  source 1..1296: mol_type = other DNA
atggaggacatccagaccaacgccgagctgaagagcacccaggagcagagcgtgcccgccgagagcgccgccgtgctgaacgactacagcctgaccaagagccacgagatggagaacgtggacagcggcgagggccccgccaacgaggacgaggacatcggcgacgacagcatgaaggtgaaggacgagtacagcgagagagacgagaacgtgctgaagagcgagcccatgggcaacgccgaggagcccgagatcccctacagctacagcagagagtacaacgagtacgagaacatcaagctggagagacacgtggtgagcttcgacagcagcagacccaccagcggcaagatgaactgcgacgtgtgcggcctgagctgcatcagcttcaacgtgctgatggtgcacaagagaagccacaccggcgagagacccttccagtgcaaccagtgcggcgccagcttcacccagaagggcaacctgctgagacacatcaagctgcacaccggcgagaagcccttcaagtgccacctgtgcaactacgcctgccagagaagagacgccctgaccggccacctgagaacccacagcggcgagaagagacactgcttcgacgtgaactacaacagcagctacatgtacgagaaggagagcgagctgatccagaccagaatgatggaccaggccatcaacaacgccatcagctacctgggcgccgaggccctgagacccctggtgcagaccccccccgcccccaccagcgagatggtgcccgtgatcagcagcatgtaccccatcgccctgaccagagccgagatgagcaacggcgccccccaggagctggagaagaagagcatccacctgcccgagaagagcgtgcccagcgagagaggcctgagccccaacaacagcggccacgacagcaccgacaccgacagcaaccacgaggagagacagaaccacatctaccagcagaaccacatggtgctgagcagagccagaaacggcatgcccctgctgaaggaggtgcccagaagctacgagctgctgaagcccccccccatctgccccagagacagcgtgaaggtgatcaacaaggagggcgaggtgatggacgtgtacagatgcgaccactgcagagtgctgttcctggactacgtgatgttcaccatccacatgggctgccacggcttcagagaccccttcgagtgcaacatgtgcggctacagaagccacgacagatacgagttcagcagccacatcgccagaggcgagcacagagccctgctgaagtag

SEQ ID NO: 11032 - DNA, 1245 bp, synthetic construct
  misc_feature 1..1245: note = Description of Artificial Sequence: Synthetic coding sequence
  source 1..1245: mol_type = other DNA
atggaggacatccagaccaacgccgagctgaagagcacccaggagcagagcgtgcccgccgagagcgccgccgtgctgaacgactacagcctgaccaagagccacgagatggagaacgtggacagcggcgagggccccgccaacgaggacgaggacatcggcgacgacagcatgaaggtgaaggacgagtacagcgagagagacgagaacgtgctgaagagcgagcccatgggcaacgccgaggagcccgagatcccctacagctacagcagagagtacaacgagtacgagaacatcaagctggagagacacgtggtgagcttcgacagcagcagacccaccagcggcaagatgaactgcgacgtgtgcggcctgagctgcatcagcttcaacgtgctgatggtgcacaagagaagccacaccgccagcgccgaggccagacacatcaaggccgagatgggcagcgagagagccctggtgctggacagactggccagcaacgtggccaagagaaagagcagcatgccccagaagttcatcggcgagaagagacactgcttcgacgtgaactacaacagcagctacatgtacgagaaggagagcgagctgatccagaccagaatgatggaccaggccatcaacaacgccatcagctacctgggcgccgaggccctgagacccctggtgcagaccccccccgcccccaccagcgagatggtgcccgtgatcagcagcatgtaccccatcgccctgaccagagccgagatgagcaacggcgccccccaggagctggagaagaagagcatccacctgcccgagaagagcgtgcccagcgagagaggcctgagccccaacaacagcggccacgacagcaccgacaccgacagcaaccacgaggagagacagaaccacatctaccagcagaaccacatggtgctgagcagagccagaaacggcatgcccctgctgaaggaggtgcccagaagctacgagctgctgaagcccccccccatctgccccagagacagcgtgaaggtgatcaacaaggagggcgaggtgatggacgtgtacagatgcgaccactgcagagtgctgttcctggactacgtgatgttcaccatccacatgggctgccacggcttcagagaccccttcgagtgcaacatgtgcggctacagaagccacgacagatacgagttcagcagccacatcgccagaggcgagcacagagccctgctgaagtag

SEQ ID NO: 11033 - DNA, 1413 bp, synthetic construct
  misc_feature 1..1413: note = Description of Artificial Sequence: Synthetic coding sequence
  source 1..1413: mol_type = other DNA
atggaggacatccagaccaacgccgagctgaagagcacccaggagcagagcgtgcccgccgagagcgccgccgtgctgaacgactacagcctgaccaagagccacgagatggagaacgtggacagcggcgagggccccgccaacgaggacgaggacatcggcgacgacagcatgaaggtgaaggacgagtacagcgagagagacgagaacgtgctgaagagcgagcccatgggcaacgccgaggagcccgagatcccctacagctacagcagagagtacaacgagtacgagaacatcaagctggagagacacgtggtgagcttcgacagcagcagacccaccagcggcaagatgaactgcgacgtgtgcggcctgagctgcatcagcttcaacgtgctgatggtgcacaagagaagccacaccggcgagagacccttccagtgcaaccagtgcggcgccagcttcacccagaagggcaacctgctgagacacatcaagctgcacaccggcgagaagcccttcaagtgccacctgtgcaactacgcctgccagagaagagacgccctgaccggccacctgagaacccacagcgtggagaagccctacaagtgcgagttctgcggcagaagctacaagcagagaagcagcctggaggagcacaaggagagatgcagaaccttcctgcagagcaccgaccccggcgacaccggcgagaagagacactgcttcgacgtgaactacaacagcagctacatgtacgagaaggagagcgagctgatccagaccagaatgatggaccaggccatcaacaacgccatcagctacctgggcgccgaggccctgagacccctggtgcagaccccccccgcccccaccagcgagatggtgcccgtgatcagcagcatgtaccccatcgccctgaccagagccgagatgagcaacggcgccccccaggagctggagaagaagagcatccacctgcccgagaagagcgtgcccagcgagagaggcctgagccccaacaacagcggccacgacagcaccgacaccgacagcaaccacgaggagagacagaaccacatctaccagcagaaccacatggtgctgagcagagccagaaacggcatgcccctgctgaaggaggtgcccagaagctacgagctgctgaagcccccccccatctgccccagagacagcgtgaaggtgatcaacaaggagggcgaggtgatggacgtgtacagatgcgaccactgcagagtgctgttcctggactacgtgatgttcaccatccacatgggctgccacggcttcagagaccccttcgagtgcaacatgtgcggctacagaagccacgacagatacgagttcagcagccacatcgccagaggcgagcacagagccctgctgaagtag

SEQ ID NO: 11034 - DNA, 1413 bp, synthetic construct
  misc_feature 1..1413: note = Description of Artificial Sequence: Synthetic coding sequence
  source 1..1413: mol_type = other DNA
atggaggacatccagaccaacgccgagctgaagagcacccaggagcagagcgtgcccgccgagagcgccgccgtgctgaacgactacagcctgaccaagagccacgagatggagaacgtggacagcggcgagggccccgccaacgaggacgaggacatcggcgacgacagcatgaaggtgaaggacgagtacagcgagagagacgagaacgtgctgaagagcgagcccatgggcaacgccgaggagcccgagatcccctacagctacagcagagagtacaacgagtacgagaacatcaagctggagagacacgtggtgagcttcgacagcagcagacccaccagcggcaagatgaactgcgacgtgtgcggcctgagctgcatcagcttcaacgtgctgatggtgcacaagagaagccacaccggcgagagacccttccagtgcaaccagtgcggcgccagcttcacccagaagggcaacctgctgagacacatcaagctgcacaccggcgagaagcccttcaagtgccacctgtgcaactacgcctgccagagaagagacgccctgaccggccacctgagaacccacagcgccagcgccgaggccagacacatcaaggccgagatgggcagcgagagagccctggtgctggacagactggccagcaacgtggccaagagaaagagcagcatgccccagaagttcatcggcgagaagagacactgcttcgacgtgaactacaacagcagctacatgtacgagaaggagagcgagctgatccagaccagaatgatggaccaggccatcaacaacgccatcagctacctgggcgccgaggccctgagacccctggtgcagaccccccccgcccccaccagcgagatggtgcccgtgatcagcagcatgtaccccatcgccctgaccagagccgagatgagcaacggcgccccccaggagctggagaagaagagcatccacctgcccgagaagagcgtgcccagcgagagaggcctgagccccaacaacagcggccacgacagcaccgacaccgacagcaaccacgaggagagacagaaccacatctaccagcagaaccacatggtgctgagcagagccagaaacggcatgcccctgctgaaggaggtgcccagaagctacgagctgctgaagcccccccccatctgccccagagacagcgtgaaggtgatcaacaaggagggcgaggtgatggacgtgtacagatgcgaccactgcagagtgctgttcctggactacgtgatgttcaccatccacatgggctgccacggcttcagagaccccttcgagtgcaacatgtgcggctacagaagccacgacagatacgagttcagcagccacatcgccagaggcgagcacagagccctgctgaagtag

SEQ ID NO: 11035 - DNA, 1101 bp, synthetic construct
  misc_feature 1..1101: note = Description of Artificial Sequence: Synthetic coding sequence
  source 1..1101: mol_type = other DNA
atggaggacatccagaccaacgccgagctgaagagcacccaggagcagagcgtgcccgccgagagcgccgccgtgctgaacgactacagcctgaccaagagccacgagatggagaacgtggacagcggcgagggccccgccaacgaggacgaggacatcggcgtggagaagccctacaagtgcgagttctgcggcagaagctacaagcagagaagcagcctggaggagcacaaggagagatgcagaaccttcctgcagagcaccgaccccggcgacaccgccagcgccgaggccagacacatcaaggccgagatgggcagcgagagagccctggtgctggacagactggccagcaacgtggccaagagaaagagcagcatgccccagaagttcatcggcgagaagagacactgcttcgacgtgaactacaacagcagctacatgtacgagaaggagagcgagctgatccagaccagaatgatggaccaggccatcaacaacgccatcagctacctgggcgccgaggccctgagacccctggtgcagaccccccccgcccccaccagcgagatggtgcccgtgatcagcagcatgtaccccatcgccctgaccagagccgagatgagcaacggcgccccccaggagctggagaagaagagcatccacctgcccgagaagagcgtgcccagcgagagaggcctgagccccaacaacagcggccacgacagcaccgacaccgacagcaaccacgaggagagacagaaccacatctaccagcagaaccacatggtgctgagcagagccagaaacggcatgcccctgctgaaggaggtgcccagaagctacgagctgctgaagcccccccccatctgccccagagacagcgtgaaggtgatcaacaaggagggcgaggtgatggacgtgtacagatgcgaccactgcagagtgctgttcctggactacgtgatgttcaccatccacatgggctgccacggcttcagagaccccttcgagtgcaacatgtgcggctacagaagccacgacagatacgagttcagcagccacatcgccagaggcgagcacagagccctgctgaagtag

SEQ ID NO: 11036 - DNA, 1128 bp, synthetic construct
  misc_feature 1..1128: note = Description of Artificial Sequence: Synthetic coding sequence
  source 1..1128: mol_type = other DNA
atggaggacatccagaccaacgccgagctgaagagcacccaggagcagagcgtgcccgccgagagcgccgccgtgctgaacgactacagcctgaccaagagccacgagatggagaacgtggacagcggcgagggccccgccaacgaggacgaggacatcggcgacgacagcatgaaggtgaaggacgagtacagcgagagagacgagaacgtgctgaagagcgagcccatgggcaacgccgaggagcccgagatcccctacagctacagcagagagtacaacgagtacgagaacatcaagctggagagacacgtggtgagcttcgacagcagcagacccaccagcggcaagatgaactgcgacgtgtgcggcctgagctgcatcagcttcaacgtgctgatggtgcacaagagaagccacaccggcgagaagagacactgcttcgacgtgaactacaacagcagctacatgtacgagaaggagagcgagctgatccagaccagaatgatggaccaggccatcaacaacgccatcagctacctgggcgccgaggccctgagacccctggtgcagaccccccccgcccccaccagcgagatggtgcccgtgatcagcagcatgtaccccatcgccctgaccagagccgagatgagcaacggcgccccccaggagctggagaagaagagcatccacctgcccgagaagagcgtgcccagcgagagaggcctgagccccaacaacagcggccacgacagcaccgacaccgacagcaaccacgaggagagacagaaccacatctaccagcagaaccacatggtgctgagcagagccagaaacggcatgcccctgctgaaggaggtgcccagaagctacgagctgctgaagcccccccccatctgccccagagacagcgtgaaggtgatcaacaaggagggcgaggtgatggacgtgtacagatgcgaccactgcagagtgctgttcctggactacgtgatgttcaccatccacatgggctgccacggcttcagagaccccttcgagtgcaacatgtgcggctacagaagccacgacagatacgagttcagcagccacatcgccagaggcgagcacagagccctgctgaagtag

SEQ ID NO: 11037 - DNA, 867 bp, synthetic construct
  misc_feature 1..867: note = Description of Artificial Sequence: Synthetic coding sequence
  source 1..867: mol_type = other DNA
atggaggacatccagaccaacgccgagctgaagagcacccaggagcagagcgtgcccgccgagagcgccgccgtgctgaacgactacagcctgaccaagagccacgagatggagaacgtggacagcggcgagggccccgccaacgaggacgaggacatcggcggcgagaagagacactgcttcgacgtgaactacaacagcagctacatgtacgagaaggagagcgagctgatccagaccagaatgatggaccaggccatcaacaacgccatcagctacctgggcgccgaggccctgagacccctggtgcagaccccccccgcccccaccagcgagatggtgcccgtgatcagcagcatgtaccccatcgccctgaccagagccgagatgagcaacggcgccccccaggagctggagaagaagagcatccacctgcccgagaagagcgtgcccagcgagagaggcctgagccccaacaacagcggccacgacagcaccgacaccgacagcaaccacgaggagagacagaaccacatctaccagcagaaccacatggtgctgagcagagccagaaacggcatgcccctgctgaaggaggtgcccagaagctacgagctgctgaagcccccccccatctgccccagagacagcgtgaaggtgatcaacaaggagggcgaggtgatggacgtgtacagatgcgaccactgcagagtgctgttcctggactacgtgatgttcaccatccacatgggctgccacggcttcagagaccccttcgagtgcaacatgtgcggctacagaagccacgacagatacgagttcagcagccacatcgccagaggcgagcacagagccctgctgaagtag

SEQ ID NO: 11038 - DNA, 1269 bp, synthetic construct
  misc_feature 1..1269: note = Description of Artificial Sequence: Synthetic coding sequence
  source 1..1269: mol_type = other DNA
atggaggacatccagaccaacgccgagctgaagagcacccaggagcagagcgtgcccgccgagagcgccgccgtgctgaacgactacagcctgaccaagagccacgagatggagaacgtggacagcggcgagggccccgccaacgaggacgaggacatcggcggcgagagacccttccagtgcaaccagtgcggcgccagcttcacccagaagggcaacctgctgagacacatcaagctgcacaccggcgagaagcccttcaagtgccacctgtgcaactacgcctgccagagaagagacgccctgaccggccacctgagaacccacagcgtggagaagccctacaagtgcgagttctgcggcagaagctacaagcagagaagcagcctggaggagcacaaggagagatgcagaaccttcctgcagagcaccgaccccggcgacaccgccagcgccgaggccagacacatcaaggccgagatgggcagcgagagagccctggtgctggacagactggccagcaacgtggccaagagaaagagcagcatgccccagaagttcatcggcgagaagagacactgcttcgacgtgaactacaacagcagctacatgtacgagaaggagagcgagctgatccagaccagaatgatggaccaggccatcaacaacgccatcagctacctgggcgccgaggccctgagacccctggtgcagaccccccccgcccccaccagcgagatggtgcccgtgatcagcagcatgtaccccatcgccctgaccagagccgagatgagcaacggcgccccccaggagctggagaagaagagcatccacctgcccgagaagagcgtgcccagcgagagaggcctgagccccaacaacagcggccacgacagcaccgacaccgacagcaaccacgaggagagacagaaccacatctaccagcagaaccacatggtgctgagcagagccagaaacggcatgcccctgctgaaggaggtgcccagaagctacgagctgctgaagcccccccccatctgccccagagacagcgtgaaggtgatcaacaaggagggcgaggtgatggacgtgtacagatgcgaccactgcagagtgctgttcctggactacgtgatgttcaccatccacatgggctgccacggcttcagagaccccttcgagtgcaacatgtgcggctacagaagccacgacagatacgagttcagcagccacatcgccagaggcgagcacagagccctgctgaagtag

SEQ ID NO: 11039 - DNA, 984 bp, synthetic construct
  misc_feature 1..984: note = Description of Artificial Sequence: Synthetic coding sequence
  source 1..984: mol_type = other DNA
atggaggacatccagaccaacgccgagctgaagagcacccaggagcagagcgtgcccgccgagagcgccgccgtgctgaacgactacagcctgaccaagagccacgagatggagaacgtggacagcggcgagggccccgccaacgaggacgaggacatcggcgccagcgccgaggccagacacatcaaggccgagatgggcagcgagagagccctggtgctggacagactggccagcaacgtggccaagagaaagagcagcatgccccagaagttcatcggcgagaagagacactgcttcgacgtgaactacaacagcagctacatgtacgagaaggagagcgagctgatccagaccagaatgatggaccaggccatcaacaacgccatcagctacctgggcgccgaggccctgagacccctggtgcagaccccccccgcccccaccagcgagatggtgcccgtgatcagcagcatgtaccccatcgccctgaccagagccgagatgagcaacggcgccccccaggagctggagaagaagagcatccacctgcccgagaagagcgtgcccagcgagagaggcctgagccccaacaacagcggccacgacagcaccgacaccgacagcaaccacgaggagagacagaaccacatctaccagcagaaccacatggtgctgagcagagccagaaacggcatgcccctgctgaaggaggtgcccagaagctacgagctgctgaagcccccccccatctgccccagagacagcgtgaaggtgatcaacaaggagggcgaggtgatggacgtgtacagatgcgaccactgcagagtgctgttcctggactacgtgatgttcaccatccacatgggctgccacggcttcagagaccccttcgagtgcaacatgtgcggctacagaagccacgacagatacgagttcagcagccacatcgccagaggcgagcacagagccctgctgaagtag

SEQ ID NO: 11040 - DNA, 1392 bp, synthetic construct
  misc_feature 1..1392: note = Description of Artificial Sequence: Synthetic coding sequence
  source 1..1392: mol_type = other DNA
tgacaggagcagagcgtgcccgccgacgacagcatgaaggtgaaggacgagtacagcgagagagacgagaacgtgctgaagagcgagcccatgggcaacgccgaggagcccgagatcccctacagctacagcagagagtacaacgagtacgagaacatcaagctggagagacacgtggtgagcttcgacagcagcagacccaccagcggcaagatgaactgcgacgtgtgcggcctgagctgcatcagcttcaacgtgctgatggtgcacaagagaagccacaccggcgagagacccttccagtgcaaccagtgcggcgccagcttcacccagaagggcaacctgctgagacacatcaagctgcacaccggcgagaagcccttcaagtgccacctgtgcaactacgcctgccagagaagagacgccctgaccggccacctgagaacccacagcgtggagaagccctacaagtgcgagttctgcggcagaagctacaagcagagaagcagcctggaggagcacaaggagagatgcagaaccttcctgcagagcaccgaccccggcgacaccgccagcgccgaggccagacacatcaaggccgagatgggcagcgagagagccctggtgctggacagactggccagcaacgtggccaagagaaagagcagcatgccccagaagttcatcggcgagaagagacactgcttcgacgtgaactacaacagcagctacatgtacgagaaggagagcgagctgatccagaccagaatgatggaccaggccatcaacaacgccatcagctacctgggcgccgaggccctgagacccctggtgcagaccccccccgcccccaccagcgagatggtgcccgtgatcagcagcatgtaccccatcgccctgaccagagccgagatgagcaacggcgccccccaggagctggagaagaagagcatccacctgcccgagaagagcgtgcccagcgagagaggcctgagccccaacaacagcggccacgacagcaccgacaccgacagcaaccacgaggagagacagaaccacatctaccagcagaaccacatggtgctgagcagagccagaaacggcatgcccctgctgaaggaggtgcccagaagctacgagctgctgaagcccccccccatctgccccagagacagcgtgaaggtgatcaacaaggagggcgaggtgatggacgtgtacagatgcgaccactgcagagtgctgttcctggactacgtgatgttcaccatccacatgggctgccacggcttcagagaccccttcgagtgcaacatgtgcggctacagaagccacgacagatacgagttcagcagccacatcgccagaggcgagcacagagccctgctgaagtag

SEQ ID NO: 11041 - DNA, 1275 bp, synthetic construct
  misc_feature 1..1275: note = Description of Artificial Sequence: Synthetic coding sequence
  source 1..1275: mol_type = other DNA
tgacaggagcagagcgtgcccgccgacgacagcatgaaggtgaaggacgagtacagcgagagagacgagaacgtgctgaagagcgagcccatgggcaacgccgaggagcccgagatcccctacagctacagcagagagtacaacgagtacgagaacatcaagctggagagacacgtggtgagcttcgacagcagcagacccaccagcggcaagatgaactgcgacgtgtgcggcctgagctgcatcagcttcaacgtgctgatggtgcacaagagaagccacaccggcgagagacccttccagtgcaaccagtgcggcgccagcttcacccagaagggcaacctgctgagacacatcaagctgcacaccggcgagaagcccttcaagtgccacctgtgcaactacgcctgccagagaagagacgccctgaccggccacctgagaacccacagcgccagcgccgaggccagacacatcaaggccgagatgggcagcgagagagccctggtgctggacagactggccagcaacgtggccaagagaaagagcagcatgccccagaagttcatcggcgagaagagacactgcttcgacgtgaactacaacagcagctacatgtacgagaaggagagcgagctgatccagaccagaatgatggaccaggccatcaacaacgccatcagctacctgggcgccgaggccctgagacccctggtgcagaccccccccgcccccaccagcgagatggtgcccgtgatcagcagcatgtaccccatcgccctgaccagagccgagatgagcaacggcgccccccaggagctggagaagaagagcatccacctgcccgagaagagcgtgcccagcgagagaggcctgagccccaacaacagcggccacgacagcaccgacaccgacagcaaccacgaggagagacagaaccacatctaccagcagaaccacatggtgctgagcagagccagaaacggcatgcccctgctgaaggaggtgcccagaagctacgagctgctgaagcccccccccatctgccccagagacagcgtgaaggtgatcaacaaggagggcgaggtgatggacgtgtacagatgcgaccactgcagagtgctgttcctggactacgtgatgttcaccatccacatgggctgccacggcttcagagaccccttcgagtgcaacatgtgcggctacagaagccacgacagatacgagttcagcagccacatcgccagaggcgagcacagagccctgctgaagtag

SEQ ID NO: 11042 - DNA, 1362 bp, synthetic construct
  misc_feature 1..1362: note = Description of Artificial Sequence: Synthetic coding sequence
  source 1..1362: mol_type = other DNA
atggaggacatccagaccaacgccgagctgaagagcacccaggagcagagcgtgcccgccgagagcgccgccgtgctgaacgactacagcctgaccaagagccacgagatggagaacgtggacagcggcgagggccccgccaacgaggacgaggacatcggcgacgacagcatgaaggtgaaggacgagtacagcgagagagacgagaacgtgctgaagagcgagcccatgggcaacgccgaggagcccgagatcccctacagctacagcagagagtacaacgagtacgagaacatcaagctggagagacacgtggtgagcttcgacagcagcagacccaccagcggcaagatgaactgcgacgtgtgcggcctgagctgcatcagcttcaacgtgctgatggtgcacaagagaagccacaccgtggagaagccctacaagtgcgagttctgcggcagaagctacaagcagagaagcagcctggaggagcacaaggagagatgcagaaccttcctgcagagcaccgaccccggcgacaccgccagcgccgaggccagacacatcaaggccgagatgggcagcgagagagccctggtgctggacagactggccagcaacgtggccaagagaaagagcagcatgccccagaagttcatcggcgagaagagacactgcttcgacgtgaactacaacagcagctacatgtacgagaaggagagcgagctgatccagaccagaatgatggaccaggccatcaacaacgccatcagctacctgggcgccgaggccctgagacccctggtgcagaccccccccgcccccaccagcgagatggtgcccgtgatcagcagcatgtaccccatcgccctgaccagagccgagatgagcaacggcgccccccaggagctggagaagaagagcatccacctgcccgagaagagcgtgcccagcgagagaggcctgagccccaacaacagcggccacgacagcaccgacaccgacagcaaccacgaggagagacagaaccacatctaccagcagaaccacatggtgctgagcagagccagaaacggcatgcccctgctgaaggaggtgcccagaagctacgagctgctgaagcccccccccatctgccccagagacagcgtgaaggtgatcaacaaggagggcgaggtgatggacgtgtacagatgcgaccactgcagagtgctgttcctggactacgtgatgttcaccatccacatgggctgccacggcttcagagaccccttcgagtgcaacatgtgcggctacagaagccacgacagatacgagttcagcagccacatcgccagaggcgagcacagagccctgctgaagtag

SEQ ID NO: 11043 - DNA, 1530 bp, synthetic construct
  misc_feature 1..1530: note = Description of Artificial Sequence: Synthetic coding sequence
  source 1..1530: mol_type = other DNA
atggaggacatccagaccaacgccgagctgaagagcacccaggagcagagcgtgcccgccgagagcgccgccgtgctgaacgactacagcctgaccaagagccacgagatggagaacgtggacagcggcgagggccccgccaacgaggacgaggacatcggcgacgacagcatgaaggtgaaggacgagtacagcgagagagacgagaacgtgctgaagagcgagcccatgggcaacgccgaggagcccgagatcccctacagctacagcagagagtacaacgagtacgagaacatcaagctggagagacacgtggtgagcttcgacagcagcagacccaccagcggcaagatgaactgcgacgtgtgcggcctgagctgcatcagcttcaacgtgctgatggtgcacaagagaagccacaccggcgagagacccttccagtgcaaccagtgcggcgccagcttcacccagaagggcaacctgctgagacacatcaagctgcacaccggcgagaagcccttcaagtgccacctgtgcaactacgcctgccagagaagagacgccctgaccggccacctgagaacccacagcgtggagaagccctacaagtgcgagttctgcggcagaagctacaagcagagaagcagcctggaggagcacaaggagagatgcagaaccttcctgcagagcaccgaccccggcgacaccgccagcgccgaggccagacacatcaaggccgagatgggcagcgagagagccctggtgctggacagactggccagcaacgtggccaagagaaagagcagcatgccccagaagttcatcggcgagaagagacactgcttcgacgtgaactacaacagcagctacatgtacgagaaggagagcgagctgatccagaccagaatgatggaccaggccatcaacaacgccatcagctacctgggcgccgaggccctgagacccctggtgcagaccccccccgcccccaccagcgagatggtgcccgtgatcagcagcatgtaccccatcgccctgaccagagccgagatgagcaacggcgccccccaggagctggagaagaagagcatccacctgcccgagaagagcgtgcccagcgagagaggcctgagccccaacaacagcggccacgacagcaccgacaccgacagcaaccacgaggagagacagaaccacatctaccagcagaaccacatggtgctgagcagagccagaaacggcatgcccctgctgaaggaggtgcccagaagctacgagctgctgaagcccccccccatctgccccagagacagcgtgaaggtgatcaacaaggagggcgaggtgatggacgtgtacagatgcgaccactgcagagtgctgttcctggactacgtgatgttcaccatccacatgggctgccacggcttcagagaccccttcgagtgcaacatgtgcggctacagaagccacgacagatacgagttcagcagccacatcgccagaggcgagcacagagccctgctgaagtag

SEQ ID NO: 11044 - DNA, 1428 bp, synthetic construct
  misc_feature 1..1428: note = Description of Artificial Sequence: Synthetic coding sequence
  source 1..1428: mol_type = other DNA
atggaggacatccagaccaacgccgagctgaagagcacccaggagcagagcgtgcccgccgacgacagcatgaaggtgaaggacgagtacagcgagagagacgagaacgtgctgaagagcgagcccatgggcaacgccgaggagcccgagatcccctacagctacagcagagagtacaacgagtacgagaacatcaagctggagagacacgtggtgagcttcgacagcagcagacccaccagcggcaagatgaactgcgacgtgtgcggcctgagctgcatcagcttcaacgtgctgatggtgcacaagagaagccacaccggcgagagacccttccagtgcaaccagtgcggcgccagcttcacccagaagggcaacctgctgagacacatcaagctgcacaccggcgagaagcccttcaagtgccacctgtgcaactacgcctgccagagaagagacgccctgaccggccacctgagaacccacagcgtggagaagccctacaagtgcgagttctgcggcagaagctacaagcagagaagcagcctggaggagcacaaggagagatgcagaaccttcctgcagagcaccgaccccggcgacaccgccagcgccgaggccagacacatcaaggccgagatgggcagcgagagagccctggtgctggacagactggccagcaacgtggccaagagaaagagcagcatgccccagaagttcatcggcgagaagagacactgcttcgacgtgaactacaacagcagctacatgtacgagaaggagagcgagctgatccagaccagaatgatggaccaggccatcaacaacgccatcagctacctgggcgccgaggccctgagacccctggtgcagaccccccccgcccccaccagcgagatggtgcccgtgatcagcagcatgtaccccatcgccctgaccagagccgagatgagcaacggcgccccccaggagctggagaagaagagcatccacctgcccgagaagagcgtgcccagcgagagaggcctgagccccaacaacagcggccacgacagcaccgacaccgacagcaaccacgaggagagacagaaccacatctaccagcagaaccacatggtgctgagcagagccagaaacggcatgcccctgctgaaggaggtgcccagaagctacgagctgctgaagcccccccccatctgccccagagacagcgtgaaggtgatcaacaaggagggcgaggtgatggacgtgtacagatgcgaccactgcagagtgctgttcctggactacgtgatgttcaccatccacatgggctgccacggcttcagagaccccttcgagtgcaacatgtgcggctacagaagccacgacagatacgagttcagcagccacatcgccagaggcgagcacagagccctgctgaagtag

SEQ ID NO: 11045 - DNA, 450 bp, synthetic construct
  misc_feature 1..450: note = Description of Artificial Sequence: Synthetic coding sequence
  source 1..450: mol_type = other DNA
atgaaggtggccagcggcagcaccgccaccgccgccgccggccccagctgcgccctgaaggccggcaagaccgccagcggcgccggcgaggtggtgagatgcctgagcgagcagagcgtggccatcagcagatgcgccggcggcgccggcgccagactgcccgccctgctggacgagcagcaggtgaacgtgctgctgtacgacatgaacggctgctacagcagactgaaggagctggtgcccaccctgccccagaacagaaaggtgagcaaggtggagatcctgcagcacgtgatcgactacatcagagacctgcagctggagctgaacagcgagagcgaggtgggcacccccggcggcagaggcctgcccgtgagagcccccctgagcaccctgaacggcgagatcagcgccctgaccgccgaggtgagaagcagaagcgaccactag

SEQ ID NO: 11046 - DNA, 468 bp, synthetic construct
  misc_feature 1..468: note = Description of Artificial Sequence: Synthetic coding sequence
  source 1..468: mol_type = other DNA
atgaaggtggccagcggcagcaccgccaccgccgccgccggccccagctgcgccctgaaggccggcaagaccgccagcggcgccggcgaggtggtgagatgcctgagcgagcagagcgtggccatcagcagatgcgccggcggcgccggcgccagactgcccgccctgctggacgagcagcaggtgaacgtgctgctgtacgacatgaacggctgctacagcagactgaaggagctggtgcccaccctgccccagaacagaaaggtgagcaaggtggagatcctgcagcacgtgatcgactacatcagagacctgcagctggagctgaacagcgagagcgaggtgggcacccccggcggcagaggcctgcccgtgagagcccccctgagcaccctgaacggcgagatcagcgccctgaccgccgaggccgcctgcgtgcccgccgacgacagaatcctgtgcagatag

SEQ ID NO: 11047 - DNA, 738 bp, synthetic construct
  misc_feature 1..738: note = Description of Artificial Sequence: Synthetic coding sequence
  source 1..738: mol_type = other DNA
atggccgccggcatgtacctggagcactacctggacagcatcgagaacctgcccttcgagctgcagagaaacttccagctgatgagagacctggaccagagaaccgaggacctgaaggccgagatcgacaagctggccaccgagtacatgagcagcgccagaagcctgagcagcgaggagaagctggccctgctgaagcagatccaggaggcctacggcaagtgcaaggagttcggcgacgacaaggtgcagctggccatgcagacctacgagatggtggacaagcacatcagaagactggacaccgacctggccagattcgaggccgacctgaaggagaagcagatcgagagcagcgactacgacagcagcagcagcaagggcagaacccagaaggagaagaaggccgccagagccagaagcaagggcaagaacagcgacgaggaggcccccaagaccgcccagaagaagctgaagctggtgagaaccagccccgagtacggcatgcccagcgtgaccttcggcagcgtgcaccccagcgacgtgctggacatgcccgtggaccccaacgagcccacctactgcctgtgccaccaggtgagctacggcgagatgatcggctgcgacaaccccgactgcagcatcgagtggttccacttcgcctgcgtgggcctgaccaccaagcccagaggcaagtggttctgccccagatgcagccaggagagaaagaagaagtag

SEQ ID NO: 11048 - DNA, 840 bp, synthetic construct
  misc_feature 1..840: note = Description of Artificial Sequence: Synthetic coding sequence
  source 1..840: mol_type = other DNA
atgctgagccccgccaacggcgagcagctgcacctggtgaactacgtggaggactacctggacagcatcgagagcctgcccttcgacctgcagagaaacgtgagcctgatgagagagatcgacgccaagtaccaggagatcctgaaggagctggacgagtgctacgagagattcagcagagagaccgacggcgcccagaagagaagaatgctgcactgcgtgcagagagccctgatcagaagccaggagctgggcgacgagaagatccagatcgtgagccagatggtggagctggtggagaacagaaccagacaggtggacagccacgtggagctgttcgaggcccagcaggagctgggcgacaccgccggcaacagcggcaaggccggcgccgacagacccaagggcgaggccgccgcccaggccgacaagcccaacagcaagagaagcagaagacagagaaacaacgagaacagagagaacgccagcagcaaccacgaccacgacgacggcgccagcggcacccccaaggagaagaaggccaagaccagcaagaagaagaagagaagcaaggccaaggccgagagagaggccagccccgccgacctgcccatcgaccccaacgagcccacctactgcctgtgcaaccaggtgagctacggcgagatgatcggctgcgacaacgacgagtgccccatcgagtggttccacttcagctgcgtgggcctgaaccacaagcccaagggcaagtggtactgccccaagtgcagaggcgagaacgagaagaccatggacaaggccctggagaagagcaagaaggagagagcctacaacagatag

SEQ ID NO: 11049 - DNA, 708 bp, synthetic construct
  misc_feature 1..708: note = Description of Artificial Sequence: Synthetic coding sequence
  source 1..708: mol_type = other DNA
atggagatcctgaaggagctggacgagtgctacgagagattcagcagagagaccgacggcgcccagaagagaagaatgctgcactgcgtgcagagagccctgatcagaagccaggagctgggcgacgagaagatccagatcgtgagccagatggtggagctggtggagaacagaaccagacaggtggacagccacgtggagctgttcgaggcccagcaggagctgggcgacaccgccggcaacagcggcaaggccggcgccgacagacccaagggcgaggccgccgcccaggccgacaagcccaacagcaagagaagcagaagacagagaaacaacgagaacagagagaacgccagcagcaaccacgaccacgacgacggcgccagcggcacccccaaggagaagaaggccaagaccagcaagaagaagaagagaagcaaggccaaggccgagagagaggccagccccgccgacctgcccatcgaccccaacgagcccacctactgcctgtgcaaccaggtgagctacggcgagatgatcggctgcgacaacgacgagtgccccatcgagtggttccacttcagctgcgtgggcctgaaccacaagcccaagggcaagtggtactgccccaagtgcagaggcgagaacgagaagaccatggacaaggccctggagaagagcaagaaggagagagcctacaacagatag

SEQ ID NO: 11050 - DNA, 1269 bp, synthetic construct
  misc_feature 1..1269: note = Description of Artificial Sequence: Synthetic coding sequence
  source 1..1269: mol_type = other DNA
atgagcttcgtggagtgcccctaccacagccccgccgagagactggtggccgaggccgacgagggcggccccagcgccatcaccggcatgggcctgtgcttcagatgcctgctgttcagcttcagcggcagaagcggcgtggagggcggcagagtggacctgaacgtgttcggcagcctgggcctgcagccctggatcggcagcagcagatgctggggcggcccctgcagcagcgccctgagatgcggctggttcagcagctggcccccccccagcaagagcgccatccccatcggcggcggcagcagaggcgccggcagagtgagcagatggccccccccccactggctggaggcctggagagtgagccccctgcccctgagccccctgagccccgccaccttcggcagaggcttcatcgccgtggccgtgatccccggcctgtgggccagaggcagaggctgcagcagcgacagactgcccagacccgccggccccgccagaagacagttccaggccgccagcctgctgaccagaggctggggcagagcctggccctggaagcagatcctgaaggagctggacgagtgctacgagagattcagcagagagaccgacggcgcccagaagagaagaatgctgcactgcgtgcagagagccctgatcagaagccaggagctgggcgacgagaagatccagatcgtgagccagatggtggagctggtggagaacagaaccagacaggtggacagccacgtggagctgttcgaggcccagcaggagctgggcgacaccgccggcaacagcggcaaggccggcgccgacagacccaagggcgaggccgccgcccaggccgacaagcccaacagcaagagaagcagaagacagagaaacaacgagaacagagagaacgccagcagcaaccacgaccacgacgacggcgccagcggcacccccaaggagaagaaggccaagaccagcaagaagaagaagagaagcaaggccaaggccgagagagaggccagccccgccgacctgcccatcgaccccaacgagcccacctactgcctgtgcaaccaggtgagctacggcgagatgatcggctgcgacaacgacgagtgccccatcgagtggttccacttcagctgcgtgggcctgaaccacaagcccaagggcaagtggtactgccccaagtgcagaggcgagaacgagaagaccatggacaaggccctggagaagagcaagaaggagagagcctacaacagatag

SEQ ID NO: 11051 - DNA, 633 bp, synthetic construct
  misc_feature 1..633: note = Description of Artificial Sequence: Synthetic coding sequence
  source 1..633: mol_type = other DNA
atgctgcactgcgtgcagagagccctgatcagaagccaggagctgggcgacgagaagatccagatcgtgagccagatggtggagctggtggagaacagaaccagacaggtggacagccacgtggagctgttcgaggcccagcaggagctgggcgacaccgccggcaacagcggcaaggccggcgccgacagacccaagggcgaggccgccgcccaggccgacaagcccaacagcaagagaagcagaagacagagaaacaacgagaacagagagaacgccagcagcaaccacgaccacgacgacggcgccagcggcacccccaaggagaagaaggccaagaccagcaagaagaagaagagaagcaaggccaaggccgagagagaggccagccccgccgacctgcccatcgaccccaacgagcccacctactgcctgtgcaaccaggtgagctacggcgagatgatcggctgcgacaacgacgagtgccccatcgagtggttccacttcagctgcgtgggcctgaaccacaagcccaagggcaagtggtactgccccaagtgcagaggcgagaacgagaagaccatggacaaggccctggagaagagcaagaaggagagagcctacaacagatag

SEQ ID NO: 11052 - DNA, 747 bp, synthetic construct
  misc_feature 1..747: note = Description of Artificial Sequence: Synthetic coding sequence
  source 1..747: mol_type = other DNA
atggccgccggcatgtacctggagcactacctggacagcatcgagaacctgcccttcgagctgcagagaaacttccagctgatgagagacctggaccagagaaccgaggacctgaaggccgagatcgacaagctggccaccgagtacatgagcagcgccagaagcctgagcagcgaggagaagctggccctgctgaagcagatccaggaggcctacggcaagtgcaaggagttcggcgacgacaaggtgcagctggccatgcagacctacgagatggtggacaagcacatcagaagactggacaccgacctggccagattcgaggccgacctgaaggagaagcagatcgagagcagcgactacgacagcagcagcagcaagggcaagaagagcagaacccagaaggagaagaaggccgccagagccagaagcaagggcaagaacagcgacgaggaggcccccaagaccgcccagaagaagctgaagctggtgagaaccagccccgagtacggcatgcccagcgtgaccttcggcagcgtgcaccccagcgacgtgctggacatgcccgtggaccccaacgagcccacctactgcctgtgccaccaggtgagctacggcgagatgatcggctgcgacaaccccgactgcagcatcgagtggttccacttcgcctgcgtgggcctgaccaccaagcccagaggcaagtggttctgccccagatgcagccaggagagaaagaagaagtag

SEQ ID NO: 11053 - DNA, 750 bp, synthetic construct
  misc_feature 1..750: note = Description of Artificial Sequence: Synthetic coding sequence
  source 1..750: mol_type = other DNA
atggccgccggcatgtacctggagcactacctggacagcatcgagaacctgcccttcgagctgcagagaaacttccagctgatgagagacctggaccagagaaccgaggacctgaaggccgagatcgacaagctggccaccgagtacatgagcagcgccagaagcctgagcagcgaggagaagctggccctgctgaagcagatccaggaggcctacggcaagtgcaaggagttcggcgacgacaaggtgcagctggccatgcagacctacgagatggtggacaagcacatcagaagactggacaccgacctggccagattcgaggccgacctgaaggagaagcagatcgagagcagcgactacgacagcagcagcagcaagggcaagaagaagggcagaacccagaaggagaagaaggccgccagagccagaagcaagggcaagaacagcgacgaggaggcccccaagaccgcccagaagaagctgaagctggtgagaaccagccccgagtacggcatgcccagcgtgaccttcggcagcgtgcaccccagcgacgtgctggacatgcccgtggaccccaacgagcccacctactgcctgtgccaccaggtgagctacggcgagatgatcggctgcgacaaccccgactgcagcatcgagtggttccacttcgcctgcgtgggcctgaccaccaagcccagaggcaagtggttctgccccagatgcagccaggagagaaagaagaagtag

SEQ ID NO: 11054 - DNA, 741 bp, synthetic construct
  misc_feature 1..741: note = Description of Artificial Sequence: Synthetic coding sequence
  source 1..741: mol_type = other DNA
atggccgccggcatgtacctggagcactacctggacagcatcgagaacctgcccttcgagctgcagagaaacttccagctgatgagagacctggaccagagaaccgaggacctgaaggccgagatcgacaagctggccaccgagtacatgagcagcgccagaagcctgagcagcgaggagaagctggccctgctgaagcagatccaggaggcctacggcaagtgcaaggagttcggcgacgacaaggtgcagctggccatgcagacctacgagatggtggacaagcacatcagaagactggacaccgacctggccagattcgaggccgacctgaaggagaagcagatcgagagcagcgactacgacagcagcagcagcaaggagggcagaacccagaaggagaagaaggccgccagagccagaagcaagggcaagaacagcgacgaggaggcccccaagaccgcccagaagaagctgaagctggtgagaaccagccccgagtacggcatgcccagcgtgaccttcggcagcgtgcaccccagcgacgtgctggacatgcccgtggaccccaacgagcccacctactgcctgtgccaccaggtgagctacggcgagatgatcggctgcgacaaccccgactgcagcatcgagtggttccacttcgcctgcgtgggcctgaccaccaagcccagaggcaagtggttctgccccagatgcagccaggagagaaagaagaagtag

SEQ ID NO: 11055 - DNA, 540 bp, synthetic construct
  misc_feature 1..540: note = Description of Artificial Sequence: Synthetic coding sequence
  source 1..540: mol_type = other DNA
atggccgccggcatgtacctggagcactacctggacagcatcgagaacctgcccttcgagctgcagagaaacttccagctgatgagagacctggaccagagaaccgaggacctgaaggccgagatcgacaagctggccaccgagtacatgagcagcgccagaagcctgagcagcgaggagaagctggccctgctgaagcagatccaggaggcctacggcaagtgcaaggagttcggcgacgacaaggtgcagctggccatgcagacctacgagatggtggacaagcacatcagaagactggacaccgacctggccagattcgaggccgacctgaaggagaagcagatcgagagcagcgactacgacagcagcagcagcaagggcaagaagaagggcagaacccagaaggagaagaaggccgccagagccagaagcaagggcaagaacagcgacgaggaggcccccaagaccgcccagaagaagctgaagctggtgagaaccgtgcccctgagcggcagcatcctgcccgtgtggggctag

SEQ ID NO: 11056 - DNA, 678 bp, synthetic construct
  misc_feature 1..678: note = Description of Artificial Sequence: Synthetic coding sequence
  source 1..678: mol_type = other DNA
atggccgccggcatgtacctggagcactacctggacaacctgaaggccgagatcgacaagctggccaccgagtacatgagcagcgccagaagcctgagcagcgaggagaagctggccctgctgaagcagatccaggaggcctacggcaagtgcaaggagttcggcgacgacaaggtgcagctggccatgcagacctacgagatggtggacaagcacatcagaagactggacaccgacctggccagattcgaggccgacctgaaggagaagcagatcgagagcagcgactacgacagcagcagcagcaagggcaagaagaagggcagaacccagaaggagaagaaggccgccagagccagaagcaagggcaagaacagcgacgaggaggcccccaagaccgcccagaagaagctgaagctggtgagaaccagccccgagtacggcatgcccagcgtgaccttcggcagcgtgcaccccagcgacgtgctggacatgcccgtggaccccaacgagcccacctactgcctgtgccaccaggtgagctacggcgagatgatcggctgcgacaaccccgactgcagcatcgagtggttccacttcgcctgcgtgggcctgaccaccaagcccagaggcaagtggttctgccccagatgcagccaggagagaaagaagaagtag

SEQ ID NO: 11057 - DNA, 3729 bp, synthetic construct
  misc_feature 1..3729: note = Description of Artificial Sequence: Synthetic coding sequence
  source 1..3729: mol_type = other DNA
atggccagcccccccgagagcgacggcttcagcgacgtgagaaaggtgggctacctgagaaagcccaagagcatgcacaagagattcttcgtgctgagagccgccagcgaggccggcggccccgccagactggagtactacgagaacgagaagaagtggagacacaagagcagcgcccccaagagaagcatccccctggagagctgcttcaacatcaacaagagagccgacagcaagaacaagcacctggtggccctgtacaccagagacgagcacttcgccatcgccgccgacagcgaggccgagcaggacagctggtaccaggccctgctgcagctgcacaacagagccaagggccaccacgacggcgccgccgccctgggcgccggcggcggcggcggcagctgcagcggcagcagcggcctgggcgaggccggcgaggacctgagctacggcgacgtgccccccggccccgccttcaaggaggtgtggcaggtgatcctgaagcccaagggcctgggccagaccaagaacctgatcggcatctacagactgtgcctgaccagcaagaccatcagcttcgtgaagctgaacagcgaggccgccgccgtggtgctgcagctgatgaacatcagaagatgcggccacagcgagaacttcttcttcatcgaggtgggcagaagcgccgtgaccggccccggcgagttctggatgcaggtggacgacagcgtggtggcccagaacatgcacgagaccatcctggaggccatgagagccatgagcgacgagttcagacccagaagcaagagccagagcagcagcaactgcagcaaccccatcagcgtgcccctgagaagacaccacctgaacaaccccccccccagccaggtgggcctgaccagaagaagcagaaccgagagcatcaccgccaccagccccgccagcatggtgggcggcaagcccggcagcttcagagtgagagccagcagcgacggcgagggcaccatgagcagacccgccagcgtggacggcagccccgtgagccccagcaccaacagaacccacgcccacagacacagaggcagcgccagactgcacccccccctgaaccacagcagaagcatccccatgcccgccagcagatgcagccccagcgccaccagccccgtgagcctgagcagcagcagcaccagcggccacggcagcaccagcgactgcctgttccccagaagaagcagcgccagcgtgagcggcagccccagcgacggcggcttcatcagcagcgacgagtacggcagcagcccctgcgacttcagaagcagcttcagaagcgtgacccccgacagcctgggccacaccccccccgccagaggcgaggaggagctgagcaactacatctgcatgggcggcaagggccccagcaccctgaccgcccccaacggccactacatcctgagcagaggcggcaacggccacagatgcacccccggcaccggcctgggcaccagccccgccctggccggcgacgaggccgccagcgccgccgacctggacaacagattcagaaagagaacccacagcgccggcaccagccccaccatcacccaccagaagacccccagccagagcagcgtggccagcatcgaggagtacaccgagatgatgcccgcctacccccccggcggcggcagcggcggcagactgcccggccacagacacagcgccttcgtgcccaccagaagctaccccgaggagggcctggagatgcaccccctggagagaagaggcggccaccacagacccgacagcagcaccctgcacaccgacgacggctacatgcccatgagccccggcgtggcccccgtgcccagcggcagaaagggcagcggcgactacatgcccatgagccccaagagcgtgagcgccccccagcagatcatcaaccccatcagaagacacccccagagagtggaccccaacggctacatgatgatgagccccagcggcggctgcagccccgacatcggcggcggccccagcagcagcagcagcagcagcaacgccgtgcccagcggcaccagctacggcaagctgtggaccaacggcgtgggcggccaccacagccacgtgctgccccaccccaagccccccgtggagagcagcggcggcaagctgctgccctgcaccggcgactacatgaacatgagccccgtgggcgacagcaacaccagcagccccagcgactgctactacggccccgaggacccccagcacaagcccgtgctgagctactacagcctgcccagaagcttcaagcacacccagagacccggcgagcccgaggagggcgccagacaccagcacctgagactgagcaccagcagcggcagactgctgtacgccgccaccgccgacgacagcagcagcagcaccagcagcgacagcctgggcggcggctactgcggcgccagactggagcccagcctgccccacccccaccaccaggtgctgcagccccacctgcccagaaaggtggacaccgccgcccagaccaacagcagactggccagacccaccagactgagcctgggcgaccccaaggccagcaccctgcccagagccagagagcagcagcagcagcagcagcccctgctgcacccccccgagcccaagagccccggcgagtacgtgaacatcgagttcggcagcgaccagagcggctacctgagcggccccgtggccttccacagcagccccagcgtgagatgccccagccagctgcagcccgcccccagagaggaggagaccggcaccgaggagtacatgaagatggacctgggccccggcagaagagccgcctggcaggagagcaccggcgtggagatgggcagactgggccccgccccccccggcgccgccagcatctgcagacccaccagagccgtgcccagcagcagaggcgactacatgaccatgcagatgagctgccccagacagagctacgtggacaccagccccgccgcccccgtgagctacgccgacatgagaaccggcatcgccgccgaggaggtgagcctgcccagagccaccatggccgccgccagcagcagcagcgccgccagcgccagccccaccggcccccagggcgccgccgagctggccgcccacagcagcctgctgggcggcccccagggccccggcggcatgagcgccttcaccagagtgaacctgagccccaacagaaaccagagcgccaaggtgatcagagccgacccccagggctgcagaagaagacacagcagcgagaccttcagcagcacccccagcgccaccagagtgggcaacaccgtgcccttcggcgccggcgccgccgtgggcggcggcggcggcagcagcagcagcagcgaggacgtgaagagacacagcagcgccagcttcgagaacgtgtggctgagacccggcgagctgggcggcgcccccaaggagcccgccaagctgtgcggcgccgccggcggcctggagaacggcctgaactacatcgacctggacctggtgaaggacttcaagcagtgcccccaggagtgcacccccgagccccagccccccccccccccccccccccaccagcccctgggcagcggcgagagcagcagcaccagaagaagcagcgaggacctgagcgcctacgccagcatcagcttccagaagcagcccgaggacagacagtag

SEQ ID NO: 11058 - DNA, 588 bp, synthetic construct
  misc_feature 1..588: note = Description of Artificial Sequence: Synthetic coding sequence
  source 1..588: mol_type = other DNA
atgggcaagatcagcagcctgcccacccagctgttcaagtgctgcttctgcgacttcctgaaggtgaagatgcacaccatgagcagcagccacctgttctacctggccctgtgcctgctgaccttcaccagcagcgccaccgccggccccgagaccctgtgcggcgccgagctggtggacgccctgcagttcgtgtgcggcgacagaggcttctacttcaacaagcccaccggctacggcagcagcagcagaagagccccccagaccggcatcgtggacgagtgctgcttcagaagctgcgacctgagaagactggagatgtactgcgcccccctgaagcccgccaagagcgccagaagcgtgagagcccagagacacaccgacatgcccaagacccagaagtaccagccccccagcaccaacaagaacaccaagagccagagaagaaagggctggcccaagacccaccccggcggcgagcagaaggagggcaccgaggccagcctgcagatcagaggcaagaagaaggagcagagaagagagatcggcagcagaaacgccgagtgcagaggcaagaagggcaagtag

SEQ ID NO: 11059 - DNA, 462 bp, synthetic construct
  misc_feature 1..462: note = Description of Artificial Sequence: Synthetic coding sequence
  source 1..462: mol_type = other DNA
atgggcaagatcagcagcctgcccacccagctgttcaagtgctgcttctgcgacttcctgaaggtgaagatgcacaccatgagcagcagccacctgttctacctggccctgtgcctgctgaccttcaccagcagcgccaccgccggccccgagaccctgtgcggcgccgagctggtggacgccctgcagttcgtgtgcggcgacagaggcttctacttcaacaagcccaccggctacggcagcagcagcagaagagccccccagaccggcatcgtggacgagtgctgcttcagaagctgcgacctgagaagactggagatgtactgcgcccccctgaagcccgccaagagcgccagaagcgtgagagcccagagacacaccgacatgcccaagacccagaaggaggtgcacctgaagaacgccagcagaggcagcgccggcaacaagaactacagaatgtag

SEQ ID NO: 11060 - DNA, 477 bp, synthetic construct
  misc_feature 1..477: note = Description of Artificial Sequence: Synthetic coding sequence
  source 1..477: mol_type = other DNA
atgggcaagatcagcagcctgcccacccagctgttcaagtgctgcttctgcgacttcctgaaggtgaagatgcacaccatgagcagcagccacctgttctacctggccctgtgcctgctgaccttcaccagcagcgccaccgccggccccgagaccctgtgcggcgccgagctggtggacgccctgcagttcgtgtgcggcgacagaggcttctacttcaacaagcccaccggctacggcagcagcagcagaagagccccccagaccggcatcgtggacgagtgctgcttcagaagctgcgacctgagaagactggagatgtactgcgcccccctgaagcccgccaagagcgccagaagcgtgagagcccagagacacaccgacatgcccaagacccagaagtaccagccccccagcaccaacaagaacaccaagagccagagaagaaagggcagcaccttcgaggagagaaagtag

SEQ ID NO: 11061 - DNA, 420 bp, synthetic construct
  misc_feature 1..420: note = Description of Artificial Sequence: Synthetic coding sequence
  source 1..420: mol_type = other DNA
ctgaaggtgaagatgcacaccatgagcagcagccacctgttctacctggccctgtgcctgctgaccttcaccagcagcgccaccgccggccccgagaccctgtgcggcgccgagctggtggacgccctgcagttcgtgtgcggcgacagaggcttctacttcaacaagcccaccggctacggcagcagcagcagaagagccccccagaccggcatcgtggacgagtgctgcttcagaagctgcgacctgagaagactggagatgtactgcgcccccctgaagcccgccaagagcgccagaagcgtgagagcccagagacacaccgacatgcccaagacccagaagtaccagccccccagcaccaacaagaacaccaagagccagagaagaaagggcagcaccttcgaggagagaaagtag

SEQ ID NO: 11062 - DNA, 414 bp, synthetic construct
  misc_feature 1..414: note = Description of Artificial Sequence: Synthetic coding sequence
  source 1..414: mol_type = other DNA
atgatcacccccaccgtgaagatgcacaccatgagcagcagccacctgttctacctggccctgtgcctgctgaccttcaccagcagcgccaccgccggccccgagaccctgtgcggcgccgagctggtggacgccctgcagttcgtgtgcggcgacagaggcttctacttcaacaagcccaccggctacggcagcagcagcagaagagccccccagaccggcatcgtggacgagtgctgcttcagaagctgcgacctgagaagactggagatgtactgcgcccccctgaagcccgccaagagcgccagaagcgtgagagcccagagacacaccgacatgcccaagacccagaaggaggtgcacctgaagaacgccagcagaggcagcgccggcaacaagaactacagaatgtag

SEQ ID NO: 11063 - DNA, 477 bp, synthetic construct; identical to SEQ ID NO: 11060
  misc_feature 1..477: note = Description of Artificial Sequence: Synthetic coding sequence
  source 1..477: mol_type = other DNA

SEQ ID NO: 11064 - DNA, 4104 bp, synthetic construct
  misc_feature 1..4104: note = Description of Artificial Sequence: Synthetic coding sequence
  source 1..4104: mol_type = other DNA
atgaagagcggcagcggcggcggcagccccaccagcctgtggggcctgctgttcctgagcgccgccctgagcctgtggcccaccagcggcgagatctgcggccccggcatcgacatcagaaacgactaccagcagctgaagagactggagaactgcaccgtgatcgagggctacctgcacatcctgctgatcagcaaggccgaggactacagaagctacagattccccaagctgaccgtgatcaccgagtacctgctgctgttcagagtggccggcctggagagcctgggcgacctgttccccaacctgaccgtgatcagaggctggaagctgttctacaactacgccctggtgatcttcgagatgaccaacctgaaggacatcggcctgtacaacctgagaaacatcaccagaggcgccatcagaatcgagaagaacgccgacctgtgctacctgagcaccgtggactggagcctgatcctggacgccgtgagcaacaactacatcgtgggcaacaagccccccaaggagtgcggcgacctgtgccccggcaccatggaggagaagcccatgtgcgagaagaccaccatcaacaacgagtacaactacagatgctggaccaccaacagatgccagaagatgtgccccagcacctgcggcaagagagcctgcaccgagaacaacgagtgctgccaccccgagtgcctgggcagctgcagcgcccccgacaacgacaccgcctgcgtggcctgcagacactactactacgccggcgtgtgcgtgcccgcctgcccccccaacacctacagattcgagggctggagatgcgtggacagagacttctgcgccaacatcctgagcgccgagagcagcgacagcgagggcttcgtgatccacgacggcgagtgcatgcaggagtgccccagcggcttcatcagaaacggcagccagagcatgtactgcatcccctgcgagggcccctgccccaaggtgtgcgaggaggagaagaagaccaagaccatcgacagcgtgaccagcgcccagatgctgcagggctgcaccatcttcaagggcaacctgctgatcaacatcagaagaggcaacaacatcgccagcgagctggagaacttcatgggcctgatcgaggtggtgaccggctacgtgaagatcagacacagccacgccctggtgagcctgagcttcctgaagaacctgagactgatcctgggcgaggagcagctggagggcaactacagcttctacgtgctggacaaccagaacctgcagcagctgtgggactgggaccacagaaacctgaccatcaaggccggcaagatgtacttcgccttcaaccccaagctgtgcgtgagcgagatctacagaatggaggaggtgaccggcaccaagggcagacagagcaagggcgacatcaacaccagaaacaacggcgagagagccagctgcgagagcgacgtgctgcacttcaccagcaccaccaccagcaagaacagaatcatcatcacctggcacagatacagaccccccgactacagagacctgatcagcttcaccgtgtactacaaggaggcccccttcaagaacgtgaccgagtacgacggccaggacgcctgcggcagcaacagctggaacatggtggacgtggacctgccccccaacaaggacgtggagcccggcatcctgctgcacggcctgaagccctggacccagtacgccgtgtacgtgaaggccgtgaccctgaccatggtggagaacgaccacatcagaggcgccaagagcgagatcctgtacatcagaaccaacgccagcgtgcccagcatccccctggacgtgctgagcgccagcaacagcagcagccagctgatcgtgaagtggaacccccccagcctgcccaacggcaacctgagctactacatcgtgagatggcagagacagccccaggacggctacctgtacagacacaactactgcagcaaggacaagatccccatcagaaagtacgccgacggcaccatcgacatcgaggaggtgaccgagaaccccaagaccgaggtgtgcggcggcgagaagggcccctgctgcgcctgccccaagaccgaggccgagaagcaggccgagaaggaggaggccgagtacagaaaggtgttcgagaacttcctgcacaacagcatcttcgtgcccagacccgagagaaagagaagagacgtgatgcaggtggccaacaccaccatgagcagcagaagcagaaacaccaccgccgccgacacctacaacatcaccgaccccgaggagctggagaccgagtaccccttcttcgagagcagagtggacaacaaggagagaaccgtgatcagcaacctgagacccttcaccctgtacagaatcgacatccacagctgcaaccacgaggccgagaagctgggctgcagcgccagcaacttcgtgttcgccagaaccatgcccgccgagggcgccgacgacatccccggccccgtgacctgggagcccagacccgagaacagcatcttcctgaagtggcccgagcccgagaaccccaacggcctgatcctgatgtacgagatcaagtacggcagccaggtggaggaccagagagagtgcgtgagcagacaggagtacagaaagtacggcggcgccaagctgaacagactgaaccccggcaactacaccgccagaatccaggccaccagcctgagcggcaacggcagctggaccgaccccgtgttcttctacgtgcaggccaagaccggctacgagaacttcatccacctgatcatcgccctgcccgtggccgtgctgctgatcgtgggcggcctggtgatcatgctgtacgtgttccacagaaagagaaacaacagcagactgggcaacggcgtgctgtacgccagcgtgaaccccgagtacttcagcgccgccgacgtgtacgtgcccgacgagtgggaggtggccagagagaagatcaccatgagcagagagctgggccagggcagcttcggcatggtgtacgagggcgtggccaagggcgtggtgaaggacgagcccgagaccagagtggccatcaagaccgtgaacgaggccgccagcatgagagagagaatcgagttcctgaacgaggccagcgtgatgaaggagttcaactgccaccacgtggtgagactgctgggcgtggtgagccagggccagcccaccctggtgatcatggagctgatgaccagaggcgacctgaagagctacctgagaagcctgagacccgagatggagaacaaccccgtgctggccccccccagcctgagcaagatgatccagatggccggcgagatcgccgacggcatggcctacctgaacgccaacaagttcgtgcacagagacctggccgccagaaactgcatggtggccgaggacttcaccgtgaagatcggcgacttcggcatgaccagagacatctacgagaccgactactacagaaagggcggcaagggcctgctgcccgtgagatggatgagccccgagagcctgaaggacggcgtgttcaccacctacagcgacgtgtggagcttcggcgtggtgctgtgggagatcgccaccctggccgagcagccctaccagggcctgagcaacgagcaggtgctgagattcgtgatggagggcggcctgctggacaagcccgacaactgccccgacatgctgttcgagctgatgagaatgtgctggcagtacaaccccaagatgagacccagcttcctggagatcatcagcagcatcaaggaggagatggagcccggcttcagagaggtgagcttctactacagcgaggagaacaagctgcccgagcccgaggagctggacctggagcccgagaacatggagagcgtgcccctggaccccagcgccagcagcagcagcctgcccctgcccgacagacacagcggccacaaggccgagaacggccccggccccggcgtgctggtgctgagagccagcttcgacgagagacagccctacgcccacatgaacggcggcagaaagaacgagagagccctgcccctgccccagagcagcacctgctag

SEQ ID NO: 11065 - DNA, 543 bp, synthetic construct
  misc_feature 1..543: note = Description of Artificial Sequence: Synthetic coding sequence
  source 1..543: mol_type = other DNA
atgggcatccccatgggcaagagcatgctggtgctgctgaccttcctggccttcgccagctgctgcatcgccgcctacagacccagcgagaccctgtgcggcggcgagctggtggacaccctgcagttcgtgtgcggcgacagaggcttctacttcagcagacccgccagcagagtgagcagaagaagcagaggcatcgtggaggagtgctgcttcagaagctgcgacctggccctgctggagacctactgcgccacccccgccaagagcgagagagacgtgagcaccccccccaccgtgctgcccgacaacttccccagataccccgtgggcaagttcttccagtacgacacctggaagcagagcacccagagactgagaagaggcctgcccgccctgctgagagccagaagaggccacgtgctggccaaggagctggaggccttcagagaggccaagagacacagacccctgatcgccctgcccacccaggaccccgcccacggcggcgccccccccgagatggccagcaacagaaagtag

SEQ ID NO: 11066 - DNA, 543 bp, synthetic construct; identical to SEQ ID NO: 11065
  misc_feature 1..543: note = Description of Artificial Sequence: Synthetic coding sequence
  source 1..543: mol_type = other DNA

SEQ ID NO: 11067 - DNA, 552 bp, synthetic construct
  misc_feature 1..552: note = Description of Artificial Sequence: Synthetic coding sequence
  source 1..552: mol_type = other DNA
atgggcatccccatgggcaagagcatgctggtgctgctgaccttcctggccttcgccagctgctgcatcgccgcctacagacccagcgagaccctgtgcggcggcgagctggtggacaccctgcagttcgtgtgcggcgacagaggcttctacttcagactgcccggcagacccgccagcagagtgagcagaagaagcagaggcatcgtggaggagtgctgcttcagaagctgcgacctggccctgctggagacctactgcgccacccccgccaagagcgagagagacgtgagcaccccccccaccgtgctgcccgacaacttccccagataccccgtgggcaagttcttccagtacgacacctggaagcagagcacccagagactgagaagaggcctgcccgccctgctgagagccagaagaggccacgtgctggccaaggagctggaggccttcagagaggccaagagacacagacccctgatcgccctgcccacccaggaccccgcccacggcggcgccccccccgagatggccagcaacagaaagtag

SEQ ID NO: 11068 - DNA, 552 bp, synthetic construct; identical to SEQ ID NO: 11067
  misc_feature 1..552: note = Description of Artificial Sequence: Synthetic coding sequence
  source 1..552: mol_type = other DNA

SEQ ID NO: 11069 - DNA, 543 bp, synthetic construct; identical to SEQ ID NO: 11065
  misc_feature 1..543: note = Description of Artificial Sequence: Synthetic coding sequence
  source 1..543: mol_type = other DNA

SEQ ID NO: 11070 - DNA, 552 bp, synthetic construct; identical to SEQ ID NO: 11067
  misc_feature 1..552: note = Description of Artificial Sequence: Synthetic coding sequence
  source 1..552: mol_type = other DNA

SEQ ID NO: 11071 - DNA, 543 bp, synthetic construct; identical to SEQ ID NO: 11065
  misc_feature 1..543: note = Description of Artificial Sequence: Synthetic coding sequence
  source 1..543: mol_type = other DNA

SEQ ID NO: 11072 - DNA, 552 bp, synthetic construct; identical to SEQ ID NO: 11067
  misc_feature 1..552: note = Description of Artificial Sequence: Synthetic coding sequence
  source 1..552: mol_type = other DNA

SEQ ID NO: 11073 - DNA, 543 bp, synthetic construct; identical to SEQ ID NO: 11065
  misc_feature 1..543: note = Description of Artificial Sequence: Synthetic coding sequence
  source 1..543: mol_type = other DNA

SEQ ID NO: 11074 - DNA, 543 bp, synthetic construct; identical to SEQ ID NO: 11065
  misc_feature 1..543: note = Description of Artificial Sequence: Synthetic coding sequence
  source 1..543: mol_type = other DNA

SEQ ID NO: 11075 - DNA, 711 bp, synthetic construct
  misc_feature 1..711: note = Description of Artificial Sequence: Synthetic coding sequence
  source 1..711: mol_type = other DNA
atggtgagccccgacccccagatcatcgtggtggcccccgagaccgagctggccagcatgcaggtgcagagaaccgaggacggcgtgaccatcatccagatcttctgggtgggcagaaagggcgagctgctgagaagaacccccgtgagcagcgccatgcagacccccatgggcatccccatgggcaagagcatgctggtgctgctgaccttcctggccttcgccagctgctgcatcgccgcctacagacccagcgagaccctgtgcggcggcgagctggtggacaccctgcagttcgtgtgcggcgacagaggcttctacttcagcagacccgccagcagagtgagcagaagaagcagaggcatcgtggaggagtgctgcttcagaagctgcgacctggccctgctggagacctactgcgccacccccgccaagagcgagagagacgtgagcaccccccccaccgtgctgcccgacaacttccccagataccccgtgggcaagttcttccagtacgacacctggaagcagagcacccagagactgagaagaggcctgcccgccctgctgagagccagaagaggccacgtgctggccaaggagctggaggccttcagagaggccaagagacacagacccctgatcgccctgcccacccaggaccccgcccacggcggcgccccccccgagatggccagcaacagaaagtag

SEQ ID NO: 11076 - DNA, 876 bp, synthetic construct
  misc_feature 1..876: note = Description of Artificial Sequence: Synthetic coding sequence
  source 1..876: mol_type = other DNA
atgcagagagccagacccaccctgtgggccgccgccctgaccctgctggtgctgctgagaggcccccccgtggccagagccggcgccagcagcgccggcctgggccccgtggtgagatgcgagccctgcgacgccagagccctggcccagtgcgcccccccccccgccgtgtgcgccgagctggtgagagagcccggctgcggctgctgcctgacctgcgccctgagcgagggccagccctgcggcatctacaccgagagatgcggcagcggcctgagatgccagcccagccccgacgaggccagacccctgcaggccctgctggacggcagaggcctgtgcgtgaacgccagcgccgtgagcagactgagagcctacctgctgcccgccccccccgcccccggcaacgccagcgagagcgaggaggacagaagcgccggcagcgtggagagccccagcgtgagcagcacccacagagtgagcgaccccaagttccaccccctgcacagcaagatcatcatcatcaagaagggccacgccaaggacagccagagatacaaggtggactacgagagccagagcaccgacacccagaacttcagcagcgagagcaagagagagaccgagtacggcccctgcagaagagagatggaggacaccctgaaccacctgaagttcctgaacgtgctgagccccagaggcgtgcacatccccaactgcgacaagaagggcttctacaagaagaagcagtgcagacccagcaagggcagaaagagaggcttctgctggtgcgtggacaagtacggccagcccctgcccggctacaccaccaagggcaaggaggacgtgcactgctacagcatgcagagcaagtag

SEQ ID NO: 11077 - DNA, 894 bp, synthetic construct
  misc_feature 1..894: note = Description of Artificial Sequence: Synthetic coding sequence
  source 1..894: mol_type = other DNA
atgcagagagccagacccaccctgtgggccgccgccctgaccctgctggtgctgctgagaggcccccccgtggccagagccggcgccagcagcgccggcctgggccccgtggtgagatgcgagccctgcgacgccagagccctggcccagtgcgcccccccccccgccgtgtgcgccgagctggtgagagagcccggctgcggctgctgcctgacctgcgccctgagcgagggccagccctgcggcatctacaccgagagatgcggcagcggcctgagatgccagcccagccccgacgaggccagacccctgcaggccctgctggacggcagaggcctgtgcgtgaacgccagcgccgtgagcagactgagagcctacctgctgcccgccccccccgcccccggcgagccccccgcccccggcaacgccagcgagagcgaggaggacagaagcgccggcagcgtggagagccccagcgtgagcagcacccacagagtgagcgaccccaagttccaccccctgcacagcaagatcatcatcatcaagaagggccacgccaaggacagccagagatacaaggtggactacgagagccagagcaccgacacccagaacttcagcagcgagagcaagagagagaccgagtacggcccctgcagaagagagatggaggacaccctgaaccacctgaagttcctgaacgtgctgagccccagaggcgtgcacatccccaactgcgacaagaagggcttctacaagaagaagcagtgcagacccagcaagggcagaaagagaggcttctgctggtgcgtggacaagtacggccagcccctgcccggctacaccaccaagggcaaggaggacgtgcactgctacagcatgcagagcaagtag

SEQ ID NO: 11078 - DNA, 585 bp, synthetic construct
  misc_feature 1..585: note = Description of Artificial Sequence: Synthetic coding sequence
  source 1..585: mol_type = other DNA
atgcagagagccagacccctgcaggccctgctggacggcagaggcctgtgcgtgaacgccagcgccgtgagcagactgagagcctacctgctgcccgccccccccgcccccggcaacgccagcgagagcgaggaggacagaagcgccggcagcgtggagagccccagcgtgagcagcacccacagagtgagcgaccccaagttccaccccctgcacagcaagatcatcatcatcaagaagggccacgccaaggacagccagagatacaaggtggactacgagagccagagcaccgacacccagaacttcagcagcgagagcaagagagagaccgagtacggcccctgcagaagagagatggaggacaccctgaaccacctgaagttcctgaacgtgctgagccccagaggcgtgcacatccccaactgcgacaagaagggcttctacaagaagaagcagtgcagacccagcaagggcagaaagagaggcttctgctggtgcgtggacaagtacggccagcccctgcccggctacaccaccaagggcaaggaggacgtgcactgctacagcatgcagagcaagtag

SEQ ID NO: 11079 - DNA, 462 bp, synthetic construct
  misc_feature 1..462: note = Description of Artificial Sequence: Synthetic coding sequence
  source 1..462: mol_type = other DNA
tgaagcgaggaggacagaagcgccggcagcgtggagagccccagcgtgagcagcacccacagagtgagcgaccccaagttccaccccctgcacagcaagatcatcatcatcaagaagggccacgccaaggacagccagagatacaaggtggactacgagagccagagcaccgacacccagaacttcagcagcgagagcaagagagagaccgagtacggcccctgcagaagagagatggaggacaccctgaaccacctgaagttcctgaacgtgctgagccccagaggcgtgcacatccccaactgcgacaagaagggcttctacaagaagaagcagtgcagacccagcaagggcagaaagagaggcttctgctggtgcgtggacaagtacggccagcccctgcccggctacaccaccaagggcaaggaggacgtgcactgctacagcatgcagagcaagtag

SEQ ID NO: 11080 - DNA, 432 bp, synthetic construct
  misc_feature 1..432: note = Description of Artificial Sequence: Synthetic coding sequence
  source 1..432: mol_type = other DNA
tgagagagccccagcgtgagcagcacccacagagtgagcgaccccaagttccaccccctgcacagcaagatcatcatcatcaagaagggccacgccaaggacagccagagatacaaggtggactacgagagccagagcaccgacacccagaacttcagcagcgagagcaagagagagaccgagtacggcccctgcagaagagagatggaggacaccctgaaccacctgaagttcctgaacgtgctgagccccagaggcgtgcacatccccaactgcgacaagaagggcttctacaagaagaagcagtgcagacccagcaagggcagaaagagaggcttctgctggtgcgtggacaagtacggccagcccctgcccggctacaccaccaagggcaaggaggacgtgcactgctacagcatgcagagcaagtag

SEQ ID NO: 11081 - DNA, 792 bp, synthetic construct
  misc_feature 1..792: note = Description of Artificial Sequence: Synthetic coding sequence
  source 1..792: mol_type = other DNA
atgcagagagccagacccaccctgtgggccgcctgcgagccctgcgacgccagagccctggcccagtgcgcccccccccccgccgtgtgcgccgagctggtgagagagcccggctgcggctgctgcctgacctgcgccctgagcgagggccagccctgcggcatctacaccgagagatgcggcagcggcctgagatgccagcccagccccgacgaggccagacccctgcaggccctgctggacggcagaggcctgtgcgtgaacgccagcgccgtgagcagactgagagcctacctgctgcccgccccccccgcccccggcaacgccagcgagagcgaggaggacagaagcgccggcagcgtggagagccccagcgtgagcagcacccacagagtgagcgaccccaagttccaccccctgcacagcaagatcatcatcatcaagaagggccacgccaaggacagccagagatacaaggtggactacgagagccagagcaccgacacccagaacttcagcagcgagagcaagagagagaccgagtacggcccctgcagaagagagatggaggacaccctgaaccacctgaagttcctgaacgtgctgagccccagaggcgtgcacatccccaactgcgacaagaagggcttctacaagaagaagcagtgcagacccagcaagggcagaaagagaggcttctgctggtgcgtggacaagtacggccagcccctgcccggctacaccaccaagggcaaggaggacgtgcactgctacagcatgcagagcaagtag

SEQ ID NO: 11082 - DNA, 834 bp, synthetic construct
  misc_feature 1..834: note = Description of Artificial Sequence: Synthetic coding sequence
  source 1..834: mol_type = other DNA
atgagagccctgagactgggcgccgaggaccagcccctgcccgcctggatcccccagctgagagccgtgtactgcagacccatccccgccagacccgcctgccaggccgcctgccccggctgcagaagacacgccgccggcgccacccacgccctgggcagatgcgccgacagcgccggcgccgcccccagagccgccggcggcgccggctggagagagctgggcggcctgggcagcagaggcgccctgagagccgtgagacacctgcacagagccctgctggacggcagaggcctgtgcgtgaacgccagcgccgtgagcagactgagagcctacctgctgcccgccccccccgcccccggcaacgccagcgagagcgaggaggacagaagcgccggcagcgtggagagccccagcgtgagcagcacccacagagtgagcgaccccaagttccaccccctgcacagcaagatcatcatcatcaagaagggccacgccaaggacagccagagatacaaggtggactacgagagccagagcaccgacacccagaacttcagcagcgagagcaagagagagaccgagtacggcccctgcagaagagagatggaggacaccctgaaccacctgaagttcctgaacgtgctgagccccagaggcgtgcacatccccaactgcgacaagaagggcttctacaagaagaagcagtgcagacccagcaagggcagaaagagaggcttctgctggtgcgtggacaagtacggccagcccctgcccggctacaccaccaagggcaaggaggacgtgcactgctacagcatgcagagcaagtag

SEQ ID NO: 11083 - DNA, 570 bp, synthetic construct
  misc_feature 1..570: note = Description of Artificial Sequence: Synthetic coding sequence
  source 1..570: mol_type = other DNA
atgcagagagccagacccaccctgtgggccgccgccctgaccctgctggacggcagaggcctgtgcgcctacctgctgcccgccccccccgcccccggcaacgccagcgagagcgaggaggacagaagcgccggcagcgtggagagccccagcgtgagcagcacccacagagtgagcgaccccaagttccaccccctgcacagcaagatcatcatcatcaagaagggccacgccaaggacagccagagatacaaggtggactacgagagccagagcaccgacacccagaacttcagcagcgagagcaagagagagaccgagtacggcccctgcagaagagagatggaggacaccctgaaccacctgaagttcctgaacgtgctgagccccagaggcgtgcacatccccaactgcgacaagaagggcttctacaagaagaagcagtgcagacccagcaagggcagaaagagaggcttctgctggtgcgtggacaagtacggccagcccctgcccggctacaccaccaagggcaaggaggacgtgcactgctacagcatgcagagcaagtag

SEQ ID NO: 11084 - DNA, 807 bp, synthetic construct
  misc_feature 1..807: note = Description of Artificial Sequence: Synthetic coding sequence
  source 1..807: mol_type = other DNA
atgcagagagccagacccaccctgtgggccgccgccctgaccctgctggtgctgctgagaggcccccccgtggccagagccggcgccagcagcgccggcctgggccccgtggtgagaagagagcccggctgcggctgctgcctgacctgcgccctgagcgagggccagccctgcggcatctacaccgagagatgcggcagcggcctgagatgccagcccagccccgacgaggccagacccctgcaggccctgctggacggcagaggcctgtgcgtgaacgccagcgccgtgagcagactgagagcctacctgctgcccgccccccccgcccccggcaacgccagcgagagcgaggaggacagaagcgccggcagcgtggagagccccagcgtgagcagcacccacagagtgagcgaccccaagttccaccccctgcacagcaagatcatcatcatcaagaagggccacgccaaggacagccagagatacaaggtggactacgagagccagagcaccgacacccagaacttcagcagcgagagcaagagagagaccgagtacggcccctgcagaagagagatggaggacaccctgaaccacctgaagttcctgaacgtgctgagccccagaggcgtgcacatccccaactgcgacaagaagggcttctacaagaagaagcagtgcagacccagcaagggcagaaagagaggcttctgctggtgcgtggacaagtacggccagcccctgcccggctacaccaccaagggcaaggaggacgtgcactgctacagcatgcagagcaagtag

SEQ ID NO: 11085 - DNA, 978 bp, synthetic construct
  misc_feature 1..978: note = Description of Artificial Sequence: Synthetic coding sequence
  source 1..978: mol_type = other DNA
atgctgcccagagtgggctgccccgccctgcccctgccccccccccccctgctgcccctgctgctgctgctgctgggcgccagcggcggcggcggcggcgccagagccgaggtgctgttcagatgccccccctgcacccccgagagactggccgcctgcggccccccccccgtggccccccccgccgccgtggccgccgtggccggcggcgccagaatgccctgcgccgagctggtgagagagcccggctgcggctgctgcagcgtgtgcgccagactggagggcgaggcctgcggcgtgtacacccccagatgcggccagggcctgagatgctacccccaccccggcagcgagctgcccctgcaggccctggtgatgggcgagggcacctgcgagaagagaagagacgccgagtacggcgccagccccgagcaggtggccgacaacggcgacgaccacagcgagggcggcctggtggagaaccacgtggacagcaccatgaacatgctgggcggcggcggcagcgccggcagaaagcccctgaagagcggcatgaaggagctggccgtgttcagagagaaggtgaccgagcagcacagacagatgggcaagggcggcaagcaccacctgggcctggaggagcccaagaagctgagacccccccccgccagaaccccctgccagcaggagctggaccaggtgctggagagaatcagcaccatgagactgcccgacgagagaggccccctggagcacctgtacagcctgcacatccccaactgcgacaagcacggcctgtacaacctgaagcagtgcaagatgagcctgaacggccagagaggcgagtgctggtgcgtgaaccccaacaccggcaagctgatccagggcgcccccaccatcagaggcgaccccgagtgccacctgttctacaacgagcagcaggaggccagaggcgtgcacacccagagaatgcagtag

SEQ ID NO: 11086 - DNA, 3099 bp, synthetic construct
  misc_feature 1..3099: note = Description of Artificial Sequence: Synthetic coding sequence
  source 1..3099: mol_type = other DNA
atggcctgggaggccagaagagagcccggccccagaagagccgccgtgagagagaccgtgatgctgctgctgtgcctgggcgtgcccaccggcagaccctacaacgtggacaccgagagcgccctgctgtaccagggcccccacaacaccctgttcggctacagcgtggtgctgcacagccacggcgccaacagatggctgctggtgggcgcccccaccgccaactggctggccaacgccagcgtgatcaaccccggcgccatctacagatgcagaatcggcaagaaccccggccagacctgcgagcagctgcagctgggcagccccaacggcgagccctgcggcaagacctgcctggaggagagagacaaccagtggctgggcgtgaccctgagcagacagcccggcgagaacggcagcatcgtgacctgcggccacagatggaagaacatcttctacatcaagaacgagaacaagctgcccaccggcggctgctacggcgtgccccccgacctgagaaccgagctgagcaagagaatcgccccctgctaccaggactacgtgaagaagttcggcgagaacttcgccagctgccaggccggcatcagcagcttctacaccaaggacctgatcgtgatgggcgcccccggcagcagctactggaccggcagcctgttcgtgtacaacatcaccaccaacaagtacaaggccttcctggacaagcagaaccaggtgaagttcggcagctacctgggctacagcgtgggcgccggccacttcagaagccagcacaccaccgaggtggtgggcggcgccccccagcacgagcagatcggcaaggcctacatcttcagcatcgacgagaaggagctgaacatcctgcacgagatgaagggcaagaagctgggcagctacttcggcgccagcgtgtgcgccgtggacctgaacgccgacggcttcagcgacctgctggtgggcgcccccatgcagagcaccatcagagaggagggcagagtgttcgtgtacatcaacagcggcagcggcgccgtgatgaacgccatggagaccaacctggtgggcagcgacaagtacgccgccagattcggcgagagcatcgtgaacctgggcgacatcgacaacgacggcttcgaggacgtggccatcggcgccccccaggaggacgacctgcagggcgccatctacatctacaacggcagagccgacggcatcagcagcaccttcagccagagaatcgagggcctgcagatcagcaagagcctgagcatgttcggccagagcatcagcggccagatcgacgccgacaacaacggctacgtggacgtggccgtgggcgccttcagaagcgacagcgccgtgctgctgagaaccagacccgtggtgatcgtggacgccagcctgagccaccccgagagcgtgaacagaaccaagttcgactgcgtggagaacggctggcccagcgtgtgcatcgacctgaccctgtgcttcagctacaagggcaaggaggtgcccggctacatcgtgctgttctacaacatgagcctggacgtgaacagaaaggccgagagcccccccagattctacttcagcagcaacggcaccagcgacgtgatcaccggcagcatccaggtgagcagcagagaggccaactgcagaacccaccaggccttcatgagaaaggacgtgagagacatcctgacccccatccagatcgaggccgcctaccacctgggcccccacgtgatcagcaagagaagcaccgaggagttcccccccctgcagcccatcctgcagcagaagaaggagaaggacatcatgaagaagaccatcaacttcgccagattctgcgcccacgagaactgcagcgccgacctgcaggtgagcgccaagatcggcttcctgaagccccacgagaacaagacctacctggccgtgggcagcatgaagaccctgatgctgaacgtgagcctgttcaacgccggcgacgacgcctacgagaccaccctgcacgtgaagctgcccgtgggcctgtacttcatcaagatcctggagctggaggagaagcagatcaactgcgaggtgaccgacaacagcggcgtggtgcagctggactgcagcatcggctacatctacgtggaccacctgagcagaatcgacatcagcttcctgctggacgtgagcagcctgagcagagccgaggaggacctgagcatcaccgtgcacgccacctgcgagaacgaggaggagatggacaacctgaagcacagcagagtgaccgtggccatccccctgaagtacgaggtgaagctgaccgtgcacggcttcgtgaaccccaccagcttcgtgtacggcagcaacgacgagaacgagcccgagacctgcatggtggagaagatgaacctgaccttccacgtgatcaacaccggcaacagcatggcccccaacgtgagcgtggagatcatggtgcccaacagcttcagcccccagaccgacaagctgttcaacatcctggacgtgcagaccaccaccggcgagtgccacttcgagaactaccagagagtgtgcgccctggagcagcagaagagcgccatgcagaccctgaagggcatcgtgagattcctgagcaagaccgacaagagactgctgtactgcatcaaggccgacccccactgcctgaacttcctgtgcaacttcggcaagatggagagcggcaaggaggccagcgtgcacatccagctggagggcagacccagcatcctggagatggacgagaccagcgccctgaagttcgagatcagagccaccggcttccccgagcccaaccccagagtgatcgagctgaacaaggacgagaacgtggcccacgtgctgctggagggcctgcaccaccagagacccaagagatacttcaccatcgtgatcatcagcagcagcctgctgctgggcctgatcgtgctgctgctgatcagctacgtgatgtggaaggccggcttcttcaagagacagtacaagagcatcctgcaggaggagaacagaagagacagctggagctacatcaacagcaagagcaacgacgactag

SEQ ID NO: 11087 - DNA, 1854 bp, synthetic construct
  misc_feature 1..1854: note = Description of Artificial Sequence: Synthetic coding sequence
  source 1..1854: mol_type = other DNA
atggcctgggaggccagaagagagcccggccccagaagagccgccgtgagagagaccgtgatgctgctgctgtgcctgggcgtgcccaccggcagaccctacaacgtggacaccgagagcgccctgctgtaccagggcccccacaacaccctgttcggctacagcgtggtgctgcacagccacggcgccaacagatggctgctggtgggcgcccccaccgccaactggctggccaacgccagcgtgatcaaccccggcgccatctacagatgcagaatcggcaagaaccccggccagacctgcgagcagctgcagctgggcagccccaacggcgagccctgcggcaagacctgcctggaggagagagacaaccagtggctgggcgtgaccctgagcagacagcccggcgagaacggcagcatcgtgacctgcggccacagatggaagaacatcttctacatcaagaacgagaacaagctgcccaccggcggctgctacggcgtgccccccgacctgagaaccgagctgagcaagagaatcgccccctgctaccaggactacgtgaagaagttcggcgagaacttcgccagctgccaggccggcatcagcagcttctacaccaaggacctgatcgtgatgggcgcccccggcagcagctactggaccggcagcctgttcgtgtacaacatcaccaccaacaagtacaaggccttcctggacaagcagaaccaggtgaagttcggcagctacctgggctacagcgtgggcgccggccacttcagaagccagcacaccaccgaggtggtgggcggcgccccccagcacgagcagatcggcaaggcctacatcttcagcatcgacgagaaggagctgaacatcctgcacgagatgaagggcaagaagctgggcagctacttcggcgccagcgtgtgcgccgtggacctgaacgccgacggcttcagcgacctgctggtgggcgcccccatgcagagcaccatcagagaggagggcagagtgttcgtgtacatcaacagcggcagcggcgccgtgatgaacgccatggagaccaacctggtgggcagcgacaagtacgccgccagattcggcgagagcatcgtgaacctgggcgacatcgacaacgacggcttcgaggacgtggccatcggcgccccccaggaggacgacctgcagggcgccatctacatctacaacggcagagccgacggcatcagcagcaccttcagccagagaatcgagggcctgcagatcagcaagagcctgagcatgttcggccagagcatcagcggccagatcgacgccgacaacaacggctacgtggacgtggccgtgggcgccttcagaagcgacagcgccgtgctgctgagaaccagacccgtggtgatcgtggacgccagcctgagccaccccgagagcgtgaacagaaccaagttcgactgcgtggagaacggctggcccagcgtgtgcatcgacctgaccctgtgcttcagctacaagggcaaggaggtgcccggctacatcgtgctgttctacaacatgagcctggacgtgaacagaaaggccgagagcccccccagattctacttcagcagcaacggcaccagcgacgtgatcaccggcagcatccaggtgagcagcagagaggccaactgcagaacccaccaggccttcatgagaaaggacgtgagagacatcctgacccccatccagatcgaggccgcctaccacctgggcccccacgtgatcagcaagagaagcaccgaggagttcccccccctgcagcccatcctgcagcagaagaaggagaaggacatcatgaagaagaccaagaagtag

SEQ ID NO: 11088 - DNA, 3150 bp, synthetic construct
  misc_feature 1..3150: note = Description of Artificial Sequence: Synthetic coding sequence
  source 1..3150: mol_type = other DNA
atgggcagcagaacccccgagagccccctgcacgccgtgcagctgagatggggccccagaagaagaccccccctgctgcccctgctgctgctgctgctgccccccccccccagagtgggcggcttcaacctggacgccgaggcccccgccgtgctgagcggcccccccggcagcttcttcggcttcagcgtggagttctacagacccggcaccgacggcgtgagcgtgctggtgggcgcccccaaggccaacaccagccagcccggcgtgctgcagggcggcgccgtgtacctgtgcccctggggcgccagccccacccagtgcacccccatcgagttcgacagcaagggcagcagactgctggagagcagcctgagcagcagcgagggcgaggagcccgtggagtacaagagcctgcagtggttcggcgccaccgtgagagcccacggcagcagcatcctggcctgcgcccccctgtacagctggagaaccgagaaggagcccctgagcgaccccgtgggcacctgctacctgagcaccgacaacttcaccagaatcctggagtacgccccctgcagaagcgacttcagctgggccgccggccagggctactgccagggcggcttcagcgccgagttcaccaagaccggcagagtggtgctgggcggccccggcagctacttctggcagggccagatcctgagcgccacccaggagcagatcgccgagagctactaccccgagtacctgatcaacctggtgcagggccagctgcagaccagacaggccagcagcatctacgacgacagctacctgggctacagcgtggccgtgggcgagttcagcggcgacgacaccgaggacttcgtggccggcgtgcccaagggcaacctgacctacggctacgtgaccatcctgaacggcagcgacatcagaagcctgtacaacttcagcggcgagcagatggccagctacttcggctacgccgtggccgccaccgacgtgaacggcgacggcctggacgacctgctggtgggcgcccccctgctgatggacagaacccccgacggcagaccccaggaggtgggcagagtgtacgtgtacctgcagcaccccgccggcatcgagcccacccccaccctgaccctgaccggccacgacgagttcggcagattcggcagcagcctgacccccctgggcgacctggaccaggacggctacaacgacgtggccatcggcgcccccttcggcggcgagacccagcagggcgtggtgttcgtgttccccggcggccccggcggcctgggcagcaagcccagccaggtgctgcagcccctgtgggccgccagccacacccccgacttcttcggcagcgccctgagaggcggcagagacctggacggcaacggctaccccgacctgatcgtgggcagcttcggcgtggacaaggccgtggtgtacagaggcagacccatcgtgagcgccagcgccagcctgaccatcttccccgccatgttcaaccccgaggagagaagctgcagcctggagggcaaccccgtggcctgcatcaacctgagcttctgcctgaacgccagcggcaagcacgtggccgacagcatcggcttcaccgtggagctgcagctggactggcagaagcagaagggcggcgtgagaagagccctgttcctggccagcagacaggccaccctgacccagaccctgctgatccagaacggcgccagagaggactgcagagagatgaagatctacctgagaaacgagagcgagttcagagacaagctgagccccatccacatcgccctgaacttcagcctggacccccaggcccccgtggacagccacggcctgagacccgccctgcactaccagagcaagagcagaatcgaggacaaggcccagatcctgctggactgcggcgaggacaacatctgcgtgcccgacctgcagctggaggtgttcggcgagcagaaccacgtgtacctgggcgacaagaacgccctgaacctgaccttccacgcccagaacgtgggcgagggcggcgcctacgaggccgagctgagagtgaccgccccccccgaggccgagtacagcggcctggtgagacaccccggcaacttcagcagcctgagctgcgactacttcgccgtgaaccagagcagactgctggtgtgcgacctgggcaaccccatgaaggccggcgccagcctgtggggcggcctgagattcaccgtgccccacctgagagacaccaagaagaccatccagttcgacttccagatcctgagcaagaacctgaacaacagccagagcgacgtggtgagcttcagactgagcgtggaggcccaggcccaggtgaccctgaacggcgtgagcaagcccgaggccgtgctgttccccgtgagcgactggcaccccagagaccagccccagaaggaggaggacctgggccccgccgtgcaccacgtgtacgagctgatcaaccagggccccagcagcatcagccagggcgtgctggagctgagctgcccccaggccctggagggccagcagctgctgtacgtgaccagagtgaccggcctgaactgcaccaccaaccaccccatcaaccccaagggcctggagctggaccccgagggcagcctgcaccaccagcagaagagagaggcccccagcagaagcagcgccagcagcggcccccagatcctgaagtgccccgaggccgagtgcttcagactgagatgcgagctgggccccctgcaccagcaggagagccagagcctgcagctgcacttcagagtgtgggccaagaccttcctgcagagagagcaccagcccttcagcctgcagtgcgaggccgtgtacaaggccctgaagatgccctacagaatcctgcccagacagctgccccagaaggagagacaggtggccaccgccgtgcagtggaccaaggccgagggcagctacggcgtgcccctgtggatcatcatcctggccatcctgttcggcctgctgctgctgggcctgctgatctacatcctgtacaagctgggcttcttcaagagaagcctgccctacggcaccgccatggagaaggcccagctgaagccccccgccaccagcgacgcctag

SEQ ID NO: 11089 - DNA, 3393 bp, synthetic construct
  misc_feature 1..3393: note = Description of Artificial Sequence: Synthetic coding sequence
  source 1..3393: mol_type = other DNA
atggccgccgccggccagctgtgcctgctgtacctgagcgccggcctgctgagcagactgggcgccgccttcaacctggacaccagagaggacaacgtgatcagaaagtacggcgaccccggcagcctgttcggcttcagcctggccatgcactggcagctgcagcccgaggacaagagactgctgctggtgggcgcccccagagccgaggccctgcccctgcagagagccaacagaaccggcggcctgtacagctgcgacatcaccgccagaggcccctgcaccagaatcgagttcgacaacgacgccgaccccaccagcgagagcaaggaggaccagtggatgggcgtgaccgtgcagagccagggccccggcggcaaggtggtgacctgcgcccacagatacgagaagagacagcacgtgaacaccaagcaggagagcagagacatcttcggcagatgctacgtgctgagccagaacctgagaatcgaggacgacatggacggcggcgactggagcttctgcgacggcagactgagaggccacgagaagttcggcagctgccagcagggcgtggccgccaccttcaccaaggacttccactacatcgtgttcggcgcccccggcacctacaactggaagggcatcgtgagagtggagcagaagaacaacaccttcttcgacatgaacatcttcgaggacggcccctacgaggtgggcggcgagaccgagcacgacgagagcctggtgcccgtgcccgccaacagctacctgggcctgctgttcctgaccagcgtgagctacaccgaccccgaccagttcgtgtacaagaccagaccccccagagagcagcccgacaccttccccgacgtgatgatgaacagctacctgggcttcagcctggacagcggcaagggcatcgtgagcaaggacgagatcaccttcgtgagcggcgcccccagagccaaccacagcggcgccgtggtgctgctgaagagagacatgaagagcgcccacctgctgcccgagcacatcttcgacggcgagggcctggccagcagcttcggctacgacgtggccgtggtggacctgaacaaggacggctggcaggacatcgtgatcggcgccccccagtacttcgacagagacggcgaggtgggcggcgccgtgtacgtgtacatgaaccagcagggcagatggaacaacgtgaagcccatcagactgaacggcaccaaggacagcatgttcggcatcgccgtgaagaacatcggcgacatcaaccaggacggctaccccgacatcgccgtgggcgccccctacgacgacctgggcaaggtgttcatctaccacggcagcgccaacggcatcaacaccaagcccacccaggtgctgaagggcatcagcccctacttcggctacagcatcgccggcaacatggacctggacagaaacagctaccccgacgtggccgtgggcagcctgagcgacagcgtgaccatcttcagaagcagacccgtgatcaacatccagaagaccatcaccgtgacccccaacagaatcgacctgagacagaagaccgcctgcggcgcccccagcggcatctgcctgcaggtgaagagctgcttcgagtacaccgccaaccccgccggctacaaccccagcatcagcatcgtgggcaccctggaggccgagaaggagagaagaaagagcggcctgagcagcagagtgcagttcagaaaccagggcagcgagcccaagtacacccaggagctgaccctgaagagacagaagcagaaggtgtgcatggaggagaccctgtggctgcaggacaacatcagagacaagctgagacccatccccatcaccgccagcgtggagatccaggagcccagcagcagaagaagagtgaacagcctgcccgaggtgctgcccatcctgaacagcgacgagcccaagaccgcccacatcgacgtgcacttcctgaaggagggctgcggcgacgacaacgtgtgcaacagcaacctgaagctggagtacaagttctgcaccagagagggcaaccaggacaagttcagctacctgcccatccagaagggcgtgcccgagctggtgctgaaggaccagaaggacatcgccctggagatcaccgtgaccaacagccccagcaaccccagaaaccccaccaaggacggcgacgacgcccacgaggccaagctgatcgccaccttccccgacaccctgacctacagcgcctacagagagctgagagccttccccgagaagcagctgagctgcgtggccaaccagaacggcagccaggccgactgcgagctgggcaaccccttcaagagaaacagcaacgtgaccttctacctggtgctgagcaccaccgaggtgaccttcgacacccccgacctggacatcaacctgaagctggagaccaccagcaaccaggacaacctggcccccatcaccgccaaggccaaggtggtgatcgagctgctgctgagcgtgagcggcgtggccaagcccagccaggtgtacttcggcggcaccgtggtgggcgagcaggccatgaagagcgaggacgaggtgggcagcctgatcgagtacgagttcagagtgatcaacctgggcaagcccctgaccaacctgggcaccgccaccctgaacatccagtggcccaaggagatcagcaacggcaagtggctgctgtacctggtgaaggtggagagcaagggcctggagaaggtgacctgcgagccccagaaggagatcaacagcctgaacctgaccgagagccacaacagcagaaagaagagagagatcaccgagaagcagatcgacgacaacagaaagttcagcctgttcgccgagagaaagtaccagaccctgaactgcagcgtgaacgtgaactgcgtgaacatcagatgccccctgagaggcctggacagcaaggccagcctgatcctgagaagcagactgtggaacagcaccttcctggaggagtacagcaagctgaactacctggacatcctgatgagagccttcatcgacgtgaccgccgccgccgagaacatcagactgcccaacgccggcacccaggtgagagtgaccgtgttccccagcaagaccgtggcccagtacagcggcgtgccctggtggatcatcctggtggccatcctggccggcatcctgatgctggccctgctggtgttcatcctgtggaagtgcggcttcttcaagagaagcagatacgacgacagcgtgcccagataccacgccgtgagaatcagaaaggaggagagagagatcaaggacgagaagtacatcgacaacctggagaagaagcagtggatcaccaagtggaacgagaacgagagctacagctag

SEQ ID NO: 11090 - DNA, 3222 bp, synthetic construct
  misc_feature 1..3222: note = Description of Artificial Sequence: Synthetic coding sequence
  source 1..3222: mol_type = other DNA
atggccgccgccggccagctgtgcctgctgtacctgagcgccggcctgctgagcagactgggcgccgccttcaacctggacaccagagaggacaacgtgatcagaaagtacggcgaccccggcagcctgttcggcttcagcctggccatgcactggcagctgcagcccgaggacaagagactgctgctggtgggcgcccccagagccgaggccctgcccctgcagagagccaacagaaccggcggcctgtacagctgcgacatcaccgccagaggcccctgcaccagaatcgagttcgacaacgacgccgaccccaccagcgagagcaaggaggaccagtggatgggcgtgaccgtgcagagccagggccccggcggcaaggtggtgacctgcgcccacagatacgagaagagacagcacgtgaacaccaagcaggagagcagagacatcttcggcagatgctacgtgctgagccagaacctgagaatcgaggacgacatggacggcggcgactggagcttctgcgacggcagactgagaggccacgagaagttcggcagctgccagcagggcgtggccgccaccttcaccaaggacttccactacatcgtgttcggcgcccccggcacctacaactggaagggcatcgtgagagtggagcagaagaacaacaccttcttcgacatgaacatcttcgaggacggcccctacgaggtgggcggcgagaccgagcacgacgagagcctggtgcccgtgcccgccaacagctacctgggcttcagcctggacagcggcaagggcatcgtgagcaaggacgagatcaccttcgtgagcggcgcccccagagccaaccacagcggcgccgtggtgctgctgaagagagacatgaagagcgcccacctgctgcccgagcacatcttcgacggcgagggcctggccagcagcttcggctacgacgtggccgtggtggacctgaacaaggacggctggcaggacatcgtgatcggcgccccccagtacttcgacagagacggcgaggtgggcggcgccgtgtacgtgtacatgaaccagcagggcagatggaacaacgtgaagcccatcagactgaacggcaccaaggacagcatgttcggcatcgccgtgaagaacatcggcgacatcaaccaggacggctaccccgacatcgccgtgggcgccccctacgacgacctgggcaaggtgttcatctaccacggcagcgccaacggcatcaacaccaagcccacccaggtgctgaagggcatcagcccctacttcggctacagcatcgccggcaacatggacctggacagaaacagctaccccgacgtggccgtgggcagcctgagcgacagcgtgaccatcttcagaagcagacccgtgatcaacatccagaagaccatcaccgtgacccccaacagaatcgacctgagacagaagaccgcctgcggcgcccccagcggcatctgcctgcaggtgaagagctgcttcgagtacaccgccaaccccgccggctacaaccccagcatcagcatcgtgggcaccctggaggccgagaaggagagaagaaagagcggcctgagcagcagagtgcagttcagaaaccagggcagcgagcccaagtacacccaggagctgaccctgaagagacagaagcagaaggtgtgcatggaggagaccctgtggctgcaggacaacatcagagacaagctgagacccatccccatcaccgccagcgtggagatccaggagcccagcagcagaagaagagtgaacagcctgcccgaggtgctgcccatcctgaacagcgacgagcccaagaccgcccacatcgacgtgcacttcctgaaggagggctgcggcgacgacaacgtgtgcaacagcaacctgaagctggagtacaagttctgcaccagagagggcaaccaggacaagttcagctacctgcccatccagaagggcgtgcccgagctggtgctgaaggaccagaaggacatcgccctggagatcaccgtgaccaacagccccagcaaccccagaaaccccaccaaggacggcgacgacgcccacgaggccaagctgatcgccaccttccccgacaccctgacctacagcgcctacagagagctgagagccttccccgagaagcagctgagctgcgtggccaaccagaacggcagccaggccgactgcgagctgggcaaccccttcaagagaaacagcaacgtgaccttctacctggtgctgagcaccaccgaggtgaccttcgacacccccgacctggacatcaacctgaagctggagaccaccagcaaccaggacaacctggcccccatcaccgccaaggccaaggtggtgatcgagctgctgctgagcgtgagcggcgtggccaagcccagccaggtgtacttcggcggcaccgtggtgggcgagcaggccatgaagagcgaggacgaggtgggcagcctgatcgagtacgagttcagagtgatcaacctgggcaagcccctgaccaacctgggcaccgccaccctgaacatccagtggcccaaggagatcagcaacggcaagtggctgctgtacctggtgaaggtggagagcaagggcctggagaaggtgacctgcgagccccagaaggagatcaacagcctgaacctgaccgagagccacaacagcagaaagaagagagagatcaccgagaagcagatcgacgacaacagaaagttcagcctgttcgccgagagaaagtaccagaccctgaactgcagcgtgaacgtgaactgcgtgaacatcagatgccccctgagaggcctggacagcaaggccagcctgatcctgagaagcagactgtggaacagcaccttcctggaggagtacagcaagctgaactacctggacatcctgatgagagccttcatcgacgtgaccgccgccgccgagaacatcagactgcccaacgccggcacccaggtgagagtgaccgtgttccccagcaagaccgtggcccagtacagcggcgtgccctggtggatcatcctggtggccatcctggccggcatcctgatgctggccctgctggtgttcatcctgtggaagtgcggcttcttcaagagaaacaagaaggaccactacgacgccacctaccacaaggccgagatccacgcccagcccagcgacaaggagagactgaccagcgacgcctag

SEQ ID NO: 11091 - DNA, 3207 bp, synthetic construct
  misc_feature 1..3207: note = Description of Artificial Sequence: Synthetic coding sequence
  source 1..3207: mol_type = other DNA
atggccgccgccggccagctgtgcctgctgtacctgagcgccggcctgctgagcagactgggcgccgccttcaacctggacaccagagaggacaacgtgatcagaaagtacggcgaccccggcagcctgttcggcttcagcctggccatgcactggcagctgcagcccgaggacaagagactgctgctggtgggcgcccccagagccgaggccctgcccctgcagagagccaacagaaccggcggcctgtacagctgcgacatcaccgccagaggcccctgcaccagaatcgagttcgacaacgacgccgaccccaccagcgagagcaaggaggaccagtggatgggcgtgaccgtgcagagccagggccccggcggcaaggtggtgacctgcgcccacagatacgagaagagacagcacgtgaacaccaagcaggagagcagagacatcttcggcagatgctacgtgctgagccagaacctgagaatcgaggacgacatggacggcggcgactggagcttctgcgacggcagactgagaggccacgagaagttcggcagctgccagcagggcgtggccgccaccttcaccaaggacttccactacatcgtgttcggcgcccccggcacctacaactggaagggcctgctgttcctgaccagcgtgagctacaccgaccccgaccagttcgtgtacaagaccagaccccccagagagcagcccgacaccttccccgacgtgatgatgaacagctacctgggcttcagcctggacagcggcaagggcatcgtgagcaaggacgagatcaccttcgtgagcggcgcccccagagccaaccacagcggcgccgtggtgctgctgaagagagacatgaagagcgcccacctgctgcccgagcacatcttcgacggcgagggcctggccagcagcttcggctacgacgtggccgtggtggacctgaacaaggacggctggcaggacatcgtgatcggcgccccccagtacttcgacagagacggcgaggtgggcggcgccgtgtacgtgtacatgaaccagcagggcagatggaacaacgtgaagcccatcagactgaacggcaccaaggacagcatgttcggcatcgccgtgaagaacatcggcgacatcaaccaggacggctaccccgacatcgccgtgggcgccccctacgacgacctgggcaaggtgttcatctaccacggcagcgccaacggcatcaacaccaagcccacccaggtgctgaagggcatcagcccctacttcggctacagcatcgccggcaacatggacctggacagaaacagctaccccgacgtggccgtgggcagcctgagcgacagcgtgaccatcttcagaagcagacccgtgatcaacatccagaagaccatcaccgtgacccccaacagaatcgacctgagacagaagaccgcctgcggcgcccccagcggcatctgcctgcaggtgaagagctgcttcgagtacaccgccaaccccgccggctacaaccccagcatcagcatcgtgggcaccctggaggccgagaaggagagaagaaagagcggcctgagcagcagagtgcagttcagaaaccagggcagcgagcccaagtacacccaggagctgaccctgaagagacagaagcagaaggtgtgcatggaggagaccctgtggctgcaggacaacatcagagacaagctgagacccatccccatcaccgccagcgtggagatccaggagcccagcagcagaagaagagtgaacagcctgcccgaggtgctgcccatcctgaacagcgacgagcccaagaccgcccacatcgacgtgcacttcctgaaggagggctgcggcgacgacaacgtgtgcaacagcaacctgaagctggagtacaagttctgcaccagagagggcaaccaggacaagttcagctacctgcccatccagaagggcgtgcccgagctggtgctgaaggaccagaaggacatcgccctggagatcaccgtgaccaacagccccagcaaccccagaaaccccaccaaggacggcgacgacgcccacgaggccaagctgatcgccaccttccccgacaccctgacctacagcgcctacagagagctgagagccttccccgagaagcagctgagctgcgtggccaaccagaacggcagccaggccgactgcgagctgggcaaccccttcaagagaaacagcaacgtgaccttctacctggtgctgagcaccaccgaggtgaccttcgacacccccgacctggacatcaacctgaagctggagaccaccagcaaccaggacaacctggcccccatcaccgccaaggccaaggtggtgatcgagctgctgctgagcgtgagcggcgtggccaagcccagccaggtgtacttcggcggcaccgtggtgggcgagcaggccatgaagagcgaggacgaggtgggcagcctgatcgagtacgagttcagagtgatcaacctgggcaagcccctgaccaacctgggcaccgccaccctgaacatccagtggcccaaggagatcagcaacggcaagtggctgctgtacctggtgaaggtggagagcaagggcctggagaaggtgacctgcgagccccagaaggagatcaacagcctgaacctgaccgagagccacaacagcagaaagaagagagagatcaccgagaagcagatcgacgacaacagaaagttcagcctgttcgccgagagaaagtaccagaccctgaactgcagcgtgaacgtgaactgcgtgaacatcagatgccccctgagaggcctggacagcaaggccagcctgatcctgagaagcagactgtggaacagcaccttcctggaggagtacagcaagctgaactacctggacatcctgatgagagccttcatcgacgtgaccgccgccgccgagaacatcagactgcccaacgccggcacccaggtgagagtgaccgtgttccccagcaagaccgtggcccagtacagcggcgtgccctggtggatcatcctggtggccatcctggccggcatcctgatgctggccctgctggtgttcatcctgtggaagtgcggcttcttcaagagaaacaagaaggaccactacgacgccacctaccacaaggccgagatccacgcccagcccagcgacaaggagagactgaccagcgacgcctag

SEQ ID NO: 11092 - DNA, 3339 bp, synthetic construct
  misc_feature 1..3339: note = Description of Artificial Sequence: Synthetic coding sequence
  source 1..3339: mol_type = other DNA
atggccgccgccggccagctgtgcctgctgtacctgagcgccggcctgctgagcagactgggcgccgccttcaacctggacaccagagaggacaacgtgatcagaaagtacggcgaccccggcagcctgttcggcttcagcctggccatgcactggcagctgcagcccgaggacaagagactgctgctggtgggcgcccccagagccgaggccctgcccctgcagagagccaacagaaccggcggcctgtacagctgcgacatcaccgccagaggcccctgcaccagaatcgagttcgacaacgacgccgaccccaccagcgagagcaaggaggaccagtggatgggcgtgaccgtgcagagccagggccccggcggcaaggtggtgacctgcgcccacagatacgagaagagacagcacgtgaacaccaagcaggagagcagagacatcttcggcagatgctacgtgctgagccagaacctgagaatcgaggacgacatggacggcggcgactggagcttctgcgacggcagactgagaggccacgagaagttcggcagctgccagcagggcgtggccgccaccttcaccaaggacttccactacatcgtgttcggcgcccccggcacctacaactggaagggcatcgtgagagtggagcagaagaacaacaccttcttcgacatgaacatcttcgaggacggcccctacgaggtgggcggcgagaccgagcacgacgagagcctggtgcccgtgcccgccaacagctacctgggcctgctgttcctgaccagcgtgagctacaccgaccccgaccagttcgtgtacaagaccagaccccccagagagcagcccgacaccttccccgacgtgatgatgaacagctacctgggcttcagcctggacagcggcaagggcatcgtgagcaaggacgagatcaccttcgtgagcggcgcccccagagccaaccacagcggcgccgtggtgctgctgaagagagacatgaagagcgcccacctgctgcccgagcacatcttcgacggcgagggcctggccagcagcttcggctacgacgtggccgtggtggacctgaacaaggacggctggcaggacatcgtgatcggcgccccccagtacttcgacagagacggcgaggtgggcggcgccgtgtacgtgtacatgaaccagcagggcagatggaacaacgtgaagcccatcagactgaacggcaccaaggacagcatgttcggcatcgccgtgaagaacatcggcgacatcaaccaggacggctaccccgacatcgccgtgggcgccccctacgacgacctgggcaaggtgttcatctaccacggcagcgccaacggcatcaacaccaagcccacccaggtgctgaagggcatcagcccctacttcggctacagcatcgccggcaacatggacctggacagaaacagctaccccgacgtggccgtgggcagcctgagcgacagcgtgaccatcttcagaagcagacccgtgatcaacatccagaagaccatcaccgtgacccccaacagaatcgacctgagacagaagaccgcctgcggcgcccccagcggcatctgcctgcaggtgaagagctgcttcgagtacaccgccaaccccgccggctacaaccccagcatcagcatcgtgggcaccctggaggccgagaaggagagaagaaagagcggcctgagcagcagagtgcagttcagaaaccagggcagcgagcccaagtacacccaggagctgaccctgaagagacagaagcagaaggtgtgcatggaggagaccctgtggctgcaggacaacatcagagacaagctgagacccatccccatcaccgccagcgtggagatccaggagcccagcagcagaagaagagtgaacagcctgcccgaggtgctgcccatcctgaacagcgacgagcccaagaccgcccacatcgacgtgcacttcctgaaggagggctgcggcgacgacaacgtgtgcaacagcaacctgaagctggagtacaagttctgcaccagagagggcaaccaggacaagttcagctacctgcccatccagaagggcgtgcccgagctggtgctgaaggaccagaaggacatcgccctggagatcaccgtgaccaacagccccagcaaccccagaaaccccaccaaggacggcgacgacgcccacgaggccaagctgatcgccaccttccccgacaccctgacctacagcgcctacagagagctgagagccttccccgagaagcagctgagctgcgtggccaaccagaacggcagccaggccgactgcgagctgggcaaccccttcaagagaaacagcaacgtgaccttctacctggtgctgagcaccaccgaggtgaccttcgacacccccgacctggacatcaacctgaagctggagaccaccagcaaccaggacaacctggcccccatcaccgccaaggccaaggtggtgatcgagctgctgctgagcgtgagcggcgtggccaagcccagccaggtgtacttcggcggcaccgtggtgggcgagcaggccatgaagagcgaggacgaggtgggcagcctgatcgagtacgagttcagagtgatcaacctgggcaagcccctgaccaacctgggcaccgccaccctgaacatccagtggcccaaggagatcagcaacggcaagtggctgctgtacctggtgaaggtggagagcaagggcctggagaaggtgacctgcgagccccagaaggagatcaacagcctgaacctgaccgagagccacaacagcagaaagaagagagagatcaccgagaagcagatcgacgacaacagaaagttcagcctgttcgccgagagaaagtaccagaccctgaactgcagcgtgaacgtgaactgcgtgaacatcagatgccccctgagaggcctggacagcaaggccagcctgatcctgagaagcagactgtggaacagcaccttcctggaggagtacagcaagctgaactacctggacatcctgatgagagccttcatcgacgtgaccgccgccgccgagaacatcagactgcccaacgccggcacccaggtgagagtgaccgtgttccccagcaagaccgtggcccagtacagcggcgtgccctggtggatcatcctggtggccatcctggccggcatcctgatgctggccctgctggtgttcatcctgtggaagtgcggcttcttcaagagaaacaagaaggaccactacgacgccacctaccacaaggccgagatccacgcccagcccagcgacaaggagagactgaccagcgacgcctag

SEQ ID NO: 11093 - DNA, 3276 bp, synthetic construct
  misc_feature 1..3276: note = Description of Artificial Sequence: Synthetic coding sequence
  source 1..3276: mol_type = other DNA
atggccgccgccggccagctgtgcctgctgtacctgagcgccggcctgctgagcagactgggcgccgccttcaacctggacaccagagaggacaacgtgatcagaaagtacggcgaccccggcagcctgttcggcttcagcctggccatgcactggcagctgcagcccgaggacaagagactgctgctggtgggcgcccccagagccgaggccctgcccctgcagagagccaacagaaccggcggcctgtacagctgcgacatcaccgccagaggcccctgcaccagaatcgagttcgacaacgacgccgaccccaccagcgagagcaaggaggaccagtggatgggcgtgaccgtgcagagccagggccccggcggcaaggtggtgacctgcgcccacagatacgagaagagacagcacgtgaacaccaagcaggagagcagagacatcttcggcagatgctacgtgctgagccagaacctgagaatcgaggacgacatggacggcggcgactggagcttctgcgacggcagactgagaggccacgagaagttcggcagctgccagcagggcgtggccgccaccttcaccaaggacttccactacatcgtgttcggcgcccccggcacctacaactggaagggcatcgtgagagtggagcagaagaacaacaccttcttcgacatgaacatcttcgaggacggcccctacgaggtgggcggcgagaccgagcacgacgagagcctggtgcccgtgcccgccaacagctacctgggcttcagcctggacagcggcaagggcatcgtgagcaaggacgagatcaccttcgtgagcggcgcccccagagccaaccacagcggcgccgtggtgctgctgaagagagacatgaagagcgcccacctgctgcccgagcacatcttcgacggcgagggcctggccagcagcttcggctacgacgtggccgtggtggacctgaacaaggacggctggcaggacatcgtgatcggcgccccccagtacttcgacagagacggcgaggtgggcggcgccgtgtacgtgtacatgaaccagcagggcagatggaacaacgtgaagcccatcagactgaacggcaccaaggacagcatgttcggcatcgccgtgaagaacatcggcgacatcaaccaggacggctaccccgacatcgccgtgggcgccccctacgacgacctgggcaaggtgttcatctaccacggcagcgccaacggcatcaacaccaagcccacccaggtgctgaagggcatcagcccctacttcggctacagcatcgccggcaacatggacctggacagaaacagctaccccgacgtggccgtgggcagcctgagcgacagcgtgaccatcttcagaagcagacccgtgatcaacatccagaagaccatcaccgtgacccccaacagaatcgacctgagacagaagaccgcctgcggcgcccccagcggcatctgcctgcaggtgaagagctgcttcgagtacaccgccaaccccgccggctacaaccccagcatcagcatcgtgggcaccctggaggccgagaaggagagaagaaagagcggcctgagcagcagagtgcagttcagaaaccagggcagcgagcccaagtacacccaggagctgaccctgaagagacagaagcagaaggtgtgcatggaggagaccctgtggctgcaggacaacatcagagacaagctgagacccatccccatcaccgccagcgtggagatccaggagcccagcagcagaagaagagtgaacagcctgcccgaggtgctgcccatcctgaacagcgacgagcccaagaccgcccacatcgacgtgcacttcctgaaggagggctgcggcgacgacaacgtgtgcaacagcaacctgaagctggagtacaagttctgcaccagagagggcaaccaggacaagttcagctacctgcccatccagaagggcgtgcccgagctggtgctgaaggaccagaaggacatcgccctggagatcaccgtgaccaacagccccagcaaccccagaaaccccaccaaggacggcgacgacgcccacgaggccaagctgatcgccaccttccccgacaccctgacctacagcgcctacagagagctgagagccttccccgagaagcagctgagctgcgtggccaaccagaacggcagccaggccgactgcgagctgggcaaccccttcaagagaaacagcaacgtgaccttctacctggtgctgagcaccaccgaggtgaccttcgacacccccgacctggacatcaacctgaagctggagaccaccagcaaccaggacaacctggcccccatcaccgccaaggccaaggtggtgatcgagctgctgctgagcgtgagcggcgtggccaagcccagccaggtgtacttcggcggcaccgtggtgggcgagcaggccatgaagagcgaggacgaggtgggcagcctgatcgagtacgagttcagagtgatcaacctgggcaagcccctgaccaacctgggcaccgccaccctgaacatccagtggcccaaggagatcagcaacggcaagtggctgctgtacctggtgaaggtggagagcaagggcctggagaaggtgacctgcgagccccagaaggagatcaacagcctgaacctgaccgagagccacaacagcagaaagaagagagagatcaccgagaagcagatcgacgacaacagaaagttcagcctgttcgccgagagaaagtaccagaccctgaactgcagcgtgaacgtgaactgcgtgaacatcagatgccccctgagaggcctggacagcaaggccagcctgatcctgagaagcagactgtggaacagcaccttcctggaggagtacagcaagctgaactacctggacatcctgatgagagccttcatcgacgtgaccgccgccgccgagaacatcagactgcccaacgccggcacccaggtgagagtgaccgtgttccccagcaagaccgtggcccagtacagcggcgtgccctggtggatcatcctggtggccatcctggccggcatcctgatgctggccctgctggtgttcatcctgtggaagtgcggcttcttcaagagaagcagatacgacgacagcgtgcccagataccacgccgtgagaatcagaaaggaggagagagagatcaaggacgagaagtacatcgacaacctggagaagaagcagtggatcaccaagtggaacgagaacgagagctacagctag

SEQ ID NO: 11094 - DNA, 2865 bp, synthetic construct
  misc_feature 1..2865: note = Description of Artificial Sequence: Synthetic coding sequence
  source 1..2865: mol_type = other DNA
atgggcgtgaccgtgcagagccagggccccggcggcaaggtggtgacctgcgcccacagatacgagaagagacagcacgtgaacaccaagcaggagagcagagacatcttcggcagatgctacgtgctgagccagaacctgagaatcgaggacgacatggacggcggcgactggagcttctgcgacggcagactgagaggccacgagaagttcggcagctgccagcagggcgtggccgccaccttcaccaaggacttccactacatcgtgttcggcgcccccggcacctacaactggaagggcctgctgttcctgaccagcgtgagctacaccgaccccgaccagttcgtgtacaagaccagaccccccagagagcagcccgacaccttccccgacgtgatgatgaacagctacctgggcttcagcctggacagcggcaagggcatcgtgagcaaggacgagatcaccttcgtgagcggcgcccccagagccaaccacagcggcgccgtggtgctgctgaagagagacatgaagagcgcccacctgctgcccgagcacatcttcgacggcgagggcctggccagcagcttcggctacgacgtggccgtggtggacctgaacaaggacggctggcaggacatcgtgatcggcgccccccagtacttcgacagagacggcgaggtgggcggcgccgtgtacgtgtacatgaaccagcagggcagatggaacaacgtgaagcccatcagactgaacggcaccaaggacagcatgttcggcatcgccgtgaagaacatcggcgacatcaaccaggacggctaccccgacatcgccgtgggcgccccctacgacgacctgggcaaggtgttcatctaccacggcagcgccaacggcatcaacaccaagcccacccaggtgctgaagggcatcagcccctacttcggctacagcatcgccggcaacatggacctggacagaaacagctaccccgacgtggccgtgggcagcctgagcgacagcgtgaccatcttcagaagcagacccgtgatcaacatccagaagaccatcaccgtgacccccaacagaatcgacctgagacagaagaccgcctgcggcgcccccagcggcatctgcctgcaggtgaagagctgcttcgagtacaccgccaaccccgccggctacaaccccagcatcagcatcgtgggcaccctggaggccgagaaggagagaagaaagagcggcctgagcagcagagtgcagttcagaaaccagggcagcgagcccaagtacacccaggagctgaccctgaagagacagaagcagaaggtgtgcatggaggagaccctgtggctgcaggacaacatcagagacaagctgagacccatccccatcaccgccagcgtggagatccaggagcccagcagcagaagaagagtgaacagcctgcccgaggtgctgcccatcctgaacagcgacgagcccaagaccgcccacatcgacgtgcacttcctgaaggagggctgcggcgacgacaacgtgtgcaacagcaacctgaagctggagtacaagttctgcaccagagagggcaaccaggacaagttcagctacctgcccatccagaagggcgtgcccgagctggtgctgaaggaccagaaggacatcgccctggagatcaccgtgaccaacagccccagcaaccccagaaaccccaccaaggacggcgacgacgcccacgaggccaagctgatcgccaccttccccgacaccctgacctacagcgcctacagagagctgagagccttccccgagaagcagctgagctgcgtggccaaccagaacggcagccaggccgactgcgagctgggcaaccccttcaagagaaacagcaacgtgaccttctacctggtgctgagcaccaccgaggtgaccttcgacacccccgacctggacatcaacctgaagctggagaccaccagcaaccaggacaacctggcccccatcaccgccaaggccaaggtggtgatcgagctgctgctgagcgtgagcggcgtggccaagcccagccaggtgtacttcggcggcaccgtggtgggcgagcaggccatgaagagcgaggacgaggtgggcagcctgatcgagtacgagttcagagtgatcaacctgggcaagcccctgaccaacctgggcaccgccaccctgaacatccagtggcccaaggagatcagcaacggcaagtggctgctgtacctggtgaaggtggagagcaagggcctggagaaggtgacctgcgagccccagaaggagatcaacagcctgaacctgaccgagagccacaacagcagaaagaagagagagatcaccgagaagcagatcgacgacaacagaaagttcagcctgttcgccgagagaaagtaccagaccctgaactgcagcgtgaacgtgaactgcgtgaacatcagatgccccctgagaggcctggacagcaaggccagcctgatcctgagaagcagactgtggaacagcaccttcctggaggagtacagcaagctgaactacctggacatcctgatgagagccttcatcgacgtgaccgccgccgccgagaacatcagactgcccaacgccggcacccaggtgagagtgaccgtgttccccagcaagaccgtggcccagtacagcggcgtgccctggtggatcatcctggtggccatcctggccggcatcctgatgctggccctgctggtgttcatcctgtggaagtgcggcttcttcaagagaaacaagaaggaccactacgacgccacctaccacaaggccgagatccacgcccagcccagcgacaaggagagactgaccagcgacgcctag

SEQ ID NO: 11095 - DNA, 3393 bp, synthetic construct; identical to SEQ ID NO: 11089
  misc_feature 1..3393: note = Description of Artificial Sequence: Synthetic coding sequence
  source 1..3393: mol_type = other DNA

SEQ ID NO: 11096 - DNA, 3261 bp, synthetic construct
  misc_feature 1..3261: note = Description of Artificial Sequence: Synthetic coding sequence
  source 1..3261: mol_type = other DNA
atggccgccgccggccagctgtgcctgctgtacctgagcgccggcctgctgagcagactgggcgccgccttcaacctggacaccagagaggacaacgtgatcagaaagtacggcgaccccggcagcctgttcggcttcagcctggccatgcactggcagctgcagcccgaggacaagagactgctgctggtgggcgcccccagagccgaggccctgcccctgcagagagccaacagaaccggcggcctgtacagctgcgacatcaccgccagaggcccctgcaccagaatcgagttcgacaacgacgccgaccccaccagcgagagcaaggaggaccagtggatgggcgtgaccgtgcagagccagggccccggcggcaaggtggtgacctgcgcccacagatacgagaagagacagcacgtgaacaccaagcaggagagcagagacatcttcggcagatgctacgtgctgagccagaacctgagaatcgaggacgacatggacggcggcgactggagcttctgcgacggcagactgagaggccacgagaagttcggcagctgccagcagggcgtggccgccaccttcaccaaggacttccactacatcgtgttcggcgcccccggcacctacaactggaagggcctgctgttcctgaccagcgtgagctacaccgaccccgaccagttcgtgtacaagaccagaccccccagagagcagcccgacaccttccccgacgtgatgatgaacagctacctgggcttcagcctggacagcggcaagggcatcgtgagcaaggacgagatcaccttcgtgagcggcgcccccagagccaaccacagcggcgccgtggtgctgctgaagagagacatgaagagcgcccacctgctgcccgagcacatcttcgacggcgagggcctggccagcagcttcggctacgacgtggccgtggtggacctgaacaaggacggctggcaggacatcgtgatcggcgccccccagtacttcgacagagacggcgaggtgggcggcgccgtgtacgtgtacatgaaccagcagggcagatggaacaacgtgaagcccatcagactgaacggcaccaaggacagcatgttcggcatcgccgtgaagaacatcggcgacatcaaccaggacggctaccccgacatcgccgtgggcgccccctacgacgacctgggcaaggtgttcatctaccacggcagcgccaacggcatcaacaccaagcccacccaggtgctgaagggcatcagcccctacttcggctacagcatcgccggcaacatggacctggacagaaacagctaccccgacgtggccgtgggcagcctgagcgacagcgtgaccatcttcagaagcagacccgtgatcaacatccagaagaccatcaccgtgacccccaacagaatcgacctgagacagaagaccgcctgcggcgcccccagcggcatctgcctgcaggtgaagagctgcttcgagtacaccgccaaccccgccggctacaaccccagcatcagcatcgtgggcaccctggaggccgagaaggagagaagaaagagcggcctgagcagcagagtgcagttcagaaaccagggcagcgagcccaagtacacccaggagctgaccctgaagagacagaagcagaaggtgtgcatggaggagaccctgtggctgcaggacaacatcagagacaagctgagacccatccccatcaccgccagcgtggagatccaggagcccagcagcagaagaagagtgaacagcctgcccgaggtgctgcccatcctgaacagcgacgagcccaagaccgcccacatcgacgtgcacttcctgaaggagggctgcggcgacgacaacgtgtgcaacagcaacctgaagctggagtacaagttctgcaccagagagggcaaccaggacaagttcagctacctgcccatccagaagggcgtgcccgagctggtgctgaaggaccagaaggacatcgccctggagatcaccgtgaccaacagccccagcaaccccagaaaccccaccaaggacggcgacgacgcccacgaggccaagctgatcgccaccttccccgacaccctgacctacagcgcctacagagagctgagagccttccccgagaagcagctgagctgcgtggccaaccagaacggcagccaggccgactgcgagctgggcaaccccttcaagagaaacagcaacgtgaccttctacctggtgctgagcaccaccgaggtgaccttcgacacccccgacctggacatcaacctgaagctggagaccaccagcaaccaggacaacctggcccccatcaccgccaaggccaaggtggtgatcgagctgctgctgagcgtgagcggcgtggccaagcccagccaggtgtacttcggcggcaccgtggtgggcgagcaggccatgaagagcgaggacgaggtgggcagcctgatcgagtacgagttcagagtgatcaacctgggcaagcccctgaccaacctgggcaccgccaccctgaacatccagtggcccaaggagatcagcaacggcaagtggctgctgtacctggtgaaggtggagagcaagggcctggagaaggtgacctgcgagccccagaaggagatcaacagcctgaacctgaccgagagccacaacagcagaaagaagagagagatcaccgagaagcagatcgacgacaacagaaagttcagcctgttcgccgagagaaagtaccagaccctgaactgcagcgtgaacgtgaactgcgtgaacatcagatgccccctgagaggcctggacagcaaggccagcctgatcctgagaagcagactgtggaacagcaccttcctggaggagtacagcaagctgaactacctggacatcctgatgagagccttcatcgacgtgaccgccgccgccgagaacatcagactgcccaacgccggcacccaggtgagagtgaccgtgttccccagcaagaccgtggcccagtacagcggcgtgccctggtggatcatcctggtggccatcctggccggcatcctgatgctggccctgctggtgttcatcctgtggaagtgcggcttcttcaagagaagcagatacgacgacagcgtgcccagataccacgccgtgagaatcagaaaggaggagagagagatcaaggacgagaagtacatcgacaacctggagaagaagcagtggatcaccaagtggaacgagaacgagagctacagctag

SEQ ID NO: 11097 - DNA, 3414 bp, synthetic construct
  misc_feature 1..3414: note = Description of Artificial Sequence: Synthetic coding sequence
  source 1..3414: mol_type = other DNA
atggccggcgccagaagcagagacccctggggcgccagcggcatctgctacctgttcggcagcctgctggtggagctgctgttcagcagagccgtggccttcaacctggacgtgatgggcgccctgagaaaggagggcgagcccggcagcctgttcggcttcagcgtggccctgcacagacagctgcagcccagaccccagagctggctgctggtgggcgccccccaggccctggccctgcccggccagcaggccaacagaaccggcggcctgttcgcctgccccctgagcctggaggagaccgactgctacagagtggacatcgaccagggcgccgacatgcagaaggagagcaaggagaaccagtggctgggcgtgagcgtgagaagccagggccccggcggcaagatcgtgacctgcgcccacagatacgaggccagacagagagtggaccagatcctggagaccagagacatgatcggcagatgcttcgtgctgagccaggacctggccatcagagacgagctggacggcggcgagtggaagttctgcgagggcagaccccagggccacgagcagttcggcttctgccagcagggcaccgccgccgccttcagccccgacagccactacctgctgttcggcgcccccggcacctacaactggaagggcctgctgttcgtgaccaacatcgacagcagcgaccccgaccagctggtgtacaagaccctggaccccgccgacagactgcccggccccgccggcgacctggccctgaacagctacctgggcttcagcatcgacagcggcaagggcctggtgagagccgaggagctgagcttcgtggccggcgcccccagagccaaccacaagggcgccgtggtgatcctgagaaaggacagcgccagcagactggtgcccgaggtgatgctgagcggcgagagactgaccagcggcttcggctacagcctggccgtggccgacctgaacagcgacggctggcccgacctgatcgtgggcgccccctacttcttcgagagacaggaggagctgggcggcgccgtgtacgtgtacctgaaccagggcggccactgggccggcatcagccccctgagactgtgcggcagccccgacagcatgttcggcatcagcctggccgtgctgggcgacctgaaccaggacggcttccccgacatcgccgtgggcgcccccttcgacggcgacggcaaggtgttcatctaccacggcagcagcctgggcgtggtggccaagcccagccaggtgctggagggcgaggccgtgggcatcaagagcttcggctacagcctgagcggcagcctggacatggacggcaaccagtaccccgacctgctggtgggcagcctggccgacaccgccgtgctgttcagagccagacccatcctgcacgtgagccacgaggtgagcatcgcccccagaagcatcgacctggagcagcccaactgcgccggcggccacagcgtgtgcgtggacctgagagtgtgcttcagctacatcgccgtgcccagcagctacagccccaccgtggccctggactacgtgctggacgccgacaccgacagaagactgagaggccaggtgcccagagtgaccttcctgagcagaaacctggaggagcccaagcaccaggccagcggcaccgtgtggctgaagcaccagcacgacagagtgtgcggcgacgccatgttccagctgcaggagaacgtgaaggacaagctgagagccatcgtggtgaccctgagctacagcctgcagacccccagactgagaagacaggcccccggccagggcctgccccccgtggcccccatcctgaacgcccaccagcccagcacccagagagccgagatccacttcctgaagcagggctgcggcgaggacaagatctgccagagcaacctgcagctggtgagagccagattctgcaccagagtgagcgacaccgagttccagcccctgcccatggacgtggacggcaccaccgccctgttcgccctgagcggccagcccgtgatcggcctggagctgatggtgaccaacctgcccagcgaccccgcccagccccaggccgacggcgacgacgcccacgaggcccagctgctggtgatgctgcccgacagcctgcactacagcggcgtgagagccctggaccccgccgagaagcccctgtgcctgagcaacgagaacgccagccacgtggagtgcgagctgggcaaccccatgaagagaggcgcccaggtgaccttctacctgatcctgagcaccagcggcatcagcatcgagaccaccgagctggaggtggagctgctgctggccaccatcagcgagcaggagctgcaccccgtgagcgccagagccagagtgttcatcgagctgcccctgagcatcgccggcatggccatcccccagcagctgttcttcagcggcgtggtgagaggcgagagagccatgcagagcgagagagacgtgggcagcaaggtgaagtacgaggtgaccgtgagcaaccagggccagagcctgagaaccctgggcagcgccttcctgaacatcatgtggccccacgagatcgccaacggcaagtggctgctgtaccccatgcaggtggagctggagggcggccagggccccggccagaagggcctgtgcagccccagacccaacatcctgcacctggacgtggacagcagagacagaagaagaagagagctggagccccccgagcagcaggagcccggcgagagacaggagcccagcatgagctggtggcccgtgagcagcgccgagaagaagaagaacatcaccctggactgcgccagaggcaccgccaactgcgtggtgttcagctgccccctgtacagcttcgacagagccgccgtgctgcacgtgtggggcagactgtggaacagcaccttcctggaggagtacagcgccgtgaagagcctggaggtgatcgtgagagccaacatcaccgtgaagagcagcatcaagaacctgatgctgagagacgccagcaccgtgatccccgtgatggtgtacctggaccccatggccgtggtggccgagggcgtgccctggtgggtgatcctgctggccgtgctggccggcctgctggtgctggccctgctggtgctgctgctgtggaagatgggcttcttcaagagagccaagcaccccgaggccaccgtgccccagtaccacgccgtgaagatccccagagaggacagacagcagttcaaggaggagaagaccggcaccatcctgagaaacaactggggcagccccagaagagagggccccgacgcccaccccatcctggccgccgacggccaccccgagctgggccccgacggccaccccggccccggcaccgcctag

SEQ ID NO: 11098 - DNA, 3489 bp, synthetic construct
  misc_feature 1..3489: note = Description of Artificial Sequence: Synthetic coding sequence
  source 1..3489: mol_type = other DNA
atggccggcgccagaagcagagacccctggggcgccagcggcatctgctacctgttcggcagcctgctggtggagctgctgttcagcagagccgtggccttcaacctggacgtgatgggcgccctgagaaaggagggcgagcccggcagcctgttcggcttcagcgtggccctgcacagacagctgcagcccagaccccagagctggctgctggtgggcgccccccaggccctggccctgcccggccagcaggccaacagaaccggcggcctgttcgcctgccccctgagcctggaggagaccgactgctacagagtggacatcgaccagggcgccgacatgcagaaggagagcaaggagaaccagtggctgggcgtgagcgtgagaagccagggccccggcggcaagatcgtgacctgcgcccacagatacgaggccagacagagagtggaccagatcctggagaccagagacatgatcggcagatgcttcgtgctgagccaggacctggccatcagagacgagctggacggcggcgagtggaagttctgcgagggcagaccccagggccacgagcagttcggcttctgccagcagggcaccgccgccgccttcagccccgacagccactacctgctgttcggcgcccccggcacctacaactggaagggcaccgccagagtggagctgtgcgcccagggcagcgccgacctggcccacctggacgacggcccctacgaggccggcggcgagaaggagcaggaccccagactgatccccgtgcccgccaacagctacttcggcctgctgttcgtgaccaacatcgacagcagcgaccccgaccagctggtgtacaagaccctggaccccgccgacagactgcccggccccgccggcgacctggccctgaacagctacctgggcttcagcatcgacagcggcaagggcctggtgagagccgaggagctgagcttcgtggccggcgcccccagagccaaccacaagggcgccgtggtgatcctgagaaaggacagcgccagcagactggtgcccgaggtgatgctgagcggcgagagactgaccagcggcttcggctacagcctggccgtggccgacctgaacagcgacggctggcccgacctgatcgtgggcgccccctacttcttcgagagacaggaggagctgggcggcgccgtgtacgtgtacctgaaccagggcggccactgggccggcatcagccccctgagactgtgcggcagccccgacagcatgttcggcatcagcctggccgtgctgggcgacctgaaccaggacggcttccccgacatcgccgtgggcgcccccttcgacggcgacggcaaggtgttcatctaccacggcagcagcctgggcgtggtggccaagcccagccaggtgctggagggcgaggccgtgggcatcaagagcttcggctacagcctgagcggcagcctggacatggacggcaaccagtaccccgacctgctggtgggcagcctggccgacaccgccgtgctgttcagagccagacccatcctgcacgtgagccacgaggtgagcatcgcccccagaagcatcgacctggagcagcccaactgcgccggcggccacagcgtgtgcgtggacctgagagtgtgcttcagctacatcgccgtgcccagcagctacagccccaccgtggccctggactacgtgctggacgccgacaccgacagaagactgagaggccaggtgcccagagtgaccttcctgagcagaaacctggaggagcccaagcaccaggccagcggcaccgtgtggctgaagcaccagcacgacagagtgtgcggcgacgccatgttccagctgcaggagaacgtgaaggacaagctgagagccatcgtggtgaccctgagctacagcctgcagacccccagactgagaagacaggcccccggccagggcctgccccccgtggcccccatcctgaacgcccaccagcccagcacccagagagccgagatccacttcctgaagcagggctgcggcgaggacaagatctgccagagcaacctgcagctggtgagagccagattctgcaccagagtgagcgacaccgagttccagcccctgcccatggacgtggacggcaccaccgccctgttcgccctgagcggccagcccgtgatcggcctggagctgatggtgaccaacctgcccagcgaccccgcccagccccaggccgacggcgacgacgcccacgaggcccagctgctggtgatgctgcccgacagcctgcactacagcggcgtgagagccctggaccccgccgagaagcccctgtgcctgagcaacgagaacgccagccacgtggagtgcgagctgggcaaccccatgaagagaggcgcccaggtgaccttctacctgatcctgagcaccagcggcatcagcatcgagaccaccgagctggaggtggagctgctgctggccaccatcagcgagcaggagctgcaccccgtgagcgccagagccagagtgttcatcgagctgcccctgagcatcgccggcatggccatcccccagcagctgttcttcagcggcgtggtgagaggcgagagagccatgcagagcgagagagacgtgggcagcaaggtgaagtacgaggtgaccgtgagcaaccagggccagagcctgagaaccctgggcagcgccttcctgaacatcatgtggccccacgagatcgccaacggcaagtggctgctgtaccccatgcaggtggagctggagggcggccagggccccggccagaagggcctgtgcagccccagacccaacatcctgcacctggacgtggacagcagagacagaagaagaagagagctggagccccccgagcagcaggagcccggcgagagacaggagcccagcatgagctggtggcccgtgagcagcgccgagaagaagaagaacatcaccctggactgcgccagaggcaccgccaactgcgtggtgttcagctgccccctgtacagcttcgacagagccgccgtgctgcacgtgtggggcagactgtggaacagcaccttcctggaggagtacagcgccgtgaagagcctggaggtgatcgtgagagccaacatcaccgtgaagagcagcatcaagaacctgatgctgagagacgccagcaccgtgatccccgtgatggtgtacctggaccccatggccgtggtggccgagggcgtgccctggtgggtgatcctgctggccgtgctggccggcctgctggtgctggccctgctggtgctgctgctgtggaagtgcggcttcttccacagaagcagccagagcagcagcttccccaccaactaccacagagcctgcctggccgtgcagcccagcgccatggaggtgggcggccccggcaccgtgggctgggacagcagcaacggcagaagcacccccagacccccctgccccagcaccatgagatag

SEQ ID NO: 11099 - DNA, 2976 bp, synthetic construct
  misc_feature 1..2976: note = Description of Artificial Sequence: Synthetic coding sequence
  source 1..2976: mol_type = other DNA
atggccggcgccagaagcagagacccctggggcgccagcggcatctgctacctgttcggcagcctgctggtggagctgctgttcagcagagccgtggccttcaacctggacgtgatgggcgccctgagaaaggagggcgagcccggcagcctgttcggcttcagcgtggccctgcacagacagctgcagcccagaccccagagctggctgctggtgggcgccccccaggccctggccctgcccggccagcaggccaacagaaccggcggcctgttcgcctgccccctgagcctggaggagaccgactgctacagagtggacatcgaccagggcgccgacatgcagaaggagagcaaggagaaccagtggctgggcgtgagcgtgagaagccagggccccggcggcaagatcgtgacctgcgcccacagatacgaggccagacagagagtggaccagatcctggagaccagagacatgatcggcagatgcttcgtgctgagccaggacctggccatcagagacgagctggacggcggcgagtggaagttctgcgagggcagaccccagggccacgagcagttcggcttctgccagcagggcaccgccgccgccttcagccccgacagccactacctgctgttcggcgcccccggcacctacaactggaagggcaccgccagagtggagctgtgcgcccagggcagcgccgacctggcccacctggacgacggcccctacgaggccggcggcgagaaggagcaggaccccagactgatccccgtgcccgccaacagctacttcggcctgctgttcgtgaccaacatcgacagcagcgaccccgaccagctggtgtacaagaccctggaccccgccgacagactgcccggccccgccggcgacctggccctgaacagctacctgggcttcagcatcgacagcggcaagggcctggtgagagccgaggagctgagcttcgtggccggcgcccccagagccaaccacaagggcgccgtggtgatcctgagaaaggacagcgccagcagactggtgcccgaggtgatgctgagcggcgagagactgaccagcggcttcggctacagcctggccgtggccgacctgaacagcgacggctggcccgacctgatcgtgggcgccccctacttcttcgagagacaggaggagctgggcggcgccgtgtacgtgtacctgaaccagggcggccactgggccggcatcagccccctgagactgtgcggcagccccgacagcatgttcggcatcagcctggccgtgctgggcgacctgaaccaggacggcttccccgacatcgccgtgggcgcccccttcgacggcgacggcaaggtgttcatctaccacggcagcagcctgggcgtggtggccaagcccagccaggtgctggagggcgaggccgtgggcatcaagagcttcggctacagcctgagcggcagcctggacatggacggcaaccagtaccccgacctgctggtgggcagcctggccgacaccgccgtgctgttcagagccagacccatcctgcacgtgagccacgaggtgagcatcgcccccagaagcatcgacctggagcagcccaactgcgccggcggccacagcgtgtgcgtggacctgagagtgtgcttcagctacatcgccgtgcccagcagctacagccccaccgtggccctggactacgtgctggacgccgacaccgacagaagactgagaggccaggtgcccagagtgaccttcctgagcagaaacctggaggagcccaagcaccaggccctggaccccgccgagaagcccctgtgcctgagcaacgagaacgccagccacgtggagtgcgagctgggcaaccccatgaagagaggcgcccaggtgaccttctacctgatcctgagcaccagcggcatcagcatcgagaccaccgagctggaggtggagctgctgctggccaccatcagcgagcaggagctgcaccccgtgagcgccagagccagagtgttcatcgagctgcccctgagcatcgccggcatggccatcccccagcagctgttcttcagcggcgtggtgagaggcgagagagccatgcagagcgagagagacgtgggcagcaaggtgaagtacgaggtgaccgtgagcaaccagggccagagcctgagaaccctgggcagcgccttcctgaacatcatgtggccccacgagatcgccaacggcaagtggctgctgtaccccatgcaggtggagctggagggcggccagggccccggccagaagggcctgtgcagccccagacccaacatcctgcacctggacgtggacagcagagacagaagaagaagagagctggagccccccgagcagcaggagcccggcgagagacaggagcccagcatgagctggtggcccgtgagcagcgccgagaagaagaagaacatcaccctggactgcgccagaggcaccgccaactgcgtggtgttcagctgccccctgtacagcttcgacagagccgccgtgctgcacgtgtggggcagactgtggaacagcaccttcctggaggagtacagcgccgtgaagagcctggaggtgatcgtgagagccaacatcaccgtgaagagcagcatcaagaacctgatgctgagagacgccagcaccgtgatccccgtgatggtgtacctggaccccatggccgtggtggccgagggcgtgccctggtgggtgatcctgctggccgtgctggccggcctgctggtgctggccctgctggtgctgctgctgtggaagtgcggcttcttccacagaagcagccagagcagcagcttccccaccaactaccacagagcctgcctggccgtgcagcccagcgccatggaggtgggcggccccggcaccgtgggctgggacagcagcaacggcagaagcacccccagacccccctgccccagcaccatgagatag

SEQ ID NO: 11100 - DNA, 3357 bp, synthetic construct
  misc_feature 1..3357: note = Description of Artificial Sequence: Synthetic coding sequence
  source 1..3357: mol_type = other DNA
atggccggcgccagaagcagagacccctggggcgccagcggcatctgctacctgttcggcagcctgctggtggagctgctgttcagcagagccgtggccttcaacctggacgtgatgggcgccctgagaaaggagggcgagcccggcagcctgttcggcttcagcgtggccctgcacagacagctgcagcccagaccccagagctggctgctggtgggcgccccccaggccctggccctgcccggccagcaggccaacagaaccggcggcctgttcgcctgccccctgagcctggaggagaccgactgctacagagtggacatcgaccagggcgccgacatgcagaaggagagcaaggagaaccagtggctgggcgtgagcgtgagaagccagggccccggcggcaagatcgtgacctgcgcccacagatacgaggccagacagagagtggaccagatcctggagaccagagacatgatcggcagatgcttcgtgctgagccaggacctggccatcagagacgagctggacggcggcgagtggaagttctgcgagggcagaccccagggccacgagcagttcggcttctgccagcagggcaccgccgccgccttcagccccgacagccactacctgctgttcggcgcccccggcacctacaactggaagggcctgctgttcgtgaccaacatcgacagcagcgaccccgaccagctggtgtacaagaccctggaccccgccgacagactgcccggccccgccggcgacctggccctgaacagctacctgggcttcagcatcgacagcggcaagggcctggtgagagccgaggagctgagcttcgtggccggcgcccccagagccaaccacaagggcgccgtggtgatcctgagaaaggacagcgccagcagactggtgcccgaggtgatgctgagcggcgagagactgaccagcggcttcggctacagcctggccgtggccgacctgaacagcgacggctggcccgacctgatcgtgggcgccccctacttcttcgagagacaggaggagctgggcggcgccgtgtacgtgtacctgaaccagggcggccactgggccggcatcagccccctgagactgtgcggcagccccgacagcatgttcggcatcagcctggccgtgctgggcgacctgaaccaggacggcttccccgacatcgccgtgggcgcccccttcgacggcgacggcaaggtgttcatctaccacggcagcagcctgggcgtggtggccaagcccagccaggtgctggagggcgaggccgtgggcatcaagagcttcggctacagcctgagcggcagcctggacatggacggcaaccagtaccccgacctgctggtgggcagcctggccgacaccgccgtgctgttcagagccagacccatcctgcacgtgagccacgaggtgagcatcgcccccagaagcatcgacctggagcagcccaactgcgccggcggccacagcgtgtgcgtggacctgagagtgtgcttcagctacatcgccgtgcccagcagctacagccccaccgtggccctggactacgtgctggacgccgacaccgacagaagactgagaggccaggtgcccagagtgaccttcctgagcagaaacctggaggagcccaagcaccaggccagcggcaccgtgtggctgaagcaccagcacgacagagtgtgcggcgacgccatgttccagctgcaggagaacgtgaaggacaagctgagagccatcgtggtgaccctgagctacagcctgcagacccccagactgagaagacaggcccccggccagggcctgccccccgtggcccccatcctgaacgcccaccagcccagcacccagagagccgagatccacttcctgaagcagggctgcggcgaggacaagatctgccagagcaacctgcagctggtgagagccagattctgcaccagagtgagcgacaccgagttccagcccctgcccatggacgtggacggcaccaccgccctgttcgccctgagcggccagcccgtgatcggcctggagctgatggtgaccaacctgcccagcgaccccgcccagccccaggccgacggcgacgacgcccacgaggcccagctgctggtgatgctgcccgacagcctgcactacagcggcgtgagagccctggaccccgccgagaagcccctgtgcctgagcaacgagaacgccagccacgtggagtgcgagctgggcaaccccatgaagagaggcgcccaggtgaccttctacctgatcctgagcaccagcggcatcagcatcgagaccaccgagctggaggtggagctgctgctggccaccatcagcgagcaggagctgcaccccgtgagcgccagagccagagtgttcatcgagctgcccctgagcatcgccggcatggccatcccccagcagctgttcttcagcggcgtggtgagaggcgagagagccatgcagagcgagagagacgtgggcagcaaggtgaagtacgaggtgaccgtgagcaaccagggccagagcctgagaaccctgggcagcgccttcctgaacatcatgtggccccacgagatcgccaacggcaagtggctgctgtaccccatgcaggtggagctggagggcggccagggccccggccagaagggcctgtgcagccccagacccaacatcctgcacctggacgtggacagcagagacagaagaagaagagagctggagccccccgagcagcaggagcccggcgagagacaggagcccagcatgagctggtggcccgtgagcagcgccgagaagaagaagaacatcaccctggactgcgccagaggcaccgccaactgcgtggtgttcagctgccccctgtacagcttcgacagagccgccgtgctgcacgtgtggggcagactgtggaacagcaccttcctggaggagtacagcgccgtgaagagcctggaggtgatcgtgagagccaacatcaccgtgaagagcagcatcaagaacctgatgctgagagacgccagcaccgtgatccccgtgatggtgtacctggaccccatggccgtggtggccgagggcgtgccctggtgggtgatcctgctggccgtgctggccggcctgctggtgctggccctgctggtgctgctgctgtggaagtgcggcttcttccacagaagcagccagagcagcagcttccccaccaactaccacagagcctgcctggccgtgcagcccagcgccatggaggtgggcggccccggcaccgtgggctgggacagcagcaacggcagaagcacccccagacccccctgccccagcaccatgagatag

SEQ ID NO: 11101 - DNA, 3369 bp, synthetic construct
  misc_feature 1..3369: note = Description of Artificial Sequence: Synthetic coding sequence
  source 1..3369: mol_type = other DNA
atggccggcgccagaagcagagacccctggggcgccagcggcatctgctacctgttcggcagcctgctggtggagctgctgttcagcagagccgtggccttcaacctggacgtgatgggcgccctgagaaaggagggcgagcccggcagcctgttcggcttcagcgtggccctgcacagacagctgcagcccagaccccagagctggctgctggtgggcgccccccaggccctggccctgcccggccagcaggccaacagaaccggcggcctgttcgcctgccccctgagcctggaggagaccgactgctacagagtggacatcgaccagggcgccgacatgcagaaggagagcaaggagaaccagtggctgggcgtgagcgtgagaagccagggccccggcggcaagatcgtgacctgcgcccacagatacgaggccagacagagagtggaccagatcctggagaccagagacatgatcggcagatgcttcgtgctgagccaggacctggccatcagagacgagctggacggcggcgagtggaagttctgcgagggcagaccccagggccacgagcagttcggcttctgccagcagggcaccgccgccgccttcagccccgacagccactacctgctgttcggcgcccccggcacctacaactggaagggcaccgccagagtggagctgtgcgcccagggcagcgccgacctggcccacctggacgacggcccctacgaggccggcggcgagaaggagcaggaccccagactgatccccgtgcccgccaacagctacttcggcttcagcatcgacagcggcaagggcctggtgagagccgaggagctgagcttcgtggccggcgcccccagagccaaccacaagggcgccgtggtgatcctgagaaaggacagcgccagcagactggtgcccgaggtgatgctgagcggcgagagactgaccagcggcttcggctacagcctggccgtggccgacctgaacagcgacggctggcccgacctgatcgtgggcgccccctacttcttcgagagacaggaggagctgggcggcgccgtgtacgtgtacctgaaccagggcggccactgggccggcatcagccccctgagactgtgcggcagccccgacagcatgttcggcatcagcctggccgtgctgggcgacctgaaccaggacggcttccccgacatcgccgtgggcgcccccttcgacggcgacggcaaggtgttcatctaccacggcagcagcctgggcgtggtggccaagcccagccaggtgctggagggcgaggccgtgggcatcaagagcttcggctacagcctgagcggcagcctggacatggacggcaaccagtaccccgacctgctggtgggcagcctggccgacaccgccgtgctgttcagagccagacccatcctgcacgtgagccacgaggtgagcatcgcccccagaagcatcgacctggagcagcccaactgcgccggcggccacagcgtgtgcgtggacctgagagtgtgcttcagctacatcgccgtgcccagcagctacagccccaccgtggccctggactacgtgctggacgccgacaccgacagaagactgagaggccaggtgcccagagtgaccttcctgagcagaaacctggaggagcccaagcaccaggccagcggcaccgtgtggctgaagcaccagcacgacagagtgtgcggcgacgccatgttccagctgcaggagaacgtgaaggacaagctgagagccatcgtggtgaccctgagctacagcctgcagacccccagactgagaagacaggcccccggccagggcctgccccccgtggcccccatcctgaacgcccaccagcccagcacccagagagccgagatccacttcctgaagcagggctgcggcgaggacaagatctgccagagcaacctgcagctggtgagagccagattctgcaccagagtgagcgacaccgagttccagcccctgcccatggacgtggacggcaccaccgccctgttcgccctgagcggccagcccgtgatcggcctggagctgatggtgaccaacctgcccagcgaccccgcccagccccaggccgacggcgacgacgcccacgaggcccagctgctggtgatgctgcccgacagcctgcactacagcggcgtgagagccctggaccccgccgagaagcccctgtgcctgagcaacgagaacgccagccacgtggagtgcgagctgggcaaccccatgaagagaggcgcccaggtgaccttctacctgatcctgagcaccagcggcatcagcatcgagaccaccgagctggaggtggagctgctgctggccaccatcagcgagcaggagctgcaccccgtgagcgccagagccagagtgttcatcgagctgcccctgagcatcgccggcatggccatcccccagcagctgttcttcagcggcgtggtgagaggcgagagagccatgcagagcgagagagacgtgggcagcaaggtgaagtacgaggtgaccgtgagcaaccagggccagagcctgagaaccctgggcagcgccttcctgaacatcatgtggccccacgagatcgccaacggcaagtggctgctgtaccccatgcaggtggagctggagggcggccagggccccggccagaagggcctgtgcagccccagacccaacatcctgcacctggacgtggacagcagagacagaagaagaagagagctggagccccccgagcagcaggagcccggcgagagacaggagcccagcatgagctggtggcccgtgagcagcgccgagaagaagaagaacatcaccctggactgcgccagaggcaccgccaactgcgtggtgttcagctgccccctgtacagcttcgacagagccgccgtgctgcacgtgtggggcagactgtggaacagcaccttcctggaggagtacagcgccgtgaagagcctggaggtgatcgtgagagccaacatcaccgtgaagagcagcatcaagaacctgatgctgagagacgccagcaccgtgatccccgtgatggtgtacctggaccccatggccgtggtggccgagggcgtgccctggtgggtgatcctgctggccgtgctggccggcctgctggtgctggccctgctggtgctgctgctgtggaagtgcggcttcttccacagaagcagccagagcagcagcttccccaccaactaccacagagcctgcctggccgtgcagcccagcgccatggaggtgggcggccccggcaccgtgggctgggacagcagcaacggcagaagcacccccagacccccctgccccagcaccatgagatag

SEQ ID NO: 11102 - DNA, 3135 bp, synthetic construct
  misc_feature 1..3135: note = Description of Artificial Sequence: Synthetic coding sequence
  source 1..3135: mol_type = other DNA
atggcccccttcgccacccccatggtgcaggccctgaccaccaccagaatccagagacaggccgagggcttccagtgctggagagagtgcggcaccagaagaagccccttcgagggcaaggagacctgcgcccacagatacgaggccagacagagagtggaccagatcctggagaccagagacatgatcggcagatgcttcgtgctgagccaggacctggccatcagagacgagctggacggcggcgagtggaagttctgcgagggcagaccccagggccacgagcagttcggcttctgccagcagggcaccgccgccgccttcagccccgacagccactacctgctgttcggcgcccccggcacctacaactggaagggcaccgccagagtggagctgtgcgcccagggcagcgccgacctggcccacctggacgacggcccctacgaggccggcggcgagaaggagcaggaccccagactgatccccgtgcccgccaacagctacttcggcttcagcatcgacagcggcaagggcctggtgagagccgaggagctgagcttcgtggccggcgcccccagagccaaccacaagggcgccgtggtgatcctgagaaaggacagcgccagcagactggtgcccgaggtgatgctgagcggcgagagactgaccagcggcttcggctacagcctggccgtggccgacctgaacagcgacggctggcccgacctgatcgtgggcgccccctacttcttcgagagacaggaggagctgggcggcgccgtgtacgtgtacctgaaccagggcggccactgggccggcatcagccccctgagactgtgcggcagccccgacagcatgttcggcatcagcctggccgtgctgggcgacctgaaccaggacggcttccccgacatcgccgtgggcgcccccttcgacggcgacggcaaggtgttcatctaccacggcagcagcctgggcgtggtggccaagcccagccaggtgctggagggcgaggccgtgggcatcaagagcttcggctacagcctgagcggcagcctggacatggacggcaaccagtaccccgacctgctggtgggcagcctggccgacaccgccgtgctgttcagagccagacccatcctgcacgtgagccacgaggtgagcatcgcccccagaagcatcgacctggagcagcccaactgcgccggcggccacagcgtgtgcgtggacctgagagtgtgcttcagctacatcgccgtgcccagcagctacagccccaccgtggccctggactacgtgctggacgccgacaccgacagaagactgagaggccaggtgcccagagtgaccttcctgagcagaaacctggaggagcccaagcaccaggccagcggcaccgtgtggctgaagcaccagcacgacagagtgtgcggcgacgccatgttccagctgcaggagaacgtgaaggacaagctgagagccatcgtggtgaccctgagctacagcctgcagacccccagactgagaagacaggcccccggccagggcctgccccccgtggcccccatcctgaacgcccaccagcccagcacccagagagccgagatccacttcctgaagcagggctgcggcgaggacaagatctgccagagcaacctgcagctggtgagagccagattctgcaccagagtgagcgacaccgagttccagcccctgcccatggacgtggacggcaccaccgccctgttcgccctgagcggccagcccgtgatcggcctggagctgatggtgaccaacctgcccagcgaccccgcccagccccaggccgacggcgacgacgcccacgaggcccagctgctggtgatgctgcccgacagcctgcactacagcggcgtgagagccctggaccccgccgagaagcccctgtgcctgagcaacgagaacgccagccacgtggagtgcgagctgggcaaccccatgaagagaggcgcccaggtgaccttctacctgatcctgagcaccagcggcatcagcatcgagaccaccgagctggaggtggagctgctgctggccaccatcagcgagcaggagctgcaccccgtgagcgccagagccagagtgttcatcgagctgcccctgagcatcgccggcatggccatcccccagcagctgttcttcagcggcgtggtgagaggcgagagagccatgcagagcgagagagacgtgggcagcaaggtgaagtacgaggtgaccgtgagcaaccagggccagagcctgagaaccctgggcagcgccttcctgaacatcatgtggccccacgagatcgccaacggcaagtggctgctgtaccccatgcaggtggagctggagggcggccagggccccggccagaagggcctgtgcagccccagacccaacatcctgcacctggacgtggacagcagagacagaagaagaagagagctggagccccccgagcagcaggagcccggcgagagacaggagcccagcatgagctggtggcccgtgagcagcgccgagaagaagaagaacatcaccctggactgcgccagaggcaccgccaactgcgtggtgttcagctgccccctgtacagcttcgacagagccgccgtgctgcacgtgtggggcagactgtggaacagcaccttcctggaggagtacagcgccgtgaagagcctggaggtgatcgtgagagccaacatcaccgtgaagagcagcatcaagaacctgatgctgagagacgccagcaccgtgatccccgtgatggtgtacctggaccccatggccgtggtggccgagggcgtgccctggtgggtgatcctgctggccgtgctggccggcctgctggtgctggccctgctggtgctgctgctgtggaagatgggcttcttcaagagagccaagcaccccgaggccaccgtgccccagtaccacgccgtgaagatccccagagaggacagacagcagttcaaggaggagaagaccggcaccatcctgagaaacaactggggcagccccagaagagagggccccgacgcccaccccatcctggccgccgacggccaccccgagctgggccccgacggccaccccggccccggcaccgcctag

SEQ ID NO: 11103 - DNA, 3426 bp, synthetic construct
  misc_feature 1..3426: note = Description of Artificial Sequence: Synthetic coding sequence
  source 1..3426: mol_type = other DNA
atggccggcgccagaagcagagacccctggggcgccagcggcatctgctacctgttcggcagcctgctggtggagctgctgttcagcagagccgtggccttcaacctggacgtgatgggcgccctgagaaaggagggcgagcccggcagcctgttcggcttcagcgtggccctgcacagacagctgcagcccagaccccagagctggctgctggtgggcgccccccaggccctggccctgcccggccagcaggccaacagaaccggcggcctgttcgcctgccccctgagcctggaggagaccgactgctacagagtggacatcgaccagggcgccgacatgcagaaggagagcaaggagaaccagtggctgggcgtgagcgtgagaagccagggccccggcggcaagatcgtgacctgcgcccacagatacgaggccagacagagagtggaccagatcctggagaccagagacatgatcggcagatgcttcgtgctgagccaggacctggccatcagagacgagctggacggcggcgagtggaagttctgcgagggcagaccccagggccacgagcagttcggcttctgccagcagggcaccgccgccgccttcagccccgacagccactacctgctgttcggcgcccccggcacctacaactggaagggcaccgccagagtggagctgtgcgcccagggcagcgccgacctggcccacctggacgacggcccctacgaggccggcggcgagaaggagcaggaccccagactgatccccgtgcccgccaacagctacttcggcttcagcatcgacagcggcaagggcctggtgagagccgaggagctgagcttcgtggccggcgcccccagagccaaccacaagggcgccgtggtgatcctgagaaaggacagcgccagcagactggtgcccgaggtgatgctgagcggcgagagactgaccagcggcttcggctacagcctggccgtggccgacctgaacagcgacggctggcccgacctgatcgtgggcgccccctacttcttcgagagacaggaggagctgggcggcgccgtgtacgtgtacctgaaccagggcggccactgggccggcatcagccccctgagactgtgcggcagccccgacagcatgttcggcatcagcctggccgtgctgggcgacctgaaccaggacggcttccccgacatcgccgtgggcgcccccttcgacggcgacggcaaggtgttcatctaccacggcagcagcctgggcgtggtggccaagcccagccaggtgctggagggcgaggccgtgggcatcaagagcttcggctacagcctgagcggcagcctggacatggacggcaaccagtaccccgacctgctggtgggcagcctggccgacaccgccgtgctgttcagagccagacccatcctgcacgtgagccacgaggtgagcatcgcccccagaagcatcgacctggagcagcccaactgcgccggcggccacagcgtgtgcgtggacctgagagtgtgcttcagctacatcgccgtgcccagcagctacagccccaccgtggccctggactacgtgctggacgccgacaccgacagaagactgagaggccaggtgcccagagtgaccttcctgagcagaaacctggaggagcccaagcaccaggccagcggcaccgtgtggctgaagcaccagcacgacagagtgtgcggcgacgccatgttccagctgcaggagaacgtgaaggacaagctgagagccatcgtggtgaccctgagctacagcctgcagacccccagactgagaagacaggcccccggccagggcctgccccccgtggcccccatcctgaacgcccaccagcccagcacccagagagccgagatccacttcctgaagcagggctgcggcgaggacaagatctgccagagcaacctgcagctggtgagagccagattctgcaccagagtgagcgacaccgagttccagcccctgcccatggacgtggacggcaccaccgccctgttcgccctgagcggccagcccgtgatcggcctggagctgatggtgaccaacctgcccagcgaccccgcccagccccaggccgacggcgacgacgcccacgaggcccagctgctggtgatgctgcccgacagcctgcactacagcggcgtgagagccctggaccccgccgagaagcccctgtgcctgagcaacgagaacgccagccacgtggagtgcgagctgggcaaccccatgaagagaggcgcccaggtgaccttctacctgatcctgagcaccagcggcatcagcatcgagaccaccgagctggaggtggagctgctgctggccaccatcagcgagcaggagctgcaccccgtgagcgccagagccagagtgttcatcgagctgcccctgagcatcgccggcatggccatcccccagcagctgttcttcagcggcgtggtgagaggcgagagagccatgcagagcgagagagacgtgggcagcaaggtgaagtacgaggtgaccgtgagcaaccagggccagagcctgagaaccctgggcagcgccttcctgaacatcatgtggccccacgagatcgccaacggcaagtggctgctgtaccccatgcaggtggagctggagggcggccagggccccggccagaagggcctgtgcagccccagacccaacatcctgcacctggacgtggacagcagagacagaagaagaagagagctggagccccccgagcagcaggagcccggcgagagacaggagcccagcatgagctggtggcccgtgagcagcgccgagaagaagaagaacatcaccctggactgcgccagaggcaccgccaactgcgtggtgttcagctgccccctgtacagcttcgacagagccgccgtgctgcacgtgtggggcagactgtggaacagcaccttcctggaggagtacagcgccgtgaagagcctggaggtgatcgtgagagccaacatcaccgtgaagagcagcatcaagaacctgatgctgagagacgccagcaccgtgatccccgtgatggtgtacctggaccccatggccgtggtggccgagggcgtgccctggtgggtgatcctgctggccgtgctggccggcctgctggtgctggccctgctggtgctgctgctgtggaagatgggcttcttcaagagagccaagcaccccgaggccaccgtgccccagtaccacgccgtgaagatccccagagaggacagacagcagttcaaggaggagaagaccggcaccatcctgagaaacaactggggcagccccagaagagagggccccgacgcccaccccatcctggccgccgacggccaccccgagctgggccccgacggccaccccggccccggcaccgcctag

SEQ ID NO: 11104 - DNA, 3546 bp, synthetic construct
  misc_feature 1..3546: note = Description of Artificial Sequence: Synthetic coding sequence
  source 1..3546: mol_type = other DNA
atggccggcgccagaagcagagacccctggggcgccagcggcatctgctacctgttcggcagcctgctggtggagctgctgttcagcagagccgtggccttcaacctggacgtgatgggcgccctgagaaaggagggcgagcccggcagcctgttcggcttcagcgtggccctgcacagacagctgcagcccagaccccagagctggctgctggtgggcgccccccaggccctggccctgcccggccagcaggccaacagaaccggcggcctgttcgcctgccccctgagcctggaggagaccgactgctacagagtggacatcgaccagggcgccgacatgcagaaggagagcaaggagaaccagtggctgggcgtgagcgtgagaagccagggccccggcggcaagatcgtgacctgcgcccacagatacgaggccagacagagagtggaccagatcctggagaccagagacatgatcggcagatgcttcgtgctgagccaggacctggccatcagagacgagctggacggcggcgagtggaagttctgcgagggcagaccccagggccacgagcagttcggcttctgccagcagggcaccgccgccgccttcagccccgacagccactacctgctgttcggcgcccccggcacctacaactggaagggcaccgccagagtggagctgtgcgcccagggcagcgccgacctggcccacctggacgacggcccctacgaggccggcggcgagaaggagcaggaccccagactgatccccgtgcccgccaacagctacttcggcctgctgttcgtgaccaacatcgacagcagcgaccccgaccagctggtgtacaagaccctggaccccgccgacagactgcccggccccgccggcgacctggccctgaacagctacctgggcttcagcatcgacagcggcaagggcctggtgagagccgaggagctgagcttcgtggccggcgcccccagagccaaccacaagggcgccgtggtgatcctgagaaaggacagcgccagcagactggtgcccgaggtgatgctgagcggcgagagactgaccagcggcttcggctacagcctggccgtggccgacctgaacagcgacggctggcccgacctgatcgtgggcgccccctacttcttcgagagacaggaggagctgggcggcgccgtgtacgtgtacctgaaccagggcggccactgggccggcatcagccccctgagactgtgcggcagccccgacagcatgttcggcatcagcctggccgtgctgggcgacctgaaccaggacggcttccccgacatcgccgtgggcgcccccttcgacggcgacggcaaggtgttcatctaccacggcagcagcctgggcgtggtggccaagcccagccaggtgctggagggcgaggccgtgggcatcaagagcttcggctacagcctgagcggcagcctggacatggacggcaaccagtaccccgacctgctggtgggcagcctggccgacaccgccgtgctgttcagagccagacccatcctgcacgtgagccacgaggtgagcatcgcccccagaagcatcgacctggagcagcccaactgcgccggcggccacagcgtgtgcgtggacctgagagtgtgcttcagctacatcgccgtgcccagcagctacagccccaccgtggccctggactacgtgctggacgccgacaccgacagaagactgagaggccaggtgcccagagtgaccttcctgagcagaaacctggaggagcccaagcaccaggccagcggcaccgtgtggctgaagcaccagcacgacagagtgtgcggcgacgccatgttccagctgcaggagaacgtgaaggacaagctgagagccatcgtggtgaccctgagctacagcctgcagacccccagactgagaagacaggcccccggccagggcctgccccccgtggcccccatcctgaacgcccaccagcccagcacccagagagccgagatccacttcctgaagcagggctgcggcgaggacaagatctgccagagcaacctgcagctggtgagagccagattctgcaccagagtgagcgacaccgagttccagcccctgcccatggacgtggacggcaccaccgccctgttcgccctgagcggccagcccgtgatcggcctggagctgatggtgaccaacctgcccagcgaccccgcccagccccaggccgacggcgacgacgcccacgaggcccagctgctggtgatgctgcccgacagcctgcactacagcggcgtgagagccctggaccccgccgagaagcccctgtgcctgagcaacgagaacgccagccacgtggagtgcgagctgggcaaccccatgaagagaggcgcccaggtgaccttctacctgatcctgagcaccagcggcatcagcatcgagaccaccgagctggaggtggagctgctgctggccaccatcagcgagcaggagctgcaccccgtgagcgccagagccagagtgttcatcgagctgcccctgagcatcgccggcatggccatcccccagcagctgttcttcagcggcgtggtgagaggcgagagagccatgcagagcgagagagacgtgggcagcaaggtgaagtacgaggtgaccgtgagcaaccagggccagagcctgagaaccctgggcagcgccttcctgaacatcatgtggccccacgagatcgccaacggcaagtggctgctgtaccccatgcaggtggagctggagggcggccagggccccggccagaagggcctgtgcagccccagacccaacatcctgcacctggacgtggacagcagagacagaagaagaagagagctggagccccccgagcagcaggagcccggcgagagacaggagcccagcatgagctggtggcccgtgagcagcgccgagaagaagaagaacatcaccctggactgcgccagaggcaccgccaactgcgtggtgttcagctgccccctgtacagcttcgacagagccgccgtgctgcacgtgtggggcagactgtggaacagcaccttcctggaggagtacagcgccgtgaagagcctggaggtgatcgtgagagccaacatcaccgtgaagagcagcatcaagaacctgatgctgagagacgccagcaccgtgatccccgtgatggtgtacctggaccccatggccgtggtggccgagggcgtgccctggtgggtgatcctgctggccgtgctggccggcctgctggtgctggccctgctggtgctgctgctgtggaagatgggcttcttcaagagagccaagcaccccgaggccaccgtgccccagtaccacgccgtgaagatccccagagaggacagacagcagttcaaggaggagaagaccggcaccatcctgagaaacaactggggcagccccagaagagagggccccgacgcccaccccatcctggccgccgacggccaccccgagctgggccccgacggccaccccggccccggcaccgcctag

SEQ ID NO: 11105 - DNA, 3147 bp, synthetic construct
  misc_feature 1..3147: note = Description of Artificial Sequence: Synthetic coding sequence
  source 1..3147: mol_type = other DNA
atggccttcccccccagaagaagactgagactgggccccagaggcctgcccctgctgctgagcggcctgctgctgcccctgtgcagagccttcaacctggacgtggacagccccgccgagtacagcggccccgagggcagctacttcggcttcgccgtggacttcttcgtgcccagcgccagcagcagaatgttcctgctggtgggcgcccccaaggccaacaccacccagcccggcatcgtggagggcggccaggtgctgaagtgcgactggagcagcaccagaagatgccagcccatcgagttcgacgccaccggcaacagagactacgccaaggacgaccccctggagttcaagagccaccagtggttcggcgccagcgtgagaagcaagcaggacaagatcctggcctgcgcccccctgtaccactggagaaccgagatgaagcaggagagagagcccgtgggcacctgcttcctgcaggacggcaccaagaccgtggagtacgccccctgcagaagccaggacatcgacgccgacggccagggcttctgccagggcggcttcagcatcgacttcaccaaggccgacagagtgctgctgggcggccccggcagcttctactggcagggccagctgatcagcgaccaggtggccgagatcgtgagcaagtacgaccccaacgtgtacagcatcaagtacaacaaccagctggccaccagaaccgcccaggccatcttcgacgacagctacctgggctacagcgtggccgtgggcgacttcaacggcgacggcatcgacgacttcgtgagcggcgtgcccagagccgccagaaccctgggcatggtgtacatctacgacggcaagaacatgagcagcctgtacaacttcaccggcgagcagatggccgcctacttcggcttcagcgtggccgccaccgacatcaacggcgacgactacgccgacgtgttcatcggcgcccccctgttcatggacagaggcagcgacggcaagctgcaggaggtgggccaggtgagcgtgagcctgcagagagccagcggcgacttccagaccaccaagctgaacggcttcgaggtgttcgccagattcggcagcgccatcgcccccctgggcgacctggaccaggacggcttcaacgacatcgccatcgccgccccctacggcggcgaggacaagaagggcatcgtgtacatcttcaacggcagaagcaccggcctgaacgccgtgcccagccagatcctggagggccagtgggccgccagaagcatgccccccagcttcggctacagcatgaagggcgccaccgacatcgacaagaacggctaccccgacctgatcgtgggcgccttcggcgtggacagagccatcctgtacagagccagacccgtgatcaccgtgaacgccggcctggaggtgtaccccagcatcctgaaccaggacaacaagacctgcagcctgcccggcaccgccctgaaggtgagctgcttcaacgtgagattctgcctgaaggccgacggcaagggcgtgctgcccagaaagctgaacttccaggtggagctgctgctggacaagctgaagcagaagggcgccatcagaagagccctgttcctgtacagcagaagccccagccacagcaagaacatgaccatcagcagaggcggcctgatgcagtgcgaggagctgatcgcctacctgagagacgagagcgagttcagagacaagctgacccccatcaccatcttcatggagtacagactggactacagaaccgccgccgacaccaccggcctgcagcccatcctgaaccagttcacccccgccaacatcagcagacaggcccacatcctgctggactgcggcgaggacaacgtgtgcaagcccaagctggaggtgagcgtggacagcgaccagaagaagatctacatcggcgacgacaaccccctgaccctgatcgtgaaggcccagaaccagggcgagggcgcctacgaggccgagctgatcgtgagcatccccctgcaggccgacttcatcggcgtggtgagaaacaacgaggccctggccagactgagctgcgccttcaagaccgagaaccagaccagacaggtggtgtgcgacctgggcaaccccatgaaggccggcacccagctgctggccggcctgagattcagcgtgcaccagcagagcgagatggacaccagcgtgaagttcgacctgcagatccagagcagcaacctgttcgacaaggtgagccccgtggtgagccacaaggtggacctggccgtgctggccgccgtggagatcagaggcgtgagcagccccgaccacgtgttcctgcccatccccaactgggagcacaaggagaaccccgagaccgaggaggacgtgggccccgtggtgcagcacatctacgagctgagaaacaacggccccagcagcttcagcaaggccatgctgcacctgcagtggccctacaagtacaacaacaacaccctgctgtacatcctgcactacgacatcgacggccccatgaactgcaccagcgacatggagatcaaccccctgagaatcaagatcagcagcctgcagaccaccgagaagaacgacaccgtggccggccagggcgagagagaccacctgatcaccaagagagacctggccctgagcgagggcgacatccacaccctgggctgcggcgtggcccagtgcctgaagatcgtgtgccaggtgggcagactggacagaggcaagagcgccatcctgtacgtgaagagcctgctgtggaccgagaccttcatgaacaaggagaaccagaaccacagctacagcctgaagagcagcgccagcttcaacgtgatcgagttcccctacaagaacctgcccatcgaggacatcaccaacagcaccctggtgaccaccaacgtgacctggggcatccagcccgcccccatgcccgtgcccgtgtgggtgatcatcctggccgtgctggccggcctgctgctgctggccgtgctggtgttcgtgatgtacagaatgggcttcttcaagagagtgagacccccccaggaggagcaggagagagagcagctgcagccccacgagaacggcgagggcaacagcgagacctag

SEQ ID NO: 11106 - DNA, 3039 bp, synthetic construct
  misc_feature 1..3039: note = Description of Artificial Sequence: Synthetic coding sequence
  source 1..3039: mol_type = other DNA
atggccttcccccccagaagaagactgagactgggccccagaggcctgcccctgctgctgagcggcctgctgctgcccctgtgcagagccttcaacctggacgtggacagccccgccgagtacagcggccccgagggcagctacttcggcttcgccgtggacttcttcgtgcccagcgccagcagcagaatgttcctgctggtgggcgcccccaaggccaacaccacccagcccggcatcgtggagggcggccaggtgctgaagtgcgactggagcagcaccagaagatgccagcccatcgagttcgacgccaccggcaacagagactacgccaaggacgaccccctggagttcaagagccaccagtggttcggcgccagcgtgagaagcaagcaggacaagatcctggcctgcgcccccctgtaccactggagaaccgagatgaagcaggagagagagcccgtgggcacctgcttcctgcaggacggcaccaagaccgtggagtacgccccctgcagaagcagacagctgatcagcgaccaggtggccgagatcgtgagcaagtacgaccccaacgtgtacagcatcaagtacaacaaccagctggccaccagaaccgcccaggccatcttcgacgacagctacctgggctacagcgtggccgtgggcgacttcaacggcgacggcatcgacgacttcgtgagcggcgtgcccagagccgccagaaccctgggcatggtgtacatctacgacggcaagaacatgagcagcctgtacaacttcaccggcgagcagatggccgcctacttcggcttcagcgtggccgccaccgacatcaacggcgacgactacgccgacgtgttcatcggcgcccccctgttcatggacagaggcagcgacggcaagctgcaggaggtgggccaggtgagcgtgagcctgcagagagccagcggcgacttccagaccaccaagctgaacggcttcgaggtgttcgccagattcggcagcgccatcgcccccctgggcgacctggaccaggacggcttcaacgacatcgccatcgccgccccctacggcggcgaggacaagaagggcatcgtgtacatcttcaacggcagaagcaccggcctgaacgccgtgcccagccagatcctggagggccagtgggccgccagaagcatgccccccagcttcggctacagcatgaagggcgccaccgacatcgacaagaacggctaccccgacctgatcgtgggcgccttcggcgtggacagagccatcctgtacagagccagacccgtgatcaccgtgaacgccggcctggaggtgtaccccagcatcctgaaccaggacaacaagacctgcagcctgcccggcaccgccctgaaggtgagctgcttcaacgtgagattctgcctgaaggccgacggcaagggcgtgctgcccagaaagctgaacttccaggtggagctgctgctggacaagctgaagcagaagggcgccatcagaagagccctgttcctgtacagcagaagccccagccacagcaagaacatgaccatcagcagaggcggcctgatgcagtgcgaggagctgatcgcctacctgagagacgagagcgagttcagagacaagctgacccccatcaccatcttcatggagtacagactggactacagaaccgccgccgacaccaccggcctgcagcccatcctgaaccagttcacccccgccaacatcagcagacaggcccacatcctgctggactgcggcgaggacaacgtgtgcaagcccaagctggaggtgagcgtggacagcgaccagaagaagatctacatcggcgacgacaaccccctgaccctgatcgtgaaggcccagaaccagggcgagggcgcctacgaggccgagctgatcgtgagcatccccctgcaggccgacttcatcggcgtggtgagaaacaacgaggccctggccagactgagctgcgccttcaagaccgagaaccagaccagacaggtggtgtgcgacctgggcaaccccatgaaggccggcacccagctgctggccggcctgagattcagcgtgcaccagcagagcgagatggacaccagcgtgaagttcgacctgcagatccagagcagcaacctgttcgacaaggtgagccccgtggtgagccacaaggtggacctggccgtgctggccgccgtggagatcagaggcgtgagcagccccgaccacgtgttcctgcccatccccaactgggagcacaaggagaaccccgagaccgaggaggacgtgggccccgtggtgcagcacatctacgagctgagaaacaacggccccagcagcttcagcaaggccatgctgcacctgcagtggccctacaagtacaacaacaacaccctgctgtacatcctgcactacgacatcgacggccccatgaactgcaccagcgacatggagatcaaccccctgagaatcaagatcagcagcctgcagaccaccgagaagaacgacaccgtggccggccagggcgagagagaccacctgatcaccaagagagacctggccctgagcgagggcgacatccacaccctgggctgcggcgtggcccagtgcctgaagatcgtgtgccaggtgggcagactggacagaggcaagagcgccatcctgtacgtgaagagcctgctgtggaccgagaccttcatgaacaaggagaaccagaaccacagctacagcctgaagagcagcgccagcttcaacgtgatcgagttcccctacaagaacctgcccatcgaggacatcaccaacagcaccctggtgaccaccaacgtgacctggggcatccagcccgcccccatgcccgtgcccgtgtgggtgatcatcctggccgtgctggccggcctgctgctgctggccgtgctggtgttcgtgatgtacagaatgggcttcttcaagagagtgagacccccccaggaggagcaggagagagagcagctgcagccccacgagaacggcgagggcaacagcgagacctag

SEQ ID NO: 11107 - DNA, 3009 bp, synthetic construct
  misc_feature 1..3009: note = Description of Artificial Sequence: Synthetic coding sequence
  source 1..3009: mol_type = other DNA
atgctgctgggcaccctgctgctgatcctgtacatcctgatgctgtgcagaatgttcctgctggtgggcgcccccaaggccaacaccacccagcccggcatcgtggagggcggccaggtgctgaagtgcgactggagcagcaccagaagatgccagcccatcgagttcgacgccaccggcaacagagactacgccaaggacgaccccctggagttcaagagccaccagtggttcggcgccagcgtgagaagcaagcaggacaagatcctggcctgcgcccccctgtaccactggagaaccgagatgaagcaggagagagagcccgtgggcacctgcttcctgcaggacggcaccaagaccgtggagtacgccccctgcagaagccaggacatcgacgccgacggccagggcttctgccagggcggcttcagcatcgacttcaccaaggccgacagagtgctgctgggcggccccggcagcttctactggcagggccagctgatcagcgaccaggtggccgagatcgtgagcaagtacgaccccaacgtgtacagcatcaagtacaacaaccagctggccaccagaaccgcccaggccatcttcgacgacagctacctgggctacagcgtggccgtgggcgacttcaacggcgacggcatcgacgacttcgtgagcggcgtgcccagagccgccagaaccctgggcatggtgtacatctacgacggcaagaacatgagcagcctgtacaacttcaccggcgagcagatggccgcctacttcggcttcagcgtggccgccaccgacatcaacggcgacgactacgccgacgtgttcatcggcgcccccctgttcatggacagaggcagcgacggcaagctgcaggaggtgggccaggtgagcgtgagcctgcagagagccagcggcgacttccagaccaccaagctgaacggcttcgaggtgttcgccagattcggcagcgccatcgcccccctgggcgacctggaccaggacggcttcaacgacatcgccatcgccgccccctacggcggcgaggacaagaagggcatcgtgtacatcttcaacggcagaagcaccggcctgaacgccgtgcccagccagatcctggagggccagtgggccgccagaagcatgccccccagcttcggctacagcatgaagggcgccaccgacatcgacaagaacggctaccccgacctgatcgtgggcgccttcggcgtggacagagccatcctgtacagagccagacccgtgatcaccgtgaacgccggcctggaggtgtaccccagcatcctgaaccaggacaacaagacctgcagcctgcccggcaccgccctgaaggtgagctgcttcaacgtgagattctgcctgaaggccgacggcaagggcgtgctgcccagaaagctgaacttccaggtggagctgctgctggacaagctgaagcagaagggcgccatcagaagagccctgttcctgtacagcagaagccccagccacagcaagaacatgaccatcagcagaggcggcctgatgcagtgcgaggagctgatcgcctacctgagagacgagagcgagttcagagacaagctgacccccatcaccatcttcatggagtacagactggactacagaaccgccgccgacaccaccggcctgcagcccatcctgaaccagttcacccccgccaacatcagcagacaggcccacatcctgctggactgcggcgaggacaacgtgtgcaagcccaagctggaggtgagcgtggacagcgaccagaagaagatctacatcggcgacgacaaccccctgaccctgatcgtgaaggcccagaaccagggcgagggcgcctacgaggccgagctgatcgtgagcatccccctgcaggccgacttcatcggcgtggtgagaaacaacgaggccctggccagactgagctgcgccttcaagaccgagaaccagaccagacaggtggtgtgcgacctgggcaaccccatgaaggccggcacccagctgctggccggcctgagattcagcgtgcaccagcagagcgagatggacaccagcgtgaagttcgacctgcagatccagagcagcaacctgttcgacaaggtgagccccgtggtgagccacaaggtggacctggccgtgctggccgccgtggagatcagaggcgtgagcagccccgaccacgtgttcctgcccatccccaactgggagcacaaggagaaccccgagaccgaggaggacgtgggccccgtggtgcagcacatctacgagctgagaaacaacggccccagcagcttcagcaaggccatgctgcacctgcagtggccctacaagtacaacaacaacaccctgctgtacatcctgcactacgacatcgacggccccatgaactgcaccagcgacatggagatcaaccccctgagaatcaagatcagcagcctgcagaccaccgagaagaacgacaccgtggccggccagggcgagagagaccacctgatcaccaagagagacctggccctgagcgagggcgacatccacaccctgggctgcggcgtggcccagtgcctgaagatcgtgtgccaggtgggcagactggacagaggcaagagcgccatcctgtacgtgaagagcctgctgtggaccgagaccttcatgaacaaggagaaccagaaccacagctacagcctgaagagcagcgccagcttcaacgtgatcgagttcccctacaagaacctgcccatcgaggacatcaccaacagcaccctggtgaccaccaacgtgacctggggcatccagcccgcccccatgcccgtgcccgtgtgggtgatcatcctggccgtgctggccggcctgctgctgctggccgtgctggtgttcgtgatgtacagaatgggcttcttcaagagagtgagacccccccaggaggagcaggagagagagcagctgcagccccacgagaacggcgagggcaacagcgagacctag

SEQ ID NO: 11108 - DNA, 1449 bp, synthetic construct
  misc_feature 1..1449: note = Description of Artificial Sequence: Synthetic coding sequence
  source 1..1449: mol_type = other DNA
atggccttcccccccagaagaagactgagactgggccccagaggcctgcccctgctgctgagcggcctgctgctgcccctgtgcagagccttcaacctggacgtggacagccccgccgagtacagcggccccgagggcagctacttcggcttcgccgtggacttcttcgtgcccagcgccagcagcagaatgttcctgctggtgggcgcccccaaggccaacaccacccagcccggcatcgtggagggcggccaggtgctgaagtgcgactggagcagcaccagaagatgccagcccatcgagttcgacgccaccggcaacagagactacgccaaggacgaccccctggagttcaagagccaccagtggttcggcgccagcgtgagaagcaagcaggacaagatcctggcctgcgcccccctgtaccactggagaaccgagatgaagcaggagagagagcccgtgggcacctgcttcctgcaggacggcaccaagaccgtggagtacgccccctgcagaagccaggacatcgacgccgacggccagggcttctgccagggcggcttcagcatcgacttcaccaaggccgacagagtgctgctgggcggccccggcagcttctactggcagggccagctgatcagcgaccaggtggccgagatcgtgagcaagtacgaccccaacgtgtacagcatcaagtacaacaaccagctggccaccagaaccgcccaggccatcttcgacgacagctacctgggctacagcgtggccgtgggcgacttcaacggcgacggcatcgacgacttcgtgagcggcgtgcccagagccgccagaaccctgggcatggtgtacatctacgacggcaagaacatgagcagcctgtacaacttcaccggcgagcagatggccgcctacttcggcttcagcgtggccgccaccgacatcaacggcgacgactacgccgacgtgttcatcggcgcccccctgttcatggacagaggcagcgacggcaagctgcaggaggtgggccaggtgagcgtgagcctgcagagagccagcggcgacttccagaccaccaagctgaacggcttcgaggtgttcgccagattcggcagcgccatcgcccccctgggcgacctggaccaggacggcttcaacgacatcgccatcgccgccccctacggcggcgaggacaagaagggcatcgtgtacatcttcaacggcagaagcaccggcctgaacgccgtgcccagccagatcctggagggccagtgggccgccagaagcatgccccccagcttcggctacagcatgaagggcgccaccgacatcgacaagaacggctaccccgacctgatcgtgggcgccttcggcgtggacagagccatcctgtacagagccagacccgtgatccccatcttcgtgcagctgcaccacgtggtgcactag

SEQ ID NO: 11109 - DNA, 2397 bp, synthetic construct
  misc_feature 1..2397: note = Description of Artificial Sequence: Synthetic coding sequence
  source 1..2397: mol_type = other DNA
atgaacctgcagcccatcttctggatcggcctgatcagcagcgtgtgctgcgtgttcgcccagaccgacgagaacagatgcctgaaggccaacgccaagagctgcggcgagtgcatccaggccggccccaactgcggctggtgcaccaacagcaccttcctgcaggagggcatgcccaccagcgccagatgcgacgacctggaggccctgaagaagaagggctgcccccccgacgacatcgagaaccccagaggcagcaaggacatcaagaagaacaagaacgtgaccaacagaagcaagggcaccgccgagaagctgaagcccgaggacatcacccagatccagccccagcagctggtgctgagactgagaagcggcgagccccagaccttcaccctgaagttcaagagagccgaggactaccccatcgacctgtactacctgatggacctgagctacagcatgaaggacgacctggagaacgtgaagagcctgggcaccgacctgatgaacgagatgagaagaatcaccagcgacttcagaatcggcttcggcagcttcgtggagaagaccgtgatgccctacatcagcaccacccccgccaagctgagaaacccctgcaccagcgagcagaactgcaccagccccttcagctacaagaacgtgctgagcctgaccaacaagggcgaggtgttcaacgagctggtgggcaagcagagaatcagcggcaacctggacagccccgagggcggcttcgacgccatcatgcaggtggccgtgtgcggcagcctgatcggctggagaaacgtgaccagactgctggtgttcagcaccgacgccggcttccacttcgccggcgacggcaagctgggcggcatcgtgctgcccaacgacggccagtgccacctggagaacaacatgtacaccatgagccactactacgactaccccagcatcgcccacctggtgcagaagctgagcgagaacaacatccagaccatcttcgccgtgaccgaggagttccagcccgtgtacaaggagctgaagaacctgatccccaagagcgccgtgggcaccctgagcgccaacagcagcaacgtgatccagctgatcatcgacgcctacaacagcctgagcagcgaggtgatcctggagaacggcaagctgagcgagggcgtgaccatcagctacaagagctactgcaagaacggcgtgaacggcaccggcgagaacggcagaaagtgcagcaacatcagcatcggcgacgaggtgcagttcgagatcagcatcaccagcaacaagtgccccaagaaggacagcgacagcttcaagatcagacccctgggcttcaccgaggaggtggaggtgatcctgcagtacatctgcgagtgcgagtgccagagcgagggcatccccgagagccccaagtgccacgagggcaacggcaccttcgagtgcggcgcctgcagatgcaacgagggcagagtgggcagacactgcgagtgcagcaccgacgaggtgaacagcgaggacatggacgcctactgcagaaaggagaacagcagcgagatctgcagcaacaacggcgagtgcgtgtgcggccagtgcgtgtgcagaaagagagacaacaccaacgagatctacagcggcaagttctgcgagtgcgacaacttcaactgcgacagaagcaacggcctgatctgcggcggcaacggcgtgtgcaagtgcagagtgtgcgagtgcaaccccaactacaccggcagcgcctgcgactgcagcctggacaccagcacctgcgaggccagcaacggccagatctgcaacggcagaggcatctgcgagtgcggcgtgtgcaagtgcaccgaccccaagttccagggccagacctgcgagatgtgccagacctgcctgggcgtgtgcgccgagcacaaggagtgcgtgcagtgcagagccttcaacaagggcgagaagaaggacacctgcacccaggagtgcagctacttcaacatcaccaaggtggagagcagagacaagctgccccagcccgtgcagcccgaccccgtgagccactgcaaggagaaggacgtggacgactgctggttctacttcacctacagcgtgaacggcaacaacgaggtgatggtgcacgtggtggagaaccccgagtgccccaccggccccgacatcatccccatcgtggccggcgtggtggccggcatcgtgctgatcggcctggccctgctgctgatctggaagctgctgatgatcatccacgacagaagagagttcgccaagttcgagaaggagaagatgaacgccaagtgggacaccggcgagaaccccatctacaagagcgccgtgaccaccgtggtgaaccccaagtacgagggcaagtag

SEQ ID NO: 11110 - DNA, 2478 bp, synthetic construct
  misc_feature 1..2478: note = Description of Artificial Sequence: Synthetic coding sequence
  source 1..2478: mol_type = other DNA
atgaacctgcagcccatcttctggatcggcctgatcagcagcgtgtgctgcgtgttcgcccagaccgacgagaacagatgcctgaaggccaacgccaagagctgcggcgagtgcatccaggccggccccaactgcggctggtgcaccaacagcaccttcctgcaggagggcatgcccaccagcgccagatgcgacgacctggaggccctgaagaagaagggctgcccccccgacgacatcgagaaccccagaggcagcaaggacatcaagaagaacaagaacgtgaccaacagaagcaagggcaccgccgagaagctgaagcccgaggacatcacccagatccagccccagcagctggtgctgagactgagaagcggcgagccccagaccttcaccctgaagttcaagagagccgaggactaccccatcgacctgtactacctgatggacctgagctacagcatgaaggacgacctggagaacgtgaagagcctgggcaccgacctgatgaacgagatgagaagaatcaccagcgacttcagaatcggcttcggcagcttcgtggagaagaccgtgatgccctacatcagcaccacccccgccaagctgagaaacccctgcaccagcgagcagaactgcaccagccccttcagctacaagaacgtgctgagcctgaccaacaagggcgaggtgttcaacgagctggtgggcaagcagagaatcagcggcaacctggacagccccgagggcggcttcgacgccatcatgcaggtggccgtgtgcggcagcctgatcggctggagaaacgtgaccagactgctggtgttcagcaccgacgccggcttccacttcgccggcgacggcaagctgggcggcatcgtgctgcccaacgacggccagtgccacctggagaacaacatgtacaccatgagccactactacgactaccccagcatcgcccacctggtgcagaagctgagcgagaacaacatccagaccatcttcgccgtgaccgaggagttccagcccgtgtacaaggagctgaagaacctgatccccaagagcgccgtgggcaccctgagcgccaacagcagcaacgtgatccagctgatcatcgacgcctacaacagcctgagcagcgaggtgatcctggagaacggcaagctgagcgagggcgtgaccatcagctacaagagctactgcaagaacggcgtgaacggcaccggcgagaacggcagaaagtgcagcaacatcagcatcggcgacgaggtgcagttcgagatcagcatcaccagcaacaagtgccccaagaaggacagcgacagcttcaagatcagacccctgggcttcaccgaggaggtggaggtgatcctgcagtacatctgcgagtgcgagtgccagagcgagggcatccccgagagccccaagtgccacgagggcaacggcaccttcgagtgcggcgcctgcagatgcaacgagggcagagtgggcagacactgcgagtgcagcaccgacgaggtgaacagcgaggacatggacgcctactgcagaaaggagaacagcagcgagatctgcagcaacaacggcgagtgcgtgtgcggccagtgcgtgtgcagaaagagagacaacaccaacgagatctacagcggcaagttctgcgagtgcgacaacttcaactgcgacagaagcaacggcctgatctgcggcggcaacggcgtgtgcaagtgcagagtgtgcgagtgcaaccccaactacaccggcagcgcctgcgactgcagcctggacaccagcacctgcgaggccagcaacggccagatctgcaacggcagaggcatctgcgagtgcggcgtgtgcaagtgcaccgaccccaagttccagggccagacctgcgagatgtgccagacctgcctgggcgtgtgcgccgagcacaaggagtgcgtgcagtgcagagccttcaacaagggcgagaagaaggacacctgcacccaggagtgcagctacttcaacatcaccaaggtggagagcagagacaagctgccccagcccgtgcagcccgaccccgtgagccactgcaaggagaaggacgtggacgactgctggttctacttcacctacagcgtgaacggcaacaacgaggtgatggtgcacgtggtggagaaccccgagtgccccaccggccccgacatcatccccatcgtggccggcgtggtggccggcatcgtgctgatcggcctggccctgctgctgatctggaagctgctgatgatcatccacgacagaagagagttcgccaagttcgagaaggagaagatgaacgccaagtgggacaccagcctgagcgtggcccagcccggcgtgcagtggtgcgacatcagcagcctgcagcccctgaccagcagattccagcagttcagctgcctgagcctgcccagcacctgggactacagagtgaagatcctgttcatcagagtgccctag

SEQ ID NO: 11111 - DNA, 2397 bp, synthetic construct; identical to SEQ ID NO: 11109
  misc_feature 1..2397: note = Description of Artificial Sequence: Synthetic coding sequence
  source 1..2397: mol_type = other DNA

SEQ ID NO: 11112 - DNA, 150 bp, synthetic construct
  misc_feature 1..150: note = Description of Artificial Sequence: Synthetic coding sequence
  source 1..150: mol_type = other DNA
atgaacctgcagcccatcttctggatcggcctgatcagcagcgtgtgctgcgtgttcgcccagaccgacgagaacagatgcctgaaggccaacgccaagagctgcggcgagtgcatccaggccggccccaactgcggctggtgcacctag

SEQ ID NO: 11113 - DNA, 270 bp, synthetic construct
  misc_feature 1..270: note = Description of Artificial Sequence: Synthetic coding sequence
  source 1..270: mol_type = other DNA
atgaacctgcagcccatcttctggatcggcctgatcagcagcgtgtgctgcgtgttcgcccagaccgacgagaacagatgcctgaaggccaacgccaagagctgcggcgagtgcatccaggccggccccaactgcggctggtgcaccaacagcaccttcctgcaggagggcatgcccaccagcgccagatgcgacgacctggaggccctgaagaagaagggctgcccccccgacgacatcgagaaccccagaggcagcaaggacatctag

SEQ ID NO: 11114 - DNA, 2406 bp, synthetic construct
  misc_feature 1..2406: note = Description of Artificial Sequence: Synthetic coding sequence
  source 1..2406: mol_type = other DNA
atgaacctgcagcccatcttctggatcggcctgatcagcagcgtgtgctgcgtgttcgcccagaccgacgagaacagatgcctgaaggccaacgccaagagctgcggcgagtgcatccaggccggccccaactgcggctggtgcaccaacagcaccttcctgcaggagggcatgcccaccagcgccagatgcgacgacctggaggccctgaagaagaagggctgcccccccgacgacatcgagaaccccagaggcagcaaggacatcaagaagaacaagaacgtgaccaacagaagcaagggcaccgccgagaagctgaagcccgaggacatcacccagatccagccccagcagctggtgctgagactgagaagcggcgagccccagaccttcaccctgaagttcaagagagccgaggactaccccatcgacctgtactacctgatggacctgagctacagcatgaaggacgacctggagaacgtgaagagcctgggcaccgacctgatgaacgagatgagaagaatcaccagcgacttcagaatcggcttcggcagcttcgtggagaagaccgtgatgccctacatcagcaccacccccgccaagctgagaaacccctgcaccagcgagcagaactgcaccagccccttcagctacaagaacgtgctgagcctgaccaacaagggcgaggtgttcaacgagctggtgggcaagcagagaatcagcggcaacctggacagccccgagggcggcttcgacgccatcatgcaggtggccgtgtgcggcagcctgatcggctggagaaacgtgaccagactgctggtgttcagcaccgacgccggcttccacttcgccggcgacggcaagctgggcggcatcgtgctgcccaacgacggccagtgccacctggagaacaacatgtacaccatgagccactactacgactaccccagcatcgcccacctggtgcagaagctgagcgagaacaacatccagaccatcttcgccgtgaccgaggagttccagcccgtgtacaaggagctgaagaacctgatccccaagagcgccgtgggcaccctgagcgccaacagcagcaacgtgatccagctgatcatcgacgcctacaacagcctgagcagcgaggtgatcctggagaacggcaagctgagcgagggcgtgaccatcagctacaagagctactgcaagaacggcgtgaacggcaccggcgagaacggcagaaagtgcagcaacatcagcatcggcgacgaggtgcagttcgagatcagcatcaccagcaacaagtgccccaagaaggacagcgacagcttcaagatcagacccctgggcttcaccgaggaggtggaggtgatcctgcagtacatctgcgagtgcgagtgccagagcgagggcatccccgagagccccaagtgccacgagggcaacggcaccttcgagtgcggcgcctgcagatgcaacgagggcagagtgggcagacactgcgagtgcagcaccgacgaggtgaacagcgaggacatggacgcctactgcagaaaggagaacagcagcgagatctgcagcaacaacggcgagtgcgtgtgcggccagtgcgtgtgcagaaagagagacaacaccaacgagatctacagcggcaagttctgcgagtgcgacaacttcaactgcgacagaagcaacggcctgatctgcggcggcaacggcgtgtgcaagtgcagagtgtgcgagtgcaaccccaactacaccggcagcgcctgcgactgcagcctggacaccagcacctgcgaggccagcaacggccagatctgcaacggcagaggcatctgcgagtgcggcgtgtgcaagtgcaccgaccccaagttccagggccagacctgcgagatgtgccagacctgcctgggcgtgtgcgccgagcacaaggagtgcgtgcagtgcagagccttcaacaagggcgagaagaaggacacctgcacccaggagtgcagctacttcaacatcaccaaggtggagagcagagacaagctgccccagcccgtgcagcccgaccccgtgagccactgcaaggagaaggacgtggacgactgctggttctacttcacctacagcgtgaacggcaacaacgaggtgatggtgcacgtggtggagaaccccgagtgccccaccggccccgacatcatccccatcgtggccggcgtggtggccggcatcgtgctgatcggcctggccctgctgctgatctggaagctgctgatgatcatccacgacagaagagagttcgccaagttcgagaaggagaagatgaacgccaagtgggacacccaggagaaccccatctacaagagccccatcaacaacttcaagaaccccaactacggcagaaaggccggcctgtag

SEQ ID NO: 11115 - DNA, 411 bp, synthetic construct
  misc_feature 1..411: note = Description of Artificial Sequence: Synthetic coding sequence
  source 1..411: mol_type = other DNA
atgaacctgcagcccatcttctggatcggcctgatcagcagcgtgtgctgcgtgttcgcccagaccgacgagaacagatgcctgaaggccaacgccaagagctgcggcgagtgcatccaggccggccccaactgcggctggtgcaccaacagcaccttcctgcaggagggcatgcccaccagcgccagatgcgacgacctggaggccctgaagaagaagggctgcccccccgacgacatcgagaaccccagaggcagcaaggacatcaagaagaacaagaacgtgaccaacagaagcaagggcaccgccgagaagctgaagcccgaggacatcacccagatccagccccagcagctggtgctgagactgagaagcggcgagccccagaccttcaccctgaagttcaagtag

SEQ ID NO: 11116 - DNA, 378 bp, synthetic construct
  misc_feature 1..378: note = Description of Artificial Sequence: Synthetic coding sequence
  source 1..378: mol_type = other DNA
atgaacctgcagcccatcttctggatcggcctgatcagcagcgtgtgctgcgtgttcgcccagaccgacgagaacagatgcctgaaggccaacgccaagagctgcggcgagtgcatccaggccggccccaactgcggctggtgcaccaacagcaccttcctgcaggagggcatgcccaccagcgccagatgcgacgacctggaggccctgaagaagaagggctgcccccccgacgacatcgagaaccccagaggcagcaaggacatcaagaagaacaagaacgtgaccaacagaagcaagggcaccgccgagaagctgaagcccgaggacatcacccagatccagccccagcagctggtgctgagactgagaagctag

SEQ ID NO: 11117 - DNA, 492 bp, synthetic construct
  misc_feature 1..492: note = Description of Artificial Sequence: Synthetic coding sequence
  source 1..492: mol_type = other DNA
atgaacctgcagcccatcttctggatcggcctgatcagcagcgtgtgctgcgtgttcgcccagaccgacgagaacagatgcctgaaggccaacgccaagagctgcggcgagtgcatccaggccggccccaactgcggctggtgcaccaacagcaccttcctgcaggagggcatgcccaccagcgccagatgcgacgacctggaggccctgaagaagaagggctgcccccccgacgacatcgagaaccccagaggcagcaaggacatcaagaagaacaagaacgtgaccaacagaagcaagggcaccgccgagaagctgaagcccgaggacatcacccagatccagccccagcagctggtgctgagactgagaagcggcgagccccagaccttcaccctgaagttcaagagagccgaggactaccccatcgacctgtactacctgatggacctgagctacagcatgaaggacgacctggagaacgtgaagtag

SEQ ID NO: 11118 - DNA, 459 bp, synthetic construct
  misc_feature 1..459: note = Description of Artificial Sequence: Synthetic coding sequence
  source 1..459: mol_type = other DNA
atgaacctgcagcccatcttctggatcggcctgatcagcagcgtgtgctgcgtgttcgcccagaccgacgagaacagatgcctgaaggccaacgccaagagctgcggcgagtgcatccaggccggccccaactgcggctggtgcaccaacagcgtgagcaagaccttcctgcaggagggcatgcccaccagcgccagatgcgacgacctggaggccctgaagaagaagggctgcccccccgacgacatcgagaaccccagaggcagcaaggacatcaagaagaacaagaacgtgaccaacagaagcaagggcaccgccgagaagctgaagcccgaggacatcacccagatccagccccagcagctggtgctgagactgagaagcggcgagccccagaccttcaccctgaagttcaagagagccgaggactaccccatcgacctgtactacctgatgtag

SEQ ID NO: 11119 - DNA, 315 bp, synthetic construct
  misc_feature 1..315: note = Description of Artificial Sequence: Synthetic coding sequence
  source 1..315: mol_type = other DNA
atgaacctgcagcccatcttctggatcggcctgatcagcagcgtgtgctgcgtgttcgcccagaccgacgagaacagatgcctgaaggccaacgccaagagctgcggcgagtgcatccaggccggccccaactgcggctggtgcaccaacagcaccttcctgcaggagggcatgcccaccagcgccagatgcgacgacctggaggccctgaagaagaagggctgcccccccgacgacatcgagaaccccagaggcagcaaggacatcaagaagaacaagaacgtgaccaacagaagcaagggcaccgccgagtag

SEQ ID NO: 11120 - DNA, 432 bp, synthetic construct
  misc_feature 1..432: note = Description of Artificial Sequence: Synthetic coding sequence
  source 1..432: mol_type = other DNA
atgaacctgcagcccatcttctggatcggcctgatcagcagcgtgtgctgcgtgttcgcccagaccgacgagaacagatgcctgaaggccaacgccaagagctgcggcgagtgcatccaggccggccccaactgcggctggtgcaccaacagcaccttcctgcaggagggcatgcccaccagcgccagatgcgacgacctggaggccctgaagaagaagggctgcccccccgacgacatcgagaaccccagaggcagcaaggacatcaagaagaacaagaacgtgaccaacagaagcaagggcaccgccgagaagctgaagcccgaggacatcacccagatccagccccagcagctggtgctgagactgagaagcggcgagccccagaccttcaccctgaagttcaagagagccgaggactaccccatctag

SEQ ID NO: 11121 - DNA, 2310 bp, synthetic construct
  misc_feature 1..2310: note = Description of Artificial Sequence: Synthetic coding sequence
  source 1..2310: mol_type = other DNA
atgctgggcctgagaccccccctgctggccctggtgggcctgctgagcctgggctgcgtgctgagccaggagtgcaccaagttcaaggtgagcagctgcagagagtgcatcgagagcggccccggctgcacctggtgccagaagctgaacttcaccggccccggcgaccccgacagcatcagatgcgacaccagaccccagctgctgatgagaggctgcgccgccgacgacatcatggaccccaccagcctggccgagacccaggaggaccacaacggcggccagaagcagctgagcccccagaaggtgaccctgtacctgagacccggccaggccgccgccttcaacgtgaccttcagaagagccaagggctaccccatcgacctgtactacctgatggacctgagctacagcatgctggacgacctgagaaacgtgaagaagctgggcggcgacctgctgagagccctgaacgagatcaccgagagcggcagaatcggcttcggcagcttcgtggacaagaccgtgctgcccttcgtgaacacccaccccgacaagctgagaaacccctgccccaacaaggagaaggagtgccagccccccttcgccttcagacacgtgctgaagctgaccaacaacagcaaccagttccagaccgaggtgggcaagcagctgatcagcggcaacctggacgcccccgagggcggcctggacgccatgatgcaggtggccgcctgccccgaggagatcggctggagaaacgtgaccagactgctggtgttcgccaccgacgacggcttccacttcgccggcgacggcaagctgggcgccatcctgacccccaacgacggcagatgccacctggaggacaacctgtacaagagaagcaacgagttcgactaccccagcgtgggccagctggcccacaagctggccgagaacaacatccagcccatcttcgccgtgaccagcagaatggtgaagacctacgagaagctgaccgagatcatccccaagagcgccgtgggcgagctgagcgaggacagcagcaacgtggtgcagctgatcaagaacgcctacaacaagctgagcagcagagtgttcctggaccacaacgccctgcccgacaccctgaaggtgacctacgacagcttctgcagcaacggcgtgacccacagaaaccagcccagaggcgactgcgacggcgtgcagatcaacgtgcccatcaccttccaggtgaaggtgaccgccaccgagtgcatccaggagcagagcttcgtgatcagagccctgggcttcaccgacatcgtgaccgtgcaggtgctgccccagtgcgagtgcagatgcagagaccagagcagagacagaagcctgtgccacggcaagggcttcctggagtgcggcatctgcagatgcgacaccggctacatcggcaagaactgcgagtgccagacccagggcagaagcagccaggagctggagggcagctgcagaaaggacaacaacagcatcatctgcagcggcctgggcgactgcgtgtgcggccagtgcctgtgccacaccagcgacgtgcccggcaagctgatctacggccagtactgcgagtgcgacaccatcaactgcgagagatacaacggccaggtgtgcggcggccccggcagaggcctgtgcttctgcggcaagtgcagatgccaccccggcttcgagggcagcgcctgccagtgcgagagaaccaccgagggctgcctgaaccccagaagagtggagtgcagcggcagaggcagatgcagatgcaacgtgtgcgagtgccacagcggctaccagctgcccctgtgccaggagtgccccggctgccccagcccctgcggcaagtacatcagctgcgccgagtgcctgaagttcgagaagggccccttcggcaagaactgcagcgccgcctgccccggcctgcagctgagcaacaaccccgtgaagggcagaacctgcaaggagagagacagcgagggctgctgggtggcctacaccctggagcagcaggacggcatggacagatacctgatctacgtggacgagagcagagagtgcgtggccggccccaacatcgccgccatcgtgggcggcaccgtggccggcatcgtgctgatcggcatcctgctgctggtgatctggaaggccctgatccacctgagcgacctgagagagtacagaagattcgagaaggagaagctgaagagccagtggaacaacgacaaccccctgttcaagagcgccaccaccaccgtgatgaaccccaagttcgccgagagctag

SEQ ID NO: 11122 - DNA, 969 bp, synthetic construct
  misc_feature 1..969: note = Description of Artificial Sequence: Synthetic coding sequence
  source 1..969: mol_type = other DNA
ggcagactgggcaaggacctggccaccggcgtgctgagccaggagtgcaccaagttcaaggtgagcagctgcagagagtgcatcgagagcggccccggctgcacctggtgccagaagctgaacttcaccggccccggcgaccccgacagcatcagatgcgacaccagaccccagctgctgatgagaggctgcgccgccgacgacatcatggaccccaccagcctggccgagacccaggaggaccacaacggcggccagaagcagctgagcccccagaaggtgaccctgtacctgagacccggccaggccgccgccttcaacgtgaccttcagaagagccaagggctaccccatcgacctgtactacctgatggacctgagctacagcatgctggacgacctgagaaacgtgaagaagctgggcggcgacctgctgagagccctgaacgagatcaccgagagcggcagaatcggcttcggcagcttcgtggacaagaccgtgctgcccttcgtgaacacccaccccgacaagctgagaaacccctgccccaacaaggagaaggagtgccagccccccttcgccttcagacacgtgctgaagctgaccaacaacagcaaccagttccagaccgaggtgggcaagcagctgatcagcggcaacctggacgcccccgagggcggcctggacgccatgatgcaggtggccgcctgccccgaggagatcggctggagaaacgtgaccagactgctggtgttcgccaccgacgacggcttccacttcgccggcgacggcaagctgggcgccatcctgacccccaacgacggcagatgccacctggaggacaacctgtacaagagaagcaacgagttcgactaccccagcgtgggccagctggcccacaagctggccgagaacaacatccagcccatcttcgccgtgaccagcagaatggtgaagacctacgagtag

SEQ ID NO: 11123 - DNA, 2310 bp, synthetic construct; identical to SEQ ID NO: 11121
  misc_feature 1..2310: note = Description of Artificial Sequence: Synthetic coding sequence
  source 1..2310: mol_type = other DNA

SEQ ID NO: 11124 - DNA, 2310 bp, synthetic construct; identical to SEQ ID NO: 11121
  misc_feature 1..2310: note = Description of Artificial Sequence: Synthetic coding sequence
  source 1..2310: mol_type = other DNA

SEQ ID NO: 11125 - DNA, 2310 bp, synthetic construct; identical to SEQ ID NO: 11121
  misc_feature 1..2310: note = Description of Artificial Sequence: Synthetic coding sequence
  source 1..2310: mol_type = other DNA

SEQ ID NO: 11126 - DNA, 2310 bp, synthetic construct; identical to SEQ ID NO: 11121
  misc_feature 1..2310: note = Description of Artificial Sequence: Synthetic coding sequence
  source 1..2310: mol_type = other DNA

SEQ ID NO: 11127 - DNA, 363 bp, synthetic construct
  misc_feature 1..363: note = Description of Artificial Sequence: Synthetic coding sequence
  source 1..363: mol_type = other DNA
atgctgggcctgagaccccccctgctggccctggtgggcctgctgagcctgggctgcgtgctgagccaggagtgcaccaagttcaaggtgagcagctgcagagagtgcatcgagagcggccccggctgcacctggtgccagaagctgaacttcaccggccccggcgaccccgacagcatcagatgcgacaccagaccccagctgctgatgagaggctgcgccgccgacgacatcatggaccccaccagcctggccgagacccaggaggaccacaacggcggccagaagcagctgagcccccagaaggtgaccctgtacctgagacccggccaggccgccgccttcaacgtgaccttcagatag

SEQ ID NO: 11128 - DNA, 213 bp, synthetic construct
  misc_feature 1..213: note = Description of Artificial Sequence: Synthetic coding sequence
  source 1..213: mol_type = other DNA
atgctgggcctgagaccccccctgctggccctggtgggcctgctgagcctgggctgcgtgctgagccaggagtgcaccaagttcaaggtgagcagctgcagagagtgcatcgagagcggccccggctgcacctggtgccagaagctgaacttcaccggccccggcgaccccgacagcatcagatgcgacaccagaccccagctgctgatgtag

SEQ ID NO: 11129 - DNA, 150 bp, synthetic construct
  misc_feature 1..150: note = Description of Artificial Sequence: Synthetic coding sequence
  source 1..150: mol_type = other DNA
atgctgggcctgagaccccccctgctggccctggtgggcctgctgagcctgggctgcgtgctgagccaggagtgcaccaagttcaaggtgagcagctgcagagagtgcatcgagagcggccccggctgcacctggtgccagaagctgtag

SEQ ID NO: 11130 - DNA, 483 bp, synthetic construct
  misc_feature 1..483: note = Description of Artificial Sequence: Synthetic coding sequence
  source 1..483: mol_type = other DNA
atgctgggcctgagaccccccctgctggccctggtgggcctgctgagcctgggctgcgtgctgagccaggagtgcaccaagttcaaggtgagcagctgcagagagtgcatcgagagcggccccggctgcacctggtgccagaagctgaacttcaccggccccggcgaccccgacagcatcagatgcgacaccagaccccagctgctgatgagaggctgcgccgccgacgacatcatggaccccaccagcctggccgagacccaggaggaccacaacggcggccagaagcagctgagcccccagaaggtgaccctgtacctgagacccggccaggccgccgccttcaacgtgaccttcagaagagccaagggctaccccatcgacctgtactacctgatggacctgagctacagcatgctggacgacctgagaaacgtgaagaagctgggcggcgacctgctgagagccctgaacgagatctag

SEQ ID NO: 11131 - DNA, 501 bp, synthetic construct
  misc_feature 1..501: note = Description of Artificial Sequence: Synthetic coding sequence
  source 1..501: mol_type = other DNA
atgctgggcctgagaccccccctgctggccctggtgggcctgctgagcctgggctgcgtgctgagccaggagtgcaccaagttcaaggtgagcagctgcagagagtgcatcgagagcggccccggctgcacctggtgccagaagctgaacttcaccggccccggcgaccccgacagcatcagatgcgacaccagaccccagctgctgatgagaggctgcgccgccgacgacatcatggaccccaccagcctggccgagacccaggaggaccacaacggcggccagaagcagctgagcccccagaaggtgaccctgtacctgagacccggccaggccgccgccttcaacgtgaccttcagaagagccaagggctaccccatcgacctgtactacctgatggacctgagctacagcatgctggacgacctgagaaacgtgaagaagctgggcggcgacctgctgagagccctgaacgagatcaccgagagcggcagaatctag

SEQ ID NO: 11132 - DNA, 1137 bp, synthetic construct
  misc_feature 1..1137: note = Description of Artificial Sequence: Synthetic coding sequence
  source 1..1137: mol_type = other DNA
atgctgggcctgagaccccccctgctggccctggtgggcctgctgagcctgggctgcgtgctgagccaggagtgcaccaagttcaaggtgagcagctgcagagagtgcatcgagagcggccccggctgcacctggtgccagaagctgaacttcaccggccccggcgaccccgacagcatcagatgcgacaccagaccccagctgctgatgagaggctgcgccgccgacgacatcatggaccccaccagcctggccgagacccaggaggaccacaacggcggccagaagcagctgagcccccagaaggtgaccctgtacctgagacccggcttcggcagcttcgtggacaagaccgtgctgcccttcgtgaacacccaccccgacaagctgagaaacccctgccccaacaaggagaaggagtgccagccccccttcgccttcagacacgtgctgaagctgaccaacaacagcaaccagttccagaccgaggtgggcaagcagctgatcagcggcaacctggacgcccccgagggcggcctggacgccatgatgcaggtggccgcctgccccgaggagatcggctggagaaacgtgaccagactgctggtgttcgccaccgacgacggcttccacttcgccggcgacggcaagctgggcgccatcctgacccccaacgacggcagatgccacctggaggacaacctgtacaagagaagcaacgagttcgactaccccagcgtgggccagctggcccacaagctggccgagaacaacatccagcccatcttcgccgtgaccagcagaatggtgaagacctacgagaagctgaccgagatcatccccaagagcgccgtgggcgagctgagcgaggacagcagcaacgtggtgcagctgatcaagaacgcctacaacaagctgagcagcagagtgttcctggaccacaacgccctgcccgacaccctgaaggtgacctacgacagcttctgcagcaacggcgtgacccacagaaaccagcccagaggcgactgcgacggcgtgcagatcaacgtgcccatcaccttccaggtgaaggtgaccgccaccgagtgcatccaggagcagagcttcgtgatcggcagatgggccagcagaacctag

SEQ ID NO: 11133 - DNA, 2367 bp, synthetic construct
  misc_feature 1..2367: note = Description of Artificial Sequence: Synthetic coding sequence
  source 1..2367: mol_type = other DNA
atgagagccagacccagacccagacccctgtgggccaccgtgctggccctgggcgccctggccggcgtgggcgtgggcggccccaacatctgcaccaccagaggcgtgagcagctgccagcagtgcctggccgtgagccccatgtgcgcctggtgcagcgacgaggccctgcccctgggcagccccagatgcgacctgaaggagaacctgctgaaggacaactgcgcccccgagagcatcgagttccccgtgagcgaggccagagtgctggaggacagacccctgagcgacaagggcagcggcgacagcagccaggtgacccaggtgagcccccagagaatcgccctgagactgagacccgacgacagcaagaacttcagcatccaggtgagacaggtggaggactaccccgtggacatctactacctgatggacctgagctacagcatgaaggacgacctgtggagcatccagaacctgggcaccaagctggccacccagatgagaaagctgaccagcaacctgagaatcggcttcggcgccttcgtggacaagcccgtgagcccctacatgtacatcagcccccccgaggccctggagaacccctgctacgacatgaagaccacctgcctgcccatgttcggctacaagcacgtgctgaccctgaccgaccaggtgaccagattcaacgaggaggtgaagaagcagagcgtgagcagaaacagagacgcccccgagggcggcttcgacgccatcatgcaggccaccgtgtgcgacgagaagatcggctggagaaacgacgccagccacctgctggtgttcaccaccgacgccaagacccacatcgccctggacggcagactggccggcatcgtgcagcccaacgacggccagtgccacgtgggcagcgacaaccactacagcgccagcaccaccatggactaccccagcctgggcctgatgaccgagaagctgagccagaagaacatcaacctgatcttcgccgtgaccgagaacgtggtgaacctgtaccagaactacagcgagctgatccccggcaccaccgtgggcgtgctgagcatggacagcagcaacgtgctgcagctgatcgtggacgcctacggcaagatcagaagcaaggtggagctggaggtgagagacctgcccgaggagctgagcctgagcttcaacgccacctgcctgaacaacgaggtgatccccggcctgaagagctgcatgggcctgaagatcggcgacaccgtgagcttcagcatcgaggccaaggtgagaggctgcccccaggagaaggagaagagcttcaccatcaagcccgtgggcttcaaggacagcctgatcgtgcaggtgaccttcgactgcgactgcgcctgccaggcccaggccgagcccaacagccacagatgcaacaacggcaacggcaccttcgagtgcggcgtgtgcagatgcggccccggctggctgggcagccagtgcgagtgcagcgaggaggactacagacccagccagcaggacgagtgcagccccagagagggccagcccgtgtgcagccagagaggcgagtgcctgtgcggccagtgcgtgtgccacagcagcgacttcggcaagatcaccggcaagtactgcgagtgcgacgacttcagctgcgtgagatacaagggcgagatgtgcagcggccacggccagtgcagctgcggcgactgcctgtgcgacagcgactggaccggctactactgcaactgcaccaccagaaccgacacctgcatgagcagcaacggcctgctgtgcagcggcagaggcaagtgcgagtgcggcagctgcgtgtgcatccagcccggcagctacggcgacacctgcgagaagtgccccacctgccccgacgcctgcaccttcaagaaggagtgcgtggagtgcaagaagttcgacagaggcgccctgcacgacgagaacacctgcaacagatactgcagagacgagatcgagagcgtgaaggagctgaaggacaccggcaaggacgccgtgaactgcacctacaagaacgaggacgactgcgtggtgagattccagtactacgaggacagcagcggcaagagcatcctgtacgtggtggaggagcccgagtgccccaagggccccgacatcctggtggtgctgctgagcgtgatgggcgccatcctgctgatcggcctggccgccctgctgatctggaagctgctgatcaccatccacgacagaaaggagttcgccaagttcgaggaggagagagccagagccaagtgggacaccgccaacaaccccctgtacaaggaggccaccagcaccttcaccaacatcacctacagaggcacctag

SEQ ID NO: 11134 - DNA, 2256 bp, synthetic construct
  misc_feature 1..2256: note = Description of Artificial Sequence: Synthetic coding sequence
  source 1..2256: mol_type = other DNA
atgtgcgcctggtgcagcgacgaggccctgcccctgggcagccccagatgcgacctgaaggagaacctgctgaaggacaactgcgcccccgagagcatcgagttccccgtgagcgaggccagagtgctggaggacagacccctgagcgacaagggcagcggcgacagcagccaggtgacccaggtgagcccccagagaatcgccctgagactgagacccgacgacagcaagaacttcagcatccaggtgagacaggtggaggactaccccgtggacatctactacctgatggacctgagctacagcatgaaggacgacctgtggagcatccagaacctgggcaccaagctggccacccagatgagaaagctgaccagcaacctgagaatcggcttcggcgccttcgtggacaagcccgtgagcccctacatgtacatcagcccccccgaggccctggagaacccctgctacgacatgaagaccacctgcctgcccatgttcggctacaagcacgtgctgaccctgaccgaccaggtgaccagattcaacgaggaggtgaagaagcagagcgtgagcagaaacagagacgcccccgagggcggcttcgacgccatcatgcaggccaccgtgtgcgacgagaagatcggctggagaaacgacgccagccacctgctggtgttcaccaccgacgccaagacccacatcgccctggacggcagactggccggcatcgtgcagcccaacgacggccagtgccacgtgggcagcgacaaccactacagcgccagcaccaccatggactaccccagcctgggcctgatgaccgagaagctgagccagaagaacatcaacctgatcttcgccgtgaccgagaacgtggtgaacctgtaccagaactacagcgagctgatccccggcaccaccgtgggcgtgctgagcatggacagcagcaacgtgctgcagctgatcgtggacgcctacggcaagatcagaagcaaggtggagctggaggtgagagacctgcccgaggagctgagcctgagcttcaacgccacctgcctgaacaacgaggtgatccccggcctgaagagctgcatgggcctgaagatcggcgacaccgtgagcttcagcatcgaggccaaggtgagaggctgcccccaggagaaggagaagagcttcaccatcaagcccgtgggcttcaaggacagcctgatcgtgcaggtgaccttcgactgcgactgcgcctgccaggcccaggccgagcccaacagccacagatgcaacaacggcaacggcaccttcgagtgcggcgtgtgcagatgcggccccggctggctgggcagccagtgcgagtgcagcgaggaggactacagacccagccagcaggacgagtgcagccccagagagggccagcccgtgtgcagccagagaggcgagtgcctgtgcggccagtgcgtgtgccacagcagcgacttcggcaagatcaccggcaagtactgcgagtgcgacgacttcagctgcgtgagatacaagggcgagatgtgcagcggccacggccagtgcagctgcggcgactgcctgtgcgacagcgactggaccggctactactgcaactgcaccaccagaaccgacacctgcatgagcagcaacggcctgctgtgcagcggcagaggcaagtgcgagtgcggcagctgcgtgtgcatccagcccggcagctacggcgacacctgcgagaagtgccccacctgccccgacgcctgcaccttcaagaaggagtgcgtggagtgcaagaagttcgacagaggcgccctgcacgacgagaacacctgcaacagatactgcagagacgagatcgagagcgtgaaggagctgaaggacaccggcaaggacgccgtgaactgcacctacaagaacgaggacgactgcgtggtgagattccagtactacgaggacagcagcggcaagagcatcctgtacgtggtggaggagcccgagtgccccaagggccccgacatcctggtggtgctgctgagcgtgatgggcgccatcctgctgatcggcctggccgccctgctgatctggaagctgctgatcaccatccacgacagaaaggagttcgccaagttcgaggaggagagagccagagccaagtgggacaccgagatcctgctgtactactgcagcttcatcctggtgcaccagagcctggagagcctgagaaccgagttcaccagcaagcagaaggacggcaactag

SEQ ID NO: 11135 - DNA, 2367 bp, synthetic construct; identical to SEQ ID NO: 11133
  misc_feature 1..2367: note = Description of Artificial Sequence: Synthetic coding sequence
  source 1..2367: mol_type = other DNA

SEQ ID NO: 11136 - DNA, 1359 bp, synthetic construct
  misc_feature 1..1359: note = Description of Artificial Sequence: Synthetic coding sequence
  source 1..1359: mol_type = other DNA
atggacgacatcttcacccagtgcagagagggcaacgccgtggccgtgagactgtggctggacaacaccgagaacgacctgaaccagggcgacgaccacggcttcagccccctgcactgggcctgcagagagggcagaagcgccgtggtggagatgctgatcatgagaggcgccagaatcaacgtgatgaacagaggcgacgacacccccctgcacctggccgccagccacggccacagagacatcgtgcagaagctgctgcagtacaaggccgacatcaacgccgtgaacgagcacggcaacgtgcccctgcactacgcctgcttctggggccaggaccaggtggccgaggacctggtggccaacggcgccctggtgagcatctgcaacaagtacggcgagatgcccgtggacaaggccaaggcccccctgagagagctgctgagagagagagccgagaagatgggccagaacctgaacagaatcccctacaaggacaccttctggaagggcaccaccagaaccagacccagaaacggcaccctgaacaagcacagcggcatcgacttcaagcagctgaacttcctgaccaagctgaacgagaaccacagcggcgagctgtggaagggcagatggcagggcaacgacatcgtggtgaaggtgctgaaggtgagagactggagcaccagaaagagcagagacttcaacgaggagtgccccagactgagaatcttcagccaccccaacgtgctgcccgtgctgggcgcctgccagagcccccccgccccccaccccaccctgatcacccactggatgccctacggcagcctgtacaacgtgctgcacgagggcaccaacttcgtggtggaccagagccaggccgtgaagttcgccctggacatggccagaggcatggccttcctgcacaccctggagcccctgatccccagacacgccctgaacagcagaagcgtgatgatcgacgaggacatgaccgccagaatcagcatggccgacgtgaagttcagcttccagtgccccggcagaatgtacgcccccgcctgggtggcccccgaggccctgcagaagaagcccgaggacaccaacagaagaagcgccgacatgtggagcttcgccgtgctgctgtgggagctggtgaccagagaggtgcccttcgccgacctgagcaacatggagatcggcatgaaggtggccctggagggcctgagacccaccatcccccccggcatcagcccccacgtgtgcaagctgatgaagatctgcatgaacgaggaccccgccaagagacccaagttcgacatgatcgtgcccatcctggagaagatgcaggacaagtag

SEQ ID NO: 11137 - DNA, 1359 bp, synthetic construct; identical to SEQ ID NO: 11136
  misc_feature 1..1359: note = Description of Artificial Sequence: Synthetic coding sequence
  source 1..1359: mol_type = other DNA

SEQ ID NO: 11138 - DNA, 1359 bp, synthetic construct; identical to SEQ ID NO: 11136
  misc_feature 1..1359: note = Description of Artificial Sequence: Synthetic coding sequence
  source 1..1359: mol_type = other DNA

SEQ ID NO: 11139 - DNA, 957 bp, synthetic construct
  misc_feature 1..957: note = Description of Artificial Sequence: Synthetic coding sequence
  source 1..957: mol_type = other DNA
atgcccgtggacaaggccaaggcccccctgagagagctgctgagagagagagccgagaagatgggccagaacctgaacagaatcccctacaaggacaccttctggaagggcaccaccagaaccagacccagaaacggcaccctgaacaagcacagcggcatcgacttcaagcagctgaacttcctgaccaagctgaacgagaaccacagcggcgagctgtggaagggcagatggcagggcaacgacatcgtggtgaaggtgctgaaggtgagagactggagcaccagaaagagcagagacttcaacgaggagtgccccagactgagaatcttcagccaccccaacgtgctgcccgtgctgggcgcctgccagagcccccccgccccccaccccaccctgatcacccactggatgccctacggcagcctgtacaacgtgctgcacgagggcaccaacttcgtggtggaccagagccaggccgtgaagttcgccctggacatggccagaggcatggccttcctgcacaccctggagcccctgatccccagacacgccctgaacagcagaagcgtgatgatcgacgaggacatgaccgccagaatcagcatggccgacgtgaagttcagcttccagtgccccggcagaatgtacgcccccgcctgggtggcccccgaggccctgcagaagaagcccgaggacaccaacagaagaagcgccgacatgtggagcttcgccgtgctgctgtgggagctggtgaccagagaggtgcccttcgccgacctgagcaacatggagatcggcatgaaggtggccctggagggcctgagacccaccatcccccccggcatcagcccccacgtgtgcaagctgatgaagatctgcatgaacgaggaccccgccaagagacccaagttcgacatgatcgtgcccatcctggagaagatgcaggacaagtag

SEQ ID NO: 11140 - DNA, 978 bp, synthetic construct
  misc_feature 1..978: note = Description of Artificial Sequence: Synthetic coding sequence
  source 1..978: mol_type = other DNA
atgcccatcaccagaatgagaatgagaccctggctggagatgcagatcaacagcaaccagatccccggcctgatctggatcaacaaggaggagatgatcttccagatcccctggaagcacgccgccaagcacggctgggacatcaacaaggacgcctgcctgttcagaagctgggccatccacaccggcagatacaaggccggcgagaaggagcccgaccccaagacctggaaggccaacttcagatgcgccatgaacagcctgcccgacatcgaggaggtgaaggaccagagcagaaacaagggcagcagcgccgtgagagtgtacagaatgctgccccccctgaccaagaaccagagaaaggagagaaagagcaagagcagcagagacgccaagagcaaggccaagagaaagagctgcggcgacagcagccccgacaccttcagcgacggcctgagcagcagcaccctgcccgacgaccacagcagctacaccgtgcccggctacatgcaggacctggaggtggagcaggccctgacccccgccctgagcccctgcgccgtgagcagcaccctgcccgactggcacatccccgtggaggtggtgcccgacagcaccagcgacctgtacaacttccaggtgagccccatgcccagcaccagcgaggccaccaccgacgaggacgaggagggcaagctgcccgaggacatcatgaagctgctggagcagagcgagtggcagcccaccaacgtggacggcaagggctacctgctgaacgagcccggcgtgcagcccaccagcgtgtacggcgacttcagctgcaaggaggagcccgagatcgacagccccggcggcgacatcggcctgagcctgcagagagtgttcaccgacctgaagaacatggacgccacctggctggacagcctgctgacccccgtgagactgcccagcatccaggccatcccctgcgccccctag

SEQ ID NO: 11141 - DNA, 978 bp, synthetic construct; identical to SEQ ID NO: 11140
  misc_feature 1..978: note = Description of Artificial Sequence: Synthetic coding sequence
  source 1..978: mol_type = other DNA

SEQ ID NO: 11142 - DNA, 579 bp, synthetic construct
  misc_feature 1..579: note = Description of Artificial Sequence: Synthetic coding sequence
  source 1..579: mol_type = other DNA
atgcccatcaccagaatgagaatgagaccctggctggagatgcagatcaacagcaaccagatccccggcctgatctggatcaacaaggaggagatgatcttccagatcccctggaagcacgccgccaagcacggctgggacatcaacaaggacgcctgcctgttcagaagctgggccatccacaccggcagatacaaggccggcgagaaggagcccgaccccaagacctggaaggccaacttcagatgcgccatgaacagcctgcccgacatcgaggaggtgaaggaccagagcagaaacaagggcagcagcgccgtgagagtgtacagaatgctgccccccctgaccaagaaccagagaaaggagagaaagagcaagagcagcagagacgccaagagcaaggccaagagaaagagctgcggcgacagcagccccgacaccttcagcgacggcctgagcagcagcaccctgcccgacgaccacagcagctacaccgtgcccggctacatgcaggacctggaggtggagcaggccctgacccccgccctgagcccctgcgccgtgagcagcaccctgtag

SEQ ID NO: 11143 - DNA, 1356 bp, synthetic construct
  misc_feature 1..1356: note = Description of Artificial Sequence: Synthetic coding sequence
  source 1..1356: mol_type = other DNA
atgaacctggagggcggcggcagaggcggcgagttcggcatgagcgccgtgagctgcggcaacggcaagctgagacagtggctgatcgaccagatcgacagcggcaagtaccccggcctggtgtgggagaacgaggagaagagcatcttcagaatcccctggaagcacgccggcaagcaggactacaacagagaggaggacgccgccctgttcaaggcctgggccctgttcaagggcaagttcagagagggcatcgacaagcccgacccccccacctggaagaccagactgagatgcgccctgaacaagagcaacgacttcgaggagctggtggagagaagccagctggacatcagcgacccctacaaggtgtacagaatcgtgcccgagggcgccaagaagggcgccaagcagctgaccctggaggacccccagatgagcatgagccacccctacaccatgaccaccccctaccccagcctgcccgcccagcaggtgcacaactacatgatgccccccctggacagaagctggagagactacgtgcccgaccagccccaccccgagatcccctaccagtgccccatgaccttcggccccagaggccaccactggcagggccccgcctgcgagaacggctgccaggtgaccggcaccttctacgcctgcgccccccccgagagccaggcccccggcgtgcccaccgagcccagcatcagaagcgccgaggccctggccttcagcgactgcagactgcacatctgcctgtactacagagagatcctggtgaaggagctgaccaccagcagccccgagggctgcagaatcagccacggccacacctacgacgccagcaacctggaccaggtgctgttcccctaccccgaggacaacggccagagaaagaacatcgagaagctgctgagccacctggagagaggcgtggtgctgtggatggcccccgacggcctgtacgccaagagactgtgccagagcagaatctactgggacggccccctggccctgtgcaacgacagacccaacaagctggagagagaccagacctgcaagctgttcgacacccagcagttcctgagcgagctgcaggccttcgcccaccacggcagaagcctgcccagattccaggtgaccctgtgcttcggcgaggagttccccgacccccagagacagagaaagctgatcaccgcccacgtggagcccctgctggccagacagctgtactacttcgcccagcagaacagcggccacttcctgagaggctacgacctgcccgagcacatcagcaaccccgaggactaccacagaagcatcagacacagcagcatccaggagtag

SEQ ID NO: 11144 - DNA, 1443 bp, synthetic construct
  misc_feature 1..1443: note = Description of Artificial Sequence: Synthetic coding sequence
  source 1..1443: mol_type = other DNA
ctgggccccaccgccgccctgagcagcgagagcagagccagagccgcccaggccggcggcggccccagagccagagccagaaccagaggcatgaacctggagggcggcggcagaggcggcgagttcggcatgagcgccgtgagctgcggcaacggcaagctgagacagtggctgatcgaccagatcgacagcggcaagtaccccggcctggtgtgggagaacgaggagaagagcatcttcagaatcccctggaagcacgccggcaagcaggactacaacagagaggaggacgccgccctgttcaaggcctgggccctgttcaagggcaagttcagagagggcatcgacaagcccgacccccccacctggaagaccagactgagatgcgccctgaacaagagcaacgacttcgaggagctggtggagagaagccagctggacatcagcgacccctacaaggtgtacagaatcgtgcccgagggcgccaagaagggcgccaagcagctgaccctggaggacccccagatgagcatgagccacccctacaccatgaccaccccctaccccagcctgcccgcccaggtgcacaactacatgatgccccccctggacagaagctggagagactacgtgcccgaccagccccaccccgagatcccctaccagtgccccatgaccttcggccccagaggccaccactggcagggccccgcctgcgagaacggctgccaggtgaccggcaccttctacgcctgcgccccccccgagagccaggcccccggcgtgcccaccgagcccagcatcagaagcgccgaggccctggccttcagcgactgcagactgcacatctgcctgtactacagagagatcctggtgaaggagctgaccaccagcagccccgagggctgcagaatcagccacggccacacctacgacgccagcaacctggaccaggtgctgttcccctaccccgaggacaacggccagagaaagaacatcgagaagctgctgagccacctggagagaggcgtggtgctgtggatggcccccgacggcctgtacgccaagagactgtgccagagcagaatctactgggacggccccctggccctgtgcaacgacagacccaacaagctggagagagaccagacctgcaagctgttcgacacccagcagttcctgagcgagctgcaggccttcgcccaccacggcagaagcctgcccagattccaggtgaccctgtgcttcggcgaggagttccccgacccccagagacagagaaagctgatcaccgcccacgtggagcccctgctggccagacagctgtactacttcgcccagcagaacagcggccacttcctgagaggctacgacctgcccgagcacatcagcaaccccgaggactaccacagaagcatcagacacagcagcatccaggagtag

SEQ ID NO: 11145 - DNA, 1497 bp, synthetic construct
  misc_feature 1..1497: note = Description of Artificial Sequence: Synthetic coding sequence
  source 1..1497: mol_type = other DNA
atgaaccagagcatccccgtggcccccaccccccccagaagagtgagactgaagccctggctggtggcccaggtgaacagctgccagtaccccggcctgcagtgggtgaacggcgagaagaagctgttctgcatcccctggagacacgccaccagacacggccccagccaggacggcgacaacaccatcttcaaggcctgggccaaggagaccggcaagtacaccgagggcgtggacgaggccgaccccgccaagtggaaggccaacctgagatgcgccctgaacaagagcagagacttcagactgatctacgacggccccagagacatgcccccccagccctacaagatctacgaggtgtgcagcaacggccccgcccccaccgacagccagccccccgaggactacagcttcggcgccggcgaggaggaggaggaggaggaggagctgcagagaatgctgcccagcctgagcctgaccgaggacgtgaagtggccccccaccctgcagccccccaccctgagaccccccaccctgcagccccccaccctgcagccccccgtggtgctgggcccccccgcccccgaccccagccccctggcccccccccccggcaaccccgccggcttcagagagctgctgagcgaggtgctggagcccggccccctgcccgccagcctgccccccgccggcgagcagctgctgcccgacctgctgatcagcccccacatgctgcccctgaccgacctggagatcaagttccagtacagaggcagaccccccagagccctgaccatcagcaacccccacggctgcagactgttctacagccagctggaggccacccaggagcaggtggagctgttcggccccatcagcctggagcaggtgagattccccagccccgaggacatccccagcgacaagcagagattctacaccaaccagctgctggacgtgctggacagaggcctgatcctgcagctgcagggccaggacctgtacgccatcagactgtgccagtgcaaggtgttctggagcggcccctgcgccagcgcccacgacagctgccccaaccccatccagagagaggtgaagaccaagctgttcagcctggagcacttcctgaacgagctgatcctgttccagaagggccagaccaacacccccccccccttcgagatcttcttctgcttcggcgaggagtggcccgacagaaagcccagagagaagaagctgatcaccgtgcaggtggtgcccgtggccgccagactgctgctggagatgttcagcggcgagctgagctggagcgccgacagcatcagactgcagatcagcaaccccgacctgaaggacagaatggtggagcagttcaaggagctgcaccacatctggcagagccagcagagactgcagcccgtggcccaggccccccccggcgccggcctgggcgtgggccagggcccctggcccatgcaccccgccggcatgcagtag

SEQ ID NO: 11146 - DNA, 1545 bp, synthetic construct
  misc_feature 1..1545: note = Description of Artificial Sequence: Synthetic coding sequence
  source 1..1545: mol_type = other DNA
atgaaccagagcatccccgtggcccccaccccccccagaagagtgagactgaagccctggctggtggcccaggtgaacagctgccagtaccccggcctgcagtgggtgaacggcgagaagaagctgttctgcatcccctggagacacgccaccagacacggccccagccaggacggcgacaacaccatcttcaaggcctgggccaaggagaccggcaagtacaccgagggcgtggacgaggccgaccccgccaagtggaaggccaacctgagatgcgccctgaacaagagcagagacttcagactgatctacgacggccccagagacatgcccccccagccctacaagatctacgaggtgtgcagcaacggccccgcccccaccgacagccagccccccgaggactacagcttcggcgccggcgaggaggaggaggaggaggaggagctgcagagaatgctgcccagcctgagcctgaccgacgccgtgcagagcggcccccacatgaccccctacagcctgctgaaggaggacgtgaagtggccccccaccctgcagccccccaccctgagaccccccaccctgcagccccccaccctgcagccccccgtggtgctgggcccccccgcccccgaccccagccccctggcccccccccccggcaaccccgccggcttcagagagctgctgagcgaggtgctggagcccggccccctgcccgccagcctgccccccgccggcgagcagctgctgcccgacctgctgatcagcccccacatgctgcccctgaccgacctggagatcaagttccagtacagaggcagaccccccagagccctgaccatcagcaacccccacggctgcagactgttctacagccagctggaggccacccaggagcaggtggagctgttcggccccatcagcctggagcaggtgagattccccagccccgaggacatccccagcgacaagcagagattctacaccaaccagctgctggacgtgctggacagaggcctgatcctgcagctgcagggccaggacctgtacgccatcagactgtgccagtgcaaggtgttctggagcggcccctgcgccagcgcccacgacagctgccccaaccccatccagagagaggtgaagaccaagctgttcagcctggagcacttcctgaacgagctgatcctgttccagaagggccagaccaacacccccccccccttcgagatcttcttctgcttcggcgaggagtggcccgacagaaagcccagagagaagaagctgatcaccgtgcaggtggtgcccgtggccgccagactgctgctggagatgttcagcggcgagctgagctggagcgccgacagcatcagactgcagatcagcaaccccgacctgaaggacagaatggtggagcagttcaaggagctgcaccacatctggcagagccagcagagactgcagcccgtggcccaggccccccccggcgccggcctgggcgtgggccagggcccctggcccatgcaccccgccggcatgcagtag

SEQ ID NO: 11147 - DNA, 1497 bp, synthetic construct; identical to SEQ ID NO: 11145
  misc_feature 1..1497: note = Description of Artificial Sequence: Synthetic coding sequence
  source 1..1497: mol_type = other DNA

SEQ ID NO: 11148 - DNA, 1467 bp, synthetic construct
  misc_feature 1..1467: note = Description of Artificial Sequence: Synthetic coding sequence
  source 1..1467: mol_type = other DNA
atgaaccagagcatccccgtggcccccaccccccccagaagagtgagactgaagccctggctggtggcccaggtgaacagctgccagtaccccggcctgcagtgggtgaacggcgagaagaagctgttctgcatcccctggagacacgccaccagacacggccccagccaggacggcgacaacaccatcttcaaggcctgggccaaggagaccggcaagtacaccgagggcgtggacgaggccgaccccgccaagtggaaggccaacctgagatgcgccctgaacaagagcagagacttcagactgatctacgacggccccagagacatgcccccccagccctacaagatctacgaggtgtgcagcaacggccccgcccccaccgacagccagccccccgaggactacagcttcggcgccggcgaggaggaggaggaggaggaggagctgcagagaatgctgcccagcctgagcctgaccgaggacgtgaagtggccccccaccctgcagccccccaccctgcagccccccgtggtgctgggcccccccgcccccgaccccagccccctggcccccccccccggcaaccccgccggcttcagagagctgctgagcgaggtgctggagcccggccccctgcccgccagcctgccccccgccggcgagcagctgctgcccgacctgctgatcagcccccacatgctgcccctgaccgacctggagatcaagttccagtacagaggcagaccccccagagccctgaccatcagcaacccccacggctgcagactgttctacagccagctggaggccacccaggagcaggtggagctgttcggccccatcagcctggagcaggtgagattccccagccccgaggacatccccagcgacaagcagagattctacaccaaccagctgctggacgtgctggacagaggcctgatcctgcagctgcagggccaggacctgtacgccatcagactgtgccagtgcaaggtgttctggagcggcccctgcgccagcgcccacgacagctgccccaaccccatccagagagaggtgaagaccaagctgttcagcctggagcacttcctgaacgagctgatcctgttccagaagggccagaccaacacccccccccccttcgagatcttcttctgcttcggcgaggagtggcccgacagaaagcccagagagaagaagctgatcaccgtgcaggtggtgcccgtggccgccagactgctgctggagatgttcagcggcgagctgagctggagcgccgacagcatcagactgcagatcagcaaccccgacctgaaggacagaatggtggagcagttcaaggagctgcaccacatctggcagagccagcagagactgcagcccgtggcccaggccccccccggcgccggcctgggcgtgggccagggcccctggcccatgcaccccgccggcatgcagtag

SEQ ID NO: 11149 - DNA, 684 bp, synthetic construct
  misc_feature 1..684: note = Description of Artificial Sequence: Synthetic coding sequence
  source 1..684: mol_type = other DNA
atgaaccagagcatccccgtggcccccaccccccccagaagagtgagactgaagccctggctggtggcccaggtgaacagctgccagtaccccggcctgcagtgggtgaacggcgagaagaagctgttctgcatcccctggagacacgccaccagacacggccccagccaggacggcgacaacaccatcttcaaggcctgggccaaggagaccggcaagtacaccgagggcgtggacgaggccgaccccgccaagtggaaggccaacctgagatgcgccctgaacaagagcagagacttcagactgatctacgacggccccagagacatgcccccccagccctacaagatctacgaggtgtgcagcaacggccccgcccccaccgacagccagccccccgaggactacagcttcggcgccggcgaggaggaggaggaggaggaggagagaatgagcagcggcagacccctgtgcagcagacccctgtgcggcagactgctgtgcagcagacccctgtgcagcagaccctggtgctgggtgcccctgctgcagacccccgccccctggctgctgcccctggccaccctgctggccagcggcagcttcagcctgagaagctggagcctgggcccctgcctgcccgcctgccccctgcaggccaacagcagctgccagacctgctag

SEQ ID NO: 11150 - DNA, 474 bp, synthetic construct
  misc_feature 1..474: note = Description of Artificial Sequence: Synthetic coding sequence
  source 1..474: mol_type = other DNA
atgaaccagagcatccccgtggcccccaccccccccagaagagtgagactgaagccctggctggtggcccaggtgaacagctgccagtaccccggcctgcagtgggtgaacggcgagaagaagctgttctgcatcccctggagacacgccaccagacacggccccagccaggacggcgacaacaccatcttcaaggcctgggccaaggagaccggcaagtacaccgagggcgtggacgaggccgaccccgccaagtggaaggccaacctgagatgcgccctgaacaagagcagagacttcagactgatctacgacggccccagagacatgcccccccagccctacaagatctacgaggtgtgcagcaacggccccgcccccaccgacagccagccccccgaggactacagcttcggcgccggcgaggaggaggaggaggaggaggagatgcagtgcagcctggcccccacctag

SEQ ID NO: 11151 - DNA, 321 bp, synthetic construct
  misc_feature 1..321: note = Description of Artificial Sequence: Synthetic coding sequence
  source 1..321: mol_type = other DNA
atgaaccagagcatccccgtggcccccaccccccccagaagagtgagactgaagccctggctggtggcccaggtgaacagctgccagtaccccggcctgcagtgggtgaacggcgagaagaagctgttctgcatcccctggagacacgccaccagacacggccccagccaggacggcgacaacaccatcttcaaggcctgggccaaggagaccggcaagtacaccgagggcgtggacgaggccgaccccgccaagtggaaggccaacctgagatgcgccctgaacaagagcagagacttcagactgatctacgacggctag

SEQ ID NO: 11152 - DNA, 180 bp, synthetic construct
  misc_feature 1..180: note = Description of Artificial Sequence: Synthetic coding sequence
  source 1..180: mol_type = other DNA
atgaaccagagcatccccgtggcccccaccccccccagaagagtgagactgaagccctggctggtggcccaggtgaacagctgccagtaccccggcctgcagtgggtgaacggcgagaagaagctgttctgcatcccctggagacacgccaccagacacggccccagccaggacggctag

SEQ ID NO: 11153 - DNA, 1497 bp, synthetic construct; identical to SEQ ID NO: 11145
  misc_feature 1..1497: note = Description of Artificial Sequence: Synthetic coding sequence
  source 1..1497: mol_type = other DNA

SEQ ID NO: 11154 - DNA, 426 bp, synthetic construct
  misc_feature 1..426: note = Description of Artificial Sequence: Synthetic coding sequence
  source 1..426: mol_type = other DNA
atgaaccagagcatccccgtggcccccaccccccccagaagagtgagactgaagccctggctggtggcccaggtgaacagctgccagtaccccggcctgcagtgggtgaacggcgagaagaagctgttctgcatcccctggagacacgccaccagacacggccccagccaggacggcgacaacaccatcttcaaggcctgggccaaggagaccggcaagtacaccgagggcgtggacgaggccgaccccgccaagtggaaggccaacctgagatgcgccctgaacaagagcagagacttcagactgatctacgacggccccagagacatgcccccccagccctacaagatctacgaggtgtgcagcaacggccccgcccccaccgacagccagccccccgaggactacagcttcggcgccggctag

SEQ ID NO: 11155 - DNA, 459 bp, synthetic construct
  misc_feature 1..459: note = Description of Artificial Sequence: Synthetic coding sequence
  source 1..459: mol_type = other DNA
atgaaccagagcatccccgtggcccccaccccccccagaagagtgagactgaagccctggctggtggcccaggtgaacagctgccagtaccccggcctgcagtgggtgaacggcgagaagaagctgttctgcatcccctggagacacgccaccagacacggccccagccaggacggcgacaacaccatcttcaaggcctgggccaaggagaccggcaagtacaccgagggcgtggacgaggccgaccccgccaagtggaaggccaacctgagatgcgccctgaacaagagcagagacttcagactgatctacgacggccccagagacatgcccccccagccctacaagatctacgaggtgtgcagcaacggccccgcccccaccgacagccagccccccgaggactacagcttcggcgccggcgaggaggaggaggaggaggaggaggtgagcgtgtag

SEQ ID NO: 11156 - DNA, 1239 bp, synthetic construct
  misc_feature 1..1239: note = Description of Artificial Sequence: Synthetic coding sequence
  source 1..1239: mol_type = other DNA
atgaaccagagcatccccgtggcccccaccccccccagaagagtgagactgaagccctggctggtggcccaggtgaacagctgccagtaccccggcctgcagtgggtgaacggcgagaagaagctgttctgcatcccctggagacacgccaccagacacggccccagccaggacggcgacaacaccatcttcaaggcctgggccaaggagaccggcaagtacaccgagggcgtggacgaggccgaccccgccaagtggaaggccaacctgagatgcgccctgaacaagagcagagacttcagactgatctacgacggccccagagacatgcccccccagccctacaagatctacgaggtgtgcagcaacggccccgcccccaccgacagccagccccccgaggactacagcttcggcgccggcgaggaggaggaggaggaggaggagctgcagagaatgctgcccagcctgagcctgaccgtgaccgacctggagatcaagttccagtacagaggcagaccccccagagccctgaccatcagcaacccccacggctgcagactgttctacagccagctggaggccacccaggagcaggtggagctgttcggccccatcagcctggagcaggtgagattccccagccccgaggacatccccagcgacaagcagagattctacaccaaccagctgctggacgtgctggacagaggcctgatcctgcagctgcagggccaggacctgtacgccatcagactgtgccagtgcaaggtgttctggagcggcccctgcgccagcgcccacgacagctgccccaaccccatccagagagaggtgaagaccaagctgttcagcctggagcacttcctgaacgagctgatcctgttccagaagggccagaccaacacccccccccccttcgagatcttcttctgcttcggcgaggagtggcccgacagaaagcccagagagaagaagctgatcaccgtgcaggtggtgcccgtggccgccagactgctgctggagatgttcagcggcgagctgagctggagcgccgacagcatcagactgcagatcagcaaccccgacctgaaggacagaatggtggagcagttcaaggagctgcaccacatctggcagagccagcagagactgcagcccgtggcccaggccccccccggcgccggcctgggcgtgggccagggcccctggcccatgcaccccgccggcatgcagtag

SEQ ID NO: 11157 - DNA, 570 bp, synthetic construct
  misc_feature 1..570: note = Description of Artificial Sequence: Synthetic coding sequence
  source 1..570: mol_type = other DNA
atggccagccccttcgccctgctgatggtgctggtggtgctgagctgcaagagcagctgcagcctgggctgcgacctgcccgagacccacagcctggacaacagaagaaccctgatgctgctggcccagatgagcagaatcagccccagcagctgcctgatggacagacacgacttcggcttcccccaggaggagttcgacggcaaccagttccagaaggcccccgccatcagcgtgctgcacgagctgatccagcagatcttcaacctgttcaccaccaaggacagcagcgccgcctgggacgaggacctgctggacaagttctgcaccgagctgtaccagcagctgaacgacctggaggcctgcgtgatgcaggaggagagagtgggcgagacccccctgatgaacgccgacagcatcctggccgtgaagaagtacttcagaagaatcaccctgtacctgaccgagaagaagtacagcccctgcgcctgggaggtggtgagagccgagatcatgagaagcctgagcctgagcaccaacctgcaggagagactgagaagaaaggagtag

SEQ ID NO: 11158 - DNA, 516 bp, synthetic construct
  misc_feature 1..516: note = Description of Artificial Sequence: Synthetic coding sequence
  source 1..516: mol_type = other DNA
atgctggtgaacttcatcctgagatgcggcctgctgctggtgaccctgagcctggccatcgccaagcacaagcagagcagcttcaccaagagctgctaccccagaggcaccctgagccaggccgtggacgccctgtacatcaaggccgcctggctgaaggccaccatccccgaggacagaatcaagaacatcagactgctgaagaagaagaccaagaagcagttcatgaagaactgccagttccaggagcagctgctgagcttcttcatggaggacgtgttcggccagctgcagctgcagggctgcaagaagatcagattcgtggaggacttccacagcctgagacagaagctgagccactgcatcagctgcgccagcagcgccagagagatgaagagcatcaccagaatgaagagaatcttctacagaatcggcaacaagggcatctacaaggccatcagcgagctggacatcctgctgagctggatcaagaagctgctggagagcagccagtag

SEQ ID NO: 11159 - DNA, 543 bp, synthetic construct
  misc_feature 1..543: note = Description of Artificial Sequence: Synthetic coding sequence
  source 1..543: mol_type = other DNA
atggccctggccgacctgtacgaggagggcggcggcggcggcggcgagggcgaggacaacgccgacagcaaggagaccatctgcagacccagcggcagaaagagcagcaagatgcaggccttcagaatctgggacgtgaaccagaagaccttctacctgagaaacaaccagctggtggccggctacctgcagggccccaacgtgaacctggaggagaagatcgacgtggtgcccatcgagccccacgccctgttcctgggcatccacggcggcaagatgtgcctgagctgcgtgaagagcggcgacgagaccagactgcagctggaggccgtgaacatcaccgacctgagcgagaacagaaagcaggacaagagattcgccttcatcagaagcgacagcggccccaccaccagcttcgagagcgccgcctgccccggctggttcctgtgcaccgccatggaggccgaccagcccgtgagcctgaccaacatgcccgacgagggcgtgatggtgaccaagttctacttccaggaggacgagtag

SEQ ID NO: 11160 - DNA, 480 bp, synthetic construct
  misc_feature 1..480: note = Description of Artificial Sequence: Synthetic coding sequence
  source 1..480: mol_type = other DNA
atggccctggagaccatctgcagacccagcggcagaaagagcagcaagatgcaggccttcagaatctgggacgtgaaccagaagaccttctacctgagaaacaaccagctggtggccggctacctgcagggccccaacgtgaacctggaggagaagatcgacgtggtgcccatcgagccccacgccctgttcctgggcatccacggcggcaagatgtgcctgagctgcgtgaagagcggcgacgagaccagactgcagctggaggccgtgaacatcaccgacctgagcgagaacagaaagcaggacaagagattcgccttcatcagaagcgacagcggccccaccaccagcttcgagagcgccgcctgccccggctggttcctgtgcaccgccatggaggccgaccagcccgtgagcctgaccaacatgcccgacgagggcgtgatggtgaccaagttctacttccaggaggacgagtag

SEQ ID NO: 11161 - DNA, 534 bp, synthetic construct
  misc_feature 1..534: note = Description of Artificial Sequence: Synthetic coding sequence
  source 1..534: mol_type = other DNA
atggagatctgcagaggcctgagaagccacctgatcaccctgctgctgttcctgttccacagcgagaccatctgcagacccagcggcagaaagagcagcaagatgcaggccttcagaatctgggacgtgaaccagaagaccttctacctgagaaacaaccagctggtggccggctacctgcagggccccaacgtgaacctggaggagaagatcgacgtggtgcccatcgagccccacgccctgttcctgggcatccacggcggcaagatgtgcctgagctgcgtgaagagcggcgacgagaccagactgcagctggaggccgtgaacatcaccgacctgagcgagaacagaaagcaggacaagagattcgccttcatcagaagcgacagcggccccaccaccagcttcgagagcgccgcctgccccggctggttcctgtgcaccgccatggaggccgaccagcccgtgagcctgaccaacatgcccgacgagggcgtgatggtgaccaagttctacttccaggaggacgagtag

SEQ ID NO: 11162 - DNA, 432 bp, synthetic construct
  misc_feature 1..432: note = Description of Artificial Sequence: Synthetic coding sequence
  source 1..432: mol_type = other DNA
atgcaggccttcagaatctgggacgtgaaccagaagaccttctacctgagaaacaaccagctggtggccggctacctgcagggccccaacgtgaacctggaggagaagatcgacgtggtgcccatcgagccccacgccctgttcctgggcatccacggcggcaagatgtgcctgagctgcgtgaagagcggcgacgagaccagactgcagctggaggccgtgaacatcaccgacctgagcgagaacagaaagcaggacaagagattcgccttcatcagaagcgacagcggccccaccaccagcttcgagagcgccgcctgccccggctggttcctgtgcaccgccatggaggccgaccagcccgtgagcctgaccaacatgcccgacgagggcgtgatggtgaccaagttctacttccaggaggacgagtag

SEQ ID NO: 11163 - DNA, 1470 bp, synthetic construct
  misc_feature 1..1470: note = Description of Artificial Sequence: Synthetic coding sequence
  source 1..1470: mol_type = other DNA
atggagcccggcctggagcacgccctgagaagaacccccagctggagcagcctgggcggcagcgagcaccaggagatgagcttcctggagcaggagaacagcagcagctggcccagccccgccgtgaccagcagcagcgagagaatcagaggcaagagaagagccaaggccctgagatggaccagacagaagagcgtggaggagggcgagccccccggccagggcgagggccccagaagcagacccgccgccgagagcaccggcctggaggccaccttccccaagaccacccccctggcccaggccgaccccgccggcgtgggcaccccccccaccggctgggactgcctgcccagcgactgcaccgccagcgccgccggcagcagcaccgacgacgtggagctggccaccgagttccccgccaccgaggcctgggagtgcgagctggagggcctgctggaggagagacccgccctgtgcctgagcccccaggcccccttccccaagctgggctgggacgacgagctgagaaagcccggcgcccagatctacatgagattcatgcaggagcacacctgctacgacgccatggccaccagcagcaagctggtgatcttcgacaccatgctggagatcaagaaggccttcttcgccctggtggccaacggcgtgagagccgcccccctgtgggacagcaagaagcagagcttcgtgggcatgctgaccatcaccgacttcatcctggtgctgcacagatactacagaagccccctggtgcagatctacgagatcgagcagcacaagatcgagacctggagagagatctacctgcagggctgcttcaagcccctggtgagcatcagccccaacgacagcctgttcgaggccgtgtacaccctgatcaagaacagaatccacagactgcccgtgctggaccccgtgagcggcaacgtgctgcacatcctgacccacaagagactgctgaagttcctgcacatcttcggcagcctgctgcccagacccagcttcctgtacagaaccatccaggacctgggcatcggcaccttcagagacctggccgtggtgctggagaccgcccccatcctgaccgccctggacatcttcgtggacagaagagtgagcgccctgcccgtggtgaacgagtgcggccaggtggtgggcctgtacagcagattcgacgtgatccacctggccgcccagcagacctacaaccacctggacatgagcgtgggcgaggccctgagacagagaaccctgtgcctggagggcgtgctgagctgccagccccacgagagcctgggcgaggtgatcgacagaatcgccagagagcaggtgcacagactggtgctggtggacgagacccagcacctgctgggcgtggtgagcctgagcgacatcctgcaggccctggtgctgagccccgccggcatcgacgccctgggcgcctag

SEQ ID NO: 11164 - DNA, 1710 bp, synthetic construct
  misc_feature 1..1710: note = Description of Artificial Sequence: Synthetic coding sequence
  source 1..1710: mol_type = other DNA
atgaaggtgctgctgagactgatctgcttcatcgccctgctgatcagcagcctggaggccgacaagtgcaaggagagagaggagaagatcatcctggtgagcagcgccaacgagatcgacgtgagaccctgccccctgaaccccaacgagcacaagggcaccatcacctggtacaaggacgacagcaagacccccgtgagcaccgagcaggccagcagaatccaccagcacaaggagaagctgtggttcgtgcccgccaaggtggaggacagcggccactactactgcgtggtgagaaacagcagctactgcctgagaatcaagatcagcgccaagttcgtggagaacgagcccaacctgtgctacaacgcccaggccatcttcaagcagaagctgcccgtggccggcgacggcggcctggtgtgcccctacatggagttcttcaagaacgagaacaacgagctgcccaagctgcagtggtacaaggactgcaagcccctgctgctggacaacatccacttcagcggcgtgaaggacagactgatcgtgatgaacgtggccgagaagcacagaggcaactacacctgccacgccagctacacctacctgggcaagcagtaccccatcaccagagtgatcgagttcatcaccctggaggagaacaagcccaccagacccgtgatcgtgagccccgccaacgagaccatggaggtggacctgggcagccagatccagctgatctgcaacgtgaccggccagctgagcgacatcgcctactggaagtggaacggcagcgtgatcgacgaggacgaccccgtgctgggcgaggactactacagcgtggagaaccccgccaacaagagaagaagcaccctgatcaccgtgctgaacatcagcgagatcgagagcagattctacaagcaccccttcacctgcttcgccaagaacacccacggcatcgacgccgcctacatccagctgatctaccccgtgaccaacttccagaagcacatgatcggcatctgcgtgaccctgaccgtgatcatcgtgtgcagcgtgttcatctacaagatcttcaagatcgacatcgtgctgtggtacagagacagctgctacgacttcctgcccatcaaggccagcgacggcaagacctacgacgcctacatcctgtaccccaagaccgtgggcgagggcagcaccagcgactgcgacatcttcgtgttcaaggtgctgcccgaggtgctggagaagcagtgcggctacaagctgttcatctacggcagagacgactacgtgggcgaggacatcgtggaggtgatcaacgagaacgtgaagaagagcagaagactgatcatcatcctggtgagagagaccagcggcttcagctggctgggcggcagcagcgaggagcagatcgccatgtacaacgccctggtgcaggacggcatcaaggtggtgctgctggagctggagaagatccaggactacgagaagatgcccgagagcatcaagttcatcaagcagaagcacggcgccatcagatggagcggcgacttcacccagggcccccagagcgccaagaccagattctggaagaacgtgagataccacatgcccgtgcagagaagaagccccagcagcaagcaccagctgctgagccccgccaccaaggagaagctgcagagagaggcccacgtgcccctgggctag

SEQ ID NO: 11165 - DNA, 549 bp, synthetic construct
  misc_feature 1..549: note = Description of Artificial Sequence: Synthetic coding sequence
  source 1..549: mol_type = other DNA
atgaaggtgctgctgagactgatctgcttcatcgccctgctgatcagcagcctggaggccgacaagtgcaaggagagagaggagaagatcatcctggtgagcagcgccaacgagatcgacgtgagaccctgccccctgaaccccaacgagcacaagggcaccatcacctggtacaaggacgacagcaagacccccgtgagcaccgagcaggccagcagaatccaccagcacaaggagaagctgtggttcgtgcccgccaaggtggaggacagcggccactactactgcgtggtgagaaacagcagctactgcctgagaatcaagatcagcgccaagttcgtggagaacgagcccaacctgtgctacaacgcccaggccatcttcaagcagaagctgcccgtggccggcgacggcggcctggtgtgcccctacatggagttcttcaagaacgagaacaacgagctgcccaagctgcagtggtacaaggactgcaagcccctgctgctggacaacatccacttcagcggcgtgaaggacagactgatctag

SEQ ID NO: 11166 - DNA, 345 bp, synthetic construct
  misc_feature 1..345: note = Description of Artificial Sequence: Synthetic coding sequence
  source 1..345: mol_type = other DNA
atgaaggtgctgctgagactgatctgcttcatcgccctgctgatcagcagcctggaggccgacaagtgcaaggagagagaggagaagatcatcctggtgagcagcgccaacgagatcgacgtgagaccctgccccctgaaccccaacgagcacaagggcaccatcacctggtacaaggacgacagcaagacccccgtgagcaccgagcaggccagcagaatccaccagcacaaggagaagctgtggttcgtgcccgccaaggtggaggacagcggccactactactgcgtggtgagaaacagcagctactgcctgagaatcaagatcagcgccaagttcgtgtag

SEQ ID NO: 11167 - DNA, 321 bp, synthetic construct
  misc_feature 1..321: note = Description of Artificial Sequence: Synthetic coding sequence
  source 1..321: mol_type = other DNA
atgaaggtgctgctgagactgatctgcttcatcgccctgctgatcagcagcctggaggccgacaagtgcaaggagagagaggagaagatcatcctggtgagcagcgccaacgagatcgacgtgagaccctgccccctgaaccccaacgagcacaagggcaccatcacctggtacaaggacgacagcaagacccccgtgagcaccgagcaggccagcagaatccaccagcacaaggagaagctgtggttcgtgcccgccaaggtggaggacagcggccactactactgcgtggtgagaaacagcagctactgcctgagatag

SEQ ID NO: 11168 - DNA, 243 bp, synthetic construct
  misc_feature 1..243: note = Description of Artificial Sequence: Synthetic coding sequence
  source 1..243: mol_type = other DNA
atgaaggtgctgctgagactgatctgcttcatcgccctgctgatcagcagcctggaggccgacaagtgcaaggagagagaggagaagatcatcctggtgagcagcgccaacgagatcgacgtgagaccctgccccctgaaccccaacgagcacaagggcaccatcacctggtacaaggacgacagcaagacccccgtgagcaccgagcaggccagcagaatccaccagcacaaggagaagtag

SEQ ID NO: 11169 - DNA, 810 bp, synthetic construct
  misc_feature 1..810: note = Description of Artificial Sequence: Synthetic coding sequence
  source 1..810: mol_type = other DNA
atggccgaggtgcccgagctggccagcgagatgatggcctactacagcggcaacgaggacgacctgttcttcgaggccgacggccccaagcagatgaagtgcagcttccaggacctggacctgtgccccctggacggcggcatccagctgagaatcagcgaccaccactacagcaagggcttcagacaggccgccagcgtggtggtggccatggacaagctgagaaagatgctggtgccctgcccccagaccttccaggagaacgacctgagcaccttcttccccttcatcttcgaggaggagcccatcttcttcgacacctgggacaacgaggcctacgtgcacgacgcccccgtgagaagcctgaactgcaccctgagagacagccagcagaagagcctggtgatgagcggcccctacgagctgaaggccctgcacctgcagggccaggacatggagcagcaggtggtgttcagcatgagcttcgtgcagggcgaggagagcaacgacaagatccccgtggccctgggcctgaaggagaagaacctgtacctgagctgcgtgctgaaggacgacaagcccaccctgcagctggagagcgtggaccccaagaactaccccaagaagaagatggagaagagattcgtgttcaacaagatcgagatcaacaacaagctggagttcgagagcgcccagttccccaactggtacatcagcaccagccaggccgagaacatgcccgtgttcctgggcggcaccaagggcggccaggacatcaccgacttcaccatgcagttcgtgagcagctag

SEQ ID NO: 11170 - DNA, 336 bp, synthetic construct
  misc_feature 1..336: note = Description of Artificial Sequence: Synthetic coding sequence
  source 1..336: mol_type = other DNA
atggccgaggtgcccgagctggccagcgagatgatggcctactacagcggcaacgaggacgacctgttcttcgaggccgacggccccaagcagatgaagtgcagcttccaggacctggacctgtgccccctggacggcggcatccagctgagaatcagcgaccaccactacagcaagggcttcagacaggccgccagcgtggtggtggccatggacaagctgagaaagatgctggtgccctgcccccagaccttccaggagaacgacctgagcaccttcttccccttcatcttcgaggaggagcccatcttcttcgacacctgggacaacgagtag

SEQ ID NO: 11171 - DNA, 432 bp, synthetic construct
  misc_feature 1..432: note = Description of Artificial Sequence: Synthetic coding sequence
  source 1..432: mol_type = other DNA
atggccgaggtgcccgagctggccagcgagatgatggcctactacagcggcaacgaggacgacctgttcttcgaggccgacggccccaagcagatgaagtgcagcttccaggacctggacctgtgccccctggacggcggcatccagctgagaatcagcgaccaccactacagcaagggcttcagacaggccgccagcgtggtggtggccatggacaagctgagaaagatgctggtgccctgcccccagaccttccaggagaacgacctgagcaccttcttccccttcatcttcgaggaggagcccatcttcttcgacacctgggacaacgaggcctacgtgcacgacgcccccgtgagaagcctgaactgcaccctgagagacagccagcagaagagcctggtgatgagcggcccctacgagctgaagtag

SEQ ID NO: 11172 - DNA, 378 bp, synthetic construct
  misc_feature 1..378: note = Description of Artificial Sequence: Synthetic coding sequence
  source 1..378: mol_type = other DNA
atggccgaggtgcccgagctggccagcgagatgatggcctactacagcggcaacgaggacgacctgttcttcgaggccgacggccccaagcagatgaagtgcagcttccaggacctggacctgtgccccctggacggcggcatccagctgagaatcagcgaccaccactacagcaagggcttcagacaggccgccagcgtggtggtggccatggacaagctgagaaagatgctggtgccctgcccccagaccttccaggagaacgacctgagcaccttcttccccttcatcttcgaggaggagcccatcttcttcgacacctgggacaacgaggcctacgtgcacgacgcccccgtgagaagcctgaactgcacctag

SEQ ID NO: 11173 - DNA, 762 bp, synthetic construct
  misc_feature 1..762: note = Description of Artificial Sequence: Synthetic coding sequence
  source 1..762: mol_type = other DNA
atgtggccccccggcagcgccagccagcccccccccagccccgccgccgccaccggcctgcaccccgccgccagacccgtgagcctgcagtgcagactgagcatgtgccccgccagaagcctgctgctggtggccaccctggtgctgctggaccacctgagcctggccagaaacctgcccgtggccacccccgaccccggcatgttcccctgcctgcaccacagccagaacctgctgagagccgtgagcaacatgctgcagaaggccagacagaccctggagttctacccctgcaccagcgaggagatcgaccacgaggacatcaccaaggacaagaccagcaccgtggaggcctgcctgcccctggagctgaccaagaacgagagctgcctgaacagcagagagaccagcttcatcaccaacggcagctgcctggccagcagaaagaccagcttcatgatggccctgtgcctgagcagcatctacgaggacctgaagatgtaccaggtggagttcaagaccatgaacgccaagctgctgatggaccccaagagacagatcttcctggaccagaacatgctggccgtgatcgacgagctgatgcaggccctgaacttcaacagcgagaccgtgccccagaagagcagcctggaggagcccgacttctacaagaccaagatcaagctgtgcatcctgctgcacgccttcagaatcagagccgtgaccatcgacagagtgatgagctacctgaacgccagctag

SEQ ID NO: 11174 - DNA, 720 bp, synthetic construct
  misc_feature 1..720: note = Description of Artificial Sequence: Synthetic coding sequence
  source 1..720: mol_type = other DNA
atgtggccccccggcagcgccagccagcccccccccagccccgccgccgccaccggcctgcaccccgccgccagacccgtgagcctgcagtgcagactgagcatgtgccccgccagaagcctgctgctggtggccaccctggtgctgctggaccacctgagcctggccagaaacctgcccgtggccacccccgaccccggcatgttcccctgcctgcaccacagccagaacctgctgagagccgtgagcaacatgctgcagaaggccagacagaccctggagttctacccctgcaccagcgaggagatcgaccacgaggacatcaccaaggacaagaccagcaccgtggaggcctgcctgcccctggagctgaccaagaacggcagctgcctggccagcagaaagaccagcttcatgatggccctgtgcctgagcagcatctacgaggacctgaagatgtaccaggtggagttcaagaccatgaacgccaagctgctgatggaccccaagagacagatcttcctggaccagaacatgctggccgtgatcgacgagctgatgcaggccctgaacttcaacagcgagaccgtgccccagaagagcagcctggaggagcccgacttctacaagaccaagatcaagctgtgcatcctgctgcacgccttcagaatcagagccgtgaccatcgacagagtgatgagctacctgaacgccagctag

SEQ ID NO: 11175 - DNA, 648 bp, synthetic construct
  misc_feature 1..648: note = Description of Artificial Sequence: Synthetic coding sequence
  source 1..648: mol_type = other DNA
atgtggccccccggcagcgccagccagcccccccccagccccgccgccgccaccggcctgcaccccgccgccagacccgtgagcctgcagtgcagactgagcatgtgccccgccagaagcctgctgctggtggccaccctggtgctgctggaccacctgagcctggccagaaacctgcccgtggccacccccgaccccggcatgttcccctgcctgcaccacagccagaacctgctgagagccgtgagcaacatgctgcagaagaacgagagctgcctgaacagcagagagaccagcttcatcaccaacggcagctgcctggccagcagaaagaccagcttcatgatggccctgtgcctgagcagcatctacgaggacctgaagatgtaccaggtggagttcaagaccatgaacgccaagctgctgatggaccccaagagacagatcttcctggaccagaacatgctggccgtgatcgacgagctgatgcaggccctgaacttcaacagcgagaccgtgccccagaagagcagcctggaggagcccgacttctacaagaccaagatcaagctgtgcatcctgctgcacgccttcagaatcagagccgtgaccatcgacagagtgatgagctacctgaacgccagctag

SEQ ID NO: 11176 - DNA, 489 bp, synthetic construct
  misc_feature 1..489: note = Description of Artificial Sequence: Synthetic coding sequence
  source 1..489: mol_type = other DNA
atgagaatcagcaagccccacctgagaagcatcagcatccagtgctacctgtgcctgctgctgaacagccacttcctgaccgaggccggcatccacgtgttcatcctgggctgcttcagcgccggcctgcccaagaccgaggccaactgggtgaacgtgatcagcgacctgaagaagatcgaggacctgatccagagcatgcacatcgacgccaccctgtacaccgagagcgacgtgcaccccagctgcaaggtgaccgccatgaagtgcttcctgctggagctgcaggtgatcagcctggagagcggcgacgccagcatccacgacaccgtggagaacctgatcatcctggccaacaacagcctgagcagcaacggcaacgtgaccgagagcggctgcaaggagtgcgaggagctggaggagaagaacatcaaggagttcctgcagagcttcgtgcacatcgtgcagatgttcatcaacaccagctag

SEQ ID NO: 11177 - DNA, 489 bp, synthetic construct; identical to SEQ ID NO: 11176
  misc_feature 1..489: note = Description of Artificial Sequence: Synthetic coding sequence
  source 1..489: mol_type = other DNA

SEQ ID NO: 11178 - DNA, 408 bp, synthetic construct
  misc_feature 1..408: note = Description of Artificial Sequence: Synthetic coding sequence
  source 1..408: mol_type = other DNA
atggtgctgggcaccatcgacctgtgcagctgcttcagcgccggcctgcccaagaccgaggccaactgggtgaacgtgatcagcgacctgaagaagatcgaggacctgatccagagcatgcacatcgacgccaccctgtacaccgagagcgacgtgcaccccagctgcaaggtgaccgccatgaagtgcttcctgctggagctgcaggtgatcagcctggagagcggcgacgccagcatccacgacaccgtggagaacctgatcatcctggccaacaacagcctgagcagcaacggcaacgtgaccgagagcggctgcaaggagtgcgaggagctggaggagaagaacatcaaggagttcctgcagagcttcgtgcacatcgtgcagatgttcatcaacaccagctag

SEQ ID NO: 11179 - DNA, 408 bp, synthetic construct; identical to SEQ ID NO: 11178
  misc_feature 1..408: note = Description of Artificial Sequence: Synthetic coding sequence
  source 1..408: mol_type = other DNA

SEQ ID NO: 11180 - DNA, 408 bp, synthetic construct; identical to SEQ ID NO: 11178
  misc_feature 1..408: note = Description of Artificial Sequence: Synthetic coding sequence
  source 1..408: mol_type = other DNA

SEQ ID NO: 11181 - DNA, 489 bp, synthetic construct; identical to SEQ ID NO: 11176
  misc_feature 1..489: note = Description of Artificial Sequence: Synthetic coding sequence
  source 1..489: mol_type = other DNA

SEQ ID NO: 11182 - DNA, 582 bp, synthetic construct
  misc_feature 1..582: note = Description of Artificial Sequence: Synthetic coding sequence
  source 1..582: mol_type = other DNA
atggccgccgagcccgtggaggacaactgcatcaacttcgtggccatgaagttcatcgacaacaccctgtacttcatcgccgaggacgacgagaacctggagagcgactacttcggcaagctggagagcaagctgagcgtgatcagaaacctgaacgaccaggtgctgttcatcgaccagggcaacagacccctgttcgaggacatgaccgacagcgactgcagagacaacgcccccagaaccatcttcatcatcagcatgtacaaggacagccagcccagaggcatggccgtgaccatcagcgtgaagtgcgagaagatcagcaccctgagctgcgagaacaagatcatcagcttcaaggagatgaacccccccgacaacatcaaggacaccaagagcgacatcatcttcttccagagaagcgtgcccggccacgacaacaagatgcagttcgagagcagcagctacgagggctacttcctggcctgcgagaaggagagagacctgttcaagctgatcctgaagaaggaggacgagctgggcgacagaagcatcatgttcaccgtgcagaacgaggactag

SEQ ID NO: 11183 - DNA, 570 bp, synthetic construct
  misc_feature 1..570: note = Description of Artificial Sequence: Synthetic coding sequence
  source 1..570: mol_type = other DNA
atggccgccgagcccgtggaggacaactgcatcaacttcgtggccatgaagttcatcgacaacaccctgtacttcatcgagaacctggagagcgactacttcggcaagctggagagcaagctgagcgtgatcagaaacctgaacgaccaggtgctgttcatcgaccagggcaacagacccctgttcgaggacatgaccgacagcgactgcagagacaacgcccccagaaccatcttcatcatcagcatgtacaaggacagccagcccagaggcatggccgtgaccatcagcgtgaagtgcgagaagatcagcaccctgagctgcgagaacaagatcatcagcttcaaggagatgaacccccccgacaacatcaaggacaccaagagcgacatcatcttcttccagagaagcgtgcccggccacgacaacaagatgcagttcgagagcagcagctacgagggctacttcctggcctgcgagaaggagagagacctgttcaagctgatcctgaagaaggaggacgagctgggcgacagaagcatcatgttcaccgtgcagaacgaggactag

SEQ ID NO: 11184 - DNA, 582 bp, synthetic construct; identical to SEQ ID NO: 11182
  misc_feature 1..582: note = Description of Artificial Sequence: Synthetic coding sequence
  source 1..582: mol_type = other DNA

SEQ ID NO: 11185 - DNA, 1782 bp, synthetic construct
  misc_feature 1..1782: note = Description of Artificial Sequence: Synthetic coding sequence
  source 1..1782: mol_type = other DNA
atggagaccccccccctgccccccgcctgcaccaagcagggccaccagaagcccctggacagcaaggacgacaacaccgagaagcactgccccgtgaccgtgaacccctggcacatgaagaaggccttcaaggtgatgaacgagctgagaagccagaacctgctgtgcgacgtgaccatcgtggccgaggacatggagatcagcgcccacagagtggtgctggccgcctgcagcccctacttccacgccatgttcaccggcgagatgagcgagagcagagccaagagagtgagaatcaaggaggtggacggctggaccctgagaatgctgatcgactacgtgtacaccgccgagatccaggtgaccgaggagaacgtgcaggtgctgctgcccgccgccggcctgctgcagctgcaggacgtgaagaagacctgctgcgagttcctggagagccagctgcaccccgtgaactgcctgggcatcagagccttcgccgacatgcacgcctgcaccgacctgctgaacaaggccaacacctacgccgagcagcacttcgccgacgtggtgctgagcgaggagttcctgaacctgggcatcgagcaggtgtgcagcctgatcagcagcgacaagctgaccatcagcagcgaggagaaggtgttcgaggccgtgatcgcctgggtgaaccacgacaaggacgtgagacaggagttcatggccagactgatggagcacgtgagactgcccctgctgcccagagagtacctggtgcagagagtggaggaggaggccctggtgaagaacagcagcgcctgcaaggactacctgatcgaggccatgaagtaccacctgctgcccaccgagcagagaatcctgatgaagagcgtgagaaccagactgagaacccccatgaacctgcccaagctgatggtggtggtgggcggccaggcccccaaggccatcagaagcgtggagtgctacgacttcaaggaggagagatggcaccaggtggccgagctgcccagcagaagatgcagagccggcatggtgtacatggccggcctggtgttcgccgtgggcggcttcaacggcagcctgagagtgagaaccgtggacagctacgaccccgtgaaggaccagtggaccagcgtggccaacatgagagacagaagaagcaccctgggcgccgccgtgctgaacggcctgctgtacgccgtgggcggcttcgacggcagcaccggcctgagcagcgtggaggcctacaacatcaagagcaacgagtggttccacgtggcccccatgaacaccagaagaagcagcgtgggcgtgggcgtggtgggcggcctgctgtacgccgtgggcggctacgacggcgccagcagacagtgcctgagcaccgtggagtgctacaacgccaccaccaacgagtggacctacatcgccgagatgagcaccagaagaagcggcgccggcgtgggcgtgctgaacaacctgctgtacgccgtgggcggccacgacggccccctggtgagaaagagcgtggaggtgtacgaccccaccaccaacgcctggagacaggtggccgacatgaacatgtgcagaagaaacgccggcgtgtgcgccgtgaacggcctgctgtacgtggtgggcggcgacgacggcagctgcaacctggccagcgtggagtactacaaccccaccaccgacaagtggaccgtggtgagcagctgcatgagcaccggcagaagctacgccggcgtgaccgtgatcgacaagcccctgtag

SEQ ID NO: 11186 - DNA, 1131 bp, synthetic construct
  misc_feature 1..1131: note = Description of Artificial Sequence: Synthetic coding sequence
  source 1..1131: mol_type = other DNA
atgaaggagaacgtggccagcgccaccgtgttcaccctgctgctgttcctgaacacctgcctgctgaacggccagctgccccccggcaagcccgagatcttcaagtgcagaagccccaacaaggagaccttcacctgctggtggagacccggcaccgacggcggcctgcccaccaactacagcctgacctaccacagagagggcgagaccctgatgcacgagtgccccgactacatcaccggcggccccaacagctgccacttcggcaagcagtacaccagcatgtggagaacctacatcatgatggtgaacgccaccaaccagatgggcagcagcttcagcgacgagctgtacgtggacgtgacctacatcgtgcagcccgacccccccctggagctggccgtggaggtgaagcagcccgaggacagaaagccctacctgtggatcaagtggagcccccccaccctgatcgacctgaagaccggctggttcaccctgctgtacgagatcagactgaagcccgagaaggccgccgagtgggagatccacttcgccggccagcagaccgagttcaagatcctgagcctgcaccccggccagaagtacctggtgcaggtgagatgcaagcccgaccacggctactggagcgcctggagccccgccaccttcatccagatccccagcgacttcaccatgaacgacaccaccgtgtggatcagcgtggccgtgctgagcgccgtgatctgcctgatcatcgtgtgggccgtggccctgaagggctacagcatggtgacctgcatcttcccccccgtgcccggccccaagatcaagggcttcgacgcccacctgctggagaagggcaagagcgaggagctgctgagcgccctgggctgccaggacttcccccccaccagcgactacgaggacctgctggtggagtacctggaggtggacgacagcgaggaccagcacctgatgagcgtgcacagcaaggagcaccccagccagggcgaccccctgatgctgggcgccagccactacaagaacctgaagagctacagacccagaaagatcagcagccagggcagactggccgtgttcaccaaggccaccctgaccaccgtgcagtag

SEQ ID NO: 11187 - DNA, 414 bp, synthetic construct
  misc_feature 1..414: note = Description of Artificial Sequence: Synthetic coding sequence
  source 1..414: mol_type = other DNA
atgggcctgaccagccagctgctgccccccctgttcttcctgctggcctgcgccggcaacttcgtgcacggccacaagtgcgacatcaccctgcaggagatcatcaagaccctgaacagcctgaccgagcagaagaacaccaccgagaaggagaccttctgcagagccgccaccgtgctgagacagttctacagccaccacgagaaggacaccagatgcctgggcgccaccgcccagcagttccacagacacaagcagctgatcagattcctgaagagactggacagaaacctgtggggcctggccggcctgaacagctgccccgtgaaggaggccaaccagagcaccctggagaacttcctggagagactgaagaccatcatgagagagaagtacagcaagtgcagcagctag

SEQ ID NO: 11188 - DNA, 639 bp, synthetic construct
  misc_feature 1..639: note = Description of Artificial Sequence: Synthetic coding sequence
  source 1..639: mol_type = other DNA
atgaacagcttcagcaccagcgccttcggccccgtggccttcagcctgggcctgctgctggtgctgcccgccgccttccccgcccccgtgccccccggcgaggacagcaaggacgtggccgccccccacagacagcccctgaccagcagcgagagaatcgacaagcagatcagatacatcctggacggcatcagcgccctgagaaaggagacctgcaacaagagcaacatgtgcgagagcagcaaggaggccctggccgagaacaacctgaacctgcccaagatggccgagaaggacggctgcttccagagcggcttcaacgaggagacctgcctggtgaagatcatcaccggcctgctggagttcgaggtgtacctggagtacctgcagaacagattcgagagcagcgaggagcaggccagagccgtgcagatgagcaccaaggtgctgatccagttcctgcagaagaaggccaagaacctggacgccatcaccacccccgaccccaccaccaacgccagcctgctgaccaagctgcaggcccagaaccagtggctgcaggacatgaccacccacctgatcctgagaagcttcaaggagttcctgcagagcagcctgagagccctgagacagatgtag

SEQ ID NO: 11189 - DNA, 369 bp, synthetic construct
  misc_feature 1..369: note = Description of Artificial Sequence: Synthetic coding sequence
  source 1..369: mol_type = other DNA
atgtgcgagagcagcaaggaggccctggccgagaacaacctgaacctgcccaagatggccgagaaggacggctgcttccagagcggcttcaacgaggagacctgcctggtgaagatcatcaccggcctgctggagttcgaggtgtacctggagtacctgcagaacagattcgagagcagcgaggagcaggccagagccgtgcagatgagcaccaaggtgctgatccagttcctgcagaagaaggtgggcgtgagcagcttcccccagctgggcgtgggcgaggacagactgaaggacagcgtgctggacaacagcggcatgcagtgccacttccagaagagaagactgcacgtgaacaagagagtgtag

SEQ ID NO: 11190 - DNA, 639 bp, synthetic construct; identical to SEQ ID NO: 11188
  misc_feature 1..639: note = Description of Artificial Sequence: Synthetic coding sequence
  source 1..639: mol_type = other DNA

SEQ ID NO: 11191 - DNA, 597 bp, synthetic construct
  misc_feature 1..597: note = Description of Artificial Sequence: Synthetic coding sequence
  source 1..597: mol_type = other DNA
atgaacagcttcagcaccagcgccttcggccccgtggccttcagcctgggcctgctgctggtgctgcccgccgccttccccgcccccgtgccccccggcgaggacagcaaggacgtggccgccccccacagacagcccctgaccagcagcgagagaatcgacaagcagatcagatacatcctggacggcatcagcgccctgagaaaggagacctgcaacaagagcaacatgtgcgagagcagcaaggaggccctggccgagaacaacctgaacctgcccaagatggccgagaaggacggctgcttccagagcggcttcaacgaggagacctgcctggtgaagatcatcaccggcctgctggagttcgaggtgtacctggagtacctgcagaacagattcgagagcagcgaggagcaggccagagccgtgcagatgagcaccaaggtgctgatccagttcctgcagaagaaggtgggcgtgagcagcttcccccagctgggcgtgggcgaggacagactgaaggacagcgtgctggacaacagcggcatgcagtgccacttccagaagagaagactgcacgtgaacaagagagtgtag

SEQ ID NO: 11192 - DNA, 759 bp, synthetic construct
  misc_feature 1..759: note = Description of Artificial Sequence: Synthetic coding sequence
  source 1..759: mol_type = other DNA
atgaacagcttcagcaccagcaagtgcagaaagagcctggccctggagctgcccgccgccgtggagccctgcgtgagagagggctgcgtggcccagggcggcctggccggcggccagcagcagagacaggcccccagctgcgccgtgagcagccccctgagaagcctgcccagcggcaccggcgccttcggccccgtggccttcagcctgggcctgctgctggtgctgcccgccgccttccccgcccccgtgccccccggcgaggacagcaaggacgtggccgccccccacagacagcccctgaccagcagcgagagaatcgacaagcagatcagatacatcctggacggcatcagcgccctgagaaaggagacctgcaacaagagcaacatgtgcgagagcagcaaggaggccctggccgagaacaacctgaacctgcccaagatggccgagaaggacggctgcttccagagcggcttcaacgaggagacctgcctggtgaagatcatcaccggcctgctggagttcgaggtgtacctggagtacctgcagaacagattcgagagcagcgaggagcaggccagagccgtgcagatgagcaccaaggtgctgatccagttcctgcagaagaaggtgggcgtgagcagcttcccccagctgggcgtgggcgaggacagactgaaggacagcgtgctggacaacagcggcatgcagtgccacttccagaagagaagactgcacgtgaacaagagagtgtag

SEQ ID NO: 11193 - DNA, 459 bp, synthetic construct
  misc_feature 1..459: note = Description of Artificial Sequence: Synthetic coding sequence
  source 1..459: mol_type = other DNA
atgaacagcttcagcaccagcgccttcggccccgtggccttcagcctgggcctgctgctggtgctgcccgccgccttccccgcccccgtgccccccggcgaggacagcaaggacgtggccgccccccacagacagcccctgaccagcagcgagagaatcgacaagcagatcagatacatcctggacggcatcagcgccctgagaaaggagacctgcaacaagagcaacatgtgcgagagcagcaaggaggccctggccgagaacaacctgaacctgcccaagatggccgagaaggacggctgcttccagagcggcttcaacgaggagacctgcctggtgaagatcatcaccggcctgctggagttcgaggtgtacctggagtacctgcagaacagattcgagagcagcgaggagcaggccagagccgtgcagatgagcaccaaggtgctgatccagtag

SEQ ID NO: 11194 - DNA, 300 bp, synthetic construct
  misc_feature 1..300: note = Description of Artificial Sequence: Synthetic coding sequence
  source 1..300: mol_type = other DNA
atgaccagcaagctggccgtggccctgctggccgccttcctgatcagcgccgccctgtgcgagggcgccgtgctgcccagaagcgccaaggagctgagatgccagtgcatcaagacctacagcaagcccttccaccccaagttcatcaaggagctgagagtgatcgagagcggcccccactgcgccaacaccgagatcatcgtgaagctgagcgacggcagagagctgtgcctggaccccaaggagaactgggtgcagagagtggtggagaagttcctgaagagagccgagaacagctag

SEQ ID NO: 11195 - DNA, 2139 bp, synthetic construct
  misc_feature 1..2139: note = Description of Artificial Sequence: Synthetic coding sequence
  source 1..2139: mol_type = other DNA
atggccggcggccccggccccggcgagcccgccgcccccggcgcccagcacttcctgtacgaggtgcccccctgggtgatgtgcagattctacaaggtgatggacgccctggagcccgccgactggtgccagttcgccgccctgatcgtgagagaccagaccgagctgagactgtgcgagagaagcggccagagaaccgccagcgtgctgtggccctggatcaacagaaacgccagagtggccgacctggtgcacatcctgacccacctgcagctgctgagagccagagacatcatcaccgcctggcacccccccgcccccctgcccagccccggcaccaccgcccccagacccagcagcatccccgcccccgccgaggccgaggcctggagccccagaaagctgcccagcagcgccagcaccttcctgagccccgccttccccggcagccagacccacagcggccccgagctgggcctggtgcccagccccgccagcctgtggccccccccccccagccccgcccccagcagcaccaagcccggccccgagagcagcgtgagcctgctgcagggcgccagacccttccccttctgctggcccctgtgcgagatcagcagaggcacccacaacttcagcgaggagctgaagatcggcgagggcggcttcggctgcgtgtacagagccgtgatgagaaacaccgtgtacgccgtgaagagactgaaggagaacgccgacctggagtggaccgccgtgaagcagagcttcctgaccgaggtggagcagctgagcagattcagacaccccaacatcgtggacttcgccggctactgcgcccagaacggcttctactgcctggtgtacggcttcctgcccaacggcagcctggaggacagactgcactgccagacccaggcctgcccccccctgagctggccccagagactggacatcctgctgggcaccgccagagccatccagttcctgcaccaggacagccccagcctgatccacggcgacatcaagagcagcaacgtgctgctggacgagagactgacccccaagctgggcgacttcggcctggccagattcagcagattcgccggcagcagccccagccagagcagcatggtggccagaacccagaccgtgagaggcaccctggcctacctgcccgaggagtacatcaagaccggcagactggccgtggacaccgacaccttcagcttcggcgtggtggtgctggagaccctggccggccagagagccgtgaagacccacggcgccagaaccaagtacctgaaggacctggtggaggaggaggccgaggaggccggcgtggccctgagaagcacccagagcaccctgcaggccggcctggccgccgacgcctgggccgcccccatcgccatgcagatctacaagaagcacctggaccccagacccggcccctgcccccccgagctgggcctgggcctgggccagctggcctgctgctgcctgcacagaagagccaagagaagaccccccatgacccaggtgtacgagagactggagaagctgcaggccgtggtggccggcgtgcccggccacagcgaggccgccagctgcatcccccccagcccccaggagaacagctacgtgagcagcaccggcagagcccacagcggcgccgccccctggcagcccctggccgcccccagcggcgccagcgcccaggccgccgagcagctgcagagaggccccaaccagcccgtggagagcgacgagagcctgggcggcctgagcgccgccctgagaagctggcacctgacccccagctgccccctggaccccgcccccctgagagaggccggctgcccccagggcgacaccgccggcgagagcagctggggcagcggccccggcagcagacccaccgccgtggagggcctggccctgggcagcagcgccagcagcagcagcgagcccccccagatcatcatcaaccccgccagacagaagatggtgcagaagctggccctgtacgaggacggcgccctggacagcctgcagctgctgagcagcagcagcctgcccggcctgggcctggagcaggacagacagggccccgaggagagcgacgagttccagagctag

SEQ ID NO: 11196 - DNA, 2082 bp, synthetic construct
  misc_feature 1..2082: note = Description of Artificial Sequence: Synthetic coding sequence
  source 1..2082: mol_type = other DNA
atggccggcggccccggccccggcgagcccgccgcccccggcgcccagcacttcctgtacgaggtgcccccctgggtgatgtgcagattctacaaggtgatggacgccctggagcccgccgactggtgccagttcggcggctggagaagagccgccggcggcagagaggccagaggcctgctggcccccacccccgacgcccccagacccgccgccgccctgatcgtgagagaccagaccgagctgagactgtgcgagagaagcggccagagaaccgccagcgtgctgtggccctggatcaacagaaacgccagagtggccgacctggtgcacatcctgacccacctgcagctgctgagagccagagacatcatcaccgcctggcacccccccgcccccctgcccagccccggcaccaccgcccccagacccagcagcatccccgcccccgccgaggccgaggcctggagccccagaaagctgcccagcagcgccagcaccttcctgagccccgccttccccggcagccagacccacagcggccccgagctgggcctggtgcccagccccgccagcctgtggccccccccccccagccccgcccccagcagcaccaagcccggccccgagagcagcgtgagcctgctgcagggcgccagacccttccccttctgctggcccctgtgcgagatcagcagaggcacccacaacttcagcgaggagctgaagatcggcgagggcggcttcggctgcgtgtacagagccgtgatgagaaacaccgtgtacgccgtgaagagactgaaggagaacgccgacctggagtggaccgccgtgaagcagagcttcctgaccgaggtggagcagctgagcagattcagacaccccaacatcgtggacttcgccggctactgcgcccagaacggcttctactgcctggtgtacggcttcctgcccaacggcagcctggaggacagactgcactgccagacccaggcctgcccccccctgagctggccccagagactggacatcctgctgggcaccgccagagccatccagttcctgcaccaggacagccccagcctgatccacggcgacatcaagagcagcaacgtgctgctggacgagagactgacccccaagctgggcgacttcggcctggccagattcagcagattcgccggcagcagccccagccagagcagcatggtggccagaacccagaccgtgagaggcaccctggcctacctgcccgaggagtacatcaagaccggcagactggccgtggacaccgacaccttcagcttcggcgtggtggtgctggagaccctggccggccagagagccgtgaagacccacggcgccagaaccaagtacctgaaggacctggtggaggaggaggccgaggaggccggcgtggccctgagaagcacccagagcaccctgcaggccggcctggccgccgacgcctgggccgcccccatcgccatgcagatctacaagaagcacctgggccagctggcctgctgctgcctgcacagaagagccaagagaagaccccccatgacccaggagaacagctacgtgagcagcaccggcagagcccacagcggcgccgccccctggcagcccctggccgcccccagcggcgccagcgcccaggccgccgagcagctgcagagaggccccaaccagcccgtggagagcgacgagagcctgggcggcctgagcgccgccctgagaagctggcacctgacccccagctgccccctggaccccgcccccctgagagaggccggctgcccccagggcgacaccgccggcgagagcagctggggcagcggccccggcagcagacccaccgccgtggagggcctggccctgggcagcagcgccagcagcagcagcgagcccccccagatcatcatcaaccccgccagacagaagatggtgcagaagctggccctgtacgaggacggcgccctggacagcctgcagctgctgagcagcagcagcctgcccggcctgggcctggagcaggacagacagggccccgaggagagcgacgagttccagagctag

SEQ ID NO: 11197 - DNA, 2049 bp, synthetic construct
  misc_feature 1..2049: note = Description of Artificial Sequence: Synthetic coding sequence
  source 1..2049: mol_type = other DNA
atggccggcggccccggccccggcgagcccgccgcccccggcgcccagcacttcctgtacgaggtgcccccctgggtgatgtgcagattctacaaggtgatggacgccctggagcccgccgactggtgccagttcgccgccctgatcgtgagagaccagaccgagctgagactgtgcgagagaagcggccagagaaccgccagcgtgctgtggccctggatcaacagaaacgccagagtggccgacctggtgcacatcctgacccacctgcagctgctgagagccagagacatcatcaccgcctggcacccccccgcccccctgcccagccccggcaccaccgcccccagacccagcagcatccccgcccccgccgaggccgaggcctggagccccagaaagctgcccagcagcgccagcaccttcctgagccccgccttccccggcagccagacccacagcggccccgagctgggcctggtgcccagccccgccagcctgtggccccccccccccagccccgcccccagcagcaccaagcccggccccgagagcagcgtgagcctgctgcagggcgccagacccttccccttctgctggcccctgtgcgagatcagcagaggcacccacaacttcagcgaggagctgaagatcggcgagggcggcttcggctgcgtgtacagagccgtgatgagaaacaccgtgtacgccgtgaagagactgaaggagaacgccgacctggagtggaccgccgtgaagcagagcttcctgaccgaggtggagcagctgagcagattcagacaccccaacatcgtggacttcgccggctactgcgcccagaacggcttctactgcctggtgtacggcttcctgcccaacggcagcctggaggacagactgcactgccagacccaggcctgcccccccctgagctggccccagagactggacatcctgctgggcaccgccagagccatccagttcctgcaccaggacagccccagcctgatccacggcgacatcaagagcagcaacgtgctgctggacgagagactgacccccaagctgggcgacttcggcctggccagattcagcagattcgccggcagcagccccagccagagcagcatggtggccagaacccagaccgtgagaggcaccctggcctacctgcccgaggagtacatcaagaccggcagactggccgtggacaccgacaccttcagcttcggcgtggtggtgctggagaccctggccggccagagagccgtgaagacccacggcgccagaaccaagtacctgaaggacctggtggaggaggaggccgaggaggccggcgtggccctgagaagcacccagagcaccctgcaggccggcctggccgccgacgcctgggccgcccccatcgccatgcagatctacaagaagcacctggaccccagacccggcccctgcccccccgagctgggcctgggcctgggccagctggcctgctgctgcctgcacagaagagccaagagaagaccccccatgacccaggagaacagctacgtgagcagcaccggcagagcccacagcggcgccgccccctggcagcccctggccgcccccagcggcgccagcgcccaggccgccgagcagctgcagagaggccccaaccagcccgtggagagcgacgagagcctgggcggcctgagcgccgccctgagaagctggcacctgacccccagctgccccctggaccccgcccccctgagagaggccggctgcccccagggcgacaccgccggcgagagcagctggggcagcggccccggcagcagacccaccgccgtggagggcctggccctgggcagcagcgccagcagcagcagcgagcccccccagatcatcatcaaccccgccagacagaagatggtgcagaagctggccctgtacgaggacggcgccctggacagcctgcagctgctgagcagcagcagcctgcccggcctgggcctggagcaggacagacagggccccgaggagagcgacgagttccagagctag

SEQ ID NO: 11198 - DNA, 2127 bp, synthetic construct
  misc_feature 1..2127: note = Description of Artificial Sequence: Synthetic coding sequence
  source 1..2127: mol_type = other DNA
atggccggcggccccggccccggcgagcccgccgcccccggcgcccagcacttcctgtacgaggtgcccccctgggtgatgtgcagattctacaaggtgatggacgccctggagcccgccgactggtgccagttcggcggctggagaagagccgccggcggcagagaggccagaggcctgctggcccccacccccgacgcccccagacccgccgccgccctgatcgtgagagaccagaccgagctgagactgtgcgagagaagcggccagagaaccgccagcgtgctgtggccctggatcaacagaaacgccagagtggccgacctggtgcacatcctgacccacctgcagctgctgagagccagagacatcatcaccgcctggcacccccccgcccccctgcccagccccggcaccaccgcccccagacccagcagcatccccgcccccgccgaggccgaggcctggagccccagaaagctgcccagcagcgccagcaccttcctgagccccgccttccccggcagccagacccacagcggccccgagctgggcctggtgcccagccccgccagcctgtggccccccccccccagccccgcccccagcagcaccaagcccggccccgagagcagcgtgagcctgctgcagggcgccagacccttccccttctgctggcccctgtgcgagatcagcagaggcacccacaacttcagcgaggagctgaagatcggcgagggcggcttcggctgcgtgtacagagccgtgatgagaaacaccgtgtacgccgtgaagagactgaaggagaacgccgacctggagtggaccgccgtgaagcagagcttcctgaccgaggtggagcagctgagcagattcagacaccccaacatcgtggacttcgccggctactgcgcccagaacggcttctactgcctggtgtacggcttcctgcccaacggcagcctggaggacagactgcactgccagacccaggcctgcccccccctgagctggccccagagactggacatcctgctgggcaccgccagagccatccagttcctgcaccaggacagccccagcctgatccacggcgacatcaagagcagcaacgtgctgctggacgagagactgacccccaagctgggcgacttcggcctggccagattcagcagattcgccggcagcagccccagccagagcagcatggtggccagaacccagaccgtgagaggcaccctggcctacctgcccgaggagtacatcaagaccggcagactggccgtggacaccgacaccttcagcttcggcgtggtggtgctggagaccctggccggccagagagccgtgaagacccacggcgccagaaccaagtacctgaaggacctggtggaggaggaggccgaggaggccggcgtggccctgagaagcacccagagcaccctgcaggccggcctggccgccgacgcctgggccgcccccatcgccatgcagatctacaagaagcacctggaccccagacccggcccctgcccccccgagctgggcctgggcctgggccagctggcctgctgctgcctgcacagaagagccaagagaagaccccccatgacccaggagaacagctacgtgagcagcaccggcagagcccacagcggcgccgccccctggcagcccctggccgcccccagcggcgccagcgcccaggccgccgagcagctgcagagaggccccaaccagcccgtggagagcgacgagagcctgggcggcctgagcgccgccctgagaagctggcacctgacccccagctgccccctggaccccgcccccctgagagaggccggctgcccccagggcgacaccgccggcgagagcagctggggcagcggccccggcagcagacccaccgccgtggagggcctggccctgggcagcagcgccagcagcagcagcgagcccccccagatcatcatcaaccccgccagacagaagatggtgcagaagctggccctgtacgaggacggcgccctggacagcctgcagctgctgagcagcagcagcctgcccggcctgggcctggagcaggacagacagggccccgaggagagcgacgagttccagagctag

SEQ ID NO: 11199 - DNA, 1902 bp, synthetic construct
  misc_feature 1..1902: note = Description of Artificial Sequence: Synthetic coding sequence
  source 1..1902: mol_type = other DNA
atggccggcggccccggccccggcgagcccgccgcccccggcgcccagcacttcctgtacgaggtgcccccctgggtgatgtgcagattctacaaggtgatggacgccctggagcccgccgactggtgccagttcgccgccctgatcgtgagagaccagaccgagctgagactgtgcgagagaagcggccagagaaccgccagcgtgctgtggccctggatcaacagaaacgccagagtggccgacctggtgcacatcctgacccacctgcagctgctgagagccagagacatcatcaccgcctggcacccccccgcccccctgcccagccccggcaccaccgcccccagacccagcagcatccccgcccccgccgaggccgaggcctggagccccagaaagctgcccagcagcgccagcaccttcctgagccccgccttccccggcagccagacccacagcggccccgagctgggcctggtgcccagccccgccagcctgtggccccccccccccagccccgcccccagcagcaccaagcccggccccgagagcagcgtgagcctgctgcagggcgccagacccttccccttctgctggcccctgtgcgagatcagcagaggcacccacaacttcagcgaggagctgaagatcggcgagggcggcttcggctgcgtgtacagagccgtgatgagaaacaccgtgtacgccgtgaagagactgaaggagaacgccgacctggagtggaccgccgtgaagcagagcttcctgaccgaggtggagcagctgagcagattcagacaccccaacatcgtggacttcgccggctactgcgcccagaacggcttctactgcctggtgtacggcttcctgcccaacggcagcctggaggacagactgcactgccagacccaggcctgcccccccctgagctggccccagagactggacatcctgctgggcaccgccagagccatccagttcctgcaccaggacagccccagcctgatccacggcgacatcaagagcagcaacgtgctgctggacgagagactgacccccaagctgggcgacttcggcctggccagattcagcagattcgccggcagcagccccagccagagcagcatggtggccagaacccagaccgtgagaggcaccctggcctacctgcccgaggagtacatcaagaccggcagactggccgtggacaccgacaccttcagcttcggcgtggtggtgctggagaccctggccggccagagagccgtgaagacccacggcgccagaaccaagtacctggtgtacgagagactggagaagctgcaggccgtggtggccggcgtgcccggccacagcgaggccgccagctgcatcccccccagcccccaggagaacagctacgtgagcagcaccggcagagcccacagcggcgccgccccctggcagcccctggccgcccccagcggcgccagcgcccaggccgccgagcagctgcagagaggccccaaccagcccgtggagagcgacgagagcctgggcggcctgagcgccgccctgagaagctggcacctgacccccagctgccccctggaccccgcccccctgagagaggccggctgcccccagggcgacaccgccggcgagagcagctggggcagcggccccggcagcagacccaccgccgtggagggcctggccctgggcagcagcgccagcagcagcagcgagcccccccagatcatcatcaaccccgccagacagaagatggtgcagaagctggccctgtacgaggacggcgccctggacagcctgcagctgctgagcagcagcagcctgcccggcctgggcctggagcaggacagacagggccccgaggagagcgacgagttccagagctag

SEQ ID NO: 11200 - DNA, 1245 bp, synthetic construct
  misc_feature 1..1245: note = Description of Artificial Sequence: Synthetic coding sequence
  source 1..1245: mol_type = other DNA
atgagcaagaagatcagcggcggcagcgtggtggagatgcagggcgacgagatgaccagaatcatctgggagctgatcaaggagaagctgatcttcccctacgtggagctggacctgcacagctacgacctgggcatcgagaacagagacgccaccaacgaccaggtgaccaaggacgccgccgaggccatcaagaagcacaacgtgggcgtgaagtgcgccaccatcacccccgacgagaagagagtggaggagttcaagctgaagcagatgtggaagagccccaacggcaccatcagaaacatcctgggcggcaccgtgttcagagaggccatcatctgcaagaacatccccagactggtgagcggctgggtgaagcccatcatcatcggcagacacgcctacggcgaccagtacagagccaccgacttcgtggtgcccggccccggcaaggtggagatcacctacacccccagcgacggcacccagaaggtgacctacctggtgcacaacttcgaggagggcggcggcgtggccatgggcatgtacaaccaggacaagagcatcgaggacttcgcccacagcagcttccagatggccctgagcaagggctggcccctgtacctgagcaccaagaacaccatcctgaagaagtacgacggcagattcaaggacatcttccaggagatctacgacaagcagtacaagagccagttcgaggcccagaagatctggtacgagcacagactgatcgacgacatggtggcccaggccatgaagagcgagggcggcttcatctgggcctgcaagaactacgacggcgacgtgcagagcgacagcgtggcccagggctacggcagcctgggcatgatgaccagcgtgctggtgtgccccgacggcaagaccgtggaggccgaggccgcccacggcaccgtgaccagacactacagaatgtaccagaagggccaggagaccagcaccaaccccatcgccagcatcttcgcctggaccagaggcctggcccacagagccaagctggacaacaacaaggagctggccttcttcgccaacgccctggaggaggtgagcatcgagaccatcgaggccggcttcatgaccaaggacctggccgcctgcatcaagggcctgcccaacgtgcagagaagcgactacctgaacaccttcgagttcatggacaagctgggcgagaacctgaagatcaagctggcccaggccaagctgtag

SEQ ID NO: 11201 - DNA, 474 bp, synthetic construct
  misc_feature 1..474: note = Description of Artificial Sequence: Synthetic coding sequence
  source 1..474: mol_type = other DNA
atgagcaagaagatcagcggcggcagcgtggtggagatgcagggcgacgagatgaccagaatcatctgggagctgatcaaggagaagctgatcttcccctacgtggagctggacctgcacagctacgacctgggcatcgagaacagagacgccaccaacgaccaggtgaccaaggacgccgccgaggccatcaagaagcacaacgtgggcgtgaagtgcgccaccatcacccccgacgagaagagagtggaggagttcaagctgaagcagatgtggaagagccccaacggcaccatcagaaacatcctgggcggcaccgtgttcagagaggccatcatctgcaagaacatccccagactggtgagcggctgggtgaagcccatcatcatcggcagacacgcctacggcgaccagtacagagccaccgacttcgtggtgcccggccccggcaaggtggagatcacctacacctag

SEQ ID NO: 11202 - DNA, 1245 bp, synthetic construct; identical to SEQ ID NO: 11200
  misc_feature 1..1245: note = Description of Artificial Sequence: Synthetic coding sequence
  source 1..1245: mol_type = other DNA

SEQ ID NO: 11203 - DNA, 225 bp, synthetic construct
  misc_feature 1..225: note = Description of Artificial Sequence: Synthetic coding sequence
  source 1..225: mol_type = other DNA
atgagcaagaagatcagcggcggcagcgtggtggagatgcagggcgacgagatgaccagaatcatctgggagctgatcaaggagaagctgatcttcccctacgtggagctggacctgcacagctacgacctgggcatcgagaacagagacgccaccaacgaccaggtgaccaaggacgccgccgaggccatcaagaagcacaacgtgggcgtgaagtgcgcctag

SEQ ID NO: 11204 - DNA, 1245 bp, synthetic construct; identical to SEQ ID NO: 11200
  misc_feature 1..1245: note = Description of Artificial Sequence: Synthetic coding sequence
  source 1..1245: mol_type = other DNA

SEQ ID NO: 11205 - DNA, 189 bp, synthetic construct
  misc_feature 1..189: note = Description of Artificial Sequence: Synthetic coding sequence
  source 1..189: mol_type = other DNA
atgagcaagaagatcagcggcggcagcgtggtggagatgcagggcgacgagatgaccagaatcatctgggagctgatcaaggagaagctgatcttcccctacgtggagctggacctgcacagctacgacctgggcatcgagaacagagacgccaccaacgaccaggtgaccaaggacgccgccgagtag

SEQ ID NO: 11206 - DNA, 1359 bp, synthetic construct
  misc_feature 1..1359: note = Description of Artificial Sequence: Synthetic coding sequence
  source 1..1359: mol_type = other DNA
atggccggctacctgagagtggtgagaagcctgtgcagagccagcggcagcagacccgcctgggcccccgccgccctgaccgcccccaccagccaggagcagcccagaagacactacgccgacaagagaatcaaggtggccaagcccgtggtggagatggacggcgacgagatgaccagaatcatctggcagttcatcaaggagaagctgatcctgccccacgtggacatccagctgaagtacttcgacctgggcctgcccaacagagaccagaccgacgaccaggtgaccatcgacagcgccctggccacccagaagtacagcgtggccgtgaagtgcgccaccatcacccccgacgaggccagagtggaggagttcaagctgaagaagatgtggaagagccccaacggcaccatcagaaacatcctgggcggcaccgtgttcagagagcccatcatctgcaagaacatccccagactggtgcccggctggaccaagcccatcaccatcggcagacacgcccacggcgaccagtacaaggccaccgacttcgtggccgacagagccggcaccttcaagatggtgttcacccccaaggacggcagcggcgtgaaggagtgggaggtgtacaacttccccgccggcggcgtgggcatgggcatgtacaacaccgacgagagcatcagcggcttcgcccacagctgcttccagtacgccatccagaagaagtggcccctgtacatgagcaccaagaacaccatcctgaaggcctacgacggcagattcaaggacatcttccaggagatcttcgacaagcactacaagaccgacttcgacaagaacaagatctggtacgagcacagactgatcgacgacatggtggcccaggtgctgaagagcagcggcggcttcgtgtgggcctgcaagaactacgacggcgacgtgcagagcgacatcctggcccagggcttcggcagcctgggcctgatgaccagcgtgctggtgtgccccgacggcaagaccatcgaggccgaggccgcccacggcaccgtgaccagacactacagagagcaccagaagggcagacccaccagcaccaaccccatcgccagcatcttcgcctggaccagaggcctggagcacagaggcaagctggacggcaaccaggacctgatcagattcgcccagatgctggagaaggtgtgcgtggagaccgtggagagcggcgccatgaccaaggacctggccggctgcatccacggcctgagcaacgtgaagctgaacgagcacttcctgaacaccaccgacttcctggacaccatcaagagcaacctggacagagccctgggcagacagtag

SEQ ID NO: 11207 - DNA, 969 bp, synthetic construct
  misc_feature 1..969: note = Description of Artificial Sequence: Synthetic coding sequence
  source 1..969: mol_type = other DNA
atgtggaagagccccaacggcaccatcagaaacatcctgggcggcaccgtgttcagagagcccatcatctgcaagaacatccccagactggtgcccggctggaccaagcccatcaccatcggcagacacgcccacggcgaccagtacaaggccaccgacttcgtggccgacagagccggcaccttcaagatggtgttcacccccaaggacggcagcggcgtgaaggagtgggaggtgtacaacttccccgccggcggcgtgggcatgggcatgtacaacaccgacgagagcatcagcggcttcgcccacagctgcttccagtacgccatccagaagaagtggcccctgtacatgagcaccaagaacaccatcctgaaggcctacgacggcagattcaaggacatcttccaggagatcttcgacaagcactacaagaccgacttcgacaagaacaagatctggtacgagcacagactgatcgacgacatggtggcccaggtgctgaagagcagcggcggcttcgtgtgggcctgcaagaactacgacggcgacgtgcagagcgacatcctggcccagggcttcggcagcctgggcctgatgaccagcgtgctggtgtgccccgacggcaagaccatcgaggccgaggccgcccacggcaccgtgaccagacactacagagagcaccagaagggcagacccaccagcaccaaccccatcgccagcatcttcgcctggaccagaggcctggagcacagaggcaagctggacggcaaccaggacctgatcagattcgcccagatgctggagaaggtgtgcgtggagaccgtggagagcggcgccatgaccaaggacctggccggctgcatccacggcctgagcaacgtgaagctgaacgagcacttcctgaacaccaccgacttcctggacaccatcaagagcaacctggacagagccctgggcagacagtag

SEQ ID NO: 11208 - DNA, 1203 bp, synthetic construct
  misc_feature 1..1203: note = Description of Artificial Sequence: Synthetic coding sequence
  source 1..1203: mol_type = other DNA
atggacggcgacgagatgaccagaatcatctggcagttcatcaaggagaagctgatcctgccccacgtggacatccagctgaagtacttcgacctgggcctgcccaacagagaccagaccgacgaccaggtgaccatcgacagcgccctggccacccagaagtacagcgtggccgtgaagtgcgccaccatcacccccgacgaggccagagtggaggagttcaagctgaagaagatgtggaagagccccaacggcaccatcagaaacatcctgggcggcaccgtgttcagagagcccatcatctgcaagaacatccccagactggtgcccggctggaccaagcccatcaccatcggcagacacgcccacggcgaccagtacaaggccaccgacttcgtggccgacagagccggcaccttcaagatggtgttcacccccaaggacggcagcggcgtgaaggagtgggaggtgtacaacttccccgccggcggcgtgggcatgggcatgtacaacaccgacgagagcatcagcggcttcgcccacagctgcttccagtacgccatccagaagaagtggcccctgtacatgagcaccaagaacaccatcctgaaggcctacgacggcagattcaaggacatcttccaggagatcttcgacaagcactacaagaccgacttcgacaagaacaagatctggtacgagcacagactgatcgacgacatggtggcccaggtgctgaagagcagcggcggcttcgtgtgggcctgcaagaactacgacggcgacgtgcagagcgacatcctggcccagggcttcggcagcctgggcctgatgaccagcgtgctggtgtgccccgacggcaagaccatcgaggccgaggccgcccacggcaccgtgaccagacactacagagagcaccagaagggcagacccaccagcaccaaccccatcgccagcatcttcgcctggaccagaggcctggagcacagaggcaagctggacggcaaccaggacctgatcagattcgcccagatgctggagaaggtgtgcgtggagaccgtggagagcggcgccatgaccaaggacctggccggctgcatccacggcctgagcaacgtgaagctgaacgagcacttcctgaacaccaccgacttcctggacaccatcaagagcaacctggacagagccctgggcagacagtag

SEQ ID NO: 11209 - DNA, 3657 bp, synthetic construct
  misc_feature 1..3657: note = Description of Artificial Sequence: Synthetic coding sequence
  source 1..3657: mol_type = other DNA
atgagaagccccagaaccagaggcagaagcggcagacccctgagcctgctgctggccctgctgtgcgccctgagagccaaggtgtgcggcgccagcggccagttcgagctggagatcctgagcatgcagaacgtgaacggcgagctgcagaacggcaactgctgcggcggcgccagaaaccccggcgacagaaagtgcaccagagacgagtgcgacacctacttcaaggtgtgcctgaaggagtaccagagcagagtgaccgccggcggcccctgcagcttcggcagcggcagcacccccgtgatcggcggcaacaccttcaacctgaaggccagcagaggcaacgacagaaacagaatcgtgctgcccttcagcttcgcctggcccagaagctacaccctgctggtggaggcctgggacagcagcaacgacaccgtgcagcccgacagcatcatcgagaaggccagccacagcggcatgatcaaccccagcagacagtggcagaccctgaagcagaacaccggcgtggcccacttcgagtaccagatcagagtgacctgcgacgactactactacggcttcggctgcaacaagttctgcagacccagagacgacttcttcggccactacgcctgcgaccagaacggcaacaagacctgcatggagggctggatgggccccgagtgcaacagagccatctgcagacagggctgcagccccaagcacggcagctgcaagctgcccggcgactgcagatgccagtacggctggcagggcctgtactgcgacaagtgcatcccccaccccggctgcgtgcacggcatctgcaacgagccctggcagtgcctgtgcgagaccaactggggcggccagctgtgcgacaaggacctgaactactgcggcacccaccagccctgcctgaacggcggcacctgcagcaacaccggccccgacaagtaccagtgcagctgccccgagggctacagcggccccaactgcgagatcgccgagcacgcctgcctgagcgacccctgccacaacagaggcagctgcaaggagaccagcctgggcttcgagtgcgagtgcagccccggctggaccggccccacctgcagcaccaacatcgacgactgcagccccaacaactgcagccacggcggcacctgccaggacctggtgaacggcttcaagtgcgtgtgccccccccagtggaccggcaagacctgccagctggacgccaacgagtgcgaggccaagccctgcgtgaacgccaagagctgcaagaacctgatcgccagctactactgcgactgcctgcccggctggatgggccagaactgcgacatcaacatcaacgactgcctgggccagtgccagaacgacgccagctgcagagacctggtgaacggctacagatgcatctgcccccccggctacgccggcgaccactgcgagagagacatcgacgagtgcgccagcaacccctgcctgaacggcggccactgccagaacgagatcaacagattccagtgcctgtgccccaccggcttcagcggcaacctgtgccagctggacatcgactactgcgagcccaacccctgccagaacggcgcccagtgctacaacagagccagcgactacttctgcaagtgccccgaggactacgagggcaagaactgcagccacctgaaggaccactgcagaaccaccccctgcgaggtgatcgacagctgcaccgtggccatggccagcaacgacacccccgagggcgtgagatacatcagcagcaacgtgtgcggcccccacggcaagtgcaagagccagagcggcggcaagttcacctgcgactgcaacaagggcttcaccggcacctactgccacgagaacatcaacgactgcgagagcaacccctgcagaaacggcggcacctgcatcgacggcgtgaacagctacaagtgcatctgcagcgacggctgggagggcgcctactgcgagaccaacatcaacgactgcagccagaacccctgccacaacggcggcacctgcagagacctggtgaacgacttctactgcgactgcaagaacggctggaagggcaagacctgccacagcagagacagccagtgcgacgaggccacctgcaacaacggcggcacctgctacgacgagggcgacgccttcaagtgcatgtgccccggcggctgggagggcaccacctgcaacatcgccagaaacagcagctgcctgcccaacccctgccacaacggcggcacctgcgtggtgaacggcgagagcttcacctgcgtgtgcaaggagggctgggagggccccatctgcgcccagaacaccaacgactgcagcccccacccctgctacaacagcggcacctgcgtggacggcgacaactggtacagatgcgagtgcgcccccggcttcgccggccccgactgcagaatcaacatcaacgagtgccagagcagcccctgcgccttcggcgccacctgcgtggacgagatcaacggctacagatgcgtgtgcccccccggccacagcggcgccaagtgccaggaggtgagcggcagaccctgcatcaccatgggcagcgtgatccccgacggcgccaagtgggacgacgactgcaacacctgccagtgcctgaacggcagaatcgcctgcagcaaggtgtggtgcggccccagaccctgcctgctgcacaagggccacagcgagtgccccagcggccagagctgcatccccatcctggacgaccagtgcttcgtgcacccctgcaccggcgtgggcgagtgcagaagcagcagcctgcagcccgtgaagaccaagtgcaccagcgacagctactaccaggacaactgcgccaacatcaccttcaccttcaacaaggagatgatgagccccggcctgaccaccgagcacatctgcagcgagctgagaaacctgaacatcctgaagaacgtgagcgccgagtacagcatctacatcgcctgcgagcccagccccagcgccaacaacgagatccacgtggccatcagcgccgaggacatcagagacgacggcaaccccatcaaggagatcaccgacaagatcatcgacctggtgagcaagagagacggcaacagcagcctgatcgccgccgtggccgaggtgagagtgcagagaagacccctgaagaacagaaccgacttcctggtgcccctgctgagcagcgtgctgaccgtggcctggatctgctgcctggtgaccgccttctactggtgcctgagaaagagaagaaagcccggcagccacacccacagcgccagcgaggacaacaccaccaacaacgtgagagagcagctgaaccagatcaagaaccccatcgagaagcacggcgccaacaccgtgcccatcaaggactacgagaacaagaacagcaagatgagcaagatcagaacccacaacagcgaggtggaggaggacgacatggacaagcaccagcagaaggccagattcgccaagcagcccgcctacaccctggtggacagagaggagaagccccccaacggcacccccaccaagcaccccaactggaccaacaagcaggacaacagagacctggagagcgcccagagcctgaacagaatggagtacatcgtgtag

SEQ ID NO: 11210 - DNA, 3180 bp, synthetic construct
  misc_feature 1..3180: note = Description of Artificial Sequence: Synthetic coding sequence
  source 1..3180: mol_type = other DNA
atgatcaaccccagcagacagtggcagaccctgaagcagaacaccggcgtggcccacttcgagtaccagatcagagtgacctgcgacgactactactacggcttcggctgcaacaagttctgcagacccagagacgacttcttcggccactacgcctgcgaccagaacggcaacaagacctgcatggagggctggatgggccccgagtgcaacagagccatctgcagacagggctgcagccccaagcacggcagctgcaagctgcccggcgactgcagatgccagtacggctggcagggcctgtactgcgacaagtgcatcccccaccccggctgcgtgcacggcatctgcaacgagccctggcagtgcctgtgcgagaccaactggggcggccagctgtgcgacaaggacctgaactactgcggcacccaccagccctgcctgaacggcggcacctgcagcaacaccggccccgacaagtaccagtgcagctgccccgagggctacagcggccccaactgcgagatcgccgagcacgcctgcctgagcgacccctgccacaacagaggcagctgcaaggagaccagcctgggcttcgagtgcgagtgcagccccggctggaccggccccacctgcagcaccaacatcgacgactgcagccccaacaactgcagccacggcggcacctgccaggacctggtgaacggcttcaagtgcgtgtgccccccccagtggaccggcaagacctgccagctggacgccaacgagtgcgaggccaagccctgcgtgaacgccaagagctgcaagaacctgatcgccagctactactgcgactgcctgcccggctggatgggccagaactgcgacatcaacatcaacgactgcctgggccagtgccagaacgacgccagctgcagagacctggtgaacggctacagatgcatctgcccccccggctacgccggcgaccactgcgagagagacatcgacgagtgcgccagcaacccctgcctgaacggcggccactgccagaacgagatcaacagattccagtgcctgtgccccaccggcttcagcggcaacctgtgccagctggacatcgactactgcgagcccaacccctgccagaacggcgcccagtgctacaacagagccagcgactacttctgcaagtgccccgaggactacgagggcaagaactgcagccacctgaaggaccactgcagaaccaccccctgcgaggtgatcgacagctgcaccgtggccatggccagcaacgacacccccgagggcgtgagatacatcagcagcaacgtgtgcggcccccacggcaagtgcaagagccagagcggcggcaagttcacctgcgactgcaacaagggcttcaccggcacctactgccacgagaacatcaacgactgcgagagcaacccctgcagaaacggcggcacctgcatcgacggcgtgaacagctacaagtgcatctgcagcgacggctgggagggcgcctactgcgagaccaacatcaacgactgcagccagaacccctgccacaacggcggcacctgcagagacctggtgaacgacttctactgcgactgcaagaacggctggaagggcaagacctgccacagcagagacagccagtgcgacgaggccacctgcaacaacggcggcacctgctacgacgagggcgacgccttcaagtgcatgtgccccggcggctgggagggcaccacctgcaacatcgccagaaacagcagctgcctgcccaacccctgccacaacggcggcacctgcgtggtgaacggcgagagcttcacctgcgtgtgcaaggagggctgggagggccccatctgcgcccagaacaccaacgactgcagcccccacccctgctacaacagcggcacctgcgtggacggcgacaactggtacagatgcgagtgcgcccccggcttcgccggccccgactgcagaatcaacatcaacgagtgccagagcagcccctgcgccttcggcgccacctgcgtggacgagatcaacggctacagatgcgtgtgcccccccggccacagcggcgccaagtgccaggaggtgagcggcagaccctgcatcaccatgggcagcgtgatccccgacggcgccaagtgggacgacgactgcaacacctgccagtgcctgaacggcagaatcgcctgcagcaaggtgtggtgcggccccagaccctgcctgctgcacaagggccacagcgagtgccccagcggccagagctgcatccccatcctggacgaccagtgcttcgtgcacccctgcaccggcgtgggcgagtgcagaagcagcagcctgcagcccgtgaagaccaagtgcaccagcgacagctactaccaggacaactgcgccaacatcaccttcaccttcaacaaggagatgatgagccccggcctgaccaccgagcacatctgcagcgagctgagaaacctgaacatcctgaagaacgtgagcgccgagtacagcatctacatcgcctgcgagcccagccccagcgccaacaacgagatccacgtggccatcagcgccgaggacatcagagacgacggcaaccccatcaaggagatcaccgacaagatcatcgacctggtgagcaagagagacggcaacagcagcctgatcgccgccgtggccgaggtgagagtgcagagaagacccctgaagaacagaaccgacttcctggtgcccctgctgagcagcgtgctgaccgtggcctggatctgctgcctggtgaccgccttctactggtgcctgagaaagagaagaaagcccggcagccacacccacagcgccagcgaggacaacaccaccaacaacgtgagagagcagctgaaccagatcaagaaccccatcgagaagcacggcgccaacaccgtgcccatcaaggactacgagaacaagaacagcaagatgagcaagatcagaacccacaacagcgaggtggaggaggacgacatggacaagcaccagcagaaggccagattcgccaagcagcccgcctacaccctggtggacagagaggagaagccccccaacggcacccccaccaagcaccccaactggaccaacaagcaggacaacagagacctggagagcgcccagagcctgaacagaatggagtacatcgtgtag

SEQ ID NO: 11211 - DNA, 3399 bp, synthetic construct
  misc_feature 1..3399: note = Description of Artificial Sequence: Synthetic coding sequence
  source 1..3399: mol_type = other DNA
atgggcatggcctgcctgaccatgaccgagatggagggcaccagcaccagcagcatctaccagaacggcgacatcagcggcaacgccaacagcatgaagcagatcgaccccgtgctgcaggtgtacctgtaccacagcctgggcaagagcgaggccgactacctgaccttccccagcggcgagtacgtggccgaggagatctgcatcgccgccagcaaggcctgcggcatcacccccgtgtaccacaacatgttcgccctgatgagcgagaccgagagaatctggtacccccccaaccacgtgttccacatcgacgagagcaccagacacaacgtgctgtacagaatcagattctacttccccagatggtactgcagcggcagcaacagagcctacagacacggcatcagcagaggcgccgaggcccccctgctggacgacttcgtgatgagctacctgttcgcccagtggagacacgacttcgtgcacggctggatcaaggtgcccgtgacccacgagacccaggaggagtgcctgggcatggccgtgctggacatgatgagaatcgccaaggagaacgaccagacccccctggccatctacaacagcatcagctacaagaccttcctgcccaagtgcatcagagccaagatccaggactaccacatcctgaccagaaagagaatcagatacagattcagaagattcatccagcagttcagccagtgcaaggccaccgccagaaacctgaagctgaagtacctgatcaacctggagaccctgcagagcgccttctacaccgagaagttcgaggtgaaggagcccggcagcggccccagcggcgaggagatcttcgccaccatcatcatcaccggcaacggcggcatccagtggagcagaggcaagcacaaggagagcgagaccctgaccgagcaggacctgcagctgtactgcgacttccccaacatcatcgacgtgagcatcaagcaggccaaccaggagggcagcaacgagagcagagtggtgaccatccacaagcaggacggcaagaacctggagatcgagctgagcagcctgagagaggccctgagcttcgtgagcctgatcgacggctactacagactgaccgccgacgcccaccactacctgtgcaaggaggtggccccccccgccgtgctggagaacatccagagcaactgccacggccccatcagcatggacttcgccatcagcaagctgaagaaggccggcaaccagaccggcctgtacgtgctgagatgcagccccaaggacttcaacaagtacttcctgaccttcgccgtggagagagagaacgtgatcgagtacaagcactgcctgatcaccaagaacgagaacgaggagtacaacctgagcggcaccaagaagaacttcagcagcctgaaggacctgctgaactgctaccagatggagaccgtgagaagcgacaacatcatcttccagttcaccaagtgctgcccccccaagcccaaggacaagagcaacctgctggtgttcagaaccaacggcgtgagcgacgtgcccaccagccccaccctgcagagacccacccacatgaaccagatggtgttccacaagatcagaaacgaggacctgatcttcaacgagagcctgggccagggcaccttcaccaagatcttcaagggcgtgagaagagaggtgggcgactacggccagctgcacgagaccgaggtgctgctgaaggtgctggacaaggcccacagaaactacagcgagagcttcttcgaggccgccagcatgatgagcaagctgagccacaagcacctggtgctgaactacggcgtgtgcgtgtgcggcgacgagaacatcctggtgcaggagttcgtgaagttcggcagcctggacacctacctgaagaagaacaagaactgcatcaacatcctgtggaagctggaggtggccaagcagctggcctgggccatgcacttcctggaggagaacaccctgatccacggcaacgtgtgcgccaagaacatcctgctgatcagagaggaggacagaaagaccggcaacccccccttcatcaagctgagcgaccccggcatcagcatcaccgtgctgcccaaggacatcctgcaggagagaatcccctgggtgccccccgagtgcatcgagaaccccaagaacctgaacctggccaccgacaagtggagcttcggcaccaccctgtgggagatctgcagcggcggcgacaagcccctgagcgccctggacagccagagaaagctgcagttctacgaggacagacaccagctgcccgcccccaagtgggccgagctggccaacctgatcaacaactgcatggactacgagcccgacttcagacccagcttcagagccatcatcagagacctgaacagcctgttcacccccgactacgagctgctgaccgagaacgacatgctgcccaacatgagaatcggcgccctgggcttcagcggcgccttcgaggacagagaccccacccagttcgaggagagacacctgaagttcctgcagcagctgggcaagggcaacttcggcagcgtggagatgtgcagatacgaccccctgcaggacaacaccggcgaggtggtggccgtgaagaagctgcagcacagcaccgaggagcacctgagagacttcgagagagagatcgagatcctgaagagcctgcagcacgacaacatcgtgaagtacaagggcgtgtgctacagcgccggcagaagaaacctgaagctgatcatggagtacctgccctacggcagcctgagagactacctgcagaagcacaaggagagaatcgaccacatcaagctgctgcagtacaccagccagatctgcaagggcatggagtacctgggcaccaagagatacatccacagagacctggccaccagaaacatcctggtggagaacgagaacagagtgaagatcggcgacttcggcctgaccaaggtgctgccccaggacaaggagtactacaaggtgaaggagcccggcgagagccccatcttctggtacgcccccgagagcctgaccgagagcaagttcagcgtggccagcgacgtgtggagcttcggcgtggtgctgtacgagctgttcacctacatcgagaagagcaagagcccccccgccgagttcatgagaatgatcggcaacgacaagcagggccagatgatcgtgttccacctgatcgagctgctgaagaacaacggcagactgcccagacccgacggctgccccgacgagatctacatgatcatgaccgagtgctggaacaacaacgtgaaccagagacccagcttcagagacctggccctgagagtggaccagatcagagacaacatggccggctag

SEQ ID NO: 11212 - DNA, 3399 bp, synthetic construct; identical to SEQ ID NO: 11211
  misc_feature 1..3399: note = Description of Artificial Sequence: Synthetic coding sequence
  source 1..3399: mol_type = other DNA

SEQ ID NO: 11213 - DNA, 2952 bp, synthetic construct
  misc_feature 1..2952: note = Description of Artificial Sequence: Synthetic coding sequence
  source 1..2952: mol_type = other DNA
atgagctacctgttcgcccagtggagacacgacttcgtgcacggctggatcaaggtgcccgtgacccacgagacccaggaggagtgcctgggcatggccgtgctggacatgatgagaatcgccaaggagaacgaccagacccccctggccatctacaacagcatcagctacaagaccttcctgcccaagtgcatcagagccaagatccaggactaccacatcctgaccagaaagagaatcagatacagattcagaagattcatccagcagttcagccagtgcaaggccaccgccagaaacctgaagctgaagtacctgatcaacctggagaccctgcagagcgccttctacaccgagaagttcgaggtgaaggagcccggcagcggccccagcggcgaggagatcttcgccaccatcatcatcaccggcaacggcggcatccagtggagcagaggcaagcacaaggagagcgagaccctgaccgagcaggacctgcagctgtactgcgacttccccaacatcatcgacgtgagcatcaagcaggccaaccaggagggcagcaacgagagcagagtggtgaccatccacaagcaggacggcaagaacctggagatcgagctgagcagcctgagagaggccctgagcttcgtgagcctgatcgacggctactacagactgaccgccgacgcccaccactacctgtgcaaggaggtggccccccccgccgtgctggagaacatccagagcaactgccacggccccatcagcatggacttcgccatcagcaagctgaagaaggccggcaaccagaccggcctgtacgtgctgagatgcagccccaaggacttcaacaagtacttcctgaccttcgccgtggagagagagaacgtgatcgagtacaagcactgcctgatcaccaagaacgagaacgaggagtacaacctgagcggcaccaagaagaacttcagcagcctgaaggacctgctgaactgctaccagatggagaccgtgagaagcgacaacatcatcttccagttcaccaagtgctgcccccccaagcccaaggacaagagcaacctgctggtgttcagaaccaacggcgtgagcgacgtgcccaccagccccaccctgcagagacccacccacatgaaccagatggtgttccacaagatcagaaacgaggacctgatcttcaacgagagcctgggccagggcaccttcaccaagatcttcaagggcgtgagaagagaggtgggcgactacggccagctgcacgagaccgaggtgctgctgaaggtgctggacaaggcccacagaaactacagcgagagcttcttcgaggccgccagcatgatgagcaagctgagccacaagcacctggtgctgaactacggcgtgtgcgtgtgcggcgacgagaacatcctggtgcaggagttcgtgaagttcggcagcctggacacctacctgaagaagaacaagaactgcatcaacatcctgtggaagctggaggtggccaagcagctggcctgggccatgcacttcctggaggagaacaccctgatccacggcaacgtgtgcgccaagaacatcctgctgatcagagaggaggacagaaagaccggcaacccccccttcatcaagctgagcgaccccggcatcagcatcaccgtgctgcccaaggacatcctgcaggagagaatcccctgggtgccccccgagtgcatcgagaaccccaagaacctgaacctggccaccgacaagtggagcttcggcaccaccctgtgggagatctgcagcggcggcgacaagcccctgagcgccctggacagccagagaaagctgcagttctacgaggacagacaccagctgcccgcccccaagtgggccgagctggccaacctgatcaacaactgcatggactacgagcccgacttcagacccagcttcagagccatcatcagagacctgaacagcctgttcacccccgactacgagctgctgaccgagaacgacatgctgcccaacatgagaatcggcgccctgggcttcagcggcgccttcgaggacagagaccccacccagttcgaggagagacacctgaagttcctgcagcagctgggcaagggcaacttcggcagcgtggagatgtgcagatacgaccccctgcaggacaacaccggcgaggtggtggccgtgaagaagctgcagcacagcaccgaggagcacctgagagacttcgagagagagatcgagatcctgaagagcctgcagcacgacaacatcgtgaagtacaagggcgtgtgctacagcgccggcagaagaaacctgaagctgatcatggagtacctgccctacggcagcctgagagactacctgcagaagcacaaggagagaatcgaccacatcaagctgctgcagtacaccagccagatctgcaagggcatggagtacctgggcaccaagagatacatccacagagacctggccaccagaaacatcctggtggagaacgagaacagagtgaagatcggcgacttcggcctgaccaaggtgctgccccaggacaaggagtactacaaggtgaaggagcccggcgagagccccatcttctggtacgcccccgagagcctgaccgagagcaagttcagcgtggccagcgacgtgtggagcttcggcgtggtgctgtacgagctgttcacctacatcgagaagagcaagagcccccccgccgagttcatgagaatgatcggcaacgacaagcagggccagatgatcgtgttccacctgatcgagctgctgaagaacaacggcagactgcccagacccgacggctgccccgacgagatctacatgatcatgaccgagtgctggaacaacaacgtgaaccagagacccagcttcagagacctggccctgagagtggaccagatcagagacaacatggccggctag

SEQ ID NO: 11214 - DNA, 732 bp, synthetic construct
  misc_feature 1..732: note = Description of Artificial Sequence: Synthetic coding sequence
  source 1..732: mol_type = other DNA
atgaccggcatcgccgccgccagcttcttcagcaacacctgcagattcggcggctgcggcctgcacttccccaccctggccgacctgatcgagcacatcgaggacaaccacatcgacaccgaccccagagtgctggagaagcaggagctgcagcagcccacctacgtggccctgagctacatcaacagattcatgaccgacgccgccagaagagagcaggagagcctgaagaagaagatccagcccaagctgagcctgaccctgagcagcagcgtgagcagaggcaacgtgagcaccccccccagacacagcagcggcagcctgaccccccccgtgaccccccccatcacccccagcagcagcttcagaagcagcacccccaccggcagcgagtacgacgaggaggaggtggactacgaggagagcgacagcgacgagagctggaccaccgagagcgccatcagcagcgaggccatcctgagcagcatgtgcatgaacggcggcgaggagaagcccttcgcctgccccgtgcccggctgcaagaagagatacaagaacgtgaacggcatcaagtaccacgccaagaacggccacagaacccagatcagagtgagaaagcccttcaagtgcagatgcggcaagagctacaagaccgcccagggcctgagacaccacaccatcaacttccacccccccgtgagcgccgagatcatcagaaagatgcagcagtag

SEQ ID NO: 11215 - DNA, 1044 bp, synthetic construct
  misc_feature 1..1044: note = Description of Artificial Sequence: Synthetic coding sequence
  source 1..1044: mol_type = other DNA
atgtgcaccaagatggagcagcccttctaccacgacgacagctacaccgccaccggctacggcagagcccccggcggcctgagcctgcacgactacaagctgctgaagcccagcctggccgtgaacctggccgacccctacagaagcctgaaggcccccggcgccagaggccccggccccgagggcggcggcggcggcagctacttcagcggccagggcagcgacaccggcgccagcctgaagctggccagcagcgagctggagagactgatcgtgcccaacagcaacggcgtgatcaccaccacccccaccccccccggccagtacttctaccccagaggcggcggcagcggcggcggcgccggcggcgccggcggcggcgtgaccgaggagcaggagggcttcgccgacggcttcgtgaaggccctggacgacctgcacaagatgaaccacgtgaccccccccaacgtgagcctgggcgccaccggcggcccccccgccggccccggcggcgtgtacgccggccccgagcccccccccgtgtacaccaacctgagcagctacagccccgccagcgccagcagcggcggcgccggcgccgccgtgggcaccggcagcagctaccccaccaccaccatcagctacctgccccacgccccccccttcgccggcggccaccccgcccagctgggcctgggcagaggcgccagcaccttcaaggaggagccccagaccgtgcccgaggccagaagcagagacgccaccccccccgtgagccccatcaacatggaggaccaggagagaatcaaggtggagagaaagagactgagaaacagactggccgccaccaagtgcagaaagagaaagctggagagaatcgccagactggaggacaaggtgaagaccctgaaggccgagaacgccggcctgagcagcaccgccggcctgctgagagagcaggtggcccagctgaagcagaaggtgatgacccacgtgagcaacggctgccagctgctgctgggcgtgaagggccacgccttctag

SEQ ID NO: 11216 - DNA, 996 bp, synthetic construct
  misc_feature 1..996: note = Description of Artificial Sequence: Synthetic coding sequence
  source 1..996: mol_type = other DNA
atgaccgccaagatggagaccaccttctacgacgacgccctgaacgccagcttcctgcccagcgagagcggcccctacggctacagcaaccccaagatcctgaagcagagcatgaccctgaacctggccgaccccgtgggcagcctgaagccccacctgagagccaagaacagcgacctgctgaccagccccgacgtgggcctgctgaagctggccagccccgagctggagagactgatcatccagagcagcaacggccacatcaccaccacccccacccccacccagttcctgtgccccaagaacgtgaccgacgagcaggagggcttcgccgagggcttcgtgagagccctggccgagctgcacagccagaacaccctgcccagcgtgaccagcgccgcccagcccgtgaacggcgccggcatggtggcccccgccgtggccagcgtggccggcggcagcggcagcggcggcttcagcgccagcctgcacagcgagccccccgtgtacgccaacctgagcaacttcaaccccggcgccctgagcagcggcggcggcgcccccagctacggcgccgccggcctggccttccccgcccagccccagcagcagcagcagcccccccaccacctgccccagcagatgcccgtgcagcaccccagactgcaggccctgaaggaggagccccagaccgtgcccgagatgcccggcgagaccccccccctgagccccatcgacatggagagccaggagagaatcaaggccgagagaaagagaatgagaaacagaatcgccgccagcaagtgcagaaagagaaagctggagagaatcgccagactggaggagaaggtgaagaccctgaaggcccagaacagcgagctggccagcaccgccaacatgctgagagagcaggtggcccagctgaagcagaaggtgatgaaccacgtgaacagcggctgccagctgatgctgacccagcagctgcagaccttctag

SEQ ID NO: 11217 - DNA, 831 bp, synthetic construct
  misc_feature 1..831: note = Description of Artificial Sequence: Synthetic coding sequence
  source 1..831: mol_type = other DNA
atgagagccccccacctgcacctgagcgccgccagcggcgccagagccctggccaagctgctgcccctgctgatggcccagctgtgggccgccgaggccgccctgctgccccagaacgacaccagactggaccccgaggcctacggcagcccctgcgccagaggcagccagccctggcaggtgagcctgttcaacggcctgagcttccactgcgccggcgtgctggtggaccagagctgggtgctgaccgccgcccactgcggcaacaagcccctgtgggccagagtgggcgacgaccacctgctgctgctgcagggcgagcagctgagaagaaccaccagaagcgtggtgcaccccaagtaccaccagggcagcggccccatcctgcccagaagaaccgacgagcacgacctgatgctgctgaagctggccagacccgtggtgctgggccccagagtgagagccctgcagctgccctacagatgcgcccagcccggcgaccagtgccaggtggccggctggggcaccaccgccgccagaagagtgaagtacaacaagggcctgacctgcagcagcatcaccatcctgagccccaaggagtgcgaggtgttctaccccggcgtggtgaccaacaacatgatctgcgccggcctggacagaggccaggacccctgccagagcgacagcggcggccccctggtgtgcgacgagaccctgcagggcatcctgagctggggcgtgtacccctgcggcagcgcccagcaccccgccgtgtacacccagatctgcaagtacatgagctggatcaacaaggtgatcagaagcaactag

SEQ ID NO: 11218 - DNA, 831 bp, synthetic construct; identical to SEQ ID NO: 11217
  misc_feature 1..831: note = Description of Artificial Sequence: Synthetic coding sequence
  source 1..831: mol_type = other DNA

SEQ ID NO: 11219 - DNA, 831 bp, synthetic construct; identical to SEQ ID NO: 11217
  misc_feature 1..831: note = Description of Artificial Sequence: Synthetic coding sequence
  source 1..831: mol_type = other DNA

SEQ ID NO: 11220 - DNA, 657 bp, synthetic construct
  misc_feature 1..657: note = Description of Artificial Sequence: Synthetic coding sequence
  source 1..657: mol_type = other DNA
atgtgggtgcccgtggtgttcctgaccctgagcgtgacctggatcggcgccgcccccctgatcctgagcagaatcgtgggcggctgggagtgcgagaagcacagccagccctggcaggtgctggtggccagcagaggcagagccgtgtgcggcggcgtgctggtgcacccccagtgggtgctgaccgccgcccactgcatcagaaagcccggcgacgacagcagccacgacctgatgctgctgagactgagcgagcccgccgagctgaccgacgccgtgaaggtgatggacctgcccacccaggagcccgccctgggcaccacctgctacgccagcggctggggcagcatcgagcccgaggagttcctgacccccaagaagctgcagtgcgtggacctgcacgtgatcagcaacgacgtgtgcgcccaggtgcacccccagaaggtgaccaagttcatgctgtgcgccggcagatggaccggcggcaagagcacctgcagcggcgacagcggcggccccctggtgtgcaacggcgtgctgcagggcatcaccagctggggcagcgagccctgcgccctgcccgagagacccagcctgtacaccaaggtggtgcactacagaaagtggatcaaggacaccatcgtggccaacccctag

SEQ ID NO: 11221 - DNA, 1590 bp, synthetic construct
  misc_feature 1..1590: note = Description of Artificial Sequence: Synthetic coding sequence
  source 1..1590: mol_type = other DNA
atgagcaccaacgagaacgccaacacccccgccgccagactgcacagattcaagaacaagggcaaggacagcaccgagatgagaagaagaagaatcgaggtgaacgtggagctgagaaaggccaagaaggacgaccagatgctgaagagaagaaacgtgagcagcttccccgacgacgccaccagccccctgcaggagaacagaaacaaccagggcaccgtgaactggagcgtggacgacatcgtgaagggcatcaacagcagcaacgtggagaaccagctgcaggccacccaggccgccagaaagctgctgagcagagagaagcagccccccatcgacaacatcatcagagccggcctgatccccaagttcgtgagcttcctgggcagaaccgactgcagccccatccagttcgagagcgcctgggccctgaccaacatcgccagcggcaccagcgagcagaccaaggccgtggtggacggcggcgccatccccgccttcatcagcctgctggccagcccccacgcccacatcagcgagcaggccgtgtgggccctgggcaacatcgccggcgacggcagcgtgttcagagacctggtgatcaagtacggcgccgtggaccccctgctggccctgctggccgtgcccgacatgagcagcctggcctgcggctacctgagaaacctgacctggaccctgagcaacctgtgcagaaacaagaaccccgccccccccatcgacgccgtggagcagatcctgcccaccctggtgagactgctgcaccacgacgaccccgaggtgctggccgacacctgctgggccatcagctacctgaccgacggccccaacgagagaatcggcatggtggtgaagaccggcgtggtgccccagctggtgaagctgctgggcgccagcgagctgcccatcgtgacccccgccctgagagccatcggcaacatcgtgaccggcaccgacgagcagacccaggtggtgatcgacgccggcgccctggccgtgttccccagcctgctgaccaaccccaagaccaacatccagaaggaggccacctggaccatgagcaacatcaccgccggcagacaggaccagatccagcaggtggtgaaccacggcctggtgcccttcctggtgagcgtgctgagcaaggccgacttcaagacccagaaggaggccgtgtgggccgtgaccaactacaccagcggcggcaccgtggagcagatcgtgtacctggtgcactgcggcatcatcgagcccctgatgaacctgctgaccgccaaggacaccaagatcatcctggtgatcctggacgccatcagcaacatcttccaggccgccgagaagctgggcgagaccgagaagctgagcatcatgatcgaggagtgcggcggcctggacaagatcgaggccctgcagaaccacgagaacgagagcgtgtacaaggccagcctgagcctgatcgagaagtacttcagcgtggaggaggaggaggaccagaacgtggtgcccgagaccaccagcgagggctacaccttccaggtgcaggacggcgcccccggcaccttcaacttctag

SEQ ID NO: 11222 - DNA, 1590 bp, synthetic construct; identical to SEQ ID NO: 11221
  misc_feature 1..1590: note = Description of Artificial Sequence: Synthetic coding sequence
  source 1..1590: mol_type = other DNA

SEQ ID NO: 11223 - DNA, 1968 bp, synthetic construct
  misc_feature 1..1968: note = Description of Artificial Sequence: Synthetic coding sequence
  source 1..1968: mol_type = other DNA
atgcccctgaagtggaagaccagcagccccgccatctggaagttccccgtgcccgtgctgaagaccagcagaagcacccccctgagccccgcctacatcagcctggtggaggaggaggaccagcacatgaagctgagcctgggcggcagcgagatgggcctgagcagccacctgcagagcagcaaggccggccccaccagaatcttcaccagcaacacccacagcagcgtggtgctgcagggcttcgaccagctgagactggagggcctgctgtgcgacgtgaccctgatgcccggcgacaccgacgacgccttccccgtgcacagagtgatgatggccagcgccagcgactacttcaaggccatgttcaccggcggcatgaaggagcaggacctgatgtgcatcaagctgcacggcgtgagcaaggtgggcctgagaaagatcatcgacttcatctacaccgccaagctgagcctgaacatggacaacctgcaggacaccctggaggccgccagcttcctgcagatcctgcccgtgctggacttctgcaaggtgttcctgatcagcggcgtgaccctggacaactgcgtggaggtgggcagaatcgccaacacctacaacctgaccgaggtggacaagtacgtgaacagcttcgtgctgaagaacttccccgccctgctgagcaccggcgagttcctgaagctgcccttcgagagactggccttcgtgctgagcagcaacagcctgaagcactgcaccgagctggagctgttcaaggccacctgcagatggctgagactggaggagcccagaatggacttcgccgccaagctgatgaagaacatcagattccccctgatgaccccccaggagctgatcaactacgtgcagaccgtggacttcatgagaaccgacaacacctgcgtgaacctgctgctggaggccagcaactaccagatgatgccctacatgcagcccgtgatgcagagcgacagaaccgccatcagaagcgacaccacccacctggtgaccctgggcggcgtgctgagacagcagctggtggtgagcaaggagctgagaatgtacgacgagaaggcccacgagtggaagagcctggcccccatggacgcccccagataccagcacggcatcgccgtgatcggcaacttcctgtacgtggtgggcggccagagcaactacgacaccaagggcaagaccgccgtggacaccgtgttcagattcgaccccagatacaacaagtggatgcaggtggccagcctgaacgagaagagaaccttcttccacctgagcgccctgaagggctacctgtacgccgtgggcggcagaaacgccgccggcgagctgcccaccgtggagtgctacaaccccagaaccaacgagtggacctacgtggccaagatgagcgagccccactacggccacgccggcaccgtgtacggcggcgtgatgtacatcagcggcggcatcacccacgacaccttccagaaggagctgatgtgcttcgaccccgacaccgacaagtggatccagaaggcccccatgaccaccgtgagaggcctgcactgcatgtgcaccgtgggcgagagactgtacgtgatcggcggcaaccacttcagaggcaccagcgactacgacgacgtgctgagctgcgagtactacagccccatcctggaccagtggacccccatcgccgccatgctgagaggccagagcgacgtgggcgtggccgtgttcgagaacaagatctacgtggtgggcggctacagctggaacaacagatgcatggtggagatcgtgcagaagtacgaccccgacaaggacgagtggcacaaggtgttcgacctgcccgagagcctgggcggcatcagagcctgcaccctgaccgtgttcccccccgaggagaccacccccagccccagcagagagagccccctgagcgccccctag

SEQ ID NO: 11224 - DNA, 1815 bp, synthetic construct
  misc_feature 1..1815: note = Description of Artificial Sequence: Synthetic coding sequence
  source 1..1815: mol_type = other DNA
atgggcctgagcagccacctgcagagcagcaaggccggccccaccagaatcttcaccagcaacacccacagcagcgtggtgctgcagggcttcgaccagctgagactggagggcctgctgtgcgacgtgaccctgatgcccggcgacaccgacgacgccttccccgtgcacagagtgatgatggccagcgccagcgactacttcaaggccatgttcaccggcggcatgaaggagcaggacctgatgtgcatcaagctgcacggcgtgagcaaggtgggcctgagaaagatcatcgacttcatctacaccgccaagctgagcctgaacatggacaacctgcaggacaccctggaggccgccagcttcctgcagatcctgcccgtgctggacttctgcaaggtgttcctgatcagcggcgtgaccctggacaactgcgtggaggtgggcagaatcgccaacacctacaacctgaccgaggtggacaagtacgtgaacagcttcgtgctgaagaacttccccgccctgctgagcaccggcgagttcctgaagctgcccttcgagagactggccttcgtgctgagcagcaacagcctgaagcactgcaccgagctggagctgttcaaggccacctgcagatggctgagactggaggagcccagaatggacttcgccgccaagctgatgaagaacatcagattccccctgatgaccccccaggagctgatcaactacgtgcagaccgtggacttcatgagaaccgacaacacctgcgtgaacctgctgctggaggccagcaactaccagatgatgccctacatgcagcccgtgatgcagagcgacagaaccgccatcagaagcgacaccacccacctggtgaccctgggcggcgtgctgagacagcagctggtggtgagcaaggagctgagaatgtacgacgagaaggcccacgagtggaagagcctggcccccatggacgcccccagataccagcacggcatcgccgtgatcggcaacttcctgtacgtggtgggcggccagagcaactacgacaccaagggcaagaccgccgtggacaccgtgttcagattcgaccccagatacaacaagtggatgcaggtggccagcctgaacgagaagagaaccttcttccacctgagcgccctgaagggctacctgtacgccgtgggcggcagaaacgccgccggcgagctgcccaccgtggagtgctacaaccccagaaccaacgagtggacctacgtggccaagatgagcgagccccactacggccacgccggcaccgtgtacggcggcgtgatgtacatcagcggcggcatcacccacgacaccttccagaaggagctgatgtgcttcgaccccgacaccgacaagtggatccagaaggcccccatgaccaccgtgagaggcctgcactgcatgtgcaccgtgggcgagagactgtacgtgatcggcggcaaccacttcagaggcaccagcgactacgacgacgtgctgagctgcgagtactacagccccatcctggaccagtggacccccatcgccgccatgctgagaggccagagcgacgtgggcgtggccgtgttcgagaacaagatctacgtggtgggcggctacagctggaacaacagatgcatggtggagatcgtgcagaagtacgaccccgacaaggacgagtggcacaaggtgttcgacctgcccgagagcctgggcggcatcagagcctgcaccctgaccgtgttcccccccgaggagaccacccccagccccagcagagagagccccctgagcgccccctag

SEQ ID NO: 11225 - DNA, 1815 bp, synthetic construct; identical to SEQ ID NO: 11224
  misc_feature 1..1815: note = Description of Artificial Sequence: Synthetic coding sequence
  source 1..1815: mol_type = other DNA

SEQ ID NO: 11226 - DNA, 1815 bp, synthetic construct; identical to SEQ ID NO: 11224
  misc_feature 1..1815: note = Description of Artificial Sequence: Synthetic coding sequence
  source 1..1815: mol_type = other DNA

SEQ ID NO: 11227 - DNA, 1815 bp, synthetic construct; identical to SEQ ID NO: 11224
  misc_feature 1..1815: note = Description of Artificial Sequence: Synthetic coding sequence
  source 1..1815: mol_type = other DNA

SEQ ID NO: 11228 - DNA, 117 bp, synthetic construct
  misc_feature 1..117: note = Description of Artificial Sequence: Synthetic coding sequence
  source 1..117: mol_type = other DNA
atgggcctgagcagccacctgcagagcagcaaggccggccccaccagaatcttcaccagcaacacccacagcagcgtggtgctgcagggcttcgaccagctgagactggagggctag

SEQ ID NO: 11229 - DNA, 1815 bp, synthetic construct; identical to SEQ ID NO: 11224
  misc_feature 1..1815: note = Description of Artificial Sequence: Synthetic coding sequence
  source 1..1815: mol_type = other DNA

SEQ ID NO: 11230 - DNA, 1977 bp, synthetic construct
  misc_feature 1..1977: note = Description of Artificial Sequence: Synthetic coding sequence
  source 1..1977: mol_type = other DNA
atgatgagagtgcagaccctgagagagaagtgggcctactggagaagaagacagctgagcctgaagcaggccgacttcaaggacatcttcaagaagagcaccagcggcagcctggtggaggaggaggaccagcacatgaagctgagcctgggcggcagcgagatgggcctgagcagccacctgcagagcagcaaggccggccccaccagaatcttcaccagcaacacccacagcagcgtggtgctgcagggcttcgaccagctgagactggagggcctgctgtgcgacgtgaccctgatgcccggcgacaccgacgacgccttccccgtgcacagagtgatgatggccagcgccagcgactacttcaaggccatgttcaccggcggcatgaaggagcaggacctgatgtgcatcaagctgcacggcgtgagcaaggtgggcctgagaaagatcatcgacttcatctacaccgccaagctgagcctgaacatggacaacctgcaggacaccctggaggccgccagcttcctgcagatcctgcccgtgctggacttctgcaaggtgttcctgatcagcggcgtgaccctggacaactgcgtggaggtgggcagaatcgccaacacctacaacctgaccgaggtggacaagtacgtgaacagcttcgtgctgaagaacttccccgccctgctgagcaccggcgagttcctgaagctgcccttcgagagactggccttcgtgctgagcagcaacagcctgaagcactgcaccgagctggagctgttcaaggccacctgcagatggctgagactggaggagcccagaatggacttcgccgccaagctgatgaagaacatcagattccccctgatgaccccccaggagctgatcaactacgtgcagaccgtggacttcatgagaaccgacaacacctgcgtgaacctgctgctggaggccagcaactaccagatgatgccctacatgcagcccgtgatgcagagcgacagaaccgccatcagaagcgacaccacccacctggtgaccctgggcggcgtgctgagacagcagctggtggtgagcaaggagctgagaatgtacgacgagaaggcccacgagtggaagagcctggcccccatggacgcccccagataccagcacggcatcgccgtgatcggcaacttcctgtacgtggtgggcggccagagcaactacgacaccaagggcaagaccgccgtggacaccgtgttcagattcgaccccagatacaacaagtggatgcaggtggccagcctgaacgagaagagaaccttcttccacctgagcgccctgaagggctacctgtacgccgtgggcggcagaaacgccgccggcgagctgcccaccgtggagtgctacaaccccagaaccaacgagtggacctacgtggccaagatgagcgagccccactacggccacgccggcaccgtgtacggcggcgtgatgtacatcagcggcggcatcacccacgacaccttccagaaggagctgatgtgcttcgaccccgacaccgacaagtggatccagaaggcccccatgaccaccgtgagaggcctgcactgcatgtgcaccgtgggcgagagactgtacgtgatcggcggcaaccacttcagaggcaccagcgactacgacgacgtgctgagctgcgagtactacagccccatcctggaccagtggacccccatcgccgccatgctgagaggccagagcgacgtgggcgtggccgtgttcgagaacaagatctacgtggtgggcggctacagctggaacaacagatgcatggtggagatcgtgcagaagtacgaccccgacaaggacgagtggcacaaggtgttcgacctgcccgagagcctgggcggcatcagagcctgcaccctgaccgtgttcccccccgaggagaccacccccagccccagcagagagagccccctgagcgccccctag

SEQ ID NO: 11231 - DNA, 1920 bp, synthetic construct
  misc_feature 1..1920: note = Description of Artificial Sequence: Synthetic coding sequence
  source 1..1920: mol_type = other DNA
atggaccacctgcacagaggcgagctggtggccgccatcctgagaaacagaagcctggtggaggaggaggaccagcacatgaagctgagcctgggcggcagcgagatgggcctgagcagccacctgcagagcagcaaggccggccccaccagaatcttcaccagcaacacccacagcagcgtggtgctgcagggcttcgaccagctgagactggagggcctgctgtgcgacgtgaccctgatgcccggcgacaccgacgacgccttccccgtgcacagagtgatgatggccagcgccagcgactacttcaaggccatgttcaccggcggcatgaaggagcaggacctgatgtgcatcaagctgcacggcgtgagcaaggtgggcctgagaaagatcatcgacttcatctacaccgccaagctgagcctgaacatggacaacctgcaggacaccctggaggccgccagcttcctgcagatcctgcccgtgctggacttctgcaaggtgttcctgatcagcggcgtgaccctggacaactgcgtggaggtgggcagaatcgccaacacctacaacctgaccgaggtggacaagtacgtgaacagcttcgtgctgaagaacttccccgccctgctgagcaccggcgagttcctgaagctgcccttcgagagactggccttcgtgctgagcagcaacagcctgaagcactgcaccgagctggagctgttcaaggccacctgcagatggctgagactggaggagcccagaatggacttcgccgccaagctgatgaagaacatcagattccccctgatgaccccccaggagctgatcaactacgtgcagaccgtggacttcatgagaaccgacaacacctgcgtgaacctgctgctggaggccagcaactaccagatgatgccctacatgcagcccgtgatgcagagcgacagaaccgccatcagaagcgacaccacccacctggtgaccctgggcggcgtgctgagacagcagctggtggtgagcaaggagctgagaatgtacgacgagaaggcccacgagtggaagagcctggcccccatggacgcccccagataccagcacggcatcgccgtgatcggcaacttcctgtacgtggtgggcggccagagcaactacgacaccaagggcaagaccgccgtggacaccgtgttcagattcgaccccagatacaacaagtggatgcaggtggccagcctgaacgagaagagaaccttcttccacctgagcgccctgaagggctacctgtacgccgtgggcggcagaaacgccgccggcgagctgcccaccgtggagtgctacaaccccagaaccaacgagtggacctacgtggccaagatgagcgagccccactacggccacgccggcaccgtgtacggcggcgtgatgtacatcagcggcggcatcacccacgacaccttccagaaggagctgatgtgcttcgaccccgacaccgacaagtggatccagaaggcccccatgaccaccgtgagaggcctgcactgcatgtgcaccgtgggcgagagactgtacgtgatcggcggcaaccacttcagaggcaccagcgactacgacgacgtgctgagctgcgagtactacagccccatcctggaccagtggacccccatcgccgccatgctgagaggccagagcgacgtgggcgtggccgtgttcgagaacaagatctacgtggtgggcggctacagctggaacaacagatgcatggtggagatcgtgcagaagtacgaccccgacaaggacgagtggcacaaggtgttcgacctgcccgagagcctgggcggcatcagagcctgcaccctgaccgtgttcccccccgaggagaccacccccagccccagcagagagagccccctgagcgccccctag

SEQ ID NO: 11232 - DNA, 1920 bp, synthetic construct; identical to SEQ ID NO: 11231
  misc_feature 1..1920: note = Description of Artificial Sequence: Synthetic coding sequence
  source 1..1920: mol_type = other DNA

SEQ ID NO: 11233 - DNA, 1842 bp, synthetic construct
  misc_feature 1..1842: note = Description of Artificial Sequence: Synthetic coding sequence
  source 1..1842: mol_type = other DNA
atgaagctgagcctgggcggcagcgagatgggcctgagcagccacctgcagagcagcaaggccggccccaccagaatcttcaccagcaacacccacagcagcgtggtgctgcagggcttcgaccagctgagactggagggcctgctgtgcgacgtgaccctgatgcccggcgacaccgacgacgccttccccgtgcacagagtgatgatggccagcgccagcgactacttcaaggccatgttcaccggcggcatgaaggagcaggacctgatgtgcatcaagctgcacggcgtgagcaaggtgggcctgagaaagatcatcgacttcatctacaccgccaagctgagcctgaacatggacaacctgcaggacaccctggaggccgccagcttcctgcagatcctgcccgtgctggacttctgcaaggtgttcctgatcagcggcgtgaccctggacaactgcgtggaggtgggcagaatcgccaacacctacaacctgaccgaggtggacaagtacgtgaacagcttcgtgctgaagaacttccccgccctgctgagcaccggcgagttcctgaagctgcccttcgagagactggccttcgtgctgagcagcaacagcctgaagcactgcaccgagctggagctgttcaaggccacctgcagatggctgagactggaggagcccagaatggacttcgccgccaagctgatgaagaacatcagattccccctgatgaccccccaggagctgatcaactacgtgcagaccgtggacttcatgagaaccgacaacacctgcgtgaacctgctgctggaggccagcaactaccagatgatgccctacatgcagcccgtgatgcagagcgacagaaccgccatcagaagcgacaccacccacctggtgaccctgggcggcgtgctgagacagcagctggtggtgagcaaggagctgagaatgtacgacgagaaggcccacgagtggaagagcctggcccccatggacgcccccagataccagcacggcatcgccgtgatcggcaacttcctgtacgtggtgggcggccagagcaactacgacaccaagggcaagaccgccgtggacaccgtgttcagattcgaccccagatacaacaagtggatgcaggtggccagcctgaacgagaagagaaccttcttccacctgagcgccctgaagggctacctgtacgccgtgggcggcagaaacgccgccggcgagctgcccaccgtggagtgctacaaccccagaaccaacgagtggacctacgtggccaagatgagcgagccccactacggccacgccggcaccgtgtacggcggcgtgatgtacatcagcggcggcatcacccacgacaccttccagaaggagctgatgtgcttcgaccccgacaccgacaagtggatccagaaggcccccatgaccaccgtgagaggcctgcactgcatgtgcaccgtgggcgagagactgtacgtgatcggcggcaaccacttcagaggcaccagcgactacgacgacgtgctgagctgcgagtactacagccccatcctggaccagtggacccccatcgccgccatgctgagaggccagagcgacgtgggcgtggccgtgttcgagaacaagatctacgtggtgggcggctacagctggaacaacagatgcatggtggagatcgtgcagaagtacgaccccgacaaggacgagtggcacaaggtgttcgacctgcccgagagcctgggcggcatcagagcctgcaccctgaccgtgttcccccccgaggagaccacccccagccccagcagagagagccccctgagcgccccctag

SEQ ID NO: 11234 - DNA, 1419 bp, synthetic construct
  misc_feature 1..1419: note = Description of Artificial Sequence: Synthetic coding sequence
  source 1..1419: mol_type = other DNA
atgaccacctgcagcagacagttcaccagcagcagcagcatgaagggcagctgcggcatcggcggcggcatcggcggcggcagcagcagaatcagcagcgtgctggccggcggcagctgcagagcccccagcacctacggcggcggcctgagcgtgagcagcagcagattcagcagcggcggcgcctgcggcctgggcggcggctacggcggcggcttcagcagcagcagcagcagcttcggcagcggcttcggcggcggctacggcggcggcctgggcgccggcctgggcggcggcttcggcggcggcttcgccggcggcgacggcctgctggtgggcagcgagaaggtgaccatgcagaacctgaacgacagactggccagctacctggacaaggtgagagccctggaggaggccaacgccgacctggaggtgaagatcagagactggtaccagagacagagacccgccgagatcaaggactacagcccctacttcaagaccatcgaggacctgagaaacaagatcctgaccgccaccgtggacaacgccaacgtgctgctgcagatcgacaacgccagactggccgccgacgacttcagaaccaagtacgagaccgagctgaacctgagaatgagcgtggaggccgacatcaacggcctgagaagagtgctggacgagctgaccctggccagagccgacctggagatgcagatcgagagcctgaaggaggagctggcctacctgaagaagaaccacgaggaggagatgaacgccctgagaggccaggtgggcggcgacgtgaacgtggagatggacgccgcccccggcgtggacctgagcagaatcctgaacgagatgagagaccagtacgagaagatggccgagaagaacagaaaggacgccgaggagtggttcttcaccaagaccgaggagctgaacagagaggtggccaccaacagcgagctggtgcagagcggcaagagcgagatcagcgagctgagaagaaccatgcagaacctggagatcgagctgcagagccagctgagcatgaaggccagcctggagaacagcctggaggagaccaagggcagatactgcatgcagctggcccagatccaggagatgatcggcagcgtggaggagcagctggcccagctgagatgcgagatggagcagcagaaccaggagtacaagatcctgctggacgtgaagaccagactggagcaggagatcgccacctacagaagactgctggagggcgaggacgcccacctgagcagcagccagttcagcagcggcagccagagcagcagagacgtgaccagcagcagcagacagatcagaaccaaggtgatggacgtgcacgacggcaaggtggtgagcacccacgagcaggtgctgagaaccaagaactag

SEQ ID NO: 11235 - DNA, 1293 bp, synthetic construct
  misc_feature 1..1293: note = Description of Artificial Sequence: Synthetic coding sequence
  source 1..1293: mol_type = other DNA
atgagcttcaccaccagaagcaccttcagcaccaactacagaagcctgggcagcgtgcaggcccccagctacggcgccagacccgtgagcagcgccgccagcgtgtacgccggcgccggcggcagcggcagcagaatcagcgtgagcagaagcaccagcttcagaggcggcatgggcagcggcggcctggccaccggcatcgccggcggcctggccggcatgggcggcatccagaacgagaaggagaccatgcagagcctgaacgacagactggccagctacctggacagagtgagaagcctggagaccgagaacagaagactggagagcaagatcagagagcacctggagaagaagggcccccaggtgagagactggagccactacttcaagatcatcgaggacctgagagcccagatcttcgccaacaccgtggacaacgccagaatcgtgctgcagatcgacaacgccagactggccgccgacgacttcagagtgaagtacgagaccgagctggccatgagacagagcgtggagaacgacatccacggcctgagaaaggtgatcgacgacaccaacatcaccagactgcagctggagaccgagatcgaggccctgaaggaggagctgctgttcatgaagaagaaccacgaggaggaggtgaagggcctgcaggcccagatcgccagcagcggcctgaccgtggaggtggacgcccccaagagccaggacctggccaagatcatggccgacatcagagcccagtacgacgagctggccagaaagaacagagaggagctggacaagtactggagccagcagatcgaggagagcaccaccgtggtgaccacccagagcgccgaggtgggcgccgccgagaccaccctgaccgagctgagaagaaccgtgcagagcctggagatcgacctggacagcatgagaaacctgaaggccagcctggagaacagcctgagagaggtggaggccagatacgccctgcagatggagcagctgaacggcatcctgctgcacctggagagcgagctggcccagaccagagccgagggccagagacaggcccaggagtacgaggccctgctgaacatcaaggtgaagctggaggccgagatcgccacctacagaagactgctggaggacggcgaggacttcaacctgggcgacgccctggacagcagcaacagcatgcagaccatccagaagaccaccaccagaagaatcgtggacggcaaggtggtgagcgagaccaacgacaccaaggtgctgagacactag

SEQ ID NO: 11236 - DNA, 1293 bp, synthetic construct; identical to SEQ ID NO: 11235
  misc_feature 1..1293: note = Description of Artificial Sequence: Synthetic coding sequence
  source 1..1293: mol_type = other DNA

SEQ ID NO: 11237 - DNA, 1203 bp, synthetic construct
  misc_feature 1..1203: note = Description of Artificial Sequence: Synthetic coding sequence
  source 1..1203: mol_type = other DNA
atgaccagctacagctacagacagagcagcgccaccagcagcttcggcggcctgggcggcggcagcgtgagattcggccccggcgtggccttcagagcccccagcatccacggcggcagcggcggcagaggcgtgagcgtgagcagcgccagattcgtgagcagcagcagcagcggcgcctacggcggcggctacggcggcgtgctgaccgccagcgacggcctgctggccggcaacgagaagctgaccatgcagaacctgaacgacagactggccagctacctggacaaggtgagagccctggaggccgccaacggcgagctggaggtgaagatcagagactggtaccagaagcagggccccggccccagcagagactacagccactactacaccaccatccaggacctgagagacaagatcctgggcgccaccatcgagaacagcagaatcgtgctgcagatcgacaacgccagactggccgccgacgacttcagaaccaagttcgagaccgagcaggccctgagaatgagcgtggaggccgacatcaacggcctgagaagagtgctggacgagctgaccctggccagaaccgacctggagatgcagatcgagggcctgaaggaggagctggcctacctgaagaagaaccacgaggaggagatcagcaccctgagaggccaggtgggcggccaggtgagcgtggaggtggacagcgcccccggcaccgacctggccaagatcctgagcgacatgagaagccagtacgaggtgatggccgagcagaacagaaaggacgccgaggcctggttcaccagcagaaccgaggagctgaacagagaggtggccggccacaccgagcagctgcagatgagcagaagcgaggtgaccgacctgagaagaaccctgcagggcctggagatcgagctgcagagccagctgagcatgaaggccgccctggaggacaccctggccgagaccgaggccagattcggcgcccagctggcccacatccaggccctgatcagcggcatcgaggcccagctgggcgacgtgagagccgacagcgagagacagaaccaggagtaccagagactgatggacatcaagagcagactggagcaggagatcgccacctacagaagcctgctggagggccaggaggaccactacaacaacctgagcgccagcaaggtgctgtag

SEQ ID NO: 11238 - DNA, 591 bp, synthetic construct
  misc_feature 1..591: note = Description of Artificial Sequence: Synthetic coding sequence
  source 1..591: mol_type = other DNA
atgaccagctacagctacagacagagcagcgccaccagcagcttcggcggcctgggcggcggcagcgtgagattcggccccggcgtggccttcagagcccccagcatccacggcggcagcggcggcagaggcgtgagcgtgagcagcgccagattcgtgagcagcagcagcagcggcgcctacggcggcggctacggcggcgtgctgaccgccagcgacggcctgctggccggcaacgagaagctgaccatgcagaacctgaacgacagactggccagctacctggacaaggtgagagccctggaggccgccaacggcgagctggagatcctgggcgccaccatcgagaacagcagaatcgtgctgcagatcgacaacgccagactggccgccgacgacttcagaaccaagttcgagaccgagcaggccctgagaatgagcgtggaggccgacatcaacggcctgagaagagtgctggacgagctgaccctggccagaaccgacctggagatgcagatcgagggcctgaaggaggagctggcctacctgaagaagaaccacgaggaggagatcagcaccctgagaggctag

SEQ ID NO: 11239 - DNA, 1773 bp, synthetic construct
  misc_feature 1..1773: note = Description of Artificial Sequence: Synthetic coding sequence
  source 1..1773: mol_type = other DNA
atgagcagacagagcagcgtgagcttcagaagcggcggcagcagaagcttcagcaccgccagcgccatcacccccagcgtgagcagaaccagcttcaccagcgtgagcagaagcggcggcggcggcggcggcggcttcggcagagtgagcctggccggcgcctgcggcgtgggcggctacggcagcagaagcctgtacaacctgggcggcagcaagagaatcagcatcagcaccagcggcggcagcttcagaaacagattcggcgccggcgccggcggcggctacggcttcggcggcggcgccggcagcggcttcggcttcggcggcggcgccggcggcggcttcggcctgggcggcggcgccggcttcggcggcggcttcggcggccccggcttccccgtgtgcccccccggcggcatccaggaggtgaccgtgaaccagagcctgctgacccccctgaacctgcagatcgaccccagcatccagagagtgagaaccgaggagagagagcagatcaagaccctgaacaacaagttcgccagcttcatcgacaaggtgagattcctggagcagcagaacaaggtgctggacaccaagtggaccctgctgcaggagcagggcaccaagaccgtgagacagaacctggagcccctgttcgagcagtacatcaacaacctgagaagacagctggacagcatcgtgggcgagagaggcagactggacagcgagctgagaaacatgcaggacctggtggaggacttcaagaacaagtacgaggacgagatcaacaagagaaccaccgccgagaacgagttcgtgatgctgaagaaggacgtggacgccgcctacatgaacaaggtggagctggaggccaaggtggacgccctgatggacgagatcaacttcatgaagatgttcttcgacgccgagctgagccagatgcagacccacgtgagcgacaccagcgtggtgctgagcatggacaacaacagaaacctggacctggacagcatcatcgccgaggtgaaggcccagtacgaggagatcgccaacagaagcagaaccgaggccgagagctggtaccagaccaagtacgaggagctgcagcagaccgccggcagacacggcgacgacctgagaaacaccaagcacgagatcagcgagatgaacagaatgatccagagactgagagccgagatcgacaacgtgaagaagcagtgcgccaacctgcagaacgccatcgccgacgccgagcagagaggcgagctggccctgaaggacgccagaaacaagctggccgagctggaggaggccctgcagaaggccaagcaggacatggccagactgctgagagagtaccaggagctgatgaacaccaagctggccctggacgtggagatcgccacctacagaaagctgctggagggcgaggagtgcagactgagcggcgagggcgtgggccccgtgaacatcagcgtggtgaccagcagcgtgagcagcggctacggcagcggcagcggctacggcggcggcctgggcggcggcctgggcggcggcctgggcggcggcctggccggcggcagcagcggcagctactacagcagcagcagcggcggcgtgggcctgggcggcggcctgagcgtgggcggcagcggcttcagcgccagcagcggcagaggcctgggcgtgggcttcggcagcggcggcggcagcagcagcagcgtgaagttcgtgagcaccaccagcagcagcagaaagagcttcaagagctag

SEQ ID NO: 11240 - DNA, 1668 bp, synthetic construct
  misc_feature 1..1668: note = Description of Artificial Sequence: Synthetic coding sequence
  source 1..1668: mol_type = other DNA
atgagcagacagagcagcgtgagcttcagaagcggcggcagcagaagcttcagcaccgccagcgccatcacccccagcgtgagcagaaccagcttcaccagcgtgagcagaagcggcggcggcggcggcggcggcttcggcagagtgagcctggccggcgcctgcggcgtgggcggctacggcttcggcggcggcgccggcagcggcttcggcttcggcggcggcgccggcggcggcttcggcctgggcggcggcgccggcttcggcggcggcttcggcggccccggcttccccgtgtgcccccccggcggcatccaggaggtgaccgtgaaccagagcctgctgacccccctgaacctgcagatcgaccccagcatccagagagtgagaaccgaggagagagagcagatcaagaccctgaacaacaagttcgccagcttcatcgacaaggtgagattcctggagcagcagaacaaggtgctggacaccaagtggaccctgctgcaggagcagggcaccaagaccgtgagacagaacctggagcccctgttcgagcagtacatcaacaacctgagaagacagctggacagcatcgtgggcgagagaggcagactggacagcgagctgagaaacatgcaggacctggtggaggacttcaagaacaagtacgaggacgagatcaacaagagaaccaccgccgagaacgagttcgtgatgctgaagaaggacgtggacgccgcctacatgaacaaggtggagctggaggccaaggtggacgccctgatggacgagatcaacttcatgaagatgttcttcgacgccgagctgagccagatgcagacccacgtgagcgacaccagcgtggtgctgagcatggacaacaacagaaacctggacctggacagcatcatcgccgaggtgaaggcccagtacgaggagatcgccaacagaagcagaaccgaggccgagagctggtaccagaccaagtacgaggagctgcagcagaccgccggcagacacggcgacgacctgagaaacaccaagcacgagatcagcgagatgaacagaatgatccagagactgagagccgagatcgacaacgtgaagaagcagtgcgccaacctgcagaacgccatcgccgacgccgagcagagaggcgagctggccctgaaggacgccagaaacaagctggccgagctggaggaggccctgcagaaggccaagcaggacatggccagactgctgagagagtaccaggagctgatgaacaccaagctggccctggacgtggagatcgccacctacagaaagctgctggagggcgaggagtgcagactgagcggcgagggcgtgggccccgtgaacatcagcgtggtgaccagcagcgtgagcagcggctacggcagcggcagcggctacggcggcggcctgggcggcggcctgggcggcggcctgggcggcggcctggccggcggcagcagcggcagctactacagcagcagcagcggcggcgtgggcctgggcggcggcctgagcgtgggcggcagcggcttcagcgccagcagcggcagaggcctgggcgtgggcttcggcagcggcggcggcagcagcagcagcgtgaagttcgtgagcaccaccagcagcagcagaaagagcttcaagagctag

SEQ ID NO: 11241 - DNA, 399 bp, synthetic construct
  misc_feature 1..399: note = Description of Artificial Sequence: Synthetic coding sequence
  source 1..399: mol_type = other DNA
atgagcagacagagcagcgtgagcttcagaagcggcggcagcagaagcttcagcaccgccagcgccatcacccccagcgtgagcagaaccagcttcaccagcgtgagcagaagcggcggcggcggcggcggcggcttcggcagagtgagcctggccggcgcctgcggcgtgggcggctacggcagcagaagcctgtacaacctgggcggcagcaagagaatcagcatcagcaccagcggcggcagcttcagaaacagattcggcgccggcgccggcggcggctacggcttcggcggcggcgccggcagcggcttcggcttcggcggcggcgccggcggcggcttcggcctgggcggcggcgccggcttcggcggcggcttcggcggccccggcttctag

SEQ ID NO: 11242 - DNA, 1410 bp, synthetic construct
  misc_feature 1..1410: note = Description of Artificial Sequence: Synthetic coding sequence
  source 1..1410: mol_type = other DNA
atgagcatccacttcagcagccccgtgttcaccagcagaagcgccgccttcagcggcagaggcgcccaggtgagactgagcagcgccagacccggcggcctgggcagcagcagcctgtacggcctgggcgccagcagacccagagtggccgtgagaagcgcctacggcggccccgtgggcgccggcatcagagaggtgaccatcaaccagagcctgctggcccccctgagactggacgccgaccccagcctgcagagagtgagacaggaggagagcgagcagatcaagaccctgaacaacaagttcgccagcttcatcgacaaggtgagattcctggagcagcagaacaagctgctggagaccaagtggaccctgctgcaggagcagaagagcgccaagagcagcagactgcccgacatcttcgaggcccagatcgccggcctgagaggccagctggaggccctgcaggtggacggcggcagactggaggccgagctgagaagcatgcaggacgtggtggaggacttcaagaacaagtacgaggacgagatcaaccacagaaccgccgccgagaacgagttcgtggtgctgaagaaggacgtggacgccgcctacatgagcaaggtggagctggaggccaaggtggacgccctgaacgacgagatcaacttcctgagaaccctgaacgagaccgagctgaccgagctgcagagccagatcagcgacaccagcgtggtgctgagcatggacaacagcagaagcctggacctggacggcatcatcgccgaggtgaaggcccagtacgaggagatggccaagtgcagcagagccgaggccgaggcctggtaccagaccaagttcgagaccctgcaggcccaggccggcaagcacggcgacgacctgagaaacaccagaaacgagatcagcgagatgaacagagccatccagagactgcaggccgagatcgacaacatcaagaaccagagagccaagctggaggccgccatcgccgaggccgaggagagaggcgagctggccctgaaggacgccagagccaagcaggaggagctggaggccgccctgcagagaggcaagcaggacatggccagacagctgagagagtaccaggagctgatgagcgtgaagctggccctggacatcgagatcgccacctacagaaagctgctggagggcgaggagagcagactggccggcgacggcgtgggcgccgtgaacatcagcgtgatgaacagcaccggcggcagcagcagcggcggcggcatcggcctgaccctgggcggcaccatgggcagcaacgccctgagcttcagcagcagcgccggccccggcctgctgaaggcctacagcatcagaaccgccagcgccagcagaagaagcgccagagactag

SEQ ID NO: 11243 - DNA, 1338 bp, synthetic construct
  misc_feature 1..1338: note = Description of Artificial Sequence: Synthetic coding sequence
  source 1..1338: mol_type = other DNA
atgagcatccacttcagcagccccgtgttcaccagcagaagcgccgccttcagcggcagaggcgcccaggtgagactgagcagcgccagacccggcggcctgggcagcagcagcctgtacggcctgggcgccagcagacccagagtggcccccctgagactggacgccgaccccagcctgcagagagtgagacaggaggagagcgagcagatcaagaccctgaacaacaagttcgccagcttcatcgacaaggtgagattcctggagcagcagaacaagctgctggagaccaagtggaccctgctgcaggagcagaagagcgccaagagcagcagactgcccgacatcttcgaggcccagatcgccggcctgagaggccagctggaggccctgcaggtggacggcggcagactggaggccgagctgagaagcatgcaggacgtggtggaggacttcaagaacagatacgaggacgagatcaaccacagaaccgccgccgagaacgagttcgtggtgctgaagaaggacgtggacgccgcctacatgagcaaggtggagctggaggccaaggtggacgccctgaacgacgagatcaacttcctgagaaccctgaacgagaccgagctgaccgagctgcagagccagatcagcgacaccagcgtggtgctgagcatggacaacagcagaagcctggacctggacggcatcatcgccgaggtgaaggcccagtacgaggagatggccaagtgcagcagagccgaggccgaggcctggtaccagaccaagttcgagaccctgcaggcccaggccggcaagcacggcgacgacctgagaaacaccagaaacgagatcagcgagatgaacagagccatccagagactgcaggccgagatcgacaacatcaagaaccagagagccaagctggaggccgccatcgccgaggccgaggagagaggcgagctggccctgaaggacgccagagccaagcaggaggagctggaggccgccctgcagagaggcaagcaggacatggccagacagctgagagagtaccaggagctgatgagcgtgaagctggccctggacatcgagatcgccacctacagaaagctgctggagggcgaggagagcagactggccggcgacggcgtgggcgccgtgaacatcagcgtgatgaacagcaccggcggcagcagcagcggcggcggcatcggcctgaccctgggcggcaccatgggcagcaacgccctgagcttcagcagcagcgccggccccggcctgctgaaggcctacagcatcagaaccgccagcgccagcagaagaagcgccagagactag

SEQ ID NO: 11244 - DNA, 1212 bp, synthetic construct
  misc_feature 1..1212: note = Description of Artificial Sequence: Synthetic coding sequence
  source 1..1212: mol_type = other DNA
atgagcatccacttcagcagccccgtgttcaccagcagaagcgccgccttcagcggcagaggcgcccaggtgagactgagcagcgccagacccggcggcctgggcagcagcagcctgtacggcctgggcgccagcagacccagagtggccgtgagaagcgcctacggcggccccgtgggcgccggcatcagagaggtgaccatcaaccagagcctgctggcccccctgagactggacgccgaccccagcctgcagagagtgagacaggaggagagcgagcagatcaagaccctgaacaacaagttcgccagcttcatcgacaaggtgagattcctggagcagcagaacaagctgctggagaccaagtggaccctgctgcaggagcagaagagcgccaagagcagcagactgcccgacatcttcgaggcccagatcgccggcctgagaggccagctggaggccctgcaggtggacggcggcagactggaggccgagctgagaagcatgcaggacgtggtggaggacttcaagaacaagtacgaggacgagatcaaccacagaaccgccgccgagaacgagttcgtggtgctgaagaaggacgtggacgccgcctacatgagcaaggtggagctggaggccaaggtggacgccctgaacgacgagatcaacttcctgagaaccctgaacgagaccgagatccacgtgctgcagagccacatcagcgacaccagcgtggtggtgaagctggacaacagccaggacctgaacatggactgcatcatcgccgagatcaaggcccagtacgacgacatcgtgacctgcagctgggccaaggccgagagctggtaccacggctgcctggagatgaaggccaccgtgatctggcacggcgagaccgtgggctgcaccaaggaggagatcaaggagctgacccacatgatccagagactgatggccaaggtggagaacgccaagtgccagaacagcaagctggaggtggaggtgacccagagcgagcagcagggcgaggtggccctgagcgacaacagatgcaagctggtggagctggagggcaccatgcagaaggccagacagtaccaggaggtgatgaacagcaagctgggcctgaacgtgaaggccgccagcagctgccacctgctggacggcgaggagcagagactgtgcgacggcatcagcgccgtgaacatctag

SEQ ID NO: 11245 - DNA, 1452 bp, synthetic construct
  misc_feature 1..1452: note = Description of Artificial Sequence: Synthetic coding sequence
  source 1..1452: mol_type = other DNA
atgagcatcagagtgacccagaagagctacaaggtgagcaccagcggccccagagccttcagcagcagaagctacaccagcggccccggcagcagaatcagcagcagcagcttcagcagagtgggcagcagcaacttcagaggcggcctgggcggcggctacggcggcgccagcggcatgggcggcatcaccgccgtgaccgtgaaccagagcctgctgagccccctggtgctggaggtggaccccaacatccaggccgtgagaacccaggagaaggagcagatcaagaccctgaacaacaagttcgccagcttcatcgacaaggtgagattcctggagcagcagaacaagatgctggagaccaagtggagcctgctgcagcagcagaagaccgccagaagcaacatggacaacatgttcgagagctacatcaacaacctgagaagacagctggagaccctgggccaggagaagctgaagctggaggccgagctgggcaacatgcagggcctggtggaggacttcaagaacaagtacgaggacgagatcaacaagagaaccgagatggagaacgagttcgtgctgatcaagaaggacgtggacgaggcctacatgaacaaggtggagctggagagcagactggagggcctgaccgacgagatcaacttcctgagacagctgtacgaggaggagatcagagagctgcagagccagatcagcgacaccagcgtggtgctgagcatggacaacagcagaagcctggacatggacagcatcatcgccgaggtgaaggcccagtacgaggacatcgccaacagaagcagagccgaggccgagagcatgtaccagatcaagtacgaggagctgcagagcctggccggcaagcacggcgacgacctgagaagaaccaagaccgagatcagcgagatgaacagaaacatcagcagactgcaggccgagatcgagggcctgaagggccagagagccagcctggaggccgccatcgccgacgccgagcagagaggcgagctggccatcaaggacgccaacgccaagctgagcgagctggaggccgccctgcagagagccaagcaggacatggccagacagctgagagagtaccaggagctgatgaacgtgaagctggccctggacatcgagatcgccacctacagaaagctgctggagggcgaggagagcagactggagagcggcatgcagaacatgagcatccacaccaagaccaccagcggctacgccggcggcctgagcagcgcctacggcggcctgaccagccccggcctgagctacagcctgggcagcagcttcggcagcggcgccggcagcagcagcttcagcagaaccagcagcagcagagccgtggtggtgaagaagatcgagaccagagacggcaagctggtgagcgagagcagcgacgtgctgcccaagtag

SEQ ID NO: 11246 - DNA, 822 bp, synthetic construct
  misc_feature 1..822: note = Description of Artificial Sequence: Synthetic coding sequence
  source 1..822: mol_type = other DNA
atgagcatcagagtgacccagaagagctacaaggtgagcaccagcggccccagagccttcagcagcagaagctacaccagcggccccggcagcagaatcagcagcagcagcttcagcagagtgggcagcagcaacttcagaggcggcctgggcggcggctacggcggcgccagcggcatgggcggcatcaccgccgtgaccgtgaaccagagcctgctgagccccctggtgctggaggtggaccccaacatccaggccgtgagaacccaggagaaggagcagatcaagaccctgaacaacaagttcgccagcttcatcgacaaggtgagattcctggagcagcagaacaagatgctggagaccaagtggagcctgctgcagcagcagaagaccgccagaagcaacatggacaacatgttcgagagctacatcaacaacctgagaagacagctggagaccctgggccaggagaagctgaagctggaggccgagctgggcaacatgcagggcctggtggaggacttcaagaacaagtacgaggacgagatcaacaagagaaccgagatggagaacgagttcgtgctgatcaagaaggacgtggacgaggcctacatgaacaaggtggagctggagagcagactggagggcctgaccgacgagatcaacttcctgagacagctgtacgaggaggagatcagagagctgcagagccagatcagcgacaccagcgtggtgctgagcatggacaacagcagaagcctggacatggacagcatcatcgccgaggtgaaggcccagtacgaggacatcgccaacagatag

SEQ ID NO: 11247 - DNA, 1452 bp, synthetic construct; identical to SEQ ID NO: 11245
  misc_feature 1..1452: note = Description of Artificial Sequence: Synthetic coding sequence
  source 1..1452: mol_type = other DNA

SEQ ID NO: 11248 - DNA, 534 bp, synthetic construct
  misc_feature 1..534: note = Description of Artificial Sequence: Synthetic coding sequence
  source 1..534: mol_type = other DNA
atgagcatcagagtgacccagaagagctacaaggtgagcaccagcggccccagagccttcagcagcagaagctacaccagcggccccggcagcagaatcagcagcagcagcttcagcagagtgggcagcagcaacttcagaggcggcctgggcggcggctacggcggcgccagcggcatgggcggcatcaccgccgtgaccgtgaaccagagcctgctgagccccctggtgctggaggtggaccccaacatccaggccgtgagaacccaggagaaggagcagatcaagaccctgaacaacaagttcgccagcttcatcgacaaggtgagattcctggagcagcagaacaagatgctggagaccaagtggagcctgctgcagcagcagaagaccgccagaagcaacatggacaacatgttcgagagctacatcaacaacctgagaagacagctggagaccctgggccaggagaagctgaagctggaggccgagctgggcaacatgcagggcctggtggaggacttcaagaactag

SEQ ID NO: 11249 - DNA, 1536 bp, synthetic construct
  misc_feature 1..1536: note = Description of Artificial Sequence: Synthetic coding sequence
  source 1..1536: mol_type = other DNA
atgaacggcgtgagctggagccaggacctgcaggagggcatcagcgcctggttcggcccccccgccagcacccccgccagcaccatgagcatcagagtgacccagaagagctacaaggtgagcaccagcggccccagagccttcagcagcagaagctacaccagcggccccggcagcagaatcagcagcagcagcttcagcagagtgggcagcagcaacttcagaggcggcctgggcggcggctacggcggcgccagcggcatgggcggcatcaccgccgtgaccgtgaaccagagcctgctgagccccctggtgctggaggtggaccccaacatccaggccgtgagaacccaggagaaggagcagatcaagaccctgaacaacaagttcgccagcttcatcgacaaggtgagattcctggagcagcagaacaagatgctggagaccaagtggagcctgctgcagcagcagaagaccgccagaagcaacatggacaacatgttcgagagctacatcaacaacctgagaagacagctggagaccctgggccaggagaagctgaagctggaggccgagctgggcaacatgcagggcctggtggaggacttcaagaacaagtacgaggacgagatcaacaagagaaccgagatggagaacgagttcgtgctgatcaagaaggacgtggacgaggcctacatgaacaaggtggagctggagagcagactggagggcctgaccgacgagatcaacttcctgagacagctgtacgaggaggagatcagagagctgcagagccagatcagcgacaccagcgtggtgctgagcatggacaacagcagaagcctggacatggacagcatcatcgccgaggtgaaggcccagtacgaggacatcgccaacagaagcagagccgaggccgagagcatgtaccagatcaagtacgaggagctgcagagcctggccggcaagcacggcgacgacctgagaagaaccaagaccgagatcagcgagatgaacagaaacatcagcagactgcaggccgagatcgagggcctgaagggccagagagccagcctggaggccgccatcgccgacgccgagcagagaggcgagctggccatcaaggacgccaacgccaagctgagcgagctggaggccgccctgcagagagccaagcaggacatggccagacagctgagagagtaccaggagctgatgaacgtgaagctggccctggacatcgagatcgccacctacagaaagctgctggagggcgaggagagcagactggagagcggcatgcagaacatgagcatccacaccaagaccaccagcggctacgccggcggcctgagcagcgcctacggcggcctgaccagccccggcctgagctacagcctgggcagcagcttcggcagcggcgccggcagcagcagcttcagcagaaccagcagcagcagagccgtggtggtgaagaagatcgagaccagagacggcaagctggtgagcgagagcagcgacgtgctgcccaagtag

SEQ ID NO: 11250 - DNA, 1452 bp, synthetic construct; identical to SEQ ID NO: 11245
  misc_feature 1..1452: note = Description of Artificial Sequence: Synthetic coding sequence
  source 1..1452: mol_type = other DNA

SEQ ID NO: 11251 - DNA, 4071 bp, synthetic construct
  misc_feature 1..4071: note = Description of Artificial Sequence: Synthetic coding sequence
  source 1..4071: mol_type = other DNA
atgcagagcaaggtgctgctggccgtggccctgtggctgtgcgtggagaccagagccgccagcgtgggcctgcccagcgtgagcctggacctgcccagactgagcatccagaaggacatcctgaccatcaaggccaacaccaccctgcagatcacctgcagaggccagagagacctggactggctgtggcccaacaaccagagcggcagcgagcagagagtggaggtgaccgagtgcagcgacggcctgttctgcaagaccctgaccatccccaaggtgatcggcaacgacaccggcgcctacaagtgcttctacagagagaccgacctggccagcgtgatctacgtgtacgtgcaggactacagaagccccttcatcgccagcgtgagcgaccagcacggcgtggtgtacatcaccgagaacaagaacaagaccgtggtgatcccctgcctgggcagcatcagcaacctgaacgtgagcctgtgcgccagataccccgagaagagattcgtgcccgacggcaacagaatcagctgggacagcaagaagggcttcaccatccccagctacatgatcagctacgccggcatggtgttctgcgaggccaagatcaacgacgagagctaccagagcatcatgtacatcgtggtggtggtgggctacagaatctacgacgtggtgctgagccccagccacggcatcgagctgagcgtgggcgagaagctggtgctgaactgcaccgccagaaccgagctgaacgtgggcatcgacttcaactgggagtaccccagcagcaagcaccagcacaagaagctggtgaacagagacctgaagacccagagcggcagcgagatgaagaagttcctgagcaccctgaccatcgacggcgtgaccagaagcgaccagggcctgtacacctgcgccgccagcagcggcctgatgaccaagaagaacagcaccttcgtgagagtgcacgagaagcccttcgtggccttcggcagcggcatggagagcctggtggaggccaccgtgggcgagagagtgagaatccccgccaagtacctgggctaccccccccccgagatcaagtggtacaagaacggcatccccctggagagcaaccacaccatcaaggccggccacgtgctgaccatcatggaggtgagcgagagagacaccggcaactacaccgtgatcctgaccaaccccatcagcaaggagaagcagagccacgtggtgagcctggtggtgtacgtgcccccccagatcggcgagaagagcctgatcagccccgtggacagctaccagtacggcaccacccagaccctgacctgcaccgtgtacgccatcccccccccccaccacatccactggtactggcagctggaggaggagtgcgccaacgagcccagccaggccgtgagcgtgaccaacccctacccctgcgaggagtggagaagcgtggaggacttccagggcggcaacaagatcgaggtgaacaagaaccagttcgccctgatcgagggcaagaacaagaccgtgagcaccctggtgatccaggccgccaacgtgagcgccctgtacaagtgcgaggccgtgaacaaggtgggcagaggcgagagagtgatcagcttccacgtgaccagaggccccgagatcaccctgcagcccgacatgcagcccaccgagcaggagagcgtgagcctgtggtgcaccgccgacagaagcaccttcgagaacctgacctggtacaagctgggcccccagcccctgcccatccacgtgggcgagctgcccacccccgtgtgcaagaacctggacaccctgtggaagctgaacgccaccatgttcagcaacagcaccaacgacatcctgatcatggagctgaagaacgccagcctgcaggaccagggcgactacgtgtgcctggcccaggacagaaagaccaagaagagacactgcgtggtgagacagctgaccgtgctggagagagtggcccccaccatcaccggcaacctggagaaccagaccaccagcatcggcgagagcatcgaggtgagctgcaccgccagcggcaacccccccccccagatcatgtggttcaaggacaacgagaccctggtggaggacagcggcatcgtgctgaaggacggcaacagaaacctgaccatcagaagagtgagaaaggaggacgagggcctgtacacctgccaggcctgcagcgtgctgggctgcgccaaggtggaggccttcttcatcatcgagggcgcccaggagaagaccaacctggagatcatcatcctggtgggcaccgccgtgatcgccatgttcttctggctgctgctggtgatcatcctgagaaccgtgaagagagccaacggcggcgagctgaagaccggctacctgagcatcgtgatggaccccgacgagctgcccctggacgagcactgcgagagactgccctacgacgccagcaagtgggagttccccagagacagactgaagctgggcaagcccctgggcagaggcgccttcggccaggtgatcgaggccgacgccttcggcatcgacaagaccgccacctgcagaaccgtggccgtgaagatgctgaaggagggcgccacccacagcgagcacagagccctgatgagcgagctgaagatcctgatccacatcggccaccacctgaacgtggtgaacctgctgggcgcctgcaccaagcccggcggccccctgatggtgatcgtggagttctgcaagttcggcaacctgagcacctacctgagaagcaagagaaacgagttcgtgccctacaagaccaagggcgccagattcagacagggcaaggactacgtgggcgccatccccgtggacctgaagagaagactggacagcatcaccagcagccagagcagcgccagcagcggcttcgtggaggagaagagcctgagcgacgtggaggaggaggaggcccccgaggacctgtacaaggacttcctgaccctggagcacctgatctgctacagcttccaggtggccaagggcatggagttcctggccagcagaaagtgcatccacagagacctggccgccagaaacatcctgctgagcgagaagaacgtggtgaagatctgcgacttcggcctggccagagacatctacaaggaccccgactacgtgagaaagggcgacgccagactgcccctgaagtggatggcccccgagaccatcttcgacagagtgtacaccatccagagcgacgtgtggagcttcggcgtgctgctgtgggagatcttcagcctgggcgccagcccctaccccggcgtgaagatcgacgaggagttctgcagaagactgaaggagggcaccagaatgagagcccccgactacaccacccccgagatgtaccagaccatgctggactgctggcacggcgagcccagccagagacccaccttcagcgagctggtggagcacctgggcaacctgctgcaggccaacgcccagcaggacggcaaggactacatcgtgctgcccatcagcgagaccctgagcatggaggaggacagcggcctgagcctgcccaccagccccgtgagctgcatggaggaggaggaggtgtgcgaccccaagttccactacgacaacaccgccggcatcagccagtacctgcagaacagcaagagaaagagcagacccgtgagcgtgaagaccttcgaggacatccccctggaggagcccgaggtgaaggtgatccccgacgacaaccagaccgacagcggcatggtgctggccagcgaggagctgaagaccctggaggacagaaccaagctgagccccagcttcggcggcatggtgcccagcaagagcagagagagcgtggccagcgagggcagcaaccagaccagcggctaccagagcggctaccacagcgacgacaccgacaccaccgtgtacagcagcgaggaggccgagctgctgaagctgatcgagatcggcgtgcagaccggcagcaccgcccagatcctgcagcccgacagcggcaccaccctgagcagcccccccgtgtag

SEQ ID NO: 11252 - DNA, 6630 bp, synthetic construct
  misc_feature 1..6630: note = Description of Artificial Sequence: Synthetic coding sequence
  source 1..6630: mol_type = other DNA
atgtggaacgacatcgagctgctgaccaacgacgacaccggcagcggctacctgagcgtgggcagcagaaaggagcacggcaccgccctgtaccaggtggacctgctggtgaagatcagcagcgagaaggccagcctgaaccccaagatccaggcctgcagcctgagcgacggcttcatcatcgtggccgaccagagcgtgatcctgctggacagcatctgcagaagcctgcagctgcacctggtgttcgacaccgaggtggacgtggtgggcctgtgccaggagggcaagttcctgctggtgggcgagagaagcggcaacctgcacctgatccacgtgaccagcaagcagaccctgctgaccaacgccttcgtgcagaaggccaacgacgagaacagaagaacctaccagaacctggtgatcgagaaggacggcagcaacgagggcacctactacatgctgctgctgacctacagcggcttcttctgcatcaccaacctgcagctgctgaagatccagcaggccatcgagaacgtggacttcagcaccgccaagaagctgcagggccagatcaagagcagcttcatcagcaccgagaactaccacaccctgggctgcctgagcctggtggccggcgacctggccagcgaggtgcccgtgatcatcggcggcaccggcaactgcgccttcagcaagtgggagcccgacagcagcaagaagggcatgaccgtgaagaacctgatcgacgccgagatcatcaagggcgccaagaagttccagctgatcgacaacctgctgttcgtgctggacaccgacaacgtgctgagcctgtgggacatctacaccctgacccccgtgtggaactggcccagcctgcacgtggaggagttcctgctgaccaccgaggccgacagccccagcagcgtgacctggcagggcatcaccaacctgaagctgatcgccctgaccgccagcgccaacaagaagatgaagaacctgatggtgtacagcctgcccaccatggagatcctgtacagcctggaggtgagcagcgtgagcagcctggtgcagaccggcatcagcaccgacaccatctacctgctggagggcgtgtgcaagaacgaccccaagctgagcgaggacagcgtgagcgtgctggtgctgagatgcctgaccgaggccctgcccgagaacagactgagcagactgctgcacaagcacagattcgccgaggccgagagcttcgccatccagttcggcctggacgtggagctggtgtacaaggtgaagagcaaccacatcctggagaagctggccctgagcagcgtggacgccagcgagcagaccgagtggcagcagctggtggacgacgccaaggagaacctgcacaagatccaggacgacgagttcgtggtgaactactgcctgaaggcccagtggatcacctacgagaccacccaggagatgctgaactacgccaagaccagactgctgaagaaggaggacaagaccgccctgatctacagcgacggcctgaaggaggtgctgagagcccacgccaagctgaccaccttctacggcgccttcggccccgagaagttcagcggcagcagctggatcgagttcctgaacaacgaggacgacctgaaggacatcttcctgcagctgaaggagggcaacctggtgtgcgcccagtacctgtggctgagacacagagccaacttcgagagcagattcgacgtgaagatgctggagagcctgctgaacagcatgagcgccagcgtgagcctgcagaagctgtgcccctggttcaagaacgacgtgatccccttcgtgagaagaaccgtgcccgagggccagatcatcctggccaagtggctggagcaggccgccagaaacctggagctgaccgacaaggccaactggcccgagaacggcctgcagctggccgagatcttcttcaccgccgagaagaccgacgagctgggcctggccagcagctggcactggatcagcctgaaggactaccagaacaccgaggaggtgtgccagctgagaaccctggtgaacaacctgagagagctgatcaccctgcacagaaagtacaactgcaagctggccctgagcgacttcgagaaggagaacaccaccaccatcgtgttcagaatgttcgacaaggtgctggcccccgagctgatccccagcatcctggagaagttcatcagagtgtacatgagagagcacgacctgcaggaggaggagctgctgctgctgtacatcgaggacctgctgaacagatgcagcagcaagagcaccagcctgttcgagaccgcctgggaggccaaggccatggccgtgatcgcctgcctgagcgacaccgacctgatcttcgacgccgtgctgaagatcatgtacgccgccgtggtgccctggagcgccgccgtggagcagctggtgaagcagcacctggagatggaccaccccaaggtgaagctgctgcaggagagctacaagctgatggagatgaagaagctgctgagaggctacggcatcagagaggtgaacctgctgaacaaggagatcatgagagtggtgagatacatcctgaagcaggacgtgcccagcagcctggaggacgccctgaaggtggcccaggccttcatgctgagcgacgacgagatctacagcctgagaatcatcgacctgatcgacagagagcagggcgaggactgcctgctgctgctgaagagcctgccccccgccgaggccgagaagaccgccgagagagtgatcatctgggccagactggccctgcaggaggagcccgaccacagcaaggagggcaaggcctggagaatgagcgtggccaagaccagcgtggacatcctgaagatcctgtgcgacatccagaaggacaacctgcagaagaaggacgagtgcgaggagatgctgaagctgttcaaggaggtggccagcctgcaggagaacttcgaggtgttcctgagcttcgaggactacagcaacagcagcctggtggccgacctgagagagcagcacatcaaggcccacgaggtggcccaggccaagcacaagcccggcagcacccccgagcccatcgccgccgaggtgagaagccccagcatggagagcaagctgcacagacaggccctggccctgcagatgagcaagcaggagctggaggccgagctgaccctgagagccctgaaggacggcaacatcaagaccgccctgaagaagtgcagcgacctgttcaagtaccactgcaacgccgacaccggcaagctgctgttcctgacctgccagaagctgtgccagatgctggccgacaacgtgcccgtgaccgtgcccgtgggcctgaacctgcccagcatgatccacgacctggccagccaggccgccaccatctgcagccccgacttcctgctggacgccctggagctgtgcaagcacaccctgatggccgtggagctgagcagacagtgccagatggacgactgcggcatcctgatgaaggccagcttcggcacccacaaggacccctacgaggagtggagctacagcgacttcttcagcgaggacggcatcgtgctggagagccagatggtgctgcccgtgatctacgagctgatcagcagcctggtgcccctggccgagagcaagagataccccctggagagcaccagcctgccctactgcagcctgaacgagggcgacggcctggtgctgcccgtgatcaacagcatcagcgccctgctgcagaacctgcaggagagcagccagtgggagctggccctgagattcgtggtgggcagcttcggcacctgcctgcagcacagcgtgagcaacttcatgaacgccaccctgagcgagaagctgttcggcgagaccaccctggtgaagagcagacacgtggtgatggagctgaaggagaaggccgtgatcttcatcagagagaacgccaccaccctgctgcacaaggtgttcaactgcagactggtggacctggacctggccctgggctactgcaccctgctgccccagaaggacgtgttcgagaacctgtggaagctgatcgacaaggcctggcagaactacgacaagatcctggccatcagcctggtgggcagcgagctggccagcctgtaccaggagatcgagatgggcctgaagttcagagagctgagcaccgacgcccagtggggcatcagactgggcaagctgggcatcagcttccagcccgtgttcagacagcacttcctgaccaagaaggacctgatcaaggccctggtggagaacatcgacatggacaccagcctgatcctggagtactgcagcaccttccagctggactgcgacgccgtgctgcagctgttcatcgagaccctgctgcacaacaccaacgccggccagggccagggcgacgccagcatggacagcgccaagagaagacaccccaagctgctggccaaggccctggagatggtgcccctgctgaccagcaccaaggacctggtgatcagcctgagcggcatcctgcacaagctggacccctacgactacgagatgatcgaggtggtgctgaaggtgatcgagagagccgacgagaagatcaccaacatcaacatcaaccaggccctgagcatcctgaagcacctgaagagctacagaagaatcagcccccccgtggacctggagtaccagtacatgctggagcacgtgatcaccctgcccagcgccgcccagaccagactgcccttccacctgatcttcttcggcaccgcccagaacttctggaagatcctgagcaccgagctgagcgaggagagcttccccaccctgctgctgatcagcaagctgatgaagttcagcctggacaccctgtacgtgagcaccgccaagcacgtgttcgagaagaagctgaagcccaagctgctgaagctgacccaggccaagagcagcaccctgatcaacaaggagatcaccaagatcacccagaccatcgagagctgcctgctgagcatcgtgaaccccgagtgggccgtggccatcgccatcagcctggcccaggacatccccgagggcagcttcaagatcagcgccctgaagttctgcctgtacctggccgagagatggctgcagaacatccccagccaggacgagaagagagagaaggccgaggccctgctgaagaagctgcacatccagtacagaagaagcggcaccgaggccgtgctgatcgcccacaagctgaacaccgaggagtacctgagagtgatcggcaagcccgcccacctgatcgtgagcctgtacgagcaccccagcatcaaccagagaatccagaacagcagcggcaccgactaccccgacatccacgccgccgccaaggagatcgccgaggtgaacgagatcaacctggagaaggtgtgggacatgctgctggagaagtggctgtgccccagcaccaagcccggcgagaagcccagcgagctgttcgagctgcaggaggacgaggccctgagaagagtgcagtacctgctgctgagcagacccatcgactacagcagcagaatgctgttcgtgttcgccaccagcaccaccaccaccctgggcatgcaccagctgaccttcgcccacagaaccagagccctgcagtgcctgttctacctggccgacaaggagaccatcgagagcctgttcaagaagcccatcgaggaggtgaagagctacctgagatgcatcaccttcctggccagcttcgagaccctgaacatccccatcacctacgagctgttctgcagcagccccaaggagggcatgatcaagggcctgtggaagaaccacagccacgagagcatggccgtgagactggtgaccgagctgtgcctggagtacaagatctacgacctgcagctgtggaacggcctgctgcagaagctgctgggcttcaacatgatcccctacctgagaaaggtgctgaaggccatcagcagcatccacagcctgtggcaggtgccctacttcagcaaggcctggcagagagtgatccagatccccctgctgagcgccagctgccccctgagccccgaccagctgagcgactgcagcgagagcctgatcgccgtgctggagtgccccgtgagcggcgacctggacctgatcggcgtggccagacagtacatccagctggagctgcccgccttcgccctggcctgcctgatgctgatgccccacagcgagaagagacaccagcagatcaagaacttcctgggcagctgcgacccccaggtgatcctgaagcagctggaggagcacatgaacaccggccagctggccggcttcagccaccagatcagaagcctgatcctgaacaacatcatcaacaagaaggagttcggcatcctggccaagaccaagtacttccagatgctgaagatgcacgccatgaacaccaacaacatcaccgagctggtgaactacctggccaacgacctgagcctggacgaggccagcgtgctgatcaccgagtacagcaagcactgcggcaagcccgtgccccccgacaccgccccctgcgagatcctgaagatgttcctgagcggcctgagctag

SEQ ID NO: 11253 - DNA, 1332 bp, synthetic construct
  misc_feature 1..1332: note = Description of Artificial Sequence: Synthetic coding sequence
  source 1..1332: mol_type = other DNA
atgctggagcacgtgatcaccctgcccagcgccgcccagaccagactgcccttccacctgatcttcttcggcaccgcccagaacttctggaagatcctgagcaccgagctgagcgaggagagcttccccaccctgctgctgatcagcaagctgatgaagttcagcctggacaccctgtacgtgagcaccgccaagcacgtgttcgagaagaagctgaagcccaagctgctgaagctgacccaggccaagagcagcaccctgatcaacaaggagatcaccaagatcacccagaccatcgagagctgcctgctgagcatcgtgaaccccgagtgggccgtggccatcgccatcagcctggcccaggacatccccgagggcagcttcaagatcagcgccctgaagttctgcctgtacctggccgagagatggctgcagaacatccccagccaggacgagaagagagagaaggccgaggccctgctgaagaagctgcacatccagtacagaagaagcggcaccgaggccgtgctgatcgcccacaagctgaacaccgaggagtacctgagagtgatcggcaagcccgcccacctgatcgtgagcctgtacgagcaccccagcatcaaccagagaatccagaacagcagcggcaccgactaccccgacatccacgccgccgccaaggagatcgccgaggtgaacgagatcaacctggagaaggtgtgggacatgctgctggagaagtggctgtgccccagcaccaagcccggcgagaagcccagcgagctgttcgagctgcaggaggacgaggccctgagaagagtgcagtacctgctgctgagcagacccatcgactacagcagcagaatgctgttcgtgttcgccaccagcaccaccaccaccctgggcatgcaccagctgaccttcgcccacagaaccagagccctgcagtgcctgttctacctggccgacaaggagaccatcgagagcctgttcaagaagcccatcgaggaggtgaagagctacctgagatgcatcaccttcctggccagcttcgagaccctgaacatccccatcacctacgagctgttctgcagcagccccaaggagggcatgatcaagggcctgtggaagaaccacagccacgagagcatggccgtgagactggtgaccgagctgtgcctggagtacaagatctacgacctgcagctgtggaacggcctgctgcagaagctgctgggcttcaacatgatcccctacctgagaaaggtgctgaaggccatcagcagcatccacagcctgtggcagagatggagaagctgctacgtggcctag

SEQ ID NO: 11254 - DNA, 417 bp, synthetic construct
  misc_feature 1..417: note = Description of Artificial Sequence: Synthetic coding sequence
  source 1..417: mol_type = other DNA
atgaacagcctggtgagctggcagctgctgctgttcctgtgcgccacccacttcggcgagcccctggagaaggtggccagcgtgggcaacagcagacccaccggccagcagctggagagcctgggcctgctggcccccggcgagcagagcctgccctgcaccgagagaaagcccgccgccaccgccagactgagcagaagaggcaccagcctgagccccccccccgagagcagcggcagcccccagcagcccggcctgagcgccccccacagcagacagatccccgccccccagggcgccgtgctggtgcagagagagaaggacctgcccaactacaactggaacagcttcggcctgagattcggcaagagagaggccgcccccggcaaccacggcagaagcgccggcagaggctag

SEQ ID NO: 11255 - DNA, 771 bp, synthetic construct
  misc_feature 1..771: note = Description of Artificial Sequence: Synthetic coding sequence
  source 1..771: mol_type = other DNA
atggcccacagaccccccagccccgccctggccagcgtgctgctggccctgctgctgagcggcgccgccagagccgccgagatcgtgggcggccacgaggcccagccccacagcagaccctacatggccagcctgcagatgagaggcaaccccggcagccacttctgcggcggcaccctgatccaccccagcttcgtgctgaccgccgcccactgcctgagagacatcccccagagactggtgaacgtggtgctgggcgcccacaacgtgagaacccaggagcccacccagcagcacttcagcgtggcccaggtgttcctgaacaactacgacgccgagaacaagctgaacgacgtgctgctgatccagctgagcagccccgccaacctgagcgccagcgtggccaccgtgcagctgccccagcaggaccagcccgtgccccacggcacccagtgcctggccatgggctggggcagagtgggcgcccacgacccccccgcccaggtgctgcaggagctgaacgtgaccgtggtgaccttcttctgcagaccccacaacatctgcaccttcgtgcccagaagaaaggccggcatctgcttcggcgacagcggcggccccctgatctgcgacggcatcatccagggcatcgacagcttcgtgatctggggctgcgccaccagactgttccccgacttcttcaccagagtggccctgtacgtggactggatcagaagcaccctgagaagagtggaggccaagggcagaccctag

SEQ ID NO: 11256 - DNA, 2937 bp, synthetic construct
  misc_feature 1..2937: note = Description of Artificial Sequence: Synthetic coding sequence
  source 1..2937: mol_type = other DNA
atggcccacaccaccaaggtgaacggcagcgccagcggcaaggccggcgacatcctgagcggcgaccaggacaaggagcagaaggacccctacttcgtggagaccccctacggctaccagctggacctggacttcctgaagtacgtggacgacatccagaagggcaacaccatcaagagactgaacatccagaagagaagaaagcccagcgtgccctgccccgagcccagaaccaccagcggccagcagggcatctggaccagcaccgagagcctgagcagcagcaacagcgacgacaacaagcagtgccccaacttcctgatcgccagaagccaggtgaccagcacccccatcagcaagccccccccccccctggagaccagcctgcccttcctgaccatccccgagaacagacagctgcccccccccagcccccagctgcccaagcacaacctgcacgtgaccaagaccctgatggagaccagaagaagactggagcaggagagagccaccatgcagatgacccccggcgagttcagaagacccagactggccagcttcggcggcatgggcaccaccagcagcctgcccagcttcgtgggcagcggcaaccacaaccccgccaagcaccagctgcagaacggctaccagggcaacggcgactacggcagctacgcccccgccgcccccaccaccagcagcatgggcagcagcatcagacacagccccctgagcagcggcatcagcacccccgtgaccaacgtgagccccatgcacctgcagcacatcagagagcagatggccatcgccctgaagagactgaaggagctggaggagcaggtgagaaccatccccgtgctgcaggtgaagatcagcgtgctgcaggaggagaagagacagctggtgagccagctgaagaaccagagagccgccagccagatcaacgtgtgcggcgtgagaaagagaagctacagcgccggcaacgccagccagctggagcagctgagcagagccagaagaagcggcggcgagctgtacatcgactacgaggaggaggagatggagaccgtggagcagagcacccagagaatcaaggagttcagacagctgaccgccgacatgcaggccctggagcagaagatccaggacagcagctgcgaggccagcagcgagctgagagagaacggcgagtgcagaagcgtggccgtgggcgccgaggagaacatgaacgacatcgtggtgtaccacagaggcagcagaagctgcaaggacgccgccgtgggcaccctggtggagatgagaaactgcggcgtgagcgtgaccgaggccatgctgggcgtgatgaccgaggccgacaaggagatcgagctgcagcagcagaccatcgagagcctgaaggagaagatctacagactggaggtgcagctgagagagaccacccacgacagagagatgaccaagctgaagcaggagctgcaggccgccggcagcagaaagaaggtggacaaggccaccatggcccagcccctggtgttcagcaaggtggtggaggccgtggtgcagaccagagaccagatggtgggcagccacatggacctggtggacacctgcgtgggcaccagcgtggagaccaacagcgtgggcatcagctgccagcccgagtgcaagaacaaggtggtgggccccgagctgcccatgaactggtggatcgtgaaggagagagtggagatgcacgacagatgcgccggcagaagcgtggagatgtgcgacaagagcgtgagcgtggaggtgagcgtgtgcgagaccggcagcaacaccgaggagagcgtgaacgacctgaccctgctgaagaccaacctgaacctgaaggaggtgagaagcatcggctgcggcgactgcagcgtggacgtgaccgtgtgcagccccaaggagtgcgccagcagaggcgtgaacaccgaggccgtgagccaggtggaggccgccgtgatggccgtgcccagaaccgccgaccaggacaccagcaccgacctggagcaggtgcaccagttcaccaacaccgagaccgccaccctgatcgagagctgcaccaacacctgcctgagcaccctggacaagcagaccagcacccagaccgtggagaccagaaccgtggccgtgggcgagggcagagtgaaggacatcaacagcagcaccaagaccagaagcatcggcgtgggcaccctgctgagcggccacagcggcttcgacagacccagcgccgtgaagaccaaggagagcggcgtgggccagatcaacatcaacgacaactacctggtgggcctgaagatgagaaccatcgcctgcggccccccccagctgaccgtgggcctgaccgccagcagaagaagcgtgggcgtgggcgacgaccccgtgggcgagagcctggagaacccccagccccaggcccccctgggcatgatgaccggcctggaccactacatcgagagaatccagaagctgctggccgagcagcagaccctgctggccgagaactacagcgagctggccgaggccttcggcgagccccacagccagatgggcagcctgaacagccagctgatcagcaccctgagcagcatcaacagcgtgatgaagagcgccagcaccgaggagctgagaaaccccgacttccagaagaccagcctgggcaagatcaccggcaactacctgggctacacctgcaagtgcggcggcctgcagagcggcagccccctgagcagccagaccagccagcccgagcaggaggtgggcaccagcgagggcaagcccatcagcagcctggacgccttccccacccaggagggcaccctgagccccgtgaacctgaccgacgaccagatcgccgccggcctgtacggcaacttcagccacagccagagcctggccagcggcttctag

SEQ ID NO: 11257 - DNA, 831 bp, synthetic construct
  misc_feature 1..831: note = Description of Artificial Sequence: Synthetic coding sequence
  source 1..831: mol_type = other DNA
atgctgagcgcctgcaacctgctgaagaacaccatcaacgaccccaaggccctgaccagcaaggacatgagattctgcctgaacaccctgcagcacgagtggttcagagtgagcagccagaagagcgccatccccgccatggtgggcgactacatcgccgccttcgaggccatcagccccgacgtgctgagatacgtgatcaacctggccgacggcaacggcaacaccgccctgcactacagcgtgagccacagcaacttcgagatcgtgaagctgctgctggacgccgacgtgtgcaacgtggaccaccagaacaaggccggctacacccccatcatgctggccgccctggccgccgtggaggccgagaaggacatgagaatcgtggaggagctgttcggctgcggcgacgtgaacgccaaggccagccaggccggccagaccgccctgatgctggccgtgagccacggcagaatcgacatggtgaagggcctgctggcctgcggcgccgacgtgaacatccaggacgacgagggcagcaccgccctgatgtgcgccagcgagcacggccacgtggagatcgtgaagctgctgctggcccagcccggctgcaacggccacctggaggacaacgacggcagcaccgccctgagcatcgccctggaggccggccacaaggacatcgccgtgctgctgtacgcccacgtgaacttcgccaaggcccagagccccgtgagcgtggtgcacctggccttcgtgaacagactgaagagcaccagactggtggaccccctgccccccggcatcgacggcagacagatcctgtgctag

SEQ ID NO: 11258 - DNA, 993 bp, synthetic construct
  misc_feature 1..993: note = Description of Artificial Sequence: Synthetic coding sequence
  source 1..993: mol_type = other DNA
atggccgagggccaccacgccgtgaacatcgagggcctgaagagcgccagagtggaggacgagatgcaggtgcaggagtgcgagcccgagaaggtggagatcagagagagatacgagctgagcgagaagatgctgagcgcctgcaacctgctgaagaacaccatcaacgaccccaaggccctgaccagcaaggacatgggccaggtgcagtggctgacccccatgatccccaccctgagagaggccgacgccggcggcagccacgagagattctgcctgaacaccctgcagcacgagtggttcagagtgagcagccagaagagcgccatccccgccatggtgggcgactacatcgccgccttcgaggccatcagccccgacgtgctgagatacgtgatcaacctggccgacggcaacggcaacaccgccctgcactacagcgtgagccacagcaacttcgagatcgtgaagctgctgctggacgccgacgtgtgcaacgtggaccaccagaacaaggccggctacacccccatcatgctggccgccctggccgccgtggaggccgagaaggacatgagaatcgtggaggagctgttcggctgcggcgacgtgaacgccaaggccagccaggccggccagaccgccctgatgctggccgtgagccacggcagaatcgacatggtgaagggcctgctggcctgcggcgccgacgtgaacatccaggacgacgagggcagcaccgccctgatgtgcgccagcgagcacggccacgtggagatcgtgaagctgctgctggcccagcccggctgcaacggccacctggaggacaacgacggcagcaccgccctgagcatcgccctggaggccggccacaaggacatcgccgtgctgctgtacgcccacgtgaacttcgccaaggcccagagccccggcacccccagactgggcagaaagaccagccccggccccacccacagaggcagcttcgactag

SEQ ID NO: 11259 - DNA, 3585 bp, synthetic construct
  misc_feature 1..3585: note = Description of Artificial Sequence: Synthetic coding sequence
  source 1..3585: mol_type = other DNA
atggagaccagaagaagactggagcaggagagagccaccatgcagatgacccccggcgagttcagaagacccagactggccagcttcggcggcatgggcaccaccagcagcctgcccagcttcgtgggcagcggcaaccacaaccccgccaagcaccagctgcagaacggctaccagggcaacggcgactacggcagctacgcccccgccgcccccaccaccagcagcatgggcagcagcatcagacacagccccctgagcagcggcatcagcacccccgtgaccaacgtgagccccatgcacctgcagcacatcagagagcagatggccatcgccctgaagagactgaaggagctggaggagcaggtgagaaccatccccgtgctgcaggtgaagatcagcgtgctgcaggaggagaagagacagctggtgagccagctgaagaaccagagagccgccagccagatcaacgtgtgcggcgtgagaaagagaagctacagcgccggcaacgccagccagctggagcagctgagcagagccagaagaagcggcggcgagctgtacatcgactacgaggaggaggagatggagaccgtggagcagagcacccagagaatcaaggagttcagacagctgaccgccgacatgcaggccctggagcagaagatccaggacagcagctgcgaggccagcagcgagctgagagagaacggcgagtgcagaagcgtggccgtgggcgccgaggagaacatgaacgacatcgtggtgtaccacagaggcagcagaagctgcaaggacgccgccgtgggcaccctggtggagatgagaaactgcggcgtgagcgtgaccgaggccatgctgggcgtgatgaccgaggccgacaaggagatcgagctgcagcagcagaccatcgagagcctgaaggagaagatctacagactggaggtgcagctgagagagaccacccacgacagagagatgaccaagctgaagcaggagctgcaggccgccggcagcagaaagaaggtggacaaggccaccatggcccagcccctggtgttcagcaaggtggtggaggccgtggtgcagaccagagaccagatggtgggcagccacatggacctggtggacacctgcgtgggcaccagcgtggagaccaacagcgtgggcatcagctgccagcccgagtgcaagaacaaggtggtgggccccgagctgcccatgaactggtggatcgtgaaggagagagtggagatgcacgacagatgcgccggcagaagcgtggagatgtgcgacaagagcgtgagcgtggaggtgagcgtgtgcgagaccggcagcaacaccgaggagagcgtgaacgacctgaccctgctgaagaccaacctgaacctgaaggaggtgagaagcatcggctgcggcgactgcagcgtggacgtgaccgtgtgcagccccaaggagtgcgccagcagaggcgtgaacaccgaggccgtgagccaggtggaggccgccgtgatggccgtgcccagaaccgccgaccaggacaccagcaccgacctggagcaggtgcaccagttcaccaacaccgagaccgccaccctgatcgagagctgcaccaacacctgcctgagcaccctggacaagcagaccagcacccagaccgtggagaccagaaccgtggccgtgggcgagggcagagtgaaggacatcaacagcagcaccaagaccagaagcatcggcgtgggcaccctgctgagcggccacagcggcttcgacagacccagcgccgtgaagaccaaggagagcggcgtgggccagatcaacatcaacgacaactacctggtgggcctgaagatgagaaccatcgcctgcggccccccccagctgaccgtgggcctgaccgccagcagaagaagcgtgggcgtgggcgacgaccccgtgggcgagagcctggagaacccccagccccaggcccccctgggcatgatgaccggcctggaccactacatcgagagaatccagaagctgctggccgagcagcagaccctgctggccgagaactacagcgagctggccgaggccttcggcgagccccacagccagatgggcagcctgaacagccagctgatcagcaccctgagcagcatcaacagcgtgatgaagagcgccagcaccgaggagctgagaaaccccgacttccagaagaccagcctgggcaagatcaccggcaactacctgggctacacctgcaagtgcggcggcctgcagagcggcagccccctgagcagccagaccagccagcccgagcaggaggtgggcaccagcgagggcaagcccatcagcagcctggacgccttccccacccaggagggcaccctgagccccgtgaacctgaccgacgaccagatcgccgccggcctgtacgcctgcaccaacaacgagagcaccctgaagagcatcatgaagaagaaggacggcaacaaggacagcaacggcgccaagaagaacctgcagttcgtgggcatcaacggcggctacgagaccaccagcagcgacgacagcagcagcgacgagagcagcagcagcgagagcgacgacgagtgcgacgtgatcgagtaccccctggaggaggaggaggaggaggaggacgaggacaccagaggcatggccgagggccaccacgccgtgaacatcgagggcctgaagagcgccagagtggaggacgagatgcaggtgcaggagtgcgagcccgagaaggtggagatcagagagagatacgagctgagcgagaagatgctgagcgcctgcaacctgctgaagaacaccatcaacgaccccaaggccctgaccagcaaggacatgagattctgcctgaacaccctgcagcacgagtggttcagagtgagcagccagaagagcgccatccccgccatggtgggcgactacatcgccgccttcgaggccatcagccccgacgtgctgagatacgtgatcaacctggccgacggcaacggcaacaccgccctgcactacagcgtgagccacagcaacttcgagatcgtgaagctgctgctggacgccgacgtgtgcaacgtggaccaccagaacaaggccggctacacccccatcatgctggccgccctggccgccgtggaggccgagaaggacatgagaatcgtggaggagctgttcggctgcggcgacgtgaacgccaaggccagccaggccggccagaccgccctgatgctggccgtgagccacggcagaatcgacatggtgaagggcctgctggcctgcggcgccgacgtgaacatccaggacgacgagggcagcaccgccctgatgtgcgccagcgagcacggccacgtggagatcgtgaagctgctgctggcccagcccggctgcaacggccacctggaggacaacgacggcagcaccgccctgagcatcgccctggaggccggccacaaggacatcgccgtgctgctgtacgcccacgtgaacttcgccaaggcccagagccccggcacccccagactgggcagaaagaccagccccggccccacccacagaggcagcttcgactag

SEQ ID NO: 11260 - DNA, 4059 bp, synthetic construct
  misc_feature 1..4059: note = Description of Artificial Sequence: Synthetic coding sequence
  source 1..4059: mol_type = other DNA
atggcccacaccaccaaggtgaacggcagcgccagcggcaaggccggcgacatcctgagcggcgaccaggacaaggagcagaaggacccctacttcgtggagaccccctacggctaccagctggacctggacttcctgaagtacgtggacgacatccagaagggcaacaccatcaagagactgaacatccagaagagaagaaagcccagcgtgccctgccccgagcccagaaccaccagcggccagcagggcatctggaccagcaccgagagcctgagcagcagcaacagcgacgacaacaagcagtgccccaacttcctgatcgccagaagccaggtgaccagcacccccatcagcaagccccccccccccctggagaccagcctgcccttcctgaccatccccgagaacagacagctgcccccccccagcccccagctgcccaagcacaacctgcacgtgaccaagaccctgatggagaccagaagaagactggagcaggagagagccaccatgcagatgacccccggcgagttcagaagacccagactggccagcttcggcggcatgggcaccaccagcagcctgcccagcttcgtgggcagcggcaaccacaaccccgccaagcaccagctgcagaacggctaccagggcaacggcgactacggcagctacgcccccgccgcccccaccaccagcagcatgggcagcagcatcagacacagccccctgagcagcggcatcagcacccccgtgaccaacgtgagccccatgcacctgcagcacatcagagagcagatggccatcgccctgaagagactgaaggagctggaggagcaggtgagaaccatccccgtgctgcaggtgaagatcagcgtgctgcaggaggagaagagacagctggtgagccagctgaagaaccagagagccgccagccagatcaacgtgtgcggcgtgagaaagagaagctacagcgccggcaacgccagccagctggagcagctgagcagagccagaagaagcggcggcgagctgtacatcgactacgaggaggaggagatggagaccgtggagcagagcacccagagaatcaaggagttcagacagctgaccgccgacatgcaggccctggagcagaagatccaggacagcagctgcgaggccagcagcgagctgagagagaacggcgagtgcagaagcgtggccgtgggcgccgaggagaacatgaacgacatcgtggtgtaccacagaggcagcagaagctgcaaggacgccgccgtgggcaccctggtggagatgagaaactgcggcgtgagcgtgaccgaggccatgctgggcgtgatgaccgaggccgacaaggagatcgagctgcagcagcagaccatcgagagcctgaaggagaagatctacagactggaggtgcagctgagagagaccacccacgacagagagatgaccaagctgaagcaggagctgcaggccgccggcagcagaaagaaggtggacaaggccaccatggcccagcccctggtgttcagcaaggtggtggaggccgtggtgcagaccagagaccagatggtgggcagccacatggacctggtggacacctgcgtgggcaccagcgtggagaccaacagcgtgggcatcagctgccagcccgagtgcaagaacaaggtggtgggccccgagctgcccatgaactggtggatcgtgaaggagagagtggagatgcacgacagatgcgccggcagaagcgtggagatgtgcgacaagagcgtgagcgtggaggtgagcgtgtgcgagaccggcagcaacaccgaggagagcgtgaacgacctgaccctgctgaagaccaacctgaacctgaaggaggtgagaagcatcggctgcggcgactgcagcgtggacgtgaccgtgtgcagccccaaggagtgcgccagcagaggcgtgaacaccgaggccgtgagccaggtggaggccgccgtgatggccgtgcccagaaccgccgaccaggacaccagcaccgacctggagcaggtgcaccagttcaccaacaccgagaccgccaccctgatcgagagctgcaccaacacctgcctgagcaccctggacaagcagaccagcacccagaccgtggagaccagaaccgtggccgtgggcgagggcagagtgaaggacatcaacagcagcaccaagaccagaagcatcggcgtgggcaccctgctgagcggccacagcggcttcgacagacccagcgccgtgaagaccaaggagagcggcgtgggccagatcaacatcaacgacaactacctggtgggcctgaagatgagaaccatcgcctgcggccccccccagctgaccgtgggcctgaccgccagcagaagaagcgtgggcgtgggcgacgaccccgtgggcgagagcctggagaacccccagccccaggcccccctgggcatgatgaccggcctggaccactacatcgagagaatccagaagctgctggccgagcagcagaccctgctggccgagaactacagcgagctggccgaggccttcggcgagccccacagccagatgggcagcctgaacagccagctgatcagcaccctgagcagcatcaacagcgtgatgaagagcgccagcaccgaggagctgagaaaccccgacttccagaagaccagcctgggcaagatcaccggcaactacctgggctacacctgcaagtgcggcggcctgcagagcggcagccccctgagcagccagaccagccagcccgagcaggaggtgggcaccagcgagggcaagcccatcagcagcctggacgccttccccacccaggagggcaccctgagccccgtgaacctgaccgacgaccagatcgccgccggcctgtacgcctgcaccaacaacgagagcaccctgaagagcatcatgaagaagaaggacggcaacaaggacagcaacggcgccaagaagaacctgcagttcgtgggcatcaacggcggctacgagaccaccagcagcgacgacagcagcagcgacgagagcagcagcagcgagagcgacgacgagtgcgacgtgatcgagtaccccctggaggaggaggaggaggaggaggacgaggacaccagaggcatggccgagggccaccacgccgtgaacatcgagggcctgaagagcgccagagtggaggacgagatgcaggtgcaggagtgcgagcccgagaaggtggagatcagagagagatacgagctgagcgagaagatgctgagcgcctgcaacctgctgaagaacaccatcaacgaccccaaggccctgaccagcaaggacatgagattctgcctgaacaccctgcagcacgagtggttcagagtgagcagccagaagagcgccatccccgccatggtgggcgactacatcgccgccttcgaggccatcagccccgacgtgctgagatacgtgatcaacctggccgacggcaacggcaacaccgccctgcactacagcgtgagccacagcaacttcgagatcgtgaagctgctgctggacgccgacgtgtgcaacgtggaccaccagaacaaggccggctacacccccatcatgctggccgccctggccgccgtggaggccgagaaggacatgagaatcgtggaggagctgttcggctgcggcgacgtgaacgccaaggccagccaggccggccagaccgccctgatgctggccgtgagccacggcagaatcgacatggtgaagggcctgctggcctgcggcgccgacgtgaacatccaggacgacgagggcagcaccgccctgatgtgcgccagcgagcacggccacgtggagatcgtgaagctgctgctggcccagcccggctgcaacggccacctggaggacaacgacggcagcaccgccctgagcatcgccctggaggccggccacaaggacatcgccgtgctgctgtacgcccacgtgaacttcgccaaggcccagagccccggcacccccagactgggcagaaagaccagccccggccccacccacagaggcagcttcgactag

SEQ ID NO: 11261 - DNA, 4059 bp, synthetic construct; identical to SEQ ID NO: 11260
  misc_feature 1..4059: note = Description of Artificial Sequence: Synthetic coding sequence
  source 1..4059: mol_type = other DNA

SEQ ID NO: 11262 - DNA, 1197 bp, synthetic construct
  misc_feature 1..1197: note = Description of Artificial Sequence: Synthetic coding sequence
  source 1..1197: mol_type = other DNA
atgaagaagaaggacggcaacaaggacagcaacggcgccaagaagaacctgcagttcgtgggcatcaacggcggctacgagaccaccagcagcgacgacagcagcagcgacgagagcagcagcagcgagagcgacgacgagtgcgacgtgatcgagtaccccctggaggaggaggaggaggaggaggacgaggacaccagaggcatggccgagggccaccacgccgtgaacatcgagggcctgaagagcgccagagtggaggacgagatgcaggtgcaggagtgcgagcccgagaaggtggagatcagagagagatacgagctgagcgagaagatgctgagcgcctgcaacctgctgaagaacaccatcaacgaccccaaggccctgaccagcaaggacatgggccaggtgcagtggctgacccccatgatccccaccctgagagaggccgacgccggcggcagccacgagagattctgcctgaacaccctgcagcacgagtggttcagagtgagcagccagaagagcgccatccccgccatggtgggcgactacatcgccgccttcgaggccatcagccccgacgtgctgagatacgtgatcaacctggccgacggcaacggcaacaccgccctgcactacagcgtgagccacagcaacttcgagatcgtgaagctgctgctggacgccgacgtgtgcaacgtggaccaccagaacaaggccggctacacccccatcatgctggccgccctggccgccgtggaggccgagaaggacatgagaatcgtggaggagctgttcggctgcggcgacgtgaacgccaaggccagccaggccggccagaccgccctgatgctggccgtgagccacggcagaatcgacatggtgaagggcctgctggcctgcggcgccgacgtgaacatccaggacgacgagggcagcaccgccctgatgtgcgccagcgagcacggccacgtggagatcgtgaagctgctgctggcccagcccggctgcaacggccacctggaggacaacgacggcagcaccgccctgagcatcgccctggaggccggccacaaggacatcgccgtgctgctgtacgcccacgtgaacttcgccaaggcccagagccccggcacccccagactgggcagaaagaccagccccggccccacccacagaggcagcttcgactag

SEQ ID NO: 11263 - DNA, 2211 bp, synthetic construct
  misc_feature 1..2211: note = Description of Artificial Sequence: Synthetic coding sequence
  source 1..2211: mol_type = other DNA
atgggcaaccccgagaacatcgaggacgcctacgtggccgtgatcagacccaagaacaccgccagcctgaacagcagagagtacagagccaagagctacgagatcctgctgcacgaggtgcccatcgagggccagaagaagaagagaaagaaggtgctgctggagaccaagctgcagggcaacagcgagatcacccagggcatcctggactacgtggtggagaccaccaagcccatcagccccgccaaccagggcatcagaggcaagagagtggtgctgatgaagaagttccccctggacggcgagaagatgggcagagaggccagcctgttcatcgtgcccagcgtggtgaaggacaacaccaagtacacctacacccccggctgccccatcttctactgcctgcaggacatcatgagagtgtgcagcgagagcagcacccacttcgccaccctgaccgccagaatgctgatcgccctggacaagtggctggacgagagacacgcccagagccacttcatccccgccctgttcagacccagccccctggagagaatcaagaccaacgtgatcaaccccgcctacgccaccgagagcggccagaccgagaacagcctgcacatgggctacagcgccctggagatcaagagcaagatgctggccctggagaaggccgacacctgcatctacaaccccctgttcggcagcgacctgcagtacaccaacagagtggacaaggtggtgatcaacccctacttcggcctgggcgcccccgactacagcaagatccagatccccaagcaggagaagtggcagagaagcatgagcagcgtgaccgaggacaaggagagacagtgggtggacgacttccccctgcacagaagcgcctgcgagggcgacagcgagctgctgagcagactgctgagcgagagattcagcgtgaaccagctggacagcgaccactgggcccccatccactacgcctgctggtacggcaaggtggaggccaccagaatcctgctggagaagggcaagtgcaaccccaacctgctgaacggccagctgagcagccccctgcacttcgccgccggcggcggccacgccgagatcgtgcagatcctgctgaaccaccccgagaccgacagacacatcaccgaccagcagggcagaagccccctgaacatctgcgaggagaacaagcagaacaactgggaggaggccgccaagctgctgaaggaggccatcaacaagccctacgagaaggtgagaatctacagaatggacggcagctacagaagcgtggagctgaagcacggcaacaacaccaccgtgcagcagatcatggagggcatgagactgagccaggagacccagcagtacttcaccatctggatctgcagcgagaacctgagcctgcagctgaagccctaccacaagcccctgcagcacgtgagagactggcccgagatcctggccgagctgaccaacctggacccccagagagagaccccccagctgttcctgagaagagacgtgagactgcccctggaggtggagaagcagatcgaggaccccctggccatcctgatcctgttcgacgaggccagatacaacctgctgaagggcttctacaccgcccccgacgccaagctgatcaccctggccagcctgctgctgcagatcgtgtacggcaactacgagagcaagaagcacaagcagggcttcctgaacgaggagaacctgaagagcatcgtgcccgtgaccaagctgaagagcaaggccccccactggaccaacagaatcctgcacgagtacaagaacctgagcaccagcgagggcgtgagcaaggagatgcaccacctgcagagaatgttcctgcagaactgctgggagatccccacctacggcgccgccttcttcaccggccagatcttcaccaaggccagccccagcaaccacaaggtgatccccgtgtacgtgggcgtgaacatcaagggcctgcacctgctgaacatggagaccaaggccctgctgatcagcctgaagtacggctgcttcatgtggcagctgggcgacaccgacacctgcttccagatccacagcatggagaacaagatgagcttcatcgtgcacaccaagcaggccggcctggtggtgaagctgctgatgaagctgaacggccagctgatgcccaccgagagaaacagctag

SEQ ID NO: 11264 - DNA, 2067 bp, synthetic construct
  misc_feature 1..2067: note = Description of Artificial Sequence: Synthetic coding sequence
  source 1..2067: mol_type = other DNA
atgggcaaccccgagaacatcgaggacgcctacgtggccgtgatcagacccaagaacaccgccagcctgaacagcagagagtacagagccaagagctacgagatcctgctgcacgaggtgcccatcgagggccagaagaagaagagaaagaaggtgctgctggagaccaagctgcagggcaacagcgagatcacccagggcatcctggactacgtggtggagaccaccaagcccatcagccccgccaaccagggcatcagaggcaagagagtggtgctgatgaagaagttccccctggacggcgagaagatgggcagagaggccagcctgttcatcgtgcccagcgtggtgaaggacaacaccaagtacacctacacccccggctgccccatcttctactgcctgcaggacatcatgagagtgtgcagcgagagcagcacccacttcgccaccctgaccgccagaatgctgatcgccctggacaagtggctggacgagagacacgcccagagccacttcatccccgccctgttcagacccagccccctggagagaatcaagaccaacgtgatcaaccccgcctacgccaccgagagcggccagaccgagaacagcctgcacatgggctacagcgccctggagatcaagagcaagatgctggccctggagaaggccgacacctgcatctacaaccccctgttcggcagcgacctgcagtacaccaacagagtggacaaggtggtgatcaacccctacttcggcctgggcgcccccgactacagcaagatccagatccccaagcaggagaagtggcagagaagcatgagcagcgtgaccgaggacaagtacggcaaggtggaggccaccagaatcctgctggagaagggcaagtgcaaccccaacctgctgaacggccagctgagcagccccctgcacttcgccgccggcggcggccacgccgagatcgtgcagatcctgctgaaccaccccgagaccgacagacacatcaccgaccagcagggcagaagccccctgaacatctgcgaggagaacaagcagaacaactgggaggaggccgccaagctgctgaaggaggccatcaacaagccctacgagaaggtgagaatctacagaatggacggcagctacagaagcgtggagctgaagcacggcaacaacaccaccgtgcagcagatcatggagggcatgagactgagccaggagacccagcagtacttcaccatctggatctgcagcgagaacctgagcctgcagctgaagccctaccacaagcccctgcagcacgtgagagactggcccgagatcctggccgagctgaccaacctggacccccagagagagaccccccagctgttcctgagaagagacgtgagactgcccctggaggtggagaagcagatcgaggaccccctggccatcctgatcctgttcgacgaggccagatacaacctgctgaagggcttctacaccgcccccgacgccaagctgatcaccctggccagcctgctgctgcagatcgtgtacggcaactacgagagcaagaagcacaagcagggcttcctgaacgaggagaacctgaagagcatcgtgcccgtgaccaagctgaagagcaaggccccccactggaccaacagaatcctgcacgagtacaagaacctgagcaccagcgagggcgtgagcaaggagatgcaccacctgcagagaatgttcctgcagaactgctgggagatccccacctacggcgccgccttcttcaccggccagatcttcaccaaggccagccccagcaaccacaaggtgatccccgtgtacgtgggcgtgaacatcaagggcctgcacctgctgaacatggagaccaaggccctgctgatcagcctgaagtacggctgcttcatgtggcagctgggcgacaccgacacctgcttccagatccacagcatggagaacaagatgagcttcatcgtgcacaccaagcaggccggcctggtggtgaagctgctgatgaagctgaacggccagctgatgcccaccgagagaaacagctag

SEQ ID NO: 11265 - DNA, 2211 bp, synthetic construct; identical to SEQ ID NO: 11263
  misc_feature 1..2211: note = Description of Artificial Sequence: Synthetic coding sequence
  source 1..2211: mol_type = other DNA

SEQ ID NO: 11266 - DNA, 2211 bp, synthetic construct; identical to SEQ ID NO: 11263
  misc_feature 1..2211: note = Description of Artificial Sequence: Synthetic coding sequence
  source 1..2211: mol_type = other DNA

SEQ ID NO: 11267 - DNA, 2211 bp, synthetic construct; identical to SEQ ID NO: 11263
  misc_feature 1..2211: note = Description of Artificial Sequence: Synthetic coding sequence
  source 1..2211: mol_type = other DNA

SEQ ID NO: 11268 - DNA, 210 bp, synthetic construct
  misc_feature 1..210: note = Description of Artificial Sequence: Synthetic coding sequence
  source 1..210: mol_type = other DNA
atgggcaaccccgagaacatcgaggacgcctacgtggccgtgatcagacccaagaacaccgccagcctgaacagcagagagtacagagccaagagctacgagatcctgctgcacgaggtgcccatcgagggccagaagaagaagagaaagaaggtgctgctggagaccaagctgcagggcaacagcgagatcacccagggcatcctgtag

SEQ ID NO: 11269 - DNA, 1698 bp, synthetic construct
  misc_feature 1..1698: note = Description of Artificial Sequence: Synthetic coding sequence
  source 1..1698: mol_type = other DNA
atgggcaaccccgagaacatcgaggacgcctacgtggccgtgatcagacccaagaacaccgccagcctgaacagcagagagtacagagccaagagctacgagatcctgctgcacgaggtgcccatcgagggccagaagaagaagagaaagaaggtgctgctggagaccaagctgcagggcaacagcgagatcacccagggcatcctggactacgtggtggagaccaccaagcccatcagccccgccaaccagggcatcagaggcaagagagtggtgctgatgaagaagttccccctggacggcgagaagatgggcagagaggccagcctgttcatcgtgcccagcgtggtgaaggacaacaccaagtacacctacacccccggctgccccatcttctactgcctgcaggacatcatgagagtgtgcagcgagagcagcacccacttcgccaccctgaccgccagaatgctgatcgccctggacaagtggctggacgagagacacgcccagagccacttcatccccgccctgttcagacccagccccctggagagaatcaagaccaacgtgatcaaccccgcctacgccaccgagagcggccagaccgagaacagcctgcacatgggctacagcgccctggagatcaagagcaagatgctggccctggagaaggccgacacctgcatctacaaccccctgttcggcagcgacctgcagtacaccaacagagtggacaaggtggtgatcaacccctacttcggcctgggcgcccccgactacagcaagatccagatccccaagcaggagaagtggcagagaagcatgagcagcgtgaccgaggacaaggagagacagtgggtggacgacttccccctgcacagaagcgcctgcgagggcgacagcgagctgctgagcagactgctgagcgagagattcagcgtgaaccagctggacagcgaccactgggcccccatccactacgcctgctggtacggcaaggtggaggccaccagaatcctgctggagaagggcaagtgcaaccccaacctgctgaacggccagctgagcagccccctgcacttcgccgccggcggcggccacgccgagatcgtgcagatcctgctgaaccaccccgagaccgacagacacatcaccgaccagcagggcagaagccccctgaacatctgcgaggagaacaagcagaacaactgggaggaggccgccaagctgctgaaggaggccatcaacaagccctacgagaaggtgagaatctacagaatggacggcagctacagaagcgtggagctgaagcacggcaacaacaccaccgtgcagcagatcatggagggcatgagactgagccaggagacccagcagtacttcaccatctggatctgcagcgagaacctgagcctgcagctgaagccctaccacaagcccctgcagcacgtgagagactggcccgagatcctggccgagctgaccaacctggacccccagagagagaccccccagctgttcctgagaagagacgtgagactgcccctggaggtggagaagcagatcgaggaccccctggccatcctgatcctgttcgacgaggccagatacaacctgctgaagggcttctacaccgcccccgacgccaagctgatcaccctggccagcctgctgctgcagagcctgtggaagctgtag

SEQ ID NO: 11270 - DNA, 78 bp, synthetic construct
  misc_feature 1..78: note = Description of Artificial Sequence: Synthetic coding sequence
  source 1..78: mol_type = other DNA
atgggcaaccccgagaacatcgaggacgcctacgtggccgtgatcagacccaagaacaccgccagcctgaacagctag

SEQ ID NO: 11271 - DNA, 39 bp, synthetic construct
  misc_feature 1..39: note = Description of Artificial Sequence: Synthetic coding sequence
  source 1..39: mol_type = other DNA
atgggcaaccccgagaacatcgaggacgcctacgtgtag

SEQ ID NO: 11272 - DNA, 117 bp, synthetic construct
  misc_feature 1..117: note = Description of Artificial Sequence: Synthetic coding sequence
  source 1..117: mol_type = other DNA
atgggcaaccccgagaacatcgaggacgcctacgtggccgtgatcagacccaagaacaccgccagcctgaacagcagagagtacagagccaagagctacgagatcctgctgcactag

SEQ ID NO: 11273 - DNA, 297 bp, synthetic construct
  misc_feature 1..297: note = Description of Artificial Sequence: Synthetic coding sequence
  source 1..297: mol_type = other DNA
atgggcaaccccgagaacatcgaggacgcctacgtggccgtgatcagacccaagaacaccgccagcctgaacagcagagagtacagagccaagagctacgagatcctgctgcacgaggtgcccatcgagggccagaagaagaagagaaagaaggtgctgctggagaccaagctgcagggcaacagcgagatcacccagggcatcctggactacgtggtggagaccaccaagcccatcagccccgccaaccagggcatcagaggcaagagagtggtgctgatgaagaagttcccctag

SEQ ID NO: 11274 - DNA, 555 bp, synthetic construct
  misc_feature 1..555: note = Description of Artificial Sequence: Synthetic coding sequence
  source 1..555: mol_type = other DNA
atgggcaaccccgagaacatcgaggacgcctacgtggccgtgatcagacccaagaacaccgccagcctgaacagcagagagtacagagccaagagctacgagatcctgctgcacgaggtgcccatcgagggccagaagaagaagagaaagaaggtgctgctggagaccaagctgcagggcaacagcgagatcacccagggcatcctggactacgtggtggagaccaccaagcccatcagccccgccaaccagggcatcagaggcaagagagtggtgctgatgaagaagttccccctggacggcgagaagatgggcagagaggccagcctgttcatcgtgcccagcgtggtgaaggacaacaccaagtacacctacacccccggctgccccatcttctactgcctgcaggacatcatgagagtgtgcagcgagagcagcacccacttcgccaccctgaccgccagaatgctgatcgccctggacaagtggctggacgagagacacgcccagagccacttcatccccgccctgttcagacccagccccctggagtag

SEQ ID NO: 11275 - DNA, 339 bp, synthetic construct
  misc_feature 1..339: note = Description of Artificial Sequence: Synthetic coding sequence
  source 1..339: mol_type = other DNA
atgggcaaccccgagaacatcgaggacgcctacgtggccgtgatcagacccaagaacaccgccagcctgaacagcagagagtacagagccaagagctacgagatcctgctgcacgaggtgcccatcgagggccagaagaagaagagaaagaaggtgctgctggagaccaagctgcagggcaacagcgagatcacccagggcatcctggactacgtggtggagaccaccaagcccatcagccccgccaaccagggcatcagaggcaagagagtggtgctgatgaagaagttccccctggacggcgagaagatgggcagagaggccagcctgttcatctag

SEQ ID NO: 11276 - DNA, 105 bp, synthetic construct
  misc_feature 1..105: note = Description of Artificial Sequence: Synthetic coding sequence
  source 1..105: mol_type = other DNA
atgggcaaccccgagaacatcgaggacgcctacgtggccgtgatcagacccaagaacaccgccagcctgaacagcagagagtacagagccaagagctacgagtag

SEQ ID NO: 11277 - DNA, 177 bp, synthetic construct
  misc_feature 1..177: note = Description of Artificial Sequence: Synthetic coding sequence
  source 1..177: mol_type = other DNA
atgggcaaccccgagaacatcgaggacgcctacgtggccgtgatcagacccaagaacaccgccagcctgaacagcagagagtacagagccaagagctacgagatcctgctgcacgaggtgcccatcgagggccagaagaagaagagaaagaaggtgctgctggagaccaagctgtag

SEQ ID NO: 11278 - DNA, 489 bp, synthetic construct
  misc_feature 1..489: note = Description of Artificial Sequence: Synthetic coding sequence
  source 1..489: mol_type = other DNA
atgggcaaccccgagaacatcgaggacgcctacgtggccgtgatcagacccaagaacaccgccagcctgaacagcagagagtacagagccaagagctacgagatcctgctgcacgaggtgcccatcgagggccagaagaagaagagaaagaaggtgctgctggagaccaagctgcagggcaacagcgagatcacccagggcatcctggactacgtggtggagaccaccaagcccatcagccccgccaaccagggcatcagaggcaagagagtggtgctgatgaagaagttccccctggacggcgagaagatgggcagagaggccagcctgttcatcgtgcccagcgtggtgaaggacaacaccaagtacacctacacccccggctgccccatcttctactgcctgcaggacatcatgagagtgtgcagcgagagcagcacccacttcgccaccctgaccgccagaatgctgatcgccctggacaagtag

SEQ ID NO: 11279 - DNA, 732 bp, synthetic construct
  misc_feature 1..732: note = Description of Artificial Sequence: Synthetic coding sequence
  source 1..732: mol_type = other DNA
atgggcaaccccgagaacatcgaggacgcctacgtggccgtgatcagacccaagaacaccgccagcctgaacagcagagagtacagagccaagagctacgagatcctgctgcacgaggtgcccatcgagggccagaagaagaagagaaagaaggtgctgctggagaccaagctgcagggcaacagcgagatcacccagggcatcctggactacgtggtggagaccaccaagcccatcagccccgccaaccagggcatcagaggcaagagagtggtgctgatgaagaagttccccctggacggcgagaagatgggcagagaggccagcctgttcatcgtgcccagcgtggtgaaggacaacaccaagtacacctacacccccggctgccccatcttctactgcctgcaggacatcatgagagtgtgcagcgagagcagcacccacttcgccaccctgaccgccagaatgctgatcgccctggacaagtggctggacgagagacacgcccagagccacttcatccccgccctgttcagacccagccccctggagagaatcaagaccaacgtgatcaaccccgcctacgccaccgagagcggccagaccgagaacagcctgcacatgggctacagcgccctggagatcaagagcaagatgctggccctggagaaggccgacacctgcatctacaaccccctgttcggcagcgacctgcagtacaccaacagatag

SEQ ID NO: 11280 - DNA, 198 bp, synthetic construct
  misc_feature 1..198: note = Description of Artificial Sequence: Synthetic coding sequence
  source 1..198: mol_type = other DNA
atgggcaaccccgagaacatcgaggacgcctacgtggccgtgatcagacccaagaacaccgccagcctgaacagcagagagtacagagccaagagctacgagatcctgctgcacgaggtgcccatcgagggccagaagaagaagagaaagaaggtgctgctggagaccaagctgcagggcaacagcgagatcacctag

SEQ ID NO: 11281 - DNA, 1089 bp, synthetic construct
  misc_feature 1..1089: note = Description of Artificial Sequence: Synthetic coding sequence
  source 1..1089: mol_type = other DNA
atggccaccgccgagaccgccctgcccagcatcagcaccctgaccgccctgggccccttccccgacacccaggacgacttcctgaagtggtggagaagcgaggaggcccaggacatgggccccggcccccccgaccccaccgagccccccctgcacgtgaagagcgaggaccagcccggcgaggaggaggacgacgagagaggcgccgacgccacctgggacctggacctgctgctgaccaacttcagcggccccgagcccggcggcgccccccagacctgcgccctggcccccagcgaggccagcggcgcccagtacccccccccccccgagaccctgggcgcctacgccggcggccccggcctggtggccggcctgctgggcagcgaggaccacagcggctgggtgagacccgccctgagagccagagcccccgacgccttcgtgggccccgccctggcccccgcccccgcccccgagcccaaggccctggccctgcagcccgtgtaccccggccccggcgccggcagcagcggcggctacttccccagaaccggcctgagcgtgcccgccgccagcggcgccccctacggcctgctgagcggctaccccgccatgtaccccgccccccagtaccagggccacttccagctgttcagaggcctgcagggccccgcccccggccccgccaccagccccagcttcctgagctgcctgggccccggcaccgtgggcaccggcctgggcggcaccgccgaggaccccggcgtgatcgccgagaccgcccccagcaagagaggcagaagaagctgggccagaaagagacaggccgcccacacctgcgcccaccccggctgcggcaagagctacaccaagagcagccacctgaaggcccacctgagaacccacaccggcgagaagccctacgcctgcacctgggagggctgcggctggagattcgccagaagcgacgagctgaccagacactacagaaagcacaccggccagagacccttcagatgccagctgtgccccagagccttcagcagaagcgaccacctggccctgcacatgaagagacacctgtag

SEQ ID NO: 11282 - DNA, 999 bp, synthetic construct
  misc_feature 1..999: note = Description of Artificial Sequence: Synthetic coding sequence
  source 1..999: mol_type = other DNA
atggccaccctgaaggaccagctgatctacaacctgctgaaggaggagcagaccccccagaacaagatcaccgtggtgggcgtgggcgccgtgggcatggcctgcgccatcagcatcctgatgaaggacctggccgacgagctggccctggtggacgtgatcgaggacaagctgaagggcgagatgatggacctgcagcacggcagcctgttcctgagaacccccaagatcgtgagcggcaaggactacaacgtgaccgccaacagcaagctggtgatcatcaccgccggcgccagacagcaggagggcgagagcagactgaacctggtgcagagaaacgtgaacatcttcaagttcatcatccccaacgtggtgaagtacagccccaactgcaagctgctgatcgtgagcaaccccgtggacatcctgacctacgtggcctggaagatcagcggcttccccaagaacagagtgatcggcagcggctgcaacctggacagcgccagattcagatacctgatgggcgagagactgggcgtgcaccccctgagctgccacggctgggtgctgggcgagcacggcgacagcagcgtgcccgtgtggagcggcatgaacgtggccggcgtgagcctgaagaccctgcaccccgacctgggcaccgacaaggacaaggagcagtggaaggaggtgcacaagcaggtggtggagagcgcctacgaggtgatcaagctgaagggctacaccagctgggccatcggcctgagcgtggccgacctggccgagagcatcatgaagaacctgagaagagtgcaccccgtgagcaccatgatcaagggcctgtacggcatcaaggacgacgtgttcctgagcgtgccctgcatcctgggccagaacggcatcagcgacctggtgaaggtgaccctgaccagcgaggaggaggccagactgaagaagagcgccgacaccctgtggggcatccagaaggagctgcagttctag

SEQ ID NO: 11283 - DNA, 825 bp, synthetic construct
  misc_feature 1..825: note = Description of Artificial Sequence: Synthetic coding sequence
  source 1..825: mol_type = other DNA
atggccaccctgaaggaccagctgatctacaacctgctgaaggaggagcagaccccccagaacaagatcaccgtggtgggcgtgggcgccgtgggcatggcctgcgccatcagcatcctgatgaaggacctggccgacgagctggccctggtggacgtgatcgaggacaagctgaagggcgagatgatggacctgcagcacggcagcctgttcctgagaacccccaagatcgtgagcggcaaggactacaacgtgaccgccaacagcaagctggtgatcatcaccgccggcgccagacagcaggagggcgagagcagactgaacctggtgcagagaaacgtgaacatcttcaagttcatcatccccaacgtggtgaagtacagccccaactgcaagctgctgatcgtgagcaaccccgtggacatcctgacctacgtggcctggaagatcagcggcttccccaagaacagagtgatcggcagcggctgcaacctggacagcgccagattcagatacctgatgggcgagagactgggcgtgcaccccctgagctgccacggctgggtgctgggcgagcacggcgacagcagcgtgcccgtgtggagcggcatgaacgtggccggcgtgagcctgaagaccctgcaccccgacctgggcaccgacaaggacaaggagcagtggaaggagtgcagatacaccctgggcgaccccaagggcgccgccatcctgaagagcagcgacgtgatcagcttccactgcctgggctacaacagaatcctgggcggcggctgcgcctgctgccccttctacctgatctgcgactag

SEQ ID NO: 11284 - DNA, 999 bp, synthetic construct; identical to SEQ ID NO: 11282
  misc_feature 1..999: note = Description of Artificial Sequence: Synthetic coding sequence
  source 1..999: mol_type = other DNA

SEQ ID NO: 11285 - DNA, 825 bp, synthetic construct
  misc_feature 1..825: note = Description of Artificial Sequence: Synthetic coding sequence
  source 1..825: mol_type = other DNA
atggccaccctgaaggaccagctgatctacaacctgctgaaggaggagcagaccccccagaacaagatcaccgtggtgggcgtgggcgccgtgggcatggcctgcgccatcagcatcctgatgaaggacctggccgacgagctggccctggtggacgtgatcgaggacaagctgaagggcgagatgatggacctgcagcacggcagcctgttcctgagaacccccaagatcgtgagcggcaaggtggacatcctgacctacgtggcctggaagatcagcggcttccccaagaacagagtgatcggcagcggctgcaacctggacagcgccagattcagatacctgatgggcgagagactgggcgtgcaccccctgagctgccacggctgggtgctgggcgagcacggcgacagcagcgtgcccgtgtggagcggcatgaacgtggccggcgtgagcctgaagaccctgcaccccgacctgggcaccgacaaggacaaggagcagtggaaggaggtgcacaagcaggtggtggagagcgcctacgaggtgatcaagctgaagggctacaccagctgggccatcggcctgagcgtggccgacctggccgagagcatcatgaagaacctgagaagagtgcaccccgtgagcaccatgatcaagggcctgtacggcatcaaggacgacgtgttcctgagcgtgccctgcatcctgggccagaacggcatcagcgacctggtgaaggtgaccctgaccagcgaggaggaggccagactgaagaagagcgccgacaccctgtggggcatccagaaggagctgcagttctag

SEQ ID NO: 11286 - DNA, 918 bp, synthetic construct
  misc_feature 1..918: note = Description of Artificial Sequence: Synthetic coding sequence
  source 1..918: mol_type = other DNA
atggccaccctgaaggaccagctgatctacaacctgctgaaggaggagcagaccccccagaacaagatcaccgtggtgggcgtgggcgccgtgggcatggcctgcgccatcagcatcctgatgaaggacctggccgacgagctggccatcgtgagcggcaaggactacaacgtgaccgccaacagcaagctggtgatcatcaccgccggcgccagacagcaggagggcgagagcagactgaacctggtgcagagaaacgtgaacatcttcaagttcatcatccccaacgtggtgaagtacagccccaactgcaagctgctgatcgtgagcaaccccgtggacatcctgacctacgtggcctggaagatcagcggcttccccaagaacagagtgatcggcagcggctgcaacctggacagcgccagattcagatacctgatgggcgagagactgggcgtgcaccccctgagctgccacggctgggtgctgggcgagcacggcgacagcagcgtgcccgtgtggagcggcatgaacgtggccggcgtgagcctgaagaccctgcaccccgacctgggcaccgacaaggacaaggagcagtggaaggaggtgcacaagcaggtggtggagagcgcctacgaggtgatcaagctgaagggctacaccagctgggccatcggcctgagcgtggccgacctggccgagagcatcatgaagaacctgagaagagtgcaccccgtgagcaccatgatcaagggcctgtacggcatcaaggacgacgtgttcctgagcgtgccctgcatcctgggccagaacggcatcagcgacctggtgaaggtgaccctgaccagcgaggaggaggccagactgaagaagagcgccgacaccctgtggggcatccagaaggagctgcagttctag

SEQ ID NO: 11287 - DNA, 435 bp, synthetic construct
  misc_feature 1..435: note = Description of Artificial Sequence: Synthetic coding sequence
  source 1..435: mol_type = other DNA
atggccaccctgaaggaccagctgatctacaacctgctgaaggaggagcagaccccccagaacaagatcaccgtggtgggcgtgggcgccgtgggcatggcctgcgccatcagcatcctgatgaaggacctggccgacgagctggccctggtggacgtgatcgaggacaagctgaagggcgagatgatggacctgcagcacggcagcctgttcctgagaacccccaagatcgtgagcggcaaggactacaacgtgaccgccaacagcaagctggtgatcatcaccgccggcgccagacagcaggagggcgagagcagactgaacctggtgcagagaaacgtgaacatcttcaagttcatcatccccaacgtggtgaagtacagccccaactgcaagctgctgatcgtgagcaaccccggcgaggccttcgactag

SEQ ID NO: 11288 - DNA, 345 bp, synthetic construct
  misc_feature 1..345: note = Description of Artificial Sequence: Synthetic coding sequence
  source 1..345: mol_type = other DNA
atggccaccctgaaggaccagctgatctacaacctgctgaaggaggagcagaccccccagaacaagatcaccgtggtgggcgtgggcgccgtgggcatggcctgcgccatcagcatcctgatgaaggacctggccgacgagctggccctggtggacgtgatcgaggacaagctgaagggcgagatgatggacctgcagcacggcagcctgttcctgagaacccccaagatcgtgagcggcaaggactacaacgtgaccgccaacagcaagctggtgatcatcaccgccggcgccagacagcaggagggcgagagcagactgaacctggtgcagagaaacgtgtag

SEQ ID NO: 11289 - DNA, 219 bp, synthetic construct
  misc_feature 1..219: note = Description of Artificial Sequence: Synthetic coding sequence
  source 1..219: mol_type = other DNA
atggccaccctgaaggaccagctgatctacaacctgctgaaggaggagcagaccccccagaacaagatcaccgtggtgggcgtgggcgccgtgggcatggcctgcgccatcagcatcctgatgaaggacctggccgacgagctggccctggtggacgtgatcgaggacaagctgaagggcgagatgatggacctgcagcacggcagcctgttcctgtag

SEQ ID NO: 11290 - DNA, 1086 bp, synthetic construct
  misc_feature 1..1086: note = Description of Artificial Sequence: Synthetic coding sequence
  source 1..1086: mol_type = other DNA
atgggcgagcccagcggcggctacacctacacccagaccagcatcttcctgttccacgccaagatccccttcggcagcaagagcaacatggccaccctgaaggaccagctgatctacaacctgctgaaggaggagcagaccccccagaacaagatcaccgtggtgggcgtgggcgccgtgggcatggcctgcgccatcagcatcctgatgaaggacctggccgacgagctggccctggtggacgtgatcgaggacaagctgaagggcgagatgatggacctgcagcacggcagcctgttcctgagaacccccaagatcgtgagcggcaaggactacaacgtgaccgccaacagcaagctggtgatcatcaccgccggcgccagacagcaggagggcgagagcagactgaacctggtgcagagaaacgtgaacatcttcaagttcatcatccccaacgtggtgaagtacagccccaactgcaagctgctgatcgtgagcaaccccgtggacatcctgacctacgtggcctggaagatcagcggcttccccaagaacagagtgatcggcagcggctgcaacctggacagcgccagattcagatacctgatgggcgagagactgggcgtgcaccccctgagctgccacggctgggtgctgggcgagcacggcgacagcagcgtgcccgtgtggagcggcatgaacgtggccggcgtgagcctgaagaccctgcaccccgacctgggcaccgacaaggacaaggagcagtggaaggaggtgcacaagcaggtggtggagagcgcctacgaggtgatcaagctgaagggctacaccagctgggccatcggcctgagcgtggccgacctggccgagagcatcatgaagaacctgagaagagtgcaccccgtgagcaccatgatcaagggcctgtacggcatcaaggacgacgtgttcctgagcgtgccctgcatcctgggccagaacggcatcagcgacctggtgaaggtgaccctgaccagcgaggaggaggccagactgaagaagagcgccgacaccctgtggggcatccagaaggagctgcagttctag

SEQ ID NO: 11291 - DNA, 999 bp, synthetic construct; identical to SEQ ID NO: 11282
  misc_feature 1..999: note = Description of Artificial Sequence: Synthetic coding sequence
  source 1..999: mol_type = other DNA

SEQ ID NO: 11292 - DNA, 474 bp, synthetic construct
  misc_feature 1..474: note = Description of Artificial Sequence: Synthetic coding sequence
  source 1..474: mol_type = other DNA
atggccaccctgaaggaccagctgatctacaacctgctgaaggaggagcagaccccccagaacaagatcaccgtggtgggcgtgggcgccgtgggcatggcctgcgccatcagcatcctgatgaaggacctggccgacgagctggccctggtggacgtgatcgaggacaagctgaagggcgagatgatggacctgcagcacggcagcctgttcctgagaacccccaagatcgtgagcggcaaggactacaacgtgaccgccaacagcaagctggtgatcatcaccgccggcgccagacagcaggagggcgagagcagactgaacctggtgcagagaaacgtgaacatcttcaagttcatcatccccaacgtggtgaagtacagccccaactgcaagctgctgatcgtgagcaaccccgtggacatcctgacctacgtggcctggaagatcagcggcttccccaagaacagatag

SEQ ID NO: 11293 - DNA, 804 bp, synthetic construct
  misc_feature 1..804: note = Description of Artificial Sequence: Synthetic coding sequence
  source 1..804: mol_type = other DNA
atgggcagcgcctgcatcaaggtgaccaagtacttcctgttcctgttcaacctgatcttcttcatcctgggcgccgtgatcctgggcttcggcgtgtggatcctggccgacaagagcagcttcatcagcgtgctgcagaccagcagcagcagcctgagaatgggcgcctacgtgttcatcggcgtgggcgccgtgaccatgctgatgggcttcctgggctgcatcggcgccgtgaacgaggtgagatgcctgctgggcctgtacttcgccttcctgctgctgatcctgatcgcccaggtgaccgccggcgccctgttctacttcaacatgggcaagctgaagcaggagatgggcggcatcgtgaccgagctgatcagagactacaacagcagcagagaggacagcctgcaggacgcctgggactacgtgcaggcccaggtgaagtgctgcggctgggtgagcttctacaactggaccgacaacgccgagctgatgaacagacccgaggtgacctacccctgcagctgcgaggtgaagggcgaggaggacaacagcctgagcgtgagaaagggcttctgcgaggcccccggcaacagaacccagagcggcaaccaccccgaggactggcccgtgtaccaggagggctgcatggagaaggtgcaggcctggctgcaggagaacctgggcatcatcctgggcgtgggcgtgggcgtggccatcatcgagctgctgggcatggtgctgagcatctgcctgtgcagacacgtgcacagcgaggactacagcaaggtgcccaagtactag

SEQ ID NO: 11294 - DNA, 3393 bp, synthetic construct
  misc_feature 1..3393: note = Description of Artificial Sequence: Synthetic coding sequence
  source 1..3393: mol_type = other DNA
atgaagagaagcgagaagcccgagggctacagacagatgagacccaagaccttccccgccagcaactacaccgtgagcagcagacagatgctgcaggagatcagagagagcctgagaaacctgagcaagcccagcgacgccgccaaggccgagcacaacatgagcaagatgagcaccgaggaccccagacaggtgagaaacccccccaagttcggcacccaccacaaggccctgcaggagatcagaaacagcctgctgcccttcgccaacgagaccaacagcagcagaagcaccagcgaggtgaacccccagatgctgcaggacctgcaggccgccggcttcgacgaggacatggtgatccaggccctgcagaagaccaacaacagaagcatcgaggccgccatcgagttcatcagcaagatgagctaccaggaccccagaagagagcagatggccgccgccgccgccagacccatcaacgccagcatgaagcccggcaacgtgcagcagagcgtgaacagaaagcagagctggaagggcagcaaggagagcctggtgccccagagacacggcccccccctgggcgagagcgtggcctaccacagcgagagccccaacagccagaccgacgtgggcagacccctgagcggcagcggcatcagcgccttcgtgcaggcccaccccagcaacggccagagagtgaacccccccccccccccccaggtgagaagcgtgacccccccccccccccccagaggccagacccccccccccagaggcaccaccccccccccccccagctgggagcccaacagccagaccaagagatacagcggcaacatggagtacgtgatcagcagaatcagccccgtgccccccggcgcctggcaggagggctacccccccccccccctgaacaccagccccatgaacccccccaaccagggccagagaggcatcagcagcgtgcccgtgggcagacagcccatcatcatgcagagcagcagcaagttcaacttccccagcggcagacccggcatgcagaacggcaccggccagaccgacttcatgatccaccagaacgtggtgcccgccggcaccgtgaacagacagcccccccccccctaccccctgaccgccgccaacggccagagccccagcgccctgcagaccggcggcagcgccgcccccagcagctacaccaacggcagcatcccccagagcatgatggtgcccaacagaaacagccacaacatggagctgtacaacatcagcgtgcccggcctgcagaccaactggccccagagcagcagcgcccccgcccagagcagccccagcagcggccacgagatccccacctggcagcccaacatccccgtgagaagcaacagcttcaacaaccccctgggcaacagagccagccacagcgccaacagccagcccagcgccaccaccgtgaccgccatcacccccgcccccatccagcagcccgtgaagagcatgagagtgctgaagcccgagctgcagaccgccctggcccccacccaccccagctggatcccccagcccatccagaccgtgcagcccagccccttccccgagggcaccgccagcaacgtgaccgtgatgccccccgtggccgaggcccccaactaccagggccccccccccccctaccccaagcacctgctgcaccagaaccccagcgtgcccccctacgagagcatcagcaagcccagcaaggaggaccagcccagcctgcccaaggaggacgagagcgagaagagctacgagaacgtggacagcggcgacaaggagaagaagcagatcaccaccagccccatcaccgtgagaaagaacaagaaggacgaggagagaagagagagcagaatccagagctacagcccccaggccttcaagttcttcatggagcagcacgtggagaacgtgctgaagagccaccagcagagactgcacagaaagaagcagctggagaacgagatgatgagagtgggcctgagccaggacgcccaggaccagatgagaaagatgctgtgccagaaggagagcaactacatcagactgaagagagccaagatggacaagagcatgttcgtgaagatcaagaccctgggcatcggcgccttcggcgaggtgtgcctggccagaaaggtggacaccaaggccctgtacgccaccaagaccctgagaaagaaggacgtgctgctgagaaaccaggtggcccacgtgaaggccgagagagacatcctggccgaggccgacaacgagtgggtggtgagactgtactacagcttccaggacaaggacaacctgtacttcgtgatggactacatccccggcggcgacatgatgagcctgctgatcagaatgggcatcttccccgagagcctggccagattctacatcgccgagctgacctgcgccgtggagagcgtgcacaagatgggcttcatccacagagacatcaagcccgacaacatcctgatcgacagagacggccacatcaagctgaccgacttcggcctgtgcaccggcttcagatggacccacgacagcaagtactaccagagcggcgaccaccccagacaggacagcatggacttcagcaacgagtggggcgaccccagcagctgcagatgcggcgacagactgaagcccctggagagaagagccgccagacagcaccagagatgcctggcccacagcctggtgggcacccccaactacatcgcccccgaggtgctgctgagaaccggctacacccagctgtgcgactggtggagcgtgggcgtgatcctgttcgagatgctggtgggccagccccccttcctggcccagacccccctggagacccagatgaaggtgatcaactggcagaccagcctgcacatccccccccaggccaagctgagccccgaggccagcgacctgatcatcaagctgtgcagaggccccgaggacagactgggcaagaacggcgccgacgagatcaaggcccaccccttcttcaagaccatcgacttcagcagcgacctgagacagcagagcgccagctacatccccaagatcacccaccccaccgacaccagcaacttcgaccccgtggaccccgacaagctgtggagcgacgacaacgaggaggagaacgtgaacgacaccctgaacggctggtacaagaacggcaagcaccccgagcacgccttctacgagttcaccttcagaagattcttcgacgacaacggctacccctacaactaccccaagcccatcgagtacgagtacatcaacagccagggcagcgagcagcagagcgacgaggacgaccagaacaccggcagcgagatcaagaacagagacctggtgtacgtgtag

SEQ ID NO: 11295 - DNA, 2073 bp, synthetic construct
  misc_feature 1..2073: note = Description of Artificial Sequence: Synthetic coding sequence
  source 1..2073: mol_type = other DNA
atgaagagaagcgagaagcccgagggctacagacagatgagacccaagaccttccccgccagcaactacaccgtgagcagcagacagatgctgcaggagatcagagagagcctgagaaacctgagcaagcccagcgacgccgccaaggccgagcacaacatgagcaagatgagcaccgaggaccccagacaggtgagaaacccccccaagttcggcacccaccacaaggccctgcaggagatcagaaacagcctgctgcccttcgccaacgagaccaacagcagcagaagcaccagcgaggtgaacccccagatgctgcaggacctgcaggccgccggcttcgacgaggacatggtgatccaggccctgcagaagaccaacaacagaagcatcgaggccgccatcgagttcatcagcaagatgagctaccaggaccccagaagagagcagatggccgccgccgccgccagacccatcaacgccagcatgaagcccggcaacgtgcagcagagcgtgaacagaaagcagagctggaagggcagcaaggagagcctggtgccccagagacacggcccccccctgggcgagagcgtggcctaccacagcgagagccccaacagccagaccgacgtgggcagacccctgagcggcagcggcatcagcgccttcgtgcaggcccaccccagcaacggccagagagtgaacccccccccccccccccaggtgagaagcgtgacccccccccccccccccagaggccagacccccccccccagaggcaccaccccccccccccccagctgggagcccaacagccagaccaagagatacagcggcaacatggagtacgtgatcagcagaatcagccccgtgccccccggcgcctggcaggagggctacccccccccccccctgaacaccagccccatgaacccccccaaccagggccagagaggcatcagcagcgtgcccgtgggcagacagcccatcatcatgcagagcagcagcaagttcaacttccccagcggcagacccggcatgcagaacggcaccggccagaccgacttcatgatccaccagaacgtggtgcccgccggcaccgtgaacagacagcccccccccccctaccccctgaccgccgccaacggccagagccccagcgccctgcagaccggcggcagcgccgcccccagcagctacaccaacggcagcatcccccagagcatgatggtgcccaacagaaacagccacaacatggagctgtacaacatcagcgtgcccggcctgcagaccaactggccccagagcagcagcgcccccgcccagagcagccccagcagcggccacgagatccccacctggcagcccaacatccccgtgagaagcaacagcttcaacaaccccctgggcaacagagccagccacagcgccaacagccagcccagcgccaccaccgtgaccgccatcacccccgcccccatccagcagcccgtgaagagcatgagagtgctgaagcccgagctgcagaccgccctggcccccacccaccccagctggatcccccagcccatccagaccgtgcagcccagccccttccccgagggcaccgccagcaacgtgaccgtgatgccccccgtggccgaggcccccaactaccagggccccccccccccctaccccaagcacctgctgcaccagaaccccagcgtgcccccctacgagagcatcagcaagcccagcaaggaggaccagcccagcctgcccaaggaggacgagagcgagaagagctacgagaacgtggacagcggcgacaaggagaagaagcagatcaccaccagccccatcaccgtgagaaagaacaagaaggacgaggagagaagagagagcagaatccagagctacagcccccaggccttcaagttcttcatggagcagcacgtggagaacgtgctgaagagccaccagcagagactgcacagaaagaagcagctggagaacgagatgatgagagtgaagcccttcaagatgagcatcttcatcctgaaccacctgttcgcctggtgcctgttctag

SEQ ID NO: 11296 - DNA, 3393 bp, synthetic construct; identical to SEQ ID NO: 11294
  misc_feature 1..3393: note = Description of Artificial Sequence: Synthetic coding sequence
  source 1..3393: mol_type = other DNA

SEQ ID NO: 11297 - DNA, 3267 bp, synthetic construct
  misc_feature 1..3267: note = Description of Artificial Sequence: Synthetic coding sequence
  source 1..3267: mol_type = other DNA
atgagacccaagaccttccccgccaccacctacagcggcaacagcagacagagactgcaggagatcagagagggcctgaagcagcccagcaagagcagcgtgcagggcctgcccgccggccccaacagcgacaccagcctggacgccaaggtgctgggcagcaaggacgccaccagacagcagcagcagatgagagccacccccaagttcggcccctaccagaaggccctgagagagatcagatacagcctgctgcccttcgccaacgagagcggcaccagcgccgccgccgaggtgaacagacagatgctgcaggagctggtgaacgccggctgcgaccaggagatggccggcagagccctgaagcagaccggcagcagaagcatcgaggccgccctggagtacatcagcaagatgggctacctggaccccagaaacgagcagatcgtgagagtgatcaagcagaccagccccggcaagggcctgatgcccacccccgtgaccagaagacccagcttcgagggcaccggcgacagcttcgccagctaccaccagctgagcggcaccccctacgagggccccagcttcggcgccgacggccccaccgccctggaggagatgcccagaccctacgtggactacctgttccccggcgtgggcccccacggccccggccaccagcaccagcacccccccaagggctacggcgccagcgtggaggccgccggcgcccacttccccctgcagggcgcccactacggcagaccccacctgctggtgcccggcgagcccctgggctacggcgtgcagagaagccccagcttccagagcaagaccccccccgagaccggcggctacgccagcctgcccaccaagggccagggcggcccccccggcgccggcctggccttccccccccccgccgccggcctgtacgtgccccacccccaccacaagcaggccggccccgccgcccaccagctgcacgtgctgggcagcagaagccaggtgttcgccagcgacagccccccccagagcctgctgacccccagcagaaacagcctgaacgtggacctgtacgagctgggcagcaccagcgtgcagcagtggcccgccgccaccctggccagaagagacagcctgcagaagcccggcctggaggccccccccagagcccacgtggccttcagacccgactgccccgtgcccagcagaaccaacagcttcaacagccaccagcccagacccggcccccccggcaaggccgagcccagcctgcccgcccccaacaccgtgaccgccgtgaccgccgcccacatcctgcaccccgtgaagagcgtgagagtgctgagacccgagccccagaccgccgtgggccccagccaccccgcctgggtgcccgcccccgcccccgcccccgcccccgcccccgcccccgccgccgagggcctggacgccaaggaggagcacgccctggccctgggcggcgccggcgccttccccctggacgtggagtacggcggccccgacagaagatgccccccccccccctaccccaagcacctgctgctgagaagcaagagcgagcagtacgacctggacagcctgtgcgccggcatggagcagagcctgagagccggccccaacgagcccgagggcggcgacaagagcagaaagagcgccaagggcgacaagggcggcaaggacaagaagcagatccagaccagccccgtgcccgtgagaaagaacagcagagacgaggagaagagagagagcagaatcaagagctacagcccctacgccttcaagttcttcatggagcagcacgtggagaacgtgatcaagacctaccagcagaaggtgaacagaagactgcagctggagcaggagatggccaaggccggcctgtgcgaggccgagcaggagcagatgagaaagatcctgtaccagaaggagagcaactacaacagactgaagagagccaagatggacaagagcatgttcgtgaagatcaagaccctgggcatcggcgccttcggcgaggtgtgcctggcctgcaaggtggacacccacgccctgtacgccatgaagaccctgagaaagaaggacgtgctgaacagaaaccaggtggcccacgtgaaggccgagagagacatcctggccgaggccgacaacgagtgggtggtgaagctgtactacagcttccaggacaaggacagcctgtacttcgtgatggactacatccccggcggcgacatgatgagcctgctgatcagaatggaggtgttccccgagcacctggccagattctacatcgccgagctgaccctggccatcgagagcgtgcacaagatgggcttcatccacagagacatcaagcccgacaacatcctgatcgacctggacggccacatcaagctgaccgacttcggcctgtgcaccggcttcagatggacccacaacagcaagtactaccagaagggcagccacgtgagacaggacagcatggagcccagcgacctgtgggacgacgtgagcaactgcagatgcggcgacagactgaagaccctggagcagagagccagaaagcagcaccagagatgcctggcccacagcctggtgggcacccccaactacatcgcccccgaggtgctgctgagaaagggctacacccagctgtgcgactggtggagcgtgggcgtgatcctgttcgagatgctggtgggccagccccccttcctggcccccacccccaccgagacccagctgaaggtgatcaactgggagaacaccctgcacatccccgcccaggtgaagctgagccccgaggccagagacctgatcaccaagctgtgctgcagcgccgaccacagactgggcagaaacggcgccgacgacctgaaggcccaccccttcttcagcgccatcgacttcagcagcgacatcagaaagcagcccgccccctacgtgcccaccatcagccaccccatggacaccagcaacttcgaccccgtggacgaggagagcccctggaacgacgccagcgagggcagcaccaaggcctgggacaccctgaccagccccaacaacaagcaccccgagcacgccttctacgagttcaccttcagaagattcttcgacgacaacggctaccccttcagatgccccaagcccagcggcgccgaggccagccaggccgagagcagcgacctggagagcagcgacctggtggaccagaccgagggctgccagcccgtgtacgtgtag

SEQ ID NO: 11298 - DNA, 3267 bp, synthetic construct; identical to SEQ ID NO: 11297
  misc_feature 1..3267: note = Description of Artificial Sequence: Synthetic coding sequence
  source 1..3267: mol_type = other DNA

SEQ ID NO: 11299 - DNA, 972 bp, synthetic construct
  misc_feature 1..972: note = Description of Artificial Sequence: Synthetic coding sequence
  source 1..972: mol_type = other DNA
atggcctacgtgcccgcccccggctaccagcccacctacaaccccaccctgccctactaccagcccatccccggcggcctgaacgtgggcatgagcgtgtacatccagggcgtggccagcgagcacatgaagagattcttcgtgaacttcgtggtgggccaggaccccggcagcgacgtggccttccacttcaaccccagattcgacggctgggacaaggtggtgttcaacaccctgcagggcggcaagtggggcagcgaggagagaaagagaagcatgcccttcaagaagggcgccgccttcgagctggtgttcatcgtgctggccgagcactacaaggtggtggtgaacggcaaccccttctacgagtacggccacagactgcccctgcagatggtgacccacctgcaggtggacggcgacctgcagctgcagagcatcaacttcatcggcggccagcccctgagaccccagggcccccccatgatgcccccctaccccggccccggccactgccaccagcagctgaacagcctgcccaccatggagggcccccccaccttcaacccccccgtgccctacttcggcagactgcagggcggcctgaccgccagaagaaccatcatcatcaagggctacgtgccccccaccggcaagagcttcgccatcaacttcaaggtgggcagcagcggcgacatcgccctgcacatcaaccccagaatgggcaacggcaccgtggtgagaaacagcctgctgaacggcagctggggcagcgaggagaagaagatcacccacaaccccttcggccccggccagttcttcgacctgagcatcagatgcggcctggacagattcaaggtgtacgccaacggccagcacctgttcgacttcgcccacagactgagcgccttccagagagtggacaccctggagatccagggcgacgtgaccctgagctacgtgcagatctag

SEQ ID NO: 11300 - DNA, 1530 bp, synthetic construct
  misc_feature 1..1530: note = Description of Artificial Sequence: Synthetic coding sequence
  source 1..1530: mol_type = other DNA
atgaacaacgaggaggacctgctgcaggaggacagcaccagagacgagggcaacgagaccgaggccaacagcatgaacaccctgagaagaaccagaaagaaggtgaccaagccctacgtgtgcagcaccgaggtgggcgagaccgacatgagcaacagcaacgactgcatgagagacagcagccagatcctgacccccccccagctgagcagcagaatgaagcacatcagacaggccatggccaagaacagactgcagttcgtgagattcgaggccaccgacctgcacggcgtgagcagaagcaagaccatccccgcccacttcttccaggagaaggtgagccacggcgtgtgcatgcccagaggctacctggaggtgatccccaaccccaaggacaacgagatgaacaacatcagagccacctgcttcaacagcgacatcgtgctgatgcccgagctgagcaccttcagagtgctgccctgggccgacagaaccgccagagtgatctgcgacaccttcaccgtgaccggcgagcccctgctgaccagccccagatacatcgccaagagacagctgagccacctgcaggccagcggcttcagcctgctgagcgccttcatctacgacttctgcatcttcggcgtgcccgagatcctgaacagcaagatcatcagcttccccgccctgaccttcctgaacaaccacgaccagcccttcatgcaggagctggtggacggcctgtaccacaccggcgccaacgtggagagcttcagcagcagcaccagacccggccagatggagatcagcttcctgcccgagttcggcatcagcagcgccgacaacgccttcaccctgagaaccggcgtgaaggaggtggccagaaagtacaactacatcgccagcttcttcatcgagaccggcttctgcgacagcggcatcctgagccacagcctgtgggacgtggacagaaagaagaacatgttctgcagcaccagcggcaccgagcagctgaccatcaccggcaagaagtggctggccggcctgctgaagcacagcgccgccctgagctgcctgatggcccccagcgtgagctgcagaaagagatacagcaaggacagaaaggacctgaagaagagcgtgcccaccacctggggctacaacgacaacagctgcatcttcaacatcaagtgccacggcgagaagggcaccagaatcgagaacaagctgggcagcgccaccgccaacccctacctggtgctggccgccaccgtggccgccggcctggacggcctgcacagcagcaacgaggtgctggccggccccgacgagagcaccgacttctaccaggtggagcccagcgagatccccctgaagctggaggacgccctggtggccctggaggaggaccagtgcctgagacaggccctgggcgagaccttcatcagatacttcgtggccatgaagaagtacgagctggagaacgaggagatcgccgccgagagaaacaagttcctggagtacttcatctag

SEQ ID NO: 11301 - DNA, 627 bp, synthetic construct
  misc_feature 1..627: note = Description of Artificial Sequence: Synthetic coding sequence
  source 1..627: mol_type = other DNA
atgaacaacgaggaggacctgctgcaggaggacagcaccagagacgagggcaacgagaccgaggccaacagcatgaacaccctgagaagaaccagaaagaaggtgaccaagccctacgtgtgcagcaccgaggtgggcgagaccgacatgagcaacagcaacgactgcatgagagacagcagccagatcctgacccccccccagctgagcagcagaatgaagcacatcagacaggccatggccaagaacagactgcagttcgtgagattcgaggccaccgacctgcacggcgtgagcagaagcaagaccatccccgcccacttcttccaggagaaggtgagccacggcgtgtgcatgcccagaggctacctggaggtgatccccaaccccaaggacaacgagatgaacaacatcagagccacctgcttcaacagcgacatcgtgctgatgcccgagctgagcaccttcagagtgctgccctgggccgacagaaccgccagagtgatctgcgacaccttcaccgtgaccgtgagcggcatgagcatcggcagaaagacctgcagcgccgccctgctggagctgagcagcagcagaagcctgggcaagaacggctggcaggacagctag

SEQ ID NO: 11302 - DNA, 504 bp, synthetic construct
  misc_feature 1..504: note = Description of Artificial Sequence: Synthetic coding sequence
  source 1..504: mol_type = other DNA
atgcactggggcaccctgtgcggcttcctgtggctgtggccctacctgttctacgtgcaggccgtgcccatccagaaggtgcaggacgacaccaagaccctgatcaagaccatcgtgaccagaatcaacgacatcagccacacccagagcgtgagcagcaagcagaaggtgaccggcctggacttcatccccggcctgcaccccatcctgaccctgagcaagatggaccagaccctggccgtgtaccagcagatcctgaccagcatgcccagcagaaacgtgatccagatcagcaacgacctggagaacctgagagacctgctgcacgtgctggccttcagcaagagctgccacctgccctgggccagcggcctggagaccctggacagcctgggcggcgtgctggaggccagcggctacagcaccgaggtggtggccctgagcagactgcagggcagcctgcaggacatgctgtggcagctggacctgagccccggctgctag

SEQ ID NO: 11303 - DNA, 1791 bp, synthetic construct
  misc_feature 1..1791: note = Description of Artificial Sequence: Synthetic coding sequence
  source 1..1791: mol_type = other DNA
atgggcagcgtgagcagcctgatcagcggccacagcttccacagcaagcactgcagagccagccagtacaagctgagaaagagcagccacctgaagaagctgaacagatacagcgacggcctgctgagattcggcttcagccaggacagcggccacggcaagagcagcagcaagatgggcaagagcgaggacttcttctacatcaaggtgagccagaaggccagaggcagccaccaccccgactacaccgccctgagcagcggcgacctgggcggccaggccggcgtggacttcgaccccagcaccccccccaagctgatgcccttcagcaaccagctggagatgggcagcgagaagggcgccgtgagacccaccgccttcaagcccgtgctgcccagaagcggcgccatcctgcacagcagccccgagagcgccagccaccagctgcaccccgccccccccgacaagcccaaggagcaggagctgaagcccggcctgtgcagcggcgccctgagcgacagcggcagaaacagcatgagcagcctgcccacccacagcaccagcagcagctaccagctggaccccctggtgacccccgtgggccccaccagcagattcggcggcagcgcccacaacatcacccagggcatcgtgctgcaggacagcaacatgatgagcctgaaggccctgagcttcagcgacggcggcagcaagctgggccacagcaacaaggccgacaagggccccagctgcgtgagaagccccatcagcaccgacgagtgcagcatccaggagctggagcagaagctgctggagagagagggcgccctgcagaagctgcagagaagcttcgaggagaaggagctggccagcagcctggcctacgaggagagacccagaagatgcagagacgagctggagggccccgagcccaagggcggcaacaagctgaagcaggccagccagaagagccagagagcccagcaggtgctgcacctgcaggtgctgcagctgcagcaggagaagagacagctgagacaggagctggagagcctgatgaaggagcaggacctgctggagaccaagctgagaagctacgagagagagaagaccagcttcggccccgccctggaggagacccagtgggaggtgtgccagaagagcggcgagatcagcctgctgaagcagcagctgaaggagagccagaccgaggtgaacgccaaggccagcgagatcctgggcctgaaggcccagctgaaggacaccagaggcaagctggagggcctggagctgagaacccaggacctggagggcgccctgagaaccaagggcctggagctggaggtgtgcgagaacgagctgcagagaaagaagaacgaggccgagctgctgagagagaaggtgaacctgctggagcaggagctgcaggagctgagagcccaggccgccctggccagagacatgggcccccccaccttccccgaggacgtgcccgccctgcagagagagctggagagactgagagccgagctgagagaggagagacagggccacgaccagatgagcagcggcttccagcacgagagactggtgtggaaggaggagaaggagaaggtgatccagtaccagaagcagctgcagcagagctacgtggccatgtaccagagaaaccagagactggagaaggccctgcagcagctggccagaggcgacagcgccggcgagcccctggaggtggacctggagggcgccgacatcccctacgaggacatcatcgccaccgagatctag

SEQ ID NO: 11304 - DNA, 231 bp, synthetic construct
  misc_feature 1..231: note = Description of Artificial Sequence: Synthetic coding sequence
  source 1..231: mol_type = other DNA
atgggcagcgtgagcagcctgatcagcggccacagcttccacagcaagcactgcagagccagccagtacaagctgagaaagagcagccacctgaagaagctgaacagatacagcgacggcctgctgagattcggcttcagccaggacagcggccacggcaaggccatgaccagatgccccagagccagcagcatgagcggcagctgcggcagaagaagaagaagaagatag

SEQ ID NO: 11305 - DNA, 1722 bp, synthetic construct
  misc_feature 1..1722: note = Description of Artificial Sequence: Synthetic coding sequence
  source 1..1722: mol_type = other DNA
atgggcagcgtgagcagcctgatcagcggccacagcttccacagcaagcactgcagagccagccagtacaagctgagaaagagcagccacctgaagaagctgaacagatacagcgacggcctgctgagattcggcttcagccaggacagcggccacggcaagagcagcagcaagatgggcaagagcgaggacttcttctacatcaaggtgagccagaaggccagaggcagccaccaccccgactacaccgccctgagcagcggcgacctgggcggccaggccggcgtggacttcgaccccagcaccccccccaagctgatgcccttcagcaaccagctggagatgggcagcgagaagggcgccgtgagacccaccgccttcaagcccgtgctgcccagaagcggcgccatcctgcacagcagccccgagagcgccagccaccagctgcaccccgccccccccgacaagcccaaggagcaggagctgaagcccggcctgtgcagcggcgccctgagcgacagcggcagaaacagcatgagcagcctgcccacccacagcaccagcagcagctaccagctggaccccctggtgacccccgtgggccccaccagcagattcggcggcagcgcccacaacatcacccagggcatcgtgctgcaggacagcaacatgatgagcctgaaggccctgagcttcagcgacggcggcagcaagctgggccacagcaacaaggccgacaagggccccagctgcgtgagaagccccatcagcaccgacgagtgcagcatccaggagctggagcagaagctgctggagagagagggcgccctgcagaagctgcagagaagcttcgaggagaaggagctggccagcagcctggcctacgaggagagacccagaagatgcagagacgagctggagggccccgagcccaagggcggcaacaagctgaagcaggccagccagaagagccagagagcccagcaggtgctgcacctgcaggtgctgcagctgcagcaggagaagagacagctgagacaggagctggagagcctgatgaaggagcaggacctgctggagaccaagctgagaagctacgagagagagaagaccagcttcggccccgccctggaggagacccagtgggaggtgtgccagaagagcggcgagatcagcctgctgaagcagcagctgaaggagagccagaccgaggtgaacgccaaggccagcgagatcctgggcctgaaggcccagctgaaggacaccagaggcaagctggagggcctggagctgagaacccaggacctggagggcgccctgagaaccaagggcctggagctggaggtgtgcgagaacgagctgcagagaaagaagaacgaggccgagctgctgagagagaaggtgaacctgctggagcaggagctgcaggagctgagagcccaggccgccctggccagagacatgggcccccccaccttccccgaggacgtgcccgccctgcagagagagctggagagactggtgtggaaggaggagaaggagaaggtgatccagtaccagaagcagctgcagcagagctacgtggccatgtaccagagaaaccagagactggagaaggccctgcagcagctggccagaggcgacagcgccggcgagcccctggaggtggacctggagggcgccgacatcccctacgaggacatcatcgccaccgagatctag

SEQ ID NO: 11306 - DNA, 1791 bp, synthetic construct; identical to SEQ ID NO: 11303
  misc_feature 1..1791: note = Description of Artificial Sequence: Synthetic coding sequence
  source 1..1791: mol_type = other DNA

SEQ ID NO: 11307 - DNA, 1614 bp, synthetic construct
  misc_feature 1..1614: note = Description of Artificial Sequence: Synthetic coding sequence
  source 1..1614: mol_type = other DNA
atgggcagcgtgagcagcctgatcagcggccacagcttccacagcaagcactgcagagccagccagtacaagctgagaaagagcagccacctgaagaagctgaacagatacagcgacggcctgctgagattcggcttcagccaggacagcggccacggcaagagcagcagcaagatgggcaagagcgaggacttcttctacatcaaggtgagccagaaggccagaggcagccaccaccccgactacaccgccctgagcagcggcgacctgggcggccaggccggcgtggacttcgaccccagcaccccccccaagctgatgcccttcagcaaccagctggagatgggcagcgagaagggcgccgtgagacccaccgccttcaagcccgtgctgcccagaagcggcgccatcctgcacagcagccccgagagcgccagccaccagctgcaccccgccccccccgacaagcccaaggagcaggagctgaagcccggcctgtgcagcggcgccctgagcgacagcggcagaaacagcatgagcagcctgcccacccacagcaccagcagcagctaccagctggaccccctggtgacccccgtgggccccaccagcagattcggcggcagcgcccacaacatcacccagggcatcgtgctgcaggacagcaacatgatgagcctgaaggccctgagcttcagcgacggcggcagcaagctgggccacagcaacaaggccgacaagggccccagctgcgtgagaagccccatcagcaccgacgagtgcagcatccaggagctggagcagaagctgctggagagagagggcgccctgcagaagctgcagagaagcttcgaggagaaggagctggccagcagcctggcctacgaggagagacccagaagatgcagagacgagctggagggccccgagcccaagggcggcaacaagctgaagcaggccagccagaagagccagagagcccagcaggtgctgcacctgcaggtgctgcagctgcagcaggagaagagacagctgagacaggagctggagagcctgatgaaggagcaggacctgctggagaccaagctgagaagctacgagagagagaagaccagcttcggccccgccctggaggagacccagtgggaggtgtgccagaagagcggcgagatcagcctgctgaagcagcagctgaaggagagccagaccgaggtgaacgccaaggccagcgagatcctgggcctgaaggcccagctgaaggacaccagaggcaagctggagggcctggagctgagaacccaggacctggagggcgccctgagaaccaagggcctggagctggaggtgtgcgagaacgagctgcagagaaagaagaacgaggccgagctgctgagagagaagcacgagagactggtgtggaaggaggagaaggagaaggtgatccagtaccagaagcagctgcagcagagctacgtggccatgtaccagagaaaccagagactggagaaggccctgcagcagctggccagaggcgacagcgccggcgagcccctggaggtggacctggagggcgccgacatcccctacgaggacatcatcgccaccgagatctag

SEQ ID NO: 11308 - DNA, 1005 bp, synthetic construct
  misc_feature 1..1005: note = Description of Artificial Sequence: Synthetic coding sequence
  source 1..1005: mol_type = other DNA
atgaccgagaacagcgacaaggtgcccatcgccctggtgggccccgacgacgtggagttctgcagcccccccgcctacgccaccctgaccgtgaagcccagcagccccgccagactgctgaaggtgggcgccgtggtgctgatcagcggcgccgtgctgctgctgttcggcgccatcggcgccttctacttctggaagggcagcgacagccacatctacaacgtgcactacaccatgagcatcaacggcaagctgcaggacggcagcatggagatcgacgccggcaacaacctggagaccttcaagatgggcagcggcgccgaggaggccatcgccgtgaacgacttccagaacggcatcaccggcatcagattcgccggcggcgagaagtgctacatcaaggcccaggtgaaggccagaatccccgaggtgggcgccgtgaccaagcagagcatcagcagcaagctggagggcaagatcatgcccgtgaagtacgaggagaacagcctgatctgggtggccgtggaccagcccgtgaaggacaacagcttcctgagcagcaaggtgctggagctgtgcggcgacctgcccatcttctggctgaagcccacctaccccaaggagatccagagagagagaagagaggtggtgagaaagatcgtgcccaccaccaccaagagaccccacagcggccccagaagcaaccccggcgccggcagactgaacaacgagaccagacccagcgtgcaggaggacagccaggccttcaaccccgacaacccctaccaccagcaggagggcgagagcatgaccttcgaccccagactggaccacgagggcatctgctgcatcgagtgcagaagaagctacacccactgccagaagatctgcgagcccctgggcggctactacccctggccctacaactaccagggctgcagaagcgcctgcagagtgatcatgccctgcagctggtgggtggccagaatcctgggcatggtgtag

SEQ ID NO: 11309 - DNA, 390 bp, synthetic construct
  misc_feature 1..390: note = Description of Artificial Sequence: Synthetic coding sequence
  source 1..390: mol_type = other DNA
atgagcatcaacggcaagctgcaggacggcagcatggagatcgacgccggcaacaacctggagaccttcaagatgggcagcggcgccgaggaggccatcgccgtgaacgacttccagaacggcatcaccggcatcagattcgccggcggcgagaagtgctacatcaaggcccaggtgaaggccagaatccccgaggtgggcgccgtgaccaagcagagcatcagcagcaagctggagggcaagatcatgcccgtgaagtacgaggagaacagcctgatctgggtggccgtggaccagcccgtgaaggacaacagcttcctgagcagcaaggtgctggagctgtgcggcgacctgcccatcttctggctgaagcccacctaccccaagtag

SEQ ID NO: 11310 - DNA, 1002 bp, synthetic construct
  misc_feature 1..1002: note = Description of Artificial Sequence: Synthetic coding sequence
  source 1..1002: mol_type = other DNA
atgaccgagaacagcgacaaggtgcccatcgccctggtgggccccgacgacgtggagttctgcagcccccccgcctacgccaccctgaccgtgaagcccagcagccccgccagactgctgaaggtgggcgccgtggtgctgatcagcggcgccgtgctgctgctgttcggcgccatcggcgccttctacttctggaagggcagcgacagccacatctacaacgtgcactacaccatgagcatcaacggcaagctgcaggacggcagcatggagatcgacgccggcaacaacctggagaccttcaagatgggcagcggcgccgaggaggccatcgccgtgaacgacttccagaacggcatcaccggcatcagattcgccggcggcgagaagtgctacatcaaggcccaggtgaaggccagaatccccgaggtgggcgccgtgaccaagcagagcatcagcagcaagctggagggcaagatcatgcccgtgaagtacgaggagaacagcctgatctgggtggccgtggaccagcccgtgaaggacaacagcttcctgagcagcaaggtgctggagctgtgcggcgacctgcccatcttctggctgaagcccacctaccccaaggagatccagagagagagaagagaggtggtgagaaagatcgtgcccaccaccaccaagagaccccacagcggccccagaagcaaccccggcgccggcagactgaacaacgagaccagacccagcgtgcaggaggacagccaggccttcaaccccgacaacccctaccaccaggagggcgagagcatgaccttcgaccccagactggaccacgagggcatctgctgcatcgagtgcagaagaagctacacccactgccagaagatctgcgagcccctgggcggctactacccctggccctacaactaccagggctgcagaagcgcctgcagagtgatcatgccctgcagctggtgggtggccagaatcctgggcatggtgtag

SEQ ID NO: 11311 - DNA, 408 bp, synthetic construct
  misc_feature 1..408: note = Description of Artificial Sequence: Synthetic coding sequence
  source 1..408: mol_type = other DNA
atgaacgaggtgatcatctacaacgtgctgctgctgagaaccatcagctgcatcagcgagacctacggccactacctgatccactgccccagcaagatcagccccgagctgctgaagaaggagagcatcaccaacagctacgcccacttccagatctacaacgtgcactacaccatgagcatcaacggcaagctgcaggacggcagcatggagatcgacgccggcaacaacctggagaccttcaagatgggcagcggcgccgaggaggccatcgccgtgaacgacttccagaacgtgagcatcttccacgccttcagagagttcaaccaggccagcctgagagacttcagcaacagcagaagaagcagcgtgagccacacccaccccaacggcaactgcagcctgtag

SEQ ID NO: 11312 - DNA, 2760 bp, synthetic construct
  misc_feature 1..2760: note = Description of Artificial Sequence: Synthetic coding sequence
  source 1..2760: mol_type = other DNA
atgcagagaagcatcatgagcttcttccaccccaagaaggagggcaaggccaagaagcccgagaaggaggccagcaacagcagcagagagaccgagcccccccccaaggccgccctgaaggagtggaacggcgtggtgagcgagagcgacagccccgtgaagagacccggcagaaaggccgccagagtgctgggcagcgagggcgaggaggaggacgaggccctgagccccgccaagggccagaagcccgccctggactgcagccaggtgagcccccccagacccgccaccagccccgagaacaacgccagcctgagcgacaccagccccatggacagcagccccagcggcatccccaagagaagaaccgccagaaagcagctgcccaagagaaccatccaggaggtgctggaggagcagagcgaggacgaggacagagaggccaagagaaagaaggaggaggaggaggaggagacccccaaggagagcctgaccgaggccgaggtggccaccgagaaggagggcgaggacggcgaccagcccaccaccccccccaagcccctgaagaccagcaaggccgagacccccaccgagagcgtgagcgagcccgaggtggccaccaagcaggagctgcaggaggaggaggagcagaccaagccccccagaagagcccccaagaccctgagcagcttcttcacccccagaaagcccgccgtgaagaaggaggtgaaggaggaggagcccggcgcccccggcaaggagggcgccgccgagggccccctggaccccagcggctacaaccccgccaagaacaactaccaccccgtggaggacgcctgctggaagcccggccagaaggtgccctacctggccgtggccagaaccttcgagaagatcgaggaggtgagcgccagactgagaatggtggagaccctgagcaacctgctgagaagcgtggtggccctgagcccccccgacctgctgcccgtgctgtacctgagcctgaaccacctgggccccccccagcagggcctggagctgggcgtgggcgacggcgtgctgctgaaggccgtggcccaggccaccggcagacagctggagagcgtgagagccgaggccgccgagaagggcgacgtgggcctggtggccgagaacagcagaagcacccagagactgatgctgccccccccccccctgaccgccagcggcgtgttcagcaagttcagagacatcgccagactgaccggcagcgccagcaccgccaagaagatcgacatcatcaagggcctgttcgtggcctgcagacacagcgaggccagattcatcgccagaagcctgagcggcagactgagactgggcctggccgagcagagcgtgctggccgccctgagccaggccgtgagcctgaccccccccggccaggagttcccccccgccatggtggacgccggcaagggcaagaccgccgaggccagaaagacctggctggaggagcagggcatgatcctgaagcagaccttctgcgaggtgcccgacctggacagaatcatccccgtgctgctggagcacggcctggagagactgcccgagcactgcaagctgagccccggcatccccctgaagcccatgctggcccaccccaccagaggcatcagcgaggtgctgaagagattcgaggaggccgccttcacctgcgagtacaagtacgacggccagagagcccagatccacgccctggagggcggcgaggtgaagatcttcagcagaaaccaggaggacaacaccggcaagtaccccgacatcatcagcagaatccccaagatcaagctgcccagcgtgaccagcttcatcctggacaccgaggccgtggcctgggacagagagaagaagcagatccagcccttccaggtgctgaccaccagaaagagaaaggaggtggacgccagcgagatccaggtgcaggtgtgcctgtacgccttcgacctgatctacctgaacggcgagagcctggtgagagagcccctgagcagaagaagacagctgctgagagagaacttcgtggagaccgagggcgagttcgtgttcgccaccagcctggacaccaaggacatcgagcagatcgccgagttcctggagcagagcgtgaaggacagctgcgagggcctgatggtgaagaccctggacgtggacgccacctacgagatcgccaagagaagccacaactggctgaagctgaagaaggactacctggacggcgtgggcgacaccctggacctggtggtgatcggcgcctacctgggcagaggcaagagagccggcagatacggcggcttcctgctggccagctacgacgaggacagcgaggagctgcaggccatctgcaagctgggcaccggcttcagcgacgaggagctggaggagcaccaccagagcctgaaggccctggtgctgcccagccccagaccctacgtgagaatcgacggcgccgtgatccccgaccactggctggaccccagcgccgtgtgggaggtgaagtgcgccgacctgagcctgagccccatctaccccgccgccagaggcctggtggacagcgacaagggcatcagcctgagattccccagattcatcagagtgagagaggacaagcagcccgagcaggccaccaccagcgcccaggtggcctgcctgtacagaaagcagagccagatccagaaccagcagggcgaggacagcggcagcgaccccgaggacacctactag

SEQ ID NO: 11313 - DNA, 2667 bp, synthetic construct
  misc_feature 1..2667: note = Description of Artificial Sequence: Synthetic coding sequence
  source 1..2667: mol_type = other DNA
atgcagagaagcatcatggccgccctgaaggagtggaacggcgtggtgagcgagagcgacagccccgtgaagagacccggcagaaaggccgccagagtgctgggcagcgagggcgaggaggaggacgaggccctgagccccgccaagggccagaagcccgccctggactgcagccaggtgagcccccccagacccgccaccagccccgagaacaacgccagcctgagcgacaccagccccatggacagcagccccagcggcatccccaagagaagaaccgccagaaagcagctgcccaagagaaccatccaggaggtgctggaggagcagagcgaggacgaggacagagaggccaagagaaagaaggaggaggaggaggagacccccaaggagagcctgaccgaggccgaggtggccaccgagaaggagggcgaggacggcgaccagcccaccaccccccccaagcccctgaagaccagcaaggccgagacccccaccgagagcgtgagcgagcccgaggtggccaccaagcaggagctgcaggaggaggaggagcagaccaagccccccagaagagcccccaagaccctgagcagcttcttcacccccagaaagcccgccgtgaagaaggaggtgaaggaggaggagcccggcgcccccggcaaggagggcgccgccgagggccccctggaccccagcggctacaaccccgccaagaacaactaccaccccgtggaggacgcctgctggaagcccggccagaaggtgccctacctggccgtggccagaaccttcgagaagatcgaggaggtgagcgccagactgagaatggtggagaccctgagcaacctgctgagaagcgtggtggccctgagcccccccgacctgctgcccgtgctgtacctgagcctgaaccacctgggccccccccagcagggcctggagctgggcgtgggcgacggcgtgctgctgaaggccgtggcccaggccaccggcagacagctggagagcgtgagagccgaggccgccgagaagggcgacgtgggcctggtggccgagaacagcagaagcacccagagactgatgctgccccccccccccctgaccgccagcggcgtgttcagcaagttcagagacatcgccagactgaccggcagcgccagcaccgccaagaagatcgacatcatcaagggcctgttcgtggcctgcagacacagcgaggccagattcatcgccagaagcctgagcggcagactgagactgggcctggccgagcagagcgtgctggccgccctgagccaggccgtgagcctgaccccccccggccaggagttcccccccgccatggtggacgccggcaagggcaagaccgccgaggccagaaagacctggctggaggagcagggcatgatcctgaagcagaccttctgcgaggtgcccgacctggacagaatcatccccgtgctgctggagcacggcctggagagactgcccgagcactgcaagctgagccccggcatccccctgaagcccatgctggcccaccccaccagaggcatcagcgaggtgctgaagagattcgaggaggccgccttcacctgcgagtacaagtacgacggccagagagcccagatccacgccctggagggcggcgaggtgaagatcttcagcagaaaccaggaggacaacaccggcaagtaccccgacatcatcagcagaatccccaagatcaagctgcccagcgtgaccagcttcatcctggacaccgaggccgtggcctgggacagagagaagaagcagatccagcccttccaggtgctgaccaccagaaagagaaaggaggtggacgccagcgagatccaggtgcaggtgtgcctgtacgccttcgacctgatctacctgaacggcgagagcctggtgagagagcccctgagcagaagaagacagctgctgagagagaacttcgtggagaccgagggcgagttcgtgttcgccaccagcctggacaccaaggacatcgagcagatcgccgagttcctggagcagagcgtgaaggacagctgcgagggcctgatggtgaagaccctggacgtggacgccacctacgagatcgccaagagaagccacaactggctgaagctgaagaaggactacctggacggcgtgggcgacaccctggacctggtggtgatcggcgcctacctgggcagaggcaagagagccggcagatacggcggcttcctgctggccagctacgacgaggacagcgaggagctgcaggccatctgcaagctgggcaccggcttcagcgacgaggagctggaggagcaccaccagagcctgaaggccctggtgctgcccagccccagaccctacgtgagaatcgacggcgccgtgatccccgaccactggctggaccccagcgccgtgtgggaggtgaagtgcgccgacctgagcctgagccccatctaccccgccgccagaggcctggtggacagcgacaagggcatcagcctgagattccccagattcatcagagtgagagaggacaagcagcccgagcaggccaccaccagcgcccaggtggcctgcctgtacagaaagcagagccagatccagaaccagcagggcgaggacagcggcagcgaccccgaggacacctactag

SEQ ID NO: 11314 - DNA, 2556 bp, synthetic construct
  misc_feature 1..2556: note = Description of Artificial Sequence: Synthetic coding sequence
  source 1..2556: mol_type = other DNA
atgcagagaagcatcatgagcttcttccaccccaagaaggagggcaaggccaagaagcccgagaaggaggccagcaacagcagcagagagaccgagcccccccccaaggccgccctgaaggagtggaacggcgtggtgagcgagagcgacagccccgtgaagagacccggcagaaaggccgccagagtgctgggcagcgagggcgaggaggaggacgaggccctgagccccgccaagggccagaagcccgccctggactgcagccaggtgagcccccccagacccgccaccagccccgagaacaacgccagcctgagcgacaccagccccatggacagcagccccagcggcatccccaagagaagaaccgaggccgagacccccaccgagagcgtgagcgagcccgaggtggccaccaagcaggagctgcaggaggaggaggagcagaccaagccccccagaagagcccccaagaccctgagcagcttcttcacccccagaaagcccgccgtgaagaaggaggtgaaggaggaggagcccggcgcccccggcaaggagggcgccgccgagggccccctggaccccagcggctacaaccccgccaagaacaactaccaccccgtggaggacgcctgctggaagcccggccagaaggtgccctacctggccgtggccagaaccttcgagaagatcgaggaggtgagcgccagactgagaatggtggagaccctgagcaacctgctgagaagcgtggtggccctgagcccccccgacctgctgcccgtgctgtacctgagcctgaaccacctgggccccccccagcagggcctggagctgggcgtgggcgacggcgtgctgctgaaggccgtggcccaggccaccggcagacagctggagagcgtgagagccgaggccgccgagaagggcgacgtgggcctggtggccgagaacagcagaagcacccagagactgatgctgccccccccccccctgaccgccagcggcgtgttcagcaagttcagagacatcgccagactgaccggcagcgccagcaccgccaagaagatcgacatcatcaagggcctgttcgtggcctgcagacacagcgaggccagattcatcgccagaagcctgagcggcagactgagactgggcctggccgagcagagcgtgctggccgccctgagccaggccgtgagcctgaccccccccggccaggagttcccccccgccatggtggacgccggcaagggcaagaccgccgaggccagaaagacctggctggaggagcagggcatgatcctgaagcagaccttctgcgaggtgcccgacctggacagaatcatccccgtgctgctggagcacggcctggagagactgcccgagcactgcaagctgagccccggcatccccctgaagcccatgctggcccaccccaccagaggcatcagcgaggtgctgaagagattcgaggaggccgccttcacctgcgagtacaagtacgacggccagagagcccagatccacgccctggagggcggcgaggtgaagatcttcagcagaaaccaggaggacaacaccggcaagtaccccgacatcatcagcagaatccccaagatcaagctgcccagcgtgaccagcttcatcctggacaccgaggccgtggcctgggacagagagaagaagcagatccagcccttccaggtgctgaccaccagaaagagaaaggaggtggacgccagcgagatccaggtgcaggtgtgcctgtacgccttcgacctgatctacctgaacggcgagagcctggtgagagagcccctgagcagaagaagacagctgctgagagagaacttcgtggagaccgagggcgagttcgtgttcgccaccagcctggacaccaaggacatcgagcagatcgccgagttcctggagcagagcgtgaaggacagctgcgagggcctgatggtgaagaccctggacgtggacgccacctacgagatcgccaagagaagccacaactggctgaagctgaagaaggactacctggacggcgtgggcgacaccctggacctggtggtgatcggcgcctacctgggcagaggcaagagagccggcagatacggcggcttcctgctggccagctacgacgaggacagcgaggagctgcaggccatctgcaagctgggcaccggcttcagcgacgaggagctggaggagcaccaccagagcctgaaggccctggtgctgcccagccccagaccctacgtgagaatcgacggcgccgtgatccccgaccactggctggaccccagcgccgtgtgggaggtgaagtgcgccgacctgagcctgagccccatctaccccgccgccagaggcctggtggacagcgacaagggcatcagcctgagattccccagattcatcagagtgagagaggacaagcagcccgagcaggccaccaccagcgcccaggtggcctgcctgtacagaaagcagagccagatccagaaccagcagggcgaggacagcggcagcgaccccgaggacacctactag

SEQ ID NO: 11315 - DNA, 1248 bp, synthetic construct
  misc_feature 1..1248: note = Description of Artificial Sequence: Synthetic coding sequence
  source 1..1248: mol_type = other DNA
atgcagagaagcatcatgagcttcttccaccccaagaaggagggcaaggccaagaagcccgagaaggaggccagcaacagcagcagagagaccgagcccccccccaaggccgccctgaaggagtggaacggcgtggtgagcgagagcgacagccccgtgaagagacccggcagaaaggccgccagagtgctgggcagcgagggcgaggaggaggacgaggccctgagccccgccaagggccagaagcccgccctggactgcagccaggtgagcccccccagacccgccaccagccccgagaacaacgccagcctgagcgacaccagccccatggacagcagccccagcggcatccccaagagaagaaccgaggaggagacccccaaggagagcctgaccgaggccgaggtggccaccgagaaggagggcgaggacggcgaccagcccaccaccccccccaagcccctgaagaccagcaaggccgagacccccaccgagagcgtgagcgagcccgaggtggccaccaagcaggagctgcaggaggaggaggagcagaccaagccccccagaagagcccccaagaccctgagcagcttcttcacccccagaaagcccgccgtgaagaaggaggtgaaggaggaggagcccggcgcccccggcaaggagggcgccgccgagggccccctggaccccagcggctacaaccccgccaagaacaactaccaccccgtggaggacgcctgctggaagcccggccagaaggtgccctacctggccgtggccagaaccttcgagaagatcgaggaggtgagcgccagactgagaatggtggagaccctgagcaacctgctgagaagcgtggtggccctgagcccccccgacctgctgcccgtgctgtacctgagcctgaaccacctgggccccccccagcagggcctggagctgggcgtgggcgacggcgtgctgctgaaggccgtggcccaggccaccggcagagagagaagagagaccagaagccacaactgccaccccagacacccccaccccagaagccccctgaaggtgggcagctggagccccagcggcctgagacagcccagaaaggccacctggggctggtggcccagaaccgccgccgcccccagaggcagctgctgccaccacctgagaagcctgccccccggcagcagcgccagcagcgccaccagccccggcagcctggccgtgctgccccagcccagaagatag

SEQ ID NO: 11316 - DNA, 2499 bp, synthetic construct
  misc_feature 1..2499: note = Description of Artificial Sequence: Synthetic coding sequence
  source 1..2499: mol_type = other DNA
gtgtgctgccccggcagcggcgccagagaccagagaaaggccagactgaccgacgaggagaagtgctggaccggcagagagaacagcgacgccaacatgcagagaagcatcatgagcttcttccaccccaagaaggagggcaaggccaagaagcccgagaaggaggccagcaacagcagcagagagaccgagcccccccccaaggccgccctgaaggagtggaacggcgtggtgagcgagagcgacagccccgtgaagagacccggcagaaaggccgccagagtgctgggcagcgagggcgaggaggaggacgaggccctgagccccgccaagggccagaagcccgccctggactgcagccaggtgagcccccccagacccgccaccagccccgagaacaacgccagcctgagcgacaccagccccatggacagcagccccagcggcatccccaagagaagaaccgccagaaagcagctgcccaagagaaccatccaggaggtgctggaggagcagagcgaggacgaggacagagaggccaagagaaagaaggaggaggaggaggagacccccaaggagagcctgaccgaggccgaggtggccaccgagaaggagggcgaggacggcgaccagcccaccaccccccccaagcccctgaagaccagcaaggccgagacccccaccgagagcgtgagcgagcccgaggtggccaccaagcaggagctgcaggaggaggaggagcagaccaagccccccagaagagcccccaagaccctgagcagcttcttcacccccagaaagcccgccgtgaagaaggaggtgaaggaggaggagcccggcgcccccggcaaggagggcgccgccgagggccccctggaccccagcggctacaaccccgccaagaacaactaccaccccgtggaggacgcctgctggaagcccggccagaaggtgccctacctggccgtggccagaaccttcgagaagatcgaggaggtgagcgccagactgagaatggtggagaccctgagcaacctgctgagaagcgtggtggccctgagcccccccgacctgctgcccgtgctgtacctgagcctgaaccacctgggccccccccagcagggcctggagctgggcgtgggcgacggcgtgctgctgaaggccgtggcccaggccaccggcagacagctggagagcgtgagagccgaggccgccgagaagggcgacgtgggcctggtggccgagaacagcagaagcacccagagactgatgctgccccccccccccctgaccgccagcggcgtgttcagcaagttcagagacatcgccagactgaccggcagcgccagcaccgccaagaagatcgacatcatcaagggcctgttcgtggcctgcagacacagcgaggccagattcatcgccagaagcctgagcggcagactgagactgggcctggccgagcagagcgtgctggccgccctgagccaggccgtgagcctgaccccccccggccaggagttcccccccgccatggtggacgccggcaagggcaagaccgccgaggccagaaagacctggctggaggagcagggcatgatcctgaagcagaccttctgcgaggtgcccgacctggacagaatcatccccgtgctgctggagcacggcctggagagactgcccgagcactgcaagctgagccccggcatccccctgaagcccatgctggcccaccccaccagaggcatcagcgaggtgctgaagagattcgaggaggccgccttcacctgcgagtacaagtacgacggccagagagcccagatccacgccctggagggcggcgaggtgaagatcttcagcagaaaccaggaggacaacaccggcaagtaccccgacatcatcagcagaatccccaagatcaagctgcccagcgtgaccagcttcatcctggacaccgaggccgtggcctgggacagagagaagaagcagatccagcccttccaggtgctgaccaccagaaagagaaaggaggtggacgccagcgagatccaggtgcaggtgtgcctgtacgccttcgacctgatctacctgaacggcgagagcctggtgagagagcccctgagcagaagaagacagctgctgagagagaacttcgtggagaccgagggcgagttcgtgttcgccaccagcctggacaccaaggacatcgagcagatcgccgagttcctggagcagagcgtgaaggacagctgcgagggcctgatggtgaagaccctggacgtggacgccacctacgagatcgccaagagaagccacaactggctgaagctgaagaaggactacctggacggcgtgggcgacaccctggacctggtggtgatcggcgcctacctgggcagaggcaagagagccggcagatacggcggcttcctgctggccagctacgacgaggacagcgaggagctgcaggccatctgcaaggtgctgggcaactggggctag

SEQ ID NO: 11317 - DNA, 2850 bp, synthetic construct
  misc_feature 1..2850: note = Description of Artificial Sequence: Synthetic coding sequence
  source 1..2850: mol_type = other DNA
atgagcctggccttcaagatcttcttcccccagaccctgagagccctgagcagaaaggagctgtgcctgttcagaaagcaccactggagagacgtgagacagttcagccagtggagcgagaccgacctgctgcacggccaccccctgttcctgagaagaaagcccgtgctgagcttccagggcagccacctgagaagcagagccacctacctggtgttcctgcccggcctgcacgtgggcctgtgcagcggcccctgcgagatggccgagcagagattctgcgtggactacgccaagagaggcaccgccggctgcaagaagtgcaaggagaagatcgtgaagggcgtgtgcagaatcggcaaggtggtgcccaaccccttcagcgagagcggcggcgacatgaaggagtggtaccacatcaagtgcatgttcgagaagctggagagagccagagccaccaccaagaagatcgaggacctgaccgagctggagggctgggaggagctggaggacaacgagaaggagcagatcacccagcacatcgccgacctgagcagcaaggccgccggcacccccaagaagaaggccgtggtgcaggccaagctgaccaccaccggccaggtgaccagccccgtgaagggcgccagcttcgtgaccagcaccaaccccagaaagttcagcggcttcagcgccaagcccaacaacagcggcgaggcccccagcagccccacccccaagagaagcctgagcagcagcaagtgcgaccccagacacaaggactgcctgctgagagagttcagaaagctgtgcgccatggtggccgacaaccccagctacaacaccaagacccagatcatccaggacttcctgagaaagggcagcgccggcgacggcttccacggcgacgtgtacctgaccgtgaagctgctgctgcccggcgtgatcaagaccgtgtacaacctgaacgacaagcagatcgtgaagctgttcagcagaatcttcaactgcaaccccgacgacatggccagagacctggagcagggcgacgtgagcgagaccatcagagtgttcttcgagcagagcaagagcttcccccccgccgccaagagcctgctgaccatccaggaggtggacgagttcctgctgagactgagcaagctgaccaaggaggacgagcagcagcaggccctgcaggacatcgccagcagatgcaccgccaacgacctgaagtgcatcatcagactgatcaagcacgacctgaagatgaacagcggcgccaagcacgtgctggacgccctggaccccaacgcctacgaggccttcaaggccagcagaaacctgcaggacgtggtggagagagtgctgcacaacgcccaggaggtggagaaggagcccggccagagaagagccctgagcgtgcaggccagcctgatgacccccgtgcagcccatgctggccgaggcctgcaagagcgtggagtacgccatgaagaagtgccccaacggcatgttcagcgagatcaagtacgacggcgagagagtgcaggtgcacaagaacggcgaccacttcagctacttcagcagaagcctgaagcccgtgctgccccacaaggtggcccacttcaaggactacatcccccaggccttccccggcggccacagcatgatcctggacagcgaggtgctgctgatcgacaacaagaccggcaagcccctgcccttcggcaccctgggcgtgcacaagaaggccgccttccaggacgccaacgtgtgcctgttcgtgttcgactgcatctacttcaacgacgtgagcctgatggacagacccctgtgcgagagaagaaagttcctgcacgacaacatggtggagatccccaacagaatcatgttcagcgagatgaagagagtgaccaaggccctggacctggccgacatgatcaccagagtgatccaggagggcctggagggcctggtgctgaaggacgtgaagggcacctacgagcccggcaagagacactggctgaaggtgaagaaggactacctgaacgagggcgccatggccgacaccgccgacctggtggtgctgggcgccttctacggccagggcagcaagggcggcatgatgagcatcttcctgatgggctgctacgaccccggcagccagaagtggtgcaccgtgaccaagtgcgccggcggccacgacgacgccaccctggccagactgcagaacgagctggacatggtgaagatcagcaaggaccccagcaagatccccagctggctgaaggtgaacaagatctactaccccgacttcatcgtgcccgaccccaagaaggccgccgtgtgggagatcaccggcgccgagttcagcaagagcgaggcccacaccgccgacggcatcagcatcagattccccagatgcaccagaatcagagacgacaaggactggaagagcgccaccaacctgccccagctgaaggagctgtaccagctgagcaaggagaaggccgacttcaccgtggtggccggcgacgagggcagcagcaccaccggcggcagcagcgaggagaacaagggccccagcggcagcgccgtgagcagaaaggcccccagcaagcccagcgccagcaccaagaaggccgagggcaagctgagcaacagcaacagcaaggacggcaacatgcagaccgccaagcccagcgccatgaaggtgggcgagaagctggccaccaagagcagccccgtgaaggtgggcgagaagagaaaggccgccgacgagaccctgtgccagaccaagagaagacccgccagcgagcagagaggcagaaccgtgcccgccggcagaagatag

SEQ ID NO: 11318 - DNA, 3030 bp, synthetic construct
  misc_feature 1..3030: note = Description of Artificial Sequence: Synthetic coding sequence
  source 1..3030: mol_type = other DNA
atgagcctggccttcaagatcttcttcccccagaccctgagagccctgagcagaaaggagctgtgcctgttcagaaagcaccactggagagacgtgagacagttcagccagtggagcgagaccgacctgctgcacggccaccccctgttcctgagaagaaagcccgtgctgagcttccagggcagccacctgagaagcagagccacctacctggtgttcctgcccggcctgcacgtgggcctgtgcagcggcccctgcgagatggccgagcagagattctgcgtggactacgccaagagaggcaccgccggctgcaagaagtgcaaggagaagatcgtgaagggcgtgtgcagaatcggcaaggtggtgcccaaccccttcagcgagagcggcggcgacatgaaggagtggtaccacatcaagtgcatgttcgagaagctggagagagccagagccaccaccaagaagatcgaggacctgaccgagctggagggctgggaggagctggaggacaacgagaaggagcagatcacccagcacatcgccgacctgagcagcaaggccgccggcacccccaagaagaaggccgtggtgcaggccaagctgaccaccaccggccaggtgaccagccccgtgaagggcgccagcttcgtgaccagcaccaaccccagaaagttcagcggcttcagcgccaagcccaacaacagcggcgaggcccccagcagccccacccccaagagaagcctgagcagcagcaagtgcgaccccagacacaaggactgcctgctgagagagttcagaaagctgtgcgccatggtggccgacaaccccagctacaacaccaagacccagatcatccaggacttcctgagaaagggcagcgccggcgacggcttccacggcgacgtgtacctgaccgtgaagctgctgctgcccggcgtgatcaagaccgtgtacaacctgaacgacaagcagatcgtgaagctgttcagcagaatcttcaactgcaaccccgacgacatggccagagacctggagcagggcgacgtgagcgagaccatcagagtgttcttcgagcagagcaagagcttcccccccgccgccaagagcctgctgaccatccaggaggtggacgagttcctgctgagactgagcaagctgaccaaggaggacgagcagcagcaggccctgcaggacatcgccagcagatgcaccgccaacgacctgaagtgcatcatcagactgatcaagcacgacctgaagatgaacagcggcgccaagcacgtgctggacgccctggaccccaacgcctacgaggccttcaaggccagcagaaacctgcaggacgtggtggagagagtgctgcacaacgcccaggaggtggagaaggagcccggccagagaagagccctgagcgtgcaggccagcctgatgacccccgtgcagcccatgctggccgaggcctgcaagagcgtggagtacgccatgaagaagtgccccaacggcatgttcagcgagatcaagtacgacggcgagagagtgcaggtgcacaagaacggcgaccacttcagctacttcagcagaagcctgaagcccgtgctgccccacaaggtggcccacttcaaggactacatcccccaggccttccccggcggccacagcatgatcctggacagcgaggtgctgctgatcgacaacaagaccggcaagcccctgcccttcggcaccctgggcgtgcacaagaaggccgccttccaggacgccaacgtgtgcctgttcgtgttcgactgcatctacttcaacgacgtgagcctgatggacagacccctgtgcgagagaagaaagttcctgcacgacaacatggtggagatccccaacagaatcatgttcagcgagatgaagagagtgaccaaggccctggacctggccgacatgatcaccagagtgatccaggagggcctggagggcctggtgctgaaggacgtgaagggcacctacgagcccggcaagagacactggctgaaggtgaagaaggactacctgaacgagggcgccatggccgacaccgccgacctggtggtgctgggcgccttctacggccagggcagcaagggcggcatgatgagcatcttcctgatgggctgctacgaccccggcagccagaagtggtgcaccgtgaccaagtgcgccggcggccacgacgacgccaccctggccagactgcagaacgagctggacatggtgaagatcagcaaggaccccagcaagatccccagctggctgaaggtgaacaagatctactaccccgacttcatcgtgcccgaccccaagaaggccgccgtgtgggagatcaccggcgccgagttcagcaagagcgaggcccacaccgccgacggcatcagcatcagattccccagatgcaccagaatcagagacgacaaggactggaagagcgccaccaacctgccccagctgaaggagctgtaccagctgagcaaggagaaggccgacttcaccgtggtggccggcgacgagggcagcagcaccaccggcggcagcagcgaggagaacaagggccccagcggcagcgccgtgagcagaaaggcccccagcaagcccagcgccagcaccaagaaggccgagggcaagctgagcaacagcaacagcaaggacggcaacatgcagaccgccaagcccagcgccatgaaggtgggcgagaagctggccaccaagagcagccccgtgaaggtgggcgagaagagaaaggccgccgacgagaccctgtgccagaccaaggtgctgctggacatcttcaccggcgtgagactgtacctgccccccagcacccccgacttcagcagactgagaagatacttcgtggccttcgacggcgacctggtgcaggagttcgacatgaccagcgccacccacgtgctgggcagcagagacaagaaccccgccgcccagcaggtgagccccgagtggatctgggcctgcatcagaaagagaagactggtggccccctgctag

SEQ ID NO: 11319 - DNA, 2736 bp, synthetic construct
  misc_feature 1..2736: note = Description of Artificial Sequence: Synthetic coding sequence
  source 1..2736: mol_type = other DNA
atggccgccagccagaccagccagaccgtggccagccacgtgcccttcgccgacctgtgcagcaccctggagagaatccagaagagcaagggcagagccgagaagatcagacacttcagagagttcctggacagctggagaaagttccacgacgccctgcacaagaaccacaaggacgtgaccgacagcttctaccccgccatgagactgatcctgccccagctggagagagagagaatggcctacggcatcaaggagaccatgctggccaagctgtacatcgagctgctgaacctgcccagagacggcaaggacgccctgaagctgctgaactacagaacccccaccggcacccacggcgacgccggcgacttcgccatgatcgcctacttcgtgctgaagcccagatgcctgcagaagggcagcctgaccatccagcaggtgaacgacctgctggacagcatcgccagcaacaacagcgccaagagaaaggacctgatcaagaagagcctgctgcagctgatcacccagagcagcgccctggagcagaagtggctgatcagaatgatcatcaaggacctgaagctgggcgtgagccagcagaccatcttcagcgtgttccacaacgacgccgccgagctgcacaacgtgaccaccgacctggagaaggtgtgcagacagctgcacgaccccagcgtgggcctgagcgacatcagcatcaccctgttcagcgccttcaagcccatgctggccgccatcgccgacatcgagcacatcgagaaggacatgaagcaccagagcttctacatcgagaccaagctggacggcgagagaatgcagatgcacaaggacggcgacgtgtacaagtacttcagcagaaacggctacaactacaccgaccagttcggcgccagccccaccgagggcagcctgacccccttcatccacaacgccttcaaggccgacatccagatctgcatcctggacggcgagatgatggcctacaaccccaacacccagaccttcatgcagaagggcaccaagttcgacatcaagagaatggtggaggacagcgacctgcagacctgctactgcgtgttcgacgtgctgatggtgaacaacaagaagctgggccacgagaccctgagaaagagatacgagatcctgagcagcatcttcacccccatccccggcagaatcgagatcgtgcagaagacccaggcccacaccaagaacgaggtgatcgacgccctgaacgaggccatcgacaagagagaggagggcatcatggtgaagcagcccctgagcatctacaagcccgacaagagaggcgagggctggctgaagatcaagcccgagtacgtgagcggcctgatggacgagctggacatcctgatcgtgggcggctactggggcaagggcagcagaggcggcatgatgagccacttcctgtgcgccgtggccgagaagcccccccccggcgagaagcccagcgtgttccacaccctgagcagagtgggcagcggctgcaccatgaaggagctgtacgacctgggcctgaagctggccaagtactggaagcccttccacagaaaggccccccccagcagcatcctgtgcggcaccgagaagcccgaggtgtacatcgagccctgcaacagcgtgatcgtgcagatcaaggccgccgagatcgtgcccagcgacatgtacaagaccggctgcaccctgagattccccagaatcgagaagatcagagacgacaaggagtggcacgagtgcatgaccctggacgacctggagcagctgagaggcaaggccagcggcaagctggccagcaagcacctgtacatcggcggcgacgacgagccccaggagaagaagagaaaggccgcccccaagatgaagaaggtgatcggcatcatcgagcacctgaaggcccccaacctgaccaacgtgaacaagatcagcaacatcttcgaggacgtggagttctgcgtgatgagcggcaccgacagccagcccaagcccgacctggagaacagaatcgccgagttcggcggctacatcgtgcagaaccccggccccgacacctactgcgtgatcgccggcagcgagaacatcagagtgaagaacatcatcctgagcaacaagcacgacgtggtgaagcccgcctggctgctggagtgcttcaagaccaagagcttcgtgccctggcagcccagattcatgatccacatgtgccccagcaccaaggagcacttcgccagagagtacgactgctacggcgacagctacttcatcgacaccgacctgaaccagctgaaggaggtgttcagcggcatcaagaacagcaacgagcagacccccgaggagatggccagcctgatcgccgacctggagtacagatacagctgggactgcagccccctgagcatgttcagaagacacaccgtgtacctggacagctacgccgtgatcaacgacctgagcaccaagaacgagggcaccagactggccatcaaggccctggagctgagattccacggcgccaaggtggtgagctgcctggccgagggcgtgagccacgtgatcatcggcgaggaccacagcagagtggccgacttcaaggccttcagaagaaccttcaagagaaagttcaagatcctgaaggagagctgggtgaccgacagcatcgacaagtgcgagctgcaggaggagaaccagtacctgatctag

SEQ ID NO: 11320 - DNA, 2736 bp, synthetic construct; identical to SEQ ID NO: 11319
  misc_feature 1..2736: note = Description of Artificial Sequence: Synthetic coding sequence
  source 1..2736: mol_type = other DNA

SEQ ID NO: 11321 - DNA, 2736 bp, synthetic construct; identical to SEQ ID NO: 11319
  misc_feature 1..2736: note = Description of Artificial Sequence: Synthetic coding sequence
  source 1..2736: mol_type = other DNA

SEQ ID NO: 11322 - DNA, 1944 bp, synthetic construct
  misc_feature 1..1944: note = Description of Artificial Sequence: Synthetic coding sequence
  source 1..1944: mol_type = other DNA
atgagactgaccctgctgtgctgcacctggagagaggagagaatgggcgaggagggcagcgagctgcccgtgtgcgccagctgcggccagagaatctacgacggccagtacctgcaggccctgaacgccgactggcacgccgactgcttcagatgctgcgactgcagcgccagcctgagccaccagtactacgagaaggacggccagctgttctgcaagaaggactactgggccagatacggcgagagctgccacggctgcagcgagcagatcaccaagggcctggtgatggtggccggcgagctgaagtaccaccccgagtgcttcatctgcctgacctgcggcaccttcatcggcgacggcgacacctacaccctggtggagcacagcaagctgtactgcggccactgctactaccagaccgtggtgacccccgtgatcgagcagatcctgcccgacagccccggcagccacctgccccacaccgtgaccctggtgagcatccccgccagcagccacggcaagagaggcctgagcgtgagcatcgaccccccccacggcccccccggctgcggcaccgagcacagccacaccgtgagagtgcagggcgtggaccccggctgcatgagccccgacgtgaagaacagcatccacgtgggcgacagaatcctggagatcaacggcacccccatcagaaacgtgcccctggacgagatcgacctgctgatccaggagaccagcagactgctgcagctgaccctggagcacgacccccacgacaccctgggccacggcctgggccccgagaccagccccctgagcagccccgcctacacccccagcggcgaggccggcagcagcgccagacagaagcccgtgctgagaagctgcagcatcgacagaagccccggcgccggcagcctgggcagccccgccagccagagaaaggacctgggcagaagcgagagcctgagagtggtgtgcagaccccacagaatcttcagacccagcgacctgatccacggcgaggtgctgggcaagggctgcttcggccaggccatcaaggtgacccacagagagaccggcgaggtgatggtgatgaaggagctgatcagattcgacgaggagacccagagaaccttcctgaaggaggtgaaggtgatgagatgcctggagcaccccaacgtgctgaagttcatcggcgtgctgtacaaggacaagagactgaacttcatcaccgagtacatcaagggcggcaccctgagaggcatcatcaagagcatggacagccagtacccctggagccagagagtgagcttcgccaaggacatcgccagcggcatggcctacctgcacagcatgaacatcatccacagagacctgaacagccacaactgcctggtgagagagaacaagaacgtggtggtggccgacttcggcctggccagactgatggtggacgagaagacccagcccgagggcctgagaagcctgaagaagcccgacagaaagaagagatacaccgtggtgggcaacccctactggatggcccccgagatgatcaacggcagaagctacgacgagaaggtggacgtgttcagcttcggcatcgtgctgtgcgagatcatcggcagagtgaacgccgaccccgactacctgcccagaaccatggacttcggcctgaacgtgagaggcttcctggacagatactgcccccccaactgcccccccagcttcttccccatcaccgtgagatgctgcgacctggaccccgagaagagacccagcttcgtgaagctggagcactggctggagaccctgagaatgcacctggccggccacctgcccctgggcccccagctggagcagctggacagaggcttctgggagacctacagaagaggcgagagcggcctgcccgcccaccccgaggtgcccgactag

SEQ ID NO: 11323 - DNA, 1944 bp, synthetic construct; identical to SEQ ID NO: 11322
  misc_feature 1..1944: note = Description of Artificial Sequence: Synthetic coding sequence
  source 1..1944: mol_type = other DNA

SEQ ID NO: 11324 - DNA, 1842 bp, synthetic construct
  misc_feature 1..1842: note = Description of Artificial Sequence: Synthetic coding sequence
  source 1..1842: mol_type = other DNA
atgctgctggccagcgcccccagaagaagaagattcctgcagagagccaagtgctgcgactgcagcgccagcctgagccaccagtactacgagaaggacggccagctgttctgcaagaaggactactgggccagatacggcgagagctgccacggctgcagcgagcagatcaccaagggcctggtgatggtggccggcgagctgaagtaccaccccgagtgcttcatctgcctgacctgcggcaccttcatcggcgacggcgacacctacaccctggtggagcacagcaagctgtactgcggccactgctactaccagaccgtggtgacccccgtgatcgagcagatcctgcccgacagccccggcagccacctgccccacaccgtgaccctggtgagcatccccgccagcagccacggcaagagaggcctgagcgtgagcatcgaccccccccacggcccccccggctgcggcaccgagcacagccacaccgtgagagtgcagggcgtggaccccggctgcatgagccccgacgtgaagaacagcatccacgtgggcgacagaatcctggagatcaacggcacccccatcagaaacgtgcccctggacgagatcgacctgctgatccaggagaccagcagactgctgcagctgaccctggagcacgacccccacgacaccctgggccacggcctgggccccgagaccagccccctgagcagccccgcctacacccccagcggcgaggccggcagcagcgccagacagaagcccgtgctgagaagctgcagcatcgacagaagccccggcgccggcagcctgggcagccccgccagccagagaaaggacctgggcagaagcgagagcctgagagtggtgtgcagaccccacagaatcttcagacccagcgacctgatccacggcgaggtgctgggcaagggctgcttcggccaggccatcaaggtgacccacagagagaccggcgaggtgatggtgatgaaggagctgatcagattcgacgaggagacccagagaaccttcctgaaggaggtgaaggtgatgagatgcctggagcaccccaacgtgctgaagttcatcggcgtgctgtacaaggacaagagactgaacttcatcaccgagtacatcaagggcggcaccctgagaggcatcatcaagagcatggacagccagtacccctggagccagagagtgagcttcgccaaggacatcgccagcggcatggcctacctgcacagcatgaacatcatccacagagacctgaacagccacaactgcctggtgagagagaacaagaacgtggtggtggccgacttcggcctggccagactgatggtggacgagaagacccagcccgagggcctgagaagcctgaagaagcccgacagaaagaagagatacaccgtggtgggcaacccctactggatggcccccgagatgatcaacggcagaagctacgacgagaaggtggacgtgttcagcttcggcatcgtgctgtgcgagatcatcggcagagtgaacgccgaccccgactacctgcccagaaccatggacttcggcctgaacgtgagaggcttcctggacagatactgcccccccaactgcccccccagcttcttccccatcaccgtgagatgctgcgacctggaccccgagaagagacccagcttcgtgaagctggagcactggctggagaccctgagaatgcacctggccggccacctgcccctgggcccccagctggagcagctggacagaggcttctgggagacctacagaagaggcgagagcggcctgcccgcccaccccgaggtgcccgactag

SEQ ID NO: 11325 - DNA, 471 bp, synthetic construct
  misc_feature 1..471: note = Description of Artificial Sequence: Synthetic coding sequence
  source 1..471: mol_type = other DNA
atgatggtgctggacaaggaggacggcgtgcccatgctgagcgtgcagcccaagggcaagcagaagggctgcgccggctgcaacagaaagatcaaggacagatacctgctgaaggccctggacaagtactggcacgaggactgcctgaagtgcgcctgctgcgactgcagactgggcgaggtgggcagcaccctgtacaccaaggccaacctgatcctgtgcagaagagactacctgagactgttcggcaccaccggcaactgcgccgcctgcagcaagctgatccccgccttcgagatggtgatgagagccagagacaacgtgtaccacctggactgcttcgcctgccagctgtgcaaccagagattctgcgtgggcgacaagttcttcctgaagaacaacatgatcctgtgccagatggactacgaggagggccagctgaacggcaccttcgagagccaggtgcagtag

SEQ ID NO: 11326 - DNA, 468 bp, synthetic construct
  misc_feature 1..468: note = Description of Artificial Sequence: Synthetic coding sequence
  source 1..468: mol_type = other DNA
atggtgctggaccaggaggacggcgtgcccatgctgagcgtgcagcccaagggcaagcagaagggctgcgccggctgcaacagaaagatcaaggacagatacctgctgaaggccctggacaagtactggcacgaggactgcctgaagtgcgcctgctgcgactgcagactgggcgaggtgggcagcaccctgtacaccaaggccaacctgatcctgtgcagaagagactacctgagactgttcggcaccaccggcaactgcgccgcctgcagcaagctgatccccgccttcgagatggtgatgagagccagagacaacgtgtaccacctggactgcttcgcctgccagctgtgcaaccagagattctgcgtgggcgacaagttcttcctgaagaacaacatgatcctgtgccagatggactacgaggagggccagctgaacggcaccttcgagagccaggtgcagtag

SEQ ID NO: 11327 - DNA, 684 bp, synthetic construct
  misc_feature 1..684: note = Description of Artificial Sequence: Synthetic coding sequence
  source 1..684: mol_type = other DNA
atggagggcagcgccgtgaccgtgctggagagaggcggcgccagcagccccgccgagagaagaagcaagagaagaagaagaagcggcggcgacggcggcggcggcggcggcgccagagcccccgagggcgtgagagcccccgccgccggccagcccagagccaccaagggcgccccccccccccccggcacccccccccccagccccatgagcagcgccatcgagagaaagagcctggaccccagcgaggagcccgtggacgaggtgctgcagatcccccccagcctgctgacctgcggcggctgccagcagaacatcggcgacagatacttcctgaaggccatcgaccagtactggcacgaggactgcctgagctgcgacctgtgcggctgcagactgggcgaggtgggcagaagactgtactacaagctgggcagaaagctgtgcagaagagactacctgagactgttcggccaggacggcctgtgcgccagctgcgacaagagaatcagagcctacgagatgaccatgagagtgaaggacaaggtgtaccacctggagtgcttcaagtgcgccgcctgccagaagcacttctgcgtgggcgacagatacctgctgatcaacagcgacatcgtgtgcgagcaggacatctacgagtggaccaagatcaacggcatgatctag

SEQ ID NO: 11328 - DNA, 477 bp, synthetic construct
  misc_feature 1..477: note = Description of Artificial Sequence: Synthetic coding sequence
  source 1..477: mol_type = other DNA
atgagcagcgccatcgagagaaagagcctggaccccagcgaggagcccgtggacgaggtgctgcagatcccccccagcctgctgacctgcggcggctgccagcagaacatcggcgacagatacttcctgaaggccatcgaccagtactggcacgaggactgcctgagctgcgacctgtgcggctgcagactgggcgaggtgggcagaagactgtactacaagctgggcagaaagctgtgcagaagagactacctgagactgttcggccaggacggcctgtgcgccagctgcgacaagagaatcagagcctacgagatgaccatgagagtgaaggacaaggtgtaccacctggagtgcttcaagtgcgccgcctgccagaagcacttctgcgtgggcgacagatacctgctgatcaacagcgacatcgtgtgcgagcaggacatctacgagtggaccaagatcaacggcatgatctag

SEQ ID NO: 11329 - DNA, 1677 bp, synthetic construct
  misc_feature 1..1677: note = Description of Artificial Sequence: Synthetic coding sequence
  source 1..1677: mol_type = other DNA
atgcacagaggcggccagcccctgaagaagagaagaggcagcttcaagatggccgagctggaccagctgcccgacgagagcagcagcgccaaggccctggtgagcctgaaggagggcagcctgagcaacacctggaacgagaagtacagcagcctgcagaagacccccgtgtggaagggcagaaacaccagcagcgccgtggagatgcccttcagaaacagcaagagaagcagactgttcagcgacgaggacgacagacagatcaacaccagaagccccaagagaaaccagagagtggccatggtgccccagaagttcaccgccaccatgagcacccccgacaagaaggccagccagaagatcggcttcagactgagaaacctgctgaagctgcccaaggcccacaagtggtgcatctacgagtggttctacagcaacatcgacaagcccctgttcgagggcgacaacgacttctgcgtgtgcctgaaggagagcttccccaacctgaagaccagaaagctgaccagagtggagtggggcaagatcagaagactgatgggcaagcccagaagatgcagcagcgccttcttcgaggaggagagaagcgccctgaagcagaagagacagaagatcagactgctgcagcagagaaaggtggccgacgtgagccagttcaaggacctgcccgacgagatccccctgcccctggtgatcggcaccaaggtgaccgccagactgagaggcgtgcacgacggcctgttcaccggccagatcgacgccgtggacaccctgaacgccacctacagagtgaccttcgacagaaccggcctgggcacccacaccatccccgactacgaggtgctgagcaacgagccccacgagaccatgcccatcgccgccttcggccagaagcagagacccagcagattcttcatgaccccccccagactgcactacaccccccccctgcagagccccatcatcgacaacgaccccctgctgggccagagcccctggagaagcaagatcagcggcagcgacaccgagaccctgggcggcttccccgtggagttcctgatccaggtgaccagactgagcaagatcctgatgatcaagaaggagcacatcaagaagctgagagagatgaacaccgaggccgagaagctgaagagctacagcatgcccatcagcatcgagttccagagaagatacgccaccatcgtgctggagctggagcagctgaacaaggacctgaacaaggtgctgcacaaggtgcagcagtactgctacgagctggcccccgaccagggcctgcagcccgccgaccagcccaccgacatgagaagaagatgcgaggaggaggcccaggagatcgtgagacacgccaacagcagcaccggccagccctgcgtggagaacgagaacctgaccgacctgatcagcagactgaccgccatcctgctgcagatcaagtgcctggccgagggcggcgacctgaacagcttcgagttcaagagcctgaccgacagcctgaacgacatcaagagcaccatcgacgccagcaacatcagctgcttccagaacaacgtggagatccacgtggcccacatccagagcggcctgagccagatgggcaacctgcacgccttcgccgccaacaacaccaacagagactag

SEQ ID NO: 11330 - DNA, 1524 bp, synthetic construct
  misc_feature 1..1524: note = Description of Artificial Sequence: Synthetic coding sequence
  source 1..1524: mol_type = other DNA
atggccgagctggaccagctgcccgacgagagcagcagcgccaaggccctggtgagcctgaaggagggcagcctgagcaacacctggaacgagaagtacagcagcctgcagaagacccccgtgtggaagggcagaaacaccagcagcgccgtggagatgaagttcaccgccaccatgagcacccccgacaagaaggccagccagaagatcggcttcagactgagaaacctgctgaagctgcccaaggcccacaagtggtgcatctacgagtggttctacagcaacatcgacaagcccctgttcgagggcgacaacgacttctgcgtgtgcctgaaggagagcttccccaacctgaagaccagaaagctgaccagagtggagtggggcaagatcagaagactgatgggcaagcccagaagatgcagcagcgccttcttcgaggaggagagaagcgccctgaagcagaagagacagaagatcagactgctgcagcagagaaaggtggccgacgtgagccagttcaaggacctgcccgacgagatccccctgcccctggtgatcggcaccaaggtgaccgccagactgagaggcgtgcacgacggcctgttcaccggccagatcgacgccgtggacaccctgaacgccacctacagagtgaccttcgacagaaccggcctgggcacccacaccatccccgactacgaggtgctgagcaacgagccccacgagaccatgcccatcgccgccttcggccagaagcagagacccagcagattcttcatgaccccccccagactgcactacaccccccccctgcagagccccatcatcgacaacgaccccctgctgggccagagcccctggagaagcaagatcagcggcagcgacaccgagaccctgggcggcttccccgtggagttcctgatccaggtgaccagactgagcaagatcctgatgatcaagaaggagcacatcaagaagctgagagagatgaacaccgaggccgagaagctgaagagctacagcatgcccatcagcatcgagttccagagaagatacgccaccatcgtgctggagctggagcagctgaacaaggacctgaacaaggtgctgcacaaggtgcagcagtactgctacgagctggcccccgaccagggcctgcagcccgccgaccagcccaccgacatgagaagaagatgcgaggaggaggcccaggagatcgtgagacacgccaacagcagcaccggccagccctgcgtggagaacgagaacctgaccgacctgatcagcagactgaccgccatcctgctgcagatcaagtgcctggccgagggcggcgacctgaacagcttcgagttcaagagcctgaccgacagcctgaacgacatcaagagcaccatcgacgccagcaacatcagctgcttccagaacaacgtggagatccacgtggcccacatccagagcggcctgagccagatgggcaacctgcacgccttcgccgccaacaacaccaacagagactag

SEQ ID NO: 11331 - DNA, 1572 bp, synthetic construct
  misc_feature 1..1572: note = Description of Artificial Sequence: Synthetic coding sequence
  source 1..1572: mol_type = other DNA
atgagacccagaaccgagggcttcttcccccccgccggcgccagcctgcccttcagcaccagaaacaagcagcccgccgtgcccgccgccgccgccagagccgccgagcacgcccccggcgccggccccggcagagacagcggcgccggcaccgccccccccgccctgagaagaagagccagcccctgcggcctgctgccccccttcctgccccccggcagcgccggcggcggcggcggcggcgccagaagaggcccccccagcgccgcccccccccccagagccggcgccggcggcgccggccccgccagcgccagcagaggcggcagcagcgccgccagaagaagaggccagagagccccccacagcaacctgcccagaaaggacagcctgagacccaccatgcacagaggcggccagcccctgaagaagagaagaggcagcttcaagatggccgagctggaccagctgcccgacgagagcagcagcgccaaggccctggtgagcctgaaggagggcagcctgagcaacacctggaacgagaagtacagcagcctgcagaagacccccgtgtggaagggcagaaacaccagcagcgccgtggagatgcccttcagaaacagcaagagaagcagactgttcagcgacgaggacgacagacagatcaacaccagaagccccaagagaaaccagagagtggccatggtgccccagaagttcaccgccaccatgagcacccccgacaagaaggccagccagaagatcggcttcagactgagaaacctgctgaagctgcccaaggcccacaagtggtgcatctacgagtggttctacagcaacatcgacaagcccctgttcgagggcgacaacgacttctgcgtgtgcctgaaggagagcttccccaacctgaagaccagaaagctgaccagagtggagtggggcaagatcagaagactgatgggcaagcccagaagatgcagcagcgccttcttcgaggaggagagaagcgccctgaagcagaagagacagaagatcagactgctgcagcagagaaaggtggccgacgtgagccagttcaaggacctgcccgacgagatccccctgcccctggtgatcggcaccaaggtgaccgccagactgagaggcgtgcacgacggcctgttcaccggccagatcgacgccgtggacaccctgaacgccacctacagagtgaccttcgacagaaccggcctgggcacccacaccatccccgactacgaggtgctgagcaacgagccccacgagaccatgcccatcgccgccttcggccagaagcagagacccagcagattcttcatgaccccccccagactgcactacaccccccccctgcagagccccatcatcgacaacgaccccctgctgggccagagcccctggagaagcaagatcagcggcagcgacaccgagaccctgggcggcttccccgtggagttcctgatccaggtgaccagactgagcaagatcctgatgatcaagggcacctaccaggagatcaagggcaacgagcacagaagcagaaagatcggctag

SEQ ID NO: 11332 - DNA, 1842 bp, synthetic construct
  misc_feature 1..1842: note = Description of Artificial Sequence: Synthetic coding sequence
  source 1..1842: mol_type = other DNA
gagaccgccgagcagaacagcagcctggccgtgggcctgaacgaccagctgcacgacctgagcagaagcagaagccccgccgccagaagcagcgccagcaacatcagagagagaagagccagaatcgccagaggcagatgggacagagtgcccgacgtggccaccagaagaggcctgctgagacccgccgtgagcggcaaggtgagaggcagaagaagacccagcaacgtgggcttcggcaactgcagcagcgccaaggccctggtgagcctgaaggagggcagcctgagcaacacctggaacgagaagtacagcagcctgcagaagacccccgtgtggaagggcagaaacaccagcagcgccgtggagatgcccttcagaaacagcaagagaagcagactgttcagcgacgaggacgacagacagatcaacaccagaagccccaagagaaaccagagagtggccatggtgccccagaagttcaccgccaccatgagcacccccgacaagaaggccagccagaagatcggcttcagactgagaaacctgctgaagctgcccaaggcccacaagtggtgcatctacgagtggttctacagcaacatcgacaagcccctgttcgagggcgacaacgacttctgcgtgtgcctgaaggagagcttccccaacctgaagaccagaaagctgaccagagtggagtggggcaagatcagaagactgatgggcaagcccagaagatgcagcagcgccttcttcgaggaggagagaagcgccctgaagcagaagagacagaagatcagactgctgcagcagagaaaggtggccgacgtgagccagttcaaggacctgcccgacgagatccccctgcccctggtgatcggcaccaaggtgaccgccagactgagaggcgtgcacgacggcctgttcaccggccagatcgacgccgtggacaccctgaacgccacctacagagtgaccttcgacagaaccggcctgggcacccacaccatccccgactacgaggtgctgagcaacgagccccacgagaccatgcccatcgccgccttcggccagaagcagagacccagcagattcttcatgaccccccccagactgcactacaccccccccctgcagagccccatcatcgacaacgaccccctgctgggccagagcccctggagaagcaagatcagcggcagcgacaccgagaccctgggcggcttccccgtggagttcctgatccaggtgaccagactgagcaagatcctgatgatcaagaaggagcacatcaagaagctgagagagatgaacaccgaggccgagaagctgaagagctacagcatgcccatcagcatcgagttccagagaagatacgccaccatcgtgctggagctggagcagctgaacaaggacctgaacaaggtgctgcacaaggtgcagcagtactgctacgagctggcccccgaccagggcctgcagcccgccgaccagcccaccgacatgagaagaagatgcgaggaggaggcccaggagatcgtgagacacgccaacagcagcaccggccagccctgcgtggagaacgagaacctgaccgacctgatcagcagactgaccgccatcctgctgcagatcaagtgcctggccgagggcggcgacctgaacagcttcgagttcaagagcctgaccgacagcctgaacgacatcaagagcaccatcgacgccagcaacatcagctgcttccagaacaacgtggagatccacgtggcccacatccagagcggcctgagccagatgggcaacctgcacgccttcgccgccaacaacaccaacagagactag

SEQ ID NO: 11333 - DNA, 13800 bp, synthetic construct
  misc_feature 1..13800: note = Description of Artificial Sequence: Synthetic coding sequence
  source 1..13800: mol_type = other DNA
atgagcgagttcctgctggccctgctgaccctgagcggcctgctgcccatcgccagagtgctgaccgtgggcgccgacagagaccagcagctgtgcgaccccggcgagttcctgtgccacgaccacgtgacctgcgtgagccagagctggctgtgcgacggcgaccccgactgccccgacgacagcgacgagagcctggacacctgccccgaggaggtggagatcaagtgccccctgaaccacatcgcctgcctgggcaccaacaagtgcgtgcacctgagccagctgtgcaacggcgtgctggactgccccgacggctacgacgagggcgtgcactgccaggagctgctgagcaactgccagcagctgaactgccagtacaagtgcaccatggtgagaaacagcaccagatgctactgcgaggacggcttcgagatcaccgaggacggcagaagctgcaaggaccaggacgagtgcgccgtgtacggcacctgcagccagacctgcagaaacacccacggcagctacacctgcagctgcgtggagggctacctgatgcagcccgacaacagaagctgcaaggccaagatcgagcccaccgacagaccccccatcctgctgatcgccaacttcgagaccatcgaggtgttctacctgaacggcagcaagatggccaccctgagcagcgtgaacggcaacgagatccacaccctggacttcatctacaacgaggacatgatctgctggatcgagagcagagagagcagcaaccagctgaagtgcatccagatcaccaaggccggcggcctgaccgacgagtggaccatcaacatcctgcagagcttccacaacgtgcagcagatggccatcgactggctgaccagaaacctgtacttcgtggaccacgtgggcgacagaatcttcgtgtgcaacagcaacggcagcgtgtgcgtgaccctgatcgacctggagctgcacaaccccaaggccatcgccgtggaccccatcgccggcaagctgttcttcaccgactacggcaacgtggccaaggtggagagatgcgacatggacggcatgaacagaaccagaatcatcgacagcaagaccgagcagcccgccgccctggccctggacctggtgaacaagctggtgtactgggtggacctgtacctggactacgtgggcgtggtggactaccagggcaagaacagacacaccgtgatccagggcagacaggtgagacacctgtacggcatcaccgtgttcgaggactacctgtacgccaccaacagcgacaactacaacatcgtgagaatcaacagattcaacggcaccgacatccacagcctgatcaagatcgagaacgcctggggcatcagaatctaccagaagagaacccagcccaccgtgagaagccacgcctgcgaggtggacccctacggcatgcccggcggctgcagccacatctgcctgctgagcagcagctacaagaccagaacctgcagatgcagaaccggcttcaacctgggcagcgacggcagaagctgcaagagacccaagaacgagctgttcctgttctacggcaagggcagacccggcatcgtgagaggcatggacctgaacaccaagatcgccgacgagtacatgatccccatcgagaacctggtgaaccccagagccctggacttccacgccgagaccaactacatctacttcgccgacaccaccagcttcctgatcggcagacagaagatcgacggcaccgagagagagaccatcctgaaggacgacctggacaacgtggagggcatcgccgtggactggatcggcaacaacctgtactggaccaacgacggccacagaaagaccatcaacgtggccagactggagaaggccagccagagcagaaagaccctgctggagggcgagatgagccaccccagaggcatcgtggtggaccccgtgaacggctggatgtactggaccgactgggaggaggacgagatcgacgacagcgtgggcagaatcgagaaggcctggatggacggcttcaacagacagatcttcgtgaccagcaagatgctgtggcccaacggcctgaccctggacttccacaccaacaccctgtactggtgcgacgcctactacgaccacatcgagaaggtgttcctgaacggcacccacagaaagatcgtgtacagcggcagagagctgaaccaccccttcggcctgagccaccacggcaactacgtgttctggaccgactacatgaacggcagcatcttccagctggacctgatcaccagcgaggtgaccctgctgagacacgagagaccccccctgttcggcctgcagatctacgaccccagaaagcagcagggcgacaacatgtgcagagtgaacaacggcggctgcagcaccctgtgcctggccatccccggcggcagagtgtgcgcctgcgccgacaaccagctgctggacgagaacggcaccacctgcaccttcaaccccggcgaggccctgccccacatctgcaaggccggcgagttcagatgcaagaacagacactgcatccaggccagatggaagtgcgacggcgacgacgactgcctggacggcagcgacgaggacagcgtgaactgcttcaaccacagctgccccgacgaccagttcaagtgccagaacaacagatgcatccccaagagatggctgtgcgacggcgccaacgactgcggcagcaacgaggacgagagcaaccagacctgcaccgccagaacctgccaggtggaccagttcagctgcggcaacggcagatgcatccccagagcctggctgtgcgacagagaggacgactgcggcgaccagaccgacgagatggccagctgcgagttccccacctgcgagcccctgacccagttcgtgtgcaagagcggcagatgcatcagcagcaagtggcactgcgacagcgacgacgactgcggcgacggcagcgacgaggtgggctgcgtgcacagctgcttcgacaaccagttcagatgcagcagcggcagatgcatccccggccactgggcctgcgacggcgacaacgactgcggcgacttcagcgacgaggcccagatcaactgcaccaaggaggagatccacagccccgccggctgcaacggcaacgagttccagtgccaccccgacggcaactgcgtgcccgacctgtggagatgcgacggcgagaaggactgcgaggacggcagcgacgagaagggctgcaacggcaccatcagactgtgcgaccacaagaccaagttcagctgctggagcaccggcagatgcatcaacaaggcctgggtgtgcgacggcgacatcgactgcgaggaccagagcgacgaggacgactgcgacagcttcctgtgcggcccccccaagcacccctgcgccaacgacaccagcgtgtgcctgcagcccgagaagctgtgcaacggcaagaaggactgccccgacggcagcgacgagggctacctgtgcgacgagtgcagcctgaacaacggcggctgcagcaaccactgcagcgtggtgcccggcagaggcatcgtgtgcagctgccccgagggcctgcagctgaacaaggacaacaagacctgcgagatcgtggactactgcagcaaccacctgaagtgcagccaggtgtgcgagcagcacaagcacaccgtgaagtgcagctgctacgagggctggaagctggacgtggacggcgagagctgcaccagcgtggaccccttcgaggccttcatcatcttcagcatcagacacgagatcagaagaatcgacctgcacaagagagactacagcctgctggtgcccggcctgagaaacaccatcgccctggacttccacttcaaccagagcctgctgtactggaccgacgtggtggaggacagaatctacagaggcaagctgagcgagagcggcggcgtgagcgccatcgaggtggtggtggagcacggcctggccacccccgagggcctgaccgtggactggatcgccggcaacatctactggatcgacagcaacctggaccagatcgaggtggccaagctggacggcagcctgagaaccaccctgatcgccggcgccatggagcaccccagagccatcgccctggaccccagatacggcatcctgttctggaccgactgggacgccaacttccccagaatcgagagcgccagcatgagcggcgccggcagaaagaccatctacaaggacatgaagaccggcgcctggcccaacggcctgaccgtggaccacttcgagaagagaatcgtgtggaccgacgccagaagcgacgccatctacagcgccctgtacgacggcaccaacatgatcgagatcatcagaggccacgagtacctgagccaccccttcgccgtgagcctgtacggcagcgaggtgtactggaccgactggagaaccaacaccctgagcaaggccaacaagtggaccggccagaacgtgagcgtgatccagaagaccagcgcccagcccttcgacctgcagatctaccaccccagcagacagccccaggcccccaacccctgcgccgccaacgacggcaagggcccctgcagccacatgtgcctgatcaaccacaacagaagcgccgcctgcgcctgcccccacctgatgaagctgagcagcgacaagaagacctgctacgagatgaagaagttcctgctgtacgccagaagaagcgagatcagaggcgtggacatcgacaacccctacttcaacttcatcaccgccttcaccgtgcccgacatcgacgacgtgaccgtgatcgacttcgacgccagcgaggagagactgtactggaccgacatcaagacccagaccatcaagagagccttcatcaacggcaccggcctggagaccgtgatcagcagagacatccagagcatcagaggcctggccgtggactgggtgagcagaaacctgtactggatcagcagcgagttcgacgagacccagatcaacgtggccagactggacggcagcctgaagaccagcatcatccacggcatcgacaagccccagtgcctggccgcccaccccgtgagaggcaagctgtactggaccgacggcaacaccatcaacatggccaacatggacggcagcaacagcaagatcctgttccagaaccagaaggagcccgtgggcctgagcatcgactacgtggagaacaagctgtactggatcagcagcggcaacggcaccatcaacagatgcaacctggacggcggcaacctggaggtgatcgagagcatgaaggaggagctgaccaaggccaccgccctgaccatcatggacaagaagctgtggtgggccgaccagaacctggcccagctgggcacctgcagcaagagagacggcagaaaccccaccatcctgagaaacaagaccagcggcgtggtgcacatgaaggtgtacgacaaggaggcccagcagggcagcaacagctgccagctgaacaacggcggctgcagccagctgtgcctgcccaccagcgagaccaccagaacctgcatgtgcaccgtgggctactacctgcagaagaacagaatgagctgccagggcatcgagagcttcctgatgtacagcgtgcacgagggcatcagaggcatccccctggagcccagcgacaagatggacgccctgatgcccatcagcggcaccagcttcgccgtgggcatcgacttccacgccgagaacgacaccatctactggaccgacatgggcttcaacaagatcagcagagccaagagagaccagacctggaaggaggacatcatcaccaacggcctgggcagagtggagggcatcgccgtggactggatcgccggcaacatctactggaccgaccacggcttcaacctgatcgaggtggccagactgaacggcagcttcagatacgtgatcatcagccagggcctggaccagcccagaagcatcgccgtgcaccccgagaagggcctgctgttctggaccgagtggggccagatgccctgcatcggcaaggccagactggacggcagcgagaaggtggtgctggtgagcatgggcatcgcctggcccaacggcatcagcatcgactacgaggagaacaagctgtactggtgcgacgccagaaccgacaagatcgagagaatcgacctggagaccggcggcaacagagagatggtgctgagcggcagcaacgtggacatgttcagcgtggccgtgttcggcgcctacatctactggagcgacagagcccacgccaacggcagcgtgagaagaggccacaagaacgacgccaccgagaccatcaccatgagaaccggcctgggcgtgaacctgaaggaggtgaagatcttcaacagagtgagagagaagggcaccaacgtgtgcgccagagacaacggcggctgcaagcagctgtgcctgtacagaggcaacagcagaagaacctgcgcctgcgcccacggctacctggccgaggacggcgtgacctgcctgagacacgagggctacctgctgtacagcggcagaaccatcctgaagagcatccacctgagcgacgagaccaacctgaacagccccatcagaccctacgagaaccccagatacttcaagaacgtgatcgccctggccttcgactacaaccagagaagaaagggcaccaacagaatcttctacagcgacgcccacttcggcaacatccagctgatcaaggacaactgggaggacagacaggtgatcgtggagaacgtgggcagcgtggagggcctggcctaccacagagcctgggacaccctgtactggaccagcagcaccaccagcagcatcaccagacacaccgtggaccagaccagacccggcgccttcgacagagaggccgtgatcaccatgagcgaggacgaccacccccacgtgctggccctggacgagtgccagaacctgatgttctggaccaactggaacgagcagcaccccagcatcatgagaagcaccctgaccggcaagaacgcccaggtggtggtgagcaccgacatcctgacccccaacggcctgaccatcgactacagagccgagaagctgtacttcagcgacggcagcctgggcaagatcgagagatgcgagtacgacggcagccagagacacgtgatcgtgaagagcggccccggcaccttcctgagcctggccgtgtacgacaactacatcttctggagcgactggggcagaagagccatcctgagaagcaacaagtacaccggcggcgacaccaagatcctgagaagcgacatcccccaccagcccatgggcatcatcgccgtggccaacgacaccaacagctgcgagctgagcccctgcgccctgctgaacggcggctgccacgacctgtgcctgctgacccccaacggcagagtgaactgcagctgcagaggcgacagaatcctgctggaggacaacagatgcgtgaccaagaacagcagctgcaacgcctacagcgagttcgagtgcggcaacggcgagtgcatcgactaccagctgacctgcgacggcatcccccactgcaaggacaagagcgacgagaagctgctgtactgcgagaacagaagctgcagaagaggcttcaagccctgctacaacagaagatgcatcccccacggcaagctgtgcgacggcgagaacgactgcggcgacaacagcgacgagctggactgcaaggtgagcacctgcgccaccgtggagttcagatgcgccgacggcacctgcatccccagaagcgccagatgcaaccagaacatcgactgcgccgacgccagcgacgagaagaactgcaacaacaccgactgcacccacttctacaagctgggcgtgaagaccaccggcttcatcagatgcaacagcaccagcctgtgcgtgctgcccacctggatctgcgacggcagcaacgactgcggcgactacagcgacgagctgaagtgccccgtgcagaacaagcacaagtgcgaggagaactacttcagctgccccagcggcagatgcatcctgaacacctggatctgcgacggccagaaggactgcgaggacggcagagacgagttccactgcgacagcagctgcagctggaaccagttcgcctgcagcgcccagaagtgcatcagcaagcactggatctgcgacggcgaggacgactgcggcgacggcctggacgagagcgacagcatctgcggcgccatcacctgcgccgccgacatgttcagctgccagggcagcagagcctgcgtgcccagacactggctgtgcgacggcgagagagactgccccgacggcagcgacgagctgagcaccgccggctgcgcccccaacaacacctgcgacgagaacgccttcatgtgccacaacaaggtgtgcatccccaagcagttcgtgtgcgaccacgacgacgactgcggcgacggcagcgacgagagcccccagtgcggctacagacagtgcggcaccgaggagttcagctgcgccgacggcagatgcctgctgaacacccagtggcagtgcgacggcgacttcgactgccccgaccacagcgacgaggcccccctgaaccccaagtgcaagagcgccgagcagagctgcaacagcagcttcttcatgtgcaagaacggcagatgcatccccagcggcggcctgtgcgacaacaaggacgactgcggcgacggcagcgacgagagaaactgccacatcaacgagtgcctgagcaagaaggtgagcggctgcagccaggactgccaggacctgcccgtgagctacaagtgcaagtgctggcccggcttccagctgaaggacgacggcaagacctgcgtggacatcgacgagtgcagcagcggcttcccctgcagccagcagtgcatcaacacctacggcacctacaagtgcctgtgcaccgacggctacgagatccagcccgacaaccccaacggctgcaagagcctgagcgacgaggagcccttcctgatcctggccgaccaccacgagatcagaaagatcagcaccgacggcagcaactacaccctgctgaagcagggcctgaacaacgtgatcgccatcgacttcgactacagagaggagttcatctactggatcgacagcagcagacccaacggcagcagaatcaacagaatgtgcctgaacggcagcgacatcaaggtggtgcacaacaccgccgtgcccaacgccctggccgtggactggatcggcaagaacctgtactggagcgacaccgagaagagaatcatcgaggtgagcaagctgaacggcctgtaccccaccatcctggtgagcaagagactgaagttccccagagacctgagcctggacccccaggccggctacctgtactggatcgactgctgcgagtacccccacatcggcagagtgggcatggacggcaccaaccagagcgtggtgatcgagaccaagatcagcagacccatggccctgaccatcgactacgtgaacagaagactgtactgggccgacgagaaccacatcgagttcagcaacatggacggcagccacagacacaaggtgcccaaccaggacatccccggcgtgatcgccctgaccctgttcgaggactacatctactggaccgacggcaagaccaagagcctgagcagagcccacaagaccagcggcgccgacagactgagcctgatctacagctggcacgccatcaccgacatccaggtgtaccacagctacagacagcccgacgtgagcaagcacctgtgcatgatcaacaacggcggctgcagccacctgtgcctgctggcccccggcaagacccacacctgcgcctgccccaccaacttctacctggccgccgacaacagaacctgcctgagcaactgcaccgccagccagttcagatgcaagaccgacaagtgcatccccttctggtggaagtgcgacaccgtggacgactgcggcgacggcagcgacgagcccgacgactgccccgagttcagatgccagcccggcagattccagtgcggcaccggcctgtgcgccctgcccgccttcatctgcgacggcgagaacgactgcggcgacaacagcgacgagctgaactgcgacacccacgtgtgcctgagcggccagttcaagtgcaccaagaaccagaagtgcatccccgtgaacctgagatgcaacggccaggacgactgcggcgacgaggaggacgagagagactgccccgagaacagctgcagccccgactacttccagtgcaagaccaccaagcactgcatcagcaagctgtgggtgtgcgacgaggaccccgactgcgccgacgccagcgacgaggccaactgcgacaagaagacctgcggcccccacgagttccagtgcaagaacaacaactgcatccccgaccactggagatgcgacagccagaacgactgcagcgacaacagcgacgaggagaactgcaagccccagacctgcaccctgaaggacttcctgtgcgccaacggcgactgcgtgagcagcagattctggtgcgacggcgacttcgactgcgccgacggcagcgacgagagaaactgcgagaccagctgcagcaaggaccagttcagatgcagcaacggccagtgcatccccgccaagtggaagtgcgacggccacgaggactgcaagtacggcgaggacgagaagagctgcgagcccgccagccccacctgcagcagcagagagtacatctgcgccagcgacggctgcatcagcgccagcctgaagtgcaacggcgagtacgactgcgccgacggcagcgacgagatggactgcgtgaccgagtgcaaggaggaccagttcagatgcaagaacaaggcccactgcatccccatcagatggctgtgcgacggcatccacgactgcgtggacggcagcgacgaggagaactgcgagagaggcggcaacatctgcagagccgacgagttcctgtgcaacaacagcctgtgcaagctgcacttctgggtgtgcgacggcgaggacgactgcggcgacaacagcgacgaggcccccgacatgtgcgtgaagttcctgtgccccagcaccagaccccacagatgcagaaacaacagaatctgcctgcagagcgagcagatgtgcaacggcatcgacgagtgcggcgacaacagcgacgaggaccactgcggcggcaagctgacctacaaggccagaccctgcaagaaggacgagttcgcctgcagcaacaagaagtgcatccccatggacctgcagtgcgacagactggacgactgcggcgacggcagcgacgagcagggctgcagaatcgcccccaccgagtacacctgcgaggacaacgtgaacccctgcggcgacgacgcctactgcaaccagatcaagaccagcgtgttctgcagatgcaagcccggcttccagagaaacatgaagaacagacagtgcgaggacctgaacgagtgcctggtgttcggcacctgcagccaccagtgcatcaacgtggagggcagctacaagtgcgtgtgcgaccagaacttccaggagagaaacaacacctgcatcgccgagggcagcgaggaccaggtgctgtacatcgccaacgacaccgacatcctgggcttcatctaccccttcaactacagcggcgaccaccagcagatcagccacatcgagcacaacagcagaatcaccggcatggacgtgtactaccagagagacatgatcatctggagcacccagttcaaccccggcggcatcttctacaagagaatccacggcagagagaagagacaggccaacagcggcctgatctgccccgagttcaagagacccagagacatcgccgtggactgggtggccggcaacatctactggaccgaccacagcagaatgcactggttcagctactacaccacccactggaccagcctgagatacagcatcaacgtgggccagctgaacggccccaactgcaccagactgctgaccaacatggccggcgagccctacgccatcgccgtgaaccccaagagaggcatgatgtactggaccgtggtgggcgaccacagccacatcgaggaggccgccatggacggcaccctgagaagaatcctggtgcagaagaacctgcagagacccaccggcctggccgtggactacttcagcgagagaatctactgggccgacttcgagctgagcatcatcggcagcgtgctgtacgacggcagcaacagcgtggtgagcgtgagcagcaagcagggcctgctgcacccccacagaatcgacatcttcgaggactacatctacggcgccggccccaagaacggcgtgttcagagtgcagaagttcggccacggcagcgtggagtacctggccctgaacatcgacaagaccaagggcgtgctgatcagccacagatacaagcagctggacctgcccaacccctgcctggacctggcctgcgagttcctgtgcctgctgaaccccagcggcgccacctgcgtgtgccccgagggcaagtacctgatcaacggcacctgcaacgacgacagcctgctggacgacagctgcaagctgacctgcgagaacggcggcagatgcatcctgaacgagaagggcgacctgagatgccactgctggcccagctacagcggcgagagatgcgaggtgaaccactgcagcaactactgccagaacggcggcacctgcgtgcccagcgtgctgggcagacccacctgcagctgcgccctgggcttcaccggccccaactgcggcaagaccgtgtgcgaggacttctgccagaacggcggcacctgcatcgtgaccgccggcaaccagccctactgccactgccagcccgagtacaccggcgacagatgccagtactacgtgtgccaccactactgcgtgaacagcgagagctgcaccatcggcgacgacggcagcgtggagtgcgtgtgccccaccagatacgagggccccaagtgcgaggtggacaagtgcgtgagatgccacggcggccactgcatcatcaacaaggacagcgaggacatcttctgcaactgcaccaacggcaagatcgccagcagctgccagctgtgcgacggctactgctacaacggcggcacctgccagctggaccccgagaccaacgtgcccgtgtgcctgtgcagcaccaactggagcggcacccagtgcgagagacccgcccccaagagcagcaagagcgaccacatcagcaccagaagcatcgccatcatcgtgcccctggtgctgctggtgaccctgatcaccaccctggtgatcggcctggtgctgtgcaagagaaagagaagaaccaagaccatcagaagacagcccatcatcaacggcggcatcaacgtggagatcggcaaccccagctacaacatgtacgaggtggaccacgaccacaacgacggcggcctgctggaccccggcttcatgatcgaccccaccaaggccagatacatcggcggcggccccagcgccttcaagctgccccacaccgccccccccatctacctgaacagcgacctgaagggccccctgaccgccggccccaccaactacagcaaccccgtgtacgccaagctgtacatggacggccagaactgcagaaacagcctgggcagcgtggacgagagaaaggagctgctgcccaagaagatcgagatcggcatcagagagaccgtggcctag

SEQ ID NO: 11334 - DNA, 2349 bp, synthetic construct
  misc_feature 1..2349: note = Description of Artificial Sequence: Synthetic coding sequence
  source 1..2349: mol_type = other DNA
atgagcgagttcctgctggccctgctgaccctgagcggcctgctgcccatcgccagagtgctgaccgtgggcgccgacagagaccagcagctgtgcgaccccggcgagttcctgtgccacgaccacgtgacctgcgtgagccagagctggctgtgcgacggcgaccccgactgccccgacgacagcgacgagagcctggacaccagcagaacctgccaggtggaccagttcagctgcggcaacggcagatgcatccccagagcctggctgtgcgacagagaggacgactgcggcgaccagaccgacgagatggccagctgcgagttccccacctgcgagcccctgacccagttcgtgtgcaagagcggcagatgcatcagcagcaagtggcactgcgacagcgacgacgactgcggcgacggcagcgacgaggtgggctgcgtgcacagctgcttcgacaaccagttcagatgcagcagcggcagatgcatccccggccactgggcctgcgacggcgacaacgactgcggcgacttcagcgacgaggcccagatcaactgcaccaaggaggagatccacagccccgccggctgcaacggcaacgagttccagtgccaccccgacggcaactgcgtgcccgacctgtggagatgcgacggcgagaaggactgcgaggacggcagcgacgagaagggctgcaacggcaccatcagactgtgcgaccacaagaccaagttcagctgctggagcaccggcagatgcatcaacaaggcctgggtgtgcgacggcgacatcgactgcgaggaccagagcgacgaggacgactgcgacagcttcctgtgcggcccccccaagcacccctgcgccaacgacaccagcgtgtgcctgcagcccgagaagctgtgcaacggcaagaaggactgccccgacggcagcgacgagggctacctgtgcgacgagtgcagcctgaacaacggcggctgcagcaaccactgcagcgtggtgcccggcagaggcatcgtgtgcagctgccccgagggcctgcagctgaacaaggacaacaagacctgcgagatcgtggactactgcagcaaccacctgaagtgcagccaggtgtgcgagcagcacaagcacaccgtgaagtgcagctgctacgagggctggaagctggacgtggacggcgagagctgcaccagcgtggaccccttcgaggccttcatcatcttcagcatcagacacgagatcagaagaatcgacctgcacaagagagactacagcctgctggtgcccggcctgagaaacaccatcgccctggacttccacttcaaccagagcctgctgtactggaccgacgtggtggaggacagaatctacagaggcaagctgagcgagagcggcggcgtgagcgccatcgaggtggtggtggagcacggcctggccacccccgagggcctgaccgtggactggatcgccggcaacatctactggatcgacagcaacctggaccagatcgaggtggccaagctggacggcagcctgagaaccaccctgatcgccggcgccatggagcaccccagagccatcgccctggaccccagatacggcatcctgttctggaccgactgggacgccaacttccccagaatcgagagcgccagcatgagcggcgccggcagaaagaccatctacaaggacatgaagaccggcgcctggcccaacggcctgaccgtggaccacttcgagaagagaatcgtgtggaccgacgccagaagcgacgccatctacagcgccctgtacgacggcaccaacatgatcgagatcatcagaggccacgagtacctgagccaccccttcgccgtgagcctgtacggcagcgaggtgtactggaccgactggagaaccaacaccctgagcaaggccaacaagtggaccggccagaacgtgagcgtgatccagaagaccagcgcccagcccttcgacctgcagatctaccaccccagcagacagccccaggcccccaacccctgcgccgccaacgacggcaagggcccctgcagccacatgtgcctgatcaaccacaacagaagcgccgcctgcgcctgcccccacctgatgaagctgagcagcgacaagaagacctgctacgagatgaagaagttcctgctgtacgccagaagaagcgagatcagaggcgtggacatcgacaacccctacttcaacttcatcaccgccttcaccgtgcccgacatcgacgacgtgaccgtgatcgacttcgacgccagcgaggagagactgtactggaccgacatcaagacccagaccatcaagagagccttcatcaacggctag

SEQ ID NO: 11335 - DNA, 13614 bp, synthetic construct
  misc_feature 1..13614: note = Description of Artificial Sequence: Synthetic coding sequence
  source 1..13614: mol_type = other DNA
ttcctgcacagcggccccgaggaggtggagatcaagtgccccctgaaccacatcgcctgcctgggcaccaacaagtgcgtgcacctgagccagctgtgcaacggcgtgctggactgccccgacggctacgacgagggcgtgcactgccagggcgagagcatctgccagcagctgaactgcaccatgtacaagtacaagtgcaccatggtgagaaacagcaccagatgctactgcgaggacggcttcgagatcaccgaggacggcagaagctgcaaggaccaggacgagtgcgccgtgtacggcacctgcagccagacctgcagaaacacccacggcagctacacctgcagctgcgtggagggctacctgatgcagcccgacaacagaagctgcaaggccaagatcgagcccaccgacagaccccccatcctgctgatcgccaacttcgagaccatcgaggtgttctacctgaacggcagcaagatggccaccctgagcagcgtgaacggcaacgagatccacaccctggacttcatctacaacgaggacatgatctgctggatcgagagcagagagagcagcaaccagctgaagtgcatccagatcaccaaggccggcggcctgaccgacgagtggaccatcaacatcctgcagagcttccacaacgtgcagcagatggccatcgactggctgaccagaaacctgtacttcgtggaccacgtgggcgacagaatcttcgtgtgcaacagcaacggcagcgtgtgcgtgaccctgatcgacctggagctgcacaaccccaaggccatcgccgtggaccccatcgccggcaagctgttcttcaccgactacggcaacgtggccaaggtggagagatgcgacatggacggcatgaacagaaccagaatcatcgacagcaagaccgagcagcccgccgccctggccctggacctggtgaacaagctggtgtactgggtggacctgtacctggactacgtgggcgtggtggactaccagggcaagaacagacacaccgtgatccagggcagacaggtgagacacctgtacggcatcaccgtgttcgaggactacctgtacgccaccaacagcgacaactacaacatcgtgagaatcaacagattcaacggcaccgacatccacagcctgatcaagatcgagaacgcctggggcatcagaatctaccagaagagaacccagcccaccgtgagaagccacgcctgcgaggtggacccctacggcatgcccggcggctgcagccacatctgcctgctgagcagcagctacaagaccagaacctgcagatgcagaaccggcttcaacctgggcagcgacggcagaagctgcaagagacccaagaacgagctgttcctgttctacggcaagggcagacccggcatcgtgagaggcatggacctgaacaccaagatcgccgacgagtacatgatccccatcgagaacctggtgaaccccagagccctggacttccacgccgagaccaactacatctacttcgccgacaccaccagcttcctgatcggcagacagaagatcgacggcaccgagagagagaccatcctgaaggacgacctggacaacgtggagggcatcgccgtggactggatcggcaacaacctgtactggaccaacgacggccacagaaagaccatcaacgtggccagactggagaaggccagccagagcagaaagaccctgctggagggcgagatgagccaccccagaggcatcgtggtggaccccgtgaacggctggatgtactggaccgactgggaggaggacgagatcgacgacagcgtgggcagaatcgagaaggcctggatggacggcttcaacagacagatcttcgtgaccagcaagatgctgtggcccaacggcctgaccctggacttccacaccaacaccctgtactggtgcgacgcctactacgaccacatcgagaaggtgttcctgaacggcacccacagaaagatcgtgtacagcggcagagagctgaaccaccccttcggcctgagccaccacggcaactacgtgttctggaccgactacatgaacggcagcatcttccagctggacctgatcaccagcgaggtgaccctgctgagacacgagagaccccccctgttcggcctgcagatctacgaccccagaaagcagcagggcgacaacatgtgcagagtgaacaacggcggctgcagcaccctgtgcctggccatccccggcggcagagtgtgcgcctgcgccgacaaccagctgctggacgagaacggcaccacctgcaccttcaaccccggcgaggccctgccccacatctgcaaggccggcgagttcagatgcaagaacagacactgcatccaggccagatggaagtgcgacggcgacgacgactgcctggacggcagcgacgaggacagcgtgaactgcttcaaccacagctgccccgacgaccagttcaagtgccagaacaacagatgcatccccaagagatggctgtgcgacggcgccaacgactgcggcagcaacgaggacgagagcaaccagacctgcaccgccagaacctgccaggtggaccagttcagctgcggcaacggcagatgcatccccagagcctggctgtgcgacagagaggacgactgcggcgaccagaccgacgagatggccagctgcgagttccccacctgcgagcccctgacccagttcgtgtgcaagagcggcagatgcatcagcagcaagtggcactgcgacagcgacgacgactgcggcgacggcagcgacgaggtgggctgcgtgcacagctgcttcgacaaccagttcagatgcagcagcggcagatgcatccccggccactgggcctgcgacggcgacaacgactgcggcgacttcagcgacgaggcccagatcaactgcaccaaggaggagatccacagccccgccggctgcaacggcaacgagttccagtgccaccccgacggcaactgcgtgcccgacctgtggagatgcgacggcgagaaggactgcgaggacggcagcgacgagaagggctgcaacggcaccatcagactgtgcgaccacaagaccaagttcagctgctggagcaccggcagatgcatcaacaaggcctgggtgtgcgacggcgacatcgactgcgaggaccagagcgacgaggacgactgcgacagcttcctgtgcggcccccccaagcacccctgcgccaacgacaccagcgtgtgcctgcagcccgagaagctgtgcaacggcaagaaggactgccccgacggcagcgacgagggctacctgtgcgacgagtgcagcctgaacaacggcggctgcagcaaccactgcagcgtggtgcccggcagaggcatcgtgtgcagctgccccgagggcctgcagctgaacaaggacaacaagacctgcgagatcgtggactactgcagcaaccacctgaagtgcagccaggtgtgcgagcagcacaagcacaccgtgaagtgcagctgctacgagggctggaagctggacgtggacggcgagagctgcaccagcgtggaccccttcgaggccttcatcatcttcagcatcagacacgagatcagaagaatcgacctgcacaagagagactacagcctgctggtgcccggcctgagaaacaccatcgccctggacttccacttcaaccagagcctgctgtactggaccgacgtggtggaggacagaatctacagaggcaagctgagcgagagcggcggcgtgagcgccatcgaggtggtggtggagcacggcctggccacccccgagggcctgaccgtggactggatcgccggcaacatctactggatcgacagcaacctggaccagatcgaggtggccaagctggacggcagcctgagaaccaccctgatcgccggcgccatggagcaccccagagccatcgccctggaccccagatacggcatcctgttctggaccgactgggacgccaacttccccagaatcgagagcgccagcatgagcggcgccggcagaaagaccatctacaaggacatgaagaccggcgcctggcccaacggcctgaccgtggaccacttcgagaagagaatcgtgtggaccgacgccagaagcgacgccatctacagcgccctgtacgacggcaccaacatgatcgagatcatcagaggccacgagtacctgagccaccccttcgccgtgagcctgtacggcagcgaggtgtactggaccgactggagaaccaacaccctgagcaaggccaacaagtggaccggccagaacgtgagcgtgatccagaagaccagcgcccagcccttcgacctgcagatctaccaccccagcagacagccccaggcccccaacccctgcgccgccaacgacggcaagggcccctgcagccacatgtgcctgatcaaccacaacagaagcgccgcctgcgcctgcccccacctgatgaagctgagcagcgacaagaagacctgctacgagatgaagaagttcctgctgtacgccagaagaagcgagatcagaggcgtggacatcgacaacccctacttcaacttcatcaccgccttcaccgtgcccgacatcgacgacgtgaccgtgatcgacttcgacgccagcgaggagagactgtactggaccgacatcaagacccagaccatcaagagagccttcatcaacggcaccggcctggagaccgtgatcagcagagacatccagagcatcagaggcctggccgtggactgggtgagcagaaacctgtactggatcagcagcgagttcgacgagacccagatcaacgtggccagactggacggcagcctgaagaccagcatcatccacggcatcgacaagccccagtgcctggccgcccaccccgtgagaggcaagctgtactggaccgacggcaacaccatcaacatggccaacatggacggcagcaacagcaagatcctgttccagaaccagaaggagcccgtgggcctgagcatcgactacgtggagaacaagctgtactggatcagcagcggcaacggcaccatcaacagatgcaacctggacggcggcaacctggaggtgatcgagagcatgaaggaggagctgaccaaggccaccgccctgaccatcatggacaagaagctgtggtgggccgaccagaacctggcccagctgggcacctgcagcaagagagacggcagaaaccccaccatcctgagaaacaagaccagcggcgtggtgcacatgaaggtgtacgacaaggaggcccagcagggcagcaacagctgccagctgaacaacggcggctgcagccagctgtgcctgcccaccagcgagaccaccagaacctgcatgtgcaccgtgggctactacctgcagaagaacagaatgagctgccagggcatcgagagcttcctgatgtacagcgtgcacgagggcatcagaggcatccccctggagcccagcgacaagatggacgccctgatgcccatcagcggcaccagcttcgccgtgggcatcgacttccacgccgagaacgacaccatctactggaccgacatgggcttcaacaagatcagcagagccaagagagaccagacctggaaggaggacatcatcaccaacggcctgggcagagtggagggcatcgccgtggactggatcgccggcaacatctactggaccgaccacggcttcaacctgatcgaggtggccagactgaacggcagcttcagatacgtgatcatcagccagggcctggaccagcccagaagcatcgccgtgcaccccgagaagggcctgctgttctggaccgagtggggccagatgccctgcatcggcaaggccagactggacggcagcgagaaggtggtgctggtgagcatgggcatcgcctggcccaacggcatcagcatcgactacgaggagaacaagctgtactggtgcgacgccagaaccgacaagatcgagagaatcgacctggagaccggcggcaacagagagatggtgctgagcggcagcaacgtggacatgttcagcgtggccgtgttcggcgcctacatctactggagcgacagagcccacgccaacggcagcgtgagaagaggccacaagaacgacgccaccgagaccatcaccatgagaaccggcctgggcgtgaacctgaaggaggtgaagatcttcaacagagtgagagagaagggcaccaacgtgtgcgccagagacaacggcggctgcaagcagctgtgcctgtacagaggcaacagcagaagaacctgcgcctgcgcccacggctacctggccgaggacggcgtgacctgcctgagacacgagggctacctgctgtacagcggcagaaccatcctgaagagcatccacctgagcgacgagaccaacctgaacagccccatcagaccctacgagaaccccagatacttcaagaacgtgatcgccctggccttcgactacaaccagagaagaaagggcaccaacagaatcttctacagcgacgcccacttcggcaacatccagctgatcaaggacaactgggaggacagacaggtgatcgtggagaacgtgggcagcgtggagggcctggcctaccacagagcctgggacaccctgtactggaccagcagcaccaccagcagcatcaccagacacaccgtggaccagaccagacccggcgccttcgacagagaggccgtgatcaccatgagcgaggacgaccacccccacgtgctggccctggacgagtgccagaacctgatgttctggaccaactggaacgagcagcaccccagcatcatgagaagcaccctgaccggcaagaacgcccaggtggtggtgagcaccgacatcctgacccccaacggcctgaccatcgactacagagccgagaagctgtacttcagcgacggcagcctgggcaagatcgagagatgcgagtacgacggcagccagagacacgtgatcgtgaagagcggccccggcaccttcctgagcctggccgtgtacgacaactacatcttctggagcgactggggcagaagagccatcctgagaagcaacaagtacaccggcggcgacaccaagatcctgagaagcgacatcccccaccagcccatgggcatcatcgccgtggccaacgacaccaacagctgcgagctgagcccctgcgccctgctgaacggcggctgccacgacctgtgcctgctgacccccaacggcagagtgaactgcagctgcagaggcgacagaatcctgctggaggacaacagatgcgtgaccaagaacagcagctgcaacgcctacagcgagttcgagtgcggcaacggcgagtgcatcgactaccagctgacctgcgacggcatcccccactgcaaggacaagagcgacgagaagctgctgtactgcgagaacagaagctgcagaagaggcttcaagccctgctacaacagaagatgcatcccccacggcaagctgtgcgacggcgagaacgactgcggcgacaacagcgacgagctggactgcaaggtgagcacctgcgccaccgtggagttcagatgcgccgacggcacctgcatccccagaagcgccagatgcaaccagaacatcgactgcgccgacgccagcgacgagaagaactgcaacaacaccgactgcacccacttctacaagctgggcgtgaagaccaccggcttcatcagatgcaacagcaccagcctgtgcgtgctgcccacctggatctgcgacggcagcaacgactgcggcgactacagcgacgagctgaagtgccccgtgcagaacaagcacaagtgcgaggagaactacttcagctgccccagcggcagatgcatcctgaacacctggatctgcgacggccagaaggactgcgaggacggcagagacgagttccactgcgacagcagctgcagctggaaccagttcgcctgcagcgcccagaagtgcatcagcaagcactggatctgcgacggcgaggacgactgcggcgacggcctggacgagagcgacagcatctgcggcgccatcacctgcgccgccgacatgttcagctgccagggcagcagagcctgcgtgcccagacactggctgtgcgacggcgagagagactgccccgacggcagcgacgagctgagcaccgccggctgcgcccccaacaacacctgcgacgagaacgccttcatgtgccacaacaaggtgtgcatccccaagcagttcgtgtgcgaccacgacgacgactgcggcgacggcagcgacgagagcccccagtgcggctacagacagtgcggcaccgaggagttcagctgcgccgacggcagatgcctgctgaacacccagtggcagtgcgacggcgacttcgactgccccgaccacagcgacgaggcccccctgaaccccaagtgcaagagcgccgagcagagctgcaacagcagcttcttcatgtgcaagaacggcagatgcatccccagcggcggcctgtgcgacaacaaggacgactgcggcgacggcagcgacgagagaaactgccacatcaacgagtgcctgagcaagaaggtgagcggctgcagccaggactgccaggacctgcccgtgagctacaagtgcaagtgctggcccggcttccagctgaaggacgacggcaagacctgcgtggacatcgacgagtgcagcagcggcttcccctgcagccagcagtgcatcaacacctacggcacctacaagtgcctgtgcaccgacggctacgagatccagcccgacaaccccaacggctgcaagagcctgagcgacgaggagcccttcctgatcctggccgaccaccacgagatcagaaagatcagcaccgacggcagcaactacaccctgctgaagcagggcctgaacaacgtgatcgccatcgacttcgactacagagaggagttcatctactggatcgacagcagcagacccaacggcagcagaatcaacagaatgtgcctgaacggcagcgacatcaaggtggtgcacaacaccgccgtgcccaacgccctggccgtggactggatcggcaagaacctgtactggagcgacaccgagaagagaatcatcgaggtgagcaagctgaacggcctgtaccccaccatcctggtgagcaagagactgaagttccccagagacctgagcctggacccccaggccggctacctgtactggatcgactgctgcgagtacccccacatcggcagagtgggcatggacggcaccaaccagagcgtggtgatcgagaccaagatcagcagacccatggccctgaccatcgactacgtgaacagaagactgtactgggccgacgagaaccacatcgagttcagcaacatggacggcagccacagacacaaggtgcccaaccaggacatccccggcgtgatcgccctgaccctgttcgaggactacatctactggaccgacggcaagaccaagagcctgagcagagcccacaagaccagcggcgccgacagactgagcctgatctacagctggcacgccatcaccgacatccaggtgtaccacagctacagacagcccgacgtgagcaagcacctgtgcatgatcaacaacggcggctgcagccacctgtgcctgctggcccccggcaagacccacacctgcgcctgccccaccaacttctacctggccgccgacaacagaacctgcctgagcaactgcaccgccagccagttcagatgcaagaccgacaagtgcatccccttctggtggaagtgcgacaccgtggacgactgcggcgacggcagcgacgagcccgacgactgccccgagttcagatgccagcccggcagattccagtgcggcaccggcctgtgcgccctgcccgccttcatctgcgacggcgagaacgactgcggcgacaacagcgacgagctgaactgcgacacccacgtgtgcctgagcggccagttcaagtgcaccaagaaccagaagtgcatccccgtgaacctgagatgcaacggccaggacgactgcggcgacgaggaggacgagagagactgccccgagaacagctgcagccccgactacttccagtgcaagaccaccaagcactgcatcagcaagctgtgggtgtgcgacgaggaccccgactgcgccgacgccagcgacgaggccaactgcgacaagaagacctgcggcccccacgagttccagtgcaagaacaacaactgcatccccgaccactggagatgcgacagccagaacgactgcagcgacaacagcgacgaggagaactgcaagccccagacctgcaccctgaaggacttcctgtgcgccaacggcgactgcgtgagcagcagattctggtgcgacggcgacttcgactgcgccgacggcagcgacgagagaaactgcgagaccagctgcagcaaggaccagttcagatgcagcaacggccagtgcatccccgccaagtggaagtgcgacggccacgaggactgcaagtacggcgaggacgagaagagctgcgagcccgccagccccacctgcagcagcagagagtacatctgcgccagcgacggctgcatcagcgccagcctgaagtgcaacggcgagtacgactgcgccgacggcagcgacgagatggactgcgtgaccgagtgcaaggaggaccagttcagatgcaagaacaaggcccactgcatccccatcagatggctgtgcgacggcatccacgactgcgtggacggcagcgacgaggagaactgcgagagaggcggcaacatctgcagagccgacgagttcctgtgcaacaacagcctgtgcaagctgcacttctgggtgtgcgacggcgaggacgactgcggcgacaacagcgacgaggcccccgacatgtgcgtgaagttcctgtgccccagcaccagaccccacagatgcagaaacaacagaatctgcctgcagagcgagcagatgtgcaacggcatcgacgagtgcggcgacaacagcgacgaggaccactgcggcggcaagctgacctacaaggccagaccctgcaagaaggacgagttcgcctgcagcaacaagaagtgcatccccatggacctgcagtgcgacagactggacgactgcggcgacggcagcgacgagcagggctgcagaatcgcccccaccgagtacacctgcgaggacaacgtgaacccctgcggcgacgacgcctactgcaaccagatcaagaccagcgtgttctgcagatgcaagcccggcttccagagaaacatgaagaacagacagtgcgaggacctgaacgagtgcctggtgttcggcacctgcagccaccagtgcatcaacgtggagggcagctacaagtgcgtgtgcgaccagaacttccaggagagaaacaacacctgcatcgccgagggcagcgaggaccaggtgctgtacatcgccaacgacaccgacatcctgggcttcatctaccccttcaactacagcggcgaccaccagcagatcagccacatcgagcacaacagcagaatcaccggcatggacgtgtactaccagagagacatgatcatctggagcacccagttcaaccccggcggcatcttctacaagagaatccacggcagagagaagagacaggccaacagcggcctgatctgccccgagttcaagagacccagagacatcgccgtggactgggtggccggcaacatctactggaccgaccacagcagaatgcactggttcagctactacaccacccactggaccagcctgagatacagcatcaacgtgggccagctgaacggccccaactgcaccagactgctgaccaacatggccggcgagccctacgccatcgccgtgaaccccaagagaggcatgatgtactggaccgtggtgggcgaccacagccacatcgaggaggccgccatggacggcaccctgagaagaatcctggtgcagaagaacctgcagagacccaccggcctggccgtggactacttcagcgagagaatctactgggccgacttcgagctgagcatcatcggcagcgtgctgtacgacggcagcaacagcgtggtgagcgtgagcagcaagcagggcctgctgcacccccacagaatcgacatcttcgaggactacatctacggcgccggccccaagaacggcgtgttcagagtgcagaagttcggccacggcagcgtggagtacctggccctgaacatcgacaagaccaagggcgtgctgatcagccacagatacaagcagctggacctgcccaacccctgcctggacctggcctgcgagttcctgtgcctgctgaaccccagcggcgccacctgcgtgtgccccgagggcaagtacctgatcaacggcacctgcaacgacgacagcctgctggacgacagctgcaagctgacctgcgagaacggcggcagatgcatcctgaacgagaagggcgacctgagatgccactgctggcccagctacagcggcgagagatgcgaggtgaaccactgcagcaactactgccagaacggcggcacctgcgtgcccagcgtgctgggcagacccacctgcagctgcgccctgggcttcaccggccccaactgcggcaagaccgtgtgcgaggacttctgccagaacggcggcacctgcatcgtgaccgccggcaaccagccctactgccactgccagcccgagtacaccggcgacagatgccagtactacgtgtgccaccactactgcgtgaacagcgagagctgcaccatcggcgacgacggcagcgtggagtgcgtgtgccccaccagatacgagggccccaagtgcgaggtggacaagtgcgtgagatgccacggcggccactgcatcatcaacaaggacagcgaggacatcttctgcaactgcaccaacggcaagatcgccagcagctgccagctgtgcgacggctactgctacaacggcggcacctgccagctggaccccgagaccaacgtgcccgtgtgcctgtgcagcaccaactggagcggcacccagtgcgagagacccgcccccaagagcagcaagagcgaccacatcagcaccagaagcatcgccatcatcgtgcccctggtgctgctggtgaccctgatcaccaccctggtgatcggcctggtgctgtgcaagagaaagagaagaaccaagaccatcagaagacagcccatcatcaacggcggcatcaacgtggagatcggcaaccccagctacaacatgtacgaggtggaccacgaccacaacgacggcggcctgctggaccccggcttcatgatcgaccccaccaaggccagatacatcggcggcggccccagcgccttcaagctgccccacaccgccccccccatctacctgaacagcgacctgaagggccccctgaccgccggccccaccaactacagcaaccccgtgtacgccaagctgtacatggacggccagaactgcagaaacagcctgggcagcgtggacgagagaaaggagctgctgcccaagaagatcgagatcggcatcagagagaccgtggcctag

SEQ ID NO: 11336 - DNA, 843 bp, synthetic construct
  misc_feature 1..843: note = Description of Artificial Sequence: Synthetic coding sequence
  source 1..843: mol_type = other DNA
atgtgccccccccaggcccaggccgaggtgggccccaccatgaccgagaaggccgagatggtgtgcgcccccagccccgcccccgcccccccccccaagcccgccagccccggccccccccaggtggaggaggtgggccacagaggcggcagcagcccccccagactgccccccggcgtgcccgtgatcagcctgggccacagcagaccccccggcgtggccatgcccaccaccgagctgggcaccctgagaccccccctgctgcagctgagcaccctgggcaccgccccccccaccctggccctgcactaccacccccaccccttcctgaacagcgtgtacatcggccccgccggccccttcagcatcttccccagcagcagactgaagagaagacccagccactgcgagctggacctggccgagggccaccagccccagaaggtggccagaagagtgttcaccaacagcagagagagatggagacagcagaacgtgaacggcgccttcgccgagctgagaaagctgctgcccacccacccccccgacagaaagctgagcaagaacgaggtgctgagactggccatgaagtacatcggcttcctggtgagactgctgagagaccaggccgccgccctggccgccggccccaccccccccggccccagaaagagacccgtgcacagagtgcccgacgacggcgccagaagaggcagcggcagaagagccgaggccgccgccagaagccagcccgccccccccgccgaccccgacggcagccccggcggcgccgccagacccatcaagatggagcagaccgccctgagccccgaggtgagatag

SEQ ID NO: 11337 - DNA, 1620 bp, synthetic construct
  misc_feature 1..1620: note = Description of Artificial Sequence: Synthetic coding sequence
  source 1..1620: mol_type = other DNA
atgggctgcggctgcagcagccaccccgaggacgactggatggagaacatcgacgtgtgcgagaactgccactaccccatcgtgcccctggacggcaagggcaccctgctgatcagaaacggcagcgaggtgagagaccccctggtgacctacgagggcagcaacccccccgccagccccctgcaggacaacctggtgatcgccctgcacagctacgagcccagccacgacggcgacctgggcttcgagaagggcgagcagctgagaatcctggagcagagcggcgagtggtggaaggcccagagcctgaccaccggccaggagggcttcatccccttcaacttcgtggccaaggccaacagcctggagcccgagccctggttcttcaagaacctgagcagaaaggacgccgagagacagctgctggcccccggcaacacccacggcagcttcctgatcagagagagcgagagcaccgccggcagcttcagcctgagcgtgagagacttcgaccagaaccagggcgaggtggtgaagcactacaagatcagaaacctggacaacggcggcttctacatcagccccagaatcaccttccccggcctgcacgagctggtgagacactacaccaacgccagcgacggcctgtgcaccagactgagcagaccctgccagacccagaagccccagaagccctggtgggaggacgagtgggaggtgcccagagagaccctgaagctggtggagagactgggcgccggccagttcggcgaggtgtggatgggctactacaacggccacaccaaggtggccgtgaagagcctgaagcagggcagcatgagccccgacgccttcctggccgaggccaacctgatgaagcagctgcagcaccagagactggtgagactgtacgccgtggtgacccaggagcccatctacatcatcaccgagtacatggagaacgacaccctgctggacagccagctggaggagaagggcctgggcgccagcccctggggcaacctgggccagcagctgctgctgctgcccaccggcagcctggtggacttcctgaagacccccagcggcatcaagctgaccatcaacaagctgctggacatggccgcccagatcgccgagggcatggccttcatcgaggagagaaactacatccacagagacctgagagccgccaacatcctggtgagcgacaccctgagctgcaagatcgccgacttcggcctggccagactgatcgaggacaacgagtacaccgccagagagggcgccaagttccccatcaagtggaccgcccccgaggccatcaactacggcaccttcaccatcaagagcgacgtgtggagcttcggcatcctgctgaccgagatcgtgacccacggcagaatcccctaccccggcatgaccaaccccgaggtgatccagaacctggagagaggctacagaatggtgagacccgacaactgccccgaggagctgtaccagctgatgagactgtgctggaaggagagacccgaggacagacccaccttcgactacctgagaagcgtgctggaggacttcttcaccgccaccgagggccagtaccagccccagccctag

SEQ ID NO: 11338 - DNA, 1530 bp, synthetic construct
  misc_feature 1..1530: note = Description of Artificial Sequence: Synthetic coding sequence
  source 1..1530: mol_type = other DNA
atgggctgcggctgcagcagccaccccgaggacgactggatggagaacatcgacgtgtgcgagaactgccactaccccatcgtgcccctggacggcaagggcaccctgctgatcagaaacggcagcgaggtgagagaccccctggtgacctacgagggcagcaacccccccgccagccccctgcaggacaacctggtgatcgccctgcacagctacgagcccagccacgacggcgacctgggcttcgagaagggcgagcagctgagaatcctggagcagagcggcgagtggtggaaggcccagagcctgaccaccggccaggagggcttcatccccttcaacttcgtggccaaggccaacagcctggagcccgagccctggttcttcaagaacctgagcagaaaggacgccgagagacagctgctggcccccggcaacacccacggcagcttcctgatcagagagagcgagagcaccgccggcagcttcagcctgagcgtgagagacttcgaccagaaccagggcgaggtggtgaagcactacaagatcagaaacctggacaacggcggcttctacatcagccccagaatcaccttccccggcctgcacgagctggtgagacactacaccaacgccagcgacggcctgtgcaccagactgagcagaccctgccagacccagaagccccagaagccctggtgggaggacgagtgggaggtgcccagagagaccctgaagctggtggagagactgggcgccggccagttcggcgaggtgtggatgggctactacaacggccacaccaaggtggccgtgaagagcctgaagcagggcagcatgagccccgacgccttcctggccgaggccaacctgatgaagcagctgcagcaccagagactggtgagactgtacgccgtggtgacccaggagcccatctacatcatcaccgagtacatggagaacggcagcctggtggacttcctgaagacccccagcggcatcaagctgaccatcaacaagctgctggacatggccgcccagatcgccgagggcatggccttcatcgaggagagaaactacatccacagagacctgagagccgccaacatcctggtgagcgacaccctgagctgcaagatcgccgacttcggcctggccagactgatcgaggacaacgagtacaccgccagagagggcgccaagttccccatcaagtggaccgcccccgaggccatcaactacggcaccttcaccatcaagagcgacgtgtggagcttcggcatcctgctgaccgagatcgtgacccacggcagaatcccctaccccggcatgaccaaccccgaggtgatccagaacctggagagaggctacagaatggtgagacccgacaactgccccgaggagctgtaccagctgatgagactgtgctggaaggagagacccgaggacagacccaccttcgactacctgagaagcgtgctggaggacttcttcaccgccaccgagggccagtaccagccccagccctag

SEQ ID NO: 11339 - DNA, 1551 bp, synthetic construct
  misc_feature 1..1551: note = Description of Artificial Sequence: Synthetic coding sequence
  source 1..1551: mol_type = other DNA
atgggctgcggctgcagcagccaccccgaggacgactggatggagaacatcgacgtgtgcgagaactgccactaccccatcgtgcccctggacggcaagggcaccctgctgatcagaaacggcagcgaggtgagagaccccctggtgacctacgagggcagcaacccccccgccagccccctgcagggcgaccccagacagcagggcctgaaggacaaggcctgcggcagcctggccgtgggcttccacctgagccccacctacttcctgcccggcctggccttcctggtgccccaccccgtgacccccggcttcctgcccatccccgccagattcagcctgatgcccctggtgttcaccgacaacctggtgatcgccctgcacagctacgagcccagccacgacggcgacctgggcttcgagaagggcgagcagctgagaatcctggagcagagcggcgagtggtggaaggcccagagcctgaccaccggccaggagggcttcatccccttcaacttcgtggccaaggccaacagcctggagcccgagccctggttcttcaagaacctgagcagaaaggacgccgagagacagctgctggcccccggcaacacccacggcagcttcctgatcagagagagcgagagcaccgccggcagcttcagcctgagcgtgagagacttcgaccagaaccagggcgaggtggtgaagcactacaagatcagaaacctggacaacggcggcttctacatcagccccagaatcaccttccccggcctgcacgagctggtgagacactacaccagatactacaacggccacaccaaggtggccgtgaagagcctgaagcagggcagcatgagccccgacgccttcctggccgaggccaacctgatgaagcagctgcagcaccagagactggtgagactgtacgccgtggtgacccaggagcccatctacatcatcaccgagtacatggagaacggcagcctggtggacttcctgaagacccccagcggcatcaagctgaccatcaacaagctgctggacatggccgcccagatcgccgagggcatggccttcatcgaggagagaaactacatccacagagacctgagagccgccaacatcctggtgagcgacaccctgagctgcaagatcgccgacttcggcctggccagactgatcgaggacaacgagtacaccgccagagagggcgccaagttccccatcaagtggaccgcccccgaggccatcaactacggcaccttcaccatcaagagcgacgtgtggagcttcggcatcctgctgaccgagatcgtgacccacggcagaatcccctaccccggcatgaccaaccccgaggtgatccagaacctggagagaggctacagaatggtgagacccgacaactgccccgaggagctgtaccagctgatgagactgtgctggaaggagagacccgaggacagacccaccttcgactacctgagaagcgtgctggaggacttcttcaccgccaccgagggccagtaccagccccagccctag

SEQ ID NO: 11340 - DNA, 750 bp, synthetic construct
  misc_feature 1..750: note = Description of Artificial Sequence: Synthetic coding sequence
  source 1..750: mol_type = other DNA
atgggctactacaacggccacaccaaggtggccgtgaagagcctgaagcagggcagcatgagccccgacgccttcctggccgaggccaacctgatgaagcagctgcagcaccagagactggtgagactgtacgccgtggtgacccaggagcccatctacatcatcaccgagtacatggagaacggcagcctggtggacttcctgaagacccccagcggcatcaagctgaccatcaacaagctgctggacatggccgcccagatcgccgagggcatggccttcatcgaggagagaaactacatccacagagacctgagagccgccaacatcctggtgagcgacaccctgagctgcaagatcgccgacttcggcctggccagactgatcgaggacaacgagtacaccgccagagagggcgccaagttccccatcaagtggaccgcccccgaggccatcaactacggcaccttcaccatcaagagcgacgtgtggagcttcggcatcctgctgaccgagatcgtgacccacggcagaatcccctaccccggcatgaccaaccccgaggtgatccagaacctggagagaggctacagaatggtgagacccgacaactgccccgaggagctgtaccagctgatgagactgtgctggaaggagagacccgaggacagacccaccttcgactacctgagaagcgtgctggaggacttcttcaccgccaccgagggccagtaccagccccagccctag

SEQ ID NO: 11341 - DNA, 1611 bp, synthetic construct
  misc_feature 1..1611: note = Description of Artificial Sequence: Synthetic coding sequence
  source 1..1611: mol_type = other DNA
atgggcatccccggcagccacaacctgagatacttctggaacttccccggccagggccccatcatcagcgacgtgggcggcgccgacctgggcggcgcccccagcgcccccagcagcatccccagcggcaccatgggctgcggctgcagcagccaccccgaggacgactggatggagaacatcgacgtgtgcgagaactgccactaccccatcgtgcccctggacggcaagggcaccctgctgatcagaaacggcagcgaggtgagagaccccctggtgacctacgagggcagcaacccccccgccagccccctgcaggacaacctggtgatcgccctgcacagctacgagcccagccacgacggcgacctgggcttcgagaagggcgagcagctgagaatcctggagcagagcggcgagtggtggaaggcccagagcctgaccaccggccaggagggcttcatccccttcaacttcgtggccaaggccaacagcctggagcccgagccctggttcttcaagaacctgagcagaaaggacgccgagagacagctgctggcccccggcaacacccacggcagcttcctgatcagagagagcgagagcaccgccggcagcttcagcctgagcgtgagagacttcgaccagaaccagggcgaggtggtgaagcactacaagatcagaaacctggacaacggcggcttctacatcagccccagaatcaccttccccggcctgcacgagctggtgagacactacaccaacgccagcgacggcctgtgcaccagactgagcagaccctgccagacccagaagccccagaagccctggtgggaggacgagtgggaggtgcccagagagaccctgaagctggtggagagactgggcgccggccagttcggcgaggtgtggatgggctactacaacggccacaccaaggtggccgtgaagagcctgaagcagggcagcatgagccccgacgccttcctggccgaggccaacctgatgaagcagctgcagcaccagagactggtgagactgtacgccgtggtgacccaggagcccatctacatcatcaccgagtacatggagaacggcagcctggtggacttcctgaagacccccagcggcatcaagctgaccatcaacaagctgctggacatggccgcccagatcgccgagggcatggccttcatcgaggagagaaactacatccacagagacctgagagccgccaacatcctggtgagcgacaccctgagctgcaagatcgccgacttcggcctggccagactgatcgaggacaacgagtacaccgccagagagggcgccaagttccccatcaagtggaccgcccccgaggccatcaactacggcaccttcacccacggcagaatcccctaccccggcatgaccaaccccgaggtgatccagaacctggagagaggctacagaatggtgagacccgacaactgccccgaggagctgtaccagctgatgagactgtgctggaaggagagacccgaggacagacccaccttcgactacctgagaagcgtgctggaggacttcttcaccgccaccgagggccagtaccagccccagccctag

SEQ ID NO: 11342 - DNA, 1200 bp, synthetic construct
  misc_feature 1..1200: note = Description of Artificial Sequence: Synthetic coding sequence
  source 1..1200: mol_type = other DNA
atgccccagctgagcggcggcggcggcggcggcggcggcgaccccgagctgtgcgccaccgacgagatgatccccttcaaggacgagggcgacccccagaaggagaagatcttcgccgagatcagccaccccgaggaggagggcgacctggccgacatcaagagcagcctggtgaacgagagcgagatcatccccgccagcaacggccacgaggtggccagacaggcccagaccagccaggagccctaccacgacaaggccagagagcaccccgacgacggcaagcaccccgacggcggcctgtacaacaagggccccagctacagcagctacagcggctacatcatgatgcccaacatgaacaacgacccctacatgagcaacggcagcctgagcccccccatccccagaaccagcaacaaggtgcccgtggtgcagcccagccacgccgtgcaccccctgacccccctgatcacctacagcgacgagcacttcagccccggcagccaccccagccacatccccagcgacgtgaacagcaagcagggcatgagcagacacccccccgcccccgacatccccaccttctaccccctgagccccggcggcgtgggccagatcaccccccccctgggctggcagggccagcccgtgtaccccatcaccggcggcttcagacagccctaccccagcagcctgagcgtggacaccagcatgagcagattcagccaccacatgatccccggcccccccggcccccacaccaccggcatcccccaccccgccatcgtgaccccccaggtgaagcaggagcacccccacaccgacagcgacctgatgcacgtgaagccccagcacgagcagagaaaggagcaggagcccaagagaccccacatcaagaagcccctgaacgccttcatgctgtacatgaaggagatgagagccaacgtggtggccgagtgcaccctgaaggagagcgccgccatcaaccagatcctgggcagaagatggcacgccctgagcagagaggagcaggccaagtactacgagctggccagaaaggagagacagctgcacatgcagctgtaccccggctggagcgccagagacaactacggcaagaagaagaagagaaagagagagaagctgcaggagagcgccagcggcaccggccccagaatgaccgccgcctacatctag

SEQ ID NO: 11343 - DNA, 1161 bp, synthetic construct
  misc_feature 1..1161: note = Description of Artificial Sequence: Synthetic coding sequence
  source 1..1161: mol_type = other DNA
atgccccagctgagcggcggcggcggcggcggcggcggcgaccccgagctgtgcgccaccgacgagatgatccccttcaaggacgagggcgacccccagaaggagaagatcttcgccgagatcagccaccccgaggaggagggcgacctggccgacatcaagagcagcctggtgaacgagagcgagatcatccccgccagcaacggccacgaggtggccagacaggcccagaccagccaggagccctaccacgacaaggccagagagcaccccgacgacggcaagcaccccgacggcggcctgtacaacaagggccccagctacagcagctacagcggctacatcatgatgcccaacatgaacaacgacccctacatgagcaacggcagcctgagcccccccatccccagaaccagcaacaaggtgcccgtggtgcagcccagccacgccgtgcaccccctgacccccctgatcacctacagcgacgagcacttcagccccggcagccaccccagccacatccccagcgacgtgaacagcaagcagggcatgagcagacacccccccgcccccgacatccccaccttctaccccctgagccccggcggcgtgggccagatcaccccccccctgggctggttcagccaccacatgatccccggcccccccggcccccacaccaccggcatcccccaccccgccatcgtgaccccccaggtgaagcaggagcacccccacaccgacagcgacctgatgcacgtgaagccccagcacgagcagagaaaggagcaggagcccaagagaccccacatcaagaagcccctgaacgccttcatgctgtacatgaaggagatgagagccaacgtggtggccgagtgcaccctgaaggagagcgccgccatcaaccagatcctgggcagaagatggcacgccctgagcagagaggagcaggccaagtactacgagctggccagaaaggagagacagctgcacatgcagctgtaccccggctggagcgccagagacaactacggcaagaagaagaagagaaagagagagaagctgcaggagagcgccagcggcggcaagagaagcagcttccccacctgcaaggccaaggccgccacccccggccccctgctggagatggaggcctgctag

SEQ ID NO: 11344 - DNA, 1116 bp, synthetic construct
  misc_feature 1..1116: note = Description of Artificial Sequence: Synthetic coding sequence
  source 1..1116: mol_type = other DNA
atgccccagctgagcggcggcggcggcggcggcggcggcgaccccgagctgtgcgccaccgacgagatgatccccttcaaggacgagggcgacccccagaaggagaagatcttcgccgagatcagccaccccgaggaggagggcgacctggccgacatcaagagcagcctggtgaacgagagcgagatcatccccgccagcaacggccacgaggtggccagacaggcccagaccagccaggagccctaccacgacaaggccagagagcaccccgacgacggcaagcaccccgacggcggcctgtacaacaagggccccagctacagcagctacagcggctacatcatgatgcccaacatgaacaacgacccctacatgagcaacggcagcctgagcccccccatccccagaaccagcaacaaggtgcccgtggtgcagcccagccacgccgtgcaccccctgacccccctgatcacctacagcgacgagcacttcagccccggcagccaccccagccacatccccagcgacgtgaacagcaagcagggcatgagcagacacccccccgcccccgacatccccaccttctaccccctgagccccggcggcgtgggccagatcaccccccccctgggctggttcagccaccacatgatccccggcccccccggcccccacaccaccggcatcccccaccccgccatcgtgaccccccaggtgaagcaggagcacccccacaccgacagcgacctgatgcacgtgaagccccagcacgagcagagaaaggagcaggagcccaagagaccccacatcaagaagcccctgaacgccttcatgctgtacatgaaggagatgagagccaacgtggtggccgagtgcaccctgaaggagagcgccgccatcaaccagatcctgggcagaagatggcacgccctgagcagagaggagcaggccaagtactacgagctggccagaaaggagagacagctgcacatgcagctgtaccccggctggagcgccagagacaactacggcaagaagaagaagagaaagagagagaagctgcaggagagcgccagcggcaccggccccagaatgaccgccgcctacatctag

SEQ ID NO: 11345 - DNA, 912 bp, synthetic construct
  misc_feature 1..912: note = Description of Artificial Sequence: Synthetic coding sequence
  source 1..912: mol_type = other DNA
atggccgaggtggccagacaggcccagaccagccaggagccctaccacgacaaggccagagagcaccccgacgacggcaagcaccccgacggcggcctgtacaacaagggccccagctacagcagctacagcggctacatcatgatgcccaacatgaacaacgacccctacatgagcaacggcagcctgagcccccccatccccagaaccagcaacaaggtgcccgtggtgcagcccagccacgccgtgcaccccctgacccccctgatcacctacagcgacgagcacttcagccccggcagccaccccagccacatccccagcgacgtgaacagcaagcagggcatgagcagacacccccccgcccccgacatccccaccttctaccccctgagccccggcggcgtgggccagatcaccccccccctgggctggttcagccaccacatgatccccggcccccccggcccccacaccaccggcatcccccaccccgccatcgtgaccccccaggtgaagcaggagcacccccacaccgacagcgacctgatgcacgtgaagccccagcacgagcagagaaaggagcaggagcccaagagaccccacatcaagaagcccctgaacgccttcatgctgtacatgaaggagatgagagccaacgtggtggccgagtgcaccctgaaggagagcgccgccatcaaccagatcctgggcagaagatggcacgccctgagcagagaggagcaggccaagtactacgagctggccagaaaggagagacagctgcacatgcagctgtaccccggctggagcgccagagacaactacggcaagaagaagaagagaaagagagagaagctgcaggagagcgccagcggcaccggccccagaatgaccgccgcctacatctag

SEQ ID NO: 11346 - DNA, 1500 bp, synthetic construct
  misc_feature 1..1500: note = Description of Artificial Sequence: Synthetic coding sequence
  source 1..1500: mol_type = other DNA
atgaacgacgaccccagcatggaggagaacggcgtggagagagtgtgccccgagagcctgctgcagagcagagagtacagcagcctgcccctgcccagacacaccagcagcaccgacggcaccatcaccagcagcgaccccggcctggagatcctgaacatggccagctgcgacctggacagaaacagcctgtgcaagaaggaggaggacaccagaagcgccagccccaccatcgaggcccagggcaccagccccgcccacgacaacatcgccttccaggacagcaccagcaaggacaagaccatcctgaacctggaggccaaggaggagcccgagaccatcgaggagcacaagaaggagcacgccagcggcgacagcgtggtgagccccctgcccgtgaccaccgtgaagagcgtgaacctgagacagagcgagaacaccagcgccaacgagaaggaggtggaggccgagttcctgagactgagcctgggcttcaagtgcgactggttcaccctggagaagagagtgaagctggaggagagaagcagagacctggccgaggagaacctgaagaaggagatcaccaactgcctgaagctgctggagagcctgacccccctgtgcgaggacgacaaccaggcccaggagatcatcaagaagctggagaagagcatcaagttcctgagccagtgcgccgccagagtggccagcagagccgagatgctgggcgccatcaaccaggagagcagagtgagcaaggccgtggaggtgatgatccagcacgtggagaacctgaagagaatgtacgccaaggagcacgccgagctggaggagctgaagcaggtgctgctgcagaacgagagaagcttcaaccccctggaggacgacgacgactgccagatcaagaagagaagcgccagcctgaacagcaagcccagcagcctgagaagagtgaccatcgccagcctgcccagaaacatcggcaacgccggcatggtggccggcatggagaacaacgacagattcagcagaagaagcagcagctggagaatcctgggcagcaagcagagcgagcacagacccagcctgcccagattcatcagcacctacagctgggccgacgccgaggaggagaagtgcgagctgaagaccaaggacgacagcgagcccagcggcgaggagaccgtggagagaaccagaaagcccagcctgagcgagaagaagaacaaccccagcaagtgggacgtgagcagcgtgtacgacaccatcgccagctgggccaccaacctgaagagcagcatcagaaaggccaacaaggccctgtggctgagcatcgccttcatcgtgctgttcgccgccctgatgagcttcctgaccggccagctgttccagaagagcgtggacgccgcccccacccagcaggaggacagctggaccagcctggagcacatcctgtggcccttcaccagactgagacacaacggccccccccccgtgtag

SEQ ID NO: 11347 - DNA, 1500 bp, synthetic construct; identical to SEQ ID NO: 11346
  misc_feature 1..1500: note = Description of Artificial Sequence: Synthetic coding sequence
  source 1..1500: mol_type = other DNA

SEQ ID NO: 11348 - DNA, 1500 bp, synthetic construct; identical to SEQ ID NO: 11346
  misc_feature 1..1500: note = Description of Artificial Sequence: Synthetic coding sequence
  source 1..1500: mol_type = other DNA

SEQ ID NO: 11349 - DNA, 234 bp, synthetic construct
  misc_feature 1..234: note = Description of Artificial Sequence: Synthetic coding sequence
  source 1..234: mol_type = other DNA
atgaacgacgaccccagcatggaggagaacggcgtggagagagtgtgccccgagagcctgctgcagagcagagagtacagcagcctgcccctgcccagacacaccagcagcaccgacggcaccatcaccagcagcgaccccggcctggagatcctgaacatggccagctgcgacctggacagaaacagcctgtgcaagaaggaggaggacaccagaagcgccagccccacctag

SEQ ID NO: 11350 - DNA, 27 bp, synthetic construct
  misc_feature 1..27: note = Description of Artificial Sequence: Synthetic coding sequence
  source 1..27: mol_type = other DNA
atgaacgacgaccccagcatggagtag

SEQ ID NO: 11351 - DNA, 618 bp, synthetic construct
  misc_feature 1..618: note = Description of Artificial Sequence: Synthetic coding sequence
  source 1..618: mol_type = other DNA
atgaccccccccgagagactgttcctgcccagagtgagaggcaccaccctgcacctgctgctgctgggcctgctgctggtgctgctgcccggcgcccagggcctgcccggcgtgggcctgacccccagcgccgcccagaccgccagacagcaccccaagatgcacctggcccacagcaccctgaagcccgccgcccacctgatcggcgaccccagcaagcagaacagcctgctgtggagagccaacaccgacagagccttcctgcaggacggcttcagcctgagcaacaacagcctgctggtgcccaccagcggcatctacttcgtgtacagccaggtggtgttcagcggcaaggcctacagccccaaggccaccagcagccccctgtacctggcccacgaggtgcagctgttcagcagccagtaccccttccacgtgcccctgctgagcagccagaagatggtgtaccccggcctgcaggagccctggctgcacagcatgtaccacggcgccgccttccagctgacccagggcgaccagctgagcacccacaccgacggcatcccccacctggtgctgagccccagcaccgtgttcttcggcgccttcgccctgtag

SEQ ID NO: 11352 - DNA, 618 bp, synthetic construct; identical to SEQ ID NO: 11351
  misc_feature 1..618: note = Description of Artificial Sequence: Synthetic coding sequence
  source 1..618: mol_type = other DNA

SEQ ID NO: 11353 - DNA, 417 bp, synthetic construct
  misc_feature 1..417: note = Description of Artificial Sequence: Synthetic coding sequence
  source 1..417: mol_type = other DNA
atgaccccccccgagagactgttcctgcccagagtgagaggcaccaccctgcacctgctgctgctgggcctgctgctggtgctgctgcccggcgcccagggcctgcccggcgtgggcctgacccccagcgccgcccagaccgccagacagcaccccaagatgcacctggcccacagcaccctgaagcccgccgcccacctgatcggcgaccccagcaagcagaacagcctgctgtggagagccaacaccgacagagccttcctgcaggacggcttcagcctgagcaacaacagcctgctggtgcccaccagcggcatctacttcgtgtacagccagggcagcagcccccccctgctgtggcccttccagcagctgaagagcagcctgatcaagagccccgagctgagcaagaagtag

SEQ ID NO: 11354 - DNA, 2010 bp, synthetic construct
  misc_feature 1..2010: note = Description of Artificial Sequence: Synthetic coding sequence
  source 1..2010: mol_type = other DNA
atggagggcaacaagctggaggagcaggacagcagccccccccagagcacccccggcctgatgaagggcaacaagagagaggagcagggcctgggccccgagcccgccgccccccagcagcccaccgccgaggaggaggccctgatcgagttccacagaagctacagagagctgttcgagttcttctgcaacaacaccaccatccacggcgccatcagactggtgtgcagccagcacaacagaatgaagaccgccttctgggccgtgctgtggctgtgcaccttcggcatgatgtactggcagttcggcctgctgttcggcgagtacttcagctaccccgtgagcctgaacatcaacctgaacagcgacaagctggtgttccccgccgtgaccatctgcaccctgaacccctacagataccccgagatcaaggaggagctggaggagctggacagaatcaccgagcagaccctgttcgacctgtacaagtacagcagcttcaccaccctggtggccggcagcagaagcagaagagacctgagaggcaccctgccccaccccctgcagagactgagagtgcccccccccccccacggcgccagaagagccagaagcgtggccagcagcctgagagacaacaacccccaggtggactggaaggactggaagatcggcttccagctgtgcaaccagaacaagagcgactgcttctaccagacctacagcagcggcgtggacgccgtgagagagtggtacagattccactacatcaacatcctgagcagactgcccgagaccctgcccagcctggaggaggacaccctgggcaacttcatcttcgcctgcagattcaaccaggtgagctgcaaccaggccaactacagccacttccaccaccccatgtacggcaactgctacaccttcaacgacaagaacaacagcaacctgtggatgagcagcatgcccggcatcaacaacggcctgagcctgatgctgagagccgagcagaacgacttcatccccctgctgagcaccgtgaccggcgccagagtgatggtgcacggccaggacgagcccgccttcatggacgacggcggcttcaacctgagacccggcgtggagaccagcatcagcatgagaaaggagaccctggacagactgggcggcgactacggcgactgcaccaagaacggcagcgacgtgcccgtggagaacctgtaccccagcaagtacacccagcaggtgtgcatccacagctgcttccaggagagcatgatcaaggagtgcggctgcgcctacatcttctaccccagaccccagaacgtggagtactgcgactacagaaagcacagcagctggggctactgctactacaagctgcaggtggacttcagcagcgaccacctgggctgcttcaccaagtgcagaaagccctgcagcgtgaccagctaccagctgagcgccggctacagcagatggcccagcgtgaccagccaggagtgggtgttccagatgctgagcagacagaacaactacaccgtgaacaacaagagaaacggcgtggccaaggtgaacatcttcttcaaggagctgaactacaagaccaacagcgagagccccagcgtgaccatggtgaccctgctgagcaacctgggcagccagtggagcctgtggttcggcagcagcgtgctgagcgtggtggagatggccgagctggtgttcgacctgctggtgatcatgttcctgatgctgctgagaagattcagaagcagatactggagccccggcagaggcggcagaggcgcccaggaggtggccagcaccctggccagcagcccccccagccacttctgcccccaccccatgagcctgagcctgagccagcccggccccgcccccagccccgccctgaccgcccccccccccgcctacgccaccctgggccccagacccagccccggcggcagcgccggcgccagcagcagcacctgccccctgggcggcccctag

SEQ ID NO: 11355 - DNA, 987 bp, synthetic construct
  misc_feature 1..987: note = Description of Artificial Sequence: Synthetic coding sequence
  source 1..987: mol_type = other DNA
atgggcctggaggagatcgccccctgcaccagcaagagaaagacccagtgcagatgccagcccggcatgttctgcgccgcctgggccctggagtgcacccactgcgagctgctgagcgactgcccccccggcaccgaggccgagctgaaggacgaggtgggcaagggcaacaaccactgcgtgccctgcaaggccggccacttccagaacaccagcagccccagcgccagatgccagccccacaccagatgcgagaaccagggcctggtggaggccgcccccggcaccgcccagagcgacaccacctgcaagaaccccctggagcccctgccccccgagatgagcggcaccatgctgatgctggccgtgctgctgcccctggccttcttcctgctgctggccaccgtgttcagctgcatctggaagagccaccccagcctgtgcagaaagctgggcagcctgctgaagagaagaccccagggcgagggccccaaccccgtggccggcagctgggagccccccaaggcccacccctacttccccgacctggtgcagcccctgctgcccatcagcggcgacgtgagccccgtgagcaccggcctgcccgccgcccccgtgctggaggccggcgtgccccagcagcagagccccctggacctgaccagagagccccagctggagcccggcgagcagagccaggtggcccacggcaccaacggcatccacgtgaccggcggcagcatgaccatcaccggcaacatctacatctacaacggccccgtgctgggcggcccccccggccccggcgacctgcccgccacccccgagcccccctaccccatccccgaggagggcgaccccggcccccccggcctgagcaccccccaccaggaggacggcaaggcctggcacctggccgagaccgagcactgcggcgccacccccagcaacagaggccccagaaaccagttcatcacccacgactag

SEQ ID NO: 11356 - DNA, 1725 bp, synthetic construct
  misc_feature 1..1725: note = Description of Artificial Sequence: Synthetic coding sequence
  source 1..1725: mol_type = other DNA
atggccctggccagaggcagcagacagctgggcgccctggtgtggggcgcctgcctgtgcgtgctggtgcacggccagcaggcccagcccggccagggcagcgaccccgccagatggagacagctgatccagtgggagaacaacggccaggtgtacagcctgctgaacagcggcagcgagtacgtgcccgccggcccccagagaagcgagagcagcagcagagtgctgctggccggcgccccccaggcccagcagagaagaagccacggcagccccagaagaagacaggcccccagcctgcccctgcccggcagagtgggcagcgacaccgtgagaggccaggccagacaccccttcggcttcggccaggtgcccgacaactggagagaggtggccgtgggcgacagcaccggcatggccagagccagaaccagcgtgagccagcagagacacggcggcagcgccagcagcgtgagcgccagcgccttcgccagcacctacagacagcagcccagctacccccagcagttcccctacccccaggcccccttcgtgagccagtacgagaactacgaccccgccagcagaacctacgaccagggcttcgtgtactacagacccgccggcggcggcgtgggcgccggcgccgccgccgtggccagcgccggcgtgatctacccctaccagcccagagccagatacgaggagtacggcggcggcgaggagctgcccgagtaccccccccagggcttctaccccgcccccgagagaccctacgtgcccccccccccccccccccccgacggcctggacagaagatacagccacagcctgtacagcgagggcacccccggcttcgagcaggcctaccccgaccccggccccgaggccgcccaggcccacggcggcgaccccagactgggctggtaccccccctacgccaaccccccccccgaggcctacggcccccccagagccctggagcccccctacctgcccgtgagaagcagcgacacccccccccccggcggcgagagaaacggcgcccagcagggcagactgagcgtgggcagcgtgtacagacccaaccagaacggcagaggcctgcccgacctggtgcccgaccccaactacgtgcaggccagcacctacgtgcagagagcccacctgtacagcctgagatgcgccgccgaggagaagtgcctggccagcaccgcctacgcccccgaggccaccgactacgacgtgagagtgctgctgagattcccccagagagtgaagaaccagggcaccgccgacttcctgcccaacagacccagacacacctgggagtggcacagctgccaccagcactaccacagcatggacgagttcagccactacgacctgctggacgccgccaccggcaagaaggtggccgagggccacaaggccagcttctgcctggaggacagcacctgcgacttcggcaacctgaagagatacgcctgcaccagccacacccagggcctgagccccggctgctacgacacctacaacgccgacatcgactgccagtggatcgacatcaccgacgtgcagcccggcaactacatcctgaaggtgcacgtgaaccccaagtacatcgtgctggagagcgacttcaccaacaacgtggtgagatgcaacatccactacaccggcagatacgtgagcgccaccaactgcaagatcgtgcagagctag

SEQ ID NO: 11357 - DNA, 1311 bp, synthetic construct
  misc_feature 1..1311: note = Description of Artificial Sequence: Synthetic coding sequence
  source 1..1311: mol_type = other DNA
atggccagagccagaaccagcgtgagccagcagagacacggcggcagcgccagcagcgtgagcgccagcgccttcgccagcacctacagacagcagcccagctacccccagcagttcccctacccccaggcccccttcgtgagccagtacgagaactacgaccccgccagcagaacctacgaccagggcttcgtgtactacagacccgccggcggcggcgtgggcgccggcgccgccgccgtggccagcgccggcgtgatctacccctaccagcccagagccagatacgaggagtacggcggcggcgaggagctgcccgagtaccccccccagggcttctaccccgcccccgagagaccctacgtgcccccccccccccccccccccgacggcctggacagaagatacagccacagcctgtacagcgagggcacccccggcttcgagcaggcctaccccgaccccggccccgaggccgcccaggcccacggcggcgaccccagactgggctggtaccccccctacgccaaccccccccccgaggcctacggcccccccagagccctggagcccccctacctgcccgtgagaagcagcgacacccccccccccggcggcgagagaaacggcgcccagcagggcagactgagcgtgggcagcgtgtacagacccaaccagaacggcagaggcctgcccgacctggtgcccgaccccaactacgtgcaggccagcacctacgtgcagagagcccacctgtacagcctgagatgcgccgccgaggagaagtgcctggccagcaccgcctacgcccccgaggccaccgactacgacgtgagagtgctgctgagattcccccagagagtgaagaaccagggcaccgccgacttcctgcccaacagacccagacacacctgggagtggcacagctgccaccagcactaccacagcatggacgagttcagccactacgacctgctggacgccgccaccggcaagaaggtggccgagggccacaaggccagcttctgcctggaggacagcacctgcgacttcggcaacctgaagagatacgcctgcaccagccacacccagggcctgagccccggctgctacgacacctacaacgccgacatcgactgccagtggatcgacatcaccgacgtgcagcccggcaactacatcctgaaggtgcacgtgaaccccaagtacatcgtgctggagagcgacttcaccaacaacgtggtgagatgcaacatccactacaccggcagatacgtgagcgccaccaactgcaagatcgtgcagagctag

SEQ ID NO: 11358 - DNA, 636 bp, synthetic construct
  misc_feature 1..636: note = Description of Artificial Sequence: Synthetic coding sequence
  source 1..636: mol_type = other DNA
atgaccaccctgaccagacaggacctgaacttcggccaggtggtggccgacgtgctgtgcgagttcctggaggtggccgtgcacctgatcctgtacgtgagagaggtgtaccccgtgggcatcttccagaagagaaagaagtacaacgtgcccgtgcagatgagctgccaccccgagctgaaccagtacatccaggacaccctgcactgcgtgaagcccctgctggagaagaacgacgtggagaaggtggtggtggtgatcctggacaaggagcacagacccgtggagaagttcgtgttcgagatcacccagccccccctgctgagcatcagcagcgacagcctgctgagccacgtggagcagctgctgagagccttcatcctgaagatcagcgtgtgcgacgccgtgctggaccacaacccccccggctgcaccttcaccgtgctggtgcacaccagagaggccgccaccagaaacatggagaagatccaggtgatcaaggacttcccctggatcctggccgacgagcaggacgtgcacatgcacgaccccagactgatccccctgaagaccatgaccagcgacatcctgaagatgcagctgtacgtggaggagagagcccacaagggcagctag

SEQ ID NO: 11359 - DNA, 318 bp, synthetic construct
  misc_feature 1..318: note = Description of Artificial Sequence: Synthetic coding sequence
  source 1..318: mol_type = other DNA
atgaccaccctgaccagacaggacctgaacttcggccaggtggtggccgacgtgctgtgcgagttcctggaggtggccgtgcacctgatcctgtacgtgagagaggtgtaccccgtgggcatcttccagaagagaaagaagtacaacgtgcccgtgcagatgagctgccaccccgagctgaaccagtacatccaggacaccctgcactgcgtgaagcccctgctggagaaggtgagagtgcactgggccccccagcccagccaccccatgctgacccccgtgcccgtgtgcagccagagcaacagcggcatgggctag

SEQ ID NO: 11360 - DNA, 531 bp, synthetic construct
  misc_feature 1..531: note = Description of Artificial Sequence: Synthetic coding sequence
  source 1..531: mol_type = other DNA
atgaccaccctgaccagacaggacctgaacttcggccaggtggtggccgacgtgctgtgcgagttcctggaggtggccgtgcacctgatcctgtacgtgagagaggtgtaccccgtgggcatcttccagaagagaaagaagtacaacgtgcccgtgcagaacgacgtggagaaggtggtggtggtgatcctggacaaggagcacagacccgtggagaagttcgtgttcgagatcacccagccccccctgctgagcatcagcagcgacagcctgctgagccacgtggagcagctgctgagagccttcatcctgaagatcagcgtgtgcgacgccgtgctggaccacaacccccccggcgtgagcaccccccaccccctgttcccctggcacttccacggctacctgggcctggtgtgcgtgcccagaagcatgttcggctgcagcgagacccacctgttcctgaccctgagagtgcacctgctgtgggaggccagcctgatcgacagcacctggctgcccagcccctactag

SEQ ID NO: 11361 - DNA, 636 bp, synthetic construct; identical to SEQ ID NO: 11358
  misc_feature 1..636: note = Description of Artificial Sequence: Synthetic coding sequence
  source 1..636: mol_type = other DNA

SEQ ID NO: 11362 - DNA, 675 bp, synthetic construct
  misc_feature 1..675: note = Description of Artificial Sequence: Synthetic coding sequence
  source 1..675: mol_type = other DNA
atgaccaccctgaccagacaggacctgaacttcggccaggtggtggccgacgtgctgtgcgagttcctggaggtggccgtgcacctgatcctgtacgtgagagaggtgtaccccgtgggcatcttccagaagagaaagaagtacaacgtgcccgtgcagatgagctgccaccccgagctgaaccagtacatccaggacaccctgcactgcgtgaagcccctgctggagaagaacgacgtggagaaggtggtggtggtgatcctggacaaggagcacagacccgtggagaagttcgtgttcgagatcacccagccccccctgctgagcatcagatgggccgcccccgcccccagacccctggccggcatcagcagcgacagcctgctgagccacgtggagcagctgctgagagccttcatcctgaagatcagcgtgtgcgacgccgtgctggaccacaacccccccggctgcaccttcaccgtgctggtgcacaccagagaggccgccaccagaaacatggagaagatccaggtgatcaaggacttcccctggatcctggccgacgagcaggacgtgcacatgcacgaccccagactgatccccctgaagaccatgaccagcgacatcctgaagatgcagctgtacgtggaggagagagcccacaagggcagctag

SEQ ID NO: 11363 - DNA, 675 bp, synthetic construct; identical to SEQ ID NO: 11362
  misc_feature 1..675: note = Description of Artificial Sequence: Synthetic coding sequence
  source 1..675: mol_type = other DNA

SEQ ID NO: 11364 - DNA, 636 bp, synthetic construct; identical to SEQ ID NO: 11358
  misc_feature 1..636: note = Description of Artificial Sequence: Synthetic coding sequence
  source 1..636: mol_type = other DNA

SEQ ID NO: 11365 - DNA, 597 bp, synthetic construct
  misc_feature 1..597: note = Description of Artificial Sequence: Synthetic coding sequence
  source 1..597: mol_type = other DNA
atgaccaccctgaccagacaggacctgaacttcggccagggcagagaggccggccccgccggccccggcgccggcgccagcggccccgccggcttcctggagagagccaccggcctgtgcccccccgccgtggtggccgacgtgctgtgcgagttcctggaggtggccgtgcacctgatcctgtacgtgagagaggtgtaccccgtgggcatcttccagaagagaaagaagtacaacgtgcccgtgcagatgagctgccaccccgagctgaaccagtacatccaggacaccctgcactgcgtgaagcccctgctggagaagaacgacgtggagaaggtggtggtggtgatcctggacaaggagcacagacccgtggagaagttcgtgttcgagatcacccagccccccctgctgagcatcagcagcgacagcctgctgagccacgtggagcagctgctgagagccttcatcctgaagatcagcgtgtgcgacgccgtgctggaccacaacccccccggctgcaccttcaccgtgctggtgcacaccagagaggccgccaccagaaacatggagaagatccaggtgatcaaggtgtag

SEQ ID NO: 11366 - DNA, 504 bp, synthetic construct
  misc_feature 1..504: note = Description of Artificial Sequence: Synthetic coding sequence
  source 1..504: mol_type = other DNA
atgaccaccctgaccagacaggacctgaacttcggccaggtggtggccgacgtgctgtgcgagttcctggaggtggccgtgcacctgatcctgtacgtgagagaggtgtaccccgtgggcatcttccagaagagaaagaagtacaacgtgcccgtgcagatgagctgccaccccgagctgaaccagtacatccaggacaccctgcactgcgtgaagcccctgctggagaagaacgacgtggagaaggtggtggtggtgatcctggacaaggagcacagacccgtggagaagttcgtgttcgagatcacccagccccccctgctgagcatcagcagcgacagcctgctgagccacgtggagcagctgctgagagccttcatcctgaagatcagcgtgtgcgacgccgtgctggaccacaacccccccggctgcaccttcaccgtgctggtgcacaccagagaggccgccaccagaaacatggagaagatccaggtgatcaagtag

SEQ ID NO: 11367 - DNA, 3159 bp, synthetic construct
  misc_feature 1..3159: note = Description of Artificial Sequence: Synthetic coding sequence
  source 1..3159: mol_type = other DNA
atggccggcatggacagcggcaacctgaagaccgccagactgtggagagacgccgccctgagagccagaaagctgagaagcaacctgagacagctgaccctgaccgccgccggcgcctgccccggcgccggcgccgacgccctggagagccccgccagcccccagctggtgctgcccgccaacctgggcgacatcgaggccctgaacctgggcaacaacggcctggaggaggtgcccgagggcctgggcagcgccctgggcagcctgagagtgctggtgctgagaagaaacagattcgccagactgccccccgccgtggccgagctgggccaccacctgaccgagctggacgtgagccacaacagactgaccgccctgggcgccgaggtggtgagcgccctgagagagctgagaaagctgaacctgagccacaaccagctgcccgccctgcccgcccagctgggcgccctggcccacctggaggagctggacgtgagcttcaacagactggcccacctgcccgacagcctgagctgcctgagcagactgagaaccctggacgtggaccacaaccagctgaccgccttccccagacagctgctgcagctggtggccctggaggagctggacgtgagcagcaacagactgagaggcctgcccgaggacatcagcgccctgagagccctgaagatcctgtggctgagcggcgccgagctgggcaccctgcccgccggcttctgcgagctggccagcctggagagcctgatgctggacaacaacggcctgcaggccctgcccgcccagttcagctgcctgcagagactgaagatgctgaacctgagcagcaacctgttcgaggagttccccgccgccctgctgcccctggccggcctggaggagctgtacctgagcagaaaccagctgaccagcgtgcccagcctgatcagcggcctgggcagactgctgaccctgtggctggacaacaacagaatcagatacctgcccgacagcatcgtggagctgaccggcctggaggagctggtgctgcagggcaaccagatcgccgtgctgcccgaccacttcggccagctgagcagagtgggcctgtggaagatcaaggacaaccccctgatccagcccccctacgaggtgtgcatgaagggcatcccctacatcgccgcctaccagaaggagctggcccacagccagcccgccgtgcagcccagactgaagctgctgctgatgggccacaaggccgccggcaagaccctgctgagacactgcctgaccgaggagagagtggagggctgccccggcggcggcgacaaggagaagtgctacccccccagccccccccccgtgagcaagggcatcgaggtgaccagctggaccgccgacgccagcagaggcctgagattcatcgtgtacgacctggccggcgacgagagctacgaggtgatccagcccttcttcctgagccccggcgccctgtacgtgctggtggtgaacctggccacctacgagcccagacacttccccaccaccgtgggcagcttcctgcacagagtgggcgccagagtgccccacgccgtggtgtgcatcgtgggcacccacgccgacctgtgcggcgagagagagctggaggagaagtgcctggacatccacagacagatcgccctgcaggagaagcacgacgccgagggcctgagcagactggccaaggtggtggacgaggccctggccagagacttcgagctgagaagcgccagcccccacgccgcctactacggcgtgagcgacaagaacctgagaagaagaaaggcccacttccagtacctgctgaaccacagactgcagatcctgagccccgtgctgcccgtgagctgcagagaccccagacacctgagaagactgagagacaagctgctgagcgtggccgagcacagagagatcttccccaacctgcacagagtgctgcccagaagctggcaggtgctggaggagctgcacttccagcccccccaggcccagagactgtggctgagctggtgggacagcgccagactgggcctgcaggccggcctgaccgaggacagactgcagagcgccctgagctacctgcacgagagcggcaagctgctgtacttcgaggacagccccgccctgaaggagcacgtgttccacaacctgaccagactgatcgacatcctgaacgtgttcttccagagagaccccagcctgctgctgcacaagctgctgctgggcaccagcggcgagggcaaggccgagggcgagagcagcccccccatggccagaagcacccccagccaggagctgctgagagccacccagctgcaccagtacgtggagggcttcctgctgcacggcctgctgcccgcccacgtgatcagactgctgctgaagccccacgtgcaggcccagcaggacctgcagctgctgctggagctgctggagaagatgggcctgtgctactgcctgaacaagcccaagggcaagcccctgaacggcagcaccgcctggtacaagttcccctgctacgtgcagaacgaggtgccccacgccgaggcctggatcaacggcaccaacctggccggccagagcttcgtggccgagcagctgcagatcgagtacagcttccccttcaccttccccctgggcctgttcgccagatacagcgtgcagatcaacagccacgtggtgcacagaagcgacggcaagttccagatcttcgcctacagaggcaaggtgcccgtggtggtgagctacagacccgccagaggcgtgctgcagcccgacaccctgagcatcgccagccacgccagcctgcccaacatctggaccgcctggcaggccatcacccccctggtggaggagctgaacgtgctgctgcaggagtggcccggcctgcactacaccgtgcacatcctgtgcagcaagtgcctgaagagaggcagccccaacccccacgccttccccggcgagctgctgagccagcccagacccgagggcgtggccgagatcatctgccccaagaacggcagcgagagagtgaacgtggccctggtgtacccccccacccccaccgtgatcagcccctgcagcaagaagaacgtgggcgagaagcacagaaaccagtag

SEQ ID NO: 11368 - DNA, 549 bp, synthetic construct
  misc_feature 1..549: note = Description of Artificial Sequence: Synthetic coding sequence
  source 1..549: mol_type = other DNA
atgggcaagggcagattcgacgagaaggagaacgtgagcaactgcatccagctgaagaccagcgtgatcaagggcatcaagaaccagctgatcgagcagttccccggcatcgagccctggctgaaccagatcatgcccaagaaggaccccgtgaagatcgtgagatgccacgagcacatcgagatcctgaccgtgaacggcgagctgctgttcttcagacagagagagggccccttctaccccaccctgagactgctgcacaagtaccccttcatcctgccccaccagcaggtggacaagggcgccatcaagttcgtgctgagcggcgccaacatcatgtgccccggcctgaccagccccggcgccaagctgtaccccgccgccgtggacaccatcgtggccatcatggccgagggcaagcagcacgccctgtgcgtgggcgtgatgaagatgagcgccgaggacatcgagaaggtgaacaagggcatcggcatcgagaacatccactacctgaacgacggcctgtggcacatgaagacctacaagtag

SEQ ID NO: 11369 - DNA, 546 bp, synthetic construct
  misc_feature 1..546: note = Description of Artificial Sequence: Synthetic coding sequence
  source 1..546: mol_type = other DNA
atgttcaagaagttcgacgagaaggagaacgtgagcaactgcatccagctgaagaccagcgtgatcaagggcatcaagaaccagctgatcgagcagttccccggcatcgagccctggctgaaccagatcatgcccaagaaggaccccgtgaagatcgtgagatgccacgagcacatcgagatcctgaccgtgaacggcgagctgctgttcttcagacagagagagggccccttctaccccaccctgagactgctgcacaagtaccccttcatcctgccccaccagcaggtggacaagggcgccatcaagttcgtgctgagcggcgccaacatcatgtgccccggcctgaccagccccggcgccaagctgtaccccgccgccgtggacaccatcgtggccatcatggccgagggcaagcagcacgccctgtgcgtgggcgtgatgaagatgagcgccgaggacatcgagaaggtgaacaagggcatcggcatcgagaacatccactacctgaacgacggcctgtggcacatgaagacctacaagtag

SEQ ID NO: 11370 - DNA, 2226 bp, synthetic construct
  misc_feature 1..2226: note = Description of Artificial Sequence: Synthetic coding sequence
  source 1..2226: mol_type = other DNA
atggccctgttcaccccctggaagctgagcagccagaagctgggcttcttcctggtgaccttcggcttcatctggggcatgatgctgctgcacttcaccatccagcagagaacccagcccgagagcagcagcatgctgagagagcagatcctggacctgagcaagagatacatcaaggccctggccgaggagaacagaaacgtggtggacggcccctacgccggcgtgatgaccgcctacgacctgaagaagaccctggccgtgctgctggacaacatcctgcagagaatcggcaagctggagagcaaggtggacaacctggtggtgaacggcaccggcaccaacagcaccaacagcaccaccgccgtgcccagcctggtggccctggagaagatcaacgtggccgacatcatcaacggcgcccaggagaagtgcgtgctgccccccatggacggctacccccactgcgagggcaagatcaagtggatgaaggacatgtggagaagcgacccctgctacgccgactacggcgtggacggcagcacctgcagcttcttcatctacctgagcgaggtggagaactggtgcccccacctgccctggagagccaagaacccctacgaggaggccgaccacaacagcctggccgagatcagaaccgacttcaacatcctgtacagcatgatgaagaagcacgaggagttcagatggatgagactgagaatcagaagaatggccgacgcctggatccaggccatcaagagcctggccgagaagcagaacctggagaagagaaagagaaagaaggtgctggtgcacctgggcctgctgaccaaggagagcggcttcaagatcgccgagaccgccttcagcggcggccccctgggcgagctggtgcagtggagcgacctgatcaccagcctgtacctgctgggccacgacatcagaatcagcgccagcctggccgagctgaaggagatcatgaagaaggtggtgggcaacagaagcggctgccccaccgtgggcgacagaatcgtggagctgatctacatcgacatcgtgggcctggcccagttcaagaagaccctgggccccagctgggtgcactaccagtgcatgctgagagtgctggacagcttcggcaccgagcccgagttcaaccacgccaactacgcccagagcaagggccacaagaccccctggggcaagtggaacctgaacccccagcagttctacaccatgttcccccacacccccgacaacagcttcctgggcttcgtggtggagcagcacctgaacagcagcgacatccaccacatcaacgagatcaagagacagaaccagagcctggtgtacggcaaggtggacagcttctggaagaacaagaagatctacctggacatcatccacacctacatggaggtgcacgccaccgtgtacggcagcagcaccaagaacatccccagctacgtgaagaaccacggcatcctgagcggcagagacctgcagttcctgctgagagagaccaagctgttcgtgggcctgggcttcccctacgagggccccgcccccctggaggccatcgccaacggctgcgccttcctgaaccccaagttcaacccccccaagagcagcaagaacaccgacttcttcatcggcaagcccaccctgagagagctgaccagccagcacccctacgccgaggtgttcatcggcagaccccacgtgtggaccgtggacctgaacaaccaggaggaggtggaggacgccgtgaaggccatcctgaaccagaagatcgagccctacatgccctacgagttcacctgcgagggcatgctgcagagaatcaacgccttcatcgagaagcaggacttctgccacggccaggtgatgtggccccccctgagcgccctgcaggtgaagctggccgagcccggccagagctgcaagcaggtgtgccaggagagccagctgatctgcgagcccagcttcttccagcacctgaacaaggacaaggacatgctgaagtacaaggtgacctgccagagcagcgagctggccaaggacatcctggtgcccagcttcgaccccaagaacaagcactgcgtgttccagggcgacctgctgctgttcagctgcgccggcgcccaccccagacaccagagagtgtgcccctgcagagacttcatcaagggccaggtggccctgtgcaaggactgcctgtag

SEQ ID NO: 11371 - DNA, 2226 bp, synthetic construct; identical to SEQ ID NO: 11370
  misc_feature 1..2226: note = Description of Artificial Sequence: Synthetic coding sequence
  source 1..2226: mol_type = other DNA

SEQ ID NO: 11372 - DNA, 1410 bp, synthetic construct
  misc_feature 1..1410: note = Description of Artificial Sequence: Synthetic coding sequence
  source 1..1410: mol_type = other DNA
atgcacagcttcccccccctgctgctgctgctgttctggggcgtggtgagccacagcttccccgccaccctggagacccaggagcaggacgtggacctggtgcagaagtacctggagaagtactacaacctgaagaacgacggcagacaggtggagaagagaagaaacagcggccccgtggtggagaagctgaagcagatgcaggagttcttcggcctgaaggtgaccggcaagcccgacgccgagaccctgaaggtgatgaagcagcccagatgcggcgtgcccgacgtggcccagttcgtgctgaccgagggcaaccccagatgggagcagacccacctgacctacagaatcgagaactacacccccgacctgcccagagccgacgtggaccacgccatcgagaaggccttccagctgtggagcaacgtgacccccctgaccttcaccaaggtgagcgagggccaggccgacatcatgatcagcttcgtgagaggcgaccacagagacaacagccccttcgacggccccggcggcaacctggcccacgccttccagcccggccccggcatcggcggcgacgcccacttcgacgaggacgagagatggaccaacaacttcagagagtacaacctgcacagagtggccgcccacgagctgggccacagcctgggcctgagccacagcaccgacatcggcgccctgatgtaccccagctacaccttcagcggcgacgtgcagctggcccaggacgacatcgacggcatccaggccatctacggcagaagccagaaccccgtgcagcccatcggcccccagacccccaaggcctgcgacagcaagctgaccttcgacgccatcaccaccatcagaggcgaggtgatgttcttcaaggacagattctacatgagaaccaaccccttctaccccgaggtggagctgaacttcatcagcgtgttctggccccagctgcccaacggcctggaggccgcctacgagttcgccgacagagacgaggtgagattcttcaagggcaacaagtactgggccgtgcagggccagaacgtgctgcacggctaccccaaggacatctacagcagcttcggcttccccagaaccgtgaagcacatcgacgccgccctgagcgaggagaacaccggcaagacctacttcttcgtggccaacaagtactggagatacgacgagtacaagagaagcatggaccccggctaccccaagatgatcgcccacgacttccccggcatcggccacaaggtggacgccgtgttcatgaaggacggcttcttctacttcttccacggcaccagacagtacaagttcgaccccaagaccaagagaatcctgaccctgcagaaggccaacagctggttcaactgcagaaagaactag

SEQ ID NO: 11373 - DNA, 1431 bp, synthetic construct
  misc_feature 1..1431: note = Description of Artificial Sequence: Synthetic coding sequence
  source 1..1431: mol_type = other DNA
atgatgcacctggccttcctggtgctgctgtgcctgcccgtgtgcagcgcctaccccctgagcggcgccgccaaggaggaggacagcaacaaggacctggcccagcagtacctggagaagtactacaacctggagaaggacgtgaagcagttcagaagaaaggacagcaacctgatcgtgaagaagatccagggcatgcagaagttcctgggcctggaggtgaccggcaagctggacaccgacaccctggaggtgatgagaaagcccagatgcggcgtgcccgacgtgggccacttcagcagcttccccggcatgcccaagtggagaaagacccacctgacctacagaatcgtgaactacacccccgacctgcccagagacgccgtggacagcgccatcgagaaggccctgaaggtgtgggaggaggtgacccccctgaccttcagcagactgtacgagggcgaggccgacatcatgatcagcttcgccgtgaaggagcacggcgacttctacagcttcgacggccccggccacagcctggcccacgcctacccccccggccccggcctgtacggcgacatccacttcgacgacgacgagaagtggaccgaggacgccagcggcaccaacctgttcctggtggccgcccacgagctgggccacagcctgggcctgttccacagcgccaacaccgaggccctgatgtaccccctgtacaacagcttcaccgagctggcccagttcagactgagccaggacgacgtgaacggcatccagagcctgtacggccccccccccgccagcaccgaggagcccctggtgcccaccaagagcgtgcccagcggcagcgagatgcccgccaagtgcgaccccgccctgagcttcgacgccatcagcaccctgagaggcgagtacctgttcttcaaggacagatacttctggagaagaagccactggaaccccgagcccgagttccacctgatcagcgccttctggcccagcctgcccagctacctggacgccgcctacgaggtgaacagcagagacaccgtgttcatcttcaagggcaacgagttctgggccatcagaggcaacgaggtgcaggccggctaccccagaggcatccacaccctgggcttcccccccaccatcagaaagatcgacgccgccgtgagcgacaaggagaagaagaagacctacttcttcgccgccgacaagtactggagattcgacgagaacagccagagcatggagcagggcttccccagactgatcgccgacgacttccccggcgtggagcccaaggtggacgccgtgctgcaggccttcggcttcttctacttcttcagcggcagcagccagttcgagttcgaccccaacgccagaatggtgacccacatcctgaagagcaacagctggctgcactgctag

SEQ ID NO: 11374 - DNA, 930 bp, synthetic construct
  misc_feature 1..930: note = Description of Artificial Sequence: Synthetic coding sequence
  source 1..930: mol_type = other DNA
atgcccagacactgcagcgccgccggctgctgcaccagagacaccagagagaccagaaacagaggcatcagcttccacagactgcccaagaaggacaaccccagaagaggcctgtggctggccaactgccagagactggaccccagcggccagggcctgtgggaccccgccagcgagtacatctacttctgcagcaagcacttcgaggaggactgcttcgagctggtgggcatcagcggctaccacagactgaaggagggcgccgtgcccaccatcttcgagagcttcagcaagctgagaagaaccaccaagaccaagggccacagctacccccccggccccgccgaggtgagcagactgagaagatgcagaaagagatgcagcgagggcagaggccccaccacccccttcagcccccccccccccgccgacgtgacctgcttccccgtggaggaggccagcgcccccgccaccctgcccgccagccccgccggcagactggagcccggcctgagcagccccttcagcgacctgctgggccccctgggcgcccaggccgacgaggccggctgcagcgcccagcccagccccgagagacagcccagccccctggagcccagacccgtgagccccagcgcctacatgctgagactgcccccccccgccggcgcctacatccagaacgagcacagctaccaggtgggcagcgccctgctgtggaagagaagagccgaggccgccctggacgccctggacaaggcccagagacagctgcaggcctgcaagagaagagagcagagactgagactgagactgaccaagctgcagcaggagagagccagagagaagagagcccaggccgacgccagacagaccctgaaggagcacgtgcaggacttcgccatgcagctgagcagcagcatggcctag

SEQ ID NO: 11375 - DNA, 1416 bp, synthetic construct
  misc_feature 1..1416: note = Description of Artificial Sequence: Synthetic coding sequence
  source 1..1416: mol_type = other DNA
atgcaccccggcgtgctggccgccttcctgttcctgagctggacccactgcagagccctgcccctgcccagcggcggcgacgaggacgacctgagcgaggaggacctgcagttcgccgagagatacctgagaagctactaccaccccaccaacctggccggcatcctgaaggagaacgccgccagcagcatgaccgagagactgagagagatgcagagcttcttcggcctggaggtgaccggcaagctggacgacaacaccctggacgtgatgaagaagcccagatgcggcgtgcccgacgtgggcgagtacaacgtgttccccagaaccctgaagtggagcaagatgaacctgacctacagaatcgtgaactacacccccgacatgacccacagcgaggtggagaaggccttcaagaaggccttcaaggtgtggagcgacgtgacccccctgaacttcaccagactgcacgacggcatcgccgacatcatgatcagcttcggcatcaaggagcacggcgacttctaccccttcgacggccccagcggcctgctggcccacgccttcccccccggccccaactacggcggcgacgcccacttcgacgacgacgagacctggaccagcagcagcaagggctacaacctgttcctggtggccgcccacgagttcggccacagcctgggcctggaccacagcaaggaccccggcgccctgatgttccccatctacacctacaccggcaagagccacttcatgctgcccgacgacgacgtgcagggcatccagagcctgtacggccccggcgacgaggaccccaaccccaagcaccccaagacccccgacaagtgcgaccccagcctgagcctggacgccatcaccagcctgagaggcgagaccatgatcttcaaggacagattcttctggagactgcacccccagcaggtggacgccgagctgttcctgaccaagagcttctggcccgagctgcccaacagaatcgacgccgcctacgagcaccccagccacgacctgatcttcatcttcagaggcagaaagttctgggccctgaacggctacgacatcctggagggctaccccaagaagatcagcgagctgggcctgcccaaggaggtgaagaagatcagcgccgccgtgcacttcgaggacaccggcaagaccctgctgttcagcggcaaccaggtgtggagatacgacgacaccaaccacatcatggacaaggactaccccagactgatcgaggaggacttccccggcatcggcgacaaggtggacgccgtgtacgagaagaacggctacatctacttcttcaacggccccatccagttcgagtacagcatctggagcaacagaatcgtgagagtgatgcccgccaacagcatcctgtggtgctag

SEQ ID NO: 11376 - DNA, 1470 bp, synthetic construct
  misc_feature 1..1470: note = Description of Artificial Sequence: Synthetic coding sequence
  source 1..1470: mol_type = other DNA
atgcaccccggcgtgctggccgccttcctgttcctgagctggacccactgcagagccctgcccctgcccagcggcggcgacgaggacgacctgagcgaggaggacctgcagttcgccgagagatacctgagaagctactaccaccccaccaacctggccggcatcctgaaggagaacgccgccagcagcatgaccgagagactgagagagatgcagagcttcttcggcctggaggtgaccggcaagctggacgacaacaccctggacgtgatgaagaagcccagatgcggcgtgcccgacgtgggcgagtacaacgtgttccccagaaccctgaagtggagcaagatgaacctgacctacagaatcgtgaactacacccccgacatgacccacagcgaggtggagaaggccttcaagaaggccttcaaggtgtggagcgacgtgacccccctgaacttcaccagactgcacgacggcatcgccgacatcatgatcagcttcggcatcaaggagcacggcgacttctaccccttcgacggccccagcggcctgctggcccacgccttcccccccggccccaactacggcggcgacgcccacttcgacgacgacgagacctggaccagcagcagcaagggctacaacctgttcctggtggccgcccacgagttcggccacagcctgggcctggaccacagcaaggaccccggcgccctgatgttccccatctacacctacaccggcaagagccacttcatgctgcccgacgacgacgtgcagggcatccagagcctgtacggccccggcgacgaggaccccaaccccaagcaccccaagacccccgacaagtgcgaccccagcctgagcctggacgccatcaccagcctgagaggcgagaccatgatcttcaaggacagattcttctggagactgcacccccagcaggtggacgccgagctgttcctgaccaagagcttctggcccgagctgcccaacagaatcgacgccgcctacgagcaccccagccacgacctgatcttcatcttcagaggcagaaagttctgggccctgaacggctacgacatcctggagggctaccccaagaagatcagcgagctgggcctgcccaaggaggtgaagaagatcagcgccgccgtgcacttcgaggacaccggcaagaccctgctgttcagcggcaaccaggtgtggagatacgacgacaccaaccacatcatggacaaggactaccccagactgatcgaggaggacttccccggcatcggcgacaaggtggacgccgtgtacgagaagaacgagagccacagcgtgacccaggccggcgtgcactgcagaaacctgagcagcctgcagccccccccccccggcttcaagagattcagctgcctgagcctgtggagcagctgggactacagactgtacctgttcttccagagaacccacaccgtgtag

SEQ ID NO: 11377 - DNA, 1152 bp, synthetic construct
  misc_feature 1..1152: note = Description of Artificial Sequence: Synthetic coding sequence
  source 1..1152: mol_type = other DNA
atgcaccccggcgtgctggccgccttcctgttcctgagctggacccactgcagagccctgcccctgcccagcggcggcgacgaggacgacctgagcgaggaggacctgcagttcgccgagagatacctgagaagctactaccaccccaccaacctggccggcatcctgaaggagaacgccgccagcagcatgaccgagagactgagagagatgcagagcttcttcggcctggaggtgaccggcaagctggacgacaacaccctggacgtgatgaagaagcccagatgcggcgtgcccgacgtgggcgagtacaacgtgttccccagaaccctgaagtggagcaagatgaacctgacctacagaatcgtgaactacacccccgacatgacccacagcgaggtggagaaggccttcaagaaggccttcaaggtgtggagcgacgtgacccccctgaacttcaccagactgcacgacggcatcgccgacatcatgatcagcttcggcatcaaggagcacggcgacttctaccccttcgacggccccagcggcctgctggcccacgccttcccccccggccccaactacggcggcgacgcccacttcgacgacgacgagacctggaccagcagcagcaagggctacaacctgttcctggtggccgcccacgagttcggccacagcctgggcctggaccacagcaaggaccccggcgccctgatgttccccatctacacctacaccggcaagagccacttcatgctgcccgacgacgacgtgcagggcatccagagcctgtacggccccggcgacgaggaccccaaccccaagcaccccaagacccccgacaagtgcgaccccagcctgagcctggacgccatcaccagcctgagaggcgagaccatgatcttcaaggacagattcttctggagactgcacccccagcaggtggacgccgagctgttcctgaccaagagcttctggcccgagctgcccaacagaatcgacgccgcctacgagcaccccagccacgacctgatcttcatcttcagaggcagaaagttctgggccctgaacggctacgacatcctggagggctaccccaagaagatcagcgagctgggcctgcccaaggaggtgaacaagctgcagtag

SEQ ID NO: 11378 - DNA, 1749 bp, synthetic construct
  misc_feature 1..1749: note = Description of Artificial Sequence: Synthetic coding sequence
  source 1..1749: mol_type = other DNA
atgagccccgcccccagaccccccagatgcctgctgctgcccctgctgaccctgggcaccgccctggccagcctgggcagcgcccagagcagcagcttcagccccgaggcctggctgcagcagtacggctacctgccccccggcgacctgagaacccacacccagagaagcccccagagcctgagcgccgccatcgccgccatgcagaagttctacggcctgcaggtgaccggcaaggccgacgccgacaccatgaaggccatgagaagacccagatgcggcgtgcccgacaagttcggcgccgagatcaaggccaacgtgagaagaaagagatacgccatccagggcctgaagtggcagcacaacgagatcaccttctgcatccagaactacacccccaaggtgggcgagtacgccacctacgaggccatcagaaaggccttcagagtgtgggagagcgccacccccctgagattcagagaggtgccctacgcctacatcagagagggccacgagaagcaggccgacatcatgatcttcttcgccgagggcttccacggcgacagcacccccttcgacggcgagggcggcttcctggcccacgcctacttccccggccccaacatcggcggcgacacccacttcgacagcgccgagccctggaccgtgagaaacgaggacctgaacggcaacgacatcttcctggtggccgtgcacgagctgggccacgccctgggcctggagcacagcagcgaccccagcgccatcatggcccccttctaccagtggatggacaccgagaacttcgtgctgcccgacgacgacagaagaggcatccagcagctgtacggcggcgagagcggcttccccaccaagatgcccccccagcccagaaccaccagcagacccagcgtgcccgacaagcccaagaaccccacctacggccccaacatctgcgacggcaacttcgacaccgtggccatgctgagaggcgagatgttcgtgttcaaggagagatggttctggagagtgagaaacaaccaggtgatggacggctaccccatgcccatcggccagttctggagaggcctgcccgccagcatcaacaccgcctacgagagaaaggacggcaagttcgtgttcttcaagggcgacaagcactgggtgttcgacgaggccagcctggagcccggctaccccaagcacatcaaggagctgggcagaggcctgcccaccgacaagatcgacgccgccctgttctggatgcccaacggcaagacctacttcttcagaggcaacaagtactacagattcaacgaggagctgagagccgtggacagcgagtaccccaagaacatcaaggtgtgggagggcatccccgagagccccagaggcagcttcatgggcagcgacgaggtgttcacctacttctacaagggcaacaagtactggaagttcaacaaccagaagctgaaggtggagcccggctaccccaagagcgccctgagagactggatgggctgccccagcggcggcagacccgacgagggcaccgaggaggagaccgaggtgatcatcatcgaggtggacgaggagggcggcggcgccgtgagcgccgccgccgtggtgctgcccgtgctgctgctgctgctggtgctggccgtgggcctggccgtgttcttcttcagaagacacggcacccccagaagactgctgtactgccagagaagcctgctggacaaggtgtag

SEQ ID NO: 11379 - DNA, 2052 bp, synthetic construct
  misc_feature 1..2052: note = Description of Artificial Sequence: Synthetic coding sequence
  source 1..2052: mol_type = other DNA
atggccagcggccccggcagccaggagagagagggcctgctgatcgtgaagctggaggaggactgcgcctggagccaggagctgcccccccccgaccccggccccagccccgaggccagccacctgagattcagaagattcagattccaggaggccgccggccccagagaggccctgagcagactgcaggagctgtgccacggctggctgagacccgagatgagaaccaaggagcagatcctggagctgctggtgctggagcagttcctgaccatcctgccccaggagatccagagcagagtgcaggagctgcaccccgagagcggcgaggaggccgtgaccctggtggaggacatgcagagagagctgggcagactgagacagcaggtgaccaaccacggcagaggcaccgaggtgctgctggaggagcccctgcccctggagaccgccagagagagccccagcttcaagctggagcccatggagaccgagagaagccccggccccagactgcaggagctgctgggccccagcccccagagagacccccaggccgtgaaggagagagccctgagcgccccctggctgagcctgttcccccccgagggcaacatggaggacaaggagatgaccggcccccagctgcccgagagcctggaggacgtggccatgtacatcagccaggaggagtggggccaccaggaccccagcaagagagccctgagcagagacaccgtgcaggagagctacgagaacgtggacagcctggagagccacatccccagccaggaggtgcccggcacccaggtgggccagggcggcaagctgtgggaccccagcgtgcagagctgcaaggagggcctgagccccagaggccccgcccccggcgaggagaagttcgagaacctggagggcgtgcccagcgtgtgcagcgagaacatccacccccaggtgctgctgcccgaccaggccagaggcgaggtgccctggagccccgagctgggcagaccccacgacagaagccagggcgactgggcccccccccccgagggcggcatggagcaggccctggccggcgccagcagcggcagagagctgggcagacccaaggagctgcagcccaagaagctgcacctgtgccccctgtgcggcaagaacttcagcaacaacagcaacctgatcagacaccagagaatccacgccgccgagagactgtgcatgggcgtggactgcaccgagatcttcggcggcaaccccagattcctgagcctgcacagagcccacctgggcgaggaggcccacaagtgcctggagtgcggcaagtgcttcagccagaacacccacctgaccagacaccagagaacccacaccggcgagaagccctaccagtgcaacatctgcggcaagtgcttcagctgcaacagcaacctgcacagacaccagagaacccacaccggcgagaagccctacaagtgccccgagtgcggcgagatcttcgcccacagcagcaacctgctgagacaccagagaatccacaccggcgagagaccctacaagtgccccgagtgcggcaagagcttcagcagaagcagccacctggtgatccacgagagaacccacgagagagagagactgtaccccttcagcgagtgcggcgaggccgtgagcgacagcacccccttcctgaccaaccacggcgcccacaaggccgagaagaagctgttcgagtgcctgacctgcggcaagagcttcagacagggcatgcacctgaccagacaccagagaacccacaccggcgagaagccctacaagtgcaccctgtgcggcgagaacttcagccacagaagcaacctgatcagacaccagagaatccacaccggcgagaagccctacacctgccacgagtgcggcgacagcttcagccacagcagcaacagaatcagacacctgagaacccacaccggcgagagaccctacaagtgcagcgagtgcggcgagagcttcagcagaagcagcagactgatgagccaccagagaacccacaccggctag

SEQ ID NO: 11380 - DNA, 1755 bp, synthetic construct
  misc_feature 1..1755: note = Description of Artificial Sequence: Synthetic coding sequence
  source 1..1755: mol_type = other DNA
atgcagaagttcttcggcctgccccagaccggcgacctggaccagaacaccatcgagaccatgagaaagcccagatgcggcaaccccgacgtggccaactacaacttcttccccagaaagcccaagtgggacaagaaccagatcacctacagaatcatcggctacacccccgacctggaccccgagaccgtggacgacgccttcgccagagccttccaggtgtggagcgacgtgacccccctgagattcagcagaatccacgacggcgaggccgacatcatgatcaacttcggcagatgggagcacggcgacggctaccccttcgacggcaaggacggcctgctggcccacgccttcgcccccggcaccggcgtgggcggcgacagccacttcgacgacgacgagctgtggaccctgggcgagggccaggtggtgagagtgaagtacggcaacgccgacggcgagtactgcaagttccccttcctgttcaacggcaaggagtacaacagctgcaccgacaccggcagaagcgacggcttcctgtggtgcagcaccacctacaacttcgagaaggacggcaagtacggcttctgcccccacgaggccctgttcaccatgggcggcaacgccgagggccagccctgcaagttccccttcagattccagggcaccagctacgacagctgcaccaccgagggcagaaccgacggctacagatggtgcggcaccaccgaggactacgacagagacaagaagtacggcttctgccccgagaccgccatgagcaccgtgggcggcaacagcgagggcgccccctgcgtgttccccttcaccttcctgggcaacaagtacgagagctgcaccagcgccggcagaagcgacggcaagatgtggtgcgccaccaccgccaactacgacgacgacagaaagtggggcttctgccccgaccagggctacagcctgttcctggtggccgcccacgagttcggccacgccatgggcctggagcacagccaggaccccggcgccctgatggcccccatctacacctacaccaagaacttcagactgagccaggacgacatcaagggcatccaggagctgtacggcgccagccccgacatcgacctgggcaccggccccacccccaccctgggccccgtgacccccgagatctgcaagcaggacatcgtgttcgacggcatcgcccagatcagaggcgagatcttcttcttcaaggacagattcatctggagaaccgtgacccccagagacaagcccatgggccccctgctggtggccaccttctggcccgagctgcccgagaagatcgacgccgtgtacgaggccccccaggaggagaaggccgtgttcttcgccggcaacgagtactggatctacagcgccagcaccctggagagaggctaccccaagcccctgaccagcctgggcctgccccccgacgtgcagagagtggacgccgccttcaactggagcaagaacaagaagacctacatcttcgccggcgacaagttctggagatacaacgaggtgaagaagaagatggaccccggcttccccaagctgatcgccgacgcctggaacgccatccccgacaacctggacgccgtggtggacctgcagggcggcggccacagctacttcttcaagggcgcctactacctgaagctggagaaccagagcctgaagagcgtgaagttcggcagcatcaagagcgactggctgggctgctag

SEQ ID NO: 11381 - DNA, 1434 bp, synthetic construct
  misc_feature 1..1434: note = Description of Artificial Sequence: Synthetic coding sequence
  source 1..1434: mol_type = other DNA
atgaagagcctgcccatcctgctgctgctgtgcgtggccgtgtgcagcgcctaccccctggacggcgccgccagaggcgaggacaccagcatgaacctggtgcagaagtacctggagaactactacgacctgaagaaggacgtgaagcagttcgtgagaagaaaggacagcggccccgtggtgaagaagatcagagagatgcagaagttcctgggcctggaggtgaccggcaagctggacagcgacaccctggaggtgatgagaaagcccagatgcggcgtgcccgacgtgggccacttcagaaccttccccggcatccccaagtggagaaagacccacctgacctacagaatcgtgaactacacccccgacctgcccaaggacgccgtggacagcgccgtggagaaggccctgaaggtgtgggaggaggtgacccccctgaccttcagcagactgtacgagggcgaggccgacatcatgatcagcttcgccgtgagagagcacggcgacttctaccccttcgacggccccggcaacgtgctggcccacgcctacgcccccggccccggcatcaacggcgacgcccacttcgacgacgacgagcagtggaccaaggacaccaccggcaccaacctgttcctggtggccgcccacgagatcggccacagcctgggcctgttccacagcgccaacaccgaggccctgatgtaccccctgtaccacagcctgaccgacctgaccagattcagactgagccaggacgacatcaacggcatccagagcctgtacggccccccccccgacagccccgagacccccctggtgcccaccgagcccgtgccccccgagcccggcacccccgccaactgcgaccccgccctgagcttcgacgccgtgagcaccctgagaggcgagatcctgatcttcaaggacagacacttctggagaaagagcctgagaaagctggagcccgagctgcacctgatcagcagcttctggcccagcctgcccagcggcgtggacgccgcctacgaggtgaccagcaaggacctggtgttcatcttcaagggcaaccagttctgggccatcagaggcaacgaggtgagagccggctaccccagaggcatccacaccctgggcttcccccccaccgtgagaaagatcgacgccgccatcagcgacaaggagaagaacaagacctacttcttcgtggaggacaagtactggagattcgacgagaagagaaacagcatggagcccggcttccccaagcagatcgccgaggacttccccggcatcgacagcaagatcgacgccgtgttcgaggagttcggcttcttctacttcttcaccggcagcagccagctggagttcgaccccaacgccaagaaggtgacccacaccctgaagagcaacagctggctgaactgctag

SEQ ID NO: 11382 - DNA, 804 bp, synthetic construct
  misc_feature 1..804: note = Description of Artificial Sequence: Synthetic coding sequence
  source 1..804: mol_type = other DNA
atgagactgaccgtgctgtgcgccgtgtgcctgctgcccggcagcctggccctgcccctgccccaggaggccggcggcatgagcgagctgcagtgggagcaggcccaggactacctgaagagattctacctgtacgacagcgagaccaagaacgccaacagcctggaggccaagctgaaggagatgcagaagttcttcggcctgcccatcaccggcatgctgaacagcagagtgatcgagatcatgcagaagcccagatgcggcgtgcccgacgtggccgagtacagcctgttccccaacagccccaagtggaccagcaaggtggtgacctacagaatcgtgagctacaccagagacctgccccacatcaccgtggacagactggtgagcaaggccctgaacatgtggggcaaggagatccccctgcacttcagaaaggtggtgtggggcaccgccgacatcatgatcggcttcgccagaggcgcccacggcgacagctaccccttcgacggccccggcaacaccctggcccacgccttcgcccccggcaccggcctgggcggcgacgcccacttcgacgaggacgagagatggaccgacggcagcagcctgggcatcaacttcctgtacgccgccacccacgagctgggccacagcctgggcatgggccacagcagcgaccccaacgccgtgatgtaccccacctacggcaacggcgacccccagaacttcaagctgagccaggacgacatcaagggcatccagaagctgtacggcaagagaagcaacagcagaaagaagtag

SEQ ID NO: 11383 - DNA, 2124 bp, synthetic construct
  misc_feature 1..2124: note = Description of Artificial Sequence: Synthetic coding sequence
  source 1..2124: mol_type = other DNA
atgagcctgtggcagcccctggtgctggtgctgctggtgctgggctgctgcttcgccgcccccagacagagacagagcaccctggtgctgttccccggcgacctgagaaccaacctgaccgacagacagctggccgaggagtacctgtacagatacggctacaccagagtggccgagatgagaggcgagagcaagagcctgggccccgccctgctgctgctgcagaagcagctgagcctgcccgagaccggcgagctggacagcgccaccctgaaggccatgagaacccccagatgcggcgtgcccgacctgggcagattccagaccttcgagggcgacctgaagtggcaccaccacaacatcacctactggatccagaactacagcgaggacctgcccagagccgtgatcgacgacgccttcgccagagccttcgccctgtggagcgccgtgacccccctgaccttcaccagagtgtacagcagagacgccgacatcgtgatccagttcggcgtggccgagcacggcgacggctaccccttcgacggcaaggacggcctgctggcccacgccttcccccccggccccggcatccagggcgacgcccacttcgacgacgacgagctgtggagcctgggcaagggcgtggtggtgcccaccagattcggcaacgccgacggcgccgcctgccacttccccttcatcttcgagggcagaagctacagcgcctgcaccaccgacggcagaagcgacggcctgccctggtgcagcaccaccgccaactacgacaccgacgacagattcggcttctgccccagcgagagactgtacacccaggacggcaacgccgacggcaagccctgccagttccccttcatcttccagggccagagctacagcgcctgcaccaccgacggcagaagcgacggctacagatggtgcgccaccaccgccaactacgacagagacaagctgttcggcttctgccccaccagagccgacagcaccgtgatgggcggcaacagcgccggcgagctgtgcgtgttccccttcaccttcctgggcaaggagtacagcacctgcaccagcgagggcagaggcgacggcagactgtggtgcgccaccaccagcaacttcgacagcgacaagaagtggggcttctgccccgaccagggctacagcctgttcctggtggccgcccacgagttcggccacgccctgggcctggaccacagcagcgtgcccgaggccctgatgtaccccatgtacagattcaccgagggcccccccctgcacaaggacgacgtgaacggcatcagacacctgtacggccccagacccgagcccgagcccagaccccccaccaccaccaccccccagcccaccgccccccccaccgtgtgccccaccggcccccccaccgtgcaccccagcgagagacccaccgccggccccaccggcccccccagcgccggccccaccggcccccccaccgccggccccagcaccgccaccaccgtgcccctgagccccgtggacgacgcctgcaacgtgaacatcttcgacgccatcgccgagatcggcaaccagctgtacctgttcaaggacggcaagtactggagattcagcgagggcagaggcagcagaccccagggccccttcctgatcgccgacaagtggcccgccctgcccagaaagctggacagcgtgttcgaggagagactgagcaagaagctgttcttcttcagcggcagacaggtgtgggtgtacaccggcgccagcgtgctgggccccagaagactggacaagctgggcctgggcgccgacgtggcccaggtgaccggcgccctgagaagcggcagaggcaagatgctgctgttcagcggcagaagactgtggagattcgacgtgaaggcccagatggtggaccccagaagcgccagcgaggtggacagaatgttccccggcgtgcccctggacacccacgacgtgttccagtacagagagaaggcctacttctgccaggacagattctactggagagtgagcagcagaagcgagctgaaccaggtggaccaggtgggctacgtgacctacgacatcctgcagtgccccgaggactag

SEQ ID NO: 11384 - DNA, 834 bp, synthetic construct
  misc_feature 1..834: note = Description of Artificial Sequence: Synthetic coding sequence
  source 1..834: mol_type = other DNA
atgggcggcaacagcgccggcgagctgtgcgtgttccccttcaccttcctgggcaaggagtacagcaacttcgacagcgacaagaagtggggcttctgccccgaccagggctacagcctgttcctggtggccgcccacgagttcggccacgccctgggcctggaccacagcagcgtgcccgaggccctgatgtaccccatgtacagattcaccgagggcccccccctgcacaaggacgacgtgaacggcatcagacacctgtacggccccagacccgagcccgagcccagaccccccaccaccaccaccccccagcccaccgccccccccaccgtgtgccccaccggcccccccaccgtgcacccccccttcctgatcgccgacaagtggcccgccctgcccagaaagctggacagcgtgttcgaggagagactgagcaagaagctgttcttcttcagcggcagacaggtgtgggtgtacaccggcgccagcgtgctgggccccagaagactggacaagctgggcctgggcgccgacgtggcccaggtgaccggcgccctgagaagcggcagaggcaagatgctgctgttcagcggcagaagactgtggagattcgacgtgaaggcccagatggtggaccccagaagcgccagcgaggtggacagaatgttccccggcgtgcccctggacacccacgacgtgttccagtacagagagaaggcctacttctgccaggacagattctactggagagtgagcagcagaagcgagctgaaccaggtggaccaggtgggctacgtgacctacgacatcctgcagtgccccgaggactag

SEQ ID NO: 11385 - DNA, 324 bp, synthetic construct
  misc_feature 1..324: note = Description of Artificial Sequence: Synthetic coding sequence
  source 1..324: mol_type = other DNA
atggccggcgaggacgtgggcgccccccccgaccacctgtgggtgcaccaggagggcatctacagagacgagtaccagagaacctgggtggccgtggtggaggaggagaccagcttcctgagagccagagtgcagcagatccaggtgcccctgggcgacgccgccagacccagccacctgctgaccagccagctgcccctgatgtggcagctgtaccccgaggagagatacatggacaacaacagcagactgtggcagatccagcaccacctgatggtgagaggcgtgcaggagctgctgctgaagctgctgcccgacgactag

SEQ ID NO: 11386 - DNA, 324 bp, synthetic construct; identical to SEQ ID NO: 11385
  misc_feature 1..324: note = Description of Artificial Sequence: Synthetic coding sequence
  source 1..324: mol_type = other DNA

SEQ ID NO: 11387 - DNA, 1329 bp, synthetic construct
  misc_feature 1..1329: note = Description of Artificial Sequence: Synthetic coding sequence
  source 1..1329: mol_type = other DNA
atggtgagaagcagacagatgtgcaacaccaacatgagcgtgcccaccgacggcgccgtgaccaccagccagatccccgccagcgagcaggagaccctggtgagacccaagcccctgctgctgaagctgctgaagagcgtgggcgcccagaaggacacctacaccatgaaggaggtgctgttctacctgggccagtacatcatgaccaagagactgtacgacgagaagcagcagcacatcgtgtactgcagcaacgacctgctgggcgacctgttcggcgtgcccagcttcagcgtgaaggagcacagaaagatctacaccatgatctacagaaacctggtggtggtgaaccagcaggaggagaacagcgacgagctgagcggcgagagacagagaaagagacacaagagcgacagcatcagcctgagcttcgacgagagcctggccctgtgcgtgatcagagagatctgctgcgagagaagcagcagcagcgagagcaccggcacccccagcaaccccgacctggacgccggcgtgagcgagcacagcggcgactggctggaccaggacagcgtgagcgaccagttcagcgtggagttcgaggtggagagcctggacagcgaggactacagcctgagcgaggagggccaggagctgagcgacgaggacgacgaggtgtaccaggtgaccgtgtaccaggccggcgagagcgacaccgacagcttcgaggaggaccccgagatcagcctggccgactactggaagtgcaccagctgcaacgagatgaacccccccctgcccagccactgcaacagatgctgggccctgagagagaactggctgcccgaggacaagggcaaggacaagggcgagatcagcgagaaggccaagctggagaacagcacccaggccgaggagggcttcgacgtgcccgactgcaagaagaccatcgtgaacgacagcagagagagctgcgtggaggagaacgacgacaagatcacccaggccagccagagccaggagagcgaggactacagccagcccagcaccagcagcagcatcatctacagcagccaggaggacgtgaaggagttcgagagagaggagacccaggacaaggaggagagcgtggagagcagcctgcccctgaacgccatcgagccctgcgtgatctgccagggcagacccaagaacggctgcatcgtgcacggcaagaccggccacctgatggcctgcttcacctgcgccaagaagctgaagaagagaaacaagccctgccccgtgtgcagacagcccatccagatgatcgtgctgacctacttcccctag

SEQ ID NO: 11388 - DNA, 1311 bp, synthetic construct
  misc_feature 1..1311: note = Description of Artificial Sequence: Synthetic coding sequence
  source 1..1311: mol_type = other DNA
atgtgcaacaccaacatgagcgtgcccaccgacggcgccgtgaccaccagccagatccccgccagcgagcaggagaccctggtgagacccaagcccctgctgctgaagctgctgaagagcgtgggcgcccagaaggacacctacaccatgaaggaggtgctgttctacctgggccagtacatcatgaccaagagactgtacgacgagaagcagcagcacatcgtgtactgcagcaacgacctgctgggcgacctgttcggcgtgcccagcttcagcgtgaaggagcacagaaagatctacaccatgatctacagaaacctggtggtggtgaaccagcaggaggagaacagcgacgagctgagcggcgagagacagagaaagagacacaagagcgacagcatcagcctgagcttcgacgagagcctggccctgtgcgtgatcagagagatctgctgcgagagaagcagcagcagcgagagcaccggcacccccagcaaccccgacctggacgccggcgtgagcgagcacagcggcgactggctggaccaggacagcgtgagcgaccagttcagcgtggagttcgaggtggagagcctggacagcgaggactacagcctgagcgaggagggccaggagctgagcgacgaggacgacgaggtgtaccaggtgaccgtgtaccaggccggcgagagcgacaccgacagcttcgaggaggaccccgagatcagcctggccgactactggaagtgcaccagctgcaacgagatgaacccccccctgcccagccactgcaacagatgctgggccctgagagagaactggctgcccgaggacaagggcaaggacaagggcgagatcagcgagaaggccaagctggagaacagcacccaggccgaggagggcttcgacgtgcccgactgcaagaagaccatcgtgaacgacagcagagagagctgcgtggaggagaacgacgacaagatcacccaggccagccagagccaggagagcgaggactacagccagcccagcaccagcagcagcatcatctacagcagccaggaggacgtgaaggagttcgagagagaggagacccaggacaaggaggagagcgtggagagcagcctgcccctgaacgccatcgagccctgcgtgatctgccagggcagacccaagaacggctgcatcgtgcacggcaagaccggccacctgatggcctgcttcacctgcgccaagaagctgaagaagagaaacaagccctgccccgtgtgcagacagcccatccagatgatcgtgctgacctacttcccctag

SEQ ID NO: 11389 - DNA, 966 bp, synthetic construct
  misc_feature 1..966: note = Description of Artificial Sequence: Synthetic coding sequence
  source 1..966: mol_type = other DNA
atgtgcaacaccaacatgagcgtgcccaccgacggcgccgtgaccaccagccagatccccgccagcgagcaggagaccctggtgagacccaagcccctgctgctgaagctgctgaagagcgtgggcgcccagaaggacacctacaccatgaaggaggacctggacgccggcgtgagcgagcacagcggcgactggctggaccaggacagcgtgagcgaccagttcagcgtggagttcgaggtggagagcctggacagcgaggactacagcctgagcgaggagggccaggagctgagcgacgaggacgacgaggtgtaccaggtgaccgtgtaccaggccggcgagagcgacaccgacagcttcgaggaggaccccgagatcagcctggccgactactggaagtgcaccagctgcaacgagatgaacccccccctgcccagccactgcaacagatgctgggccctgagagagaactggctgcccgaggacaagggcaaggacaagggcgagatcagcgagaaggccaagctggagaacagcacccaggccgaggagggcttcgacgtgcccgactgcaagaagaccatcgtgaacgacagcagagagagctgcgtggaggagaacgacgacaagatcacccaggccagccagagccaggagagcgaggactacagccagcccagcaccagcagcagcatcatctacagcagccaggaggacgtgaaggagttcgagagagaggagacccaggacaaggaggagagcgtggagagcagcctgcccctgaacgccatcgagccctgcgtgatctgccagggcagacccaagaacggctgcatcgtgcacggcaagaccggccacctgatggcctgcttcacctgcgccaagaagctgaagaagagaaacaagccctgccccgtgtgcagacagcccatccagatgatcgtgctgacctacttcccctag

SEQ ID NO: 11390 - DNA, 1359 bp, synthetic construct
  misc_feature 1..1359: note = Description of Artificial Sequence: Synthetic coding sequence
  source 1..1359: mol_type = other DNA
atggtgagaagcagacagatgtgcaacaccaacatgagcgtgcccaccgacggcgccgtgaccaccagccagatccccgccagcgagcaggagaccctggtgagacccaagcccctgctgctgaagctgctgaagagcgtgggcgcccagaaggacacctacaccatgaaggagaagatctacaccatgatctacagaaacctggtggtggtgaaccagcaggagagcagcgacagcggcaccagcgtgagcgagaacagatgccacctggagggcggcagcgaccagaaggacctggtgcaggagctgcaggaggagaagcccagcagcagccacctggtgagcagacccagcaccagcagcagaagaagagccatcagcgagaccgaggagaacagcgacgagctgagcggcgagagacagagaaagagacacaagagcgacagcatcagcctgagcttcgacgagagcctggccctgtgcgtgatcagagagatctgctgcgagagaagcagcagcagcgagagcaccggcacccccagcaaccccgacctggacgccggcgtgagcgagcacagcggcgactggctggaccaggacagcgtgagcgaccagttcagcgtggagttcgaggtggagagcctggacagcgaggactacagcctgagcgaggagggccaggagctgagcgacgaggacgacgaggtgtaccaggtgaccgtgtaccaggccggcgagagcgacaccgacagcttcgaggaggaccccgagatcagcctggccgactactggaagtgcaccagctgcaacgagatgaacccccccctgcccagccactgcaacagatgctgggccctgagagagaactggctgcccgaggacaagggcaaggacaagggcgagatcagcgagaaggccaagctggagaacagcacccaggccgaggagggcttcgacgtgcccgactgcaagaagaccatcgtgaacgacagcagagagagctgcgtggaggagaacgacgacaagatcacccaggccagccagagccaggagagcgaggactacagccagcccagcaccagcagcagcatcatctacagcagccaggaggacgtgaaggagttcgagagagaggagacccaggacaaggaggagagcgtggagagcagcctgcccctgaacgccatcgagccctgcgtgatctgccagggcagacccaagaacggctgcatcgtgcacggcaagaccggccacctgatggcctgcttcacctgcgccaagaagctgaagaagagaaacaagccctgccccgtgtgcagacagcccatccagatgatcgtgctgacctacttcccctag

SEQ ID NO: 11391 - DNA, 771 bp, synthetic construct
  misc_feature 1..771: note = Description of Artificial Sequence: Synthetic coding sequence
  source 1..771: mol_type = other DNA
atgtgcaacaccaacatgagcgtgcccaccgacggcgccgtgaccaccagccagatccccgccagcgagcaggagaccctggtgagacccaagcccctgctgctgaagctgctgaagagcgtgggcgcccagaaggacacctacaccatgaaggaggtgctgttctacctgggccagtacatcatgaccaagagactgtacgacgagaagcagcagcacatcgtgtactgcagcaacgacctgctgggcgacctgttcggcgtgcccagcttcagcgtgaaggagcacagaaagatctacaccatgatctacagaaacctggtggtggtgaaccagcaggagagcagcgacagcggcaccagcgtgagcgagaacagatgccacctggagggcggcagcgaccagaaggacctggtgcaggagctgcaggaggagaagcccagcagcagccacctggtgagcagacccagcaccagcagcagaagaagagccatcagcgagaccgaggagaacagcgacgagctgagcggcgagagacagagaaagagacacaagagcgacagcatcagcctgagcttcgacgagagcctggccctgtgcgtgatcagagagatctgctgcgagagaagcagcagcagcgagagcaccggcacccccagcaaccccgacctgctgctgggcgtgtaccaggtgaccgtgtaccaggccggcgagagcgacaccgacagcttcgaggaggaccccgagatcagcctggcccactacctgtag

SEQ ID NO: 11392 - DNA, 798 bp, synthetic construct
  misc_feature 1..798: note = Description of Artificial Sequence: Synthetic coding sequence
  source 1..798: mol_type = other DNA
atgagcgtgcccaccgacggcgccgtgaccaccagccagatccccgccagcgagcaggagaccctggacctggacgccggcgtgagcgagcacagcggcgactggctggaccaggacagcgtgagcgaccagttcagcgtggagttcgaggtggagagcctggacagcgaggactacagcctgagcgaggagggccaggagctgagcgacgaggacgacgaggactactggaagtgcaccagctgcaacgagatgaacccccccctgcccagccactgcaacagatgctgggccctgagagagaactggctgcccgaggacaagggcaaggacaagggcgagatcagcgagaaggccaagctggagaacagcacccaggccgaggagggcttcgacgtgcccgactgcaagaagaccatcgtgaacgacagcagagagagctgcgtggaggagaacgacgacaagatcacccaggccagccagagccaggagagcgaggactacagccagcccagcaccagcagcagcatcatctacagcagccaggaggacgtgaaggagttcgagagagaggagacccaggacaaggaggagagcgtggagagcagcctgcccctgaacgccatcgagccctgcgtgatctgccagggcagacccaagaacggctgcatcgtgcacggcaagaccggccacctgatggcctgcttcacctgcgccaagaagctgaagaagagaaacaagccctgccccgtgtgcagacagcccatccagatgatcgtgctgacctacttcccctag

SEQ ID NO: 11393 - DNA, 1401 bp, synthetic construct
  misc_feature 1..1401: note = Description of Artificial Sequence: Synthetic coding sequence
  source 1..1401: mol_type = other DNA
atgtgcaacaccaacatgagcgtgcccaccgacggcgccgtgaccaccagccagatccccgccagcgagcaggagaccctggtgctgttctacctgggccagtacatcatgaccaagagactgtacgacgagaagcagcagcacatcgtgtactgcagcaacgacctgctgggcgacctgttcggcgtgcccagcttcagcgtgaaggagcacagaaagatctacaccatgatctacagaaacctggtggtggtgaaccagcaggagagcagcgacagcggcaccagcgtgagcgagaacagatgccacctggagggcggcagcgaccagaaggacctggtgcaggagctgcaggaggagaagcccagcagcagccacctggtgagcagacccagcaccagcagcagaagaagagccatcagcgagaccgaggagaacagcgacgagctgagcggcgagagacagagaaagagacacaagagcgacagcatcagcctgagcttcgacgagagcctggccctgtgcgtgatcagagagatctgctgcgagagaagcagcagcagcgagagcaccggcacccccagcaaccccgacctggacgccggcgtgagcgagcacagcggcgactggctggaccaggacagcgtgagcgaccagttcagcgtggagttcgaggtggagagcctggacagcgaggactacagcctgagcgaggagggccaggagctgagcgacgaggacgacgaggtgtaccaggtgaccgtgtaccaggccggcgagagcgacaccgacagcttcgaggaggaccccgagatcagcctggccgactactggaagtgcaccagctgcaacgagatgaacccccccctgcccagccactgcaacagatgctgggccctgagagagaactggctgcccgaggacaagggcaaggacaagggcgagatcagcgagaaggccaagctggagaacagcacccaggccgaggagggcttcgacgtgcccgactgcaagaagaccatcgtgaacgacagcagagagagctgcgtggaggagaacgacgacaagatcacccaggccagccagagccaggagagcgaggactacagccagcccagcaccagcagcagcatcatctacagcagccaggaggacgtgaaggagttcgagagagaggagacccaggacaaggaggagagcgtggagagcagcctgcccctgaacgccatcgagccctgcgtgatctgccagggcagacccaagaacggctgcatcgtgcacggcaagaccggccacctgatggcctgcttcacctgcgccaagaagctgaagaagagaaacaagccctgccccgtgtgcagacagcccatccagatgatcgtgctgacctacttcccctag

SEQ ID NO: 11394 - DNA, 966 bp, synthetic construct; identical to SEQ ID NO: 11389
  misc_feature 1..966: note = Description of Artificial Sequence: Synthetic coding sequence
  source 1..966: mol_type = other DNA

SEQ ID NO: 11395 - DNA, 480 bp, synthetic construct
  misc_feature 1..480: note = Description of Artificial Sequence: Synthetic coding sequence
  source 1..480: mol_type = other DNA
atgtgcaacaccaacatgagcgtgcccaccgacggcgccgtgaccaccagccagatccccgccagcgagcaggagaccctggtgagacccaagcccctgctgctgaagctgctgaagagcgtgggcgcccagaaggacacctacaccatgaaggaggacctggacgccggcgtgagcgagcacagcggcgactggctggaccaggacagcgtgagcgaccagttcagcgtggagttcgaggtggagagcctggacagcgaggactacagcctgagcgaggagggccaggagctgagcgacgaggacgacgaggtgtaccaggtgaccgtgtaccaggccggcgagagcgacaccgacagcttcgaggaggaccccgagatcagcctggccgactactggaagtgcctgaagaagagaaacaagccctgccccgtgtgcagacagcccatccagatgatcgtgctgacctacttcccctag

SEQ ID NO: 11396 - DNA, 891 bp, synthetic construct
  misc_feature 1..891: note = Description of Artificial Sequence: Synthetic coding sequence
  source 1..891: mol_type = other DNA
atgtgcaacaccaacatgagcgtgcccaccgacggcgccgtgaccaccagccagatccccgccagcgagcaggagaccctggacctggacgccggcgtgagcgagcacagcggcgactggctggaccaggacagcgtgagcgaccagttcagcgtggagttcgaggtggagagcctggacagcgaggactacagcctgagcgaggagggccaggagctgagcgacgaggacgacgaggtgtaccaggtgaccgtgtaccaggccggcgagagcgacaccgacagcttcgaggaggaccccgagatcagcctggccgactactggaagtgcaccagctgcaacgagatgaacccccccctgcccagccactgcaacagatgctgggccctgagagagaactggctgcccgaggacaagggcaaggacaagggcgagatcagcgagaaggccaagctggagaacagcacccaggccgaggagggcttcgacgtgcccgactgcaagaagaccatcgtgaacgacagcagagagagctgcgtggaggagaacgacgacaagatcacccaggccagccagagccaggagagcgaggactacagccagcccagcaccagcagcagcatcatctacagcagccaggaggacgtgaaggagttcgagagagaggagacccaggacaaggaggagagcgtggagagcagcctgcccctgaacgccatcgagccctgcgtgatctgccagggcagacccaagaacggctgcatcgtgcacggcaagaccggccacctgatggcctgcttcacctgcgccaagaagctgaagaagagaaacaagccctgccccgtgtgcagacagcccatccagatgatcgtgctgacctacttcccctag

SEQ ID NO: 11397 - DNA, 732 bp, synthetic construct
  misc_feature 1..732: note = Description of Artificial Sequence: Synthetic coding sequence
  source 1..732: mol_type = other DNA
atgtgcaacaccaacatgagcgtgcccaccgacggcgccgtgaccaccagccagatccccgccagcgagcaggagaccctggtgagacccaagcccctgctgctgaagctgctgaagagcgtgggcgcccagaaggacacctacaccatgaaggaggactactggaagtgcaccagctgcaacgagatgaacccccccctgcccagccactgcaacagatgctgggccctgagagagaactggctgcccgaggacaagggcaaggacaagggcgagatcagcgagaaggccaagctggagaacagcacccaggccgaggagggcttcgacgtgcccgactgcaagaagaccatcgtgaacgacagcagagagagctgcgtggaggagaacgacgacaagatcacccaggccagccagagccaggagagcgaggactacagccagcccagcaccagcagcagcatcatctacagcagccaggaggacgtgaaggagttcgagagagaggagacccaggacaaggaggagagcgtggagagcagcctgcccctgaacgccatcgagccctgcgtgatctgccagggcagacccaagaacggctgcatcgtgcacggcaagaccggccacctgatggcctgcttcacctgcgccaagaagctgaagaagagaaacaagccctgccccgtgtgcagacagcccatccagatgatcgtgctgacctacttcccctag

SEQ ID NO: 11398 - DNA, 657 bp, synthetic construct
  misc_feature 1..657: note = Description of Artificial Sequence: Synthetic coding sequence
  source 1..657: mol_type = other DNA
atgtgcaacaccaacatgagcgtgcccaccgacggcgccgtgaccaccagccagatccccgccagcgagcaggagaccctggactactggaagtgcaccagctgcaacgagatgaacccccccctgcccagccactgcaacagatgctgggccctgagagagaactggctgcccgaggacaagggcaaggacaagggcgagatcagcgagaaggccaagctggagaacagcacccaggccgaggagggcttcgacgtgcccgactgcaagaagaccatcgtgaacgacagcagagagagctgcgtggaggagaacgacgacaagatcacccaggccagccagagccaggagagcgaggactacagccagcccagcaccagcagcagcatcatctacagcagccaggaggacgtgaaggagttcgagagagaggagacccaggacaaggaggagagcgtggagagcagcctgcccctgaacgccatcgagccctgcgtgatctgccagggcagacccaagaacggctgcatcgtgcacggcaagaccggccacctgatggcctgcttcacctgcgccaagaagctgaagaagagaaacaagccctgccccgtgtgcagacagcccatccagatgatcgtgctgacctacttcccctag

SEQ ID NO: 11399 - DNA, 657 bp, synthetic construct; identical to SEQ ID NO: 11398
  misc_feature 1..657: note = Description of Artificial Sequence: Synthetic coding sequence
  source 1..657: mol_type = other DNA

SEQ ID NO: 11400 - DNA, 771 bp, synthetic construct
  misc_feature 1..771: note = Description of Artificial Sequence: Synthetic coding sequence
  source 1..771: mol_type = other DNA
atgtgcaacaccaacatgagcgtgcccaccgacggcgccgtgaccaccagccagatccccgccagcgagcaggagaccctggtgagacccaagcccctgctgctgaagctgctgaagagcgtgggcgcccagaaggacacctacaccatgaaggaggtgctgttctacctgggccagtacatcatgaccaagagactgtacgacgagaagcagcagcacatcgtgtactgcagcaacgacctgctgggcgacctgttcggcgtgcccagcttcagcgtgaaggagcacagaaagatctacaccatgatctacagaaacctggtggtggtgaaccagcaggagagcagcgacagcggcaccagcgtgagcgagaacagatgccacctggagggcggcagcgaccagaaggacctggtgcaggagctgcaggaggagaagcccagcagcagccacctggtgagcagacccagcaccagcagcagaagaagagccatcagcgagaccgaggagaacagcgacgagctgagcggcgagagacagagaaagagacacaagagcgacagcatcagcctgagcttcgacgagagcctggccctgtgcgtgatcagagagatctgctgcgagagaagcagcagcagcgagagcaccggcacccccagcaaccccgacctggacgccggcgtgtaccaggtgaccgtgtaccaggccggcgagagcgacaccgacagcttcgaggaggaccccgagatcagcctggccgactactggtag

SEQ ID NO: 11401 - DNA, 813 bp, synthetic construct
  misc_feature 1..813: note = Description of Artificial Sequence: Synthetic coding sequence
  source 1..813: mol_type = other DNA
atgtgcaacaccaacatgagcgtgcccaccgacggcgccgtgaccaccagccagatccccgccagcgagcaggagaccctggacctggacgccggcgtgagcgagcacagcggcgactggctggaccaggacagcgtgagcgaccagttcagcgtggagttcgaggtggagagcctggacagcgaggactacagcctgagcgaggagggccaggagctgagcgacgaggacgacgaggactactggaagtgcaccagctgcaacgagatgaacccccccctgcccagccactgcaacagatgctgggccctgagagagaactggctgcccgaggacaagggcaaggacaagggcgagatcagcgagaaggccaagctggagaacagcacccaggccgaggagggcttcgacgtgcccgactgcaagaagaccatcgtgaacgacagcagagagagctgcgtggaggagaacgacgacaagatcacccaggccagccagagccaggagagcgaggactacagccagcccagcaccagcagcagcatcatctacagcagccaggaggacgtgaaggagttcgagagagaggagacccaggacaaggaggagagcgtggagagcagcctgcccctgaacgccatcgagccctgcgtgatctgccagggcagacccaagaacggctgcatcgtgcacggcaagaccggccacctgatggcctgcttcacctgcgccaagaagctgaagaagagaaacaagccctgccccgtgtgcagacagcccatccagatgatcgtgctgacctacttcccctag

SEQ ID NO: 11402 - DNA, 1494 bp, synthetic construct
  misc_feature 1..1494: note = Description of Artificial Sequence: Synthetic coding sequence
  source 1..1494: mol_type = other DNA
atggtgagaagcagacagatgtgcaacaccaacatgagcgtgcccaccgacggcgccgtgaccaccagccagatccccgccagcgagcaggagaccctggtgagacccaagcccctgctgctgaagctgctgaagagcgtgggcgcccagaaggacacctacaccatgaaggaggtgctgttctacctgggccagtacatcatgaccaagagactgtacgacgagaagcagcagcacatcgtgtactgcagcaacgacctgctgggcgacctgttcggcgtgcccagcttcagcgtgaaggagcacagaaagatctacaccatgatctacagaaacctggtggtggtgaaccagcaggagagcagcgacagcggcaccagcgtgagcgagaacagatgccacctggagggcggcagcgaccagaaggacctggtgcaggagctgcaggaggagaagcccagcagcagccacctggtgagcagacccagcaccagcagcagaagaagagccatcagcgagaccgaggagaacagcgacgagctgagcggcgagagacagagaaagagacacaagagcgacagcatcagcctgagcttcgacgagagcctggccctgtgcgtgatcagagagatctgctgcgagagaagcagcagcagcgagagcaccggcacccccagcaaccccgacctggacgccggcgtgagcgagcacagcggcgactggctggaccaggacagcgtgagcgaccagttcagcgtggagttcgaggtggagagcctggacagcgaggactacagcctgagcgaggagggccaggagctgagcgacgaggacgacgaggtgtaccaggtgaccgtgtaccaggccggcgagagcgacaccgacagcttcgaggaggaccccgagatcagcctggccgactactggaagtgcaccagctgcaacgagatgaacccccccctgcccagccactgcaacagatgctgggccctgagagagaactggctgcccgaggacaagggcaaggacaagggcgagatcagcgagaaggccaagctggagaacagcacccaggccgaggagggcttcgacgtgcccgactgcaagaagaccatcgtgaacgacagcagagagagctgcgtggaggagaacgacgacaagatcacccaggccagccagagccaggagagcgaggactacagccagcccagcaccagcagcagcatcatctacagcagccaggaggacgtgaaggagttcgagagagaggagacccaggacaaggaggagagcgtggagagcagcctgcccctgaacgccatcgagccctgcgtgatctgccagggcagacccaagaacggctgcatcgtgcacggcaagaccggccacctgatggcctgcttcacctgcgccaagaagctgaagaagagaaacaagccctgccccgtgtgcagacagcccatccagatgatcgtgctgacctacttcccctag

SEQ ID NO: 11403 - DNA, 393 bp, synthetic construct
  misc_feature 1..393: note = Description of Artificial Sequence: Synthetic coding sequence
  source 1..393: mol_type = other DNA
atgtgcaacaccaacatgagcgtgcccaccgacggcgccgtgaccaccagccagatccccgccagcgagcaggagaccctggtgagacccaagcccctgctgctgaagctgctgaagagcgtgggcgcccagaaggacacctacaccatgaaggagttcgagagagaggagacccaggacaaggaggagagcgtggagagcagcctgcccctgaacgccatcgagccctgcgtgatctgccagggcagacccaagaacggctgcatcgtgcacggcaagaccggccacctgatggcctgcttcacctgcgccaagaagctgaagaagagaaacaagccctgccccgtgtgcagacagcccatccagatgatcgtgctgacctacttcccctag

SEQ ID NO: 11404 - DNA, 774 bp, synthetic construct
  misc_feature 1..774: note = Description of Artificial Sequence: Synthetic coding sequence
  source 1..774: mol_type = other DNA
atgtgcaacaccaacatgagcgtgcccaccgacggcgccgtgaccaccagccagatccccgccagcgagcaggagaccctggtgagacccaagcccctgctgctgaagctgctgaagagcgtgggcgcccagaaggacacctacaccatgaaggaggtgctgttctacctgggccagtacatcatgaccaagagactgtacgacgagaagcagcagcacatcgtgtactgcagcaacgacctgctgggcgacctgttcggcgtgcccagcttcagcgtgaaggagcacagaaagatctacaccatgatctacagaaacctggtggtggtgaaccagcaggagagcagcgacagcggcaccagcgtgagcgagaacagatgccacctggagggcggcagcgaccagaaggacctggtgcaggagctgcaggaggagaagcccagcagcagccacctggtgagcagacccagcaccagcagcagaagaagagccatcagcgagaccgaggagaacagcgacgagctgagcggcgagagacagagaaagagacacaagagcgacagcatcagcctgagcttcgacgagagcctggccctgtgcgtgatcagagagatctgctgcgagagaagcagcagcagcgagagcaccggcacccccagcaaccccgacctggacgccggcgtgagcgagcacagcggcgactggctggaccaggacagcgtgagcgaccagttcagcgtggagttcgaggtggagagcctggacagcgagtag

SEQ ID NO: 11405 - DNA, 891 bp, synthetic construct; identical to SEQ ID NO: 11396
  misc_feature 1..891: note = Description of Artificial Sequence: Synthetic coding sequence
  source 1..891: mol_type = other DNA

SEQ ID NO: 11406 - DNA, 1341 bp, synthetic construct
  misc_feature 1..1341: note = Description of Artificial Sequence: Synthetic coding sequence
  source 1..1341: mol_type = other DNA
atgtgcaacaccaacatgagcgtgcccaccgacggcgccgtgaccaccagccagatccccgccagcgagcaggagaccctggtgagacccaagcccctgctgctgaagctgctgaagagcgtgggcgcccagaaggacacctacaccatgaaggagaagatctacaccatgatctacagaaacctggtggtggtgaaccagcaggagagcagcgacagcggcaccagcgtgagcgagaacagatgccacctggagggcggcagcgaccagaaggacctggtgcaggagctgcaggaggagaagcccagcagcagccacctggtgagcagacccagcaccagcagcagaagaagagccatcagcgagaccgaggagaacagcgacgagctgagcggcgagagacagagaaagagacacaagagcgacagcatcagcctgagcttcgacgagagcctggccctgtgcgtgatcagagagatctgctgcgagagaagcagcagcagcgagagcaccggcacccccagcaaccccgacctggacgccggcgtgagcgagcacagcggcgactggctggaccaggacagcgtgagcgaccagttcagcgtggagttcgaggtggagagcctggacagcgaggactacagcctgagcgaggagggccaggagctgagcgacgaggacgacgaggtgtaccaggtgaccgtgtaccaggccggcgagagcgacaccgacagcttcgaggaggaccccgagatcagcctggccgactactggaagtgcaccagctgcaacgagatgaacccccccctgcccagccactgcaacagatgctgggccctgagagagaactggctgcccgaggacaagggcaaggacaagggcgagatcagcgagaaggccaagctggagaacagcacccaggccgaggagggcttcgacgtgcccgactgcaagaagaccatcgtgaacgacagcagagagagctgcgtggaggagaacgacgacaagatcacccaggccagccagagccaggagagcgaggactacagccagcccagcaccagcagcagcatcatctacagcagccaggaggacgtgaaggagttcgagagagaggagacccaggacaaggaggagagcgtggagagcagcctgcccctgaacgccatcgagccctgcgtgatctgccagggcagacccaagaacggctgcatcgtgcacggcaagaccggccacctgatggcctgcttcacctgcgccaagaagctgaagaagagaaacaagccctgccccgtgtgcagacagcccatccagatgatcgtgctgacctacttcccctag

SEQ ID NO: 11407 - DNA, 642 bp, synthetic construct
  misc_feature 1..642: note = Description of Artificial Sequence: Synthetic coding sequence
  source 1..642: mol_type = other DNA
atgcccaacttcgtggtggactggagagtgtacaccgacagcctgttcctgaccgtggacttcggcctgtgcgccgaggagagcagcaccagcagaaagagaaccaccgaggacgacatccccaccctgcccaccagcgagcacaagtgcatccacagcagagaggacgaggacctgatcgagaacctggcccaggacgagaccagcagactggacctgggcttcgaggagtgggacgtggccggcctgccctggtggttcctgggcaacctgagaagcaactacacccccagaagcaacggcagcaccgacctgcagaccaaccaggacgtgggcaccgccatcgtgagcgacaccaccgacgacctgtggttcctgaacgagagcgtgagcgagcagctgggcgtgggcatcaaggtggaggccgccgacaccgagcagaccagcgaggaggtgggcaaggtgagcgacaagaaggtgatcgaggtgggcaagaacgacgacctggaggacagcaagagcctgagcgacgacaccgacgtggaggtgaccagcgaggacgagtggcagtgcaccgagtgcaagaagttcaacagccccagcaagagatactgcttcagatgctgggccctgagaaagtag

SEQ ID NO: 11408 - DNA, 396 bp, synthetic construct
  misc_feature 1..396: note = Description of Artificial Sequence: Synthetic coding sequence
  source 1..396: mol_type = other DNA
atgaccagcttcagcaccagcgcccagtgcagcaccagcgacagcgcctgcagaatcagccccggccagatcaaccaggtgagacccaagctgcccctgctgaagatcctgcacgccgccggcgcccagggcgagatgttcaccgtgaaggaggtgatgcactacctgggccagtacatcatggtgaagcagctgtacgaccagcaggagcagcacatggtgtactgcggcggcgacctgctgggcgagctgctgggcagacagagcttcagcgtgaaggaccccagccccctgtacgacatgctgagaaagaacctggtgaccctggccaccgccaccaccgagatgggccacctgttctgcagaatcagccacgccctggagctggccgactag

SEQ ID NO: 11409 - DNA, 1473 bp, synthetic construct
  misc_feature 1..1473: note = Description of Artificial Sequence: Synthetic coding sequence
  source 1..1473: mol_type = other DNA
atgaccagcttcagcaccagcgcccagtgcagcaccagcgacagcgcctgcagaatcagccccggccagatcaaccaggtgagacccaagctgcccctgctgaagatcctgcacgccgccggcgcccagggcgagatgttcaccgtgaaggaggtgatgcactacctgggccagtacatcatggtgaagcagctgtacgaccagcaggagcagcacatggtgtactgcggcggcgacctgctgggcgagctgctgggcagacagagcttcagcgtgaaggaccccagccccctgtacgacatgctgagaaagaacctggtgaccctggccaccgccaccaccgacgccgcccagaccctggccctggcccaggaccacagcatggacatccccagccaggaccagctgaagcagagcgccgaggagagcagcaccagcagaaagagaaccaccgaggacgacatccccaccctgcccaccagcgagcacaagtgcatccacagcagagaggacgaggacctgatcgagaacctggcccaggacgagaccagcagactggacctgggcttcgaggagtgggacgtggccggcctgccctggtggttcctgggcaacctgagaagcaactacacccccagaagcaacggcagcaccgacctgcagaccaaccaggacgtgggcaccgccatcgtgagcgacaccaccgacgacctgtggttcctgaacgagagcgtgagcgagcagctgggcgtgggcatcaaggtggaggccgccgacaccgagcagaccagcgaggaggtgggcaaggtgagcgacaagaaggtgatcgaggtgggcaagaacgacgacctggaggacagcaagagcctgagcgacgacaccgacgtggaggtgaccagcgaggacgagtggcagtgcaccgagtgcaagaagttcaacagccccagcaagagatactgcttcagatgctgggccctgagaaaggactggtacagcgactgcagcaagctgacccacagcctgagcaccagcgacatcaccgccatccccgagaaggagaacgagggcaacgacgtgcccgactgcagaagaaccatcagcgcccccgtggtgagacccaaggacgcctacatcaagaaggagaacagcaagctgttcgacccctgcaacagcgtggagttcctggacctggcccacagcagcgagagccaggagaccatcagcagcatgggcgagcagctggacaacctgagcgagcagagaaccgacaccgagaacatggaggactgccagaacctgctgaagccctgcagcctgtgcgagaagagacccagagacggcaacatcatccacggcagaaccggccacctggtgacctgcttccactgcgccagaagactgaagaaggccggcgccagctgccccatctgcaagaaggagatccagctggtgatcaaggtgttcatcgcctag

SEQ ID NO: 11410 - DNA, 495 bp, synthetic construct
  misc_feature 1..495: note = Description of Artificial Sequence: Synthetic coding sequence
  source 1..495: mol_type = other DNA
atgaccagcttcagcaccagcgcccagtgcagcaccagcgacagcgcctgcagaatcagccccggccagatcaaccaggagaacgagggcaacgacgtgcccgactgcagaagaaccatcagcgcccccgtggtgagacccaaggacgcctacatcaagaaggagaacagcaagctgttcgacccctgcaacagcgtggagttcctggacctggcccacagcagcgagagccaggagaccatcagcagcatgggcgagcagctggacaacctgagcgagcagagaaccgacaccgagaacatggaggactgccagaacctgctgaagccctgcagcctgtgcgagaagagacccagagacggcaacatcatccacggcagaaccggccacctggtgacctgcttccactgcgccagaagactgaagaaggccggcgccagctgccccatctgcaagaaggagatccagctggtgatcaaggtgttcatcgcctag

SEQ ID NO: 11411 - DNA, 423 bp, synthetic construct
  misc_feature 1..423: note = Description of Artificial Sequence: Synthetic coding sequence
  source 1..423: mol_type = other DNA
atgaccagcttcagcaccagcgcccagtgcagcaccagcgacagcgcctgcagaatcagccccggccagatcaaccaggtgagacccaagctgcccctgctgaagatcctgcacgccgccggcgcccagggcgagatgttcaccgtgaaggaggtgatgcactacctgggccagtacatcatggtgaagcagctgtacgaccagcaggagcagcacatggtgtactgcggcggcgacctgctgggcgagctgctgggcagacagagcttcagcgtgaaggaccccagccccctgtacgacatgctgagaaagaacctggtgaccctggccaccgccaccaccgccaagtgcagaggcaagttccacttccagaagaagaactacagaagaagatacccccacaccgcctacctgagagcctag

SEQ ID NO: 11412 - DNA, 516 bp, synthetic construct
  misc_feature 1..516: note = Description of Artificial Sequence: Synthetic coding sequence
  source 1..516: mol_type = other DNA
gacctgatcgagaacctggcccaggacgagaccagcagactggacctgggcttcgaggagtgggacgtggccggcctgccctggtggttcctgggcaacctgagaagcaactacacccccagaagcaacggcagcaccgacctgcagaccaaccaggtgatcgaggtgggcaagaacgacgacctggaggacagcaagagcctgagcgacgacaccgacgtggaggtgaccagcgaggacgagtggcagtgcaccgagtgcaagaagttcaacagccccagcaagagatactgcttcagatgctgggccctgagaaaggactggtacagcgactgcagcaagctgacccacagcctgagcaccagcgacatcaccgccatccccgagaaggagaacgagggcaacgacgtgcccgactgcagaagaaccatcagcgcccccgtggtgagacccaaggacgcctacatcaagaaggagaacagcaagctgttcgacccctgcaacagcgtggagtag

SEQ ID NO: 11413 - DNA, 1323 bp, synthetic construct
  misc_feature 1..1323: note = Description of Artificial Sequence: Synthetic coding sequence
  source 1..1323: mol_type = other DNA
atgaccagcttcagcaccagcgcccagtgcagcaccagcgacagcgcctgcagaatcagccccggccagatcaaccaggtgagacccaagctgcccctgctgaagatcctgcacgccgccggcgcccagggcgagatgttcaccgtgaaggaggtgatgcactacctgggccagtacatcatggtgaagcagctgtacgaccagcaggagcagcacatggtgtactgcggcggcgacctgctgggcgagctgctgggcagacagagcttcagcgtgaaggaccccagccccctgtacgacatgctgagaaagaacctggtgaccctggccaccgccaccaccgacgccgcccagaccctggccctggcccaggaccacagcatggacatccccagccaggaccagctgaagcagagcgccgaggagagcagcaccagcagaaagagaaccaccgaggacgacatccccaccctgcccaccagcgagcacaagtgcatccacagcagagaggacgaggacctgatcgagaacctggcccaggacgagaccagcagactggacctgggcttcgaggagtgggacgtggccggcctgccctggtggttcctgggcaacctgagaagcaactacacccccagaagcaacggcagcaccgacctgcagaccaaccaggtgatcgaggtgggcaagaacgacgacctggaggacagcaagagcctgagcgacgacaccgacgtggaggtgaccagcgaggacgagtggcagtgcaccgagtgcaagaagttcaacagccccagcaagagatactgcttcagatgctgggccctgagaaaggactggtacagcgactgcagcaagctgacccacagcctgagcaccagcgacatcaccgccatccccgagaaggagaacgagggcaacgacgtgcccgactgcagaagaaccatcagcgcccccgtggtgagacccaaggacgcctacatcaagaaggagaacagcaagctgttcgacccctgcaacagcgtggagttcctggacctggcccacagcagcgagagccaggagaccatcagcagcatgggcgagcagctggacaacctgagcgagcagagaaccgacaccgagaacatggaggactgccagaacctgctgaagccctgcagcctgtgcgagaagagacccagagacggcaacatcatccacggcagaaccggccacctggtgacctgcttccactgcgccagaagactgaagaaggccggcgccagctgccccatctgcaagaaggagatccagctggtgatcaaggtgttcatcgcctag

SEQ ID NO: 11414 - DNA, 384 bp, synthetic construct
  misc_feature 1..384: note = Description of Artificial Sequence: Synthetic coding sequence
  source 1..384: mol_type = other DNA
atgaccagcttcagcaccagcgcccagtgcagcaccagcgacagcgcctgcagaatcagccccggccagatcaaccaggtgagacccaagctgcccctgctgaagatcctgcacgccgccggcgcccagggcgagatgttcaccgtgaaggaggtgatgcactacctgggccagtacatcatggtgaagcagctgtacgaccagcaggagcagcacatggtgtactgcggcggcgacctgctgggcgagctgctgggcagacagagcttcagcgtgaaggaccccagccccctgtacgacatgctgagaaagaacctggtgaccctggccaccgccaccaccggctgccagagaagagtgaacggcccccagagagcctggtag

SEQ ID NO: 11415 - DNA, 462 bp, synthetic construct
  misc_feature 1..462: note = Description of Artificial Sequence: Synthetic coding sequence
  source 1..462: mol_type = other DNA
atgaccagcttcagcaccagcgcccagtgcagcaccagcgacagcgcctgcagaatcagccccggccagatcaaccaggtgagacccaagctgcccctgctgaagatcctgcacgccgccggcgcccagggcgagatgttcaccgtgaaggaggtgatgcactacctgggccagtacatcatggtgaagcagctgtacgaccagcaggagcagcacatggtgtactgcggcggcgacctgctgggcgagctgctgggcagacagagcttcagcgtgaaggaccccagccccctgtacgacatgctgagaaagaacctggtgaccctggccaccgccaccaccggcagccagtacggctacagcaagagcagacccaccgaggccaagtgcagaggcaagttccacttccagaagaagaactacagaagaagatacccccacaccgcctacctgagagcctag

SEQ ID NO: 11416 - DNA, 7650 bp, synthetic construct
  misc_feature 1..7650: note = Description of Artificial Sequence: Synthetic coding sequence
  source 1..7650: mol_type = other DNA
atgctgggcaccggccccgccgccgccaccaccgccgccaccaccagcagcaacgtgagcgtgctgcagcagttcgccagcggcctgaagagcagaaacgaggagaccagagccaaggccgccaaggagctgcagcactacgtgaccatggagctgagagagatgagccaggaggagagcaccagattctacgaccagctgaaccaccacatcttcgagctggtgagcagcagcgacgccaacgagagaaagggcggcatcctggccatcgccagcctgatcggcgtggagggcggcaacgccaccagaatcggcagattcgccaactacctgagaaacctgctgcccagcaacgaccccgtggtgatggagatggccagcaaggccatcggcagactggccatggccggcgacaccttcaccgccgagtacgtggagttcgaggtgaagagagccctggagtggctgggcgccgacagaaacgagggcagaagacacgccgccgtgctggtgctgagagagctggccatcagcgtgcccaccttcttcttccagcaggtgcagcccttcttcgacaacatcttcgtggccgtgtgggaccccaagcaggccatcagagagggcgccgtggccgccctgagagcctgcctgatcctgaccacccagagagagcccaaggagatgcagaagccccagtggtacagacacaccttcgaggaggccgagaagggcttcgacgagaccctggccaaggagaagggcatgaacagagacgacagaatccacggcgccctgctgatcctgaacgagctggtgagaatcagcagcatggagggcgagagactgagagaggagatggaggagatcacccagcagcagctggtgcacgacaagtactgcaaggacctgatgggcttcggcaccaagcccagacacatcacccccttcaccagcttccaggccgtgcagccccagcagagcaacgccctggtgggcctgctgggctacagcagccaccagggcctgatgggcttcggcaccagccccagccccgccaagagcaccctggtggagagcagatgctgcagagacctgatggaggagaagttcgaccaggtgtgccagtgggtgctgaagtgcagaaacagcaagaacagcctgatccagatgaccatcctgaacctgctgcccagactggccgccttcagacccagcgccttcaccgacacccagtacctgcaggacaccatgaaccacgtgctgagctgcgtgaagaaggagaaggagagaaccgccgccttccaggccctgggcctgctgagcgtggccgtgagaagcgagttcaaggtgtacctgcccagagtgctggacatcatcagagccgccctgccccccaaggacttcgcccacaagagacagaaggccatgcaggtggacgccaccgtgttcacctgcatcagcatgctggccagagccatgggccccggcatccagcaggacatcaaggagctgctggagcccatgctggccgtgggcctgagccccgccctgaccgccgtgctgtacgacctgagcagacagatcccccagctgaagaaggacatccaggacggcctgctgaagatgctgagcctggtgctgatgcacaagcccctgagacaccccggcatgcccaagggcctggcccaccagctggccagccccggcctgaccaccctgcccgaggccagcgacgtgggcagcatcaccctggccctgagaaccctgggcagcttcgagttcgagggccacagcctgacccagttcgtgagacactgcgccgaccacttcctgaacagcgagcacaaggagatcagaatggaggccgccagaacctgcagcagactgctgacccccagcatccacctgatcagcggccacgcccacgtggtgagccagaccgccgtgcaggtggtggccgacgtgctgagcaagctgctggtggtgggcatcaccgaccccgaccccgacatcagatactgcgtgctggccagcctggacgagagattcgacgcccacctggcccaggccgagaacctgcaggccctgttcgtggccctgaacgaccaggtgttcgagatcagagagctggccatctgcaccgtgggcagactgagcagcatgaaccccgccttcgtgatgcccttcctgagaaagatgctgatccagatcctgaccgagctggagcacagcggcatcggcagaatcaaggagcagagcgccagaatgctgggccacctggtgagcaacgcccccagactgatcagaccctacatggagcccatcctgaaggccctgatcctgaagctgaaggaccccgaccccgaccccaaccccggcgtgatcaacaacgtgctggccaccatcggcgagctggcccaggtgagcggcctggagatgagaaagtgggtggacgagctgttcatcatcatcatggacatgctgcaggacagcagcctgctggccaagagacaggtggccctgtggaccctgggccagctggtggccagcaccggctacgtggtggagccctacagaaagtaccccaccctgctggaggtgctgctgaacttcctgaagaccgagcagaaccagggcaccagaagagaggccatcagagtgctgggcctgctgggcgccctggacccctacaagcacaaggtgaacatcggcatgatcgaccagagcagagacgccagcgccgtgagcctgagcgagagcaagagcagccaggacagcagcgactacagcaccagcgagatgctggtgaacatgggcaacctgcccctggacgagttctaccccgccgtgagcatggtggccctgatgagaatcttcagagaccagagcctgagccaccaccacaccatggtggtgcaggccatcaccttcatcttcaagagcctgggcctgaagtgcgtgcagttcctgccccaggtgatgcccaccttcctgaacgtgatcagagtgtgcgacggcgccatcagagagttcctgttccagcagctgggcatgctggtgagcttcgtgaagagccacatcagaccctacatggacgagatcgtgaccctgatgagagagttctgggtgatgaacaccagcatccagagcaccatcatcctgctgatcgagcagatcgtggtggccctgggcggcgagttcaagctgtacctgccccagctgatcccccacatgctgagagtgttcatgcacgacaacagccccggcagaatcgtgagcatcaagctgctggccgccatccagctgttcggcgccaacctggacgactacctgcacctgctgctgccccccatcgtgaagctgttcgacgcccccgaggcccccctgcccagcagaaaggccgccctggagaccgtggacagactgaccgagagcctggacttcaccgactacgccagcagaatcatccaccccatcgtgagaaccctggaccagagccccgagctgagaagcaccgccatggacaccctgagcagcctggtgttccagctgggcaagaagtaccagatcttcatccccatggtgaacaaggtgctggtgagacacagaatcaaccaccagagatacgacgtgctgatctgcagaatcgtgaagggctacaccctggccgacgaggaggaggaccccctgatctaccagcacagaatgctgagaagcggccagggcgacgccctggccagcggccccgtggagaccggccccatgaagaagctgcacgtgagcaccatcaacctgcagaaggcctggggcgccgccagaagagtgagcaaggacgactggctggagtggctgagaagactgagcctggagctgctgaaggacagcagcagccccagcctgagaagctgctgggccctggcccaggcctacaaccccatggccagagacctgttcaacgccgccttcgtgagctgctggagcgagctgaacgaggaccagcaggacgagctgatcagaagcatcgagctggccctgaccagccaggacatcgccgaggtgacccagaccctgctgaacctggccgagttcatggagcacagcgacaagggccccctgcccctgagagacgacaacggcatcgtgctgctgggcgagagagccgccaagtgcagagcctacgccaaggccctgcactacaaggagctggagttccagaagggccccacccccgccatcctggagagcctgatcagcatcaacaacaagctgcagcagcccgaggccgccgccggcgtgctggagtacgccatgaagcacttcggcgagctggagatccaggccacctggtacgagaagctgcacgagtgggaggacgccctggtggcctacgacaagaagatggacaccaacaaggacgaccccgagctgatgctgggcagaatgagatgcctggaggccctgggcgagtggggccagctgcaccagcagtgctgcgagaagtggaccctggtgaacgacgagacccaggccaagatggccagaatggccgccgccgccgcctggggcctgggccagtgggacagcatggaggagtacacctgcatgatccccagagacacccacgacggcgccttctacagagccgtgctggccctgcaccaggacctgttcagcctggcccagcagtgcatcgacaaggccagagacctgctggacgccgagctgaccgccatggccggcgagagctacagcagagcctacggcgccatggtgagctgccacatgctgagcgagctggaggaggtgatccagtacaagctggtgcccgagagaagagagatcatcagacagatctggtgggagagactgcagggctgccagagaatcgtggaggactggcagaagatcctgatggtgagaagcctggtggtgagcccccacgaggacatgagaacctggctgaagtacgccagcctgtgcggcaagagcggcagactggccctggcccacaagaccctggtgctgctgctgggcgtggaccccagcagacagctggaccaccccctgcccaccgtgcacccccaggtgacctacgcctacatgaagaacatgtggaagagcgccagaaagatcgacgccttccagcacatgcagcacttcgtgcagaccatgcagcagcaggcccagcacgccatcgccaccgaggaccagcagcacaagcaggagctgcacaagctgatggccagatgcttcctgaagctgggcgagtggcagctgaacctgcagggcatcaacgagagcaccatccccaaggtgctgcagtactacagcgccgccaccgagcacgacagaagctggtacaaggcctggcacgcctgggccgtgatgaacttcgaggccgtgctgcactacaagcaccagaaccaggccagagacgagaagaagaagctgagacacgccagcggcgccaacatcaccaacgccaccaccgccgccaccaccgccgccaccgccaccaccaccgccagcaccgagggcagcaacagcgagagcgaggccgagagcaccgagaacagccccacccccagccccctgcagaagaaggtgaccgaggacctgagcaagaccctgctgatgtacaccgtgcccgccgtgcagggcttcttcagaagcatcagcctgagcagaggcaacaacctgcaggacaccctgagagtgctgaccctgtggttcgactacggccactggcccgacgtgaacgaggccctggtggagggcgtgaaggccatccagatcgacacctggctgcaggtgatcccccagctgatcgccagaatcgacacccccagacccctggtgggcagactgatccaccagctgctgaccgacatcggcagataccacccccaggccctgatctaccccctgaccgtggccagcaagagcaccaccaccgccagacacaacgccgccaacaagatcctgaagaacatgtgcgagcacagcaacaccctggtgcagcaggccatgatggtgagcgaggagctgatcagagtggccatcctgtggcacgagatgtggcacgagggcctggaggaggccagcagactgtacttcggcgagagaaacgtgaagggcatgttcgaggtgctggagcccctgcacgccatgatggagagaggcccccagaccctgaaggagaccagcttcaaccaggcctacggcagagacctgatggaggcccaggagtggtgcagaaagtacatgaagagcggcaacgtgaaggacctgacccaggcctgggacctgtactaccacgtgttcagaagaatcagcaagcagctgccccagctgaccagcctggagctgcagtacgtgagccccaagctgctgatgtgcagagacctggagctggccgtgcccggcacctacgaccccaaccagcccatcatcagaatccagagcatcgcccccagcctgcaggtgatcaccagcaagcagagacccagaaagctgaccctgatgggcagcaacggccacgagttcgtgttcctgctgaagggccacgaggacctgagacaggacgagagagtgatgcagctgttcggcctggtgaacaccctgctggccaacgaccccaccagcctgagaaagaacctgagcatccagagatacgccgtgatccccctgagcaccaacagcggcctgatcggctgggtgccccactgcgacaccctgcacgccctgatcagagactacagagagaagaagaagatcctgctgaacatcgagcacagaatcatgctgagaatggcccccgactacgaccacctgaccctgatgcagaaggtggaggtgttcgagcacgccgtgaacaacaccgccggcgacgacctggccaagctgctgtggctgaagagccccagcagcgaggtgtggttcgacagaagaaccaactacaccagaagcctggccgtgatgagcatggtgggctacatcctgggcctgggcgacagacaccccagcaacctgatgctggacagactgagcggcaagatcctgcacatcgacttcggcgactgcttcgaggtggccatgaccagagagaagttccccgagaagatccccttcagactgaccagaatgctgaccaacgccatggaggtgaccggcctggacggcaactacagaatcacctgccacaccgtgatggaggtgctgagagagcacaaggacagcgtgatggccgtgctggaggccttcgtgtacgaccccctgctgaactggagactgatggacaccaacaccaagggcaacaagagaagcagaaccagaaccgacagctacagcgccggccagagcgtggagatcctggacggcgtggagctgggcgagcccgcccacaagaagaccggcaccaccgtgcccgagagcatccacagcttcatcggcgacggcctggtgaagcccgaggccctgaacaagaaggccatccagatcatcaacagagtgagagacaagctgaccggcagagacttcagccacgacgacaccctggacgtgcccacccaggtggagctgctgatcaagcaggccaccagccacgagaacctgtgccagtgctacatcggctggtgccccttctggtag

SEQ ID NO: 11417 - DNA, 2265 bp, synthetic construct
  misc_feature 1..2265: note = Description of Artificial Sequence: Synthetic coding sequence
  source 1..2265: mol_type = other DNA
atgaacttcgaggccgtgctgcactacaagcaccagaaccaggccagagacgagaagaagaagctgagacacgccagcggcgccaacatcaccaacgccaccaccgccgccaccaccgccgccaccgccaccaccaccgccagcaccgagggcagcaacagcgagagcgaggccgagagcaccgagaacagccccacccccagccccctgcagaagaaggtgaccgaggacctgagcaagaccctgctgatgtacaccgtgcccgccgtgcagggcttcttcagaagcatcagcctgagcagaggcaacaacctgcaggacaccctgagagtgctgaccctgtggttcgactacggccactggcccgacgtgaacgaggccctggtggagggcgtgaaggccatccagatcgacacctggctgcaggtgatcccccagctgatcgccagaatcgacacccccagacccctggtgggcagactgatccaccagctgctgaccgacatcggcagataccacccccaggccctgatctaccccctgaccgtggccagcaagagcaccaccaccgccagacacaacgccgccaacaagatcctgaagaacatgtgcgagcacagcaacaccctggtgcagcaggccatgatggtgagcgaggagctgatcagagtggccatcctgtggcacgagatgtggcacgagggcctggaggaggccagcagactgtacttcggcgagagaaacgtgaagggcatgttcgaggtgctggagcccctgcacgccatgatggagagaggcccccagaccctgaaggagaccagcttcaaccaggcctacggcagagacctgatggaggcccaggagtggtgcagaaagtacatgaagagcggcaacgtgaaggacctgacccaggcctgggacctgtactaccacgtgttcagaagaatcagcaagcagctgccccagctgaccagcctggagctgcagtacgtgagccccaagctgctgatgtgcagagacctggagctggccgtgcccggcacctacgaccccaaccagcccatcatcagaatccagagcatcgcccccagcctgcaggtgatcaccagcaagcagagacccagaaagctgaccctgatgggcagcaacggccacgagttcgtgttcctgctgaagggccacgaggacctgagacaggacgagagagtgatgcagctgttcggcctggtgaacaccctgctggccaacgaccccaccagcctgagaaagaacctgagcatccagagatacgccgtgatccccctgagcaccaacagcggcctgatcggctgggtgccccactgcgacaccctgcacgccctgatcagagactacagagagaagaagaagatcctgctgaacatcgagcacagaatcatgctgagaatggcccccgactacgaccacctgaccctgatgcagaaggtggaggtgttcgagcacgccgtgaacaacaccgccggcgacgacctggccaagctgctgtggctgaagagccccagcagcgaggtgtggttcgacagaagaaccaactacaccagaagcctggccgtgatgagcatggtgggctacatcctgggcctgggcgacagacaccccagcaacctgatgctggacagactgagcggcaagatcctgcacatcgacttcggcgactgcttcgaggtggccatgaccagagagaagttccccgagaagatccccttcagactgaccagaatgctgaccaacgccatggaggtgaccggcctggacggcaactacagaatcacctgccacaccgtgatggaggtgctgagagagcacaaggacagcgtgatggccgtgctggaggccttcgtgtacgaccccctgctgaactggagactgatggacaccaacaccaagggcaacaagagaagcagaaccagaaccgacagctacagcgccggccagagcgtggagatcctggacggcgtggagctgggcgagcccgcccacaagaagaccggcaccaccgtgcccgagagcatccacagcttcatcggcgacggcctggtgaagcccgaggccctgaacaagaaggccatccagatcatcaacagagtgagagacaagctgaccggcagagacttcagccacgacgacaccctggacgtgcccacccaggtggagctgctgatcaagcaggccaccagccacgagaacctgtgccagtgctacatcggctggtgccccttctggtag

SEQ ID NO: 11418 - DNA, 486 bp, synthetic construct
  misc_feature 1..486: note = Description of Artificial Sequence: Synthetic coding sequence
  source 1..486: mol_type = other DNA
atgctggacagactgagcggcaagatcctgcacatcgacttcggcgactgcttcgaggtggccatgaccagagagaagttccccgagaagatccccttcagactgaccagaatgctgaccaacgccatggaggtgaccggcctggacggcaactacagaatcacctgccacaccgtgatggaggtgctgagagagcacaaggacagcgtgatggccgtgctggaggccttcgtgtacgaccccctgctgaactggagactgatggacaccaacaccaagggcaacaagagaagcagaaccagaaccgacagctacagcgccggccagagcgtggagatcctggacggcgtggagctgggcgagcccgcccacaagaagaccggcaccaccgtgcccgagagcatccacagcttcatcggcgacggcctggtgaagcccgaggccctgaacaagaaggccatccagatcatcaacagagtgagatag

SEQ ID NO: 11419 - DNA, 5187 bp, synthetic construct
  misc_feature 1..5187: note = Description of Artificial Sequence: Synthetic coding sequence
  source 1..5187: mol_type = other DNA
atgctgggcaccggccccgccgccgccaccaccgccgccaccaccagcagcaacgtgagcgtgctgcagcagttcgccagcggcctgaagagcagaaacgaggagaccagagccaaggccgccaaggagctgcagcactacgtgaccatggagctgagagagatgagccaggaggagagcaccagattctacgaccagctgaaccaccacatcttcgagctggtgagcagcagcgacgccaacgagagaaagggcggcatcctggccatcgccagcctgatcggcgtggagggcggcaacgccaccagaatcggcagattcgccaactacctgagaaacctgctgcccagcaacgaccccgtggtgatggagatggccagcaaggccatcggcagactggccatggccggcgacaccttcaccgccgagtacgtggagttcgaggtgaagagagccctggagtggctgggcgccgacagaaacgagggcagaagacacgccgccgtgctggtgctgagagagctggccatcagcgtgcccaccttcttcttccagcaggtgcagcccttcttcgacaacatcttcgtggccgtgtgggaccccaagcaggccatcagagagggcgccgtggccgccctgagagcctgcctgatcctgaccacccagagagagcccaaggagatgcagaagccccagtggtacagacacaccttcgaggaggccgagaagggcttcgacgagaccctggccaaggagaagggcatgaacagagacgacagaatccacggcgccctgctgatcctgaacgagctggtgagaatcagcagcatggagggcgagagactgagagaggagatggaggagatcacccagcagcagctggtgcacgacaagtactgcaaggacctgatgggcttcggcaccaagcccagacacatcacccccttcaccagcttccaggccgtgcagccccagcagagcaacgccctggtgggcctgctgggctacagcagccaccagggcctgatgggcttcggcaccagccccagccccgccaagagcaccctggtggagagcagatgctgcagagacctgatggaggagaagttcgaccaggtgtgccagtgggtgctgaagtgcagaaacagcaagaacagcctgatccagatgaccatcctgaacctgctgcccagactggccgccttcagacccagcgccttcaccgacacccagtacctgcaggacaccatgaaccacgtgctgagctgcgtgaagaaggagaaggagagaaccgccgccttccaggccctgggcctgctgagcgtggccgtgagaagcgagttcaaggtgtacctgcccagagtgctggacatcatcagagccgccctgccccccaaggacttcgcccacaagagacagaaggccatgcaggtggacgccaccgtgttcacctgcatcagcatgctggccagagccatgggccccggcatccagcaggacatcaaggagctgctggagcccatgctggccgtgggcctgagccccgccctgaccgccgtgctgtacgacctgagcagacagatcccccagctgaagaaggacatccaggacggcctgctgaagatgctgagcctggtgctgatgcacaagcccctgagacaccccggcatgcccaagggcctggcccaccagctggccagccccggcctgaccaccctgcccgaggccagcgacgtgggcagcatcaccctggccctgagaaccctgggcagcttcgagttcgagggccacagcctgacccagttcgtgagacactgcgccgaccacttcctgaacagcgagcacaaggagatcagaatggaggccgccagaacctgcagcagactgctgacccccagcatccacctgatcagcggccacgcccacgtggtgagccagaccgccgtgcaggtggtggccgacgtgctgagcaagctgctggtggtgggcatcaccgaccccgaccccgacatcagatactgcgtgctggccagcctggacgagagattcgacgcccacctggcccaggccgagaacctgcaggccctgttcgtggccctgaacgaccaggtgttcgagatcagagagctggccatctgcaccgtgggcagactgagcagcatgaaccccgccttcgtgatgcccttcctgagaaagatgctgatccagatcctgaccgagctggagcacagcggcatcggcagaatcaaggagcagagcgccagaatgctgggccacctggtgagcaacgcccccagactgatcagaccctacatggagcccatcctgaaggccctgatcctgaagctgaaggaccccgaccccgaccccaaccccggcgtgatcaacaacgtgctggccaccatcggcgagctggcccaggtgagcggcctggagatgagaaagtgggtggacgagctgttcatcatcatcatggacatgctgcaggacagcagcctgctggccaagagacaggtggccctgtggaccctgggccagctggtggccagcaccggctacgtggtggagccctacagaaagtaccccaccctgctggaggtgctgctgaacttcctgaagaccgagcagaaccagggcaccagaagagaggccatcagagtgctgggcctgctgggcgccctggacccctacaagcacaaggtgaacatcggcatgatcgaccagagcagagacgccagcgccgtgagcctgagcgagagcaagagcagccaggacagcagcgactacagcaccagcgagatgctggtgaacatgggcaacctgcccctggacgagttctaccccgccgtgagcatggtggccctgatgagaatcttcagagaccagagcctgagccaccaccacaccatggtggtgcaggccatcaccttcatcttcaagagcctgggcctgaagtgcgtgcagttcctgccccaggtgatgcccaccttcctgaacgtgatcagagtgtgcgacggcgccatcagagagttcctgttccagcagctgggcatgctggtgagcttcgtgaagagccacatcagaccctacatggacgagatcgtgaccctgatgagagagttctgggtgatgaacaccagcatccagagcaccatcatcctgctgatcgagcagatcgtggtggccctgggcggcgagttcaagctgtacctgccccagctgatcccccacatgctgagagtgttcatgcacgacaacagccccggcagaatcgtgagcatcaagctgctggccgccatccagctgttcggcgccaacctggacgactacctgcacctgctgctgccccccatcgtgaagctgttcgacgcccccgaggcccccctgcccagcagaaaggccgccctggagaccgtggacagactgaccgagagcctggacttcaccgactacgccagcagaatcatccaccccatcgtgagaaccctggaccagagccccgagctgagaagcaccgccatggacaccctgagcagcctggtgttccagctgggcaagaagtaccagatcttcatccccatggtgaacaaggtgctggtgagacacagaatcaaccaccagagatacgacgtgctgatctgcagaatcgtgaagggctacaccctggccgacgaggaggaggaccccctgatctaccagcacagaatgctgagaagcggccagggcgacgccctggccagcggccccgtggagaccggccccatgaagaagctgcacgtgagcaccatcaacctgcagaaggcctggggcgccgccagaagagtgagcaaggacgactggctggagtggctgagaagactgagcctggagctgctgaaggacagcagcagccccagcctgagaagctgctgggccctggcccaggcctacaaccccatggccagagacctgttcaacgccgccttcgtgagctgctggagcgagctgaacgaggaccagcaggacgagctgatcagaagcatcgagctggccctgaccagccaggacatcgccgaggtgacccagaccctgctgaacctggccgagttcatggagcacagcgacaagggccccctgcccctgagagacgacaacggcatcgtgctgctgggcgagagagccgccaagtgcagagcctacgccaaggccctgcactacaaggagctggagttccagaagggccccacccccgccatcctggagagcctgatcagcatcaacaacaagctgcagcagcccgaggccgccgccggcgtgctggagtacgccatgaagcacttcggcgagctggagatccaggccacctggtacgagaagctgcacgagtgggaggacgccctggtggcctacgacaagaagatggacaccaacaaggacgaccccgagctgatgctgggcagaatgagatgcctggaggccctgggcgagtggggccagctgcaccagcagtgctgcgagaagtggaccctggtgaacgacgagacccaggccaagatggccagaatggccgccgccgccgcctggggcctgggccagtgggacagcatggaggagtacacctgcatgatccccagagacacccacgacggcgccttctacagagccgtgctggccctgcaccaggacctgttcagcctggcccagcagtgcatcgacaaggccagagacctgctggacgccgagctgaccgccatggccggcgagagctacagcagagcctacggcgccatggtgagctgccacatgctgagcgagctggaggaggtgatccagtacaagctggtgcccgagagaagagagatcatcagacagatctggtgggagagactgcagggctgccagagaatcgtggaggactggcagaagatcctgatggtgagaagcctggtggtgagcccccacgaggacatgagaacctggctgaagtacgccagcctgtgcggcaagagcggcagactggccatcgcccccctgaacatgggcaccgccaacagcgcccagcccagaagcctgagaagctggagaacctggatcagaatcctggactgcaaggacaccgaggacgccgacctgacccccgccacctaccccaagaccagcctggtgtgcggccagcagcagaagtgcctgcaggacagacccaagtag

SEQ ID NO: 11420 - DNA, 6270 bp, synthetic construct
  misc_feature 1..6270: note = Description of Artificial Sequence: Synthetic coding sequence
  source 1..6270: mol_type = other DNA
atggaggacacccaggccatcgactgggacgtggaggaggaggaggagaccgagcagagcagcgagagcctgagatgcaacgtggagcccgtgggcagactgcacatcttcagcggcgcccacggccccgagaaggacttccccctgcacctgggcaagaacgtggtgggcagaatgcccgactgcagcgtggccctgcccttccccagcatcagcaagcagcacgccgagatcgagatcctggcctgggacaaggcccccatcctgagagactgcggcagcctgaacggcacccagatcctgagaccccccaaggtgctgagccccggcgtgagccacagactgagagaccaggagctgatcctgttcgccgacctgctgtgccagtaccacagactggacgtgagcctgcccttcgtgagcagaggccccctgaccgtggaggagacccccagagtgcagggcgagacccagccccagagactgctgctggccgaggacagcgaggaggaggtggacttcctgagcgagagaagaatggtgaagaagagcagaaccaccagcagcagcgtgatcgtgcccgagagcgacgaggagggccacagccccgtgctgggcggcctgggcccccccttcgccttcaacctgaacagcgacaccgacgtggaggagggccagcagcccgccaccgaggaggccagcagcgccgccagaagaggcgccaccgtggaggccaagcagagcgaggccgaggtggtgaccgagatccagctggagaaggaccagcccctggtgaaggagaaggacaacgacaccaaggtgaagagaggcgccggcaacggcgtggtgcccgccggcgtgatcctggagagaagccagccccccggcgaggacagcgacaccgacgtggacgacgacagcagaccccccggcagacccgccgaggtgcacctggagagagcccagcccttcggcttcatcgacagcgacaccgacgccgaggaggagagaatccccgccacccccgtggtgatccccatgaagaagagaaagatcttccacggcgtgggcaccagaggccccggcgcccccggcctggcccacctgcaggagagccaggccggcagcgacaccgacgtggaggagggcaaggccccccaggccgtgcccctggagaagagccaggccagcatggtgatcaacagcgacaccgacgacgaggaggaggtgagcgccgccctgaccctggcccacctgaaggagagccagcccgccatctggaacagagacgccgaggaggacatgccccagagagtggtgctgctgcagagaagccagaccaccaccgagagagacagcgacaccgacgtggaggaggaggagctgcccgtggagaacagagaggccgtgctgaaggaccacaccaagatcagagccctggtgagagcccacagcgagaaggaccagccccccttcggcgacagcgacgacagcgtggaggccgacaagagcagccccggcatccacctggagagaagccaggccagcaccaccgtggacatcaacacccaggtggagaaggaggtgccccccggcagcgccatcatccacatcaagaagcaccaggtgagcgtggagggcaccaaccagaccgacgtgaaggccgtgggcggccccgccaagctgctggtggtgagcctggaggaggcctggcccctgcacggcgactgcgagaccgacgccgaggagggcaccagcctgaccgccagcgtggtggccgacgtgagaaagagccagctgcccgccgagggcgacgccggcgccgagtgggccgccgccgtgctgaagcaggagagagcccacgaggtgggcgcccagggcggcccccccgtggcccaggtggagcaggacctgcccatcagcagagagaacctgaccgacctggtggtggacaccgacaccctgggcgagagcacccagccccagagagagggcgcccaggtgcccaccggcagagagagagagcagcacgtgggcggcaccaaggacagcgaggacaactacggcgacagcgaggacctggacctgcaggccacccagtgcttcctggagaaccagggcctggaggccgtgcagagcatggaggacgagcccacccaggccttcatgctgacccccccccaggagctgggccccagccactgcagcttccagaccaccggcaccctggacgagccctgggaggtgctggccacccagcccttctgcctgagagagagcgaggacagcgagacccagcccttcgacacccacctggaggcctacggcccctgcctgagcccccccagagccatccccggcgaccagcaccccgagagccccgtgcacaccgagcccatgggcatccagggcagaggcagacagaccgtggacaaggtgatgggcatccccaaggagaccgccgagagagtgggccccgagagaggccccctggagagagagaccgagaagctgctgcccgagagacagaccgacgtgaccggcgaggaggagctgaccaagggcaagcaggacagagagcagaagcagctgctggccagagacacccagagacaggagagcgacaagaacggcgagagcgccagccccgagagagacagagagagcctgaaggtggagatcgagaccagcgaggagatccaggagaagcaggtgcagaagcagaccctgcccagcaaggccttcgagagagaggtggagagacccgtggccaacagagagtgcgaccccgccgagctggaggagaaggtgcccaaggtgatcctggagagagacacccagagaggcgagcccgagggcggcagccaggaccagaagggccaggccagcagccccacccccgagcccggcgtgggcgccggcgacctgcccggccccaccagcgcccccgtgcccagcggcagccagagcggcggcagaggcagccccgtgagccccagaagacaccagaagggcctgctgaactgcaagatgccccccgccgagaaggccagcagaatcagagccgccgagaaggtgagcagaggcgaccaggagagccccgacgcctgcctgccccccaccgtgcccgaggcccccgcccccccccagaagcccctgaacagccagagccagaagcacctggcccccccccccctgctgagccccctgctgcccagcatcaagcccaccgtgagaaagaccagacaggacggcagccaggaggcccccgaggcccccctgagcagcgagctggagcccttccaccccaagcccaagatcagaaccagaaagagcagcagaatgacccccttccccgccaccagcgccgcccccgagccccaccccagcaccagcaccgcccagcccgtgacccccaagcccaccagccaggccaccagaagcagaaccaacagaagcagcgtgaagacccccgagcccgtggtgcccaccgcccccgagctgcagcccagcaccagcaccgaccagcccgtgaccagcgagcccaccagccaggtgaccagaggcagaaagagcagaagcagcgtgaagacccccgagaccgtggtgcccaccgccctggagctgcagcccagcaccagcaccgacagacccgtgaccagcgagcccaccagccaggccaccagaggcagaaagaacagaagcagcgtgaagacccccgagcccgtggtgcccaccgcccccgagctgcagcccagcaccagcaccgaccagcccgtgaccagcgagcccacctaccaggccaccagaggcagaaagaacagaagcagcgtgaagacccccgagcccgtggtgcccaccgcccccgagctgagacccagcaccagcaccgacagacccgtgacccccaagcccaccagcagaaccaccagaagcagaaccaacatgagcagcgtgaagacccccgagaccgtggtgcccaccgcccccgagctgcagatcagcaccagcaccgaccagcccgtgacccccaagcccaccagcagaaccaccagaagcagaaccaacatgagcagcgtgaagaaccccgagagcaccgtgcccatcgcccccgagctgccccccagcaccagcaccgagcagcccgtgacccccgagcccaccagcagagccaccagaggcagaaagaacagaagcagcggcaagacccccgagaccctggtgcccaccgcccccaagctggagcccagcaccagcaccgaccagcccgtgacccccgagcccaccagccaggccaccagaggcagaaccaacagaagcagcgtgaagacccccgagaccgtggtgcccaccgcccccgagctgcagcccagcaccagcaccgaccagcccgtgacccccgagcccaccagccaggccaccagaggcagaaccgacagaagcagcgtgaagacccccgagaccgtggtgcccaccgcccccgagctgcaggccagcgccagcaccgaccagcccgtgaccagcgagcccaccagcagaaccaccagaggcagaaagaacagaagcagcgtgaagacccccgagaccgtggtgcccgccgcccccgagctgcagcccagcaccagcaccgaccagcccgtgacccccgagcccaccagcagagccaccagaggcagaaccaacagaagcagcgtgaagacccccgagagcatcgtgcccatcgcccccgagctgcagcccagcaccagcagaaaccagctggtgacccccgagcccaccagcagagccaccagatgcagaaccaacagaagcagcgtgaagacccccgagcccgtggtgcccaccgcccccgagccccaccccaccaccagcaccgaccagcccgtgacccccaagctgaccagcagagccaccagaagaaagaccaacagaagcagcgtgaagacccccaagcccgtggagcccgccgccagcgacctggagcccttcacccccaccgaccagagcgtgacccccgaggccatcgcccagggcggccagagcaagaccctgagaagcagcaccgtgagagccatgcccgtgcccaccacccccgagttccagagccccgtgaccaccgaccagcccatcagccccgagcccatcacccagcccagctgcatcaagagacagagagccgccggcaaccccggcagcctggccgcccccatcgaccacaagccctgcagcgcccccctggagcccaagagccaggccagcagaaaccagagatggggcgccgtgagagccgccgagagcctgaccgccatccccgagcccgccagcccccagctgctggagacccccatccacgccagccagatccagaaggtggagcccgccggcagaagcagattcacccccgagctgcagcccaaggccagccagagcagaaagagaagcctggccaccatggacagccccccccaccagaagcagccccagagaggcgaggtgagccagaagaccgtgatcatcaaggaggaggaggaggacaccgccgagaagcccggcaaggaggaggacgtggtgacccccaagcccggcaagagaaagagagaccaggccgaggaggagcccaacagaatccccagcagaagcctgagaagaaccaagctgaaccaggagagcaccgcccccaaggtgctgttcaccggcgtggtggacgccagaggcgagagagccgtgctggccctgggcggcagcctggccggcagcgccgccgaggccagccacctggtgaccgacagaatcagaagaaccgtgaagttcctgtgcgccctgggcagaggcatccccatcctgagcctggactggctgcaccagagcagaaaggccggcttcttcctgccccccgacgagtacgtggtgaccgaccccgagcaggagaagaacttcggcttcagcctgcaggacgccctgagcagagccagagagagaagactgctggagggctacgagatctacgtgacccccggcgtgcagcccccccccccccagatgggcgagatcatcagctgctgcggcggcacctacctgcccagcatgcccagaagctacaagccccagagagtggtgatcacctgcccccaggacttcccccactgcagcatccccctgagagtgggcctgcccctgctgagccccgagttcctgctgaccggcgtgctgaagcaggaggccaagcccgaggccttcgtgctgagccccctggagatgagcagcacctag

SEQ ID NO: 11421 - DNA, 489 bp, synthetic construct
  misc_feature 1..489: note = Description of Artificial Sequence: Synthetic coding sequence
  source 1..489: mol_type = other DNA
atggaggacacccaggccatcgactgggacgtggaggaggaggaggagaccgagcagagcagcgagagcctgagatgcaacgtggagcccgtgggcagactgcacatcttcagcggcgcccacggccccgagaaggacttccccctgcacctgggcaagaacgtggtgggcagaatgcccgactgcagcgtggccctgcccttccccagcatcagcaagcagcacgccgagatcgagatcctggcctgggacaaggcccccatcctgagagactgcggcagcctgaacggcacccagatcctgagaccccccaaggtgctgagccccggcgtgagccacagactgagagaccaggagctgatcctgttcgccgacctgctgtgccagtaccacagactggacgtgagcctgcccttcgtgagcagaggccccctgaccgtggaggagacccccagagtgcagggcgagacccagccccagagactgtag

SEQ ID NO: 11422 - DNA, 384 bp, synthetic construct
  misc_feature 1..384: note = Description of Artificial Sequence: Synthetic coding sequence
  source 1..384: mol_type = other DNA
atggaggacacccaggccatcgactgggacgtggaggaggaggaggagaccgagcagagcagcgagagcctgagatgcaacgtggagcccgtgggcagactgcacatcttcagcggcgcccacggccccgagaaggacttccccctgcacctgggcaagaacgtggtgggcagaatgcccgactgcagcgtggccctgcccttccccagcatcagcaagcagcacgccgagatcgagatcctggcctgggacaaggcccccatcctgagagactgcggcagcctgaacggcacccagatcctgagaccccccaaggtgctgagccccggcgtgagccacagactgagagaccaggagctgatcctgttcgccgacctgctgtag

SEQ ID NO: 11423 - DNA, 921 bp, synthetic construct
  misc_feature 1..921: note = Description of Artificial Sequence: Synthetic coding sequence
  source 1..921: mol_type = other DNA
tgacacgtgggcggcaccaaggacagcgaggacaactacggcgacagcgaggacctggacctgcaggccacccagtgcttcctggagaaccagggcctggaggccgtgcagagcatggaggacgagcccacccaggccttcatgctgacccccccccaggagctgggccccagccactgcagcttccagaccaccggcctgctgaactgcaagatgccccccgccgagaaggccagcagaatcagagccgccgagaaggtgagcagaggcgaccaggagagccccgacgcctgcctgccccccaccgtgcccgaggcccccgcccccccccagaagcccctgaacagccagagccagaagcacctggcccccccccccctgctgagccccctgctgcccagcatcaagcccaccgtgagaaagaccagacaggacggcagccaggaggcccccgaggcccccctgagcagcgagctggagcccttccaccccaagcccaagatcagaaccagaaagagcagcagaatgacccccttccccgccaccagcgccgcccccgagccccaccccagcaccagcaccgcccagcccgtgacccccaagcccaccagccaggccaccagaagcagaaccaacagaagcagcgtgaagacccccgagcccgtggtgcccaccgcccccgagctgcagcccagcaccagcaccgaccagcccgtgaccagcgagcccaccagccaggtgaccagaggcagaaagagcagaagcagcgtgaagacccccgagaccgtggtgcccaccgccctggagctgcagcccagcaccagcaccgacagacccgtgaccagcgagcccaccagccaggccaccagaggcagaaagaacagaagcagcgtgaagacccccgagcccgtggtgccctag

SEQ ID NO: 11424 - DNA, 342 bp, synthetic construct
  misc_feature 1..342: note = Description of Artificial Sequence: Synthetic coding sequence
  source 1..342: mol_type = other DNA
atggaggacacccaggccatcgactgggacgtggaggaggaggaggagaccgagcagagcagcgagagcctgagatgcaacgtggagcccgtgggcagactgcacatcttcagcggcgcccacggccccgagaaggacttccccctgcacctgggcaagaacgtggtgggcagaatgcccgactgcagcgtggccctgcccttccccagcatcagcaagcagcacgccgagatcgagatcctggcctgggacaaggcccccatcctgagagactgcggcagcctgaacggcacccagatcctgagaccccccaaggtgctgagccccggcgtgagccactag

SEQ ID NO: 11425 - DNA, 5409 bp, synthetic construct
  misc_feature 1..5409: note = Description of Artificial Sequence: Synthetic coding sequence
  source 1..5409: mol_type = other DNA
atggaggacacccaggccatcgactgggacgtggaggaggaggaggagaccgagcagagcagcgagagcctgagatgcaacgtggagcccgtgggcagactgcacatcttcagcggcgcccacggccccgagaaggacttccccctgcacctgggcaagaacgtggtgggcagaatgcccgactgcagcgtggccctgcccttccccagcatcagcaagcagcacgccgagatcgagatcctggcctgggacaaggcccccatcctgagagactgcggcagcctgaacggcacccagatcctgagaccccccaaggtgctgagccccggcgtgagccacagactgagagaccaggagctgatcctgttcgccgacctgctgtgccagtaccacagactggacgtgagcctgcccttcgtgagcagaggccccctgaccgtggaggagacccccagagtgcagggcgagacccagccccagagactgctgctggccgaggacagcgaggaggaggtggacttcctgagcgagagaagaatggtgaagaagagcagaaccaccagcagcagcgtgatcgtgcccgagagcgacgaggagggccacagccccgtgctgggcggcctgggcccccccttcgccttcaacctgaacagcgacaccgacgtggaggagggccagcagcccgccaccgaggaggccagcagcgccgccagaagaggcgccaccgtggaggccaagcagagcgaggccgaggtggtgaccgagatccagctggagaaggaccagcccctggtgaaggagaaggacaacgacaccaaggtgaagagaggcgccggcaacggcgtggtgcccgccggcgtgatcctggagagaagccagccccccggcgaggacagcgacaccgacgtggacgacgacagcagaccccccggcagacccgccgaggtgcacctggagagagcccagcccttcggcttcatcgacagcgacaccgacgccgaggaggagagaatccccgccacccccgtggtgatccccatgaagaagagaaagatcttccacggcgtgggcaccagaggccccggcgcccccggcctggcccacctgcaggagagccaggccggcagcgacaccgacgtggaggagggcaaggccccccaggccgtgcccctggagaagagccaggccagcatggtgatcaacagcgacaccgacgacgaggaggaggtgagcgccgccctgaccctggcccacctgaaggagagccagcccgccatctggaacagagacgccgaggaggacatgccccagagagtggtgctgctgcagagaagccagaccaccaccgagagagacagcgacaccgacgtggaggaggaggagctgcccgtggagaacagagaggccgtgctgaaggaccacaccaagatcagagccctggtgagagcccacagcgagaaggaccagccccccttcggcgacagcgacgacagcgtggaggccgacaagagcagccccggcatccacctggagagaagccaggccagcaccaccgtggacatcaacacccaggtggagaaggaggtgccccccggcagcgccatcatccacatcaagaagcaccaggtgagcgtggagggcaccaaccagaccgacgtgaaggccgtgggcggccccgccaagctgctggtggtgagcctggaggaggcctggcccctgcacggcgactgcgagaccgacgccgaggagggcaccagcctgaccgccagcgtggtggccgacgtgagaaagagccagctgcccgccgagggcgacgccggcgccgagtgggccgccgccgtgctgaagcaggagagagcccacgaggtgggcgcccagggcggcccccccgtggcccaggtggagcaggacctgcccatcagcagagagaacctgaccgacctggtggtggacaccgacaccctgggcgagagcacccagccccagagagagggcgcccaggtgcccaccggcagagagagagagcagcacgtgggcggcaccaaggacagcgaggacaactacggcgacagcgaggacctggacctgcaggccacccagtgcttcctggagaaccagggcctggaggccgtgcagagcatggaggacgagcccacccaggccttcatgctgacccccccccaggagctgggccccagccactgcagcttccagaccaccggcaccctggacgagccctgggaggtgctggccacccagcccttctgcctgagagagagcgaggacagcgagacccagcccttcgacacccacctggaggcctacggcccctgcctgagcccccccagagccatccccggcgaccagcaccccgagagccccgtgcacaccgagcccatgggcatccagggcagaggcagacagaccgtggacaaggtgatgggcatccccaaggagaccgccgagagagtgggccccgagagaggccccctggagagagagaccgagaagctgctgcccgagagacagaccgacgtgaccggcgaggaggagctgaccaagggcaagcaggacagagagcagaagcagctgctggccagagacacccagagacaggagagcgacaagaacggcgagagcgccagccccgagagagacagagagagcctgaaggtggagatcgagaccagcgaggagatccaggagaagcaggtgcagaagcagaccctgcccagcaaggccttcgagagagaggtggagagacccgtggccaacagagagtgcgaccccgccgagctggaggagaaggtgcccaaggtgatcctggagagagacacccagagaggcgagcccgagggcggcagccaggaccagaagggccaggccagcagccccacccccgagcccggcgtgggcgccggcgacctgcccggccccaccagcgcccccgtgcccagcggcagccagagcggcggcagaggcagccccgtgagccccagaagacaccagaagggcctgctgaactgcaagatgccccccgccgagaaggccagcagaatcagagccgccgagaaggtgagcagaggcgaccaggagagccccgacgcctgcctgccccccaccgtgcccgaggcccccgcccccccccagaagcccctgaacagccagagccagaagcacctggcccccccccccctgctgagccccctgctgcccagcatcaagcccaccgtgagaaagaccagacaggacggcagccaggaggcccccgaggcccccctgagcagcgagctggagcccttccaccccaagcccaagatcagaaccagaaagagcagcagaatgacccccttccccgccaccagcgccgcccccaagctggagcccagcaccagcaccgaccagcccgtgacccccgagcccaccagccaggccaccagaggcagaaccaacagaagcagcgtgaagacccccgagaccgtggtgcccaccgcccccgagctgcagcccagcaccagcaccgaccagcccgtgacccccgagcccaccagccaggccaccagaggcagaaccgacagaagcagcgtgaagacccccgagaccgtggtgcccaccgcccccgagctgcaggccagcgccagcaccgaccagcccgtgaccagcgagcccaccagcagaaccaccagaggcagaaagaacagaagcagcgtgaagacccccgagaccgtggtgcccgccgcccccgagctgcagcccagcaccagcaccgaccagcccgtgacccccgagcccaccagcagagccaccagaggcagaaccaacagaagcagcgtgaagacccccgagagcatcgtgcccatcgcccccgagctgcagcccagcaccagcagaaaccagctggtgacccccgagcccaccagcagagccaccagatgcagaaccaacagaagcagcgtgaagacccccgagcccgtggtgcccaccgcccccgagccccaccccaccaccagcaccgaccagcccgtgacccccaagctgaccagcagagccaccagaagaaagaccaacagaagcagcgtgaagacccccaagcccgtggagcccgccgccagcgacctggagcccttcacccccaccgaccagagcgtgacccccgaggccatcgcccagggcggccagagcaagaccctgagaagcagcaccgtgagagccatgcccgtgcccaccacccccgagttccagagccccgtgaccaccgaccagcccatcagccccgagcccatcacccagcccagctgcatcaagagacagagagccgccggcaaccccggcagcctggccgcccccatcgaccacaagccctgcagcgcccccctggagcccaagagccaggccagcagaaaccagagatggggcgccgtgagagccgccgagagcctgaccgccatccccgagcccgccagcccccagctgctggagacccccatccacgccagccagatccagaaggtggagcccgccggcagaagcagattcacccccgagctgcagcccaaggccagccagagcagaaagagaagcctggccaccatggacagccccccccaccagaagcagccccagagaggcgaggtgagccagaagaccgtgatcatcaaggaggaggaggaggacaccgccgagaagcccggcaaggaggaggacgtggtgacccccaagcccggcaagagaaagagagaccaggccgaggaggagcccaacagaatccccagcagaagcctgagaagaaccaagctgaaccaggagagcaccgcccccaaggtgctgttcaccggcgtggtggacgccagaggcgagagagccgtgctggccctgggcggcagcctggccggcagcgccgccgaggccagccacctggtgaccgacagaatcagaagaaccgtgaagttcctgtgcgccctgggcagaggcatccccatcctgagcctggactggctgcaccagagcagaaaggccggcttcttcctgccccccgacgagtacgtggtgaccgaccccgagcaggagaagaacttcggcttcagcctgcaggacgccctgagcagagccagagagagaagactgctggagggctacgagatctacgtgacccccggcgtgcagcccccccccccccagatgggcgagatcatcagctgctgcggcggcacctacctgcccagcatgcccagaagctacaagccccagagagtggtgatcacctgcccccaggacttcccccactgcagcatccccctgagagtgggcctgcccctgctgagccccgagttcctgctgaccggcgtgctgaagcaggaggccaagcccgaggccttcgtgctgagccccctggagatgagcagcacctag

SEQ ID NO: 11426 - DNA, 666 bp, synthetic construct
  misc_feature 1..666: note = Description of Artificial Sequence: Synthetic coding sequence
  source 1..666: mol_type = other DNA
atggaggacacccaggccatcgactgggacgtggaggaggaggaggagaccgagcagagcagcgagagcctgagatgcaacgtggagcccgtgggcagactgcacatcttcagcggcgcccacggccccgagaaggacttccccctgcacctgggcaagaacgtggtgggcagaatgcccgactgcagcgtggccctgcccttccccagcatcagcaagcagcacgccgagatcgagatcctggcctgggacaaggcccccatcctgagagactgcggcagcctgaacggcacccagatcctgagcagcagcctgccccccccccagaccagcctgctgcccctgagcctgagactgagactgctgggcgaggagcagatcgaccccctgagcagactgctgaagcagctgagcccccagcccctgagctacagactgccccccccccagaccagcctgagccccctgagcccccacctgggccccctgggcgaggagaagatcggccccctgagcagacccctgaagcagctgtgcccccagcccctgagcagcagcctgccccccccccagaccaacctgagccccctgagcccccacctgggccccctgggcgccggccagatcggccccctgagcagacccctgaaccagctgagcctgtag

SEQ ID NO: 11427 - DNA, 738 bp, synthetic construct
  misc_feature 1..738: note = Description of Artificial Sequence: Synthetic coding sequence
  source 1..738: mol_type = other DNA
atggaggacacccaggccatcgactgggacgtggaggaggaggaggagaccgagcagagcagcgagagcctgagatgcaacgtggagcccgtgggcagactgcacatcttcagcggcgcccacggccccgagaaggacttccccctgcacctgggcaagaacgtggtgggcagaatgcccgactgcagcgtggccctgcccttccccagcatcagcaagcagcacgccgagatcgagatcctggcctgggacaaggcccccatcctgagagactgcggcagcctgaacggcacccagatcctgagaccccccaaggtgctgagccccggcgtgagccacagactgagagaccaggagctgatcctgttcgccgacctgctgtgccagtaccacagactggacgtgagcctgcccttcgtgagcagaggccccctgaccgtggaggagacccccagagtgcagggcgagacccagccccagagactgctgctggccgaggacagcgaggaggaggtggacttcctgagcgagagaagaatggtgaagaagagcagaaccaccagcagcagcgtgatcgtgcccgagagcgacgaggagggccacagccccgtgctgggcggcctgggcccccccttcgccttcaacctgaacagcgacaccgacgtggaggagggccagcagcccgccaccgaggaggccagcagcgccgccagaagaggcgccaccgtggaggcctag

SEQ ID NO: 11428 - DNA, 735 bp, synthetic construct
  misc_feature 1..735: note = Description of Artificial Sequence: Synthetic coding sequence
  source 1..735: mol_type = other DNA
atggaggacacccaggccatcgactgggacgtggaggaggaggaggagaccgagcagagcagcgagagcctgagatgcaacgtggagcccgtgggcagactgcacatcttcagcggcgcccacggccccgagaaggacttccccctgcacctgggcaagaacgtggtgggcagaatgcccgactgcagcgtggccctgcccttccccagcatcagcaagcagcacgccgagatcgagatcctggcctgggacaaggcccccatcctgagagactgcggcagcctgaacggcacccagatcctgagaccccccaaggtgctgagccccggcgtgagccacagactgagagaccaggagctgatcctgttcgccgacctgctgtgccagtaccacagactggacgtgagcctgcccttcgtgagcagaggccccctgaccgtggaggagacccccagagtgcagggcgagacccagccccagagactgctgctggccgaggacagcgaggaggaggtggacttcctgagcgagagaagaatggtgaagaagagcagaaccaccagcagcagcgtgatcgtgcccgagagcgacgaggagggccacagccccgtgctgggcggcctgggcccccccttcgccttcaacctgaacagcgacaccgacgtggaggagggccagcagccccacagaggcggcctgctgagctgccagaagagatgccactgcagaggctag

SEQ ID NO: 11429 - DNA, 5478 bp, synthetic construct
  misc_feature 1..5478: note = Description of Artificial Sequence: Synthetic coding sequence
  source 1..5478: mol_type = other DNA
atggaggacacccaggccatcgactgggacgtggaggaggaggaggagaccgagcagagcagcgagagcctgagatgcaacgtggagcccgtgggcagactgcacatcttcagcggcgcccacggccccgagaaggacttccccctgcacctgggcaagaacgtggtgggcagaatgcccgactgcagcgtggccctgcccttccccagcatcagcaagcagcacgccgagatcgagatcctggcctgggacaaggcccccatcctgagagactgcggcagcctgaacggcacccagatcctgagaccccccaaggtgctgagccccggcgtgagccacagactgagagaccaggagctgatcctgttcgccgacctgctgtgccagtaccacagactggacgtgagcctgcccttcgtgagcagaggccccctgaccgtggaggagacccccagagtgcagggcgagacccagccccagagactgctgctggccgaggacagcgaggaggaggtggacttcctgagcgagagaagaatggtgaagaagagcagaaccaccagcagcagcgtgatcgtgcccgagagcgacgaggagggccacagccccgtgctgggcggcctgggcccccccttcgccttcaacctgaacagcgacaccgacgtggaggagggccagcagcccgccaccgaggaggccagcagcgccgccagaagaggcgccaccgtggaggccaagcagagcgaggccgaggtggtgaccgagatccagctggagaaggaccagcccctggtgaaggagaaggacaacgacaccaaggtgaagagaggcgccggcaacggcgtggtgcccgccggcgtgatcctggagagaagccagccccccggcgaggacagcgacaccgacgtggacgacgacagcagaccccccggcagacccgccgaggtgcacctggagagagcccagcccttcggcttcatcgacagcgacaccgacgccgaggaggagagaatccccgccacccccgtggtgatccccatgaagaagagaaagatcttccacggcgtgggcaccagaggccccggcgcccccggcctggcccacctgcaggagagccaggccggcagcgacaccgacgtggaggagggcaaggccccccaggccgtgcccctggagaagagccaggccagcatggtgatcaacagcgacaccgacgacgaggaggaggtgagcgccgccctgaccctggcccacctgaaggagagccagcccgccatctggaacagagacgccgaggaggacatgccccagagagtggtgctgctgcagagaagccagaccaccaccgagagagacagcgacaccgacgtggaggaggaggagctgcccgtggagaacagagaggccgtgctgaaggaccacaccaagatcagagccctggtgagagcccacagcgagaaggaccagccccccttcggcgacagcgacgacagcgtggaggccgacaagagcagccccggcatccacctggagagaagccaggccagcaccaccgtggacatcaacacccaggtggagaaggaggtgccccccggcagcgccatcatccacatcaagaagcaccaggtgagcgtggagggcaccaaccagaccgacgtgaaggccgtgggcggccccgccaagctgctggtggtgagcctggaggaggcctggcccctgcacggcgactgcgagaccgacgccgaggagggcaccagcctgaccgccagcgtggtggccgacgtgagaaagagccagctgcccgccgagggcgacgccggcgccgagtgggccgccgccgtgctgaagcaggagagagcccacgaggtgggcgcccagggcggcccccccgtggcccaggtggagcaggacctgcccatcagcagagagaacctgaccgacctggtggtggacaccgacaccctgggcgagagcacccagccccagagagagggcgcccaggtgcccaccggcagagagagagagcagcacgtgggcggcaccaaggacagcgaggacaactacggcgacagcgaggacctggacctgcaggccacccagtgcttcctggagaaccagggcctggaggccgtgcagagcatggaggacgagcccacccaggccttcatgctgacccccccccaggagctgggccccagccactgcagcttccagaccaccggcctgctgaactgcaagatgccccccgccgagaaggccagcagaatcagagccgccgagaaggtgagcagaggcgaccaggagagccccgacgcctgcctgccccccaccgtgcccgaggcccccgcccccccccagaagcccctgaacagccagagccagaagcacctggcccccccccccctgctgagccccctgctgcccagcatcaagcccaccgtgagaaagaccagacaggacggcagccaggaggcccccgaggcccccctgagcagcgagctggagcccttccaccccaagcccaagatcagaaccagaaagagcagcagaatgacccccttccccgccaccagcgccgcccccgagccccaccccagcaccagcaccgcccagcccgtgacccccaagcccaccagccaggccaccagaagcagaaccaacagaagcagcgtgaagacccccgagcccgtggtgcccaccgcccccgagctgcagcccagcaccagcaccgaccagcccgtgaccagcgagcccaccagccaggtgaccagaggcagaaagagcagaagcagcgtgaagacccccgagaccgtggtgcccaccgccctggagctgcagcccagcaccagcaccgacagacccgtgaccagcgagcccaccagccaggccaccagaggcagaaagaacagaagcagcgtgaagacccccgagcccgtggtgcccaccgcccccgagctgcagcccagcaccagcaccgaccagcccgtgaccagcgagcccacctaccaggccaccagaggcagaaagaacagaagcagcgtgaagacccccgagcccgtggtgcccaccgcccccgagctgagacccagcaccagcaccgacagacccgtgacccccaagcccaccagcagaaccaccagaagcagaaccaacatgagcagcgtgaagacccccgagaccgtggtgcccaccgcccccgagctgcagatcagcaccagcaccgaccagcccgtgacccccaagcccaccagcagaaccaccagaagcagaaccaacatgagcagcgtgaagaaccccgagagcaccgtgcccatcgcccccgagctgccccccagcaccagcaccgagcagcccgtgacccccgagcccaccagcagagccaccagaggcagaaagaacagaagcagcggcaagacccccgagaccctggtgcccaccgcccccaagctggagcccagcaccagcaccgaccagcccgtgacccccgagcccaccagccaggccaccagaggcagaaccaacagaagcagcgtgaagacccccgagaccgtggtgcccaccgcccccgagctgcagcccagcaccagcaccgaccagcccgtgacccccgagcccaccagccaggccaccagaggcagaaccgacagaagcagcgtgaagacccccgagaccgtggtgcccaccgcccccgagctgcaggccagcgccagcaccgaccagcccgtgaccagcgagcccaccagcagaaccaccagaggcagaaagaacagaagcagcgtgaagacccccgagaccgtggtgcccgccgcccccgagctgcagcccagcaccagcaccgaccagcccgtgacccccgagcccaccagcagagccaccagaggcagaaccaacagaagcagcgtgaagacccccgagagcatcgtgcccatcgcccccgagctgcagcccagcaccagcagaaaccagctggtgacccccgagcccaccagcagagccaccagatgcagaaccaacagaagcagcgtgaagacccccgagcccgtggtgcccaccgcccccgagccccaccccaccaccagcaccgaccagcccgtgacccccaagctgaccagcagagccaccagaagaaagaccaacagaagcagcgtgaagacccccaagcccgtggagcccgccgccagcgacctggagcccttcacccccaccgaccagagcgtgacccccgaggccatcgcccagggcggccagagcaagaccctgagaagcagcaccgtgagagccatgcccgtgcccaccacccccgagttccagagccccgtgaccaccgaccagcccatcagccccgagcccatcacccagcccagctgcatcaagagacagagagccgccggcaaccccggcagcctggccgcccccatcgaccacaagccctgcagcgcccccctggagcccaagagccaggccagcagaaaccagagatggggcgccgtgagagccgccgagagcctgaccgccatccccgagcccgccagcccccagctgctggagacccccatccacgccagccagatccagaaggtggagcccgccggcagaagcagattcacccccgagctgcagcccaaggccagccagagcagaaagagaagcctggccaccatggacagccccccccaccagaagcagccccagagaggcgaggtgagccagaagaccgtgatcatcaaggaggaggaggaggacaccgccgagaagcccggcaaggaggaggacgtggtgacccccaagcccggcaagagaaagagagaccaggccgaggaggagcccaacagaatccccagcagaagcctgagaagaaccaagctgaaccaggagagcaccgcccccaaggtgctgttcaccggcgtggtggacgccagaggcgagagagccgtgctggccctgggcggcagcctggccggcagcgccgccgaggccagccacctggtgaccgacagaatcagaagaaccgtgaagttcctgtgcgccctgggcagaggcatccccatcctgagcctggactggctgcaccagagcagaaaggccggcttcttcctgccccccgacgagtacgtggtgaccgaccccgagcaggagaagaacttcggcttcagcctgcaggacgccctgagcagagccagagagagaagactgctggagggctacgagatctacgtgacccccggcgtgcagcccccccccccccagatgggcgagatcatcagctgctgcggcggcacctacctgcccagcatgcccagaagctacaagccccagagagtggtgatcacctgcccccaggacttcccccactgcagcatccccctgagagtgggcctgcccctgctgagccccgagttcctgctgaccggcgtgctgaagcaggaggccaagcccgaggccttcgtgctgagccccctggagatgagcagcacctag

SEQ ID NO: 11430 - DNA, 4968 bp, synthetic construct
  misc_feature 1..4968: note = Description of Artificial Sequence: Synthetic coding sequence
  source 1..4968: mol_type = other DNA
atgtaccacagactggacgtgagcctgcccttcgtgagcagaggccccctgaccgtggaggagacccccagagtgcagggcgagacccagccccagagactgctgctggccgaggacagcgaggaggaggtggacttcctgagcgagagaagaatggtgaagaagagcagaaccaccagcagcagcgtgatcgtgcccgagagcgacgaggagggccacagccccgtgctgggcggcctgggcccccccttcgccttcaacctgaacagcgacaccgacgtggaggagggccagcagcccgccaccgaggaggccagcagcgccgccagaagaggcgccaccgtggaggccaagcagagcgaggccgaggtggtgaccgagatccagctggagaaggaccagcccctggtgaaggagaaggacaacgacaccaaggtgaagagaggcgccggcaacggcgtggtgcccgccggcgtgatcctggagagaagccagccccccggcgaggacagcgacaccgacgtggacgacgacagcagaccccccggcagacccgccgaggtgcacctggagagagcccagcccttcggcttcatcgacagcgacaccgacgccgaggaggagagaatccccgccacccccgtggtgatccccatgaagaagagaaagatcttccacggcgtgggcaccagaggccccggcgcccccggcctggcccacctgcaggagagccaggccggcagcgacaccgacgtggaggagggcaaggccccccaggccgtgcccctggagaagagccaggccagcatggtgatcaacagcgacaccgacgacgaggaggaggtgagcgccgccctgaccctggcccacctgaaggagagccagcccgccatctggaacagagacgccgaggaggacatgccccagagagtggtgctgctgcagagaagccagaccaccaccgagagagacagcgacaccgacgtggaggaggaggagctgcccgtggagaacagagaggccgtgctgaaggaccacaccaagatcagagccctggtgagagcccacagcgagaaggaccagccccccttcggcgacagcgacgacagcgtggaggccgacaagagcagccccggcatccacctggagagaagccaggccagcaccaccgtggacatcaacacccaggtggagaaggaggtgccccccggcagcgccatcatccacatcaagaagcaccaggtgagcgtggagggcaccaaccagaccgacgtgaaggccgtgggcggccccgccaagctgctggtggtgagcctggaggaggcctggcccctgcacggcgactgcgagaccgacgccgaggagggcaccagcctgaccgccagcgtggtggccgacgtgagaaagagccagctgcccgccgagggcgacgccggcgccgagtgggccgccgccgtgctgaagcaggagagagcccacgaggtgggcgcccagggcggcccccccgtggcccaggtggagcaggacctgcccatcagcagagagaacctgaccgacctggtggtggacaccgacaccctgggcgagagcacccagccccagagagagggcgcccaggtgcccaccggcagagagagagagcagcacgtgggcggcaccaaggacagcgaggacaactacggcgacagcgaggacctggacctgcaggccacccagtgcttcctggagaaccagggcctggaggtgcagagcatggaggacgagcccacccaggccttcatgctgacccccccccaggagctgggccccagccactgcagcttccagaccaccggcctgctgaactgcaagatgccccccgccgagaaggccagcagaatcagagccgccgagaaggtgagcagaggcgaccaggagagccccgacgcctgcctgccccccaccgtgcccgaggcccccgcccccccccagaagcccctgaacagccagagccagaagcacctggcccccccccccctgctgagccccctgctgcccagcatcaagcccaccgtgagaaagaccagacaggacggcagccaggaggcccccgaggcccccctgagcagcgagctggagcccttccaccccaagcccaagatcagaaccagaaagagcagcagaatgacccccttccccgccaccagcgccgcccccgagccccaccccagcaccagcaccgcccagcccgtgacccccaagcccaccagccaggccaccagaagcagaaccaacagaagcagcgtgaagacccccgagcccgtggtgcccaccgcccccgagctgcagcccagcaccagcaccgaccagcccgtgaccagcgagcccaccagccaggtgaccagaggcagaaagagcagaagcagcgtgaagacccccgagaccgtggtgcccaccgccctggagctgcagcccagcaccagcaccgacagacccgtgaccagcgagcccaccagccaggccaccagaggcagaaagaacagaagcagcgtgaagacccccgagcccgtggtgcccaccgcccccgagctgcagcccagcaccagcaccgaccagcccgtgaccagcgagcccacctaccaggccaccagaggcagaaagaacagaagcagcgtgaagacccccgagcccgtggtgcccaccgcccccgagctgagacccagcaccagcaccgacagacccgtgacccccaagcccaccagcagaaccaccagaagcagaaccaacatgagcagcgtgaagaaccccgagagcaccgtgcccatcgcccccgagctgccccccagcaccagcaccgagcagcccgtgacccccgagcccaccagcagagccaccagaggcagaaagaacagaagcagcggcaagacccccgagaccctggtgcccaccgcccccaagctggagcccagcaccagcaccgaccagcccgtgacccccgagcccaccagccaggccaccagaggcagaaccaacagaagcagcgtgaagacccccgagaccgtggtgcccaccgcccccgagctgcagcccagcaccagcaccgaccagcccgtgacccccgagcccaccagccaggccaccagaggcagaaccgacagaagcagcgtgaagacccccgagaccgtggtgcccaccgcccccgagctgcaggccagcgccagcaccgaccagcccgtgaccagcgagcccaccagcagaaccaccagaggcagaaagaacagaagcagcgtgaagacccccgagaccgtggtgcccgccgcccccgagctgcagcccagcaccagcaccgaccagcccgtgacccccgagcccaccagcagagccaccagaggcagaaccaacagaagcagcgtgaagacccccgagagcatcgtgcccatcgcccccgagctgcagcccagcaccagcagaaaccagctggtgacccccgagcccaccagcagagccaccagatgcagaaccaacagaagcagcgtgaagacccccgagcccgtggtgcccaccgcccccgagccccaccccaccaccagcaccgaccagcccgtgacccccaagctgaccagcagagccaccagaagaaagaccaacagaagcagcgtgaagacccccaagcccgtggagcccgccgccagcgacctggagcccttcacccccaccgaccagagcgtgacccccgaggccatcgcccagggcggccagagcaagaccctgagaagcagcaccgtgagagccatgcccgtgcccaccacccccgagttccagagccccgtgaccaccgaccagcccatcagccccgagcccatcacccagcccagctgcatcaagagacagagagccgccggcaaccccggcagcctggccgcccccatcgaccacaagccctgcagcgcccccctggagcccaagagccaggccagcagaaaccagagatggggcgccgtgagagccgccgagagcctgaccgccatccccgagcccgccagcccccagctgctggagacccccatccacgccagccagatccagaaggtggagcccgccggcagaagcagattcacccccgagctgcagcccaaggccagccagagcagaaagagaagcctggccaccatggacagccccccccaccagaagcagccccagagaggcgaggtgagccagaagaccgtgatcatcaaggaggaggaggaggacaccgccgagaagcccggcaaggaggaggacgtggtgacccccaagcccggcaagagaaagagagaccaggccgaggaggagcccaacagaatccccagcagaagcctgagaagaaccaagctgaaccaggagagcaccgcccccaaggtgctgttcaccggcgtggtggacgccagaggcgagagagccgtgctggccctgggcggcagcctggccggcagcgccgccgaggccagccacctggtgaccgacagaatcagaagaaccgtgaagttcctgtgcgccctgggcagaggcatccccatcctgagcctggactggctgcaccagagcagaaaggccggcttcttcctgccccccgacgagtacgtggtgaccgaccccgagcaggagaagaacttcggcttcagcctgcaggacgccctgagcagagccagagagagaagactgctggagggctacgagatctacgtgacccccggcgtgcagcccccccccccccagatgggcgagatcatcagctgctgcggcggcacctacctgcccagcatgcccagaagctacaagccccagagagtggtgatcacctgcccccaggacttcccccactgcagcatccccctgagagtgggcctgcccctgctgagccccgagttcctgctgaccggcgtgctgaagcaggaggccaagcccgaggccttcgtgctgagccccctggagatgagcagcacctag

SEQ ID NO: 11431 - DNA, 1941 bp, synthetic construct
  misc_feature 1..1941: note = Description of Artificial Sequence: Synthetic coding sequence
  source 1..1941: mol_type = other DNA
atgggcctgcccagactggtgtgcgccttcctgctggccgcctgctgctgctgccccagagtggccggcgtgcccggcgaggccgagcagcccgcccccgagctggtggaggtggaggtgggcagcaccgccctgctgaagtgcggcctgagccagagccagggcaacctgagccacgtggactggttcagcgtgcacaaggagaagagaaccctgatcttcagagtgagacagggccagggccagagcgagcccggcgagtacgagcagagactgagcctgcaggacagaggcgccaccctggccctgacccaggtgaccccccaggacgagagaatcttcctgtgccagggcaagagacccagaagccaggagtacagaatccagctgagagtgtacaaggcccccgaggagcccaacatccaggtgaaccccctgggcatccccgtgaacagcaaggagcccgaggaggtggccacctgcgtgggcagaaacggctaccccatcccccaggtgatctggtacaagaacggcagacccctgaaggaggagaagaacagagtgcacatccagagcagccagaccgtggagagcagcggcctgtacaccctgcagagcatcctgaaggcccagctggtgaaggaggacaaggacgcccagttctactgcgagctgaactacagactgcccagcggcaaccacatgaaggagagcagagaggtgaccgtgcccgtgttctaccccaccgagaaggtgtggctggaggtggagcccgtgggcatgctgaaggagggcgacagagtggagatcagatgcctggccgacggcaacccccccccccacttcagcatcagcaagcagaaccccagcaccagagaggccgaggaggagaccaccaacgacaacggcgtgctggtgctggagcccgccagaaaggagcacagcggcagatacgagtgccagggcctggacctggacaccatgatcagcctgctgagcgagccccaggagctgctggtgaactacgtgagcgacgtgagagtgagccccgccgcccccgagagacaggagggcagcagcctgaccctgacctgcgaggccgagagcagccaggacctggagttccagtggctgagagaggagaccggccaggtgctggagagaggccccgtgctgcagctgcacgacctgaagagagaggccggcggcggctacagatgcgtggccagcgtgcccagcatccccggcctgaacagaacccagctggtgaacgtggccatcttcggccccccctggatggccttcaaggagagaaaggtgtgggtgaaggagaacatggtgctgaacctgagctgcgaggccagcggccaccccagacccaccatcagctggaacgtgaacggcaccgccagcgagcaggaccaggacccccagagagtgctgagcaccctgaacgtgctggtgacccccgagctgctggagaccggcgtggagtgcaccgccagcaacgacctgggcaagaacaccagcatcctgttcctggagctggtgaacctgaccaccctgacccccgacagcaacaccaccaccggcctgagcaccagcaccgccagcccccacaccagagccaacagcaccagcaccgagagaaagctgcccgagcccgagagcagaggcgtggtgatcgtggccgtgatcgtgtgcatcctggtgctggccgtgctgggcgccgtgctgtacttcctgtacaagaagggcaagctgccctgcagaagaagcggcaagcaggagatcaccctgccccccagcagaaagagcgagctggtggtggaggtgaagagcgacaagctgcccgaggagatgggcctgctgcagggcagcagcggcgacaagagagcccccggcgaccagggcgagaagtacatcgacctgagacactag

SEQ ID NO: 11432 - DNA, 1584 bp, synthetic construct
  misc_feature 1..1584: note = Description of Artificial Sequence: Synthetic coding sequence
  source 1..1584: mol_type = other DNA
atggtgtacatcgtgagacagttcctgctgtacaacgtgagcggcagcgtgtacctggaccagctgatcgtgctgctgaccgccaagttcagcatcctgagaatcgccggcagcagagtgcaccacagccccttcagcggccacctggacggctgcagcttcctgagcctgcagcacagcctgcacaccagcctggacatgagcagacacgagaacgtgttcctgggcctgaccctgagcagcaagagcgccggcctgaagggcttccagctggccttcgtgcccggcctgctgcagggcaccggcggctacctggacggccccctgcccacccccgtggacaaccccagagtgggcctggaggtgggcctgagactgagcctgccccccctgcccccctgccccggcgtgcacatccagagcagccagaccgtggagagcagcggcctgtacaccctgcagagcatcctgaaggcccagctggtgaaggaggacaaggacgcccagttctactgcgagctgaactacagactgcccagcggcaaccacatgaaggagagcagagaggtgaccgtgcccgtgttctaccccaccgagaaggtgtggctggaggtggagcccgtgggcatgctgaaggagggcgacagagtggagatcagatgcctggccgacggcaacccccccccccacttcagcatcagcaagcagaaccccagcaccagagaggccgaggaggagaccaccaacgacaacggcgtgctggtgctggagcccgccagaaaggagcacagcggcagatacgagtgccagggcctggacctggacaccatgatcagcctgctgagcgagccccaggagctgctggtgaactacgtgagcgacgtgagagtgagccccgccgcccccgagagacaggagggcagcagcctgaccctgacctgcgaggccgagagcagccaggacctggagttccagtggctgagagaggagaccggccaggtgctggagagaggccccgtgctgcagctgcacgacctgaagagagaggccggcggcggctacagatgcgtggccagcgtgcccagcatccccggcctgaacagaacccagctggtgaacgtggccatcttcggccccccctggatggccttcaaggagagaaaggtgtgggtgaaggagaacatggtgctgaacctgagctgcgaggccagcggccaccccagacccaccatcagctggaacgtgaacggcaccgccagcgagcaggaccaggacccccagagagtgctgagcaccctgaacgtgctggtgacccccgagctgctggagaccggcgtggagtgcaccgccagcaacgacctgggcaagaacaccagcatcctgttcctggagctggtgaacctgaccaccctgacccccgacagcaacaccaccaccggcctgagcaccagcaccgccagcccccacaccagagccaacagcaccagcaccggcaagcccggcctggccagagagcagggctgcgccagagccagcttcctgccctgccccagccccgagagccccgtgcagaagggcgagtag

SEQ ID NO: 11433 - DNA, 141 bp, synthetic construct
  misc_feature 1..141: note = Description of Artificial Sequence: Synthetic coding sequence
  source 1..141: mol_type = other DNA
ggcgtggtgatcgtggccgtgatcgtgtgcatcctggtgctggccgtgctgggcgccgtgctgtacttcctgtacaagaagggcaagctgccctgcagaagaagcggcaagcaggagatggagagaaacaccagcatctag

SEQ ID NO: 11434 - DNA, 2253 bp, synthetic construct
  misc_feature 1..2253: note = Description of Artificial Sequence: Synthetic coding sequence
  source 1..2253: mol_type = other DNA
atgggcaagagcgagagccagatggacatcaccgacatcaacacccccaagcccaagaagaagcagagatggacccccctggagatcagcctgagcgtgctggtgctgctgctgaccatcatcgccgtgaccatgatcgccctgtacgccacctacgacgacggcatctgcaagagcagcgactgcatcaagagcgccgccagactgatccagaacatggacgccaccaccgagccctgcaccgacttcttcaagtacgcctgcggcggctggctgaagagaaacgtgatccccgagaccagcagcagatacggcaacttcgacatcctgagagacgagctggaggtggtgctgaaggacgtgctgcaggagcccaagaccgaggacatcgtggccgtgcagaaggccaaggccctgtacagaagctgcatcaacgagagcgccatcgacagcagaggcggcgagcccctgctgaagctgctgcccgacatctacggctggcccgtggccaccgagaactgggagcagaagtacggcgccagctggaccgccgagaaggccatcgcccagctgaacagcaagtacggcaagaaggtgctgatcaacctgttcgtgggcaccgacgacaagaacagcgtgaaccacgtgatccacatcgaccagcccagactgggcctgcccagcagagactactacgagtgcaccggcatctacaaggaggcctgcaccgcctacgtggacttcatgatcagcgtggccagactgatcagacaggaggagagactgcccatcgacgagaaccagctggccctggagatgaacaaggtgatggagctggagaaggagatcgccaacgccaccgccaagcccgaggacagaaacgaccccatgctgctgtacaacaagatgaccctggcccagatccagaacaacttcagcctggagatcaacggcaagcccttcagctggctgaacttcaccaacgagatcatgagcaccgtgaacatcagcatcaccaacgaggaggacgtggtggtgtacgcccccgagtacctgaccaagctgaagcccatcctgaccaagtacagcgccagagacctgcagaacctgatgagctggagattcatcatggacctggtgagcagcctgagcagaacctacaaggagagcagaaacgccttcagaaaggccctgtacggcaccaccagcgagaccgccacctggagaagatgcgccaactacgtgaacggcaacatggagaacgccgtgggcagactgtacgtggaggccgccttcgccggcgagagcaagcacgtggtggaggacctgatcgcccagatcagagaggtgttcatccagaccctggacgacctgacctggatggacgccgagaccaagaagagagccgaggagaaggccctggccatcaaggagagaatcggctaccccgacgacatcgtgagcaacgacaacaagctgaacaacgagtacctggagctgaactacaaggaggacgagtacttcgagaacatcatccagaacctgaagttcagccagagcaagcagctgaagaagctgagagagaaggtggacaaggacgagtggatcagcggcgccgccgtggtgaacgccttctacagcagcggcagaaaccagatcgtgttccccgccggcatcctgcagccccccttcttcagcgcccagcagagcaacagcctgaactacggcggcatcggcatggtgatcggccacgagatcacccacggcttcgacgacaacggcagaaacttcaacaaggacggcgacctggtggactggtggacccagcagagcgccagcaacttcaaggagcagagccagtgcatggtgtaccagtacggcaacttcagctgggacctggccggcggccagcacctgaacggcatcaacaccctgggcgagaacatcgccgacaacggcggcctgggccaggcctacagagcctaccagaactacatcaagaagaacggcgaggagaagctgctgcccggcctggacctgaaccacaagcagctgttcttcctgaacttcgcccaggtgtggtgcggcacctacagacccgagtacgccgtgaacagcatcaagaccgacgtgcacagccccggcaacttcagaatcatcggcaccctgcagaacagcgccgagttcagcgaggccttccactgcagaaagaacagctacatgaaccccgagaagaagtgcagagtgtggtag

SEQ ID NO: 11435 - DNA, 2253 bp, synthetic construct; identical to SEQ ID NO: 11434
  misc_feature 1..2253: note = Description of Artificial Sequence: Synthetic coding sequence
  source 1..2253: mol_type = other DNA

SEQ ID NO: 11436 - DNA, 2253 bp, synthetic construct; identical to SEQ ID NO: 11434
  misc_feature 1..2253: note = Description of Artificial Sequence: Synthetic coding sequence
  source 1..2253: mol_type = other DNA

SEQ ID NO: 11437 - DNA, 486 bp, synthetic construct
  misc_feature 1..486: note = Description of Artificial Sequence: Synthetic coding sequence
  source 1..486: mol_type = other DNA
atgggcaagagcgagagccagatggacatcaccgacatcaacacccccaagcccaagaagaagcagagatggacccccctggagatcagcctgagcgtgctggtgctgctgctgaccatcatcgccgtgaccatgatcgccctgtacgccacctacgacgacggcatctgcaagagcagcgactgcatcaagagcgccgccagactgatccagaacatggacgccaccaccgagccctgcaccgacttcttcaagtacgcctgcggcggctggctgaagagaaacgtgatccccgagaccagcagcagatacggcaacttcgacatcctgagagacgagctggaggtggtgctgaaggacgtgctgcaggagcccaagaccgaggacatcgtggccgtgcagaaggccaaggccctgtacagaagctgcatcaacgagagcgccatcgacagcagaggcggcgagcccctgctgaagctgctgtag

SEQ ID NO: 11438 - DNA, 282 bp, synthetic construct
  misc_feature 1..282: note = Description of Artificial Sequence: Synthetic coding sequence
  source 1..282: mol_type = other DNA
atgggcaagagcgagagccagatggacatcaccgacatcaacacccccaagcccaagaagaagcagagatggacccccctggagatcagcctgagcgtgctggtgctgctgctgaccatcatcgccgtgaccatgatcgccctgtacgccacctacgacgacggcatctgcaagagcagcgactgcatcaagagcgccgccagactgatccagaacatggacgccaccaccgagccctgcaccgacttcttcaagtacgcctgcggcggctggctgaagtag

SEQ ID NO: 11439 - DNA, 702 bp, synthetic construct
  misc_feature 1..702: note = Description of Artificial Sequence: Synthetic coding sequence
  source 1..702: mol_type = other DNA
atgggcaagagcgagagccagatggacatcaccgacatcaacacccccaagcccaagaagaagcagagatggacccccctggagatcagcctgagcgtgctggtgctgctgctgaccatcatcgccgtgaccatgatcgccctgtacgccacctacgacgacggcatctgcaagagcagcgactgcatcaagagcgccgccagactgatccagaacatggacgccaccaccgagccctgcaccgacttcttcaagtacgcctgcggcggctggctgaagagaaacgtgatccccgagaccagcagcagatacggcaacttcgacatcctgagagacgagctggaggtggtgctgaaggacgtgctgcaggagcccaagaccgaggacatcgtggccgtgcagaaggccaaggccctgtacagaagctgcatcaacgagagcgccatcgacagcagaggcggcgagcccctgctgaagctgctgcccgacatctacggctggcccgtggccaccgagaactgggagcagaagtacggcgccagctggaccgccgagaaggccatcgcccagctgaacagcaagtacggcaagaaggtgctgatcaacctgttcgtgggcaccgacgacaagaacagcgtgaaccacgtgatccacatcgaccagcccagactgggcctgcccagcagagactactacgagtag

SEQ ID NO: 11440 - DNA, 360 bp, synthetic construct
  misc_feature 1..360: note = Description of Artificial Sequence: Synthetic coding sequence
  source 1..360: mol_type = other DNA
atgggcaagagcgagagccagatggacatcaccgacatcaacacccccaagcccaagaagaagcagagatggacccccctggagatcagcctgagcgtgctggtgctgctgctgaccatcatcgccgtgaccatgatcgccctgtacgccacctacgacgacggcatctgcaagagcagcgactgcatcaagagcgccgccagactgatccagaacatggacgccaccaccgagccctgcaccgacttcttcaagtacgcctgcggcggctggctgaagagaaacgtgatccccgagaccagcagcagatacggcaacttcgacatcctgagagacgagctggaggtggtgctgaagtag

SEQ ID NO: 11441 - DNA, 2253 bp, synthetic construct; identical to SEQ ID NO: 11434
  misc_feature 1..2253: note = Description of Artificial Sequence: Synthetic coding sequence
  source 1..2253: mol_type = other DNA

SEQ ID NO: 11442 - DNA, 2253 bp, synthetic construct; identical to SEQ ID NO: 11434
  misc_feature 1..2253: note = Description of Artificial Sequence: Synthetic coding sequence
  source 1..2253: mol_type = other DNA

SEQ ID NO: 11443 - DNA, 48 bp, synthetic construct
  misc_feature 1..48: note = Description of Artificial Sequence: Synthetic coding sequence
  source 1..48: mol_type = other DNA
atgggcaagagcgagagccagatggacatcaccgacatcaacacctag

SEQ ID NO: 11444 - DNA, 894 bp, synthetic construct
  misc_feature 1..894: note = Description of Artificial Sequence: Synthetic coding sequence
  source 1..894: mol_type = other DNA
atgaccacccccagaaacagcgtgaacggcaccttccccgccgagcccatgaagggccccatcgccatgcagagcggccccaagcccctgttcagaagaatgagcagcctggtgggccccacccagagcttcttcatgagagagagcaagaccctgggcgccgtgcagatcatgaacggcctgttccacatcgccctgggcggcctgctgatgatccccgccggcatctacgcccccatctgcgtgaccgtgtggtaccccctgtggggcggcatcatgtacatcatcagcggcagcctgctggccgccaccgagaagaacagcagaaagtgcctggtgaagggcaagatgatcatgaacagcctgagcctgttcgccgccatcagcggcatgatcctgagcatcatggacatcctgaacatcaagatcagccacttcctgaagatggagagcctgaacttcatcagagcccacaccccctacatcaacatctacaactgcgagcccgccaaccccagcgagaagaacagccccagcacccagtactgctacagcatccagagcctgttcctgggcatcctgagcgtgatgctgatcttcgccttcttccaggagctggtgatcgccggcatcgtggagaacgagtggaagagaacctgcagcagacccaagagcaacatcgtgctgctgagcgccgaggagaagaaggagcagaccatcgagatcaaggaggaggtggtgggcctgaccgagaccagcagccagcccaagaacgaggaggacatcgagatcatccccatccaggaggaggaggaggaggagaccgagaccaacttccccgagcccccccaggaccaggagagcagccccatcgagaacgacagcagcccctag

SEQ ID NO: 11445 - DNA, 894 bp, synthetic construct; identical to SEQ ID NO: 11444
  misc_feature 1..894: note = Description of Artificial Sequence: Synthetic coding sequence
  source 1..894: mol_type = other DNA

SEQ ID NO: 11446 - DNA, 24 bp, synthetic construct
  misc_feature 1..24: note = Description of Artificial Sequence: Synthetic coding sequence
  source 1..24: mol_type = other DNA
atgaccacccccagaaacagctag

SEQ ID NO: 11447 - DNA, 855 bp, synthetic construct
  misc_feature 1..855: note = Description of Artificial Sequence: Synthetic coding sequence
  source 1..855: mol_type = other DNA
atgaccacccccagaaacagcgtgaacggcaccttccccgccgagcccatgaagggccccatcgccatgcagagcggccccaagcccctgttcagaagaatgagcagcctggtgggccccacccagagcttcttcatgagagagagcaagaccctgggcgccgtgcagatcatgaacggcctgttccacatcgccctgggcggcctgctgatgatccccgccggcatctacgcccccatctgcgtgaccgtgtggtaccccctgtggggcggcatcatgtacatcatcagcggcagcctgctggccgccaccgagaagaacagcagaaagtgcctggtgaagggcaagatgatcatgaacagcctgagcctgttcgccgccatcagcggcatgatcctgagcatcatggacatcctgaacatcaagatcagccacttcctgaagatggagagcctgaacttcatcagagcccacaccccctacatcaacatctacaactgcgagcccgccaaccccagcgagaagaacagccccagcacccagtactgctacagcatccagagcctgttcctggagctggtgatcgccggcatcgtggagaacgagtggaagagaacctgcagcagacccaagagcaacatcgtgctgctgagcgccgaggagaagaaggagcagaccatcgagatcaaggaggaggtggtgggcctgaccgagaccagcagccagcccaagaacgaggaggacatcgagatcatccccatccaggaggaggaggaggaggagaccgagaccaacttccccgagcccccccaggaccaggagagcagccccatcgagaacgacagcagcccctag

SEQ ID NO: 11448 - DNA, 21 bp, synthetic construct
  misc_feature 1..21: note = Description of Artificial Sequence: Synthetic coding sequence
  source 1..21: mol_type = other DNA
atgaccacccccagaaactag

SEQ ID NO: 11449 - DNA, 894 bp, synthetic construct; identical to SEQ ID NO: 11444
  misc_feature 1..894: note = Description of Artificial Sequence: Synthetic coding sequence
  source 1..894: mol_type = other DNA

SEQ ID NO: 11450 - DNA, 930 bp, synthetic construct
  misc_feature 1..930: note = Description of Artificial Sequence: Synthetic coding sequence
  source 1..930: mol_type = other DNA
atggacgaccagggctgccccagatgcaagaccaccaagtacagaaaccccagcctgaagctgatggtgaacgtgtgcggccacaccctgtgcgagagctgcgtggacctgctgttcgtgagaggcgccggcaactgccccgagtgcggcacccccctgagaaagagcaacttcagagtgcagctgttcgaggaccccaccgtggacaaggaggtggagatcagaaagaaggtgctgaagatctacaacaagagagaggaggacttccccagcctgagagagtacaacgacttcctggaggaggtggaggagatcgtgttcaacctgaccaacaacgtggacctggacaacaccaagaagaagatggagatctaccagaaggagaacaaggacgtgatccagaagaacaagctgaagctgaccagagagcaggaggagctggaggaggccctggaggtggagagacaggagaacgagcagagaagactgttcatccagaaggaggagcagctgcagcagatcctgaagagaaagaacaagcaggccttcctggacgagctggagagcagcgacctgcccgtggccctgctgctggcccagcacaaggacagaagcacccagctggagatgcagctggagaagcccaagcccgtgaagcccgtgaccttcagcaccggcatcaagatgggccagcacatcagcctggcccccatccacaagctggaggaggccctgtacgagtaccagcccctgcagatcgagacctacggcccccacgtgcccgagctggagatgctgggcagactgggctacctgaaccacgtgagagccgccagcccccaggacctggccggcggctacaccagcagcctggcctgccacagagccctgcaggacgccttcagcggcctgttctggcagcccagctag

SEQ ID NO: 11451 - DNA, 804 bp, synthetic construct
  misc_feature 1..804: note = Description of Artificial Sequence: Synthetic coding sequence
  source 1..804: mol_type = other DNA
atggacgaccagggctgccccagatgcaagaccaccaagtacagaaaccccagcctgaagctgatggtgaacgtgtgcggccacaccctgtgcgagagctgcgtggacctgctgttcgtgagaggcgccggcaactgccccgagtgcggcacccccctgagaaagagcaacttcagagtgcagctgttcgaggaccccaccgtggacaaggaggtggagatcagaaagaaggtgctgaagatctacaacaagagagaggaggacttccccagcctgagagagtacaacgacttcctggaggaggtggaggagatcgtgttcaacctgaccaacaacgtggacctggacaacaccaagaagaagatggagatctaccagaaggagaacaaggacgtgatccagaagaacaagctgaagctgaccagagagcaggaggagctggaggaggccctggaggtggagagacaggagaacgagcagagaagactgttcatccagaaggaggagcagctgcagcagatcctgaagagaaagaacaagcaggccttcctggacgagctgggccagcacatcagcctggcccccatccacaagctggaggaggccctgtacgagtaccagcccctgcagatcgagacctacggcccccacgtgcccgagctggagatgctgggcagactgggctacctgaaccacgtgagagccgccagcccccaggacctggccggcggctacaccagcagcctggcctgccacagagccctgcaggacgccttcagcggcctgttctggcagcccagctag

SEQ ID NO: 11452 - DNA, 510 bp, synthetic construct
  misc_feature 1..510: note = Description of Artificial Sequence: Synthetic coding sequence
  source 1..510: mol_type = other DNA
accagagagcaggaggagctggaggaggccctggaggtggagagacaggagaacgagcagagaagactgttcatccagaaggaggagcagctgcagcagatcctgaagagaaagaacaagcaggccttcctggacgagctggagagcagcgacctgcccgtggccctgctgctggcccagcacaaggacagaagcacccagctggagatgcagctggagaagcccaagcccgtgaagcccgtgaccttcagcaccggcatcaagatgggccagcacatcagcctggcccccatccacaagctggaggaggccctgtacgagtaccagcccctgcagatcgagacctacggcccccacgtgcccgagctggagatgctgggcagactgggctacctgaaccacgtgagagccgccagcccccaggacctggccggcggctacaccagcagcctggcctgccacagagccctgcaggacgccttcagcggcctgttctggcagcccagctag

SEQ ID NO: 11453 - DNA, 3963 bp, synthetic construct
  misc_feature 1..3963: note = Description of Artificial Sequence: Synthetic coding sequence
  source 1..3963: mol_type = other DNA
atgttcggcctggaccagttcgagccccaggtgaacagcagaaacgccggccagggcgagagaaacttcaacgagaccggcctgagcatgaacacccacttcaaggcccccgccttccacaccggcggcccccccggccccgtggaccccgccatgagcgccctgggcgagccccccatcctgggcatgaacatggagccctacggcttccacgccagaggccacagcgagctgcacgccggcggcctgcaggcccagcccgtgcacggcttcttcggcggccagcagccccaccacggccaccccggcagccaccacccccaccagcaccacccccacttcggcggcaacttcggcggccccgaccccggcgccagctgcctgcacggcggcagactgctgggctacggcggcgccgccggcggcctgggcagccagccccccttcgccgagggctacgagcacatggccgagagccagggccccgagagcttcggcccccagagacccggcaacctgcccgacttccacagcagcggcgccagcagccacgccgtgcccgccccctgcctgcccctggaccagagccccaacagagccgccagcttccacggcctgcccagcagcagcggcagcgacagccacagcctggagcccagaagagtgaccaaccagggcgccgtggacagcctggagtacaactaccccggcgaggcccccagcggccacttcgacatgttcagccccagcgacagcgagggccagctgccccactacgccgccggcagacaggtgcccggcggcgccttccccggcgccagcgccatgcccagagccgccggcatggtgggcctgagcaagatgcacgcccagcccccccagcagcagccccagcagcagcagcagccccagcagcagcagcagcagcacggcgtgttcttcgagagattcagcggcgccagaaagatgcccgtgggcctggagcccagcgtgggcagcagacaccccctgatgcagcccccccagcaggcccccccccccccccagcagcagcccccccagcagcccccccagcagcagcccccccccccccccggcctgctggtgagacagaacagctgcccccccgccctgcccagaccccagcagggcgaggccggcacccccagcggcggcctgcaggacggcggccccatgctgcccagccagcacgcccagttcgagtaccccatccacagactggagaacagaagcatgcacccctacagcgagcccgtgttcagcatgcagcacccccccccccagcaggcccccaaccagagactgcagcacttcgacgcccccccctacatgaacgtggccaagagacccagattcgacttccccggcagcgccggcgtggacagatgcgccagctggaacggcagcatgcacaacggcgccctggacaaccacctgagccccagcgcctaccccggcctgcccggcgagttcaccccccccgtgcccgacagcttccccagcggcccccccctgcagcaccccgcccccgaccaccagagcctgcagcagcagcagcagcagcagcagcagcagcagcagcagcagcagcagcagcagcagcagcagcagcagcagcagcagcagcagagacagaacgccgccctgatgatcaagcagatggccagcagaaaccagcagcagagactgagacagcccaacctggcccagctgggccaccccggcgacgtgggccagggcggcctggtgcacggcggccccgtgggcggcctggcccagcccaacttcgagagagagggcggcagcaccggcgccggcagactgggcaccttcgagcagcaggccccccacctggcccaggagagcgcctggttcagcggcccccaccccccccccggcgacctgctgcccagaagaatgggcggcagcggcctgcccgccgactgcggcccccacgaccccagcctggcccccccccccccccccggcggcagcggcgtgctgttcagaggccccctgcaggagcccatgagaatgcccggcgagggccacgtgcccgccctgcccagccccggcctgcagttcggcggcagcctgggcggcctgggccagctgcagagccccggcgccggcgtgggcctgcccagcgccgccagcgagagaagaccccccccccccgacttcgccaccagcgccctgggcggccagcccggcttccccttcggcgccgccggcagacagagcaccccccacagcggccccggcgtgaacagcccccccagcgccggcggcggcggcggcagcagcggcggcggcggcggcggcggcgcctaccccccccagcccgacttccagcccagccagagaaccagcgccagcaagctgggcgccctgagcctgggcagcttcaacaagcccagcagcaaggacaacctgttcggccagagctgcctggccgccctgagcaccgcctgccagaacatgatcgccagcctgggcgcccccaacctgaacgtgaccttcaacaagaagaacccccccgagggcaagagaaagctgagccagaacgagaccgacggcgccgccgtggccggcaaccccggcagcgactacttccccggcggcaccgcccccggcgcccccggccccggcggccccagcggcaccagcagcagcggcagcaaggccagcggcccccccaacccccccgcccagggcgacggcaccagcctgagccccaactacaccctggagagcaccagcggcaacgacggcaagcccgtgagcggcggcggcggcagaggcagaggcagaagaaagagagacagcggccacgtgagccccggcaccttcttcgacaagtacagcgccgcccccgacagcggcggcgcccccggcgtgagccccggccagcagcaggccagcggcgccgccgtgggcggcagcagcgccggcgagaccagaggcgcccccaccccccacgagaaggccctgaccagccccagctggggcaagggcgccgagctgctgctgggcgaccagcccgacctgatcggcagcctggacggcggcgccaagagcgacagcagcagccccaacgtgggcgagttcgccagcgacgaggtgagcaccagctacgccaacgaggacgaggtgagcagcagcagcgacaacccccaggccctggtgaaggccagcagaagccccctggtgaccggcagccccaagctgccccccagaggcgtgggcgccggcgagcacggccccaaggcccccccccccgccctgggcctgggcatcatgagcaacagcaccagcacccccgacagctacggcggcggcggcggccccggccaccccggcacccccggcctggagcaggtgagaacccccaccagcagcagcggcgcccccccccccgacgagatccaccccctggagatcctgcaggcccagatccagctgcagagacagcagttcagcatcagcgaggaccagcccctgggcctgaagggcggcaagaagggcgagtgcgccgtgggcgccagcggcgcccagaacggcgacagcgagctgggcagctgctgcagcgaggccgtgaagagcgccatgagcaccatcgacctggacagcctgatggccgagcacagcgccgcctggtacatgcccgccgacaaggccctggtggacagcgccgacgacgacaagaccctggccccctgggagaaggccaagccccagaaccccaacagcaaggaggcccacgacctgcccgccaacaaggccagcgccagccagcccggcagccacctgcagtgcctgagcgtgcactgcaccgacgacgtgggcgacgccaaggccagagccagcgtgcccacctggagaagcctgcacagcgacatcagcaacagattcggcaccttcgtggccgccctgacctag

SEQ ID NO: 11454 - DNA, 4227 bp, synthetic construct
  misc_feature 1..4227: note = Description of Artificial Sequence: Synthetic coding sequence
  source 1..4227: mol_type = other DNA
atgaaggcccccgccgtgctggcccccggcatcctggtgctgctgttcaccctggtgcagagaagcaacggcgagtgcaaggaggccctggccaagagcgagatgaacgtgaacatgaagtaccagctgcccaacttcaccgccgagacccccatccagaacgtgatcctgcacgagcaccacatcttcctgggcgccaccaactacatctacgtgctgaacgaggaggacctgcagaaggtggccgagtacaagaccggccccgtgctggagcaccccgactgcttcccctgccaggactgcagcagcaaggccaacctgagcggcggcgtgtggaaggacaacatcaacatggccctggtggtggacacctactacgacgaccagctgatcagctgcggcagcgtgaacagaggcacctgccagagacacgtgttcccccacaaccacaccgccgacatccagagcgaggtgcactgcatcttcagcccccagatcgaggagcccagccagtgccccgactgcgtggtgagcgccctgggcgccaaggtgctgagcagcgtgaaggacagattcatcaacttcttcgtgggcaacaccatcaacagcagctacttccccgaccaccccctgcacagcatcagcgtgagaagactgaaggagaccaaggacggcttcatgttcctgaccgaccagagctacatcgacgtgctgcccgagttcagagacagctaccccatcaagtacgtgcacgccttcgagagcaacaacttcatctacttcctgaccgtgcagagagagaccctggacgcccagaccttccacaccagaatcatcagattctgcagcatcaacagcggcctgcacagctacatggagatgcccctggagtgcatcctgaccgagaagagaaagaagagaagcaccaagaaggaggtgttcaacatcctgcaggccgcctacgtgagcaagcccggcgcccagctggccagacagatcggcgccagcctgaacgacgacatcctgttcggcgtgttcgcccagagcaagcccgacagcgccgagcccatggacagaagcgccatgtgcgccttccccatcaagtacgtgaacgacttcttcaacaagatcgtgaacaagaacaacgtgagatgcctgcagcacttctacggccccaaccacgagcactgcttcaacagaaccctgctgagaaacagcagcggctgcgaggccagaagagacgagtacagaaccgagttcaccaccgccctgcagagagtggacctgttcatgggccagttcagcgaggtgctgctgaccagcatcagcaccttcatcaagggcgacctgaccatcgccaacctgggcaccagcgagggcagattcatgcaggtggtggtgagcagaagcggccccagcaccccccacgtgaacttcctgctggacagccaccccgtgagccccgaggtgatcgtggagcacaccctgaaccagaacggctacaccctggtgatcaccggcaagaagatcaccaagatccccctgaacggcctgggctgcagacacttccagagctgcagccagtgcctgagcgccccccccttcgtgcagtgcggctggtgccacgacaagtgcgtgagaagcgaggagtgcctgagcggcacctggacccagcagatctgcctgcccgccatctacaaggtgttccccaacagcgcccccctggagggcggcaccagactgaccatctgcggctgggacttcggcttcagaagaaacaacaagttcgacctgaagaagaccagagtgctgctgggcaacgagagctgcaccctgaccctgagcgagagcaccatgaacaccctgaagtgcaccgtgggccccgccatgaacaagcacttcaacatgagcatcatcatcagcaacggccacggcaccacccagtacagcaccttcagctacgtggaccccgtgatcaccagcatcagccccaagtacggccccatggccggcggcaccctgctgaccctgaccggcaactacctgaacagcggcaacagcagacacatcagcatcggcggcaagacctgcaccctgaagagcgtgagcaacagcatcctggagtgctacacccccgcccagaccatcagcaccgagttcgccgtgaagctgaagatcgacctggccaacagagagaccagcatcttcagctacagagaggaccccatcgtgtacgagatccaccccaccaagagcttcatcagcacctggtggaaggagcccctgaacatcgtgagcttcctgttctgcttcgccagcggcggcagcaccatcaccggcgtgggcaagaacctgaacagcgtgagcgtgcccagaatggtgatcaacgtgcacgaggccggcagaaacttcaccgtggcctgccagcacagaagcaacagcgagatcatctgctgcaccacccccagcctgcagcagctgaacctgcagctgcccctgaagaccaaggccttcttcatgctggacggcatcctgagcaagtacttcgacctgatctacgtgcacaaccccgtgttcaagcccttcgagaagcccgtgatgatcagcatgggcaacgagaacgtgctggagatcaagggcaacgacatcgaccccgaggccgtgaagggcgaggtgctgaaggtgggcaacaagagctgcgagaacatccacctgcacagcgaggccgtgctgtgcaccgtgcccaacgacctgctgaagctgaacagcgagctgaacatcgagtggaagcaggccatcagcagcaccgtgctgggcaaggtgatcgtgcagcccgaccagaacttcaccggcctgatcgccggcgtggtgagcatcagcaccgccctgctgctgctgctgggcttcttcctgtggctgaagaagagaaagcagatcaaggacctgggcagcgagctggtgagatacgacgccagagtgcacaccccccacctggacagactggtgagcgccagaagcgtgagccccaccaccgagatggtgagcaacgagagcgtggactacagagccaccttccccgaggaccagttccccaacagcagccagaacggcagctgcagacaggtgcagtaccccctgaccgacatgagccccatcctgaccagcggcgacagcgacatcagcagccccctgctgcagaacaccgtgcacatcgacctgagcgccctgaaccccgagctggtgcaggccgtgcagcacgtggtgatcggccccagcagcctgatcgtgcacttcaacgaggtgatcggcagaggccacttcggctgcgtgtaccacggcaccctgctggacaacgacggcaagaagatccactgcgccgtgaagagcctgaacagaatcaccgacatcggcgaggtgagccagttcctgaccgagggcatcatcatgaaggacttcagccaccccaacgtgctgagcctgctgggcatctgcctgagaagcgagggcagccccctggtggtgctgccctacatgaagcacggcgacctgagaaacttcatcagaaacgagacccacaaccccaccgtgaaggacctgatcggcttcggcctgcaggtggccaagggcatgaagtacctggccagcaagaagttcgtgcacagagacctggccgccagaaactgcatgctggacgagaagttcaccgtgaaggtggccgacttcggcctggccagagacatgtacgacaaggagtactacagcgtgcacaacaagaccggcgccaagctgcccgtgaagtggatggccctggagagcctgcagacccagaagttcaccaccaagagcgacgtgtggagcttcggcgtgctgctgtgggagctgatgaccagaggcgcccccccctaccccgacgtgaacaccttcgacatcaccgtgtacctgctgcagggcagaagactgctgcagcccgagtactgccccgaccccctgtacgaggtgatgctgaagtgctggcaccccaaggccgagatgagacccagcttcagcgagctggtgagcagaatcagcgccatcttcagcaccttcatcggcgagcactacgtgcacgtgaacgccacctacgtgaacgtgaagtgcgtggccccctaccccagcctgctgagcagcgaggacaacgccgacgacgaggtggacaccagacccgccagcttctgggagaccagctag

SEQ ID NO: 11455 - DNA, 4173 bp, synthetic construct
  misc_feature 1..4173: note = Description of Artificial Sequence: Synthetic coding sequence
  source 1..4173: mol_type = other DNA
atgaaggcccccgccgtgctggcccccggcatcctggtgctgctgttcaccctggtgcagagaagcaacggcgagtgcaaggaggccctggccaagagcgagatgaacgtgaacatgaagtaccagctgcccaacttcaccgccgagacccccatccagaacgtgatcctgcacgagcaccacatcttcctgggcgccaccaactacatctacgtgctgaacgaggaggacctgcagaaggtggccgagtacaagaccggccccgtgctggagcaccccgactgcttcccctgccaggactgcagcagcaaggccaacctgagcggcggcgtgtggaaggacaacatcaacatggccctggtggtggacacctactacgacgaccagctgatcagctgcggcagcgtgaacagaggcacctgccagagacacgtgttcccccacaaccacaccgccgacatccagagcgaggtgcactgcatcttcagcccccagatcgaggagcccagccagtgccccgactgcgtggtgagcgccctgggcgccaaggtgctgagcagcgtgaaggacagattcatcaacttcttcgtgggcaacaccatcaacagcagctacttccccgaccaccccctgcacagcatcagcgtgagaagactgaaggagaccaaggacggcttcatgttcctgaccgaccagagctacatcgacgtgctgcccgagttcagagacagctaccccatcaagtacgtgcacgccttcgagagcaacaacttcatctacttcctgaccgtgcagagagagaccctggacgcccagaccttccacaccagaatcatcagattctgcagcatcaacagcggcctgcacagctacatggagatgcccctggagtgcatcctgaccgagaagagaaagaagagaagcaccaagaaggaggtgttcaacatcctgcaggccgcctacgtgagcaagcccggcgcccagctggccagacagatcggcgccagcctgaacgacgacatcctgttcggcgtgttcgcccagagcaagcccgacagcgccgagcccatggacagaagcgccatgtgcgccttccccatcaagtacgtgaacgacttcttcaacaagatcgtgaacaagaacaacgtgagatgcctgcagcacttctacggccccaaccacgagcactgcttcaacagaaccctgctgagaaacagcagcggctgcgaggccagaagagacgagtacagaaccgagttcaccaccgccctgcagagagtggacctgttcatgggccagttcagcgaggtgctgctgaccagcatcagcaccttcatcaagggcgacctgaccatcgccaacctgggcaccagcgagggcagattcatgcaggtggtggtgagcagaagcggccccagcaccccccacgtgaacttcctgctggacagccaccccgtgagccccgaggtgatcgtggagcacaccctgaaccagaacggctacaccctggtgatcaccggcaagaagatcaccaagatccccctgaacggcctgggctgcagacacttccagagctgcagccagtgcctgagcgccccccccttcgtgcagtgcggctggtgccacgacaagtgcgtgagaagcgaggagtgcctgagcggcacctggacccagcagatctgcctgcccgccatctacaaggtgttccccaacagcgcccccctggagggcggcaccagactgaccatctgcggctgggacttcggcttcagaagaaacaacaagttcgacctgaagaagaccagagtgctgctgggcaacgagagctgcaccctgaccctgagcgagagcaccatgaacaccctgaagtgcaccgtgggccccgccatgaacaagcacttcaacatgagcatcatcatcagcaacggccacggcaccacccagtacagcaccttcagctacgtggaccccgtgatcaccagcatcagccccaagtacggccccatggccggcggcaccctgctgaccctgaccggcaactacctgaacagcggcaacagcagacacatcagcatcggcggcaagacctgcaccctgaagagcgtgagcaacagcatcctggagtgctacacccccgcccagaccatcagcaccgagttcgccgtgaagctgaagatcgacctggccaacagagagaccagcatcttcagctacagagaggaccccatcgtgtacgagatccaccccaccaagagcttcatcagcggcggcagcaccatcaccggcgtgggcaagaacctgaacagcgtgagcgtgcccagaatggtgatcaacgtgcacgaggccggcagaaacttcaccgtggcctgccagcacagaagcaacagcgagatcatctgctgcaccacccccagcctgcagcagctgaacctgcagctgcccctgaagaccaaggccttcttcatgctggacggcatcctgagcaagtacttcgacctgatctacgtgcacaaccccgtgttcaagcccttcgagaagcccgtgatgatcagcatgggcaacgagaacgtgctggagatcaagggcaacgacatcgaccccgaggccgtgaagggcgaggtgctgaaggtgggcaacaagagctgcgagaacatccacctgcacagcgaggccgtgctgtgcaccgtgcccaacgacctgctgaagctgaacagcgagctgaacatcgagtggaagcaggccatcagcagcaccgtgctgggcaaggtgatcgtgcagcccgaccagaacttcaccggcctgatcgccggcgtggtgagcatcagcaccgccctgctgctgctgctgggcttcttcctgtggctgaagaagagaaagcagatcaaggacctgggcagcgagctggtgagatacgacgccagagtgcacaccccccacctggacagactggtgagcgccagaagcgtgagccccaccaccgagatggtgagcaacgagagcgtggactacagagccaccttccccgaggaccagttccccaacagcagccagaacggcagctgcagacaggtgcagtaccccctgaccgacatgagccccatcctgaccagcggcgacagcgacatcagcagccccctgctgcagaacaccgtgcacatcgacctgagcgccctgaaccccgagctggtgcaggccgtgcagcacgtggtgatcggccccagcagcctgatcgtgcacttcaacgaggtgatcggcagaggccacttcggctgcgtgtaccacggcaccctgctggacaacgacggcaagaagatccactgcgccgtgaagagcctgaacagaatcaccgacatcggcgaggtgagccagttcctgaccgagggcatcatcatgaaggacttcagccaccccaacgtgctgagcctgctgggcatctgcctgagaagcgagggcagccccctggtggtgctgccctacatgaagcacggcgacctgagaaacttcatcagaaacgagacccacaaccccaccgtgaaggacctgatcggcttcggcctgcaggtggccaagggcatgaagtacctggccagcaagaagttcgtgcacagagacctggccgccagaaactgcatgctggacgagaagttcaccgtgaaggtggccgacttcggcctggccagagacatgtacgacaaggagtactacagcgtgcacaacaagaccggcgccaagctgcccgtgaagtggatggccctggagagcctgcagacccagaagttcaccaccaagagcgacgtgtggagcttcggcgtgctgctgtgggagctgatgaccagaggcgcccccccctaccccgacgtgaacaccttcgacatcaccgtgtacctgctgcagggcagaagactgctgcagcccgagtactgccccgaccccctgtacgaggtgatgctgaagtgctggcaccccaaggccgagatgagacccagcttcagcgagctggtgagcagaatcagcgccatcttcagcaccttcatcggcgagcactacgtgcacgtgaacgccacctacgtgaacgtgaagtgcgtggccccctaccccagcctgctgagcagcgaggacaacgccgacgacgaggtggacaccagacccgccagcttctgggagaccagctag

SEQ ID NO: 11456 - DNA, 2295 bp, synthetic construct
  misc_feature 1..2295: note = Description of Artificial Sequence: Synthetic coding sequence
  source 1..2295: mol_type = other DNA
atgaaggcccccgccgtgctggcccccggcatcctggtgctgctgttcaccctggtgcagagaagcaacggcgagtgcaaggaggccctggccaagagcgagatgaacgtgaacatgaagtaccagctgcccaacttcaccgccgagacccccatccagaacgtgatcctgcacgagcaccacatcttcctgggcgccaccaactacatctacgtgctgaacgaggaggacctgcagaaggtggccgagtacaagaccggccccgtgctggagcaccccgactgcttcccctgccaggactgcagcagcaaggccaacctgagcggcggcgtgtggaaggacaacatcaacatggccctggtggtggacacctactacgacgaccagctgatcagctgcggcagcgtgaacagaggcacctgccagagacacgtgttcccccacaaccacaccgccgacatccagagcgaggtgcactgcatcttcagcccccagatcgaggagcccagccagtgccccgactgcgtggtgagcgccctgggcgccaaggtgctgagcagcgtgaaggacagattcatcaacttcttcgtgggcaacaccatcaacagcagctacttccccgaccaccccctgcacagcatcagcgtgagaagactgaaggagaccaaggacggcttcatgttcctgaccgaccagagctacatcgacgtgctgcccgagttcagagacagctaccccatcaagtacgtgcacgccttcgagagcaacaacttcatctacttcctgaccgtgcagagagagaccctggacgcccagaccttccacaccagaatcatcagattctgcagcatcaacagcggcctgcacagctacatggagatgcccctggagtgcatcctgaccgagaagagaaagaagagaagcaccaagaaggaggtgttcaacatcctgcaggccgcctacgtgagcaagcccggcgcccagctggccagacagatcggcgccagcctgaacgacgacatcctgttcggcgtgttcgcccagagcaagcccgacagcgccgagcccatggacagaagcgccatgtgcgccttccccatcaagtacgtgaacgacttcttcaacaagatcgtgaacaagaacaacgtgagatgcctgcagcacttctacggccccaaccacgagcactgcttcaacagaaccctgctgagaaacagcagcggctgcgaggccagaagagacgagtacagaaccgagttcaccaccgccctgcagagagtggacctgttcatgggccagttcagcgaggtgctgctgaccagcatcagcaccttcatcaagggcgacctgaccatcgccaacctgggcaccagcgagggcagattcatgcaggtggtggtgagcagaagcggccccagcaccccccacgtgaacttcctgctggacagccaccccgtgagccccgaggtgatcgtggagcacaccctgaaccagaacggctacaccctggtgatcaccggcaagaagatcaccaagatccccctgaacggcctgggctgcagacacttccagagctgcagccagtgcctgagcgccccccccttcgtgcagtgcggctggtgccacgacaagtgcgtgagaagcgaggagtgcctgagcggcacctggacccagcagatctgcctgcccgccatctacaaggtgttccccaacagcgcccccctggagggcggcaccagactgaccatctgcggctgggacttcggcttcagaagaaacaacaagttcgacctgaagaagaccagagtgctgctgggcaacgagagctgcaccctgaccctgagcgagagcaccatgaacaccctgaagtgcaccgtgggccccgccatgaacaagcacttcaacatgagcatcatcatcagcaacggccacggcaccacccagtacagcaccttcagctacgtggaccccgtgatcaccagcatcagccccaagtacggccccatggccggcggcaccctgctgaccctgaccggcaactacctgaacagcggcaacagcagacacatcagcatcggcggcaagacctgcaccctgaagagcgtgagcaacagcatcctggagtgctacacccccgcccagaccatcagcaccgagttcgccgtgaagctgaagatcgacctggccaacagagagaccagcatcttcagctacagagaggaccccatcgtgtacgagatccaccccaccaagagcttcatcagacacgtgaacatcgccctgatccagagatag

SEQ ID NO: 11457 - DNA, 783 bp, synthetic construct
  misc_feature 1..783: note = Description of Artificial Sequence: Synthetic coding sequence
  source 1..783: mol_type = other DNA
atgaaggacttcagccaccccaacgtgctgagcctgctgggcatctgcctgagaagcgagggcagccccctggtggtgctgccctacatgaagcacggcgacctgagaaacttcatcagaaacgagacccacaaccccaccgtgaaggacctgatcggcttcggcctgcaggtggccaagggcatgaagtacctggccagcaagaagttcgtgcacagagacctggccgccagaaactgcatgctggacgagaagttcaccgtgaaggtggccgacttcggcctggccagagacatgtacgacaaggagtactacagcgtgcacaacaagaccggcgccaagctgcccgtgaagtggatggccctggagagcctgcagacccagaagttcaccaccaagagcgacgtgtggagcttcggcgtgctgctgtgggagctgatgaccagaggcgcccccccctaccccgacgtgaacaccttcgacatcaccgtgtacctgctgcagggcagaagactgctgcagcccgagtactgccccgaccccctgtacgaggtgatgctgaagtgctggcaccccaaggccgagatgagacccagcttcagcgagctggtgagcagaatcagcgccatcttcagcaccttcatcggcgagcactacgtgcacgtgaacgccacctacgtgaacgtgaagtgcgtggccccctaccccagcctgctgagcagcgaggacaacgccgacgacgaggtggacaccagacccgccagcttctgggagaccagctag

SEQ ID NO: 11458 - DNA, 1749 bp, synthetic construct
  misc_feature 1..1749: note = Description of Artificial Sequence: Synthetic coding sequence
  source 1..1749: mol_type = other DNA
atggccgccagaagctggcaggacgagctggcccagcaggccgaggagggcagcgccagactgagagagatgctgagcgtgggcctgggcttcctgagaaccgagctgggcctggacctgggcctggagcccaagagataccccggctgggtgatcctggtgggcaccggcgccctgggcctgctgctgctgttcctgctgggctacggctgggccgccgcctgcgccggcgccagaaagaagagaagaagcccccccagaaagagagaggaggccgccgccgtgcccgccgccgcccccgacgacctggccctgctgaagaacctgagaagcgaggagcagaagaagaagaacagaaagaagctgagcgagaagcccaagcccaacggcagaaccgtggaggtggccgagggcgaggccgtgagaaccccccagagcgtgaccgccaagcagccccccgagatcgacaagaagaacgagaagagcaagaagaacaagaagaagagcaagagcgacgccaaggccgtgcagaacagcagcagacacgacggcaaggaggtggacgagggcgcctgggagaccaagatcagccacagagagaagagacagcagagaaagagagacaaggtgctgaccgacagcggcagcctggacagcaccatccccggcatcgagaacaccatcaccgtgaccaccgagcagctgaccaccgccagcttccccgtgggcagcaagaagaacaagggcgacagccacctgaacgtgcaggtgagcaacttcaagagcggcaagggcgacagcaccctgcaggtgagcagcggcctgaacgagaacctgaccgtgaacggcggcggctggaacgagaagagcgtgaagctgagcagccagatcagcgccggcgaggagaagtggaacagcgtgagccccgccagcgccggcaagagaaagaccgagcccagcgcctggagccaggacaccggcgacgccaacaccaacggcaaggactggggcagaagctggagcgacagaagcatcttcagcggcatcggcagcaccgccgagcccgtgagccagagcaccaccagcgactaccagtgggacgtgagcagaaaccagccctacatcgacgacgagtggagcggcctgaacggcctgagcagcgccgaccccaacagcgactggaacgcccccgccgaggagtggggcaactgggtggacgaggagagagccagcctgctgaagagccaggagcccatccccgacgaccagaaggtgagcgacgacgacaaggagaagggcgagggcgccctgcccaccggcaagagcaagaagaagaagaagaagaagaagaagcagggcgaggacaacagcaccgcccaggacaccgaggagctggagaaggagatcagagaggacctgcccgtgaacaccagcaagaccagacccaagcaggagaaggccttcagcctgaagaccatcagcaccagcgaccccgccgaggtgctggtgaagaacagccagcccatcaagaccctgccccccgccaccagcaccgagcccagcgtgatcctgagcaagagcgacagcgacaagagcagcagccaggtgccccccatcctgcaggagaccgacaagagcaagagcaacaccaagcagaacagcgtgccccccagccagaccaagagcgagaccagctgggagagccccaagcagatcaagaagaagaagaaggccagaagagagacctag

SEQ ID NO: 11459 - DNA, 2148 bp, synthetic construct
  misc_feature 1..2148: note = Description of Artificial Sequence: Synthetic coding sequence
  source 1..2148: mol_type = other DNA
atggccgccaacatgtacagagtgggcgactacgtgtacttcgagaacagcagcagcaacccctacctgatcagaagaatcgaggagctgaacaagaccgccaacggcaacgtggaggccaaggtggtgtgcttctacagaagaagagacatcagcagcaccctgatcgccctggccgacaagcacgccaccctgagcgtgtgctacaaggccggccccggcgccgacaacggcgaggagggcgagatcgaggaggagatggagaaccccgagatggtggacctgcccgagaagctgaagcaccagctgagacacagagagctgttcctgagcagacagctggagagcctgcccgccacccacatcagaggcaagtgcagcgtgaccctgctgaacgagaccgagagcctgaagagctacctggagagagaggacttcttcttctacagcctggtgtacgacccccagcagaagaccctgctggccgacaagggcgagatcagagtgggcaacagataccaggccgacatcaccgacctgctgaaggagggcgaggaggacggcagagaccagagcagactggagacccaggtgtgggaggcccacaaccccctgaccgacaagcagatcgaccagttcctggtggtggccagaagcgtgggcaccttcgccagagccctggactgcagcagcagcgtgagacagcccagcctgcacatgagcgccgccgccgccagcagagacatcaccctgttccacgccatggacaccctgcacaagaacatctacgacatcagcaaggccatcagcgccctggtgccccagggcggccccgtgctgtgcagagacgagatggaggagtggagcgccagcgaggccaacctgttcgaggaggccctggagaagtacggcaaggacttcaccgacatccagcaggacttcctgccctggaagagcctgaccagcatcatcgagtactactacatgtggaagaccaccgacagatacgtgcagcagaagagactgaaggccgccgaggccgagagcaagctgaagcaggtgtacatccccaactacaacaagcccaaccccaaccagatcagcgtgaacaacgtgaaggccggcgtggtgaacggcaccggcgcccccggccagagccccggcgccggcagagcctgcgagagctgctacaccacccagagctaccagtggtacagctggggcccccccaacatgcagtgcagactgtgcgccagctgctggacctactggaagaagtacggcggcctgaagatgcccaccagactggacggcgagagacccggccccaacagaagcaacatgagcccccacggcctgcccgccagaagcagcggcagccccaagttcgccatgaagaccagacaggccttctacctgcacaccaccaagctgaccagaatcgccagaagactgtgcagagagatcctgagaccctggcacgccgccagacacccctacctgcccatcaacagcgccgccatcaaggccgagtgcaccgccagactgcccgaggccagccagagccccctggtgctgaagcaggccgtgagaaagcccctggaggccgtgctgagatacctggagacccaccccagaccccccaagcccgaccccgtgaagagcgtgagcagcgtgctgagcagcctgacccccgccaaggtggcccccgtgatcaacaacggcagccccaccatcctgggcaagagaagctacgagcagcacaacggcgtggacggcaacatgaagaagagactgctgatgcccagcagaggcctggccaaccacggccaggccagacacatgggccccagcagaaacctgctgctgaacggcaagagctaccccaccaaggtgagactgatcagaggcggcagcctgccccccgtgaagagaagaagaatgaactggatcgacgcccccgacgacgtgttctacatggccaccgaggagaccagaaagatcagaaagctgctgagcagcagcgagaccaagagagccgccagaagaccctacaagcccatcgccctgagacagagccaggccctgccccccagaccccccccccccgcccccgtgaacgacgagcccatcgtgatcgaggactag

SEQ ID NO: 11460 - DNA, 1887 bp, synthetic construct
  misc_feature 1..1887: note = Description of Artificial Sequence: Synthetic coding sequence
  source 1..1887: mol_type = other DNA
atggtggacctgcccgagaagctgaagcaccagctgagacacagagagctgttcctgagcagacagctggagagcctgcccgccacccacatcagaggcaagtgcagcgtgaccctgctgaacgagaccgagagcctgaagagctacctggagagagaggacttcttcttctacagcctggtgtacgacccccagcagaagaccctgctggccgacaagggcgagatcagagtgggcaacagataccaggccgacatcaccgacctgctgaaggagggcgaggaggacggcagagaccagagcagactggagacccaggtgtgggaggcccacaaccccctgaccgacaagcagatcgaccagttcctggtggtggccagaagcgtgggcaccttcgccagagccctggactgcagcagcagcgtgagacagcccagcctgcacatgagcgccgccgccgccagcagagacatcaccctgttccacgccatggacaccctgcacaagaacatctacgacatcagcaaggccatcagcgccctggtgccccagggcggccccgtgctgtgcagagacgagatggaggagtggagcgccagcgaggccaacctgttcgaggaggccctggagaagtacggcaaggacttcaccgacatccagcaggacttcctgccctggaagagcctgaccagcatcatcgagtactactacatgtggaagaccaccgacagatacgtgcagcagaagagactgaaggccgccgaggccgagagcaagctgaagcaggtgtacatccccaactacaacaagcccaaccccaaccagatcagcgtgaacaacgtgaaggccggcgtggtgaacggcaccggcgcccccggccagagccccggcgccggcagagcctgcgagagctgctacaccacccagagctaccagtggtacagctggggcccccccaacatgcagtgcagactgtgcgccagctgctggacctactggaagaagtacggcggcctgaagatgcccaccagactggacggcgagagacccggccccaacagaagcaacatgagcccccacggcctgcccgccagaagcagcggcagccccaagttcgccatgaagaccagacaggccttctacctgcacaccaccaagctgaccagaatcgccagaagactgtgcagagagatcctgagaccctggcacgccgccagacacccctacctgcccatcaacagcgccgccatcaaggccgagtgcaccgccagactgcccgaggccagccagagccccctggtgctgaagcaggccgtgagaaagcccctggaggccgtgctgagatacctggagacccaccccagaccccccaagcccgaccccgtgaagagcgtgagcagcgtgctgagcagcctgacccccgccaaggtggcccccgtgatcaacaacggcagccccaccatcctgggcaagagaagctacgagcagcacaacggcgtggacggcaacatgaagaagagactgctgatgcccagcagaggcaccagcagcggcctggccaaccacggccaggccagacacatgggccccagcagaaacctgctgctgaacggcaagagctaccccaccaaggtgagactgatcagaggcggcagcctgccccccgtgaagagaagaagaatgaactggatcgacgcccccgacgacgtgttctacatggccaccgaggagaccagaaagatcagaaagctgctgagcagcagcgagaccaagagagccgccagaagaccctacaagcccatcgccctgagacagagccaggccctgccccccagaccccccccccccgcccccgtgaacgacgagcccatcgtgatcgaggactag

SEQ ID NO: 11461 - DNA, 768 bp, synthetic construct
  misc_feature 1..768: note = Description of Artificial Sequence: Synthetic coding sequence
  source 1..768: mol_type = other DNA
atgaagaccagacaggccttctacctgcacaccaccaagctgaccagaatcgccagaagactgtgcagagagatcctgagaccctggcacgccgccagacacccctacctgcccatcaacagcgccgccatcaaggccgagtgcaccgccagactgcccgaggccagccagagccccctggtgctgaagcaggccgtgagaaagcccctggaggccgtgctgagatacctggagacccaccccagaccccccaagcccgaccccgtgaagagcgtgagcagcgtgctgagcagcctgacccccgccaaggtggcccccgtgatcaacaacggcagccccaccatcctgggcaagagaagctacgagcagcacaacggcgtggacggcaacatgaagaagagactgctgatgcccagcagaggcacctacctgggcctggccaaccacggccaggccagacacatgggccccagcagaaacctgctgctgaacggcaagagctaccccaccaaggtgagactgatcagaggcggcagcctgccccccgtgaagagaagaagaatgaactggatcgacgcccccgacgacgtgttctacatggccaccgaggagaccagaaagatcagaaagctgctgagcagcagcgagaccaagagagccgccagaagaccctacaagcccatcgccctgagacagagccaggccctgccccccagaccccccccccccgcccccgtgaacgacgagcccatcgtgatcgaggactag

SEQ ID NO: 11462 - DNA, 1293 bp, synthetic construct
  misc_feature 1..1293: note = Description of Artificial Sequence: Synthetic coding sequence
  source 1..1293: mol_type = other DNA
atggccgccaacatgtacagagtgggcgactacgtgtacttcgagaacagcagcagcaacccctacctgatcagaagaatcgaggagctgaacaagaccgccaacggcaacgtggaggccaaggtggtgtgcttctacagaagaagagacatcagcagcaccctgatcgccctggccgacaagcacgccaccctgagcgtgtgctacaaggccggccccggcgccgacaacggcgaggagggcgagatcgaggaggagatggagaaccccgagatggtggacctgcccgagaagctgaagcaccagctgagacacagagagctgttcctgagcagacagctggagagcctgcccgccacccacatcagaggcaagtgcagcgtgaccctgctgaacgagaccgagagcctgaagagctacctggagagagaggacttcttcttctacagcctggtgtacgacccccagcagaagaccctgctggccgacaagggcgagatcagagtgggcaacagataccaggccgacatcaccgacctgctgaaggagggcgaggaggacggcagagaccagagcagactggagacccaggtgtgggaggcccacaaccccctgaccgacaagcagatcgaccagttcctggtggtggccagaagcgtgggcaccttcgccagagccctggactgcagcagcagcgtgagacagcccagcctgcacatgagcgccgccgccgccagcagagacatcaccctgttccacgccatggacaccctgcacaagaacatctacgacatcagcaaggccatcagcgccctggtgccccagggcggccccgtgctgtgcagagacgagatggaggagtggagcgccagcgaggccaacctgttcgaggaggccctggagaagtacggcaaggacttcaccgacatccagcaggacttcctgccctggaagagcctgaccagcatcatcgagtactactacatgtggaagaccaccgacagatacgtgcagcagaagagactgaaggccgccgaggccgagagcaagctgaagcaggtgtacatccccaactacaacaagcccaaccccaaccagatcagcgtgaacaacgtgaaggccggcgtggtgaacggcaccggcgcccccggccagagccccggcgccggcagagcctgcgagagctgctacatgagcagcctgagaatcctgctggacatcctggaggagatctggtggctggagaacgccaaccccgtgagatggagagaggccagaaccaagccccagtag

SEQ ID NO: 11463 - DNA, 1422 bp, synthetic construct
  misc_feature 1..1422: note = Description of Artificial Sequence: Synthetic coding sequence
  source 1..1422: mol_type = other DNA
atgctgagacccgtgatcgaggaggagatcagcatgctgggcgagatcacccacctgcagaccatcagcgaggacctgaagagcctgaccatggacccccacaagctgcccagcagcagcgagcaggtgatcctggacctgaagggcagcgactacagctggagctaccagaccccccccagcagccccagcaccaccatgagcagaaagagcagcgtgtgcagcagcctgaacagcgtgaacagcagcgacagcagaagcagcggcagccacagccacagccccagcagccactacagatacagaagcagcaacctggcccagcaggcccccgtgagactgagcagcgtgagcagccacgacagcggcttcatcagccaggacgccttccagagcaagagccccagccccatgccccccgaggcccccaaccagagaagaaaggagaagagagagcccgaccccaacggcggcggccccaccaccgccagcggcccccccgccgccgccgaggaggcccagagacccagaagcatgaccgtgagcgccgccaccagacccggcgaggagatggaggcctgcgaggagctggccctggccctgagcagaggcctgcagctggacacccagagaagcagcagagacagcctgcagtgcagcagcggctacagcacccagaccaccaccccctgctgcagcgaggacaccatccccagccaggtgagcgactacgactacttcagcgtgagcggcgaccaggaggccgaccagcaggagttcgacaagagcagcaccatccccagaaacagcgacatcagccagagctacagaagaatgttccaggccaagagacccgccagcaccgccggcctgcccaccaccctgggccccgccatggtgacccccggcgtggccaccatcagaagaacccccagcaccaagcccagcgtgagaagaggcaccatcggcgccggccccatccccatcaagacccccgtgatccccgtgaagacccccaccgtgcccgacctgcccggcgtgctgcccgccccccccgacggccccgaggagagaggcgagcacagccccgagagccccagcgtgggcgagggcccccagggcgtgaccagcatgcccagcagcatgtggagcggccaggccagcgtgaacccccccctgcccggccccaagcccagcatccccgaggagcacagacaggccatccccgagagcgaggccgaggaccaggagagagagccccccagcgccaccgtgagccccggccagatccccgagagcgaccccgccgacctgagccccagagacaccccccagggcgaggacatgctgaacgccatcagaagaggcgtgaagctgaagaagaccaccaccaacgacagaagcgcccccagattcagctag

SEQ ID NO: 11464 - DNA, 2193 bp, synthetic construct
  misc_feature 1..2193: note = Description of Artificial Sequence: Synthetic coding sequence
  source 1..2193: mol_type = other DNA
atggaggccgtgatcgagaaggagtgcagcgccctgggcggcctgttccagaccatcatcagcgacatgaagggcagctaccccgtgtgggaggacttcatcaacaaggccggcaagctgcagagccagctgagaaccaccgtggtggccgccgccgccttcctggacgccttccagaaggtggccgacatggccaccaacaccagaggcggcaccagagagatcggcagcgccctgaccagaatgtgcatgagacacagaagcatcgaggccaagctgagacagttcagcagcgccctgatcgactgcctgatcaaccccctgcaggagcagatggaggagtggaagaaggtggccaaccagctggacaaggaccacgccaaggagtacaagaaggccagacaggagatcaagaagaagagcagcgacaccctgaagctgcagaagaaggccaagaagggcagaggcgacatccagccccagctggacagcgccctgcaggacgtgaacgacaagtacctgctgctggaggagaccgagaagcaggccgtgagaaaggccctgatcgaggagagaggcagattctgcaccttcatcagcatgctgagacccgtgatcgaggaggagatcagcatgctgggcgagatcacccacctgcagaccatcagcgaggacctgaagagcctgaccatggacccccacaagctgcccagcagcagcgagcaggtgatcctggacctgaagggcagcgactacagctggagctaccagaccccccccagcagccccagcaccaccatgagcagaaagagcagcgtgtgcagcagcctgaacagcgtgaacagcagcgacagcagaagcagcggcagccacagccacagccccagcagccactacagatacagaagcagcaacctggcccagcaggcccccgtgagactgagcagcgtgagcagccacgacagcggcttcatcagccaggacgccttccagagcaagagccccagccccatgccccccgaggcccccaaccagaacagcagcagcagcgccagcagcgaggccagcgagacctgccagagcgtgagcgagtgcagcagccccaccagcgtgagcagcggcagcaccatgggcgcctgggtgagcaccgagaaggactgggccaagcccggcccctacgaccagcccctggtgaacaccctgcagagaagaaaggagaagagagagcccgaccccaacggcggcggccccaccaccgccagcggcccccccgccgccgccgaggaggcccagagacccagaagcatgaccgtgagcgccgccaccagacccggcgaggagatggaggcctgcgaggagctggccctggccctgagcagaggcctgcagctggacacccagagaagcagcagagacagcctgcagtgcagcagcggctacagcacccagaccaccaccccctgctgcagcgaggacaccatccccagccaggtgagcgactacgactacttcagcgtgagcggcgaccaggaggccgaccagcaggagttcgacaagagcagcaccatccccagaaacagcgacatcagccagagctacagaagaatgttccaggccaagagacccgccagcaccgccggcctgcccaccaccctgggccccgccatggtgacccccggcgtggccaccatcagaagaacccccagcaccaagcccagcgtgagaagaggcaccatcggcgccggccccatccccatcaagacccccgtgatccccgtgaagacccccaccgtgcccgacctgcccggcgtgctgcccgccccccccgacggccccgaggagagaggcgagcacagccccgagagccccagcgtgggcgagggcccccagggcgtgaccagcatgcccagcagcatgtggagcggccaggccagcgtgaacccccccctgcccggccccaagcccagcatccccgaggagcacagacaggccatccccgagagcgaggccgaggaccaggagagagagccccccagcgccaccgtgagccccggccagatccccgagagcgaccccgccgacctgagccccagagacaccccccagggcgaggacatgctgaacgccatcagaagaggcgtgaagctgaagaagaccaccaccaacgacagaagcgcccccagattcagctag

SEQ ID NO: 11465 - DNA, 1590 bp, synthetic construct
  misc_feature 1..1590: note = Description of Artificial Sequence: Synthetic coding sequence
  source 1..1590: mol_type = other DNA
atgagcagaaagagcagcgtgtgcagcagcctgaacagcgtgaacagcagcgacagcagaagcagcggcagccacagccacagccccagcagccactacagatacagaagcagcaacctggcccagcaggcccccgtgagactgagcagcgtgagcagccacgacagcggcttcatcagccaggacgccttccagagcaagagccccagccccatgccccccgaggcccccaaccagaacagcagcagcagcgccagcagcgaggccagcgagacctgccagagcgtgagcgagtgcagcagccccaccagcgtgagcagcggcagcaccatgggcgcctgggtgagcaccgagaagctgagcaacggcttcagccactacagcctgagcagcgagagccacgtgggccccaccggcgccggcctgttcccccactgcctgcccgccagcagactgctgcccagagtgaccagcgtgcacctgcccgactacgcccactactacaccatcggccccggcatgttccccagcagccagatccccagctggaaggactgggccaagcccggcccctacgaccagcccctggtgaacaccctgcagagaagaaaggagaagagagagcccgaccccaacggcggcggccccaccaccgccagcggcccccccgccgccgccgaggaggcccagagacccagaagcatgaccgtgagcgccgccaccagacccggcgaggagatggaggcctgcgaggagctggccctggccctgagcagaggcctgcagctggacacccagagaagcagcagagacagcctgcagtgcagcagcggctacagcacccagaccaccaccccctgctgcagcgaggacaccatccccagccaggtgagcgactacgactacttcagcgtgagcggcgaccaggaggccgaccagcaggagttcgacaagagcagcaccatccccagaaacagcgacatcagccagagctacagaagaatgttccaggccaagagacccgccagcaccgccggcctgcccaccaccctgggccccgccatggtgacccccggcgtggccaccatcagaagaacccccagcaccaagcccagcgtgagaagaggcaccatcggcgccggccccatccccatcaagacccccgtgatccccgtgaagacccccaccgtgcccgacctgcccggcgtgctgcccgccccccccgacggccccgaggagagaggcgagcacagccccgagagccccagcgtgggcgagggcccccagggcgtgaccagcatgcccagcagcatgtggagcggccaggccagcgtgaacccccccctgcccggccccaagcccagcatccccgaggagcacagacaggccatccccgagagcgaggccgaggaccaggagagagagccccccagcgccaccgtgagccccggccagatccccgagagcgaccccgccgacctgagccccagagacaccccccagggcgaggacatgctgaacgccatcagaagaggcgtgaagctgaagaagaccaccaccaacgacagaagcgcccccagattcagctag

SEQ ID NO: 11466 - DNA, 2268 bp, synthetic construct
  misc_feature 1..2268: note = Description of Artificial Sequence: Synthetic coding sequence
  source 1..2268: mol_type = other DNA
atggaggccgtgatcgagaaggagtgcagcgccctgggcggcctgttccagaccatcatcagcgacatgaagggcagctaccccgtgtgggaggacttcatcaacaaggccggcaagctgcagagccagctgagaaccaccgtggtggccgccgccgccttcctggacgccttccagaaggtggccgacatggccaccaacaccagaggcggcaccagagagatcggcagcgccctgaccagaatgtgcatgagacacagaagcatcgaggccaagctgagacagttcagcagcgccctgatcgactgcctgatcaaccccctgcaggagcagatggaggagtggaagaaggtggccaaccagctggacaaggaccacgccaaggagtacaagaaggccagacaggagatcaagaagaagagcagcgacaccctgaagctgcagaagaaggccaagaagggcagaggcgacatccagccccagctggacagcgccctgcaggacgtgaacgacaagtacctgctgctggaggagaccgagaagcaggccgtgagaaaggccctgatcgaggagagaggcagattctgcaccttcatcagcatgctgagacccgtgatcgaggaggagatcagcatgctgggcgagatcacccacctgcagaccatcagcgaggacctgaagagcctgaccatggacccccacaagctgcccagcagcagcgagcaggtgatcctggacctgaagggcagcgactacagctggagctaccagaccccccccagcagccccagcaccaccatgagcagaaagagcagcgtgtgcagcagcctgaacagcgtgaacagcagcgacagcagaagcagcggcagccacagccacagccccagcagccactacagatacagaagcagcaacctggcccagcaggcccccgtgagactgagcagcgtgagcagccacgacagcggcttcatcagccaggacgccttccagagcaagagccccagccccatgccccccgaggcccccaaccagctgagcaacggcttcagccactacagcctgagcagcgagagccacgtgggccccaccggcgccggcctgttcccccactgcctgcccgccagcagactgctgcccagagtgaccagcgtgcacctgcccgactacgcccactactacaccatcggccccggcatgttccccagcagccagatccccagctggaaggactgggccaagcccggcccctacgaccagcccctggtgaacaccctgcagagaagaaaggagaagagagagcccgaccccaacggcggcggccccaccaccgccagcggcccccccgccgccgccgaggaggcccagagacccagaagcatgaccgtgagcgccgccaccagacccggcgaggagatggaggcctgcgaggagctggccctggccctgagcagaggcctgcagctggacacccagagaagcagcagagacagcctgcagtgcagcagcggctacagcacccagaccaccaccccctgctgcagcgaggacaccatccccagccaggtgagcgactacgactacttcagcgtgagcggcgaccaggaggccgaccagcaggagttcgacaagagcagcaccatccccagaaacagcgacatcagccagagctacagaagaatgttccaggccaagagacccgccagcaccgccggcctgcccaccaccctgggccccgccatggtgacccccggcgtggccaccatcagaagaacccccagcaccaagcccagcgtgagaagaggcaccatcggcgccggccccatccccatcaagacccccgtgatccccgtgaagacccccaccgtgcccgacctgcccggcgtgctgcccgccccccccgacggccccgaggagagaggcgagcacagccccgagagccccagcgtgggcgagggcccccagggcgtgaccagcatgcccagcagcatgtggagcggccaggccagcgtgaacccccccctgcccggccccaagcccagcatccccgaggagcacagacaggccatccccgagagcgaggccgaggaccaggagagagagccccccagcgccaccgtgagccccggccagatccccgagagcgaccccgccgacctgagccccagagacaccccccagggcgaggacatgctgaacgccatcagaagaggcgtgaagctgaagaagaccaccaccaacgacagaagcgcccccagattcagctag

SEQ ID NO: 11467 - DNA, 1437 bp, synthetic construct
  misc_feature 1..1437: note = Description of Artificial Sequence: Synthetic coding sequence
  source 1..1437: mol_type = other DNA
atggccggcgtggaggaggtggccgccagcggcagccacctgaacggcgacctggaccccgacgacagagaggagggcgccgccagcaccgccgaggaggccgccaagaagaagagaagaaagaagaagaagagcaagggccccagcgccgccggcgagcaggagcccgacaaggagagcggcgccagcgtggacgaggtggccagacagctggagagaagcgccctggaggacaaggagagagacgaggacgacgaggacggcgacggcgacggcgacggcgccaccggcaagaagaagaagaagaagaagaagaagagaggccccaaggtgcagaccgacccccccagcgtgcccatctgcgacctgtaccccaacggcgtgttccccaagggccaggagtgcgagtacccccccacccaggacggcagaaccgccgcctggagaaccaccagcgaggagaagaaggccctggaccaggccagcgaggagatctggaacgacttcagagaggccgccgaggcccacagacaggtgagaaagtacgtgatgagctggatcaagcccggcatgaccatgatcgagatctgcgagaagctggaggactgcagcagaaagctgatcaaggagaacggcctgaacgccggcctggccttccccaccggctgcagcctgaacaactgcgccgcccactacacccccaacgccggcgacaccaccgtgctgcagtacgacgacatctgcaagatcgacttcggcacccacatcagcggcagaatcatcgactgcgccttcaccgtgaccttcaaccccaagtacgacaccctgctgaaggccgtgaaggacgccaccaacaccggcatcaagtgcgccggcatcgacgtgagactgtgcgacgtgggcgaggccatccaggaggtgatggagagctacgaggtggagatcgacggcaagacctaccaggtgaagcccatcagaaacctgaacggccacagcatcggccagtacagaatccacgccggcaagaccgtgcccatcgtgaagggcggcgaggccaccagaatggaggagggcgaggtgtacgccatcgagaccttcggcagcaccggcaagggcgtggtgcacgacgacatggagtgcagccactacatgaagaacttcgacgtgggccacgtgcccatcagactgcccagaaccaagcacctgctgaacgtgatcaacgagaacttcggcaccctggccttctgcagaagatggctggacagactgggcgagagcaagtacctgatggccctgaagaacctgtgcgacctgggcatcgtggacccctacccccccctgtgcgacatcaagggcagctacaccgcccagttcgagcacaccatcctgctgagacccacctgcaaggaggtggtgagcagaggcgacgactactag

SEQ ID NO: 11468 - DNA, 1743 bp, synthetic construct
  misc_feature 1..1743: note = Description of Artificial Sequence: Synthetic coding sequence
  source 1..1743: mol_type = other DNA
atgggcaccaccggcctggagagcctgagcctgggcgacagaggcgccgcccccaccgtgaccagcagcgagagactggtgcccgacccccccaacgacctgagaaaggaggacgtggccatggagctggagagagtgggcgaggacgaggagcagatgatgatcaagagaagcagcgagtgcaaccccctgctgcaggagcccatcgccagcgcccagttcggcgccaccgccggcaccgagtgcagaaagagcgtgccctgcggctgggagagagtggtgaagcagagactgttcggcaagaccgccggcagattcgacgtgtacttcatcagcccccagggcctgaagttcagaagcaagagcagcctggccaactacctgcacaagaacggcgagaccagcctgaagcccgaggacttcgacttcaccgtgctgagcaagagaggcatcaagagcagatacaaggactgcagcatggccgccctgaccagccacctgcagaaccagagcaacaacagcaactggaacctgagaaccagaagcaagtgcaagaaggacgtgttcatgccccccagcagcagcagcgagctgcaggagagcagaggcctgagcaacttcaccagcacccacctgctgctgaaggaggacgagggcgtggacgacgtgaacttcagaaaggtgagaaagcccaagggcaaggtgaccatcctgaagggcatccccatcaagaagaccaagaagggctgcagaaagagctgcagcggcttcgtgcagagcgacagcaagagagagagcgtgtgcaacaaggccgacgccgagagcgagcccgtggcccagaagagccagctggacagaaccgtgtgcatcagcgacgccggcgcctgcggcgagaccctgagcgtgaccagcgaggagaacagcctggtgaagaagaaggagagaagcctgagcagcggcagcaacttctgcagcgagcagaagaccagcggcatcatcaacaagttctgcagcgccaaggacagcgagcacaacgagaagtacgaggacaccttcctggagagcgaggagatcggcaccaaggtggaggtggtggagagaaaggagcacctgcacaccgacatcctgaagagaggcagcgagatggacaacaactgcagccccaccagaaaggacttcaccggcgagaagatcttccaggaggacaccatccccagaacccagatcgagagaagaaagaccagcctgtacttcagcagcaagtacaacaaggaggccctgagcccccccagaagaaaggccttcaagaagtggaccccccccagaagccccttcaacctggtgcaggagaccctgttccacgacccctggaagctgctgatcgccaccatcttcctgaacagaaccagcggcaagatggccatccccgtgctgtggaagttcctggagaagtaccccagcgccgaggtggccagaaccgccgactggagagacgtgagcgagctgctgaagcccctgggcctgtacgacctgagagccaagaccatcgtgaagttcagcgacgagtacctgaccaagcagtggaagtaccccatcgagctgcacggcatcggcaagtacggcaacgacagctacagaatcttctgcgtgaacgagtggaagcaggtgcaccccgaggaccacaagctgaacaagtaccacgactggctgtgggagaaccacgagaagctgagcctgagctag

SEQ ID NO: 11469 - DNA, 789 bp, synthetic construct
  misc_feature 1..789: note = Description of Artificial Sequence: Synthetic coding sequence
  source 1..789: mol_type = other DNA
atgggcaccaccggcctggagagcctgagcctgggcgacagaggcgccgcccccaccgtgaccagcagcgagagactggtgcccgacccccccaacgacctgagaaaggaggacgtggccatggagctggagagagtgggcgaggacgaggagcagatgatgatcaagagaagcagcgagtgcaaccccctgctgcaggagcccatcgccagcgcccagttcggcgccaccgccggcaccgagtgccaggacaccatccccagaacccagatcgagagaagaaagaccagcctgtacttcagcagcaagtacaacaaggaggccctgagcccccccagaagaaaggccttcaagaagtggaccccccccagaagccccttcaacctggtgcaggagaccctgttccacgacccctggaagctgctgatcgccaccatcttcctgaacagaaccagcggcaagatggccatccccgtgctgtggaagttcctggagaagtaccccagcgccgaggtggccagaaccgccgactggagagacgtgagcgagctgctgaagcccctgggcctgtacgacctgagagccaagaccatcgtgaagttcagcgacgagtacctgaccaagcagtggaagtaccccatcgagctgcacggcatcggcaagtacggcaacgacagctacagaatcttctgcgtgaacgagtggaagcaggtgcaccccgaggaccacaagctgaacaagtaccacgactggctgtgggagaaccacgagaagctgagcctgagctag

SEQ ID NO: 11470 - DNA, 1725 bp, synthetic construct
  misc_feature 1..1725: note = Description of Artificial Sequence: Synthetic coding sequence
  source 1..1725: mol_type = other DNA
atgggcaccaccggcctggagagcctgagcctgggcgacagaggcgccgcccccaccgtgaccagcagcgagagactggtgcccgacccccccaacgacctgagaaaggaggacgtggccatggagctggagagagtgggcgaggacgaggagcagatgatgatcaagagaagcagcgagtgcaaccccctgctgcaggagcccatcgccagcgcccagttcggcgccaccgccggcaccgagtgcagaaagagcgtgccctgcggctgggagagagtggtgaagcagagactgttcggcaagaccgccggcagattcgacgtgtacttcatcagcccccagggcctgaagttcagaagcaagagcagcctggccaactacctgcacaagaacggcgagaccagcctgaagcccgaggacttcgacttcaccgtgctgagcaagagaggcatcaagagcagatacaaggactgcagcatggccgccctgaccagccacctgcagaaccagagcaacaacagcaactggaacctgagaaccagaagcaagtgcaagaaggacgtgttcatgccccccagcagcagcagcgagctgcaggagagcagaggcctgagcaacttcaccagcacccacctgctgctgaaggaggacgagggcgtggacgacgtgaacttcagaaaggtgagaaagcccaagggcaaggtgaccatcctgaagggcatccccatcaagaagaccaagaagggctgcagaaagagctgcagcggcttcgtgcagagcgacagcaagagagagagcgtgtgcaacaaggccgacgccgagagcgagcccgtggcccagaagagccagctggacagaaccgtgtgcatcagcgacgccggcgcctgcggcgagaccctgagcgtgaccagcgaggagaacagcctggtgaagaagaaggagagaagcctgagcagcggcagcaacttctgcagcgagcagaagaccagcggcatcatcaacaagttctgcagcgccaaggacagcgagcacaacgagaagtacgaggacaccttcctggagagcgaggagatcggcaccaaggtggaggtggtggagagaaaggagcacctgcacaccgacatcctgaagagaggcagcgagatggacaacaactgcagccccaccagaaaggacttcaccgaggacaccatccccagaacccagatcgagagaagaaagaccagcctgtacttcagcagcaagtacaacaaggaggccctgagcccccccagaagaaaggccttcaagaagtggaccccccccagaagccccttcaacctggtgcaggagaccctgttccacgacccctggaagctgctgatcgccaccatcttcctgaacagaaccagcggcaagatggccatccccgtgctgtggaagttcctggagaagtaccccagcgccgaggtggccagaaccgccgactggagagacgtgagcgagctgctgaagcccctgggcctgtacgacctgagagccaagaccatcgtgaagttcagcgacgagtacctgaccaagcagtggaagtaccccatcgagctgcacggcatcggcaagtacggcaacgacagctacagaatcttctgcgtgaacgagtggaagcaggtgcaccccgaggaccacaagctgaacaagtaccacgactggctgtgggagaaccacgagaagctgagcctgagctag

SEQ ID NO: 11471 - DNA, 93 bp, synthetic construct
  misc_feature 1..93: note = Description of Artificial Sequence: Synthetic coding sequence
  source 1..93: mol_type = other DNA
atggtgaacgaggccagaggcaacagcagcctgaacccctgcctggagggcagcgccagcagcggcagcgagagcagcaaggacagcagctag

SEQ ID NO: 11472 - DNA, 2094 bp, synthetic construct
  misc_feature 1..2094: note = Description of Artificial Sequence: Synthetic coding sequence
  source 1..2094: mol_type = other DNA
atggaccacagaaaggccagagtgctgcccgccggccactactgccccagcctgggcatctgggccagccaggtgggcagcgtgagaagcagcgtgccccccagcatcagcagaaaccccgccatggtgaacgaggccagaggcaacagcagcctgaacccctgcctggagggcagcgccagcagcggcagcgagagcagcaaggacagcagcagatgcagcacccccggcctggaccccgagagacacgagagactgagagagaagatgagaagaagactggagagcggcgacaagtggttcagcctggagttcttcccccccagaaccgccgagggcgccgtgaacctgatcagcagattcgacagaatggccgccggcggccccctgtacatcgacgtgacctggcaccccgccggcgaccccggcagcgacaaggagaccagcagcatgatgatcgccagcaccgccgtgaactactgcggcctggagaccatcctgcacatgacctgctgcagacagagactggaggagatcaccggccacctgcacaaggccaagcagctgggcctgaagaacatcatggccctgagaggcgaccccatcggcgaccagtgggaggaggaggagggcggcttcaactacgccgtggacctggtgaagcacatcagaagcgagttcggcgactacttcgacatctgcgtggccggctaccccaagggccaccccgaggccggcagcttcgaggccgacctgaagcacctgaaggagaaggtgagcgccggcgccgacttcatcatcacccagctgttcttcgaggccgacaccttcttcagattcgtgaaggcctgcaccgacatgggcatcacctgccccatcgtgcccggcatcttccccatccagggctaccacagcctgagacagctggtgaagctgagcaagctggaggtgccccaggagatcaaggacgtgatcgagcccatcaaggacaacgacgccgccatcagaaactacggcatcgagctggccgtgagcctgtgccaggagctgctggccagcggcctggtgcccggcctgcacttctacaccctgaacagagagatggccaccaccgaggtgctgaagagactgggcatgtggaccgaggaccccagaagacccctgccctgggccctgagcgcccaccccaagagaagagaggaggacgtgagacccatcttctgggccagcagacccaagagctacatctacagaacccaggagtgggacgagttccccaacggcagatggggcaacagcagcagccccgccttcggcgagctgaaggactactacctgttctacctgaagagcaagagccccaaggaggagctgctgaagatgtggggcgaggagctgaccagcgaggagagcgtgttcgaggtgttcgtgctgtacctgagcggcgagcccaacagaaacggccacaaggtgacctgcctgccctggaacgacgagcccctggccgccgagaccagcctgctgaaggaggagctgctgagagtgaacagacagggcatcctgaccatcaacagccagcccaacatcaacggcaagcccagcagcgaccccatcgtgggctggggccccagcggcggctacgtgttccagaaggcctacctggagttcttcaccagcagagagaccgccgaggccctgctgcaggtgctgaagaagtacgagctgagagtgaactaccacctggtgaacgtgaagggcgagaacatcaccaacgcccccgagctgcagcccaacgccgtgacctggggcatcttccccggcagagagatcatccagcccaccgtggtggaccccgtgagcttcatgttctggaaggacgaggccttcgccctgtggatcgagagatggggcaagctgtacgaggaggagagccccagcagaaccatcatccagtacatccacgacaactacttcctggtgaacctggtggacaacgacttccccctggacaactgcctgtggcaggtggtggaggacaccctggagctgctgaacagacccacccagaacgccagagagaccgaggccccctag

SEQ ID NO: 11473 - DNA, 2094 bp, synthetic construct; identical to SEQ ID NO: 11472
  misc_feature 1..2094: note = Description of Artificial Sequence: Synthetic coding sequence
  source 1..2094: mol_type = other DNA

SEQ ID NO: 11474 - DNA, 1971 bp, synthetic construct
  misc_feature 1..1971: note = Description of Artificial Sequence: Synthetic coding sequence
  source 1..1971: mol_type = other DNA
atggtgaacgaggccagaggcaacagcagcctgaacccctgcctggagggcagcgccagcagcggcagcgagagcagcaaggacagcagcagatgcagcacccccggcctggaccccgagagacacgagagactgagagagaagatgagaagaagactggagagcggcgacaagtggttcagcctggagttcttcccccccagaaccgccgagggcgccgtgaacctgatcagcagattcgacagaatggccgccggcggccccctgtacatcgacgtgacctggcaccccgccggcgaccccggcagcgacaaggagaccagcagcatgatgatcgccagcaccgccgtgaactactgcggcctggagaccatcctgcacatgacctgctgcagacagagactggaggagatcaccggccacctgcacaaggccaagcagctgggcctgaagaacatcatggccctgagaggcgaccccatcggcgaccagtgggaggaggaggagggcggcttcaactacgccgtggacctggtgaagcacatcagaagcgagttcggcgactacttcgacatctgcgtggccggctaccccaagggccaccccgaggccggcagcttcgaggccgacctgaagcacctgaaggagaaggtgagcgccggcgccgacttcatcatcacccagctgttcttcgaggccgacaccttcttcagattcgtgaaggcctgcaccgacatgggcatcacctgccccatcgtgcccggcatcttccccatccagggctaccacagcctgagacagctggtgaagctgagcaagctggaggtgccccaggagatcaaggacgtgatcgagcccatcaaggacaacgacgccgccatcagaaactacggcatcgagctggccgtgagcctgtgccaggagctgctggccagcggcctggtgcccggcctgcacttctacaccctgaacagagagatggccaccaccgaggtgctgaagagactgggcatgtggaccgaggaccccagaagacccctgccctgggccctgagcgcccaccccaagagaagagaggaggacgtgagacccatcttctgggccagcagacccaagagctacatctacagaacccaggagtgggacgagttccccaacggcagatggggcaacagcagcagccccgccttcggcgagctgaaggactactacctgttctacctgaagagcaagagccccaaggaggagctgctgaagatgtggggcgaggagctgaccagcgaggagagcgtgttcgaggtgttcgtgctgtacctgagcggcgagcccaacagaaacggccacaaggtgacctgcctgccctggaacgacgagcccctggccgccgagaccagcctgctgaaggaggagctgctgagagtgaacagacagggcatcctgaccatcaacagccagcccaacatcaacggcaagcccagcagcgaccccatcgtgggctggggccccagcggcggctacgtgttccagaaggcctacctggagttcttcaccagcagagagaccgccgaggccctgctgcaggtgctgaagaagtacgagctgagagtgaactaccacctggtgaacgtgaagggcgagaacatcaccaacgcccccgagctgcagcccaacgccgtgacctggggcatcttccccggcagagagatcatccagcccaccgtggtggaccccgtgagcttcatgttctggaaggacgaggccttcgccctgtggatcgagagatggggcaagctgtacgaggaggagagccccagcagaaccatcatccagtacatccacgacaactacttcctggtgaacctggtggacaacgacttccccctggacaactgcctgtggcaggtggtggaggacaccctggagctgctgaacagacccacccagaacgccagagagaccgaggccccctag

SEQ ID NO: 11475 - DNA, 1971 bp, synthetic construct; identical to SEQ ID NO: 11474
  misc_feature 1..1971: note = Description of Artificial Sequence: Synthetic coding sequence
  source 1..1971: mol_type = other DNA

SEQ ID NO: 11476 - DNA, 93 bp, synthetic construct; identical to SEQ ID NO: 11471
  misc_feature 1..93: note = Description of Artificial Sequence: Synthetic coding sequence
  source 1..93: mol_type = other DNA

SEQ ID NO: 11477 - DNA, 432 bp, synthetic construct
  misc_feature 1..432: note = Description of Artificial Sequence: Synthetic coding sequence
  source 1..432: mol_type = other DNA
atggtgaacgaggccagaggcaacagcagcctgaacccctgcctggagggcagcgccagcagcggcagcgagagcagcaaggacagcagcagatgcagcacccccggcctggaccccgagagacacgagagactgagagagaagatgagaagaagactggagagcggcgacaagtggttcagcctggagttcttcccccccagaaccgccgagggcgccgtgaacctgatcagcagattcgacagaatggccgccggcggccccctgtacatcgacgtgacctggcaccccgccggcgaccccggcagcgacaaggagaccagcagcatgatgatcgccagcaccgccgtgaactactgcggcctggagaccatcctgcacatgacctgctgcagacagagactggaggagatcaccggccacctgcactag

SEQ ID NO: 11478 - DNA, 162 bp, synthetic construct
  misc_feature 1..162: note = Description of Artificial Sequence: Synthetic coding sequence
  source 1..162: mol_type = other DNA
atgtgcagaggctgcggctgcctgccccccgacgccccctgccccaccctgtgcagcagaaaccccgccatggtgaacgaggccagaggcaacagcagcctgaacccctgcctggagggcagcgccagcagcggcagcgagagcagcaaggacagcagctag

SEQ ID NO: 11479 - DNA, 93 bp, synthetic construct; identical to SEQ ID NO: 11471
  misc_feature 1..93: note = Description of Artificial Sequence: Synthetic coding sequence
  source 1..93: mol_type = other DNA

SEQ ID NO: 11480 - DNA, 2508 bp, synthetic construct
  misc_feature 1..2508: note = Description of Artificial Sequence: Synthetic coding sequence
  source 1..2508: mol_type = other DNA
atggccgcccccatcctgaaggacgtggtggcctacgtggaggtgtggagcagcaacggcaccgagaactacagcaagaccttcaccacccagctggtggacatgggcgccaaggtgagcaagaccttcaacaagcaggtgacccacgtgatcttcaaggacggctaccagagcacctgggacaaggcccagaagagaggcgtgaagctggtgagcgtgctgtgggtggagaagtgcagaaccgccggcgcccacatcgacgagagcctgttccccgccgccaacatgaacgagcacctgagcagcctgatcaagaagaagagaaagtgcatgcagcccaaggacttcaacttcaagacccccgagaacgacaagagattccagaagaagttcgagaagatggccaaggagctgcagagacagaagaccaacctggacgacgacgtgcccatcctgctgttcgagagcaacggcagcctgatctacacccccaccatcgagatcaacagcagacaccacagcgccatggagaagagactgcaggagatgaaggagaagagagagaacctgagccccaccagcagccagatgatccagcagagccacgacaaccccagcaacagcctgtgcgaggcccccctgaacatcagcagagacaccctgtgcagcgacgagtacttcgccggcggcctgcacagcagcttcgacgacctgtgcggcaacagcggctgcggcaaccaggagagaaagctggagggcagcatcaacgacatcaagagcgacgtgtgcatcagcagcctggtgctgaaggccaacaacatccacagcagccccagcttcacccacctggacaagagcagcccccagaagttcctgagcaacctgagcaaggaggagatcaacctgcagagaaacatcgccggcaaggtggtgacccccgaccagaagcaggccgccggcatgagccaggagaccttcgaggagaagtacagactgagccccaccctgagcagcaccaagggccacctgctgatccacagcagacccagaagcagcagcgtgaagagaaagagagtgagccacggcagccacagcccccccaaggagaagtgcaagagaaagagaagcaccagaagaagcatcatgcccagactgcagctgtgcagaagcgaggacagactgcagcacgtggccggccccgccctggaggccctgagctgcggcgagagcagctacgacgactacttcagccccgacaacctgaaggagagatacagcgagaacctgccccccgagagccagctgcccagcagccccgcccagctgagctgcagaagcctgagcaagaaggagagaaccagcatcttcgagatgagcgacttcagctgcgtgggcaagaagaccagaaccgtggacatcaccaacttcaccgccaagaccatcagcagccccagaaagaccggcaacggcgagggcagagccaccagcagctgcgtgaccagcgcccccgaggaggccctgagatgctgcagacaggccggcaaggaggacgcctgccccgagggcaacggcttcagctacaccatcgaggaccccgccctgcccaagggccacgacgacgacctgacccccctggagggcagcctggaggagatgaaggaggccgtgggcctgaagagcacccagaacaagggcaccaccagcaagatcagcaacagcagcgagggcgaggcccagagcgagcacgagccctgcttcatcgtggactgcaacatggagaccagcaccgaggagaaggagaacctgcccggcggctacagcggcagcgtgaagaacagacccaccagacacgacgtgctggacgacagctgcgacggcttcaaggacctgatcaagccccacgaggagctgaagaagagcggcagaggcaagaagcccaccagaaccctggtgatgaccagcatgcccagcgagaagcagaacgtggtgatccaggtggtggacaagctgaagggcttcagcatcgcccccgacgtgtgcgagaccaccacccacgtgctgagcggcaagcccctgagaaccctgaacgtgctgctgggcatcgccagaggctgctgggtgctgagctacgactgggtgctgtggagcctggagctgggccactggatcagcgaggagcccttcgagctgagccaccacttccccgccgcccccctgtgcagaagcgagtgccacctgagcgccggcccctacagaggcaccctgttcgccgaccagcccgccatgttcgtgagccccgccagcagcccccccgtggccaagctgtgcgagctggtgcacctgtgcggcggcagagtgagccaggtgcccagacaggccagcatcgtgatcggcccctacagcggcaagaagaaggccaccgtgaagtacctgagcgagaagtgggtgctggacagcatcacccagcacaaggtgtgcgcccccgagaactacctgctgagccagtag

SEQ ID NO: 11481 - DNA, 1833 bp, synthetic construct
  misc_feature 1..1833: note = Description of Artificial Sequence: Synthetic coding sequence
  source 1..1833: mol_type = other DNA
atggccgcccccatcctgaaggacgtggtggcctacgtggaggtgtggagcagcaacggcaccgagaactacagcaagaccttcaccacccagctggtggacatgggcgccaaggtgagcaagaccttcaacaagcaggtgacccacgtgatcttcaaggacggctaccagagcacctgggacaaggcccagaagagaggcgtgaagctggtgagcgtgctgtgggtggagaagtgcagaaccgccggcgcccacatcgacgagagcctgttccccgccgccaacatgaacgagcacctgagcagcctgatcaagaagaagagaaagtgcatgcagcccaaggacttcaacttcaagacccccgagaacgacaagagattccagaagaagttcgagaagatggccaaggagctgcagagacagaagaccaacctggacgacgacgtgcccatcctgctgttcgagagcaacggcagcctgatctacacccccaccatcgagatcaacagcagacaccacagcgccatggagaagagactgcaggagatgaaggagaagagagagaacctgagccccaccagcagccagatgatccagcagagccacgacaaccccagcaacagcctgtgcgaggcccccctgaacatcagcagagacaccctgtgcagcgacgagtacttcgccggcggcctgcacagcagcttcgacgacctgtgcggcaacagcggctgcggcaaccaggagagaaagctggagggcagcatcaacgacatcaagagcgacgtgtgcatcagcagcctggtgctgaaggccaacaacatccacagcagccccagcttcacccacctggacaagagcagcccccagaagttcctgagcaacctgagcaaggaggagatcaacctgcagagaaacatcgccggcaaggtggtgacccccgaccagaagcaggccgccggcatgagccaggagaccttcgaggagaagtacagactgagccccaccctgagcagcaccaagggccacctgctgatccacagcagacccagaagcagcagcgtgaagagaaagagagtgagccacggcagccacagcccccccaaggagaagtgcaagagaaagagaagcaccagaagaagcatcatgcccagactgcagctgtgcagaagcgaggacagactgcagcacgtggccggccccgccctggaggccctgagctgcggcgagagcagctacgacgactacttcagccccgacaacctgaaggagagatacagcgagaacctgccccccgagagccagctgcccagcagccccgcccagctgagctgcagaagcctgagcaagaaggagagaaccagcatcttcgagatgagcgacttcagctgcgtgggcaagaagaccagaaccgtggacatcaccaacttcaccgccaagaccatcagcagccccagaaagaccggcaacggcgagggcagagccaccagcagctgcgtgaccagcgcccccgaggaggccctgagatgctgcagacaggccggcaaggaggacgcctgccccgagggcaacggcttcagctacaccatcgaggaccccgccctgcccaagggccacgacgacgacctgacccccctggagggcagcctggaggagatgaaggaggccgtgggcctgaagagcacccagaacaagggcaccaccagcaagatcagcaacagcagcgagggcgaggcccagagcgagcacgagccctgcttcatcgtggactgcaacatggagaccagcaccgaggagaaggagaacctgcccggcggctacagcggcagcatgtag

SEQ ID NO: 11482 - DNA, 1689 bp, synthetic construct
  misc_feature 1..1689: note = Description of Artificial Sequence: Synthetic coding sequence
  source 1..1689: mol_type = other DNA
atggccgcccccatcctgaaggacgtggtggcctacgtggaggtgtggagcagcaacggcaccgagaactacagcaagaccttcaccacccagctggtggacatgggcgccaaggtgagcaagaccttcaacaagcaggtgacccacgtgatcttcaaggacggctaccagagcacctgggacaaggcccagaagagaggcgtgaagctggtgagcgtgctgtgggtggagaagtgcagaaccgccggcgcccacatcgacgagagcctgttccccgccgccaacatgaacgagcacctgagcagcctgatcaagaagaagagaaagtgcatgcagcccaaggacttcaacttcaagacccccgagaacgacaagagattccagaagaagttcgagaagatggccaaggagctgcagagacagaagaccaacctggccagccagatgatccagcagagccacgacaaccccagcaacagcctgtgcgaggcccccctgaacatcagcagagacaccctgtgcagcgacgagtacttcgccggcggcctgcacagcagcttcgacgacctgtgcggcaacagcggctgcggcaaccaggagagaaagctggagggcagcatcaacgacatcaagagcgacgtgtgcatcagcagcctggtgctgaaggccaacaacatccacagcagccccagcttcacccacctggacaagagcagcccccagaagttcctgagcaacctgagcaaggaggagatcaacctgcagagaaacatcgccggcaaggtggtgacccccgaccagaagcaggccgccggcatgagccaggagaccttcgaggagaagtacagactgagccccaccctgagcagcaccaagggccacctgctgatccacagcagacccagaagcagcagcgtgaagagaaagagagtgagccacggcagccacagcccccccaaggagaagtgcaagagaaagagaagcaccagaagaagcatcatgcccagactgcagctgtgcagaagcgaggacagactgcagcacgtggccggccccgccctggaggccctgagctgcggcgagagcagctacgacgactacttcagccccgacaacctgaaggagagatacagcgagaacctgccccccgagagccagctgcccagcagccccgcccagctgagctgcagaagcctgagcaagaaggagagaaccagcatcttcgagatgagcgacttcagctgcgtgggcaagaagaccagaaccgtggacatcaccaacttcaccgccaagaccatcagcagccccagaaagaccggcaacggcgagggcagagccaccagcagctgcgtgaccagcgcccccgaggaggccctgagatgctgcagacaggccggcaaggaggacgcctgccccgagggcaacggcttcagctacaccatcgaggaccccgccctgcccaagggccacgacgacgacctgacccccctggagggcagcctggaggagatgaaggaggccgtgggcctgaagagcacccagaacaagggcaccaccagcaagatcagcaacagcagcgagggcgaggcccagagcgagcacgagccctgcttcatcgtggactgcaacatggagaccagcaccgaggagaaggagaacctgcccggcggctacagcggcagcatgtag

SEQ ID NO: 11483 - DNA, 234 bp, synthetic construct
  misc_feature 1..234: note = Description of Artificial Sequence: Synthetic coding sequence
  source 1..234: mol_type = other DNA
atgaacgtgctgctgggcagcgtggtgatcttcgccaccttcgtgaccctgtgcaacgccagctgctacttcatccccaacgagggcgtgcccggcgacagcaccagaatgttcctgcacctgtgggtgatgaccaagaccaccgccaaggagagcagcagaagaagaaccgccagcatcagctggtggagaagaagaacccagaagagacccgtgctgagcgtgaacggctag

SEQ ID NO: 11484 - DNA, 345 bp, synthetic construct
  misc_feature 1..345: note = Description of Artificial Sequence: Synthetic coding sequence
  source 1..345: mol_type = other DNA
atgaacgtgctgctgggcagcgtggtgatcttcgccaccttcgtgaccctgtgcaacgccagctgctacttcatccccaacgagggcgtgcccggcgacagcaccagaaagtgcatggacctgaagggcaacaagcaccccatcaacagcgagtggcagaccgacaactgcgagacctgcacctgctacgagaccgagatcagctgctgcaccctggtgagcacccccgtgggctacgacaaggacaactgccagagaatcttcaagaaggaggactgcaagtacatcgtggtggagaagaaggaccccaagaagacctgcagcgtgagcgagtggatcatctag

SEQ ID NO: 11485 - DNA, 3813 bp, synthetic construct
  misc_feature 1..3813: note = Description of Artificial Sequence: Synthetic coding sequence
  source 1..3813: mol_type = other DNA
atgaccgacgacaacagcgacgacaagatcgaggacgagctgcagaccttcttcaccagcgacaaggacggcaacacccacgcctacaaccccaagagcccccccacccagaacagcagcgccagcagcgtgaactggaacagcgccaaccccgacgacatggtggtggactacgagaccgaccccgccgtggtgaccggcgagaacatcagcctgagcctgcagggcgtggaggtgttcggccacgagaagagcagcagcgacttcatcagcaagcaggtgctggacatgcacaaggacagcatctgccagtgccccgccctggtgggcaccgagaagcccaagtacctgcagcacagctgccacagcctggaggccgtggagggccagagcgtggagcccagcctgcccttcgtgtggaagcccaacgacaacctgaactgcgccggctactgcgacgccctggagctgaaccagaccttcgacatgaccgtggacaaggtgaactgcaccttcatcagccaccacgccatcggcaagagccagagcttccacaccgccggcagcctgccccccaccggcagaagaagcggcagcaccagcagcctgagctacagcacctggaccagcagccacagcgacaagacccacgccagagagaccacctacgacagagagagcttcgagaacccccaggtgacccccagcgaggcccaggacatgacctacaccgccttcagcgacgtggtgatgcagagcgaggtgttcgtgagcgacatcggcaaccagtgcgcctgcagcagcggcaaggtgaccagcgagtacaccgacggcagccagcagagactggtgggcgagaaggagacccaggccctgacccccgtgagcgacggcatggaggtgcccaacgacagcgccctgcaggagttcttctgcctgagccacgacgagagcaacagcgagccccacagccagagcagctacagacacaaggagatgggccagaacctgagagagaccgtgagctactgcctgatcgacgacgagtgccccctgatggtgcccgccttcgacaagagcgaggcccaggtgctgaaccccgagcacaaggtgaccgagaccgaggacacccagatggtgagcaagggcaaggacctgggcacccagaaccacaccagcgagctgatcctgagcagcccccccggccagaaggtgggcagcagcttcggcctgacctgggacgccaacgacatggtgatcagcaccgacaagaccatgtgcatgagcacccccgtgctggagcccaccaaggtgaccttcagcgtgagccccatcgaggccaccgagaagtgcaagaaggtggagaagggcaacagaggcctgaagaacatccccgacagcaaggaggcccccgtgaacctgtgcaagcccagcctgggcaagagcaccatcaagaccaacacccccatcggctgcaaggtgagaaagaccgagatcatcagctaccccagacccaacttcaagaacgtgaaggccaaggtgatgagcagagccgtgctgcagcccaaggacgccgccctgagcaaggtgacccccagaccccagcagaccagcgccagcagccccagcagcgtgaacagcagacagcagaccgtgctgagcagaacccccagaagcgacctgaacgccgacaagaaggccgagatcctgatcaacaagacccacaagcagcagttcaacaagctgatcaccagccaggccgtgcacgtgaccacccacagcaagaacgccagccacagagtgcccagaaccaccagcgccgtgaagagcaaccaggaggacgtggacaaggccagcagcagcaacagcgcctgcgagaccggcagcgtgagcgccctgttccagaagatcaagggcatcctgcccgtgaagatggagagcgccgagtgcctggagatgacctacgtgcccaacatcgacagaatcagccccgagaagaagggcgagaaggagaacggcaccagcatggagaagcaggagctgaagcaggagatcatgaacgagaccttcgagtacggcagcctgttcctgggcagcgccagcaagaccaccaccaccagcggcagaaacatcagcaagcccgacagctgcggcctgagacagatcgccgcccccaaggccaaggtgggcccccccgtgagctgcctgagaagaaacagcgacaacagaaaccccagcgccgacagagccgtgagcccccagagaatcagaagagtgagcagcagcggcaagcccaccagcctgaagaccgcccagagcagctgggtgaacctgcccagacccctgcccaagagcaaggccagcctgaagagccccgccctgagaagaaccggcagcacccccagcatcgccagcacccacagcgagctgagcacctacagcaacaacagcggcaacgccgccgtgatcaagtacgaggagaagccccccaagcccgccttccagaacggcagcagcggcagcttctacctgaagcccctggtgagcagagcccacgtgcacctgatgaagaccccccccaagggccccagcagaaagaacctgttcaccgccctgaacgccgtggagaagagcagacagaagaaccccagaagcctgtgcatccagccccagaccgcccccgacgccctgccccccgagaagaccctggagctgacccagtacaagaccaagtgcgagaaccagagcggcttcatcctgcagctgaagcagctgctggcctgcggcaacaccaagttcgaggccctgaccgtggtgatccagcacctgctgagcgagagagaggaggccctgaagcagcacaagaccctgagccaggagctggtgaacctgagaggcgagctggtgaccgccagcaccacctgcgagaagctggagaaggccagaaacgagctgcagaccgtgtacgaggccttcgtgcagcagcaccaggccgagaagaccgagagagagaacagactgaaggagttctacaccagagagtacgagaagctgagagacacctacatcgaggaggccgagaagtacaagatgcagctgcaggagcagttcgacaacctgaacgccgcccacgagaccagcaagctggagatcgaggccagccacagcgagaagctggagctgctgaagaaggcctacgaggccagcctgagcgagatcaagaagggccacgagatcgagaagaagagcctggaggacctgctgagcgagaagcaggagagcctggagaagcagatcaacgacctgaagagcgagaacgacgccctgaacgagaagctgaagagcgaggagcagaagagaagagccagagagaaggccaacctgaagaacccccagatcatgtacctggagcaggagctggagagcctgaaggccgtgctggagatcaagaacgagaagctgcaccagcaggacatcaagctgatgaagatggagaagctggtggacaacaacaccgccctggtggacaagctgaagagattccagcaggagaacgaggagctgaaggccagaatggacaagcacatggccatcagcagacagctgagcaccgagcaggccgtgctgcaggagagcctggagaaggagagcaaggtgaacaagagactgagcatggagaacgaggagctgctgtggaagctgcacaacggcgacctgtgcagccccaagagaagccccaccagcagcgccatccccctgcagagccccagaaacagcggcagcttccccagccccagcatcagccccagatag

SEQ ID NO: 11486 - DNA, 1311 bp, synthetic construct
  misc_feature 1..1311: note = Description of Artificial Sequence: Synthetic coding sequence
  source 1..1311: mol_type = other DNA
atgctgctgagccccaagttcagcctgagcaccatccacatcagactgaccgccaagggcctgctgagaaacctgagactgcccagcggcttcagaagaagcaccgtggtgttccacaccgtggagaagagcagacagaagaaccccagaagcctgtgcatccagccccagaccgcccccgacgccctgccccccgagaagaccctggagctgacccagtacaagaccaagtgcgagaaccagagcggcttcatcctgcagctgaagcagctgctggcctgcggcaacaccaagttcgaggccctgaccgtggtgatccagcacctgctgagcgagagagaggaggccctgaagcagcacaagaccctgagccaggagctggtgaacctgagaggcgagctggtgaccgccagcaccacctgcgagaagctggagaaggccagaaacgagctgcagaccgtgtacgaggccttcgtgcagcagcaccaggccgagaagaccgagagagagaacagactgaaggagttctacaccagagagtacgagaagctgagagacacctacatcgaggaggccgagaagtacaagatgcagctgcaggagcagttcgacaacctgaacgccgcccacgagaccagcaagctggagatcgaggccagccacagcgagaagctggagctgctgaagaaggcctacgaggccagcctgagcgagatcaagaagggccacgagatcgagaagaagagcctggaggacctgctgagcgagaagcaggagagcctggagaagcagatcaacgacctgaagagcgagaacgacgccctgaacgagaagctgaagagcgaggagcagaagagaagagccagagagaaggccaacctgaagaacccccagatcatgtacctggagcaggagctggagagcctgaaggccgtgctggagatcaagaacgagaagctgcaccagcaggacatcaagctgatgaagatggagaagctggtggacaacaacaccgccctggtggacaagctgaagagattccagcaggagaacgaggagctgaaggccagaatggacaagcacatggccatcagcagacagctgagcaccgagcaggccgtgctgcaggagagcctggagaaggagagcaaggtgaacaagagactgagcatggagaacgaggagctgctgtggaagctgcacaacggcgacctgtgcagccccaagagaagccccaccagcagcgccatccccctgcagagccccagaaacagcggcagcttccccagccccagcatcagccccagatag

SEQ ID NO: 11487 - DNA, 1554 bp, synthetic construct
  misc_feature 1..1554: note = Description of Artificial Sequence: Synthetic coding sequence
  source 1..1554: mol_type = other DNA
atgaccgtgcccggcggcttcagaagctgcaccgagaccgacatcagcagcaagatcttcatcaacagcaccctgaccccccccgccggcagcgagagacactacgacgccaccctgctgaccctgctggtggtgggcagctacagcctgtgcatcatccccctgctggccaccttcaccggcaagaagaccggcaacgccgccgtgatcaagtacgaggagaagccccccaagcccgccttccagaacggcagcagcggcagcttctacctgaagcccctggtgagcagagcccacgtgcacctgatgaagaccccccccaagggccccagcagaaagaacctgttcaccgccctgaacgccgtggagaagagcagacagaagaaccccagaagcctgtgcatccagccccagaccgcccccgacgccctgccccccgagaagaccctggagctgacccagtacaagaccaagtgcgagaaccagagcggcttcatcctgcagctgaagcagctgctggcctgcggcaacaccaagttcgaggccctgaccgtggtgatccagcacctgctgagcgagagagaggaggccctgaagcagcacaagaccctgagccaggagctggtgaacctgagaggcgagctggtgaccgccagcaccacctgcgagaagctggagaaggccagaaacgagctgcagaccgtgtacgaggccttcgtgcagcagcaccaggccgagaagaccgagagagagaacagactgaaggagttctacaccagagagtacgagaagctgagagacacctacatcgaggaggccgagaagtacaagatgcagctgcaggagcagttcgacaacctgaacgccgcccacgagaccagcaagctggagatcgaggccagccacagcgagaagctggagctgctgaagaaggcctacgaggccagcctgagcgagatcaagaagggccacgagatcgagaagaagagcctggaggacctgctgagcgagaagcaggagagcctggagaagcagatcaacgacctgaagagcgagaacgacgccctgaacgagaagctgaagagcgaggagcagaagagaagagccagagagaaggccaacctgaagaacccccagatcatgtacctggagcaggagctggagagcctgaaggccgtgctggagatcaagaacgagaagctgcaccagcaggacatcaagctgatgaagatggagaagctggtggacaacaacaccgccctggtggacaagctgaagagattccagcaggagaacgaggagctgaaggccagaatggacaagcacatggccatcagcagacagctgagcaccgagcaggccgtgctgcaggagagcctggagaaggagagcaaggtgaacaagagactgagcatggagaacgaggagctgctgtggaagctgcacaacggcgacctgtgcagccccaagagaagccccaccagcagcgccatccccctgcagagccccagaaacagcggcagcttccccagccccagcatcagccccagatag

SEQ ID NO: 11488 - DNA, 2313 bp, synthetic construct
  misc_feature 1..2313: note = Description of Artificial Sequence: Synthetic coding sequence
  source 1..2313: mol_type = other DNA
atgaccgacgacaacagcgacgacaagatcgaggacgagctgcagaccttcttcaccagcgacaaggacggcaacacccacgcctacaaccccaagagcccccccacccagaacagcagcgccagcagcgtgaactggaacagcgccaaccccgacgacatggtggtggactacgagaccgaccccgccgtggtgaccggcgagaacatcagcctgagcctgcagggcgtggaggtgttcggccacgagaagagcagcagcgacttcatcagcaagcaggtgctggacatgcacaaggacagcatctgccagtgccccgccctggtgggcaccgagaagcccaagtacctgcagcacagctgccacagcctggaggccgtggagggccagagcgtggagcccagcctgcccttcgtgtggaagcccaacgacaacctgaactgcgccggctactgcgacgccctggagctgaaccagaccttcgacatgaccgtggacaaggtgaactgcaccttcatcagccaccacgccatcggcaagagccagagcttccacaccgccggcagcctgccccccaccggcagaagaagcggcagcaccagcagcctgagctacagcacctggaccagcagccacagcgacaagacccacgccagagagaccacctacgacagagagagcttcgagaacccccaggtgacccccagcgaggcccaggacatgacctacaccgccttcagcgacgtggtgatgcagagcgaggtgttcgtgagcgacatcggcaaccagtgcgcctgcagcagcggcaaggtgaccagcgagtacaccgacggcagccagcagagactggtgggcgagaaggagacccaggccctgacccccgtgagcgacggcatggaggtgcccaacgacagcgccctgcaggagttcttctgcctgagccacgacgagagcaacagcgagccccacagccagagcagctacagacacaaggagatgggccagaacctgagagagaccgtgagctactgcctgatcgacgacgagtgccccctgatggtgcccgccttcgacaagagcgaggcccaggtgctgaaccccgagcacaaggtgaccgagaccgaggacacccagatggtgagcaagggcaaggacctgggcacccagaaccacaccagcgagctgatcctgagcagcccccccggccagaaggtgggcagcagcttcggcctgacctgggacgccaacgacatggtgatcagcaccgacaagaccatgtgcatgagcacccccgtgctggagcccaccaaggtgaccttcagcgtgagccccatcgaggccaccgagaagtgcaagaaggtggagaagggcaacagaggcctgaagaacatccccgacagcaaggaggcccccgtgaacctgtgcaagcccagcctgggcaagagcaccatcaagaccaacacccccatcggctgcaaggtgagaaagaccgagatcatcagctaccccagacccaacttcaagaacgtgaaggccaaggtgatgagcagagccgtgctgcagcccaaggacgccgccctgagcaaggtgacccccagaccccagcagaccagcgccagcagccccagcagcgtgaacagcagacagcagaccgtgctgagcagaacccccagaagcgacctgaacgccgacaagaaggccgagatcctgatcaacaagacccacaagcagcagttcaacaagctgatcaccagccaggccgtgcacgtgaccacccacagcaagaacgccagccacagagtgcccagaaccaccagcgccgtgaagagcaaccaggaggacgtggacaaggccagcagcagcaacagcgcctgcgagaccggcagcgtgagcgccctgttccagaagatcaagggcatcctgcccgtgaagatggagagcgccgagtgcctggagatgacctacgtgcccaacatcgacagaatcagccccgagaagaagggcgagaaggagaacggcaccagcatggagaagcaggagctgaagcaggagatcatgaacgagaccttcgagtacggcagcctgttcctgggcagcgccagcaagaccaccaccaccagcggcagaaacatcagcaagcccgacagctgcggcctgagacagatcgccgcccccaaggccaaggtgggcccccccgtgagctgcctgagaagaaacagcgacaacagaaaccccagcgccgacagagccgtgagcccccagagaatcagaagagtgagcagcagcgtgctgcccaaggccgccttcagctag

SEQ ID NO: 11489 - DNA, 3651 bp, synthetic construct
  misc_feature 1..3651: note = Description of Artificial Sequence: Synthetic coding sequence
  source 1..3651: mol_type = other DNA
atgaccgacgacaacagcgacgacaagatcgaggacgagctgcagaccttcttcaccagcgacaaggacggcaacacccacgcctacaaccccaagagcccccccacccagaacagcagcgccagcagcgtgaactggaacagcgccaaccccgacgacatggtggtggactacgagaccgaccccgccgtggtgaccggcgagaacatcagcctgagcctgcagggcgtggaggtgttcggccacgagaagagcagcagcgacttcatcagcaagcaggtgctggacatgcacaaggacagcatctgccagtgccccgccctggtgggcaccgagaagcccaagtacctgcagcacagctgccacagcctggaggccgtggagggccagagcgtggagcccagcctgcccttcgtgtggaagcccaacgacaacctgaactgcgccggctactgcgacgccctggagctgaaccagaccttcgacatgaccgtggacaaggtgaactgcaccttcatcagccaccacgccatcggcaagagccagagcttccacaccgccggcagcctgccccccaccggcagaagaagcggcagcaccagcagcctgagctacagcacctggaccagcagccacagcgacaagacccacgccagagagaccacctacgacagagagagcttcgagaacccccaggtgacccccagcgaggcccaggacatgacctacaccgccttcagcgacgtggtgatgcagagcgaggtgttcgtgagcgacatcggcaaccagtgcgcctgcagcagcggcaaggtgaccagcgagtacaccgacggcagccagcagagactggtgggcgagaaggagacccaggccctgacccccgtgagcgacggcatggaggtgcccaacgacagcgccctgcaggagttcttctgcctgagccacgacgagagcaacagcgagccccacagccagagcagctacagacacaaggagatgggccagaacctgagagagaccgtgagctactgcctgatcgacgacgagtgccccctgatggtgcccgccttcgacaagagcgaggcccaggtgctgaaccccgagcacaaggtgaccgagaccgaggacacccagatggtgagcaagggcaaggacctgggcacccagaaccacaccagcgagctgatcctgagcagcccccccggccagaaggtgggcagcagcttcggcctgacctgggacgccaacgacatggtgatcagcaccgacaagaccatgtgcatgagcacccccgtgctggagcccaccaaggtgaccttcagcgtgagccccatcgaggccaccgagaagtgcaagaaggtggagaagggcaacagaggcctgaagaacatccccgacagcaaggaggcccccgtgaacctgtgcaagcccagcctgggcaagagcaccatcaagaccaacacccccatcggctgcaaggtgagaaagaccgagatcatcagctaccccagacccaacttcaagaacgtgaaggccaaggtgatgagcagagccgtgctgcagcccaaggacgccgccctgagcaaggtgacccccagaccccagcagaccagcgccagcagccccagcagcgtgaacagcagacagcagaccgtgctgagcagaacccccagaagcgacctgaacgccgacaagaaggccgagatcctgatcaacaagacccacaagcagcagttcaacaagctgatcaccagccaggccgtgcacgtgaccacccacagcaagaacgccagccacagagtgcccagaaccaccagcgccgtgaagagcaaccaggaggacgtggacaaggccagcagcagcaacagcgcctgcgagaccggcagcgtgagcgccctgttccagaagatcaagggcatcctgcccgtgaagatggagagcgccgagtgcctggagatgacctacgtgcccaacatcgacagaatcagccccgagaagaagggcgagaaggagaacggcaccagcatggagaagcaggagctgaagcaggagatcatgaacgagaccttcgagtacggcagcctgttcctgggcagcgccagcaagaccaccaccaccagcggcagaaacatcagcaagcccgacagctgcggcctgagacagatcgccgcccccaaggccaaggtgggcccccccgtgagctgcctgagaagaaacagcgacaacagaaaccccagcgccgacagagccgtgagcccccagagaatcagaagagtgagcagcagcgccggcaacgccgccgtgatcaagtacgaggagaagccccccaagcccgccttccagaacggcagcagcggcagcttctacctgaagcccctggtgagcagagcccacgtgcacctgatgaagaccccccccaagggccccagcagaaagaacctgttcaccgccctgaacgccgtggagaagagcagacagaagaaccccagaagcctgtgcatccagccccagaccgcccccgacgccctgccccccgagaagaccctggagctgacccagtacaagaccaagtgcgagaaccagagcggcttcatcctgcagctgaagcagctgctggcctgcggcaacaccaagttcgaggccctgaccgtggtgatccagcacctgctgagcgagagagaggaggccctgaagcagcacaagaccctgagccaggagctggtgaacctgagaggcgagctggtgaccgccagcaccacctgcgagaagctggagaaggccagaaacgagctgcagaccgtgtacgaggccttcgtgcagcagcaccaggccgagaagaccgagagagagaacagactgaaggagttctacaccagagagtacgagaagctgagagacacctacatcgaggaggccgagaagtacaagatgcagctgcaggagcagttcgacaacctgaacgccgcccacgagaccagcaagctggagatcgaggccagccacagcgagaagctggagctgctgaagaaggcctacgaggccagcctgagcgagatcaagaagggccacgagatcgagaagaagagcctggaggacctgctgagcgagaagcaggagagcctggagaagcagatcaacgacctgaagagcgagaacgacgccctgaacgagaagctgaagagcgaggagcagaagagaagagccagagagaaggccaacctgaagaacccccagatcatgtacctggagcaggagctggagagcctgaaggccgtgctggagatcaagaacgagaagctgcaccagcaggacatcaagctgatgaagatggagaagctggtggacaacaacaccgccctggtggacaagctgaagagattccagcaggagaacgaggagctgaaggccagaatggacaagcacatggccatcagcagacagctgagcaccgagcaggccgtgctgcaggagagcctggagaaggagagcaaggtgaacaagagactgagcatggagaacgaggagctgctgtggaagctgcacaacggcgacctgtgcagccccaagagaagccccaccagcagcgccatccccctgcagagccccagaaacagcggcagcttccccagccccagcatcagccccagatag

SEQ ID NO: 11490 - DNA, 1029 bp, synthetic construct
  misc_feature 1..1029: note = Description of Artificial Sequence: Synthetic coding sequence
  source 1..1029: mol_type = other DNA
atgggctgccccagcagcaagctgtgcctgtacagcccctgcgccgccaccagaagagaggaggccctgaagcagcacaagaccctgagccaggagctggtgaacctgagaggcgagctggtgaccgccagcaccacctgcgagaagctggagaaggccagaaacgagctgcagaccgtgtacgaggccttcgtgcagcagcaccaggccgagaagaccgagagagagaacagactgaaggagttctacaccagagagtacgagaagctgagagacacctacatcgaggaggccgagaagtacaagatgcagctgcaggagcagttcgacaacctgaacgccgcccacgagaccagcaagctggagatcgaggccagccacagcgagaagctggagctgctgaagaaggcctacgaggccagcctgagcgagatcaagaagggccacgagatcgagaagaagagcctggaggacctgctgagcgagaagcaggagagcctggagaagcagatcaacgacctgaagagcgagaacgacgccctgaacgagaagctgaagagcgaggagcagaagagaagagccagagagaaggccaacctgaagaacccccagatcatgtacctggagcaggagctggagagcctgaaggccgtgctggagatcaagaacgagaagctgcaccagcaggacatcaagctgatgaagatggagaagctggtggacaacaacaccgccctggtggacaagctgaagagattccagcaggagaacgaggagctgaaggccagaatggacaagcacatggccatcagcagacagctgagcaccgagcaggccgtgctgcaggagagcctggagaaggagagcaaggtgaacaagagactgagcatggagaacgaggagctgctgtggaagctgcacaacggcgacctgtgcagccccaagagaagccccaccagcagcgccatccccctgcagagccccagaaacagcggcagcttccccagccccagcatcagccccagatag

SEQ ID NO: 11491 - DNA, 3651 bp, synthetic construct; identical to SEQ ID NO: 11489
  misc_feature 1..3651: note = Description of Artificial Sequence: Synthetic coding sequence
  source 1..3651: mol_type = other DNA

SEQ ID NO: 11492 - DNA, 1248 bp, synthetic construct
  misc_feature 1..1248: note = Description of Artificial Sequence: Synthetic coding sequence
  source 1..1248: mol_type = other DNA
atgaagaccccccccaagggccccagcagaaagaacctgttcaccgccctgaacgccgtggagaagagcagacagaagaaccccagaagcctgtgcatccagccccagaccgcccccgacgccctgccccccgagaagaccctggagctgacccagtacaagaccaagtgcgagaaccagagcggcttcatcctgcagctgaagcagctgctggcctgcggcaacaccaagttcgaggccctgaccgtggtgatccagcacctgctgagcgagagagaggaggccctgaagcagcacaagaccctgagccaggagctggtgaacctgagaggcgagctggtgaccgccagcaccacctgcgagaagctggagaaggccagaaacgagctgcagaccgtgtacgaggccttcgtgcagcagcaccaggccgagaagaccgagagagagaacagactgaaggagttctacaccagagagtacgagaagctgagagacacctacatcgaggaggccgagaagtacaagatgcagctgcaggagcagttcgacaacctgaacgccgcccacgagaccagcaagctggagatcgaggccagccacagcgagaagctggagctgctgaagaaggcctacgaggccagcctgagcgagatcaagaagggccacgagatcgagaagaagagcctggaggacctgctgagcgagaagcaggagagcctggagaagcagatcaacgacctgaagagcgagaacgacgccctgaacgagaagctgaagagcgaggagcagaagagaagagccagagagaaggccaacctgaagaacccccagatcatgtacctggagcaggagctggagagcctgaaggccgtgctggagatcaagaacgagaagctgcaccagcaggacatcaagctgatgaagatggagaagctggtggacaacaacaccgccctggtggacaagctgaagagattccagcaggagaacgaggagctgaaggccagaatggacaagcacatggccatcagcagacagctgagcaccgagcaggccgtgctgcaggagagcctggagaaggagagcaaggtgaacaagagactgagcatggagaacgaggagctgctgtggaagctgcacaacggcgacctgtgcagccccaagagaagccccaccagcagcgccatccccctgcagagccccagaaacagcggcagcttccccagccccagcatcagccccagatag

SEQ ID NO: 11493 - DNA, 7407 bp, synthetic construct
  misc_feature 1..7407: note = Description of Artificial Sequence: Synthetic coding sequence
  source 1..7407: mol_type = other DNA
atggccaccgtggtggtggaggccaccgagcccgagcccagcggcagcatcgccaaccccgccgccagcaccagccccagcctgagccacagattcctggacagcaagttctacctgctggtggtggtgggcgagatcgtgaccgaggagcacctgagaagagccatcggcaacatcgagctgggcatcagaagctgggacaccaacctgatcgagtgcaacctggaccaggagctgaagctgttcgtgagcagacacagcgccagattcagccccgaggtgcccggccagaagatcctgcaccacagaagcgacgtgctggagaccgtggtgctgatcaaccccagcgacgaggccgtgagcaccgaggtgagactgatgatcaccgacgccgccagacacaagctgctggtgctgaccggccagtgcttcgagaacaccggcgagctgatcctgcagagcggcagcttcagcttccagaacttcatcgagatcttcaccgaccaggagatcggcgagctgctgagcaccacccaccccgccaacaaggccagcctgaccctgttctgccccgaggagggcgactggaagaacagcaacctggacagacacaacctgcaggacttcatcaacatcaagctgaacagcgccagcatcctgcccgagatggagggcctgagcgagttcaccgagtacctgagcgagagcgtggaggtgcccagccccttcgacatcctggagccccccaccagcggcggcttcctgaagctgagcaagccctgctgctacatcttccccggcggcagaggcgacagcgccctgttcgccgtgaacggcttcaacatgctgatcaacggcggcagcgagagaaagagctgcttctggaagctgatcagacacctggacagagtggacagcatcctgctgacccacatcggcgacgacaacctgcccggcatcaacagcatgctgcagagaaagatcgccgagctggaggaggagcagagccagggcagcaccaccaacagcgactggatgaagaacctgatcagccccgacctgggcgtggtgttcctgaacgtgcccgagaacctgaagaaccccgagcccaacatcaagatgaagagaagcatcgaggaggcctgcttcaccctgcagtacctgaacaagctgagcatgaagcccgagcccctgttcagaagcgtgggcaacaccatcgaccccgtgatcctgttccagaagatgggcgtgggcaagctggagatgtacgtgctgaaccccgtgaagagcagcaaggagatgcagtacttcatgcagcagtggaccggcaccaacaaggacaaggccgagttcatcctgcccaacggccaggaggtggacctgcccatcagctacctgaccagcgtgagcagcctgatcgtgtggcaccccgccaaccccgccgagaagatcatcagagtgctgttccccggcaacagcacccagtacaacatcctggagggcctggagaagctgaagcacctggacttcctgaagcagcccctggccacccagaaggacctgaccggccaggtgcccacccccgtggtgaagcagaccaagctgaagcagagagccgacagcagagagagcctgaagcccgccgccaagcccctgcccagcaagagcgtgagaaaggagagcaaggaggagacccccgaggtgaccaaggtgaaccacgtggagaagccccccaaggtggagagcaaggagaaggtgatggtgaagaaggacaagcccatcaagaccgagaccaagcccagcgtgaccgagaaggaggtgcccagcaaggaggagcccagccccgtgaaggccgaggtggccgagaagcaggccaccgacgtgaagcccaaggccgccaaggagaagaccgtgaagaaggagaccaaggtgaagcccgaggacaagaaggaggagaaggagaagcccaagaaggaggtggccaagaaggaggacaagacccccatcaagaaggaggagaagcccaagaaggaggaggtgaagaaggaggtgaagaaggagatcaagaaggaggagaagaaggagcccaagaaggaggtgaagaaggagaccccccccaaggaggtgaagaaggaggtgaagaaggaggagaagaaggaggtgaagaaggaggagaaggagcccaagaaggagatcaagaagctgcccaaggacgccaagaagagcagcacccccctgagcgaggccaagaagcccgccgccctgaagcccaaggtgcccaagaaggaggagagcgtgaagaaggacagcgtggccgccggcaagcccaaggagaagggcaagatcaaggtgatcaagaaggagggcaaggccgccgaggccgtggccgccgccgtgggcaccggcgccaccaccgccgccgtgatggccgccgccggcatcgccgccatcggccccgccaaggagctggaggccgagagaagcctgatgagcagccccgaggacctgaccaaggacttcgaggagctgaaggccgaggaggtggacgtgaccaaggacatcaagccccagctggagctgatcgaggacgaggagaagctgaaggagaccgagcccgtggaggcctacgtgatccagaaggagagagaggtgaccaagggccccgccgagagccccgacgagggcatcaccaccaccgagggcgagggcgagtgcgagcagacccccgaggagctggagcccgtggagaagcagggcgtggacgacatcgagaagttcgaggacgagggcgccggcttcgaggagagcagcgagaccggcgactacgaggagaaggccgagaccgaggaggccgaggagcccgaggaggacggcgaggagcacgtgtgcgtgagcgccagcaagcacagccccaccgaggacgaggagagcgccaaggccgaggccgacgcctacatcagagagaagagagagagcgtggccagcggcgacgacagagccgaggaggacatggacgaggccatcgagaagggcgaggccgagcagagcgaggaggaggccgacgaggaggacaaggccgaggacgccagagaggaggagtacgagcccgagaagatggaggccgaggactacgtgatggccgtggtggacaaggccgccgaggccggcggcgccgaggagcagtacggcttcctgaccacccccaccaagcagctgggcgcccagagccccggcagagagcccgccagcagcatccacgacgagaccctgcccggcggcagcgagagcgaggccaccgccagcgacgaggagaacagagaggaccagcccgaggagttcaccgccaccagcggctacacccagagcaccatcgagatcagcagcgagcccacccccatggacgagatgagcacccccagagacgtgatgagcgacgagaccaacaacgaggagaccgagagccccagccaggagttcgtgaacatcaccaagtacgagagcagcctgtacagccaggagtacagcaagcccgccgacgtgacccccctgaacggcttcagcgagggcagcaagaccgacgccaccgacggcaaggactacaacgccagcgccagcaccatcagcccccccagcagcatggaggaggacaagttcagcagaagcgccctgagagacgcctactgcagcgaggtgaaggccagcaccaccctggacatcaaggacagcatcagcgccgtgagcagcgagaaggtgagccccagcaagagccccagcctgagccccagcccccccagccccctggagaagacccccctgggcgagagaagcgtgaacttcagcctgacccccaacgagatcaaggtgagcgccgaggccgaggtggcccccgtgagccccgaggtgacccaggaggtggtggaggagcactgcgccagccccgaggacaagaccctggaggtggtgagccccagccagagcgtgaccggcagcgccggccacaccccctactaccagagccccaccgacgagaagagcagccacctgcccaccgaggtgatcgagaagccccccgccgtgcccgtgagcttcgagttcagcgacgccaaggacgagaacgagagagccagcgtgagccccatggacgagcccgtgcccgacagcgagagccccatcgagaaggtgctgagccccctgagaagcccccccctgatcggcagcgagagcgcctacgagagcttcctgagcgccgacgacaaggccagcggcagaggcgccgagagccccttcgaggagaagagcggcaagcagggcagccccgaccaggtgagccccgtgagcgagatgaccagcaccagcctgtaccaggacaagcaggagggcaagagcaccgacttcgcccccatcaaggaggacttcggccaggagaagaagaccgacgacgtggaggccatgagcagccagcccgccctggccctggacgagagaaagctgggcgacgtgagccccacccagatcgacgtgagccagttcggcagcttcaaggaggacaccaagatgagcatcagcgagggcaccgtgagcgacaagagcgccacccccgtggacgagggcgtggccgaggacacctacagccacatggagggcgtggccagcgtgagcaccgccagcgtggccaccagcagcttccccgagcccaccaccgacgacgtgagccccagcctgcacgccgaggtgggcagcccccacagcaccgaggtggacgacagcctgagcgtgagcgtggtgcagacccccaccaccttccaggagaccgagatgagccccagcaaggaggagtgccccagacccatgagcatcagcccccccgacttcagccccaagaccgccaagagcagaacccccgtgcaggaccacagaagcgagcagagcagcatgagcatcgagttcggccaggagagccccgagcagagcctggccatggacttcagcagacagagccccgaccaccccaccgtgggcgccggcgtgctgcacatcaccgagaacggccccaccgaggtggactacagccccagcgacatgcaggacagcagcctgagccacaagatcccccccatggaggagcccagctacacccaggacaacgacctgagcgagctgatcagcgtgagccaggtggaggccagccccagcaccagcagcgcccacacccccagccagatcgccagccccctgcaggaggacaccctgagcgacgtggccccccccagagacatgagcctgtacgccagcctgaccagcgagaaggtgcagagcctggagggcgagaagctgagccccaagagcgacatcagccccctgacccccagagagagcagccccctgtacagccccaccttcagcgacagcaccagcgccgtgaaggagaagaccgccacctgccacagcagcagcagcccccccatcgacgccgccagcgccgagccctacggcttcagagccagcgtgctgttcgacaccatgcagcaccacctggccctgaacagagacctgagcacccccggcctggagaaggacagcggcggcaagacccccggcgacttcagctacgcctaccagaagcccgaggagaccaccagaagccccgacgaggaggactacgactacgagagctacgagaagaccaccagaaccagcgacgtgggcggctactactacgagaagatcgagagaaccaccaagagccccagcgacagcggctacagctacgagaccatcggcaagaccaccaagacccccgaggacggcgactacagctacgagatcatcgagaagaccaccagaacccccgaggagggcggctacagctacgacatcagcgagaagaccaccagcccccccgaggtgagcggctacagctacgagaagaccgagagaagcagaagactgctggacgacatcagcaacggctacgacgacagcgaggacggcggccacaccctgggcgaccccagctacagctacgagaccaccgagaagatcaccagcttccccgagagcgagggctacagctacgagaccagcaccaagaccaccagaacccccgacaccagcacctactgctacgagaccgccgagaagatcaccagaaccccccaggccagcacctacagctacgagaccagcgacctgtgctacaccgccgagaagaagagccccagcgaggccagacaggacgtggacctgtgcctggtgagcagctgcgagtacaagcaccccaagaccgagctgagccccagcttcatcaaccccaaccccctggagtggttcgccagcgaggagcccaccgaggagagcgagaagcccctgacccagagcggcggcgccccccccccccccggcggcaagcagcagggcagacagtgcgacgagaccccccccaccagcgtgagcgagagcgcccccagccagaccgacagcgacgtgccccccgagaccgaggagtgccccagcatcaccgccgacgccaacatcgacagcgaggacgagagcgagaccatccccaccgacaagaccgtgacctacaagcacatggaccccccccccgcccccgtgcaggacagaagccccagccccagacaccccgacgtgagcatggtggaccccgaggccctggccatcgagcagaacctgggcaaggccctgaagaaggacctgaaggagaagaccaagaccaagaagcccggcaccaagaccaagagcagcagccccgtgaagaagagcgacggcaagagcaagcccctggccgccagccccaagcccgccggcctgaaggagagcagcgacaaggtgagcagagtggccagccccaagaagaaggagagcgtggagaaggccgccaagcccaccaccacccccgaggtgaaggccgccagaggcgaggagaaggacaaggagaccaagaacgccgccaacgccagcgccagcaagagcgccaagaccgccaccgccggccccggcaccaccaagaccaccaagagcagcgccgtgccccccggcctgcccgtgtacctggacctgtgctacatccccaaccacagcaacagcaagaacgtggacgtggagttcttcaagagagtgagaagcagctactacgtggtgagcggcaacgaccccgccgccgaggagcccagcagagccgtgctggacgccctgctggagggcaaggcccagtggggcagcaacatgcaggtgaccctgatccccacccacgacagcgaggtgatgagagagtggtaccaggagacccacgagaagcagcaggacctgaacatcatggtgctggccagcagcagcaccgtggtgatgcaggacgagagcttccccgcctgcaagatcgagctgtag

SEQ ID NO: 11494 - DNA, 432 bp, synthetic construct
  misc_feature 1..432: note = Description of Artificial Sequence: Synthetic coding sequence
  source 1..432: mol_type = other DNA
atgcagcacagaggcttcctgctgctgaccctgctggccctgctggccctgaccagcgccgtggccaagaagaaggacaaggtgaagaagggcggccccggcagcgagtgcgccgagtgggcctggggcccctgcacccccagcagcaaggactgcggcgtgggcttcagagagggcacctgcggcgcccagacccagagaatcagatgcagagtgccctgcaactggaagaaggagttcggcgccgactgcaagtacaagttcgagaactggggcgcctgcgacggcggcaccggcaccaaggtgagacagggcaccctgaagaaggccagatacaacgcccagtgccaggagaccatcagagtgaccaagccctgcacccccaagaccaaggccaaggccaaggccaagaagggcaagggcaaggactag

SEQ ID NO: 11495 - DNA, 432 bp, synthetic construct; identical to SEQ ID NO: 11494
  misc_feature 1..432: note = Description of Artificial Sequence: Synthetic coding sequence
  source 1..432: mol_type = other DNA

SEQ ID NO: 11496 - DNA, 432 bp, synthetic construct; identical to SEQ ID NO: 11494
  misc_feature 1..432: note = Description of Artificial Sequence: Synthetic coding sequence
  source 1..432: mol_type = other DNA

SEQ ID NO: 11497 - DNA, 459 bp, synthetic construct
  misc_feature 1..459: note = Description of Artificial Sequence: Synthetic coding sequence
  source 1..459: mol_type = other DNA
atgcagcacagaggcttcctgctgctgaccctgctggccctgctggccctgaccagcgccgtggccaagaagaaggaggagggcgccctgcagtgcagcgtgcccggcgaccaccccagacaccaggccctgcacccccaggaccagagcaagggccagagccaggagagagagggcaagggcctggacgccaagcccggctgccagggcgcccccggcgtgacctggggcctggcccacgccctgcccctgcccggccccagatgcgacccccccgtgcccagcgtgtgcagcctggccctgatcaaccacgccctgccctgccccagccacagccccgccccccccctgagcgcccagagcggcgagggccagggcatcctgggcagcctgagcctgccccagagcaacgtgagccccagagccagattctgcagcagcccccagttccactactag

SEQ ID NO: 11498 - DNA, 432 bp, synthetic construct; identical to SEQ ID NO: 11494
  misc_feature 1..432: note = Description of Artificial Sequence: Synthetic coding sequence
  source 1..432: mol_type = other DNA

SEQ ID NO: 11499 - DNA, 432 bp, synthetic construct; identical to SEQ ID NO: 11494
  misc_feature 1..432: note = Description of Artificial Sequence: Synthetic coding sequence
  source 1..432: mol_type = other DNA

SEQ ID NO: 11500 - DNA, 432 bp, synthetic construct; identical to SEQ ID NO: 11494
  misc_feature 1..432: note = Description of Artificial Sequence: Synthetic coding sequence
  source 1..432: mol_type = other DNA

SEQ ID NO: 11501 - DNA, 150 bp, synthetic construct
  misc_feature 1..150: note = Description of Artificial Sequence: Synthetic coding sequence
  source 1..150: mol_type = other DNA
atgcagcacagaggcttcctgctgctgaccctgctggccctgctggccctgaccagcgccgtggccaagaagaaggacaaggtgaagaagggcggccccggcagcgagtgcgccgagtgggcctggggcccctgcacccccagcagctag

SEQ ID NO: 11502 - DNA, 396 bp, synthetic construct
  misc_feature 1..396: note = Description of Artificial Sequence: Synthetic coding sequence
  source 1..396: mol_type = other DNA
atgcagcacagaggcttcctgctgctgaccctgctggccctgctggccctgaccagcgccgtggccaagaagaaggacaaggtgaagaagggcggccccggcagcgagtgcgccgagtgggcctggggcccctgcacccccagcagcaaggactgcggcgtgggcttcagagagggcacctgcggcgcccagacccagagaatcagatgcagagtgccctgcaactggaagaaggagttcggcgccgactgcaagtacaagttcgagaactggggcgcctgcgacggcggcaccggcaccaaggtgagacagggcaccctgaagaaggccagatacaacgcccagtgccaggagaccatcagagtgaccaagccctgcacccccaagaccaagtag

SEQ ID NO: 11503 - DNA, 264 bp, synthetic construct
  misc_feature 1..264: note = Description of Artificial Sequence: Synthetic coding sequence
  source 1..264: mol_type = other DNA
atgcagcacagaggcttcctgctgctgaccctgctggccctgctggccctgaccagcgccgtggccaagaagaaggccgactgcaagtacaagttcgagaactggggcgcctgcgacggcggcaccggcaccaaggtgagacagggcaccctgaagaaggccagatacaacgcccagtgccaggagaccatcagagtgaccaagccctgcacccccaagaccaaggccaaggccaaggccaagaagggcaagggcaaggactag

SEQ ID NO: 11504 - DNA, 2715 bp, synthetic construct
  misc_feature 1..2715: note = Description of Artificial Sequence: Synthetic coding sequence
  source 1..2715: mol_type = other DNA
atggccgagagcagcgagagcttcaccatggccagcagccccgcccagagaagaagaggcaacgaccccctgaccagcagccccggcagaagcagcagaagaaccgacgccctgaccagcagccccggcagagacctgccccccttcgaggacgagagcgagggcctgctgggcaccgagggccccctggaggaggaggaggacggcgaggagctgatcggcgacggcatggagagagactacagagccatccccgagctggacgcctacgaggccgagggcctggccctggacgacgaggacgtggaggagctgaccgccagccagagagaggccgccgagagagccatgagacagagagacagagaggccggcagaggcctgggcagaatgagaagaggcctgctgtacgacagcgacgaggaggacgaggagagacccgccagaaagagaagacaggtggagagagccaccgaggacggcgaggaggacgaggagatgatcgagagcatcgagaacctggaggacctgaagggccacagcgtgagagagtgggtgagcatggccggccccagactggagatccaccacagattcaagaacttcctgagaacccacgtggacagccacggccacaacgtgttcaaggagagaatcagcgacatgtgcaaggagaacagagagagcctggtggtgaactacgaggacctggccgccagagagcacgtgctggcctacttcctgcccgaggcccccgccgagctgctgcagatcttcgacgaggccgccctggaggtggtgctggccatgtaccccaagtacgacagaatcaccaaccacatccacgtgagaatcagccacctgcccctggtggaggagctgagaagcctgagacagctgcacctgaaccagctgatcagaaccagcggcgtggtgaccagctgcaccggcgtgctgccccagctgagcatggtgaagtacaactgcaacaagtgcaacttcgtgctgggccccttctgccagagccagaaccaggaggtgaagcccggcagctgccccgagtgccagagcgccggccccttcgaggtgaacatggaggagaccatctaccagaactaccagagaatcagaatccaggagagccccggcaaggtggccgccggcagactgcccagaagcaaggacgccatcctgctggccgacctggtggacagctgcaagcccggcgacgagatcgagctgaccggcatctaccacaacaactacgacggcagcctgaacaccgccaacggcttccccgtgttcgccaccgtgatcctggccaaccacgtggccaagaaggacaacaaggtggccgtgggcgagctgaccgacgaggacgtgaagatgatcaccagcctgagcaaggaccagcagatcggcgagaagatcttcgccagcatcgcccccagcatctacggccacgaggacatcaagagaggcctggccctggccctgttcggcggcgagcccaagaaccccggcggcaagcacaaggtgagaggcgacatcaacgtgctgctgtgcggcgaccccggcaccgccaagagccagttcctgaagtacatcgagaaggtgagcagcagagccatcttcaccaccggccagggcgccagcgccgtgggcctgaccgcctacgtgcagagacaccccgtgagcagagagtggaccctggaggccggcgccctggtgctggccgacagaggcgtgtgcctgatcgacgagttcgacaagatgaacgaccaggacagaaccagcatccacgaggccatggagcagcagagcatcagcatcagcaaggccggcatcgtgaccagcctgcaggccagatgcaccgtgatcgccgccgccaaccccatcggcggcagatacgaccccagcctgaccttcagcgagaacgtggacctgaccgagcccatcatcagcagattcgacatcctgtgcgtggtgagagacaccgtggaccccgtgcaggacgagatgctggccagattcgtggtgggcagccacgtgagacaccaccccagcaacaaggaggaggagggcctggccaacggcagcgccgccgagcccgccatgcccaacacctacggcgtggagcccctgccccaggaggtgctgaagaagtacatcatctacgccaaggagagagtgcaccccaagctgaaccagatggaccaggacaaggtggccaagatgtacagcgacctgagaaaggagagcatggccaccggcagcatccccatcaccgtgagacacatcgagagcatgatcagaatggccgaggcccacgccagaatccacctgagagactacgtgatcgaggacgacgtgaacatggccatcagagtgatgctggagagcttcatcgacacccagaagttcagcgtgatgagaagcatgagaaagaccttcgccagatacctgagcttcagaagagacaacaacgagctgctgctgttcatcctgaagcagctggtggccgagcaggtgacctaccagagaaacagattcggcgcccagcaggacaccatcgaggtgcccgagaaggacctggtggacaaggccagacagatcaacatccacaacctgagcgccttctacgacagcgagctgttcagaatgaacaagttcagccacgacctgaagagaaagatgatcctgcagcagttctag

SEQ ID NO: 11505 - DNA, 2427 bp, synthetic construct
  misc_feature 1..2427: note = Description of Artificial Sequence: Synthetic coding sequence
  source 1..2427: mol_type = other DNA
atggccgagagcagcgagagcttcaccatggccagcagccccgcccagagaagaagaggcaacgaccccctgaccagcagccccggctggggcctgggcagaatgagaagaggcctgctgtacgacagcgacgaggaggacgaggagagacccgccagaaagagaagacaggtggagagagccaccgaggacggcgaggaggacgaggagatgatcgagagcatcgagaacctggaggacctgaagggccacagcgtgagagagtgggtgagcatggccggccccagactggagatccaccacagattcaagaacttcctgagaacccacgtggacagccacggccacaacgtgttcaaggagagaatcagcgacatgtgcaaggagaacagagagagcctggtggtgaactacgaggacctggccgccagagagcacgtgctggcctacttcctgcccgaggcccccgccgagctgctgcagatcttcgacgaggccgccctggaggtggtgctggccatgtaccccaagtacgacagaatcaccaaccacatccacgtgagaatcagccacctgcccctggtggaggagctgagaagcctgagacagctgcacctgaaccagctgatcagaaccagcggcgtggtgaccagctgcaccggcgtgctgccccagctgagcatggtgaagtacaactgcaacaagtgcaacttcgtgctgggccccttctgccagagccagaaccaggaggtgaagcccggcagctgccccgagtgccagagcgccggccccttcgaggtgaacatggaggagaccatctaccagaactaccagagaatcagaatccaggagagccccggcaaggtggccgccggcagactgcccagaagcaaggacgccatcctgctggccgacctggtggacagctgcaagcccggcgacgagatcgagctgaccggcatctaccacaacaactacgacggcagcctgaacaccgccaacggcttccccgtgttcgccaccgtgatcctggccaaccacgtggccaagaaggacaacaaggtggccgtgggcgagctgaccgacgaggacgtgaagatgatcaccagcctgagcaaggaccagcagatcggcgagaagatcttcgccagcatcgcccccagcatctacggccacgaggacatcaagagaggcctggccctggccctgttcggcggcgagcccaagaaccccggcggcaagcacaaggtgagaggcgacatcaacgtgctgctgtgcggcgaccccggcaccgccaagagccagttcctgaagtacatcgagaaggtgagcagcagagccatcttcaccaccggccagggcgccagcgccgtgggcctgaccgcctacgtgcagagacaccccgtgagcagagagtggaccctggaggccggcgccctggtgctggccgacagaggcgtgtgcctgatcgacgagttcgacaagatgaacgaccaggacagaaccagcatccacgaggccatggagcagcagagcatcagcatcagcaaggccggcatcgtgaccagcctgcaggccagatgcaccgtgatcgccgccgccaaccccatcggcggcagatacgaccccagcctgaccttcagcgagaacgtggacctgaccgagcccatcatcagcagattcgacatcctgtgcgtggtgagagacaccgtggaccccgtgcaggacgagatgctggccagattcgtggtgggcagccacgtgagacaccaccccagcaacaaggaggaggagggcctggccaacggcagcgccgccgagcccgccatgcccaacacctacggcgtggagcccctgccccaggaggtgctgaagaagtacatcatctacgccaaggagagagtgcaccccaagctgaaccagatggaccaggacaaggtggccaagatgtacagcgacctgagaaaggagagcatggccaccggcagcatccccatcaccgtgagacacatcgagagcatgatcagaatggccgaggcccacgccagaatccacctgagagactacgtgatcgaggacgacgtgaacatggccatcagagtgatgctggagagcttcatcgacacccagaagttcagcgtgatgagaagcatgagaaagaccttcgccagatacctgagcttcagaagagacaacaacgagctgctgctgttcatcctgaagcagctggtggccgagcaggtgacctaccagagaaacagattcggcgcccagcaggacaccatcgaggtgcccgagaaggacctggtggacaaggccagacagatcaacatccacaacctgagcgccttctacgacagcgagctgttcagaatgaacaagttcagccacgacctgaagagaaagatgatcctgcagcagttctag

SEQ ID NO: 11506 - DNA, 2865 bp, synthetic construct
  misc_feature 1..2865: note = Description of Artificial Sequence: Synthetic coding sequence
  source 1..2865: mol_type = other DNA
atggccgagagcagcgagagcttcaccatggccagcagccccgcccagagaagaagaggcaacgaccccctgaccagcagccccggcagaagcagcagaagaaccgacgccctgaccagcagccccggcagagacctgccccccttcgaggacgagagcgagggcctgctgggcaccgagggccccctggaggaggaggaggacggcgaggagctgatcggcgacggcatggagagagactacagagccatccccgagctggacgcctacgaggccgagggcctggccctggacgacgaggacgtggaggagctgaccgccagccagagagaggccggcagaggcctgctgtacgacagcgacgaggaggacgaggagagacccgccagaaagagaagacaggtggagagagccaccgaggacggcgaggaggacgaggagatgatcgagagcatcgagaacctggaggacctgaagggccacagcgtgagagagtgggtgagcatggccggccccagactggagatccaccacagattcaagaacttcctgagaacccacgtggacagccacggccacaacgtgttcaaggagagaatcagcgacatgtgcaaggagaacagagagagcctggtggtgaactacgaggacctggccgccagagagcacgtgctggcctacttcctgcccgaggcccccgccgagctgctgcagatcttcgacgaggccgccctggaggtggtgctggccatgtaccccaagtacgacagaatcaccaaccacatccacgtgagaatcagccacctgcccctggtggaggagctgagaagcctgagacagctgcacctgaaccagctgatcagaaccagcggcgtggtgaccagctgcaccggcgtgctgccccagctgagcatggtgaagtacaactgcaacaagtgcaacttcgtgctgggccccttctgccagagccagaaccaggaggtgaagcccggcagctgccccgagtgccagagcgccggccccttcgaggtgaacatggaggagaccatctaccagaactaccagagaatcagaatccaggagagccccggcaaggtggccgccggcagactgcccagaagcaaggacgccatcctgctggccgacctggtggacagctgcaagcccggcgacgagatcgagctgaccggcatctaccacaacaactacgacggcagcctgaacaccgccaacggcttccccgtgttcgccaccgtgatcctggccaaccacgtggccaagaaggacaacaaggtggccgtgggcgagctgaccgacgaggacgtgaagatgatcaccagcctgagcaaggaccagcagatcggcgagaaggagagcagcagaaacgccagcctggccgaggccggcatcggcgccatccccagccagctgctggccatcgagcccagcctgagaagaagcggcgtgcccatcggcgaggtgggcgtgagccagagacaggaggccagaagcttcagcagcgccaacacccactggttcctggaggacctgctgggccccagctgcagagacaccatgatcttcgccagcatcgcccccagcatctacggccacgaggacatcaagagaggcctggccctggccctgttcggcggcgagcccaagaaccccggcggcaagcacaaggtgagaggcgacatcaacgtgctgctgtgcggcgaccccggcaccgccaagagccagttcctgaagtacatcgagaaggtgagcagcagagccatcttcaccaccggccagggcgccagcgccgtgggcctgaccgcctacgtgcagagacaccccgtgagcagagagtggaccctggaggccggcgccctggtgctggccgacagaggcgtgtgcctgatcgacgagttcgacaagatgaacgaccaggacagaaccagcatccacgaggccatggagcagcagagcatcagcatcagcaaggccggcatcgtgaccagcctgcaggccagatgcaccgtgatcgccgccgccaaccccatcggcggcagatacgaccccagcctgaccttcagcgagaacgtggacctgaccgagcccatcatcagcagattcgacatcctgtgcgtggtgagagacaccgtggaccccgtgcaggacgagatgctggccagattcgtggtgggcagccacgtgagacaccaccccagcaacaaggaggaggagggcctggccaacggcagcgccgccgagcccgccatgcccaacacctacggcgtggagcccctgccccaggaggtgctgaagaagtacatcatctacgccaaggagagagtgcaccccaagctgaaccagatggaccaggacaaggtggccaagatgtacagcgacctgagaaaggagagcatggccaccggcagcatccccatcaccgtgagacacatcgagagcatgatcagaatggccgaggcccacgccagaatccacctgagagactacgtgatcgaggacgacgtgaacatggccatcagagtgatgctggagagcttcatcgacacccagaagttcagcgtgatgagaagcatgagaaagaccttcgccagatacctgagcttcagaagagacaacaacgagctgctgctgttcatcctgaagcagctggtggccgagcaggtgacctaccagagaaacagattcggcgcccagcaggacaccatcgaggtgcccgagaaggacctggtggacaaggccagacagatcaacatccacaacctgagcgccttctacgacagcgagctgttcagaatgaacaagttcagccacgacctgaagagaaagatgatcctgcagcagttctag

SEQ ID NO: 11507 - DNA, 753 bp, synthetic construct
  misc_feature 1..753: note = Description of Artificial Sequence: Synthetic coding sequence
  source 1..753: mol_type = other DNA
atggccctgagagccggcctggtgctgggcttccacaccctgatgaccctgctgagcccccaggaggccggcgccaccaaggccgaccacatgggcagctacggccccgccttctaccagagctacggcgccagcggccagttcacccacgagttcgacgaggagcagctgttcagcgtggacctgaagaagagcgaggccgtgtggagactgcccgagttcggcgacttcgccagattcgacccccagggcggcctggccggcatcgccgccatcaaggcccacctggacatcctggtggagagaagcaacagaagcagagccatcaacgtgccccccagagtgaccgtgctgcccaagagcagagtggagctgggccagcccaacatcctgatctgcatcgtggacaacatcttcccccccgtgatcaacatcacctggctgagaaacggccagaccgtgaccgagggcgtggcccagaccagcttctacagccagcccgaccacctgttcagaaagttccactacctgcccttcgtgcccagcgccgaggacgtgtacgactgccaggtggagcactggggcctggacgcccccctgctgagacactgggagctgcaggtgcccatccccccccccgacgccatggagaccctggtgtgcgccctgggcctggccatcggcctggtgggcttcctggtgggcaccgtgctgatcatcatgggcacctacgtgagcagcgtgcccagatag

SEQ ID NO: 11508 - DNA, 993 bp, synthetic construct
  misc_feature 1..993: note = Description of Artificial Sequence: Synthetic coding sequence
  source 1..993: mol_type = other DNA
atgcacagatacagagcccccggcgagcaggacggcgacgccatgcccctgggcagcgccgtggacatcctggccaccgacgaccccaacttcagccaggaggaccagcaggacacccagatctacgagaagcacgacaacctgctgcacggcaccaagaagaagaaggagaagatggtgagcgccgccttcatgaagaagtacatccacgtggccaagatcatcaagcccgtgctgacccaggagagcgccacctacatcgccgaggagtacagcagactgagaagccaggacagcatgagcagcgacaccgccagaaccagccccgtgaccgccagaaccctggagaccctgatcagactggccaccgcccacgccaaggccagaatgagcaagaccgtggacctgcaggacgccgaggaggccgtggagctggtgcagtacgcctacttcaagaaggtgctggagaaggagaagaagagaaagaagagaagcgaggacgagagcgagaccgaggacgaggaggagaagagccaggaggaccaggagcagaagagaaagagaagaaagaccagacagcccgacgccaaggacggcgacagctacgacccctacgacttcagcgacaccgaggaggagatgccccaggtgcacacccccaagaccgccgacagccaggagaccaaggagagccagaaggtggagctgagcgagagcagagacggcatcagcccctgctgccccggctggagctggacccccggcctgaagcagagcttctacctgagcctgcccaagggctgggactacagacacaagcccctgtgcctgttcgacctgatcctgttcaacgactgcagagtgagcatggtggagggcatccagggcggccccctgggctgcgtgcccggcagcagctgcgccgtgaacagacacgagagcccccacagaatccaccagcccggccagagaagagccctgctgttcagctag

SEQ ID NO: 11509 - DNA, 2289 bp, synthetic construct
  misc_feature 1..2289: note = Description of Artificial Sequence: Synthetic coding sequence
  source 1..2289: mol_type = other DNA
atgtggagctgcggcagactgagagagatcacctggaccagctggaccaccagactgctgaacaacgccttcgaggagctggtggccttccagagagccctgaaggacttcgtggccagcatcgacgccacctacgccaagcagtacgaggagttctacgtgggcctggagggcagcttcggcagcaagcacgtgagccccagaaccctgaccagctgcttcctgagctgcgtggtgtgcgtggagggcatcgtgaccaagtgcagcctggtgagacccaaggtggtgagaagcgtgcactactgccccgccaccaagaagaccatcgagagaagatacagcgacctgaccaccctggtggccttccccagcagcagcgtgtaccccaccaaggacgaggagaacaaccccctggagaccgagtacggcctgagcgtgtacaaggaccaccagaccatcaccatccaggagatgcccgagaaggcccccgccggccagctgcccagaagcgtggacgtgatcctggacgacgacctggtggacaaggccaagcccggcgacagagtgcaggtggtgggcacctacagatgcctgcccggcaagaagggcggctacaccagcggcaccttcagaaccgtgctgatcgcctgcaacgtgaagcagatgagcaaggacgcccagcccagcttcagcgccgaggacatcgccaagatcaagaagttcagcaagaccagaagcaaggacatcttcgaccagctggccaagagcctggcccccagcatccacggccacgactacgtgaagaaggccatcctgtgcctgctgctgggcggcgtggagagagacctggagaacggcagccacatcagaggcgacatcaacatcctgctgatcggcgaccccagcgtggccaagagccagctgctgagatacgtgctgtgcaccgcccccagagccatccccaccaccggcagaggcagcagcggcgtgggcctgaccgccgccgtgaccaccgaccaggagaccggcgagagaagactggaggccggcgccatggtgctggccgacagaggcgtggtgtgcatcgacgagttcgacaagatgagcgacatggacagaaccgccatccacgaggtgatggagcagggcagagtgaccatcgccaaggccggcatccacgccagactgaacgccagatgcagcgtgctggccgccgccaaccccgtgtacggcagatacgaccagtacaagacccccatggagaacatcggcctgcaggacagcctgctgagcagattcgacctgctgttcatcatgctggaccagatggaccccgagcaggacagagagatcagcgaccacgtgctgagaatgcacagatacagagcccccggcgagcaggacggcgacgccatgcccctgggcagcgccgtggacatcctggccaccgacgaccccaacttcagccaggaggaccagcaggacacccagatctacgagaagcacgacaacctgctgcacggcaccaagaagaagaaggagaagatggtgagcgccgccttcatgaagaagtacatccacgtggccaagatcatcaagcccgtgctgacccaggagagcgccacctacatcgccgaggagtacagcagactgagaagccaggacagcatgagcagcgacaccgccagaaccagccccgtgaccgccagaaccctggagaccctgatcagactggccaccgcccacgccaaggccagaatgagcaagaccgtggacctgcaggacgccgaggaggccgtggagctggtgcagtacgcctacttcaagaaggtgctggagaaggagaagaagagaaagaagagaagcgaggacgagagcgagaccgaggacgaggaggagaagagccaggaggaccaggagcagaagagaaagagaagaaagaccagacagcccgacgccaaggacggcgacagctacgacccctacgacttcagcgacaccgaggaggagatgccccaggtgcacacccccaagaccgccgacagccaggagaccaaggagagccagaaggtggagctgagcgagagcagactgaaggccttcaaggtggccctgctggacgtgttcagagaggcccacgcccagagcatcggcatgaacagactgaccgagagcatcaacagagacagcgaggagcccttcagcagcgtggagatccaggccgccctgagcaagatgcaggacgacaaccaggtgatggtgagcgagggcatcatcttcctgatctag

SEQ ID NO: 11510 - DNA, 987 bp, synthetic construct
  misc_feature 1..987: note = Description of Artificial Sequence: Synthetic coding sequence
  source 1..987: mol_type = other DNA
agatacagagcccccggcgagcaggacggcgacgccatgcccctgggcagcgccgtggacatcctggccaccgacgaccccaacttcagccaggaggaccagcaggacacccagatctacgagaagcacgacaacctgctgcacggcaccaagaagaagaaggagaagatggtgagcgccgccttcatgaagaagtacatccacgtggccaagatcatcaagcccgtgctgacccaggagagcgccacctacatcgccgaggagtacagcagactgagaagccaggacagcatgagcagcgacaccgccagaaccagccccgtgaccgccagaaccctggagaccctgatcagactggccaccgcccacgccaaggccagaatgagcaagaccgtggacctgcaggacgccgaggaggccgtggagctggtgcagtacgcctacttcaagaaggtgctggagaaggagaagaagagaaagaagagaagcgaggacgagagcgagaccgaggacgaggaggagaagagccaggaggaccaggagcagaagagaaagagaagaaagaccagacagcccgacgccaaggacggcgacagctacgacccctacgacttcagcgacaccgaggaggagatgccccaggtgcacacccccaagaccgccgacagccaggagaccaaggagagccagaaggtggagctgagcgagagcagagacggcatcagcccctgctgccccggctggagctggacccccggcctgaagcagagcttctacctgagcctgcccaagggctgggactacagacacaagcccctgtgcctgttcgacctgatcctgttcaacgactgcagagtgagcatggtggagggcatccagggcggccccctgggctgcgtgcccggcagcagctgcgccgtgaacagacacgagagcccccacagaatccaccagcccggccagagaagagccctgctgttcagctag

SEQ ID NO: 11511 - DNA, 2562 bp, synthetic construct
  misc_feature 1..2562: note = Description of Artificial Sequence: Synthetic coding sequence
  source 1..2562: mol_type = other DNA
atgctgcccagaagcccccccctgcccagaggcaacctgtggtggagagaggagttcggcagcttcagagccggcgtggagagcagctgggagccccccagagacttcggcggcggcagcagcctggccgccggcatggccggcaccgtggtgctggacgacgtggagctgagagaggcccagagagactacctggacttcctggacgacgaggaggaccagggcatctaccagagcaaggtgagagagctgatcagcgacaaccagtacagactgatcgtgaacgtgaacgacctgagaagaaagaacgagaagagagccaacagactgctgaacaacgccttcgaggagctggtggccttccagagagccctgaaggacttcgtggccagcatcgacgccacctacgccaagcagtacgaggagttctacgtgggcctggagggcagcttcggcagcaagcacgtgagccccagaaccctgaccagctgcttcctgagctgcgtggtgtgcgtggagggcatcgtgaccaagtgcagcctggtgagacccaaggtggtgagaagcgtgcactactgccccgccaccaagaagaccatcgagagaagatacagcgacctgaccaccctggtggccttccccagcagcagcgtgtaccccaccaaggacgaggagaacaaccccctggagaccgagtacggcctgagcgtgtacaaggaccaccagaccatcaccatccaggagatgcccgagaaggcccccgccggccagctgcccagaagcgtggacgtgatcctggacgacgacctggtggacaaggccaagcccggcgacagagtgcaggtggtgggcacctacagatgcctgcccggcaagaagggcggctacaccagcggcaccttcagaaccgtgctgatcgcctgcaacgtgaagcagatgagcaaggacgcccagcccagcttcagcgccgaggacatcgccaagatcaagaagttcagcaagaccagaagcaaggacatcttcgaccagctggccaagagcctggcccccagcatccacggccacgactacgtgaagaaggccatcctgtgcctgctgctgggcggcgtggagagagacctggagaacggcagccacatcagaggcgacatcaacatcctgctgatcggcgaccccagcgtggccaagagccagctgctgagatacgtgctgtgcaccgcccccagagccatccccaccaccggcagaggcagcagcggcgtgggcctgaccgccgccgtgaccaccgaccaggagaccggcgagagaagactggaggccggcgccatggtgctggccgacagaggcgtggtgtgcatcgacgagttcgacaagatgagcgacatggacagaaccgccatccacgaggtgatggagcagggcagagtgaccatcgccaaggccggcatccacgccagactgaacgccagatgcagcgtgctggccgccgccaaccccgtgtacggcagatacgaccagtacaagacccccatggagaacatcggcctgcaggacagcctgctgagcagattcgacctgctgttcatcatgctggaccagatggaccccgagcaggacagagagatcagcgaccacgtgctgagaatgcacagatacagagcccccggcgagcaggacggcgacgccatgcccctgggcagcgccgtggacatcctggccaccgacgaccccaacttcagccaggaggaccagcaggacacccagatctacgagaagcacgacaacctgctgcacggcaccaagaagaagaaggagaagatggtgagcgccgccttcatgaagaagtacatccacgtggccaagatcatcaagcccgtgctgacccaggagagcgccacctacatcgccgaggagtacagcagactgagaagccaggacagcatgagcagcgacaccgccagaaccagccccgtgaccgccagaaccctggagaccctgatcagactggccaccgcccacgccaaggccagaatgagcaagaccgtggacctgcaggacgccgaggaggccgtggagctggtgcagtacgcctacttcaagaaggtgctggagaaggagaagaagagaaagaagagaagcgaggacgagagcgagaccgaggacgaggaggagaagagccaggaggaccaggagcagaagagaaagagaagaaagaccagacagcccgacgccaaggacggcgacagctacgacccctacgacttcagcgacaccgaggaggagatgccccaggtgcacacccccaagaccgccgacagccaggagaccaaggagagccagaaggtggagctgagcgagagcagactgaaggccttcaaggtggccctgctggacgtgttcagagaggcccacgcccagagcatcggcatgaacagactgaccgagagcatcaacagagacagcgaggagcccttcagcagcgtggagatccaggccgccctgagcaagatgcaggacgacaaccaggtgatggtgagcgagggcatcatcttcctgatctag

SEQ ID NO: 11512 - DNA, 2592 bp, synthetic construct
  misc_feature 1..2592: note = Description of Artificial Sequence: Synthetic coding sequence
  source 1..2592: mol_type = other DNA
atgagcagccccgccagcacccccagcagaagaggcagcagaagaggcagagccacccccgcccagacccccagaagcgaggacgccagaagcagccccagccagagaagaagaggcgaggacagcaccagcaccggcgagctgcagcccatgcccaccagccccggcgtggacctgcagagccccgccgcccaggacgtgctgttcagcagccccccccagatgcacagcagcgccatccccctggacttcgacgtgagcagccccctgacctacggcacccccagcagcagagtggagggcacccccagaagcggcgtgagaggcacccccgtgagacagagacccgacctgggcagcgcccagaagggcctgcaggtggacctgcagagcgacggcgccgccgccgaggacatcgtggccagcgagcagagcctgggccagaagctggtgatctggggcaccgacgtgaacgtggccgcctgcaaggagaacttccagagattcctgcagagattcatcgaccccctggccaaggaggaggagaacgtgggcatcgacatcaccgagcccctgtacatgcagagactgggcgagatcaacgtgatcggcgagcccttcctgaacgtgaactgcgagcacatcaagagcttcgacaagaacctgtacagacagctgatcagctacccccaggaggtgatccccaccttcgacatggccgtgaacgagatcttcttcgacagataccccgacagcatcctggagcaccagatccaggtgagacccttcaacgccctgaagaccaagaacatgagaaacctgaaccccgaggacatcgaccagctgatcaccatcagcggcatggtgatcagaaccagccagctgatccccgagatgcaggaggccttcttccagtgccaggtgtgcgcccacaccaccagagtggagatggacagaggcagaatcgccgagcccagcgtgtgcggcagatgccacaccacccacagcatggccctgatccacaacagaagcctgttcagcgacaagcagatgatcaagctgcaggagagccccgaggacatgcccgccggccagaccccccacaccgtgatcctgttcgcccacaacgacctggtggacaaggtgcagcccggcgacagagtgaacgtgaccggcatctacagagccgtgcccatcagagtgaaccccagagtgagcaacgtgaagagcgtgtacaagacccacatcgacgtgatccactacagaaagaccgacgccaagagactgcacggcctggacgaggaggccgagcagaagctgttcagcgagaagagagtggagctgctgaaggagctgagcagaaagcccgacatctacgagagactggccagcgccctggcccccagcatctacgagcacgaggacatcaagaagggcatcctgctgcagctgttcggcggcaccagaaaggacttcagccacaccggcagaggcaagttcagagccgagatcaacatcctgctgtgcggcgaccccggcaccagcaagagccagctgctgcagtacgtgtacaacctggtgcccagaggccagtacaccagcggcaagggcagcagcgccgtgggcctgaccgcctacgtgatgaaggaccccgagaccagacagctggtgctgcagaccggcgccctggtgctgagcgacaacggcatctgctgcatcgacgagttcgacaagatgaacgagagcaccagaagcgtgctgcacgaggtgatggagcagcagaccctgagcatcgccaaggccggcatcatctgccagctgaacgccagaaccagcgtgctggccgccgccaaccccatcgagagccagtggaaccccaagaagaccaccatcgagaacatccagctgccccacaccctgctgagcagattcgacctgatcttcctgctgctggacccccaggacgaggcctacgacagaagactggcccaccacctggtggccctgtactaccagagcgaggagcaggccgaggaggagctgctggacatggccgtgctgaaggactacatcgcctacgcccacagcaccatcatgcccagactgagcgaggaggccagccaggccctgatcgaggcctacgtggacatgagaaagatcggcagcagcagaggcatggtgagcgcctaccccagacagctggagagcctgatcagactggccgaggcccacgccaaggtgagactgagcaacaaggtggaggccatcgacgtggaggaggccaagagactgcacagagaggccctgaagcagagcgccaccgaccccagaaccggcatcgtggacatcagcatcctgaccaccggcatgagcgccaccagcagaaagagaaaggaggagctggccgaggccctgaagaagctgatcctgagcaagggcaagacccccgccctgaagtaccagcagctgttcgaggacatcagaggccagagcgacatcgccatcaccaaggacatgttcgaggaggccctgagagccctggccgacgacgacttcctgaccgtgaccggcaagaccgtgagactgctgtag

SEQ ID NO: 11513 - DNA, 2472 bp, synthetic construct
  misc_feature 1..2472: note = Description of Artificial Sequence: Synthetic coding sequence
  source 1..2472: mol_type = other DNA
atgcccggccacctgcccctgagagacgtggaggccagaatccccccccccagaggcagctgcagcagatgccagcccagactggagtggacctgcagagccctgctgagaagaacctgctgcttccccgccctgcccaagtgcatcctgcagctgagcctgctgaccctgatgctggagggcacccccagaagcggcgtgagaggcacccccgtgagacagagacccgacctgggcagcgcccagaagggcctgcaggtggacctgcagagcgacggcgccgccgccgaggacatcgtggccagcgagcagagcctgggccagaagctggtgatctggggcaccgacgtgaacgtggccgcctgcaaggagaacttccagagattcctgcagagattcatcgaccccctggccaaggaggaggagaacgtgggcatcgacatcaccgagcccctgtacatgcagagactgggcgagatcaacgtgatcggcgagcccttcctgaacgtgaactgcgagcacatcaagagcttcgacaagaacctgtacagacagctgatcagctacccccaggaggtgatccccaccttcgacatggccgtgaacgagatcttcttcgacagataccccgacagcatcctggagcaccagatccaggtgagacccttcaacgccctgaagaccaagaacatgagaaacctgaaccccgaggacatcgaccagctgatcaccatcagcggcatggtgatcagaaccagccagctgatccccgagatgcaggaggccttcttccagtgccaggtgtgcgcccacaccaccagagtggagatggacagaggcagaatcgccgagcccagcgtgtgcggcagatgccacaccacccacagcatggccctgatccacaacagaagcctgttcagcgacaagcagatgatcaagctgcaggagagccccgaggacatgcccgccggccagaccccccacaccgtgatcctgttcgcccacaacgacctggtggacaaggtgcagcccggcgacagagtgaacgtgaccggcatctacagagccgtgcccatcagagtgaaccccagagtgagcaacgtgaagagcgtgtacaagacccacatcgacgtgatccactacagaaagaccgacgccaagagactgcacggcctggacgaggaggccgagcagaagctgttcagcgagaagagagtggagctgctgaaggagctgagcagaaagcccgacatctacgagagactggccagcgccctggcccccagcatctacgagcacgaggacatcaagaagggcatcctgctgcagctgttcggcggcaccagaaaggacttcagccacaccggcagaggcaagttcagagccgagatcaacatcctgctgtgcggcgaccccggcaccagcaagagccagctgctgcagtacgtgtacaacctggtgcccagaggccagtacaccagcggcaagggcagcagcgccgtgggcctgaccgcctacgtgatgaaggaccccgagaccagacagctggtgctgcagaccggcgccctggtgctgagcgacaacggcatctgctgcatcgacgagttcgacaagatgaacgagagcaccagaagcgtgctgcacgaggtgatggagcagcagaccctgagcatcgccaaggccggcatcatctgccagctgaacgccagaaccagcgtgctggccgccgccaaccccatcgagagccagtggaaccccaagaagaccaccatcgagaacatccagctgccccacaccctgctgagcagattcgacctgatcttcctgctgctggacccccaggacgaggcctacgacagaagactggcccaccacctggtggccctgtactaccagagcgaggagcaggccgaggaggagctgctggacatggccgtgctgaaggactacatcgcctacgcccacagcaccatcatgcccagactgagcgaggaggccagccaggccctgatcgaggcctacgtggacatgagaaagatcggcagcagcagaggcatggtgagcgcctaccccagacagctggagagcctgatcagactggccgaggcccacgccaaggtgagactgagcaacaaggtggaggccatcgacgtggaggaggccaagagactgcacagagaggccctgaagcagagcgccaccgaccccagaaccggcatcgtggacatcagcatcctgaccaccggcatgagcgccaccagcagaaagagaaaggaggagctggccgaggccctgaagaagctgatcctgagcaagggcaagacccccgccctgaagtaccagcagctgttcgaggacatcagaggccagagcgacatcgccatcaccaaggacatgttcgaggaggccctgagagccctggccgacgacgacttcctgaccgtgaccggcaagaccgtgagactgctgtag

SEQ ID NO: 11514 - DNA, 2592 bp, synthetic construct; identical to SEQ ID NO: 11512
  misc_feature 1..2592: note = Description of Artificial Sequence: Synthetic coding sequence
  source 1..2592: mol_type = other DNA

SEQ ID NO: 11515 - DNA, 855 bp, synthetic construct
  misc_feature 1..855: note = Description of Artificial Sequence: Synthetic coding sequence
  source 1..855: mol_type = other DNA
atggcccccagactgtgcagcatcagcgtgaccgccagaagactgctgggcggccccggccccagagccggcgacgtggccagcgccgccgccgccagattctacagcaaggacaacgagggcagctggttcagaagcctgttcgtgcacaaggtggaccccagaaaggacgcccacagcaccctgctgagcaagaaggagaccagcaacctgtacaagatccagttccacaacgtgaagcccgagtacctggacgcctacaacagcctgaccgaggccgtgctgcccaagctgcacctggacgaggactacccctgcagcctggtgggcaactggaacacctggtacggcgagcaggaccaggccgtgcacctgtggagattcagcggcggctaccccgccctgatggactgcatgaacaagctgaagaacaacaaggagtacctggagttcagaagagagagaagccagatgctgctgagcagaagaaaccagctgctgctggagttcagcttctggaacgagccccagcccagaatgggccccaacatctacgagctgagaacctacaagctgaagcccggcaccatgatcgagtggggcaacaactgggccagagccatcaagtacagacaggagaaccaggaggccgtgggcggcttcttcagccagatcggcgagctgtacgtggtgcaccacctgtgggcctacaaggacctgcagagcagagaggagaccagaaacgccgcctggagaaagagaggctgggacgagaacgtgtactacaccgtgcccctggtgagacacatggagagcagaatcatgatccccctgaagatcagccccctgcagtag

SEQ ID NO: 11516 - DNA, 2076 bp, synthetic construct
  misc_feature 1..2076: note = Description of Artificial Sequence: Synthetic coding sequence
  source 1..2076: mol_type = other DNA
atgagcggcttcgacgaccccggcatcttctacagcgacagcttcggcggcgacgcccaggccgacgagggccaggccagaaagagccagctgcagagaagattcaaggagttcctgagacagtacagagtgggcaccgacagaaccggcttcaccttcaagtacagagacgagctgaagagacactacaacctgggcgagtactggatcgaggtggagatggaggacctggccagcttcgacgaggacctggccgactacctgtacaagcagcccgccgagcacctgcagctgagcgacatgatgagccacctggtgaagatccccggcatcatcatcgccgccagcgccgtgagagccaaggccaccagaatcagcatccagtgcagaagctgcagaaacaccctgaccaacatcgccatgagacccggcctggagggctacgccctgcccagaaagtgcaacaccgaccaggccggcagacccaagtgccccctggacccctacttcatcatgcccgacaagtgcaagtgcgtggacttccagaccctgaagctgcaggagctgcccgacgccgtgccccacggcgagatgcccagacacatgcagctgtactgcgacagatacctgtgcgacaaggtggtgcccggcaacagagtgaccatcatgggcatctacagcatcaagaagttcggcctgaccaccagcagaggcagagacagagtgggcgtgggcatcagaagcagctacatcagagtgctgggcatccaggtggacaccgacggcagcggcagaagcttcgccggcgccgtgagcccccaggaggaggaggagttcagaagactggccgccctgcccaacgtgtacgaggtgatcagcaagagcatcgcccccagcatcttcggcggcaccgacatgaagaaggccatcgcctgcctgctgttcggcggcagcagaaagagactgcccgacggcctgaccagaagaggcgacatcaacctgctgatgctgggcgaccccggcaccgccaagagccagctgctgaagttcgtggagaagtgcagccccatcggcgtgtacaccagcggcaagggcagcagcgccgccggcctgaccgccagcgtgatgagagaccccagcagcagaaacttcatcatggagggcggcgccatggtgctggccgacggcggcgtggtgtgcatcgacgagttcgacaagatgagagaggacgacagagtggccatccacgaggccatggagcagcagaccatcagcatcgccaaggccggcatcaccaccaccctgaacagcagatgcagcgtgctggccgccgccaacagcgtgttcggcagatgggacgagaccaagggcgaggacaacatcgacttcatgcccaccatcctgagcagattcgacatgatcttcatcgtgaaggacgagcacaacgaggagagagacgtgatgctggccaagcacgtgatcaccctgcacgtgagcgccctgacccagacccaggccgtggagggcgagatcgacctggccaagctgaagaagttcatcgcctactgcagagtgaagtgcggccccagactgagcgccgaggccgccgagaagctgaagaacagatacatcatcatgagaagcggcgccagacagcacgagagagacagcgacagaagaagcagcatccccatcaccgtgagacagctggaggccatcgtgagaatcgccgaggccctgagcaagatgaagctgcagcccttcgccaccgaggccgacgtggaggaggccctgagactgttccaggtgagcaccctggacgccgccctgagcggcaccctgagcggcgtggagggcttcaccagccaggaggaccaggagatgctgagcagaatcgagaagcagctgaagagaagattcgccatcggcagccaggtgagcgagcacagcatcatcaaggacttcaccaagcagaagtaccccgagcacgccatccacaaggtgctgcagctgatgctgagaagaggcgagatccagcacagaatgcagagaaaggtgctgtacagactgaagtag

SEQ ID NO: 11517 - DNA, 696 bp, synthetic construct
  misc_feature 1..696: note = Description of Artificial Sequence: Synthetic coding sequence
  source 1..696: mol_type = other DNA
atgagcggcttcgacgaccccggcatcttctacagcgacagcttcggcggcgacgcccaggccgacgagggccaggccagaaagagccagctgcagagaagattcaaggagttcctgagacagtacagagtgggcaccgacagaaccggcttcaccttcaagtacagcctggcccccagcctgatcgagcacctgctgcccgccagatactgcagcggctgctgggccgccgccctgaagctggacctggcccccgccagcagagacgagctgaagagacactacaacctgggcgagtactggatcgaggtggagatggaggacctggccagcttcgacgaggacctggccgactacctgtacaagcagcccgccgagcacctgcagctgctggaggaggccgccaaggaggtggccgacgaggtgaccagacccagacccagcggcgaggaggtgctgcaggacatccaggtgatgctgaagagcgacgccagccccagcagcatcagaagcctgaagagcgacatgatgagccacctggtgaagatccccggcatcatcatcgccgccagcgccgtgagagccaaggccaccagaatcagcatccagtgcagaagctgcagaaacaccctgaccaacatcgccatgagacccggcctggagggctacgccctgcccagaaagtgcaacacctag

SEQ ID NO: 11518 - DNA, 1125 bp, synthetic construct
  misc_feature 1..1125: note = Description of Artificial Sequence: Synthetic coding sequence
  source 1..1125: mol_type = other DNA
atgaacagcagcggcatcaccacctggggcagcaccggcctgagatggagatggagaaccagacccagacccagcggcgaggaggtgctgcaggacatccaggtgatgctgaagagcgacgccagccccagcagcatcagaagcctgaagagcgacatgatgagccacctggtgaagatccccggcatcatcatcgccgccagcgccgtgagagccaaggccaccagaatcagcatccagtgcagaagctgcagaaacaccctgaccaacatcgccatgagacccggcctggagggctacgccctgcccagaaagtgcaacaccgaccaggccggcagacccaagtgccccctggacccctacttcatcatgcccgacaagtgcaagtgcgtggacttccagaccctgaagctgcaggagctgcccgacgccgtgccccacggcgagatgcccagacacatgcagctgtactgcgacagatacctgtgcgacaaggtggtgcccggcaacagagtgaccatcatgggcatctacagcatcaagaagttcggcctgaccaccagcagaggcagagacagagtgggcgtgggcatcagaagcagctacatcagagtgctgggcatccaggtggacaccgacggcagcggcagaagcttcgccggcgccgtgagcccccaggaggaggaggagttcagaagactggccgccctgcccaacgtgtacgaggtgatcagcaagagcatcgcccccagcatcttcggcggcaccgacatgaagaaggccatcgcctgcctgctgttcggcggcagcagaaagagactgcccgacggcctgaccagaagaggcgacatcaacctgctgatgctgggcgaccccggcaccgccaagagccagctgctgaagttcgtggagaagtgcagccccatcggcgtgtacaccagcggcaagggcagcagcgccgccggcctgaccgccagcgtgatgagagaccccagcagcagaaacttcatcatggagggcggcgccatggtgctggccgacggcggcgtggtgtgcatcgacgagttcgacaagcacagagaggccgcccaggcccccctgtgccactggctgcccggcgtgtag

SEQ ID NO: 11519 - DNA, 1788 bp, synthetic construct
  misc_feature 1..1788: note = Description of Artificial Sequence: Synthetic coding sequence
  source 1..1788: mol_type = other DNA
atgttctacttcagaggctgcggcagatgggtggccgtgagcttcaccaagcagcagttccccctggccagactgagcagcgacagcgccgcccccagaaccccccacttcgacgtgatcgtgatcggcggcggccacgccggcaccgaggccgccaccgccgccgccagatgcggcagcagaaccctgctgctgacccacagagtggacaccatcggccagatgagctgcaaccccagcttcggcggcatcggcaagggccacctgatgagagaggtggacgccctggacggcctgtgcagcagaatctgcgaccagagcggcgtgcactacaaggtgctgaacagaagaaagggccccgccgtgtggggcctgagagcccagatcgacagaaagctgtacaagcagaacatgcagaaggagatcctgaacacccccctgctgaccgtgcaggagggcgccgtggaggacctgatcctgaccgagcccgagcccgagcacaccggcaagtgcagagtgagcggcgtggtgctgcccgaggaccagctgccctgctacctgacccacaccaaccccagagtggacgagatcgtgctgaagaacctgcacctgaacagccacgtgaaggagaccaccagaggccccagatactgccccagcatcgagagcaaggtgctgagattccccaacagactgcaccaggtgtggctggagcccgagggcatggacagcgacctgatctacccccagggcctgagcatgaccctgcccgccgagctgcaggagaagatgatcacctgcatcagaggcctggagaaggccaaggtgatccagcccggctacggcgtgcagtacgactacctggaccccagacagatcacccccagcctggagacccacctggtgcagagactgttcttcgccggccagatcaacggcaccaccggctacgaggaggccgccgcccagggcgtgatcgccggcatcaacgccagcctgagagtgagcagaaagccccccttcgtggtgagcagaaccgagggctacatcggcgtgctgatcgacgacctgaccaccctgggcaccagcgagccctacagaatgttcaccagcagagtggagttcagactgagcctgagacccgacaacgccgacagcagactgaccctgagaggctacaaggacgccggctgcgtgagccagcagagatacgagagagcctgctggatgaagagcagcctggaggagggcatcagcgtgctgaagagcatcgagttcctgagcagcaagtggaagaagctgatccccgaggccagcatcagcaccagcagaagcctgcccgtgagagccctggacgtgctgaagtacgaggaggtggacatggacagcctggccaaggccgtgcccgagcccctgaagaagtacaccaagtgcagagagctggccgagagactgaagatcgaggccacctacgagagcgtgctgttccaccagctgcaggagatcaagggcgtgcagcaggacgaggccctgcagctgcccaaggacctggactacctgaccatcagagacgtgagcctgagccacgaggtgagagagaagctgcacttcagcagaccccagaccatcggcgccgccagcagaatccccggcgtgacccccgccgccatcatcaacctgctgagattcgtgaagaccacccagagaagacagagcgccatgaacgagagcagcaagaccgaccagtacctgtgcgacgccgacagactgcaggagagagagctgtag

SEQ ID NO: 11520 - DNA, 2154 bp, synthetic construct
  misc_feature 1..2154: note = Description of Artificial Sequence: Synthetic coding sequence
  source 1..2154: mol_type = other DNA
atgttctacttcagaggctgcggcagatgggtggccgtgagcttcaccaagcagcagttccccctggccagactgagcagcgacagcgccgcccccagaaccccccacttcgacgtgatcgtgatcggcggcggccacgccggcaccgaggccgccaccgccgccgccagatgcggcagcagaaccctgctgctgacccacagagtggacaccatcggccagatgagctgcaaccccagcttcggcggcatcggcaagggccacctgatgagagaggtggacgccctggacggcctgtgcagcagaatctgcgaccagagcggcgtgcactacaaggtgctgaacagaagaaagggccccgccgtgtggggcctgagagcccagatcgacagaaagctgtacaagcagaacatgcagaaggagatcctgaacacccccctgctgaccgtgcaggagggcgccgtggaggacctgatcctgaccgagcccgagcccgagcacaccggcaagtgcagagtgagcggcgtggtgctggtggacggcagcaccgtgtacgccgagagcgtgatcctgaccaccggcaccttcctgagaggcatgatcgtgatcggcctggagacccaccccgccggcagactgggcgaccagcccagcatcggcctggcccagaccctggagaagctgggcttcgtggtgggcagactgaagaccggcaccccccccagaatcgccaaggagagcatcaacttcagcatcctgaacaagcacatccccgacaaccccagcatccccttcagcttcaccaacgagaccgtgtggatcaagcccgaggaccagctgccctgctacctgacccacaccaaccccagagtggacgagatcgtgctgaagaacctgcacctgaacagccacgtgaaggagaccaccagaggccccagatactgccccagcatcgagagcaaggtgctgagattccccaacagactgcaccaggtgtggctggagcccgagggcatggacagcgacctgatctacccccagggcctgagcatgaccctgcccgccgagctgcaggagaagatgatcacctgcatcagaggcctggagaaggccaaggtgatccagcccgacggcgtgctgctgctgctgcccagaatggagtgcaacggcgccatcagcgcccaccacaacctgcccctgcccggctacggcgtgcagtacgactacctggaccccagacagatcacccccagcctggagacccacctggtgcagagactgttcttcgccggccagatcaacggcaccaccggctacgaggaggccgccgcccagggcgtgatcgccggcatcaacgccagcctgagagtgagcagaaagccccccttcgtggtgagcagaaccgagggctacatcggcgtgctgatcgacgacctgaccaccctgggcaccagcgagccctacagaatgttcaccagcagagtggagttcagactgagcctgagacccgacaacgccgacagcagactgaccctgagaggctacaaggacgccggctgcgtgagccagcagagatacgagagagcctgctggatgaagagcagcctggaggagggcatcagcgtgctgaagagcatcgagttcctgagcagcaagtggaagaagctgatccccgaggccagcatcagcaccagcagaagcctgcccgtgagagccctggacgtgctgaagtacgaggaggtggacatggacagcctggccaaggccgtgcccgagcccctgaagaagtacaccaagtgcagagagctggccgagagactgaagatcgaggccacctacgagagcgtgctgttccaccagctgcaggagatcaagggcgtgcagcaggacgaggccctgcagctgcccaaggacctggactacctgaccatcagagacgtgagcctgagccacgaggtgagagagaagctgcacttcagcagaccccagaccatcggcgccgccagcagaatccccggcgtgacccccgccgccatcatcaacctgctgagattcgtgaagaccacccagagaagacagagcgccatgaacgagagcagcaagaccgaccagtacctgtgcgacgccgacagactgcaggagagagagctgtag

SEQ ID NO: 11521 - DNA, 1932 bp, synthetic construct
  misc_feature 1..1932: note = Description of Artificial Sequence: Synthetic coding sequence
  source 1..1932: mol_type = other DNA
atgagctgcaaccccagcttcggcggcatcggcaagggccacctgatgagagaggtggacgccctggacggcctgtgcagcagaatctgcgaccagagcggcgtgcactacaaggtgctgaacagaagaaagggccccgccgtgtggggcctgagagcccagatcgacagaaagctgtacaagcagaacatgcagaaggagatcctgaacacccccctgctgaccgtgcaggagggcgccgtggaggacctgatcctgaccgagcccgagcccgagcacaccggcaagtgcagagtgagcggcgtggtgctggtggacggcagcaccgtgtacgccgagagcgtgatcctgaccaccggcaccttcctgagaggcatgatcgtgatcggcctggagacccaccccgccggcagactgggcgaccagcccagcatcggcctggcccagaccctggagaagctgggcttcgtggtgggcagactgaagaccggcaccccccccagaatcgccaaggagagcatcaacttcagcatcctgaacaagcacatccccgacaaccccagcatccccttcagcttcaccaacgagaccgtgtggatcaagcccgaggaccagctgccctgctacctgacccacaccaaccccagagtggacgagatcgtgctgaagaacctgcacctgaacagccacgtgaaggagaccaccagaggccccagatactgccccagcatcgagagcaaggtgctgagattccccaacagactgcaccaggtgtggctggagcccgagggcatggacagcgacctgatctacccccagggcctgagcatgaccctgcccgccgagctgcaggagaagatgatcacctgcatcagaggcctggagaaggccaaggtgatccagcccgacggcgtgctgctgctgctgcccagaatggagtgcaacggcgccatcagcgcccaccacaacctgcccctgcccggctacggcgtgcagtacgactacctggaccccagacagatcacccccagcctggagacccacctggtgcagagactgttcttcgccggccagatcaacggcaccaccggctacgaggaggccgccgcccagggcgtgatcgccggcatcaacgccagcctgagagtgagcagaaagccccccttcgtggtgagcagaaccgagggctacatcggcgtgctgatcgacgacctgaccaccctgggcaccagcgagccctacagaatgttcaccagcagagtggagttcagactgagcctgagacccgacaacgccgacagcagactgaccctgagaggctacaaggacgccggctgcgtgagccagcagagatacgagagagcctgctggatgaagagcagcctggaggagggcatcagcgtgctgaagagcatcgagttcctgagcagcaagtggaagaagctgatccccgaggccagcatcagcaccagcagaagcctgcccgtgagagccctggacgtgctgaagtacgaggaggtggacatggacagcctggccaaggccgtgcccgagcccctgaagaagtacaccaagtgcagagagctggccgagagactgaagatcgaggccacctacgagagcgtgctgttccaccagctgcaggagatcaagggcgtgcagcaggacgaggccctgcagctgcccaaggacctggactacctgaccatcagagacgtgagcctgagccacgaggtgagagagaagctgcacttcagcagaccccagaccatcggcgccgccagcagaatccccggcgtgacccccgccgccatcatcaacctgctgagattcgtgaagaccacccagagaagacagagcgccatgaacgagagcagcaagaccgaccagtacctgtgcgacgccgacagactgcaggagagagagctgtag

SEQ ID NO: 11522 - DNA, 2199 bp, synthetic construct
  misc_feature 1..2199: note = Description of Artificial Sequence: Synthetic coding sequence
  source 1..2199: mol_type = other DNA
atgttctacttcagaggctgcggcagatgggtggccgtgagcttcaccaagcagcagttccccctggccagactgagcagcgacagcgccgcccccagaaccccccacttcgacgtgatcgtgatcggcggcggccacgccggcaccgaggccgccaccgccgccgccagatgcggcagcagaaccctgctgctgacccacagagtggacaccatcggccagatgagctgcaaccccagcttcggcggcatcggcaagggccacctgatgagagaggtggacgccctggacggcctgtgcagcagaatctgcgaccagagcggcgtgcactacaaggtgctgaacagaagaaagggccccgccgtgtggggcctgagagcccagatcgacagaaagctgtacaagcagaacatgcagaaggagatcctgaacacccccctgctgaccgtgcaggagggcgccgtggaggacctgatcctgaccgagcccgagcccgagcacaccggcaagtgcagagtgagcggcgtggtgctggtggacggcagcaccgtgtacgccgagagcgtgatcctgaccaccggcaccttcctgagaggcatgatcgtgatcggcctggagacccaccccgccggcagactgggcgaccagcccagcatcggcctggcccagaccctggagaagctgggcttcgtggtgggcagactgaagaccggcaccccccccagaatcgccaaggagagcatcaacttcagcatcctgaacaagcacatccccgacaaccccagcatccccttcagcttcaccaacgagaccgtgtggatcaagcccgaggaccagctgccctgctacctgacccacaccaaccccagagtggacgagatcgtgctgaagaacctgcacctgaacagccacgtgaaggagaccaccagaggccccagatactgccccagcatcgagagcaaggtgctgagattccccaacagactgcaccaggtgtggctggagcccgagggcatggacagcgacctgatctacccccagggcctgagcatgaccctgcccgccgagctgcaggagaagatgatcacctgcatcagaggcctggagaaggccaaggtgatccagcccggctacggcgtgcagtacgactacctggaccccagacagatcacccccagcctggagacccacctggtgcagagactgttcttcgccggccagatcaacggcaccaccggctacgaggaggccgccgcccagaccgagtgctgcagcgtggccagactggagtgcagcgacatgatcagccagctgcaggccatcctgctgccccagcccagcctggtggccggcaccgccggcatgcaccacaacacccagggcgtgatcgccggcatcaacgccagcctgagagtgagcagaaagccccccttcgtggtgagcagaaccgagggctacatcggcgtgctgatcgacgacctgaccaccctgggcaccagcgagccctacagaatgttcaccagcagagtggagttcagactgagcctgagacccgacaacgccgacagcagactgaccctgagaggctacaaggacgccggctgcgtgagccagcagagatacgagagagcctgctggatgaagagcagcctggaggagggcatcagcgtgctgaagagcatcgagttcctgagcagcaagtggaagaagctgatccccgaggccagcatcagcaccagcagaagcctgcccgtgagagccctggacgtgctgaagtacgaggaggtggacatggacagcctggccaaggccgtgcccgagcccctgaagaagtacaccaagtgcagagagctggccgagagactgaagatcgaggccacctacgagagcgtgctgttccaccagctgcaggagatcaagggcgtgcagcaggacgaggccctgcagctgcccaaggacctggactacctgaccatcagagacgtgagcctgagccacgaggtgagagagaagctgcacttcagcagaccccagaccatcggcgccgccagcagaatccccggcgtgacccccgccgccatcatcaacctgctgagattcgtgaagaccacccagagaagacagagcgccatgaacgagagcagcaagaccgaccagtacctgtgcgacgccgacagactgcaggagagagagctgtag

SEQ ID NO: 11523 - DNA, 2079 bp, synthetic construct
  misc_feature 1..2079: note = Description of Artificial Sequence: Synthetic coding sequence
  source 1..2079: mol_type = other DNA
atgttctacttcagaggctgcggcagatgggtggccgtgagcttcaccaagcagcagttccccctggccagactgagcagcgacagcgccgcccccagaaccccccacttcgacgtgatcgtgatcggcggcggccacgccggcaccgaggccgccaccgccgccgccagatgcggcagcagaaccctgctgctgacccacagagtggacaccatcggccagatgagctgcaaccccagcttcggcggcatcggcaagggccacctgatgagagaggtggacgccctggacggcctgtgcagcagaatctgcgaccagagcggcgtgcactacaaggtgctgaacagaagaaagggccccgccgtgtggggcctgagagcccagatcgacagaaagctgtacaagcagaacatgcagaaggagatcctgaacacccccctgctgaccgtgcaggagggcgccgtggaggacctgatcctgaccgagcccgagcccgagcacaccggcaagtgcagagtgagcggcgtggtgctggtggacggcagcaccgtgtacgccgagagcgtgatcctgaccaccggcaccttcctgagaggcatgatcgtgatcggcctggagacccaccccgccggcagactgggcgaccagcccagcatcggcctggcccagaccctggagaagctgggcttcgtggtgggcagactgaagaccggcaccccccccagaatcgccaaggagagcatcaacttcagcatcctgaacaagcacatccccgacaaccccagcatccccttcagcttcaccaacgagaccgtgtggatcaagcccgaggaccagctgccctgctacctgacccacaccaaccccagagtggacgagatcgtgctgaagaacctgcacctgaacagccacgtgaaggagaccaccagaggccccagatactgccccagcatcgagagcaaggtgctgagattccccaacagactgcaccaggtgtggctggagcccgagggcatggacagcgacctgatctacccccagggcctgagcatgaccctgcccgccgagctgcaggagaagatgatcacctgcatcagaggcctggagaaggccaaggtgatccagcccggctacggcgtgcagtacgactacctggaccccagacagatcacccccagcctggagacccacctggtgcagagactgttcttcgccggccagatcaacggcaccaccggctacgaggaggccgccgcccagggcgtgatcgccggcatcaacgccagcctgagagtgagcagaaagccccccttcgtggtgagcagaaccgagggctacatcggcgtgctgatcgacgacctgaccaccctgggcaccagcgagccctacagaatgttcaccagcagagtggagttcagactgagcctgagacccgacaacgccgacagcagactgaccctgagaggctacaaggacgccggctgcgtgagccagcagagatacgagagagcctgctggatgaagagcagcctggaggagggcatcagcgtgctgaagagcatcgagttcctgagcagcaagtggaagaagctgatccccgaggccagcatcagcaccagcagaagcctgcccgtgagagccctggacgtgctgaagtacgaggaggtggacatggacagcctggccaaggccgtgcccgagcccctgaagaagtacaccaagtgcagagagctggccgagagactgaagatcgaggccacctacgagagcgtgctgttccaccagctgcaggagatcaagggcgtgcagcaggacgaggccctgcagctgcccaaggacctggactacctgaccatcagagacgtgagcctgagccacgaggtgagagagaagctgcacttcagcagaccccagaccatcggcgccgccagcagaatccccggcgtgacccccgccgccatcatcaacctgctgagattcgtgaagaccacccagagaagacagagcgccatgaacgagagcagcaagaccgaccagtacctgtgcgacgccgacagactgcaggagagagagctgtag

SEQ ID NO: 11524 - DNA, 381 bp, synthetic construct
  misc_feature 1..381: note = Description of Artificial Sequence: Synthetic coding sequence
  source 1..381: mol_type = other DNA
atgagcatcggcgtgcccatcaaggtgctgcacgaggccgagggccacatcgtgacctgcgagaccaacaccggcgaggtgtacagaggcaagctgatcgaggccgaggacaacatgaactgccagatgagcaacatcaccgtgacctacagagacggcagagtggcccagctggagcaggtgtacatcagaggcagcaagatcagattcctgatcctgcccgacatgctgaagaacgcccccatgctgaagagcatgaagaacaagaaccagggcagcggcgccggcagaggcaaggccgccatcctgaaggcccaggtggccgccagaggcagaggcagaggcatgggcagaggcaacatcttccagaagagaagatag

SEQ ID NO: 11525 - DNA, 1083 bp, synthetic construct
  misc_feature 1..1083: note = Description of Artificial Sequence: Synthetic coding sequence
  source 1..1083: mol_type = other DNA
atggccgccgccgccgccgccggcgccggccccgagatggtgagaggccaggtgttcgacgtgggccccagatacaccaacctgagctacatcggcgagggcgcctacggcatggtgtgcagcgcctacgacaacgtgaacaaggtgagagtggccatcaagaagatcagccccttcgagcaccagacctactgccagagaaccctgagagagatcaagatcctgctgagattcagacacgagaacatcatcggcatcaacgacatcatcagagcccccaccatcgagcagatgaaggacgtgtacatcgtgcaggacctgatggagaccgacctgtacaagctgctgaagacccagcacctgagcaacgaccacatctgctacttcctgtaccagatcctgagaggcctgaagtacatccacagcgccaacgtgctgcacagagacctgaagcccagcaacctgctgctgaacaccacctgcgacctgaagatctgcgacttcggcctggccagagtggccgaccccgaccacgaccacaccggcttcctgaccgagtacgtggccaccagatggtacagagcccccgagatcatgctgaacagcaagggctacaccaagagcatcgacatctggagcgtgggctgcatcctggccgagatgctgagcaacagacccatcttccccggcaagcactacctggaccagctgaaccacatcctgggcatcctgggcagccccagccaggaggacctgaactgcatcatcaacctgaaggccagaaactacctgctgagcctgccccacaagaacaaggtgccctggaacagactgttccccaacgccgacagcaaggccctggacctgctggacaagatgctgaccttcaacccccacaagagaatcgaggtggagcaggccctggcccacccctacctggagcagtactacgaccccagcgacgagcccatcgccgaggcccccttcaagttcgacatggagctggacgacctgcccaaggagaagctgaaggagctgatcttcgaggagaccgccagattccagcccggctacagaagctag

SEQ ID NO: 11526 - DNA, 1047 bp, synthetic construct
  misc_feature 1..1047: note = Description of Artificial Sequence: Synthetic coding sequence
  source 1..1047: mol_type = other DNA
atggtgagaggccaggtgttcgacgtgggccccagatacaccaacctgagctacatcggcgagggcgcctacggcatggtgtgcagcgcctacgacaacgtgaacaaggtgagagtggccatcaagaagatcagccccttcgagcaccagacctactgccagagaaccctgagagagatcaagatcctgctgagattcagacacgagaacatcatcggcatcaacgacatcatcagagcccccaccatcgagcagatgaaggacgtgtacatcgtgcaggacctgatggagaccgacctgtacaagctgctgaagacccagcacctgagcaacgaccacatctgctacttcctgtaccagatcctgagaggcctgaagtacatccacagcgccaacgtgctgcacagagacctgaagcccagcaacctgctgctgaacaccacctgcgacctgaagatctgcgacttcggcctggccagagtggccgaccccgaccacgaccacaccggcttcctgaccgagtacgtggccaccagatggtacagagcccccgagatcatgctgaacagcaagggctacaccaagagcatcgacatctggagcgtgggctgcatcctggccgagatgctgagcaacagacccatcttccccggcaagcactacctggaccagctgaaccacatcctgggcatcctgggcagccccagccaggaggacctgaactgcatcatcaacctgaaggccagaaactacctgctgagcctgccccacaagaacaaggtgccctggaacagactgttccccaacgccgacagcaaggccctggacctgctggacaagatgctgaccttcaacccccacaagagaatcgaggtggagcaggccctggcccacccctacctggagcagtactacgaccccagcgacgagcccatcgccgaggcccccttcaagttcgacatggagctggacgacctgcccaaggagaagctgaaggagctgatcttcgaggagaccgccagattccagcccggctacagaagctag

SEQ ID NO: 11527 - DNA, 951 bp, synthetic construct
  misc_feature 1..951: note = Description of Artificial Sequence: Synthetic coding sequence
  source 1..951: mol_type = other DNA
atggccgccgccgccgccgccggcgccggccccgagatggtgagaggccaggtgttcgacgtgggccccagatacaccaacctgagctacatcggcgagggcgcctacggcatggtgtgcagcgcctacgacaacgtgaacaaggtgagagtggccatcaagaagatcagccccttcgagcaccagacctactgccagagaaccctgagagagatcaagatcctgctgagattcagacacgagaacatcatcggcatcaacgacatcatcagagcccccaccatcgagcagatgaaggacgtgtacatcgtgcaggacctgatggagaccgacctgtacaagctgctgaagacccagcacctgagcaacgaccacatctgctacttcctgtaccagatcctgagaggcctgaagtacatccacagcgccaacgtgctgcacagagacctgaagcccagcaacctgctgctgaacaccacctgcgacctgaagatctgcgacttcggcctggccagagtggccgaccccgaccacgaccacaccggcttcctgaccgagtacgtggccaccagatggtacagagcccccgagatcatgctgaacagcaagggctacaccaagagcatcgacatctggagcgtgggctgcatcctggccgagatgctgagcaacagacccatcttccccggcaagcactacctggaccagctgaaccacatcctggccctggacctgctggacaagatgctgaccttcaacccccacaagagaatcgaggtggagcaggccctggcccacccctacctggagcagtactacgaccccagcgacgagcccatcgccgaggcccccttcaagttcgacatggagctggacgacctgcccaaggagaagctgaaggagctgatcttcgaggagaccgccagattccagcccggctacagaagctag

SEQ ID NO: 11528 - DNA, 1095 bp, synthetic construct
  misc_feature 1..1095: note = Description of Artificial Sequence: Synthetic coding sequence
  source 1..1095: mol_type = other DNA
atgagcggccccagagccggcttctacagacaggagctgaacaagaccgtgtgggaggtgccccagagactgcagggcctgagacccgtgggcagcggcgcctacggcagcgtgtgcagcgcctacgacgccagactgagacagaaggtggccgtgaagaagctgagcagacccttccagagcctgatccacgccagaagaacctacagagagctgagactgctgaagcacctgaagcacgagaacgtgatcggcctgctggacgtgttcacccccgccaccagcatcgaggacttcagcgaggtgtacctggtgaccaccctgatgggcgccgacctgaacaacatcgtgaagtgccaggccctgagcgacgagcacgtgcagttcctggtgtaccagctgctgagaggcctgaagtacatccacagcgccggcatcatccacagagacctgaagcccagcaacgtggccgtgaacgaggactgcgagctgagaatcctggacttcggcctggccagacaggccgacgaggagatgaccggctacgtggccaccagatggtacagagcccccgagatcatgctgaactggatgcactacaaccagaccgtggacatctggagcgtgggctgcatcatggccgagctgctgcagggcaaggccctgttccccggcagcgactacatcgaccagctgaagagaatcatggaggtggtgggcacccccagccccgaggtgctggccaagatcagcagcgagcacgccagaacctacatccagagcctgccccccatgccccagaaggacctgagcagcatcttcagaggcgccaaccccctggccatcgacctgctgggcagaatgctggtgctggacagcgaccagagagtgagcgccgccgaggccctggcccacgcctacttcagccagtaccacgaccccgaggacgagcccgaggccgagccctacgacgagagcgtggaggccaaggagagaaccctggaggagtggaaggagctgacctaccaggaggtgctgagcttcaagccccccgagccccccaagccccccggcagcctggagatcgagcagtag

SEQ ID NO: 11529 - DNA, 1095 bp, synthetic construct; identical to SEQ ID NO: 11528
  misc_feature 1..1095: note = Description of Artificial Sequence: Synthetic coding sequence
  source 1..1095: mol_type = other DNA

SEQ ID NO: 11530 - DNA, 642 bp, synthetic construct
  misc_feature 1..642: note = Description of Artificial Sequence: Synthetic coding sequence
  source 1..642: mol_type = other DNA
atgggcgccgacctgaacaacatcgtgaagtgccaggccctgagcgacgagcacgtgcagttcctggtgtaccagctgctgagaggcctgaagtacatccacagcgccggcatcatccacagagacctgaagcccagcaacgtggccgtgaacgaggactgcgagctgagaatcctggacttcggcctggccagacaggccgacgaggagatgaccggctacgtggccaccagatggtacagagcccccgagatcatgctgaactggatgcactacaaccagaccggcgccggcggcagaccctggggcgacgagggccagggccccagactggccctggactggctgtgcatgcccggcctgagaggccaggccagaagccccagaatgtgggacccccacagcaaggtggccctgcagagacccctggagcacgacggctgctggccccccctggccgtgcagctgtggaccagcccctgcctgggcggcctgggcatggccgaggagggcgtgtgccccagctggggcctggacgtgaccgtgggcctgctggaggagggcagaggcgtgggcaccctgatggaggtgcccagccccagccacagcggctacctggtgagaggcctgcaccacggctag

SEQ ID NO: 11531 - DNA, 1149 bp, synthetic construct
  misc_feature 1..1149: note = Description of Artificial Sequence: Synthetic coding sequence
  source 1..1149: mol_type = other DNA
atggacttcggcctggccctgctgctggccggcctgctgggcctgctgctgggccagagcctgcaggtgaagcccctgcaggtggagccccccgagcccgtggtggccgtggccctgggcgccagcagacagctgacctgcagactggcctgcgccgacagaggcgccagcgtgcagtggagaggcctggacaccagcctgggcgccgtgcagagcgacaccggcagaagcgtgctgaccgtgagaaacgccagcctgagcgccgccggcaccagagtgtgcgtgggcagctgcggcggcagaaccttccagcacaccgtgcagctgctggtgtacgccttccccgaccagctgaccgtgagccccgccgccctggtgcccggcgaccccgaggtggcctgcaccgcccacaaggtgacccccgtggaccccaacgccctgagcttcagcctgctggtgggcggccaggagctggagggcgcccaggccctgggccccgaggtgcaggaggaggaggaggagccccagggcgacgaggacgtgctgttcagagtgaccgagagatggagactgccccccctgggcacccccgtgccccccgccctgtactgccaggccaccatgagactgcccggcctggagctgagccacagacaggccatccccgtgctgcacagccccaccagccccgagccccccgacaccaccagccccgagagccccgacaccaccagccccgagagccccgacaccaccagccaggagccccccgacaccaccagccccgagccccccgacaagaccagccccgagcccgccccccagcagggcagcacccacacccccagaagccccggcagcaccagaaccagaagacccgagatcagccaggccggccccacccagggcgaggtgatccccaccggcagcagcaagcccgccggcgaccagctgcccgccgccctgtggaccagcagcgccgtgctgggcctgctgctgctggccctgcccacctaccacctgtggaagagatgcagacacctggccgaggacgacacccacccccccgccagcctgagactgctgccccaggtgagcgcctgggccggcctgagaggcaccggccaggtgggcatcagccccagctag

SEQ ID NO: 11532 - DNA, 1074 bp, synthetic construct
  misc_feature 1..1074: note = Description of Artificial Sequence: Synthetic coding sequence
  source 1..1074: mol_type = other DNA
atgagcagccccccccccgccagaagcggcttctacagacaggaggtgaccaagaccgcctgggaggtgagagccgtgtacagagacctgcagcccgtgggcagcggcgcctacggcgccgtgtgcagcgccgtggacggcagaaccggcgccaaggtggccatcaagaagctgtacagacccttccagagcgagctgttcgccaagagagcctacagagagctgagactgctgaagcacatgagacacgagaacgtgatcggcctgctggacgtgttcacccccgacgagaccctggacgacttcaccgacttctacctggtgatgcccttcatgggcaccgacctgggcaagctgatgaagcacgagaagctgggcgaggacagaatccagttcctggtgtaccagatgctgaagggcctgagagacctgaagcccggcaacctggccgtgaacgaggactgcgagctgaagatcctggacttcggcctggccagacaggccgacagcgagatgaccggctacgtggtgaccagatggtacagagcccccgaggtgatcctgaactggatgagatacacccagaccgtggacatctggagcgtgggctgcatcatggccgagatgatcaccggcaagaccctgttcaagggcagcgaccacctggaccagctgaaggagatcatgaaggtgaccggcaccccccccgccgagttcgtgcagagactgcagagcgacgaggccaagaactacatgaagggcctgcccgagctggagaagaaggacttcgccagcatcctgaccaacgccagccccctggccgtgaacctgctggagaagatgctggtgctggacgccgagcagagagtgaccgccggcgaggccctggcccacccctacttcgagagcctgcacgacaccgaggacgagccccaggtgcagaagtacgacgacagcttcgacgacgtggacagaaccctggacgagtggaagagagtgacctacaaggaggtgctgagcttcaagccccccagacagctgggcgccagagtgagcaaggagacccccctgtag

SEQ ID NO: 11533 - DNA, 837 bp, synthetic construct
  misc_feature 1..837: note = Description of Artificial Sequence: Synthetic coding sequence
  source 1..837: mol_type = other DNA
atggccctgctgcccgtgctgttcctggtgaccgtgctgctgcccagcctgcccgccgagggcaaggaccccgccttcaccgccctgctgaccacccagctgcaggtgcagagagagatcgtgaacaagcacaacgagctgagaaaggccgtgagcccccccgccagcaacatgctgaagatggagtggagcagagaggtgaccaccaacgcccagagatgggccaacaagtgcaccctgcagcacagcgaccccgaggacagaaagaccagcaccagatgcggcgagaacctgtacatgagcagcgaccccaccagctggagcagcgccatccagagctggtacgacgagatcctggacttcgtgtacggcgtgggccccaagagccccaacgccgtggtgggccactacacccagctggtgtggtacagcacctaccaggtgggctgcggcatcgcctactgccccaaccaggacagcctgaagtactactacgtgtgccagtactgccccgccatgaagacctacctgaacaagagagagggcatcaacgtgtggaagtgcttcctgagactgagacacttccagctgctgagaggcgagcagctgctgaccttcagcggcaacaacatgaacagaaagaacaccccctaccagcagggcaccccctgcgccggctgccccgacgactgcgacaagggcctgtgcaccaacagctgccagtaccaggacctgctgagcaactgcgacagcctgaagaacaccgccggctgcgagcacgagctgctgaaggagaagtgcaaggccacctgcctgtgcgagaacaagatctactag

SEQ ID NO: 11534 - DNA, 459 bp, synthetic construct
  misc_feature 1..459: note = Description of Artificial Sequence: Synthetic coding sequence
  source 1..459: mol_type = other DNA
atgcagcacgagaacgtgatcggcctgctggacgtgttcacccccgccagcagcctgagaaacttctacgacttctacctggtgatgcccttcatgcagaccgacctgcagaagatcatgggcatggagttcagcgaggagaagatccagtacctggtgtaccagatgctgaagggcctgaagtacatccacagcgccggcgtggtgcacagagacctgaagcccggcaacctggccgtgaacgaggactgcgagctgaagatcctggacttcggcctggccagacacgccgacgccgagatgaccggctacgtggtgaccagatggtacagagcccccgaggtgatcctgagctggatgcactacaaccagaccggccagatcctgcaccccgtgcccgccaccgacccccaggagggcttccacagcgccgtgcccaccggccagccccccggctag

SEQ ID NO: 11535 - DNA, 1068 bp, synthetic construct
  misc_feature 1..1068: note = Description of Artificial Sequence: Synthetic coding sequence
  source 1..1068: mol_type = other DNA
atgagcctgatcagaaagaagggcttctacaagcaggacgtgaacaagaccgcctgggagctgcccaagacctacgtgagccccacccacgtgggcagcggcgcctacggcagcgtgtgcagcgccatcgacaagagaagcggcgagaaggtggccatcaagaagctgagcagacccttccagagcgagatcttcgccaagagagcctacagagagctgctgctgctgaagcacatgcagcacgagaacgtgatcggcctgctggacgtgttcacccccgccagcagcctgagaaacttctacgacttctacctggtgatgcccttcatgcagaccgacctgcagaagatcatgggcatggagttcagcgaggagaagatccagtacctggtgtaccagatgctgaagggcctgaaggacctgaagcccggcaacctggccgtgaacgaggactgcgagctgaagatcctggacttcggcctggccagacacgccgacgccgagatgaccggctacgtggtgaccagatggtacagagcccccgaggtgatcctgagctggatgcactacaaccagaccgtggacatctggagcgtgggctgcatcatggccgagatgctgaccggcaagaccctgttcaagggcaaggactacctggaccagctgacccagatcctgaaggtgaccggcgtgcccggcaccgagttcgtgcagaagctgaacgacaaggccgccaagagctacatccagagcctgccccagacccccagaaaggacttcacccagctgttccccagagccagcccccaggccgccgacctgctggagaagatgctggagctggacgtggacaagagactgaccgccgcccaggccctgacccaccccttcttcgagcccttcagagaccccgaggaggagaccgaggcccagcagcccttcgacgacagcctggagcacgagaagctgaccgtggacgagtggaagcagcacatctacaaggagatcgtgaacttcagccccatcgccagaaaggacagcagaagaagaagcggcatgaagctgtag

SEQ ID NO: 11536 - DNA, 774 bp, synthetic construct
  misc_feature 1..774: note = Description of Artificial Sequence: Synthetic coding sequence
  source 1..774: mol_type = other DNA
atgagcctgatcagaaagaagggcttctacaagcaggacgtgaacaagaccgcctgggagctgcccaagacctacgtgagccccacccacgtgggcagcggcgcctacggcagcgtgtgcagcgccatcgacaagagaagcggcgagaaggtggccatcaagaagctgagcagacccttccagagcgagatcttcgccaagagagcctacagagagctgctgctgctgaagcacatgcagcacgagaacgtgatcggcctgctggacgtgttcacccccgccagcagcctgagaaacttctacgacttctacctggtgatgcccttcatgcagaccgacctgcagaagatcatgggcatggagttcagcgaggagaagatccagtacctggtgtaccagatgctgaagggcctgaagtacatccacagcgccggcgtggtgcacagagacctgaagcccggcaacctggccgtgaacgaggactgcgagctgaagatcctggacttcggcctggccagacacgccgacgccgagatgaccggctacgtggtgaccagatggtacagagcccccgaggtgatcctgagctggatgcactacaaccagaccggccagatcctgcaccccgtgcccgccaccgacccccaggagggcttccacagcgccgtgcccaccggccagccccccggctgcggccccgccggcgaggacgccggcgccagaagaggccaggcccccgacggcagagccggcccccaccccagcctgctgtag

SEQ ID NO: 11537 - DNA, 933 bp, synthetic construct
  misc_feature 1..933: note = Description of Artificial Sequence: Synthetic coding sequence
  source 1..933: mol_type = other DNA
atgagcctgatcagaaagaagggcttctacaagcaggacgtgaacaagaccgcctgggagctgcccaagacctacgtgagccccacccacgtgggcagcggcgcctacggcagcgtgtgcagcgccatcgacaagagaagcggcgagaaggtggccatcaagaagctgagcagacccttccagagcgagatcttcgccaagagagcctacagagagctgctgctgctgaagcacatgcagcacgagaacgtgatcggcctgctggacgtgttcacccccgccagcagcctgagaaacttctacgacttctacctggtgatgcccttcatgcagaccgacctgcagaagatcatgggcatggagttcagcgaggagaagatccagtacctggtgtaccagatgctgaagggcctgaagtacatccacagcgccggcgtggtgcacagagacctgaagcccggcaacctggccgtgaacgaggactgcgagctgaagatcctggacttcggcctggccagacacgccgacgccgagatgaccggctacgtggtgaccagatggtacagagcccccgaggtgatcctgagctggatgcactacaaccagaccgtggacatctggagcgtgggctgcatcatggccgagatgctgaccggcaagaccctgttcaagggcaaggactacctgctggagaagatgctggagctggacgtggacaagagactgaccgccgcccaggccctgacccaccccttcttcgagcccttcagagaccccgaggaggagaccgaggcccagcagcccttcgacgacagcctggagcacgagaagctgaccgtggacgagtggaagcagcacatctacaaggagatcgtgaacttcagccccatcgccagaaaggacagcagaagaagaagcggcatgaagctgtag

SEQ ID NO: 11538 - DNA, 1629 bp, synthetic construct
  misc_feature 1..1629: note = Description of Artificial Sequence: Synthetic coding sequence
  source 1..1629: mol_type = other DNA
atgcccctgagagacgagaccctgagagaggtgtgggccagcgacagcggccacgaggaggagagcctgagccccgaggcccccagaagacccaagcagagacccgcccccgcccagagactgagaaagaagagaaccgaggcccccgagagcccctgccccaccggcagcaagcccagaaagcccggcgccggcagaaccggcagacccagagaggagcccagccccgaccccgcccaggccagagccccccagaccgtgtacgccagattcctgagagaccccgaggccaagaagagagaccccagagagaccttcctggtggccagagcccccgacgccgaggacgaggaggaggaggaggaggaggacgaggaggacgaggaggaggaggccgaggagaagaaggagaagatcctgctgccccccaagaagcccctgagagagaagagcagcgccgacctgaaggagagaagagccaaggcccagggccccagaggcgacctgggcagccccgaccccccccccaagcccctgagagtgagaaacaaggaggcccccgccggcgagggcaccaagatgagaaagaccaagaagaagggcagcggcgaggccgacaaggaccccagcggcagccccgccagcgccagaaagagccccgccgccatgttcctggtgggcgagggcagccccgacaagaaggccctgaagaagaagggcacccccaagggcgccagaaaggaggaggaggaggaggaggaggccgccaccgtgatcaagaagagcaaccagaagggcaaggccaagggcaagggcaagaagaaggccaaggaggagagagcccccagcccccccgtggaggtggacgagcccagagagttcgtgctgagacccgccccccagggcagaaccgtgagatgcagactgaccagagacaagaagggcatggacagaggcatgtaccccagctacttcctgcacctggacaccgagaagaaggtgttcctgctggccggcagaaagagaaagagaagcaagaccgccaactacctgatcagcatcgaccccaccaacctgagcagaggcggcgagaacttcatcggcaagctgagaagcaacctgctgggcaacagattcaccgtgttcgacaacggccagaacccccagagaggctacagcaccaacgtggccagcctgagacaggagctggccgccgtgatctacgagaccaacgtgctgggcttcagaggccccagaagaatgaccgtgatcatccccggcatgagcgccgagaacgagagagtgcccatcagacccagaaacgccagcgacggcctgctggtgagatggcagaacaagaccctggagagcctgatcgagctgcacaacaagccccccgtgtggaacgacgacagcggcagctacaccctgaacttccagggcagagtgacccaggccagcgtgaagaacttccagatcgtgcacgccgacgaccccgactacatcgtgctgcagttcggcagagtggccgaggacgccttcaccctggactacagataccccctgtgcgccctgcaggccttcgccatcgccctgagcagcttcgacggcaagctggcctgcgagtag

SEQ ID NO: 11539 - DNA, 1083 bp, synthetic construct
  misc_feature 1..1083: note = Description of Artificial Sequence: Synthetic coding sequence
  source 1..1083: mol_type = other DNA
atgagccaggagagacccaccttctacagacaggagctgaacaagaccatctgggaggtgcccgagagataccagaacctgagccccgtgggcagcggcgcctacggcagcgtgtgcgccgccttcgacaccaagaccggcctgagagtggccgtgaagaagctgagcagacccttccagagcatcatccacgccaagagaacctacagagagctgagactgctgaagcacatgaagcacgagaacgtgatcggcctgctggacgtgttcacccccgccagaagcctggaggagttcaacgacgtgtacctggtgacccacctgatgggcgccgacctgaacaacatcgtgaagtgccagaagctgaccgacgaccacgtgcagttcctgatctaccagatcctgagaggcctgaagtacatccacagcgccgacatcatccacagagacctgaagcccagcaacctggccgtgaacgaggactgcgagctgaagatcctggacttcggcctggccagacacaccgacgacgagatgaccggctacgtggccaccagatggtacagagcccccgagatcatgctgaactggatgcactacaaccagaccgtggacatctggagcgtgggctgcatcatggccgagctgctgaccggcagaaccctgttccccggcaccgaccacatcgaccagctgaagctgatcctgagactggtgggcacccccggcgccgagctgctgaagaagatcagcagcgagagcgccagaaactacatccagagcctgacccagatgcccaagatgaacttcgccaacgtgttcatcggcgccaaccccctggccgtggacctgctggagaagatgctggtgctggacagcgacaagagaatcaccgccgcccaggccctggcccacgcctacttcgcccagtaccacgaccccgacgacgagcccgtggccgacccctacgaccagagcttcgagagcagagacctgctgatcgacgagtggaagagcctgacctacgacgaggtgatcagcttcgtgcccccccccctggaccaggaggagatggagagctag

SEQ ID NO: 11540 - DNA, 924 bp, synthetic construct
  misc_feature 1..924: note = Description of Artificial Sequence: Synthetic coding sequence
  source 1..924: mol_type = other DNA
atgagccaggagagacccaccttctacagacaggagctgaacaagaccatctgggaggtgcccgagagataccagaacctgagccccgtgggcagcggcgcctacggcagcgtgtgcgccgccttcgacaccaagaccggcctgagagtggccgtgaagaagctgagcagacccttccagagcatcatccacgccaagagaacctacagagagctgagactgctgaagcacatgaagcacgagaacgtgatcggcctgctggacgtgttcacccccgccagaagcctggaggagttcaacgacgtgtacctggtgacccacctgatgggcgccgacctgaacaacatcgtgaagtgccagaagctgaccgacgaccacgtgcagttcctgatctaccagatcctgagaggcctgaagtacatccacagcgccgacatcatccacagagacctgaagcccagcaacctggccgtgaacgaggactgcgagctgaagatcctggacttcggcctggccagacacaccgacgacgagatgaccggctacgtggccaccagatggtacagagcccccgagatcatgctgaactggatgcactacaaccagaccgtggacatctggagcgtgggctgcatcatggccgagctgctgaccggcagaaccctgttccccggcaccgaccacatcgaccagctgaagctgatcctgagactggtgggcacccccggcgccgagctgctgaagaagatcagcagcgagagcctgagcacctgctggagaagatgcctgtactggacccagatcagagagctgcagagacccaagcccctgcacatgcccaccctgctgagcaccaccatcctgatgatgaaccagtggcccatcctgatgatcagccccctgaaggccggcaccagcctgtag

SEQ ID NO: 11541 - DNA, 852 bp, synthetic construct
  misc_feature 1..852: note = Description of Artificial Sequence: Synthetic coding sequence
  source 1..852: mol_type = other DNA
atgaagcacgagaacgtgatcggcctgctggacgtgttcacccccgccagaagcctggaggagttcaacgacgtgtacctggtgacccacctgatgggcgccgacctgaacaacatcgtgaagtgccagaagctgaccgacgaccacgtgcagttcctgatctaccagatcctgagaggcctgaagtacatccacagcgccgacatcatccacagagacctgaagcccagcaacctggccgtgaacgaggactgcgagctgaagatcctggacttcggcctggccagacacaccgacgacgagatgaccggctacgtggccaccagatggtacagagcccccgagatcatgctgaactggatgcactacaaccagaccgtggacatctggagcgtgggctgcatcatggccgagctgctgaccggcagaaccctgttccccggcaccgaccacatcgaccagctgaagctgatcctgagactggtgggcacccccggcgccgagctgctgaagaagatcagcagcgagagcgccagaaactacatccagagcctgacccagatgcccaagatgaacttcgccaacgtgttcatcggcgccaaccccctggccgtggacctgctggagaagatgctggtgctggacagcgacaagagaatcaccgccgcccaggccctggcccacgcctacttcgcccagtaccacgaccccgacgacgagcccgtggccgacccctacgaccagagcttcgagagcagagacctgctgatcgacgagtggaagagcctgacctacgacgaggtgatcagcttcgtgcccccccccctggaccaggaggagatggagagctag

SEQ ID NO: 11542 - DNA, 1140 bp, synthetic construct
  misc_feature 1..1140: note = Description of Artificial Sequence: Synthetic coding sequence
  source 1..1140: mol_type = other DNA
atggccgccgccgccgcccagggcggcggcggcggcgagcccagaagaaccgagggcgtgggccccggcgtgcccggcgaggtggagatggtgaagggccagcccttcgacgtgggccccagatacacccagctgcagtacatcggcgagggcgcctacggcatggtgagcagcgcctacgaccacgtgagaaagaccagagtggccatcaagaagatcagccccttcgagcaccagacctactgccagagaaccctgagagagatccagatcctgctgagattcagacacgagaacgtgatcggcatcagagacatcctgagagccagcaccctggaggccatgagagacgtgtacatcgtgcaggacctgatggagaccgacctgtacaagctgctgaagagccagcagctgagcaacgaccacatctgctacttcctgtaccagatcctgagaggcctgaagtacatccacagcgccaacgtgctgcacagagacctgaagcccagcaacctgctgatcaacaccacctgcgacctgaagatctgcgacttcggcctggccagaatcgccgaccccgagcacgaccacaccggcttcctgaccgagtacgtggccaccagatggtacagagcccccgagatcatgctgaacagcaagggctacaccaagagcatcgacatctggagcgtgggctgcatcctggccgagatgctgagcaacagacccatcttccccggcaagcactacctggaccagctgaaccacatcctgggcatcctgggcagccccagccaggaggacctgaactgcatcatcaacatgaaggccagaaactacctgcagagcctgcccagcaagaccaaggtggcctgggccaagctgttccccaagagcgacagcaaggccctggacctgctggacagaatgctgaccttcaaccccaacaagagaatcaccgtggaggaggccctggcccacccctacctggagcagtactacgaccccaccgacgagcccgtggccgaggagcccttcaccttcgccatggagctggacgacctgcccaaggagagactgaaggagctgatcttccaggagaccgccagattccagcccggcgtgctggaggccccctag

SEQ ID NO: 11543 - DNA, 1008 bp, synthetic construct
  misc_feature 1..1008: note = Description of Artificial Sequence: Synthetic coding sequence
  source 1..1008: mol_type = other DNA
atggccgccgccgccgcccagggcggcggcggcggcgagcccagaagaaccgagggcgtgggccccggcgtgcccggcgaggtggagatggtgaagggccagcccttcgacgtgggccccagatacacccagctgcagtacatcggcgagggcgcctacggcatggtgagcagcgcctacgaccacgtgagaaagaccagagtggccatcaagaagatcagccccttcgagcaccagacctactgccagagaaccctgagagagatccagatcctgctgagattcagacacgagaacgtgatcggcatcagagacatcctgagagccagcaccctggaggccatgagagacgtgtacatcgtgcaggacctgatggagaccgacctgtacaagctgctgaagagccagcagctgagcaacgaccacatctgctacttcctgtaccagatcctgagaggcctgaagtacatccacagcgccaacgtgctgcacagagacctgaagcccagcaacctgctgatcaacaccacctgcgacctgaagatctgcgacttcggcctggccagaatcgccgaccccgagcacgaccacaccggcttcctgaccgagtacgtggccaccagatggtacagagcccccgagatcatgctgaacagcaagggctacaccaagagcatcgacatctggagcgtgggctgcatcctggccgagatgctgagcaacagacccatcttccccggcaagcactacctggaccagctgaaccacatcctggccctggacctgctggacagaatgctgaccttcaaccccaacaagagaatcaccgtggaggaggccctggcccacccctacctggagcagtactacgaccccaccgacgagcccgtggccgaggagcccttcaccttcgccatggagctggacgacctgcccaaggagagactgaaggagctgatcttccaggagaccgccagattccagcccggcgtgctggaggccccctag

SEQ ID NO: 11544 - DNA, 936 bp, synthetic construct
  misc_feature 1..936: note = Description of Artificial Sequence: Synthetic coding sequence
  source 1..936: mol_type = other DNA
atggtgaagggccagcccttcgacgtgggccccagatacacccagctgcagtacatcggcgagggcgcctacggcatggtgagcagcgcctacgaccacgtgagaaagaccagagtggccatcaagaagatcagccccttcgagcaccagacctactgccagagaaccctgagagagatccagatcctgctgagattcagacacgagaacgtgatcggcatcagagacatcctgagagccagcaccctggaggccatgagagacgtgtacatcgtgcaggacctgatggagaccgacctgtacaagctgctgaagagccagcagctgagcaacgaccacatctgctacttcctgtaccagatcctgagaggcctgaagtacatccacagcgccaacgtgctgcacagagacctgaagcccagcaacctgctgatcaacaccacctgcgacctgaagggctacaccaagagcatcgacatctggagcgtgggctgcatcctggccgagatgctgagcaacagacccatcttccccggcaagcactacctggaccagctgaaccacatcctgggcatcctgggcagccccagccaggaggacctgaactgcatcatcaacatgaaggccagaaactacctgcagagcctgcccagcaagaccaaggtggcctgggccaagctgttccccaagagcgacagcaaggccctggacctgctggacagaatgctgaccttcaaccccaacaagagaatcaccgtggaggaggccctggcccacccctacctggagcagtactacgaccccaccgacgagcccgtggccgaggagcccttcaccttcgccatggagctggacgacctgcccaaggagagactgaaggagctgatcttccaggagaccgccagattccagcccggcgtgctggaggccccctag

SEQ ID NO: 11545 - DNA, 1008 bp, synthetic construct; identical to SEQ ID NO: 11543
  misc_feature 1..1008: note = Description of Artificial Sequence: Synthetic coding sequence
  source 1..1008: mol_type = other DNA

SEQ ID NO: 11546 - DNA, 1074 bp, synthetic construct
  misc_feature 1..1074: note = Description of Artificial Sequence: Synthetic coding sequence
  source 1..1074: mol_type = other DNA
atggccgccgccgccgcccagggcggcggcggcggcgagcccagaagaaccgagggcgtgggccccggcgtgcccggcgaggtggagatggtgaagggccagcccttcgacgtgggccccagatacacccagctgcagtacatcggcgagggcgcctacggcatggtgagcagcgcctacgaccacgtgagaaagaccagagtggccatcaagaagatcagccccttcgagcaccagacctactgccagagaaccctgagagagatccagatcctgctgagattcagacacgagaacgtgatcggcatcagagacatcctgagagccagcaccctggaggccatgagagacgtgtacatcgtgcaggacctgatggagaccgacctgtacaagctgctgaagagccagcagctgagcaacgaccacatctgctacttcctgtaccagatcctgagaggcctgaagtacatccacagcgccaacgtgctgcacagagacctgaagcccagcaacctgctgatcaacaccacctgcgacctgaagatctgcgacttcggcctggccagaatcgccgaccccgagcacgaccacaccggcttcctgaccgagtacgtggccaccagatggtacagagcccccgagatcatgctgaacagcaagggctacaccaagagcatcgacatctggagcgtgggctgcatcctggccgagatgctgagcaacagacccatcttccccggcaagcactacctggaccagctgaaccacatcctgggcatcctgggcagccccagccaggaggacctgaactgcatcatcaacatgaaggccagaaactacctgcagagcctgcccagcaagaccaaggtggcctgggccaagctgttccccaagagcgacagcaaggccctggacctgctggacagaatgctgaccttcaaccccaacaagagaatcaccgtggaggaggccctggcccacccctacctggagcagtactacgaccccaccgacgaggtgggccagagccccgccgccgtgggcctgggcgccggcgagcagggcggcacctag

SEQ ID NO: 11547 - DNA, 798 bp, synthetic construct
  misc_feature 1..798: note = Description of Artificial Sequence: Synthetic coding sequence
  source 1..798: mol_type = other DNA
atgagagacgtgtacatcgtgcaggacctgatggagaccgacctgtacaagctgctgaagagccagcagctgagcaacgaccacatctgctacttcctgtaccagatcctgagaggcctgaagtacatccacagcgccaacgtgctgcacagagacctgaagcccagcaacctgctgatcaacaccacctgcgacctgaagatctgcgacttcggcctggccagaatcgccgaccccgagcacgaccacaccggcttcctgaccgagtacgtggccaccagatggtacagagcccccgagatcatgctgaacagcaagggctacaccaagagcatcgacatctggagcgtgggctgcatcctggccgagatgctgagcaacagacccatcttccccggcaagcactacctggaccagctgaaccacatcctgggcatcctgggcagccccagccaggaggacctgaactgcatcatcaacatgaaggccagaaactacctgcagagcctgcccagcaagaccaaggtggcctgggccaagctgttccccaagagcgacagcaaggccctggacctgctggacagaatgctgaccttcaaccccaacaagagaatcaccgtggaggaggccctggcccacccctacctggagcagtactacgaccccaccgacgagcccgtggccgaggagcccttcaccttcgccatggagctggacgacctgcccaaggagagactgaaggagctgatcttccaggagaccgccagattccagcccggcgtgctggaggccccctag

SEQ ID NO: 11548 - DNA, 1284 bp, synthetic construct
  misc_feature 1..1284: note = Description of Artificial Sequence: Synthetic coding sequence
  source 1..1284: mol_type = other DNA
atgagcagaagcaagagagacaacaacttctacagcgtggagatcggcgacagcaccttcaccgtgctgaagagataccagaacctgaagcccatcggcagcggcgcccagggcatcgtgtgcgccgcctacgacgccatcctggagagaaacgtggccatcaagaagctgagcagacccttccagaaccagacccacgccaagagagcctacagagagctggtgctgatgaagtgcgtgaaccacaagaacatcatcggcctgctgaacgtgttcaccccccagaagagcctggaggagttccaggacgtgtacatcgtgatggagctgatggacgccaacctgtgccaggtgatccagatggagctggaccacgagagaatgagctacctgctgtaccagatgctgtgcggcatcaagcacctgcacagcgccggcatcatccacagagacctgaagcccagcaacatcgtggtgaagagcgactgcaccctgaagatcctggacttcggcctggccagaaccgccggcaccagcttcatgatgaccccctacgtggtgaccagatactacagagcccccgaggtgatcctgggcatgggctacaaggagaacgtggacctgtggagcgtgggctgcatcatgggcgagatggtgtgccacaagatcctgttccccggcagagactacatcgaccagtggaacaaggtgatcgagcagctgggcaccccctgccccgagttcatgaagaagctgcagcccaccgtgagaacctacgtggagaacagacccaagtacgccggctacagcttcgagaagctgttccccgacgtgctgttccccgccgacagcgagcacaacaagctgaaggccagccaggccagagacctgctgagcaagatgctggtgatcgacgccagcaagagaatcagcgtggacgaggccctgcagcacccctacatcaacgtgtggtacgaccccagcgaggccgaggcccccccccccaagatccccgacaagcagctggacgagagagagcacaccatcgaggagtggaaggagctgatctacaaggaggtgatggacctggaggagagaaccaagaacggcgtgatcagaggccagcccagccccctgggcgccgccgtgatcaacggcagccagcaccccagcagcagcagcagcgtgaacgacgtgagcagcatgagcaccgaccccaccctggccagcgacaccgacagcagcctggaggccgccgccggccccctgggctgctgcagatag

SEQ ID NO: 11549 - DNA, 657 bp, synthetic construct
  misc_feature 1..657: note = Description of Artificial Sequence: Synthetic coding sequence
  source 1..657: mol_type = other DNA
atgagcagaagcaagagagacaacaacttctacagcgtggagatcggcgacagcaccttcaccgtgctgaagagataccagaacctgaagcccatcggcagcggcgcccagggcatcgtgtgcgccgcctacgacgccatcctggagagaaacgtggccatcaagaagctgagcagacccttccagaaccagacccacgccaagagagcctacagagagctggtgctgatgaagtgcgtgaaccacaagaacatcatcggcctgctgaacgtgttcaccccccagaagagcctggaggagttccaggacgtgtacatcgtgatggagctgatggacgccaacctgtgccaggtgatccagatggagctggaccacgagagaatgagctacctgctgtaccagatgctgtgcggcatcaagcacctgcacagcgccggcatcatccacagagacctgaagcccagcaacatcgtggtgaagagcgactgcaccctgaagatcctggacttcggcctggccagaaccgccggcaccagcttcatgatgaccccctacgtggtgaccagatactacagagcccccgaggtgatcctgggcatgggctacaaggagaacggcggcagaatgggcaagggcatcttcaccagactgcagtag

SEQ ID NO: 11550 - DNA, 1284 bp, synthetic construct
  misc_feature 1..1284: note = Description of Artificial Sequence: Synthetic coding sequence
  source 1..1284: mol_type = other DNA
atgagcagaagcaagagagacaacaacttctacagcgtggagatcggcgacagcaccttcaccgtgctgaagagataccagaacctgaagcccatcggcagcggcgcccagggcatcgtgtgcgccgcctacgacgccatcctggagagaaacgtggccatcaagaagctgagcagacccttccagaaccagacccacgccaagagagcctacagagagctggtgctgatgaagtgcgtgaaccacaagaacatcatcggcctgctgaacgtgttcaccccccagaagagcctggaggagttccaggacgtgtacatcgtgatggagctgatggacgccaacctgtgccaggtgatccagatggagctggaccacgagagaatgagctacctgctgtaccagatgctgtgcggcatcaagcacctgcacagcgccggcatcatccacagagacctgaagcccagcaacatcgtggtgaagagcgactgcaccctgaagatcctggacttcggcctggccagaaccgccggcaccagcttcatgatgaccccctacgtggtgaccagatactacagagcccccgaggtgatcctgggcatgggctacaaggagaacgtggacatctggagcgtgggctgcatcatgggcgagatgatcaagggcggcgtgctgttccccggcaccgaccacatcgaccagtggaacaaggtgatcgagcagctgggcaccccctgccccgagttcatgaagaagctgcagcccaccgtgagaacctacgtggagaacagacccaagtacgccggctacagcttcgagaagctgttccccgacgtgctgttccccgccgacagcgagcacaacaagctgaaggccagccaggccagagacctgctgagcaagatgctggtgatcgacgccagcaagagaatcagcgtggacgaggccctgcagcacccctacatcaacgtgtggtacgaccccagcgaggccgaggcccccccccccaagatccccgacaagcagctggacgagagagagcacaccatcgaggagtggaaggagctgatctacaaggaggtgatggacctggaggagagaaccaagaacggcgtgatcagaggccagcccagccccctgggcgccgccgtgatcaacggcagccagcaccccagcagcagcagcagcgtgaacgacgtgagcagcatgagcaccgaccccaccctggccagcgacaccgacagcagcctggaggccgccgccggccccctgggctgctgcagatag

SEQ ID NO: 11551 - DNA, 1155 bp, synthetic construct
  misc_feature 1..1155: note = Description of Artificial Sequence: Synthetic coding sequence
  source 1..1155: mol_type = other DNA
atgagcagaagcaagagagacaacaacttctacagcgtggagatcggcgacagcaccttcaccgtgctgaagagataccagaacctgaagcccatcggcagcggcgcccagggcatcgtgtgcgccgcctacgacgccatcctggagagaaacgtggccatcaagaagctgagcagacccttccagaaccagacccacgccaagagagcctacagagagctggtgctgatgaagtgcgtgaaccacaagaacatcatcggcctgctgaacgtgttcaccccccagaagagcctggaggagttccaggacgtgtacatcgtgatggagctgatggacgccaacctgtgccaggtgatccagatggagctggaccacgagagaatgagctacctgctgtaccagatgctgtgcggcatcaagcacctgcacagcgccggcatcatccacagagacctgaagcccagcaacatcgtggtgaagagcgactgcaccctgaagatcctggacttcggcctggccagaaccgccggcaccagcttcatgatgaccccctacgtggtgaccagatactacagagcccccgaggtgatcctgggcatgggctacaaggagaacgtggacatctggagcgtgggctgcatcatgggcgagatgatcaagggcggcgtgctgttccccggcaccgaccacatcgaccagtggaacaaggtgatcgagcagctgggcaccccctgccccgagttcatgaagaagctgcagcccaccgtgagaacctacgtggagaacagacccaagtacgccggctacagcttcgagaagctgttccccgacgtgctgttccccgccgacagcgagcacaacaagctgaaggccagccaggccagagacctgctgagcaagatgctggtgatcgacgccagcaagagaatcagcgtggacgaggccctgcagcacccctacatcaacgtgtggtacgaccccagcgaggccgaggcccccccccccaagatccccgacaagcagctggacgagagagagcacaccatcgaggagtggaaggagctgatctacaaggaggtgatggacctggaggagagaaccaagaacggcgtgatcagaggccagcccagccccctggcccaggtgcagcagtag

SEQ ID NO: 11552 - DNA, 1155 bp, synthetic construct
  misc_feature 1..1155: note = Description of Artificial Sequence: Synthetic coding sequence
  source 1..1155: mol_type = other DNA
atgagcagaagcaagagagacaacaacttctacagcgtggagatcggcgacagcaccttcaccgtgctgaagagataccagaacctgaagcccatcggcagcggcgcccagggcatcgtgtgcgccgcctacgacgccatcctggagagaaacgtggccatcaagaagctgagcagacccttccagaaccagacccacgccaagagagcctacagagagctggtgctgatgaagtgcgtgaaccacaagaacatcatcggcctgctgaacgtgttcaccccccagaagagcctggaggagttccaggacgtgtacatcgtgatggagctgatggacgccaacctgtgccaggtgatccagatggagctggaccacgagagaatgagctacctgctgtaccagatgctgtgcggcatcaagcacctgcacagcgccggcatcatccacagagacctgaagcccagcaacatcgtggtgaagagcgactgcaccctgaagatcctggacttcggcctggccagaaccgccggcaccagcttcatgatgaccccctacgtggtgaccagatactacagagcccccgaggtgatcctgggcatgggctacaaggagaacgtggacctgtggagcgtgggctgcatcatgggcgagatggtgtgccacaagatcctgttccccggcagagactacatcgaccagtggaacaaggtgatcgagcagctgggcaccccctgccccgagttcatgaagaagctgcagcccaccgtgagaacctacgtggagaacagacccaagtacgccggctacagcttcgagaagctgttccccgacgtgctgttccccgccgacagcgagcacaacaagctgaaggccagccaggccagagacctgctgagcaagatgctggtgatcgacgccagcaagagaatcagcgtggacgaggccctgcagcacccctacatcaacgtgtggtacgaccccagcgaggccgaggcccccccccccaagatccccgacaagcagctggacgagagagagcacaccatcgaggagtggaaggagctgatctacaaggaggtgatggacctggaggagagaaccaagaacggcgtgatcagaggccagcccagccccctggcccaggtgcagcagtag

SEQ ID NO: 11553 - DNA, 1284 bp, synthetic construct; identical to SEQ ID NO: 11548
  misc_feature 1..1284: note = Description of Artificial Sequence: Synthetic coding sequence
  source 1..1284: mol_type = other DNA

SEQ ID NO: 11554 - DNA, 927 bp, synthetic construct
  misc_feature 1..927: note = Description of Artificial Sequence: Synthetic coding sequence
  source 1..927: mol_type = other DNA
atgagcagaagcaagagagacaacaacttctacagcgtggagatcggcgacagcaccttcaccgtgctgaagagataccagaacctgaagcccatcggcagcggcgcccagggcatcgtgtgcgccgcctacgacgccatcctggagagaaacgtggccatcaagaagctgagcagacccttccagaaccagacccacgccaagagagcctacagagagctggtgctgatgaagtgcgtgaaccacaagaacatcatcggcctgctgaacgtgttcaccccccagaagagcctggaggagttccaggacgtgtacatcgtgatggagctgatggacgccaacctgtgccaggtgatccagatggagctggaccacgagagaatgagctacctgctgtaccagatgctgtgcggcatcaagcacctgcacagcgccggcatcatccacagagacctgaagcccagcaacatcgtggtgaagagcgactgcaccctgaagatcctggacttcggcctggccagaaccgccggcaccagcttcatgatgaccccctacgtggtgaccagatactacagagcccccgaggtgatcctgggcatgggctacaaggagaacgccgacagcgagcacaacaagctgaaggccagccaggccagagacctgctgagcaagatgctggtgatcgacgccagcaagagaatcagcgtggacgaggccctgcagcacccctacatcaacgtgtggtacgaccccagcgaggccgaggcccccccccccaagatccccgacaagcagctggacgagagagagcacaccatcgaggagtggaaggagctgatctacaaggaggtgatggacctggaggagagaaccaagaacggcgtgatcagaggccagcccagccccctggcccaggtgcagcagtag

SEQ ID NO: 11555 - DNA, 429 bp, synthetic construct
  misc_feature 1..429: note = Description of Artificial Sequence: Synthetic coding sequence
  source 1..429: mol_type = other DNA
atgagcagaagcaagagagacaacaacttctacagcgtggagatcggcgacagcaccttcaccgtgctgaagagataccagaacctgaagcccatcggcagcggcgcccagggcatcgtgtgcgccgcctacgacgccatcctggagagaaacgtggccatcaagaagctgagcagacccttccagaaccagacccacgccaagagagcctacagagagctggtgctgatgaagtgcgtgaaccacaagaacatcatcggcctgctgaacgtgttcaccccccagaagagcctggaggagttccaggacgtgtacatcgtgatggagctgatggacgccaacctgtgccaggtgatccagatggagctggaccacgagagaatgagctacctgctgtaccagatgctgtgcggcatcaagcacctgtag

SEQ ID NO: 11556 - DNA, 294 bp, synthetic construct
  misc_feature 1..294: note = Description of Artificial Sequence: Synthetic coding sequence
  source 1..294: mol_type = other DNA
atgatcatcggcctgctgaacgtgttcaccccccagaagagcctggaggagttccaggacgtgtacatcgtgatggagctgatggacgccaacctgtgccaggtgatccagatggagctggaccacgagagaatgagctacctgctgtaccagatgctgtgcggcatcaagcacctgcacagcgccggcatcatccacagagacctgaagcccagcaacatcgtggtgaagagcgactgcaccctgaagatcctggacttcggcctggccagaaccgccggcaccagcttctag

SEQ ID NO: 11557 - DNA, 429 bp, synthetic construct; identical to SEQ ID NO: 11555
  misc_feature 1..429: note = Description of Artificial Sequence: Synthetic coding sequence
  source 1..429: mol_type = other DNA

SEQ ID NO: 11558 - DNA, 1182 bp, synthetic construct
  misc_feature 1..1182: note = Description of Artificial Sequence: Synthetic coding sequence
  source 1..1182: mol_type = other DNA
atgcccaagaagaagcccacccccatccagctgaaccccgcccccgacggcagcgccgtgaacggcaccagcagcgccgagaccaacctggaggccctgcagaagaagctggaggagctggagctggacgagcagcagagaaagagactggaggccttcctgacccagaagcagaaggtgggcgagctgaaggacgacgacttcgagaagatcagcgagctgggcgccggcaacggcggcgtggtgttcaaggtgagccacaagcccagcggcctggtgatggccagaaagctgatccacctggagatcaagcccgccatcagaaaccagatcatcagagagctgcaggtgctgcacgagtgcaacagcccctacatcgtgggcttctacggcgccttctacagcgacggcgagatcagcatctgcatggagcacatggacggcggcagcctggaccaggtgctgaagaaggccggcagaatccccgagcagatcctgggcaaggtgagcatcgccgtgatcaagggcctgacctacctgagagagaagcacaagatcatgcacagagacgtgaagcccagcaacatcctggtgaacagcagaggcgagatcaagctgtgcgacttcggcgtgagcggccagctgatcgacagcatggccaacagcttcgtgggcaccagaagctacatgagccccgagagactgcagggcacccactacagcgtgcagagcgacatctggagcatgggcctgagcctggtggagatggccgtgggcagataccccatccccccccccgacgccaaggagctggagctgatgttcggctgccaggtggagggcgacgccgccgagaccccccccagacccagaacccccggcagacccctgagcagctacggcatggacagcagaccccccatggccatcttcgagctgctggactacatcgtgaacgagcccccccccaagctgcccagcggcgtgttcagcctggagttccaggacttcgtgaacaagtgcctgatcaagaaccccgccgagagagccgacctgaagcagctgatggtgcacgccttcatcaagagaagcgacgccgaggaggtggacttcgccggctggctgtgcagcaccatcggcctgaaccagcccagcacccccacccacgccgccggcgtgtag

SEQ ID NO: 11559 - DNA, 1203 bp, synthetic construct
  misc_feature 1..1203: note = Description of Artificial Sequence: Synthetic coding sequence
  source 1..1203: mol_type = other DNA
atgctggccagaagaaagcccgtgctgcccgccctgaccatcaaccccaccatcgccgagggccccagccccaccagcgagggcgccagcgaggccaacctggtggacctgcagaagaagctggaggagctggagctggacgagcagcagaagaagagactggaggccttcctgacccagaaggccaaggtgggcgagctgaaggacgacgacttcgagagaatcagcgagctgggcgccggcaacggcggcgtggtgaccaaggtgcagcacagacccagcggcctgatcatggccagaaagctgatccacctggagatcaagcccgccatcagaaaccagatcatcagagagctgcaggtgctgcacgagtgcaacagcccctacatcgtgggcttctacggcgccttctacagcgacggcgagatcagcatctgcatggagcacatggacggcggcagcctggaccaggtgctgaaggaggccaagagaatccccgaggagatcctgggcaaggtgagcatcgccgtgctgagaggcctggcctacctgagagagaagcaccagatcatgcacagagacgtgaagcccagcaacatcctggtgaacagcagaggcgagatcaagctgtgcgacttcggcgtgagcggccagctgatcgacagcatggccaacagcttcgtgggcaccagaagctacatggcccccgagagactgcagggcacccactacagcgtgcagagcgacatctggagcatgggcctgagcctggtggagctggccgtgggcagataccccatccccccccccgacgccaaggagctggaggccatcttcggcagacccgtggtggacggcgaggagggcgagccccacagcatcagccccagacccagaccccccggcagacccgtgagcggccacggcatggacagcagacccgccatggccatcttcgagctgctggactacatcgtgaacgagcccccccccaagctgcccaacggcgtgttcacccccgacttccaggagttcgtgaacaagtgcctgatcaagaaccccgccgagagagccgacctgaagatgctgaccaaccacaccttcatcaagagaagcgaggtggaggaggtggacttcgccggctggctgtgcaagaccctgagactgaaccagcccggcacccccaccagaaccgccgtgtag

SEQ ID NO: 11560 - DNA, 1056 bp, synthetic construct
  misc_feature 1..1056: note = Description of Artificial Sequence: Synthetic coding sequence
  source 1..1056: mol_type = other DNA
atgggcgtgcagggcaccctgatgagcagagaccagaccccccacctgctgagcatcctgggcaagagcaagagaaagaaggacctgagaatcagctgcatgagcaagccccccgcccccaaccccaccccccccagaaacctggacagcagaaccttcatcaccatcggcgacagaaacttcgaggtggaggccgacgacctggtgaccatcagcgagctgggcagaggcgcctacggcgtggtggagaaggtgagacacgcccagagcggcaccatcatggccgtgaagagaatcagagccaccgtgaacagccaggagcagaagagactgctgatggacctggacatcaacatgagaaccgtggactgcttctacaccgtgaccttctacggcgccctgttcagagagggcgacgtgtggatctgcatggagctgatggacaccagcctggacaagttctacagaaaggtgctggacaagaacatgaccatccccgaggacatcctgggcgagatcgccgtgagcatcgtgagagccctggagcacctgcacagcaagctgagcgtgatccacagagacgtgaagcccagcaacgtgctgatcaacaaggagggccacgtgaagatgtgcgacttcggcatcagcggctacctggtggacagcgtggccaagaccatggacgccggctgcaagccctacatggcccccgagagaatcaaccccgagctgaaccagaagggctacaacgtgaagagcgacgtgtggagcctgggcatcaccatgatcgagatggccatcctgagattcccctacgagagctggggcacccccttccagcagctgaagcaggtggtggaggagcccagcccccagctgcccgccgacagattcagccccgagttcgtggacttcaccgcccagtgcctgagaaagaaccccgccgagagaatgagctacctggagctgatggagcaccccttcttcaccctgcacaagaccaagaagaccgacatcgccgccttcgtgaaggagatcctgggcgaggacagctag

SEQ ID NO: 11561 - DNA, 1044 bp, synthetic construct
  misc_feature 1..1044: note = Description of Artificial Sequence: Synthetic coding sequence
  source 1..1044: mol_type = other DNA
atggagagccccgccagcagccagcccgccagcatgccccagagcaagggcaagagcaagagaaagaaggacctgagaatcagctgcatgagcaagccccccgcccccaaccccaccccccccagaaacctggacagcagaaccttcatcaccatcggcgacagaaacttcgaggtggaggccgacgacctggtgaccatcagcgagctgggcagaggcgcctacggcgtggtggagaaggtgagacacgcccagagcggcaccatcatggccgtgaagagaatcagagccaccgtgaacagccaggagcagaagagactgctgatggacctggacatcaacatgagaaccgtggactgcttctacaccgtgaccttctacggcgccctgttcagagagggcgacgtgtggatctgcatggagctgatggacaccagcctggacaagttctacagaaaggtgctggacaagaacatgaccatccccgaggacatcctgggcgagatcgccgtgagcatcgtgagagccctggagcacctgcacagcaagctgagcgtgatccacagagacgtgaagcccagcaacgtgctgatcaacaaggagggccacgtgaagatgtgcgacttcggcatcagcggctacctggtggacagcgtggccaagaccatggacgccggctgcaagccctacatggcccccgagagaatcaaccccgagctgaaccagaagggctacaacgtgaagagcgacgtgtggagcctgggcatcaccatgatcgagatggccatcctgagattcccctacgagagctggggcacccccttccagcagctgaagcaggtggtggaggagcccagcccccagctgcccgccgacagattcagccccgagttcgtggacttcaccgcccagtgcctgagaaagaaccccgccgagagaatgagctacctggagctgatggagcaccccttcttcaccctgcacaagaccaagaagaccgacatcgccgccttcgtgaaggagatcctgggcgaggacagctag

SEQ ID NO: 11562 - DNA, 957 bp, synthetic construct
  misc_feature 1..957: note = Description of Artificial Sequence: Synthetic coding sequence
  source 1..957: mol_type = other DNA
atgagcaagccccccgcccccaaccccaccccccccagaaacctggacagcagaaccttcatcaccatcggcgacagaaacttcgaggtggaggccgacgacctggtgaccatcagcgagctgggcagaggcgcctacggcgtggtggagaaggtgagacacgcccagagcggcaccatcatggccgtgaagagaatcagagccaccgtgaacagccaggagcagaagagactgctgatggacctggacatcaacatgagaaccgtggactgcttctacaccgtgaccttctacggcgccctgttcagagagggcgacgtgtggatctgcatggagctgatggacaccagcctggacaagttctacagaaaggtgctggacaagaacatgaccatccccgaggacatcctgggcgagatcgccgtgagcatcgtgagagccctggagcacctgcacagcaagctgagcgtgatccacagagacgtgaagcccagcaacgtgctgatcaacaaggagggccacgtgaagatgtgcgacttcggcatcagcggctacctggtggacagcgtggccaagaccatggacgccggctgcaagccctacatggcccccgagagaatcaaccccgagctgaaccagaagggctacaacgtgaagagcgacgtgtggagcctgggcatcaccatgatcgagatggccatcctgagattcccctacgagagctggggcacccccttccagcagctgaagcaggtggtggaggagcccagcccccagctgcccgccgacagattcagccccgagttcgtggacttcaccgcccagtgcctgagaaagaaccccgccgagagaatgagctacctggagctgatggagcaccccttcttcaccctgcacaagaccaagaagaccgacatcgccgccttcgtgaaggagatcctgggcgaggacagctag

SEQ ID NO: 11563 - DNA, 1113 bp, synthetic construct
  misc_feature 1..1113: note = Description of Artificial Sequence: Synthetic coding sequence
  source 1..1113: mol_type = other DNA
atgctgagcaacagccagggccagagcccccccgtgcccttccccgcccccgccccccccccccagccccccacccccgccctgccccacccccccgcccagcccccccccccccccccccagcagttcccccagttccacgtgaagagcggcctgcagatcaagaagaacgccatcatcgacgactacaaggtgaccagccaggtgctgggcctgggcatcaacggcaaggtgctgcagatcttcaacaagagaacccaggagaagttcgccctgaagatgctgcaggactgccccaaggccagaagagaggtggagctgcactggagagccagccagtgcccccacatcgtgagaatcgtggacgtgtacgagaacctgtacgccggcagaaagtgcctgctgatcgtgatggagtgcctggacggcggcgagctgttcagcagaatccaggacagaggcgaccaggccttcaccgagagagaggccagcgagatcatgaagagcatcggcgaggccatccagtacctgcacagcatcaacatcgcccacagagacgtgaagcccgagaacctgctgtacaccagcaagagacccaacgccatcctgaagctgaccgacttcggcttcgccaaggagaccaccagccacaacagcctgaccaccccctgctacaccccctactacgtggcccccgaggtgctgggccccgagaagtacgacaagagctgcgacatgtggagcctgggcgtgatcatgtacatcctgctgtgcggctacccccccttctacagcaaccacggcctggccatcagccccggcatgaagaccagaatcagaatgggccagtacgagttccccaaccccgagtggagcgaggtgagcgaggaggtgaagatgctgatcagaaacctgctgaagaccgagcccacccagagaatgaccatcaccgagttcatgaaccacccctggatcatgcagagcaccaaggtgccccagacccccctgcacaccagcagagtgctgaaggaggacaaggagagatgggaggacgtgaagggctgcctgcacgacaagaacagcgaccaggccacctggctgaccagactgtag

SEQ ID NO: 11564 - DNA, 1203 bp, synthetic construct
  misc_feature 1..1203: note = Description of Artificial Sequence: Synthetic coding sequence
  source 1..1203: mol_type = other DNA
atgctgagcaacagccagggccagagcccccccgtgcccttccccgcccccgccccccccccccagccccccacccccgccctgccccacccccccgcccagcccccccccccccccccccagcagttcccccagttccacgtgaagagcggcctgcagatcaagaagaacgccatcatcgacgactacaaggtgaccagccaggtgctgggcctgggcatcaacggcaaggtgctgcagatcttcaacaagagaacccaggagaagttcgccctgaagatgctgcaggactgccccaaggccagaagagaggtggagctgcactggagagccagccagtgcccccacatcgtgagaatcgtggacgtgtacgagaacctgtacgccggcagaaagtgcctgctgatcgtgatggagtgcctggacggcggcgagctgttcagcagaatccaggacagaggcgaccaggccttcaccgagagagaggccagcgagatcatgaagagcatcggcgaggccatccagtacctgcacagcatcaacatcgcccacagagacgtgaagcccgagaacctgctgtacaccagcaagagacccaacgccatcctgaagctgaccgacttcggcttcgccaaggagaccaccagccacaacagcctgaccaccccctgctacaccccctactacgtggcccccgaggtgctgggccccgagaagtacgacaagagctgcgacatgtggagcctgggcgtgatcatgtacatcctgctgtgcggctacccccccttctacagcaaccacggcctggccatcagccccggcatgaagaccagaatcagaatgggccagtacgagttccccaaccccgagtggagcgaggtgagcgaggaggtgaagatgctgatcagaaacctgctgaagaccgagcccacccagagaatgaccatcaccgagttcatgaaccacccctggatcatgcagagcaccaaggtgccccagacccccctgcacaccagcagagtgctgaaggaggacaaggagagatgggaggacgtgaaggaggagatgaccagcgccctggccaccatgagagtggactacgagcagatcaagatcaagaagatcgaggacgccagcaaccccctgctgctgaagagaagaaagaaggccagagccctggaggccgccgccctggcccactag

SEQ ID NO: 11565 - DNA, 1149 bp, synthetic construct
  misc_feature 1..1149: note = Description of Artificial Sequence: Synthetic coding sequence
  source 1..1149: mol_type = other DNA
atggacggcgagaccgccgaggagcagggcggccccgtgcccccccccgtggcccccggcggccccggcctgggcggcgcccccggcggcagaagagagcccaagaagtacgccgtgaccgacgactaccagctgagcaagcaggtgctgggcctgggcgtgaacggcaaggtgctggagtgcttccacagaagaaccggccagaagtgcgccctgaagctgctgtacgacagccccaaggccagacaggaggtggaccaccactggcaggccagcggcggcccccacatcgtgtgcatcctggacgtgtacgagaacatgcaccacggcaagagatgcctgctgatcatcatggagtgcatggagggcggcgagctgttcagcagaatccaggagagaggcgaccaggccttcaccgagagagaggccgccgagatcatgagagacatcggcaccgccatccagttcctgcacagccacaacatcgcccacagagacgtgaagcccgagaacctgctgtacaccagcaaggagaaggacgccgtgctgaagctgaccgacttcggcttcgccaaggagaccacccagaacgccctgcagaccccctgctacaccccctactacgtggcccccgaggtgctgggccccgagaagtacgacaagagctgcgacatgtggagcctgggcgtgatcatgtacatcctgctgtgcggcttcccccccttctacagcaacaccggccaggccatcagccccggcatgaagagaagaatcagactgggccagtacggcttccccaaccccgagtggagcgaggtgagcgaggacgccaagcagctgatcagactgctgctgaagaccgaccccaccgagagactgaccatcacccagttcatgaaccacccctggatcaaccagagcatggtggtgccccagacccccctgcacaccgccagagtgctgcaggaggacaaggaccactgggacgaggtgaaggaggagatgaccagcgccctggccaccatgagagtggactacgaccaggtgaagatcaaggacctgaagaccagcaacaacagactgctgaacaagagaagaaagaagcaggccggcagcagcagcgccagccagggctgcaacaaccagtag

SEQ ID NO: 11566 - DNA, 999 bp, synthetic construct
  misc_feature 1..999: note = Description of Artificial Sequence: Synthetic coding sequence
  source 1..999: mol_type = other DNA
atggacggcgagaccgccgaggagcagggcggccccgtgcccccccccgtggcccccggcggccccggcctgggcggcgcccccggcggcagaagagagcccaagaagtacgccgtgaccgacgactaccagctgagcaagcaggtgctgggcctgggcgtgaacggcaaggtgctggagtgcttccacagaagaaccggccagaagtgcgccctgaagctgctgtacgacagccccaaggccagacaggaggtggaccaccactggcaggccagcggcggcccccacatcgtgtgcatcctggacgtgtacgagaacatgcaccacggcaagagatgcctgctgatcatcatggagtgcatggagggcggcgagctgttcagcagaatccaggagagaggcgaccaggccttcaccgagagagaggccgccgagatcatgagagacatcggcaccgccatccagttcctgcacagccacaacatcgcccacagagacgtgaagcccgagaacctgctgtacaccagcaaggagaaggacgccgtgctgaagctgaccgacttcggcttcgccaaggagaccacccagaacgccctgcagaccccctgctacaccccctactacgtggcccccgaggtgctgggccccgagaagtacgacaagagctgcgacatgtggagcctgggcgtgatcatgtacatcctgctgtgcggcttcccccccttctacagcaacaccggccaggccatcagccccggcatgaagagaagaatcagactgggccagtacggcttccccaaccccgagtggagcgaggtgagcgaggacgccaagcagctgatcagactgctgctgaagaccgaccccaccgagagactgaccatcacccagttcatgaaccacccctggatcaaccagagcatggtggtgccccagacccccctgcacaccgccagagtgctgcaggaggacaaggaccactgggacgaggtgaagtag

SEQ ID NO: 11567 - DNA, 1149 bp, synthetic construct; identical to SEQ ID NO: 11565
  misc_feature 1..1149: note = Description of Artificial Sequence: Synthetic coding sequence
  source 1..1149: mol_type = other DNA

SEQ ID NO: 11568 - DNA, 360 bp, synthetic construct
  misc_feature 1..360: note = Description of Artificial Sequence: Synthetic coding sequence
  source 1..360: mol_type = other DNA
atggacggcgagaccgccgaggagcagggcggccccgtgcccccccccgtggcccccggcggccccggcctgggcggcgcccccggcggcagaagagagcccaagaagtacgccgtgaccgacgactaccagctgagcaagcaggtgctgggcctgggcgtgaacggcaaggtgctggagtgcttccacagaagaaccggccagaagtgcgccctgaagctgctgtacgacagccccaaggccagacaggaggtggaccaccactggcaggccagcggcggcccccacatcgtgtgcatcctggacgtgtacgagaacatgcaccacggcaagagatgcctgctgatcatcatggagtag

SEQ ID NO: 11569 - DNA, 1422 bp, synthetic construct
  misc_feature 1..1422: note = Description of Artificial Sequence: Synthetic coding sequence
  source 1..1422: mol_type = other DNA
atgagcgaggagagcgacatggacaaggccatcaaggagaccagcatcctggaggagtacagcatcaactggacccagaagctgggcgccggcatcagcggccccgtgagagtgtgcgtgaagaagagcacccaggagagattcgccctgaagatcctgctggacagacccaaggccagaaacgaggtgagactgcacatgatgtgcgccacccaccccaacatcgtgcagatcatcgaggtgttcgccaacagcgtgcagttcccccacgagagcagccccagagccagactgctgatcgtgatggagatgatggagggcggcgagctgttccacagaatcagccagcacagacacttcaccgagaagcaggccagccaggtgaccaagcagatcgccctggccctgagacactgccacctgctgaacatcgcccacagagacctgaagcccgagaacctgctgttcaaggacaacagcctggacgcccccgtgaagctgtgcgacttcggcttcgccaagatcgaccagggcgacctgatgaccccccagttcaccccctactacgtggccccccaggtgctggaggcccagagaagacaccagaaggagaagagcggcatcatccccaccagccccaccccctacacctacaacaagagctgcgacctgtggagcctgggcgtgatcatctacgtgatgctgtgcggctacccccccttctacagcaagcaccacagcagaaccatccccaaggacatgagaagaaagatcatgaccggcagcttcgagttccccgaggaggagtggagccagatcagcgagatggccaaggacgtggtgagaaagctgctgaaggtgaagcccgaggagagactgaccatcgagggcgtgctggaccacccctggctgaacagcaccgaggccctggacaacgtgctgcccagcgcccagctgatgatggacaaggccgtggtggccggcatccagcaggcccacgccgagcagctggccaacatgagaatccaggacctgaaggtgagcctgaagcccctgcacagcgtgaacaaccccatcctgagaaagagaaagctgctgggcaccaagcccaaggacagcgtgtacatccacgaccacgagaacggcgccgaggacagcaacgtggccctggagaagctgagagacgtgatcgcccagtgcatcctgccccaggccggcaagggcgagaacgaggacgagaagctgaacgaggtgatgcaggaggcctggaagtacaacagagagtgcaagctgctgagagacaccctgcagagcttcagctggaacggcagaggcttcaccgacaaggtggacagactgaagctggccgagatcgtgaagcaggtgatcgaggagcagaccaccagccacgagagccagtag

SEQ ID NO: 11570 - DNA, 1416 bp, synthetic construct
  misc_feature 1..1416: note = Description of Artificial Sequence: Synthetic coding sequence
  source 1..1416: mol_type = other DNA
atgagcgaggagagcgacatggacaaggccatcaaggagaccagcatcctggaggagtacagcatcaactggacccagaagctgggcgccggcatcagcggccccgtgagagtgtgcgtgaagaagagcacccaggagagattcgccctgaagatcctgctggacagacccaaggccagaaacgaggtgagactgcacatgatgtgcgccacccaccccaacatcgtgcagatcatcgaggtgttcgccaacagcgtgcagttcccccacgagagcagccccagagccagactgctgatcgtgatggagatgatggagggcggcgagctgttccacagaatcagccagcacagacacttcaccgagaagcaggccagccaggtgaccaagcagatcgccctggccctgagacactgccacctgctgaacatcgcccacagagacctgaagcccgagaacctgctgttcaaggacaacagcctggacgcccccgtgaagctgtgcgacttcggcttcgccaagatcgaccagggcgacctgatgaccccccagttcaccccctactacgtggccccccaggtgctggaggcccagagaagacaccagaaggagaagagcggcatcatccccaccagccccaccccctacacctacaacaagagctgcgacctgtggagcctgggcgtgatcatctacgtgatgctgtgcggctacccccccttctacagcaagcaccacagcagaaccatccccaaggacatgagaagaaagatcatgaccggcagcttcgagttccccgaggaggagtggagccagatcagcgagatggccaaggacgtggtgagaaagctgctgaaggtgaagcccgaggagagactgaccatcgagggcgtgctggaccacccctggctgaacagcaccgaggccctggacaacgtgctgcccagcgcccagctgatgatggacaaggccgtggtggccggcatccagcaggcccacgccgagcagctggccaacatgagaatccaggacctgaaggtgagcctgaagcccctgcacagcgtgaacaaccccatcctgagaaagagaaagctgctgggcaccaagcccaaggacagcgtgtacatccacgaccacgagaacggcgccgaggacagcaacgtggccctggagaagctgagagacgtgatcgcccagtgcatcctgccccaggccggcgagaacgaggacgagaagctgaacgaggtgatgcaggaggcctggaagtacaacagagagtgcaagctgctgagagacaccctgcagagcttcagctggaacggcagaggcttcaccgacaaggtggacagactgaagctggccgagatcgtgaagcaggtgatcgaggagcagaccaccagccacgagagccagtag

SEQ ID NO: 11571 - DNA, 1416 bp, synthetic construct
  misc_feature 1..1416: note = Description of Artificial Sequence: Synthetic coding sequence
  source 1..1416: mol_type = other DNA
atgagcgaggagagcgacatggacaaggccatcaaggagaccagcatcctggaggagtacagcatcaactggacccagaagctgggcgccggcatcagcggccccgtgagagtgtgcgtgaagaagagcacccaggagagattcgccctgaagatcctgctggacagacccaaggccagaaacgaggtgagactgcacatgatgtgcgccacccaccccaacatcgtgcagatcatcgaggtgttcgccaacagcgtgcagttcccccacgagagcagccccagagccagactgctgatcgtgatggagatgatggagggcggcgagctgttccacagaatcagccagcacagacacttcaccgagaagcaggccagccaggtgaccaagcaggccaccctggccctgagacactgccacctgctgaacatcgcccacagagacctgaagcccgagaacctgctgttcaaggacaacagcctggacgcccccgtgaagctgtgcgacttcggcttcgccaagatcgaccagggcgacctgatgaccccccagttcaccccctactacgtggccccccaggtgctggaggcccagagaagacaccagaaggagaagagcggcatcatccccaccagccccaccccctacacctacaacaagagctgcgacctgtggagcctgggcgtgatcatctacgtgatgctgtgcggctacccccccttctacagcaagcaccacagcagaaccatccccaaggacatgagaagaaagatcatgaccggcagcttcgagttccccgaggaggagtggagccagatcagcgagatggccaaggacgtggtgagaaagctgctgaaggtgaagcccgaggagagactgaccatcgagggcgtgctggaccacccctggctgaacagcaccgaggccctggacaacgtgctgcccagcgcccagctgatgatggacaaggccgtggtggccggcatccagcaggcccacgccgagcagctggccaacatgagaatccaggacctgaaggtgagcctgaagcccctgcacagcgtgaacaaccccatcctgagaaagagaaagctgctgggcaccaagcccaaggacagcgtgtacatccacgaccacgagaacggcgccgaggacagcaacgtggccctggagaagctgagagacgtgatcgcccagtgcatcctgccccaggccggcgagaacgaggacgagaagctgaacgaggtgatgcaggaggcctggaagtacaacagagagtgcaagctgctgagagacaccctgcagagcttcagctggaacggcagaggcttcaccgacaaggtggacagactgaagctggccgagatcgtgaagcaggtgatcgaggagcagaccaccagccacgagagccagtag

SEQ ID NO: 11572 - DNA, 1422 bp, synthetic construct
  misc_feature 1..1422: note = Description of Artificial Sequence: Synthetic coding sequence
  source 1..1422: mol_type = other DNA
atgagcgaggagagcgacatggacaaggccatcaaggagaccagcatcctggaggagtacagcatcaactggacccagaagctgggcgccggcatcagcggccccgtgagagtgtgcgtgaagaagagcacccaggagagattcgccctgaagatcctgctggacagacccaaggccagaaacgaggtgagactgcacatgatgtgcgccacccaccccaacatcgtgcagatcatcgaggtgttcgccaacagcgtgcagttcccccacgagagcagccccagagccagactgctgatcgtgatggagatgatggagggcggcgagctgttccacagaatcagccagcacagacacttcaccgagaagcaggccagccaggtgaccaagcaggccaccctggccctgagacactgccacctgctgaacatcgcccacagagacctgaagcccgagaacctgctgttcaaggacaacagcctggacgcccccgtgaagctgtgcgacttcggcttcgccaagatcgaccagggcgacctgatgaccccccagttcaccccctactacgtggccccccaggtgctggaggcccagagaagacaccagaaggagaagagcggcatcatccccaccagccccaccccctacacctacaacaagagctgcgacctgtggagcctgggcgtgatcatctacgtgatgctgtgcggctacccccccttctacagcaagcaccacagcagaaccatccccaaggacatgagaagaaagatcatgaccggcagcttcgagttccccgaggaggagtggagccagatcagcgagatggccaaggacgtggtgagaaagctgctgaaggtgaagcccgaggagagactgaccatcgagggcgtgctggaccacccctggctgaacagcaccgaggccctggacaacgtgctgcccagcgcccagctgatgatggacaaggccgtggtggccggcatccagcaggcccacgccgagcagctggccaacatgagaatccaggacctgaaggtgagcctgaagcccctgcacagcgtgaacaaccccatcctgagaaagagaaagctgctgggcaccaagcccaaggacagcgtgtacatccacgaccacgagaacggcgccgaggacagcaacgtggccctggagaagctgagagacgtgatcgcccagtgcatcctgccccaggccggcaagggcgagaacgaggacgagaagctgaacgaggtgatgcaggaggcctggaagtacaacagagagtgcaagctgctgagagacaccctgcagagcttcagctggaacggcagaggcttcaccgacaaggtggacagactgaagctggccgagatcgtgaagcaggtgatcgaggagcagaccaccagccacgagagccagtag

SEQ ID NO: 11573 - DNA, 2799 bp, synthetic construct
  misc_feature 1..2799: note = Description of Artificial Sequence: Synthetic coding sequence
  source 1..2799: mol_type = other DNA
atggccgccgccgccgccgtggaggccgccgcccccatgggcgccctgtggggcctggtgcacgacttcgtggtgggccagcaggagggccccgccgaccaggtggccgccgacgtgaagagcggcaactacaccgtgctgcaggtggtggaggccctgggcagcagcctggagaaccccgagcccagaaccagagccagagccatccagctgctgagccaggtgctgctgcactgccacaccctgctgctggagaaggaggtggtgcacctgatcctgttctacgagaacagactgaaggaccaccacctggtgatccccagcgtgctgcagggcctgaaggccctgagcctgtgcgtggccctgccccccggcctggccgtgagcgtgctgaaggccatcttccaggaggtgcacgtgcagagcctgccccaggtggacagacacaccgtgtacaacatcatcaccaacttcatgagaaccagagaggaggagctgaagagcctgggcgccgacttcaccttcggcttcatccaggtgatggacggcgagaaggaccccagaaacctgctggtggccttcagaatcgtgcacgacctgatcagcagagactacagcctgggccccttcgtggaggagctgttcgaggtgaccagctgctacttccccatcgacttcacccccccccccaacgacccccacggcatccagagagaggacctgatcctgagcctgagagccgtgctggccagcacccccagattcgccgagttcctgctgcccctgctgatcgagaaggtggacagcgaggtgctgagcgccaagctggacagcctgcagaccctgaacgcctgctgcgccgtgtacggccagaaggagctgaaggacttcctgcccagcctgtgggccagcatcagaagagagagcagccagagaagaaccatcctggagatgctgctgggcttcctgaagctgcagcagaagtggagctacgaggacaaggaccagagacccctgaacggcttcaaggaccagctgtgcagcctggtgttcatggccctgaccgaccccagcacccagctgcagctggtgggcatcagaaccctgaccgtgctgggcgcccagcccgacctgctgagctacgaggacctggagctggccgtgggccacctgtacagactgagcttcctgaaggaggacagccagagctgcagagtggccgccctggaggccagcggcaccctggccgccctgtaccccgtggccttcagcagccacctggtgcccaagctggccgaggagctgagagtgggcgagagcaacctgaccaacggcgacgagcccacccagtgcagcagacacctgtgctgcctgcaggccctgagcgccgtgagcacccaccccagcatcgtgaaggagaccctgcccctgctgctgcagcacctgtggcaggtgaacagaggcaacatggtggcccagagcagcgacgtgatcgccgtgtgccagagcctgagacagatggccgagaagtgccagcaggaccccgagagctgctggtacttccaccagaccgccatcccctgcctgctggccctggccgtgcaggccagcatgcccgagaaggagcccagcgtgctgagaaaggtgctgctggaggacgaggtgctggccgccatggtgagcgtgatcggcaccgccaccacccacctgagccccgagctggccgcccagagcgtgacccacatcgtgcccctgttcctggacggcaacgtgagcttcctgcccgagaacagcttccccagcagattccagcccttccaggacggcagcagcggccagagaagactgatcgccctgctgatggccttcgtgtgcagcctgcccagaaacgtggagatcccccagctgaaccagctgatgagagagctgctggagctgagctgctgccacagctgccccttcagcagcaccgccgccgccaagtgcttcgccggcctgctgaacaagcaccccgccggccagcagctggacgagttcctgcagctggccgtggacaaggtggaggccggcctgggcagcggcccctgcagaagccaggccttcaccctgctgctgtgggtgaccaaggccctggtgctgagataccaccccctgagcagctgcctgaccgccagactgatgggcctgctgagcgaccccgagctgggccccgccgccgccgacggcttcagcctgctgatgagcgactgcaccgacgtgctgaccagagccggccacgccgaggtgagaatcatgttcagacagagattcttcaccgacaacgtgcccgccctggtgcagggcttccacgccgccccccaggacgtgaagcccaactacctgaagggcctgagccacgtgctgaacagactgcccaagcccgtgctgctgcccgagctgcccaccctgctgagcctgctgctggaggccctgagctgccccgactgcgtggtgcagctgagcaccctgagctgcctgcagcccctgctgctggaggccccccaggtgatgagcctgcacgtggacaccctggtgaccaagttcctgaacctgagcagcagccccagcatggccgtgagaatcgccgccctgcagtgcatgcacgccctgaccagactgcccacccccgtgctgctgccctacaagccccaggtgatcagagccctggccaagcccctggacgacaagaagagactggtgagaaaggaggccgtgagcgccagaggcgagtggttcctgctgggcagccccggcagctag

SEQ ID NO: 11574 - DNA, 1092 bp, synthetic construct
  misc_feature 1..1092: note = Description of Artificial Sequence: Synthetic coding sequence
  source 1..1092: mol_type = other DNA
atgctgctgggcttcctgaagctgcagcagaagtggagctacgaggacaaggaccagagacccctgaacggcttcaaggaccagctgtgcagcctggtgttcatggccctgaccgaccccagcacccagctgcagctggtgggcatcagaaccctgaccgtgctgggcgcccagcccgacctgctgagctacgaggacctggagctggccgtgggccacctgtacagactgagcttcctgaaggaggacagccagagctgcagagtggccgccctggaggccagcggcaccctggccgccctgtaccccgtggccttcagcagccacctggtgcccaagctggccgaggagctgagagtgggcgagagcaacctgaccaacggcgacgagcccacccagtgcagcagacacctgtgctgcctgcaggccctgagcgccgtgagcacccaccccagcatcgtgaaggagaccctgcccctgctgctgcagcacctgtggcaggtgaacagaggcaacatggtggcccagagcagcgacgtgatcgccgtgtgccagagcctgagacagatggccgagaagtgccagcaggaccccgagagctgctggtacttccaccagaccgccatcccctgcctgctggccctggccgtgcaggccagcatgcccgagaaggagcccagcgtgctgagaaaggtgctgctggaggacgaggtgctggccgccatggtgagcgtgatcggcaccgccaccacccacctgagccccgagctggccgcccagagcgtgacccacatcgtgcccctgttcctggacggcaacgtgagcttcctgcccgagaacagcttccccagcagattccagcccttccaggacggcagcagcggccagagaagactgatcgccctgctgatggccttcgtgtgcagcctgcccagaaacgtggagatcccccagctgaaccagctgatgagagagctgctggagctgagctgcaccgccgcccccttcctgccccccctgctgcccagcgccctgcaggacagcagcaccagcaccctgcagggcagcagctggatgaacagctacagctag

SEQ ID NO: 11575 - DNA, 1128 bp, synthetic construct
  misc_feature 1..1128: note = Description of Artificial Sequence: Synthetic coding sequence
  source 1..1128: mol_type = other DNA
atgaagctggtgtggcccagcgccaagctgctgcaggccgccgccggcgccagcgccagagcctgcgacagcgtgaccagcaacgtgctgcccctgctgctggagcagttccacaagcacagccagagcagccagagaagaaccatcctggagatgctgctgggcttcctgaagctgcagcagaagtggagctacgaggacaaggaccagagacccctgaacggcttcaaggaccagctgtgcagcctggtgttcatggccctgaccgaccccagcacccagctgcagctggtgggcatcagaaccctgaccgtgctgggcgcccagcccgacctgctgagctacgaggacctggagctggccgtgggccacctgtacagactgagcttcctgaaggaggacagccagagctgcagagtggccgccctggaggccagcggcaccctggccgccctgtaccccgtggccttcagcagccacctggtgcccaagctggccgaggagctgagagtgggcgagagcaacctgaccaacggcgacgagcccacccagtgcagcagacacctgtgctgcctgcaggccctgagcgccgtgagcacccaccccagcatcgtgaaggagaccctgcccctgctgctgcagcacctgtggcaggtgaacagaggcaacatggtggcccagagcagcgacgtgatcgccgtgtgccagagcctgagacagatggccgagaagtgccagcaggaccccgagagctgctggtacttccaccagaccgccatcccctgcctgctggccctggccgtgcaggccagcatgcccgagaaggagcccagcgtgctgagaaaggtgctgctggaggacgaggtgctggccgccatggtgagcgtgatcggcaccgccaccacccacctgagccccgagctggccgcccagagcgtgacccacatcgtgcccctgttcctggacggcaacgtgagcttcctgcccgagaacagcttccccagcagattccagcccttccaggtgaccgacggcagcagcggccagagaagactgatcgccctgctgatggccttcgtgtgcagcctgcccagaaacggcagcagctggatgaacagctacagctag

SEQ ID NO: 11576 - DNA, 1128 bp, synthetic construct; identical to SEQ ID NO: 11575
  misc_feature 1..1128: note = Description of Artificial Sequence: Synthetic coding sequence
  source 1..1128: mol_type = other DNA

SEQ ID NO: 11577 - DNA, 2964 bp, synthetic construct
  misc_feature 1..2964: note = Description of Artificial Sequence: Synthetic coding sequence
  source 1..2964: mol_type = other DNA
atggccgccgccgccgccgtggaggccgccgcccccatgggcgccctgtggggcctggtgcacgacttcgtggtgggccagcaggagggccccgccgaccaggtggccgccgacgtgaagagcggcaactacaccgtgctgcaggtggtggaggccctgggcagcagcctggagaaccccgagcccagaaccagagccagagccatccagctgctgagccaggtgctgctgcactgccacaccctgctgctggagaaggaggtggtgcacctgatcctgttctacgagaacagactgaaggaccaccacctggtgatccccagcgtgctgcagggcctgaaggccctgagcctgtgcgtggccctgccccccggcctggccgtgagcgtgctgaaggccatcttccaggaggtgcacgtgcagagcctgccccaggtggacagacacaccgtgtacaacatcatcaccaacttcatgagaaccagagaggagggccccttcgtggaggagctgttcgaggtgaccagctgctacttccccatcgacttcacccccccccccaacgacccccacggcatccagagagaggacctgatcctgagcctgagagccgtgctggccagcacccccagattcgccgagttcctgctgcccctgctgatcgagaaggtggacagcgaggtgctgagcgccaagctggacagcctgcagaccctgaacgcctgctgcgccgtgtacggccagaaggagctgaaggacttcctgcccagcctgtgggccagcatcagaagagaggtgttccagaccgccagcgagagagtggaggccgagggcctggccgccctgcacagcctgaccgcctgcctgagcagaagcgtgctgagagccgacgccgaggacctgctggacagcttcctgagcaacatcctgcaggactgcagacaccacctgtgcgagcccgacatgaagctggtgtggcccagcgccaagctgctgcaggccgccgccggcgccagcgccagagcctgcgacagcgtgaccagcaacgtgctgcccctgctgctggagcagttccacaagcacagccagagcagccagagaagaaccatcctggagatgctgctgggcttcctgaagctgcagcagaagtggagctacgaggacaaggaccagagacccctgaacggcttcaaggaccagctgtgcagcctggtgttcatggccctgaccgaccccagcacccagctgcagctggtgggcatcagaaccctgaccgtgctgggcgcccagcccgacctgctgagctacgaggacctggagctggccgtgggccacctgtacagactgagcttcctgaaggaggacagccagagctgcagagtggccgccctggaggccagcggcaccctggccgccctgtaccccgtggccttcagcagccacctggtgcccaagctggccgaggagctgagagtgggcgagagcaacctgaccaacggcgacgagcccacccagtgcagcagacacctgtgctgcctgcaggccctgagcgccgtgagcacccaccccagcatcgtgaaggagaccctgcccctgctgctgcagcacctgtggcaggtgaacagaggcaacatggtggcccagagcagcgacgtgatcgccgtgtgccagagcctgagacagatggccgagaagtgccagcaggaccccgagagctgctggtacttccaccagaccgccatcccctgcctgctggccctggccgtgcaggccagcatgcccgagaaggagcccagcgtgctgagaaaggtgctgctggaggacgaggtgctggccgccatggtgagcgtgatcggcaccgccaccacccacctgagccccgagctggccgcccagagcgtgacccacatcgtgcccctgttcctggacggcaacgtgagcttcctgcccgagaacagcttccccagcagattccagcccttccaggacggcagcagcggccagagaagactgatcgccctgctgatggccttcgtgtgcagcctgcccagaaacgtggagatcccccagctgaaccagctgatgagagagctgctggagctgagctgctgccacagctgccccttcagcagcaccgccgccgccaagtgcttcgccggcctgctgaacaagcaccccgccggccagcagctggacgagttcctgcagctggccgtggacaaggtggaggccggcctgggcagcggcccctgcagaagccaggccttcaccctgctgctgtgggtgaccaaggccctggtgctgagataccaccccctgagcagctgcctgaccgccagactgatgggcctgctgagcgaccccgagctgggccccgccgccgccgacggcttcagcctgctgatgagcgactgcaccgacgtgctgaccagagccggccacgccgaggtgagaatcatgttcagacagagattcttcaccgacaacgtgcccgccctggtgcagggcttccacgccgccccccaggacgtgaagcccaactacctgaagggcctgagccacgtgctgaacagactgcccaagcccgtgctgctgcccgagctgcccaccctgctgagcctgctgctggaggccctgagctgccccgactgcgtggtgcagctgagcaccctgagctgcctgcagcccctgctgctggaggccccccaggtgatgagcctgcacgtggacaccctggtgaccaagttcctgaacctgagcagcagccccagcatggccgtgagaatcgccgccctgcagtgcatgcacgccctgaccagactgcccacccccgtgctgctgccctacaagccccaggtgatcagagccctggccaagcccctggacgacaagaagagactggtgagaaaggaggccgtgagcgccagaggcgagtggttcctgctgggcagccccggcagctag

SEQ ID NO: 11578 - DNA, 3093 bp, synthetic construct
  misc_feature 1..3093: note = Description of Artificial Sequence: Synthetic coding sequence
  source 1..3093: mol_type = other DNA
atggccgccgccgccgccgtggaggccgccgcccccatgggcgccctgtggggcctggtgcacgacttcgtggtgggccagcaggagggccccgccgaccaggtggccgccgacgtgaagagcggcaactacaccgtgctgcaggtggtggaggccctgggcagcagcctggagaaccccgagcccagaaccagagccagagccatccagctgctgagccaggtgctgctgcactgccacaccctgctgctggagaaggaggtggtgcacctgatcctgttctacgagaacagactgaaggaccaccacctggtgatccccagcgtgctgcagggcctgaaggccctgagcctgtgcgtggccctgccccccggcctggccgtgagcgtgctgaaggccatcttccaggaggtgcacgtgcagagcctgccccaggtggacagacacaccgtgtacaacatcatcaccaacttcatgagaaccagagaggaggagctgaagagcctgggcgccgacttcaccttcggcttcatccaggtgatggacggcgagaaggaccccagaaacctgctggtggccttcagaatcgtgcacgacctgatcagcagagactacagcctgggccccttcgtggaggagctgttcgaggtgaccagctgctacttccccatcgacttcacccccccccccaacgacccccacggcatccagagagaggacctgatcctgagcctgagagccgtgctggccagcacccccagattcgccgagttcctgctgcccctgctgatcgagaaggtggacagcgaggtgctgagcgccaagctggacagcctgcagaccctgaacgcctgctgcgccgtgtacggccagaaggagctgaaggacttcctgcccagcctgtgggccagcatcagaagagaggtgttccagaccgccagcgagagagtggaggccgagggcctggccgccctgcacagcctgaccgcctgcctgagcagaagcgtgctgagagccgacgccgaggacctgctggacagcttcctgagcaacatcctgcaggactgcagacaccacctgtgcgagcccgacatgaagctggtgtggcccagcgccaagctgctgcaggccgccgccggcgccagcgccagagcctgcgacagcgtgaccagcaacgtgctgcccctgctgctggagcagttccacaagcacagccagagcagccagagaagaaccatcctggagatgctgctgggcttcctgaagctgcagcagaagtggagctacgaggacaaggaccagagacccctgaacggcttcaaggaccagctgtgcagcctggtgttcatggccctgaccgaccccagcacccagctgcagctggtgggcatcagaaccctgaccgtgctgggcgcccagcccgacctgctgagctacgaggacctggagctggccgtgggccacctgtacagactgagcttcctgaaggaggacagccagagctgcagagtggccgccctggaggccagcggcaccctggccgccctgtaccccgtggccttcagcagccacctggtgcccaagctggccgaggagctgagagtgggcgagagcaacctgaccaacggcgacgagcccacccagtgcagcagacacctgtgctgcctgcaggccctgagcgccgtgagcacccaccccagcatcgtgaaggagaccctgcccctgctgctgcagcacctgtggcaggtgaacagaggcaacatggtggcccagagcagcgacgtgatcgccgtgtgccagagcctgagacagatggccgagaagtgccagcaggaccccgagagctgctggtacttccaccagaccgccatcccctgcctgctggccctggccgtgcaggccagcatgcccgagaaggagcccagcgtgctgagaaaggtgctgctggaggacgaggtgctggccgccatggtgagcgtgatcggcaccgccaccacccacctgagccccgagctggccgcccagagcgtgacccacatcgtgcccctgttcctggacggcaacgtgagcttcctgcccgagaacagcttccccagcagattccagcccttccaggacggcagcagcggccagagaagactgatcgccctgctgatggccttcgtgtgcagcctgcccagaaacgtggagatcccccagctgaaccagctgatgagagagctgctggagctgagctgctgccacagctgccccttcagcagcaccgccgccgccaagtgcttcgccggcctgctgaacaagcaccccgccggccagcagctggacgagttcctgcagctggccgtggacaaggtggaggccggcctgggcagcggcccctgcagaagccaggccttcaccctgctgctgtgggtgaccaaggccctggtgctgagataccaccccctgagcagctgcctgaccgccagactgatgggcctgctgagcgaccccgagctgggccccgccgccgccgacggcttcagcctgctgatgagcgactgcaccgacgtgctgaccagagccggccacgccgaggtgagaatcatgttcagacagagattcttcaccgacaacgtgcccgccctggtgcagggcttccacgccgccccccaggacgtgaagcccaactacctgaagggcctgagccacgtgctgaacagactgcccaagcccgtgctgctgcccgagctgcccaccctgctgagcctgctgctggaggccctgagctgccccgactgcgtggtgcagctgagcaccctgagctgcctgcagcccctgctgctggaggccccccaggtgatgagcctgcacgtggacaccctggtgaccaagttcctgaacctgagcagcagccccagcatggccgtgagaatcgccgccctgcagtgcatgcacgccctgaccagactgcccacccccgtgctgctgccctacaagccccaggtgatcagagccctggccaagcccctggacgacaagaagagactggtgagaaaggaggccgtgagcgccagaggcgagtggttcctgctgggcagccccggcagctag

SEQ ID NO: 11579 - DNA, 3030 bp, synthetic construct
  misc_feature 1..3030: note = Description of Artificial Sequence: Synthetic coding sequence
  source 1..3030: mol_type = other DNA
atggccgccgccgccgccgtggaggccgccgcccccatgggcgccctgtggggcctggtgcacgacttcgtggtgggccagcaggagggccccgccgaccaggtggccgccagcagcctggagaaccccgagcccagaaccagagccagagccatccagctgctgagccaggtgctgctgcactgccacaccctgctgctggagaaggaggtggtgcacctgatcctgttctacgagaacagactgaaggaccaccacctggtgatccccagcgtgctgcagggcctgaaggccctgagcctgtgcgtggccctgccccccggcctggccgtgagcgtgctgaaggccatcttccaggaggtgcacgtgcaggtggacagacacaccgtgtacaacatcatcaccaacttcatgagaaccagagaggaggagctgaagagcctgggcgccgacttcaccttcggcttcatccaggtgatggacggcgagaaggaccccagaaacctgctggtggccttcagaatcgtgcacgacctgatcagcagagactacagcctgggccccttcgtggaggagctgttcgaggtgaccagctgctacttccccatcgacttcacccccccccccaacgacccccacggcatccagagagaggacctgatcctgagcctgagagccgtgctggccagcacccccagattcgccgagttcctgctgcccctgctgatcgagaaggtggacagcgaggtgctgagcgccaagctggacagcctgcagaccctgaacgcctgctgcgccgtgtacggccagaaggagctgaaggacttcctgcccagcctgtgggccagcatcagaagagaggtgttccagaccgccagcgagagagtggaggccgagggcctggccgccctgcacagcctgaccgcctgcctgagcagaagcgtgctgagagccgacgccgaggacctgctggacagcttcctgagcaacatcctgcaggactgcagacaccacctgtgcgagcccgacatgaagctggtgtggcccagcgccaagctgctgcaggccgccgccggcgccagcgccagagcctgcgacagcgtgaccagcaacgtgctgcccctgctgctggagcagttccacaagcacagccagagcagccagagaagaaccatcctggagatgctgctgggcttcctgaagctgcagcagaagtggagctacgaggacaaggaccagagacccctgaacggcttcaaggaccagctgtgcagcctggtgttcatggccctgaccgaccccagcacccagctgcagctggtgggcatcagaaccctgaccgtgctgggcgcccagcccgacctgctgagctacgaggacctggagctggccgtgggccacctgtacagactgagcttcctgaaggaggacagccagagctgcagagtggccgccctggaggccagcggcaccctggccgccctgtaccccgtggccttcagcagccacctggtgcccaagctggccgaggagctgagagtgggcgagagcaacctgaccaacggcgacgagcccacccagtgcagcagacacctgtgctgcctgcaggccctgagcgccgtgagcacccaccccagcatcgtgaaggagaccctgcccctgctgctgcagcacctgtggcaggtgaacagaggcaacatggtggcccagagcagcgacgtgatcgccgtgtgccagagcctgagacagatggccgagaagtgccagcaggaccccgagagctgctggtacttccaccagaccgccatcccctgcctgctggccctggccgtgcaggccagcatgcccgagaaggagcccagcgtgctgagaaaggtgctgctggaggacgaggtgctggccgccatggtgagcgtgatcggcaccgccaccacccacctgagccccgagctggccgcccagagcgtgacccacatcgtgcccctgttcctggacggcaacgtgagcttcctgcccgagaacagcttccccagcagattccagcccttccaggacggcagcagcggccagagaagactgatcgccctgctgatggccttcgtgtgcagcctgcccagaaacgtggagatcccccagctgaaccagctgatgagagagctgctggagctgagctgctgccacagctgccccttcagcagcaccgccgccgccaagtgcttcgccggcctgctgaacaagcaccccgccggccagcagctggacgagttcctgcagctggccgtggacaaggtggaggccggcctgggcagcggcccctgcagaagccaggccttcaccctgctgctgtgggtgaccaaggccctggtgctgagataccaccccctgagcagctgcctgaccgccagactgatgggcctgctgagcgaccccgagctgggccccgccgccgccgacggcttcagcctgctgatgagcgactgcaccgacgtgctgaccagagccggccacgccgaggtgagaatcatgttcagacagagattcttcaccgacaacgtgcccgccctggtgcagggcttccacgccgccccccaggacgtgaagcccaactacctgaagggcctgagccacgtgctgaacagactgcccaagcccgtgctgctgcccgagctgcccaccctgctgagcctgctgctggaggccctgagctgccccgactgcgtggtgcagctgagcaccctgagctgcctgcagcccctgctgctggaggccccccaggtgatgagcctgcacgtggacaccctggtgaccaagttcctgaacctgagcagcagccccagcatggccgtgagaatcgccgccctgcagtgcatgcacgccctgaccagactgcccacccccgtgctgctgccctacaagccccaggtgatcagagccctggccaagcccctggacgacaagaagagactggtgagaaaggaggccgtgagcgccagaggcgagtggttcctgctgggcagccccggcagctag

SEQ ID NO: 11580 - DNA, 3093 bp, synthetic construct; identical to SEQ ID NO: 11578
  misc_feature 1..3093: note = Description of Artificial Sequence: Synthetic coding sequence
  source 1..3093: mol_type = other DNA

SEQ ID NO: 11581 - DNA, 1734 bp, synthetic construct
  misc_feature 1..1734: note = Description of Artificial Sequence: Synthetic coding sequence
  source 1..1734: mol_type = other DNA
atgcccaagaccatcagcgtgagagtgaccaccatggacgccgagctggagttcgccatccagcccaacaccaccggcaagcagctgttcgaccaggtggtgaagaccatcggcctgagagaggtgtggttcttcggcctgcagtaccaggacaccaagggcttcagcacctggctgaagctgaacaagaaggtgaccgcccaggacgtgagaaaggagagccccctgctgttcaagttcagagccaagttctaccccgaggacgtgagcgaggagctgatccaggacatcacccagagactgttcttcctgcaggtgaaggagggcatcctgaacgacgacatctactgcccccccgagaccgccgtgctgctggccagctacgccgtgcagagcaagtacggcgacttcaacaaggaggtgcacaagagcggctacctggccggcgacaagctgctgccccagagagtgctggagcagcacaagctgaacaaggaccagtgggaggagagaatccaggtgtggcacgaggagcacagaggcatgctgagagaggacgccgtgctggagtacctgaagatcgcccaggacctggagatgtacggcgtgaactacttcagcatcaagaacaagaagggcagcgagctgtggctgggcgtggacgccctgggcctgaacatctacgagcagaacgacagactgacccccaagatcggcttcccctggagcgagatcagaaacatcagcttcaacgacaagaagttcgtgatcaagcccatcgacaagaaggcccccgacttcgtgttctacgcccccagactgagaatcaacaagagaatcctggccctgtgcatgggcaaccacgagctgtacatgagaagaagaaagcccgacaccatcgaggtgcagcagatgaaggcccaggccagagaggagaagcaccagaagcagatggagagagccatgctggagaacgagaagaagaagagagagatggccgagaaggagaaggagaagatcgagagagagaaggaggagctgatggagagactgaagcagatcgaggagcagaccaagaaggcccagcaggagctggaggagcagaccagaagagccctggagctggagcaggagagaaagagagcccagagcgaggccgagaagctggccaaggagagacaggaggccgaggaggccaaggaggccctgctgcaggccagcagagaccagaagaagacccaggagcagctggccctggagatggccgagctgaccgccagaatcagccagctggagatggccagacagaagaaggagagcgaggccgtggagtggcagcagaaggcccagatggtgcaggaggacctggagaagaccagagccgagctgaagaccgccatgagcaccccccacgtggccgagcccgccgagaacgagcaggacgagcaggacgagaacggcgccgaggccagcgccgacctgagagccgacgccatggccaaggacagaagcgaggaggagagaaccaccgaggccgagaagaacgagagagtgcagaagcacctgaaggccctgaccagcgagctggccaacgccagagacgagagcaagaagaccgccaacgacatgatccacgccgagaacatgagactgggcagagacaagtacaagaccctgagacagatcagacagggcaacaccaagcagagaatcgacgagttcgagagcatgtag

SEQ ID NO: 11582 - DNA, 717 bp, synthetic construct
  misc_feature 1..717: note = Description of Artificial Sequence: Synthetic coding sequence
  source 1..717: mol_type = other DNA
atgagattcaagaacagattccagagattcatgaaccacagagcccccgccaacggcagatacaagcccacctgctacgagcacgccgccaactgctacacccacgccttcctgatcgtgcccgccatcgtgggcagcgccctgctgcacagactgagcgacgactgctgggagaagatcaccgcctggatctacggcatgggcctgtgcgccctgttcatcgtgagcaccgtgttccacatcgtgagctggaagaagagccacctgagaaccgtggagcactgcttccacatgtgcgacagaatggtgatctacttcttcatcgccgccagctacgccccctggctgaacctgagagagctgggccccctggccagccacatgagatggttcatctggctgatggccgccggcggcaccatctacgtgttcctgtaccacgagaagtacaaggtggtggagctgttcttctacctgaccatgggcttcagccccgccctggtggtgaccagcatgaacaacaccgacggcctgcaggagctggcctgcggcggcctgatctactgcctgggcgtggtgttcttcaagagcgacggcatcatccccttcgcccacgccatctggcacctgttcgtggccaccgccgccgccgtgcactactacgccatctggaagtacctgtacagaagccccaccgacttcatgagacacctgtag

SEQ ID NO: 11583 - DNA, 2127 bp, synthetic construct
  misc_feature 1..2127: note = Description of Artificial Sequence: Synthetic coding sequence
  source 1..2127: mol_type = other DNA
atgagcaccgccgacgccctggacgacgagaacaccttcaagatcctggtggccaccgacatccacctgggcttcatggagaaggacgccgtgagaggcaacgacaccttcgtgaccctggacgagatcctgagactggcccaggagaacgaggtggacttcatcctgctgggcggcgacctgttccacgagaacaagcccagcagaaagaccctgcacacctgcctggagctgctgagaaagtactgcatgggcgacagacccgtgcagttcgagatcctgagcgaccagagcgtgaacttcggcttcagcaagttcccctgggtgaactaccaggacggcaacctgaacatcagcatccccgtgttcagcatccacggcaaccacgacgaccccaccggcgccgacgccctgtgcgccctggacatcctgagctgcgccggcttcgtgaaccacttcggcagaagcatgagcgtggagaagatcgacatcagccccgtgctgctgcagaagggcagcaccaagatcgccctgtacggcctgggcagcatccccgacgagagactgtacagaatgttcgtgaacaagaaggtgaccatgctgagacccaaggaggacgagaacagctggttcaacctgttcgtgatccaccagaacagaagcaagcacggcagcaccaacttcatccccgagcagttcctggacgacttcatcgacctggtgatctggggccacgagcacgagtgcaagatcgcccccaccaagaacgagcagcagctgttctacatcagccagcccggcagcagcgtggtgaccagcctgagccccggcgaggccgtgaagaagcacgtgggcctgctgagaatcaagggcagaaagatgaacatgcacaagatccccctgcacaccgtgagacagttcttcatggaggacatcgtgctggccaaccaccccgacatcttcaaccccgacaaccccaaggtgacccaggccatccagagcttctgcctggagaagatcgaggagatgctggagaacgccgagagagagagactgggcaacagccaccagcccgagaagcccctggtgagactgagagtggactacagcggcggcttcgagcccttcagcgtgctgagattcagccagaagttcgtggacagagtggccaaccccaaggacatcatccacttcttcagacacagagagcagaaggagaagaccggcgaggagatcaacttcggcaagctgatcaccaagcccagcgagggcaccaccctgagagtggaggacctggtgaagcagtacttccagaccgccgagaagaacgtgcagctgagcctgctgaccgagagaggcatgggcgaggccgtgcaggagttcgtggacaaggaggagaaggacgccatcgaggagctggtgaagtaccagctggagaagacccagagattcctgaaggagagacacatcgacgccctggaggacaagatcgacgaggaggtgagaagattcagagagaccagacagaagaacaccaacgaggaggacgacgaggtgagagaggccatgaccagagccagagccctgagaagccagagcgaggagagcgccagcgccttcagcgccgacgacctgatgagcatcgacctggccgagcagatggccaacgacagcgacgacagcatcagcgccgccaccaacaagggcagaggcagaggcagaggcagaagaggcggcagaggccagaacagcgccagcagaggcggcagccagagaggcagagccgacaccggcctggagaccagcaccagaagcagaaacagcaagaccgccgtgagcgccagcagaaacatgagcatcatcgacgccttcaagagcaccagacagcagcccagcagaaacgtgaccaccaagaactacagcgaggtgatcgaggtggacgagagcgacgtggaggaggacatcttccccaccaccagcaagaccgaccagagatggagcagcaccagcagcagcaagatcatgagccagagccaggtgagcaagggcgtggacttcgagagcagcgaggacgacgacgacgaccccttcatgaacaccagcagcctgagaagaaacagaagatag

SEQ ID NO: 11584 - DNA, 2043 bp, synthetic construct
  misc_feature 1..2043: note = Description of Artificial Sequence: Synthetic coding sequence
  source 1..2043: mol_type = other DNA
atgagcaccgccgacgccctggacgacgagaacaccttcaagatcctggtggccaccgacatccacctgggcttcatggagaaggacgccgtgagaggcaacgacaccttcgtgaccctggacgagatcctgagactggcccaggagaacgaggtggacttcatcctgctgggcggcgacctgttccacgagaacaagcccagcagaaagaccctgcacacctgcctggagctgctgagaaagtactgcatgggcgacagacccgtgcagttcgagatcctgagcgaccagagcgtgaacttcggcttcagcaagttcccctgggtgaactaccaggacggcaacctgaacatcagcatccccgtgttcagcatccacggcaaccacgacgaccccaccggcgccgacgccctgtgcgccctggacatcctgagctgcgccggcttcgtgaaccacttcggcagaagcatgagcgtggagaagatcgacatcagccccgtgctgctgcagaagggcagcaccaagatcgccctgtacggcctgggcagcatccccgacgagagactgtacagaatgttcgtgaacaagaaggtgaccatgctgagacccaaggaggacgagaacagctggttcaacctgttcgtgatccaccagaacagaagcaagcacggcagcaccaacttcatccccgagcagttcctggacgacttcatcgacctggtgatctggggccacgagcacgagtgcaagatcgcccccaccaagaacgagcagcagctgttctacatcagccagcccggcagcagcgtggtgaccagcctgagccccggcgaggccgtgaagaagcacgtgggcctgctgagaatcaagggcagaaagatgaacatgcacaagatccccctgcacaccgtgagacagttcttcatggaggacatcgtgctggccaaccaccccgacatcttcaaccccgacaaccccaaggtgacccaggccatccagagcttctgcctggagaagatcgaggagatgctggagaacgccgagagagagagactgggcaacagccaccagcccgagaagcccctggtgagactgagagtggactacagcggcggcttcgagcccttcagcgtgctgagattcagccagaagttcgtggacagagtggccaaccccaaggacatcatccacttcttcagacacagagagcagaaggagaagaccggcgaggagatcaacttcggcaagctgatcaccaagcccagcgagggcaccaccctgagagtggaggacctggtgaagcagtacttccagaccgccgagaagaacgtgcagctgagcctgctgaccgagagaggcatgggcgaggccgtgcaggagttcgtggacaaggaggagaaggacgccatcgaggagctggtgaagtaccagctggagaagacccagagattcctgaaggagagacacatcgacgccctggaggacaagatcgacgaggaggtgagaagattcagagagaccagacagaagaacaccaacgaggaggacgacgaggtgagagaggccatgaccagagccagagccctgagaagccagagcgaggagagcgccagcgccttcagcgccgacgacctgatgagcatcgacctggccgagcagatggccaacgacagcgacgacagcatcagcgccgccaccaacaagggcagaggcagaggcagaggcagaagaggcggcagaggccagaacagcgccagcagaggcggcagccagagaggcagagccttcaagagcaccagacagcagcccagcagaaacgtgaccaccaagaactacagcgaggtgatcgaggtggacgagagcgacgtggaggaggacatcttccccaccaccagcaagaccgaccagagatggagcagcaccagcagcagcaagatcatgagccagagccaggtgagcaagggcgtggacttcgagagcagcgaggacgacgacgacgaccccttcatgaacaccagcagcctgagaagaaacagaagatag

SEQ ID NO: 11585 - DNA, 2124 bp, synthetic construct
  misc_feature 1..2124: note = Description of Artificial Sequence: Synthetic coding sequence
  source 1..2124: mol_type = other DNA
atgagcaccgccgacgccctggacgacgagaacaccttcaagatcctggtggccaccgacatccacctgggcttcatggagaaggacgccgtgagaggcaacgacaccttcgtgaccctggacgagatcctgagactggcccaggagaacgaggtggacttcatcctgctgggcggcgacctgttccacgagaacaagcccagcagaaagaccctgcacacctgcctggagctgctgagaaagtactgcatgggcgacagacccgtgcagttcgagatcctgagcgaccagagcgtgaacttcggcttcagcaagttcccctgggtgaactaccaggacggcaacctgaacatcagcatccccgtgttcagcatccacggcaaccacgacgaccccaccggcgccgacgccctgtgcgccctggacatcctgagctgcgccggcttcgtgaaccacttcggcagaagcatgagcgtggagaagatcgacatcagccccgtgctgctgcagaagggcagcaccaagatcgccctgtacggcctgggcagcatccccgacgagagactgtacagaatgttcgtgaacaagaaggtgaccatgctgagacccaaggaggacgagaacagctggttcaacctgttcgtgatccaccagaacagaagcaagcacggcagcaccaacttcatccccgagcagttcctggacgacttcatcgacctggtgatctggggccacgagcacgagtgcaagatcgcccccaccaagaacgagcagcagctgttctacatcagccagcccggcagcagcgtggtgaccagcctgagccccggcgaggccgtgaagaagcacgtgggcctgctgagaatcaagggcagaaagatgaacatgcacaagatccccctgcacaccgtgagacagttcttcatggaggacatcgtgctggccaaccaccccgacatcttcaaccccgacaaccccaaggtgacccaggccatccagagcttctgcctggagaagatcgaggagatgctggagaacgccgagagagagagactgggcaacagccaccagcccgagaagcccctggtgagactgagagtggactacagcggcggcttcgagcccttcagcgtgctgagattcagccagaagttcgtggacagagtggccaaccccaaggacatcatccacttcttcagacacagagagcagaaggagaagaccggcgaggagatcaacttcggcaagctgatcaccaagcccagcgagggcaccaccctgagagtggaggacctggtgaagcagtacttccagaccgccgagaagaacgtgcagctgagcctgctgaccgagagaggcatgggcgaggccgtgcaggagttcgtggacaaggaggagaaggacgccatcgaggagctggtgaagtaccagctggagaagacccagagattcctgaaggagagacacatcgacgccctggaggacaagatcgacgaggaggtgagaagattcagagagaccagacagaagaacaccaacgaggaggacgacgaggtgagagaggccatgaccagagccagagccctgagaagccagagcgaggagagcgccagcgccttcagcgccgacgacctgatgagcatcgacctggccgagcagatggccaacgacagcgacgacagcatcagcgccgccaccaacaagggcagaggcagaggcagaggcagaagaggcggcagaggccagaacagcgccagcagaggcggcagccagagaggcagagacaccggcctggagaccagcaccagaagcagaaacagcaagaccgccgtgagcgccagcagaaacatgagcatcatcgacgccttcaagagcaccagacagcagcccagcagaaacgtgaccaccaagaactacagcgaggtgatcgaggtggacgagagcgacgtggaggaggacatcttccccaccaccagcaagaccgaccagagatggagcagcaccagcagcagcaagatcatgagccagagccaggtgagcaagggcgtggacttcgagagcagcgaggacgacgacgacgaccccttcatgaacaccagcagcctgagaagaaacagaagatag

SEQ ID NO: 11586 - DNA, 2136 bp, synthetic construct
  misc_feature 1..2136: note = Description of Artificial Sequence: Synthetic coding sequence
  source 1..2136: mol_type = other DNA
atgaacagaaacatcagccaccagaagggcgacgacgagaacaccttcaagatcctggtggccaccgacatccacctgggcttcatggagaaggacgccgtgagaggcaacgacaccttcgtgaccctggacgagatcctgagactggcccaggagaacgaggtggacttcatcctgctgggcggcgacctgttccacgagaacaagcccagcagaaagaccctgcacacctgcctggagctgctgagaaagtactgcatgggcgacagacccgtgcagttcgagatcctgagcgaccagagcgtgaacttcggcttcagcaagttcccctgggtgaactaccaggacggcaacctgaacatcagcatccccgtgttcagcatccacggcaaccacgacgaccccaccggcgccgacgccctgtgcgccctggacatcctgagctgcgccggcttcgtgaaccacttcggcagaagcatgagcgtggagaagatcgacatcagccccgtgctgctgcagaagggcagcaccaagatcgccctgtacggcctgggcagcatccccgacgagagactgtacagaatgttcgtgaacaagaaggtgaccatgctgagacccaaggaggacgagaacagctggttcaacctgttcgtgatccaccagaacagaagcaagcacggcagcaccaacttcatccccgagcagttcctggacgacttcatcgacctggtgatctggggccacgagcacgagtgcaagatcgcccccaccaagaacgagcagcagctgttctacatcagccagcccggcagcagcgtggtgaccagcctgagccccggcgaggccgtgaagaagcacgtgggcctgctgagaatcaagggcagaaagatgaacatgcacaagatccccctgcacaccgtgagacagttcttcatggaggacatcgtgctggccaaccaccccgacatcttcaaccccgacaaccccaaggtgacccaggccatccagagcttctgcctggagaagatcgaggagatgctggagaacgccgagagagagagactgggcaacagccaccagcccgagaagcccctggtgagactgagagtggactacagcggcggcttcgagcccttcagcgtgctgagattcagccagaagttcgtggacagagtggccaaccccaaggacatcatccacttcttcagacacagagagcagaaggagaagaccggcgaggagatcaacttcggcaagctgatcaccaagcccagcgagggcaccaccctgagagtggaggacctggtgaagcagtacttccagaccgccgagaagaacgtgcagctgagcctgctgaccgagagaggcatgggcgaggccgtgcaggagttcgtggacaaggaggagaaggacgccatcgaggagctggtgaagtaccagctggagaagacccagagattcctgaaggagagacacatcgacgccctggaggacaagatcgacgaggaggtgagaagattcagagagaccagacagaagaacaccaacgaggaggacgacgaggtgagagaggccatgaccagagccagagccctgagaagccagagcgaggagagcgccagcgccttcagcgccgacgacctgatgagcatcgacctggccgagcagatggccaacgacagcgacgacagcatcagcgccgccaccaacaagggcagaggcagaggcagaggcagaagaggcggcagaggccagaacagcgccagcagaggcggcagccagagaggcagagccgacaccggcctggagaccagcaccagaagcagaaacagcaagaccgccgtgagcgccagcagaaacatgagcatcatcgacgccttcaagagcaccagacagcagcccagcagaaacgtgaccaccaagaactacagcgaggtgatcgaggtggacgagagcgacgtggaggaggacatcttccccaccaccagcaagaccgaccagagatggagcagcaccagcagcagcaagatcatgagccagagccaggtgagcaagggcgtggacttcgagagcagcgaggacgacgacgacgaccccttcatgaacaccagcagcctgagaagaaacagaagatag

SEQ ID NO: 11587 - DNA, 384 bp, synthetic construct
  misc_feature 1..384: note = Description of Artificial Sequence: Synthetic coding sequence
  source 1..384: mol_type = other DNA
atgagcaccgccgacgccctggacgacgagaacaccttcaagatcctggtggccaccgacatccacctgggcttcatggagaaggacgccgtgagaggcaacgacaccttcgtgaccctggacgagatcctgagactggcccaggagaacgaggtggacttcatcctgctgggcggcgacctgttccacgagaacaagcccagcagaaagaccctgcacacctgcctggagctgctgagaaagtactgcatgggcgacagacccgtgcagttcgagatcctgagcgaccagagcgtgaacttcggcttcagcaagttcccctgggtgaactaccaggacggcaacctgaacatcagcatccccgtgttcagcatccacggctag

SEQ ID NO: 11588 - DNA, 336 bp, synthetic construct
  misc_feature 1..336: note = Description of Artificial Sequence: Synthetic coding sequence
  source 1..336: mol_type = other DNA
atgagcaccgccgacgccctggacgacgagaacaccttcaagatcctggtggccaccgacatccacctgggcttcatggagaaggacgccgtgagaggcaacgacaccttcgtgaccctggacgagatcctgagactggcccaggagaacgaggtggacttcatcctgctgggcggcgacctgttccacgagaacaagcccagcagaaagaccctgcacacctgcctggagctgctgagaaagtactgcatgggcgacagacccgtgcagttcgagatcctgagcgaccagagcgtgaacttcggcttcagcaagttcccctgggtgaactactag

SEQ ID NO: 11589 - DNA, 666 bp, synthetic construct
  misc_feature 1..666: note = Description of Artificial Sequence: Synthetic coding sequence
  source 1..666: mol_type = other DNA
atgagcaccgccgacgccctggacgacgagaacaccttcaagatcctggtggccaccgacatccacctgggcttcatggagaaggacgccgtgagaggcaacgacaccttcgtgaccctggacgagatcctgagactggcccaggagaacgaggtggacttcatcctgctgggcggcgacctgttccacgagaacaagcccagcagaaagaccctgcacacctgcctggagctgctgagaaagtactgcatgggcgacagacccgtgcagttcgagatcctgagcgaccagagcgtgaacttcggcttcagcaagttcccctgggtgaactaccaggacggcaacctgaacatcagcatccccgtgttcagcatccacggcaaccacgacgaccccaccggcgccgacgccctgtgcgccctggacatcctgagctgcgccggcttcgtgaaccacttcggcagaagcatgagcgtggagaagatcgacatcagccccgtgctgctgcagaagggcagcaccaagatcgccctgtacggcctgggcagcatccccgacgagagactgtacagaatgttcgtgaacaagaaggtgaccatgctgagacccaaggaggacgagaacagctggttcaacctgttcgtgatccaccagaacagagtgtag

SEQ ID NO: 11590 - DNA, 822 bp, synthetic construct
  misc_feature 1..822: note = Description of Artificial Sequence: Synthetic coding sequence
  source 1..822: mol_type = other DNA
atgacccccggcacccagagccccttcttcctgctgctgctgctgaccgtgctgaccgtggtgaccggcagcggccacgccagcagcacccccggcggcgagaaggagaccagcgccacccagagaagcagcgtgcccagcagcaccgagaagaacgccctgagcaccggcgtgagcttcttcttcctgagcttccacatcagcaacctgcagttcaacagcagcctggaggaccccagcaccgactactaccaggagctgcagagagacatcagcgagatgttcctgcagatctacaagcagggcggcttcctgggcctgagcaacatcaagttcagacccggcagcgtggtggtgcagctgaccctggccttcagagagggcaccatcaacgtgcacgacgtggagacccagttcaaccagtacaagaccgaggccgccagcagatacaacctgaccatcagcgacgtgagcgtgagcgacgtgcccttccccttcagcgcccagagcggcgccggcgtgcccggctggggcatcgccctgctggtgctggtgtgcgtgctggtggccctggccatcgtgtacctgatcgccctggccgtgtgccagtgcagaagaaagaactacggccagctggacatcttccccgccagagacacctaccaccccatgagcgagtaccccacctaccacacccacggcagatacgtgccccccagcagcaccgacagaagcccctacgagaaggtgagcgccggcaacggcggcagcagcctgagctacaccaaccccgccgtggccgccaccagcgccaacctgtag

SEQ ID NO: 11591 - DNA, 675 bp, synthetic construct
  misc_feature 1..675: note = Description of Artificial Sequence: Synthetic coding sequence
  source 1..675: mol_type = other DNA
atgacccccggcacccagagccccttcttcctgctgctgctgctgaccgtgctgaccgccaccaccgcccccaagcccgccaccgtggtgaccggcagcggccacgccagcagcacccccggcggcgagaaggagaccagcgccacccagagaagcagcgtgcccagcagcaccgagaagaacgccttcagacccggcagcgtggtggtgcagctgaccctggccttcagagagggcaccatcaacgtgcacgacgtggagacccagttcaaccagtacaagaccgaggccgccagcagatacaacctgaccatcagcgacgtgagcgtgagcgacgtgcccttccccttcagcgcccagagcggcgccggcgtgcccggctggggcatcgccctgctggtgctggtgtgcgtgctggtggccctggccatcgtgtacctgatcgccctggccgtgtgccagtgcagaagaaagaactacggccagctggacatcttccccgccagagacacctaccaccccatgagcgagtaccccacctaccacacccacggcagatacgtgccccccagcagcaccgacagaagcccctacgagaaggtgagcgccggcaacggcggcagcagcctgagctacaccaaccccgccgtggccgccaccagcgccaacctgtag

SEQ ID NO: 11592 - DNA, 501 bp, synthetic construct
  misc_feature 1..501: note = Description of Artificial Sequence: Synthetic coding sequence
  source 1..501: mol_type = other DNA
atgacccccggcacccagagccccttcttcctgctgctgctgctgaccgtgctgaccgccaccaccgcccccaagcccgccaccgtggtgaccggcagcggccacgccagcagcacccccggcggcgagaaggagaccagcgccacccagagaagcagcgtgcccagcagcaccgagaagaacgccagcggcgccggcgtgcccggctggggcatcgccctgctggtgctggtgtgcgtgctggtggccctggccatcgtgtacctgatcgccctggccgtgtgccagtgcagaagaaagaactacggccagctggacatcttccccgccagagacacctaccaccccatgagcgagtaccccacctaccacacccacggcagatacgtgccccccagcagcaccgacagaagcccctacgagaaggtgagcgccggcaacggcggcagcagcctgagctacaccaaccccgccgtggccgccaccagcgccaacctgtag

SEQ ID NO: 11593 - DNA, 612 bp, synthetic construct
  misc_feature 1..612: note = Description of Artificial Sequence: Synthetic coding sequence
  source 1..612: mol_type = other DNA
atgacccccggcacccagagccccttcttcctgctgctgctgctgaccgtgctgaccgtggtgaccggcagcggccacgccagcagcacccccggcggcgagaaggagaccagcgccacccagagaagcagcgtgcccagcagcaccgagaagaacgccatccccgcccccaccaccaccaagagctgcagagagaccttcctgaagtgcttctgcagattcatcaacaagggcgtgttctgggccagccccatcctgagcagcgtgagcgacgtgcccttccccttcagcgcccagagcggcgccggcgtgcccggctggggcatcgccctgctggtgctggtgtgcgtgctggtggccctggccatcgtgtacctgatcgccctggccgtgtgccagtgcagaagaaagaactacggccagctggacatcttccccgccagagacacctaccaccccatgagcgagtaccccacctaccacacccacggcagatacgtgccccccagcagcaccgacagaagcccctacgagaaggtgagcgccggcaacggcggcagcagcctgagctacaccaaccccgccgtggccgccaccagcgccaacctgtag

SEQ ID NO: 11594 - DNA, 507 bp, synthetic construct
  misc_feature 1..507: note = Description of Artificial Sequence: Synthetic coding sequence
  source 1..507: mol_type = other DNA
atgacccccggcacccagagccccttcttcctgctgctgctgctgaccgtgctgaccgtggtgaccggcagcggccacgccagcagcacccccggcggcgagaaggagaccagcgccacccagagaagcagcgtgcccagcagcaccgagaagaacgccctgagcaccggcgtgagcttcttcttcctgagcttccacatcagcaacctgcagttcaacagcagcctggaggaccccagcaccgactactaccaggagctgcagagagacatcagcgagatggccgtgtgccagtgcagaagaaagaactacggccagctggacatcttccccgccagagacacctaccaccccatgagcgagtaccccacctaccacacccacggcagatacgtgccccccagcagcaccgacagaagcccctacgagaaggtgagcgccggcaacggcggcagcagcctgagctacaccaaccccgccgtggccgccaccagcgccaacctgtag

SEQ ID NO: 11595 - DNA, 768 bp, synthetic construct
  misc_feature 1..768: note = Description of Artificial Sequence: Synthetic coding sequence
  source 1..768: mol_type = other DNA
atgacccccggcacccagagccccttcttcctgctgctgctgctgaccgtgctgaccgtggtgaccggcagcggccacgccagcagcacccccggcggcgagaaggagaccagcgccacccagagaagcagcgtgcccagcagcaccgagaagaacgccttcaacagcagcctggaggaccccagcaccgactactaccaggagctgcagagagacatcagcgagatgttcctgcagatctacaagcagggcggcttcctgggcctgagcaacatcaagttcagacccggcagcgtggtggtgcagctgaccctggccttcagagagggcaccatcaacgtgcacgacgtggagacccagttcaaccagtacaagaccgaggccgccagcagatacaacctgaccatcagcgacgtgagcgtgagcgacgtgcccttccccttcagcgcccagagcggcgccggcgtgcccggctggggcatcgccctgctggtgctggtgtgcgtgctggtggccctggccatcgtgtacctgatcgccctggccgtgtgccagtgcagaagaaagaactacggccagctggacatcttccccgccagagacacctaccaccccatgagcgagtaccccacctaccacacccacggcagatacgtgccccccagcagcaccgacagaagcccctacgagaaggtgagcgccggcaacggcggcagcagcctgagctacaccaaccccgccgtggccgccaccagcgccaacctgtag

SEQ ID NO: 11596 - DNA, 795 bp, synthetic construct
  misc_feature 1..795: note = Description of Artificial Sequence: Synthetic coding sequence
  source 1..795: mol_type = other DNA
atgacccccggcacccagagccccttcttcctgctgctgctgctgaccgtgctgaccgccaccaccgcccccaagcccgccaccgtggtgaccggcagcggccacgccagcagcacccccggcggcgagaaggagaccagcgccacccagagaagcagcgtgcccagcagcaccgagaagaacgccttcaacagcagcctggaggaccccagcaccgactactaccaggagctgcagagagacatcagcgagatgttcctgcagatctacaagcagggcggcttcctgggcctgagcaacatcaagttcagacccggcagcgtggtggtgcagctgaccctggccttcagagagggcaccatcaacgtgcacgacgtggagacccagttcaaccagtacaagaccgaggccgccagcagatacaacctgaccatcagcgacgtgagcgtgagcgacgtgcccttccccttcagcgcccagagcggcgccggcgtgcccggctggggcatcgccctgctggtgctggtgtgcgtgctggtggccctggccatcgtgtacctgatcgccctggccgtgtgccagtgcagaagaaagaactacggccagctggacatcttccccgccagagacacctaccaccccatgagcgagtaccccacctaccacacccacggcagatacgtgccccccagcagcaccgacagaagcccctacgagaaggtgagcgccggcaacggcggcagcagcctgagctacaccaaccccgccgtggccgccaccagcgccaacctgtag

SEQ ID NO: 11597 - DNA, 597 bp, synthetic construct
  misc_feature 1..597: note = Description of Artificial Sequence: Synthetic coding sequence
  source 1..597: mol_type = other DNA
atgacccccggcacccagagccccttcttcctgctgctgctgctgaccgtgctgaccgtggtgaccggcagcggccacgccagcagcacccccggcggcgagaaggagaccagcgccacccagagaagcagcgtgcccagcagcaccgagaagaacgccctgagcaccggcgtgagcttcttcttcctgagcttccacatcagcaacctgcagttcaacagcagcctggaggaccccagcaccgactactaccaggagctgcagagagacatcagcgagatgttcctgcagatctacaagcagggcggcttcctgggcctgagcaacatcaagttcagacccggcagcgtggtggtgcagctgaccctggccttcagagagggcaccatcaacgtgcacgacgtggagacccagttcaaccagtacaagaccgaggccgccagcagatacaacctgaccatcagcgacgtgagcggctgcctgagcgtgccccccaaggagctgagagccgccggccacctgagcagccccggctacctgcccagctacgagagagtgccccacctgccccacccctgggccctgtgcgccccctag

SEQ ID NO: 11598 - DNA, 1428 bp, synthetic construct
  misc_feature 1..1428: note = Description of Artificial Sequence: Synthetic coding sequence
  source 1..1428: mol_type = other DNA
atgacccccggcacccagagccccttcttcctgctgctgctgctgaccgtgctgaccgtggtgaccggcagcggccacgccagcagcacccccggcggcgagaaggagaccagcgccacccagagaagcagcgtgcccagcagcaccgagaagaacgccgtgagcatgaccagcagcgtgctgagcagccacagccccggcagcggcagcagcaccacccagggccaggacgtgaccctggcccccgccaccgagcccgccagcggcagcgccgccacctggggccaggacgtgaccagcgtgcccgtgaccagacccgccctgggcagcaccaccccccccgcccacgacgtgaccagcgcccccgacaacaagcccgcccccggcagcaccgccccccccgcccacggcgtgaccagcgcccccgacaccagacccgcccccggcagcaccgccccccccgcccacggcgtgaccagcgcccccgacaacagacccgccctgggcagcaccgccccccccgtgcacaacgtgaccagcgccagcggcagcgccagcggcagcgccagcaccctggtgcacaacggcaccagcgccagagccaccaccacccccgccagcaagagcacccccttcagcatccccagccaccacagcgacacccccaccaccctggccagccacagcaccaagaccgacgccagcagcacccaccacagcaccgtgccccccctgaccagcagcaaccacagcaccagcccccagctgagcaccggcgtgagcttcttcttcctgagcttccacatcagcaacctgcagttcaacagcagcctggaggaccccagcaccgactactaccaggagctgcagagagacatcagcgagatgttcctgcagatctacaagcagggcggcttcctgggcctgagcaacatcaagttcagacccggcagcgtggtggtgcagctgaccctggccttcagagagggcaccatcaacgtgcacgacgtggagacccagttcaaccagtacaagaccgaggccgccagcagatacaacctgaccatcagcgacgtgagcgtgagcgacgtgcccttccccttcagcgcccagagcggcgccggcgtgcccggctggggcatcgccctgctggtgctggtgtgcgtgctggtggccctggccatcgtgtacctgatcgccctggccgtgtgccagtgcagaagaaagaactacggccagctggacatcttccccgccagagacacctaccaccccatgagcgagtaccccacctaccacacccacggcagatacgtgccccccagcagcaccgacagaagcccctacgagaaggtgagcgccggcaacggcggcagcagcctgagctacaccaaccccgccgtggccgccaccagcgccaacctgtag

SEQ ID NO: 11599 - DNA, 480 bp, synthetic construct
  misc_feature 1..480: note = Description of Artificial Sequence: Synthetic coding sequence
  source 1..480: mol_type = other DNA
atgacccccggcacccagagccccttcttcctgctgctgctgctgaccgtgctgaccgccaccaccgcccccaagcccgccaccgtggtgaccggcagcggccacgccagcagcacccccggcggcgagaaggagaccagcgccacccagagaagcagcgtgcccagcagcaccgagaagaacgccttcaacagcagcctggaggaccccagcaccgactactaccaggagctgcagagagacatcagcgagatggccgtgtgccagtgcagaagaaagaactacggccagctggacatcttccccgccagagacacctaccaccccatgagcgagtaccccacctaccacacccacggcagatacgtgccccccagcagcaccgacagaagcccctacgagaaggtgagcgccggcaacggcggcagcagcctgagctacaccaaccccgccgtggccgccaccagcgccaacctgtag

SEQ ID NO: 11600 - DNA, 693 bp, synthetic construct
  misc_feature 1..693: note = Description of Artificial Sequence: Synthetic coding sequence
  source 1..693: mol_type = other DNA
atgacccccggcacccagagccccttcttcctgctgctgctgctgaccgtgctgaccgtggtgaccggcagcggccacgccagcagcacccccggcggcgagaaggagaccagcgccacccagagaagcagcgtgcccagcagcaccgagaagaacgccatccccgcccccaccaccaccaagagctgcagagagaccttcctgaagtggcccggcagcgtggtggtgcagctgaccctggccttcagagagggcaccatcaacgtgcacgacgtggagacccagttcaaccagtacaagaccgaggccgccagcagatacaacctgaccatcagcgacgtgagcgtgagcgacgtgcccttccccttcagcgcccagagcggcgccggcgtgcccggctggggcatcgccctgctggtgctggtgtgcgtgctggtggccctggccatcgtgtacctgatcgccctggccgtgtgccagtgcagaagaaagaactacggccagctggacatcttccccgccagagacacctaccaccccatgagcgagtaccccacctaccacacccacggcagatacgtgccccccagcagcaccgacagaagcccctacgagaaggtgagcgccggcaacggcggcagcagcctgagctacaccaaccccgccgtggccgccaccagcgccaacctgtag

SEQ ID NO: 11601 - DNA, 1686 bp, synthetic construct
  misc_feature 1..1686: note = Description of Artificial Sequence: Synthetic coding sequence
  source 1..1686: mol_type = other DNA
atgacccccggcacccagagccccttcttcctgctgctgctgctgaccgtgctgaccgtggtgaccggcagcggccacgccagcagcacccccggcggcgagaaggagaccagcgccacccagagaagcagcgtgcccagcagcaccgagaagaacgccgtgagcatgaccagcagcgtgctgagcagccacagccccggcagcggcagcagcaccacccagggccaggacgtgaccctggcccccgccaccgagcccgccagcggcagcgccgccacctggggccaggacgtgaccagcgtgcccgtgaccagacccgccctgggcagcaccaccccccccgcccacgacgtgaccagcgcccccgacaccagacccgcccccggcagcaccgccccccccgcccacggcgtgaccagcgcccccgacaccagacccgcccccggcagcaccgccccccccgcccacggcgtgaccagcgcccccgacaccagacccgcccccggcagcaccgccccccccgcccacggcgtgaccagcgcccccgacaccagacccgcccccggcagcaccgccccccccgcccacggcgtgaccagcgcccccgacaccagaagagcccccggcagcacccccgcccccggcagcaccgccccccccgcccacggcgtgaccagcgcccccgacaccagacccgcccccggcagcaccgccccccccgcccacggcgtgaccagcgcccccgacaacagacccgccctgggcagcaccgccccccccgtgcacaacgtgaccagcgccagcggcagcgccagcggcagcgccagcaccctggtgcacaacggcaccagcgccagagccaccaccacccccgccagcaagagcacccccttcagcatccccagccaccacagcgacacccccaccaccctggccagccacagcaccaagaccgacgccagcagcacccaccacagcaccgtgccccccctgaccagcagcaaccacagcaccagcccccagctgagcaccggcgtgagcttcttcttcctgagcttccacatcagcaacctgcagttcaacagcagcctggaggaccccagcaccgactactaccaggagctgcagagagacatcagcgagatgttcctgcagatctacaagcagggcggcttcctgggcctgagcaacatcaagttcagacccggcagcgtggtggtgcagctgaccctggccttcagagagggcaccatcaacgtgcacgacgtggagacccagttcaaccagtacaagaccgaggccgccagcagatacaacctgaccatcagcgacgtgagcgtgagcgacgtgcccttccccttcagcgcccagagcggcgccggcgtgcccggctggggcatcgccctgctggtgctggtgtgcgtgctggtggccctggccatcgtgtacctgatcgccctggccgtgtgccagtgcagaagaaagaactacggccagctggacatcttccccgccagagacacctaccaccccatgagcgagtaccccacctaccacacccacggcagatacgtgccccccagcagcaccgacagaagcccctacgagaaggtgagcgccggcaacggcggcagcagcctgagctacaccaaccccgccgtggccgccaccagcgccaacctgtag

SEQ ID NO: 11602 - DNA, 690 bp, synthetic construct
  misc_feature 1..690: note = Description of Artificial Sequence: Synthetic coding sequence
  source 1..690: mol_type = other DNA
atgacccccggcacccagagccccttcttcctgctgctgctgctgaccgtgctgaccgtggtgaccggcagcggccacgccagcagcacccccggcggcgagaaggagaccagcgccacccagagaagcagcgtgcccagcagcaccgagaagaacgccatctacaagcagggcggcttcctgggcctgagcaacatcaagttcagacccggcagcgtggtggtgcagctgaccctggccttcagagagggcaccatcaacgtgcacgacgtggagacccagttcaaccagtacaagaccgaggccgccagcagatacaacctgaccatcagcgacgtgagcgtgagcgacgtgcccttccccttcagcgcccagagcggcgccggcgtgcccggctggggcatcgccctgctggtgctggtgtgcgtgctggtggccctggccatcgtgtacctgatcgccctggccgtgtgccagtgcagaagaaagaactacggccagctggacatcttccccgccagagacacctaccaccccatgagcgagtaccccacctaccacacccacggcagatacgtgccccccagcagcaccgacagaagcccctacgagaaggtgagcgccggcaacggcggcagcagcctgagctacaccaaccccgccgtggccgccaccagcgccaacctgtag

SEQ ID NO: 11603 - DNA, 780 bp, synthetic construct
  misc_feature 1..780: note = Description of Artificial Sequence: Synthetic coding sequence
  source 1..780: mol_type = other DNA
atgacccccggcacccagagccccttcttcctgctgctgctgctgaccgtgctgaccgccaccaccgcccccaagcccgccaccgtggtgaccggcagcggccacgccagcagcacccccggcggcgagaaggagaccagcgccacccagagaagcagcgtgcccagcagcaccgagaagaacgccttcaacagcagcctggaggaccccagcaccgactactaccaggagctgcagagagacatcagcgagatgttcctgcagatctacaagcagggcggcttcctgggcctgagcaacatcaagttcagacccggcagcgtggtggtgcagctgaccctggccttcagagagggcaccatcaacgtgcacgacgtggagacccagttcaaccagtacaagaccgaggccgccagcagatacaacctgaccatcagcgacgtgagcgtgagcgacgtgcccttccccttcagcgcccagagcggcgccggcgtgcccggctggggcatcgccctgctggtgctggtgtgcgtgctggtggccctggccatcgtgtacctgatcgccctggccgtgtgccagtgcagaagaaagaactacggccagctggacatcttccccgccagagacacctaccaccccatgagcgagtaccccacctaccacacccacggcagatacgtgccccccagcagcaccgacagaagcccctacgagaagagacagaacggctggagcaccatgcccagaggcgccctgcccgaggagagccagggctag

SEQ ID NO: 11604 - DNA, 1833 bp, synthetic construct
  misc_feature 1..1833: note = Description of Artificial Sequence: Synthetic coding sequence
  source 1..1833: mol_type = other DNA
atgggcctgaaggccgcccagaagaccctgttccccctgagaagcatcgacgacgtggtgagactgttcgccgccgagctgggcagagaggagcccgacctggtgctgctgagcctggtgctgggcttcgtggagcacttcctggccgtgaacagagtgatccccaccaacgtgcccgagctgaccttccagcccagccccgcccccgacccccccggcggcctgacctacttccccgtggccgacctgagcatcatcgccgccctgtacgccagattcaccgcccagatcagaggcgccgtggacctgagcctgtaccccagagagggcggcgtgagcagcagagagctggtgaagaaggtgagcgacgtgatctggaacagcctgagcagaagctacttcaaggacagagcccacatccagagcctgttcagcttcatcaccggcaccaagctggacagcagcggcgtggccttcgccgtggtgggcgcctgccaggccctgggcctgagagacgtgcacctggccctgagcgaggaccacgcctgggtggtgttcggccccaacggcgagcagaccgccgaggtgacctggcacggcaagggcaacgaggacagaagaggccagaccgtgaacgccggcgtggccgagagaagctggctgtacctgaagggcagctacatgagatgcgacagaaagatggaggtggccttcatggtgtgcgccatcaaccccagcatcgacctgcacaccgacagcctggagctgctgcagctgcagcagaagctgctgtggctgctgtacgacctgggccacctggagagataccccatggccctgggcaacctggccgacctggaggagctggagcccacccccggcagacccgaccccctgaccctgtaccacaagggcatcgccagcgccaagacctactacagagacgagcacatctacccctacatgtacctggccggctaccactgcagaaacagaaacgtgagagaggccctgcaggcctgggccgacaccgccaccgtgatccaggactacaactactgcagagaggacgaggagatctacaaggagttcttcgaggtggccaacgacgtgatccccaacctgctgaaggaggccgccagcctgctggaggccggcgaggagagacccggcgagcagagccagggcacccagagccagggcagcgccctgcaggaccccgagtgcttcgcccacctgctgagattctacgacggcatctgcaagtgggaggagggcagccccacccccgtgctgcacgtgggctgggccaccttcctggtgcagagcctgggcagattcgagggccaggtgagacagaaggtgagaatcgtgagcagagaggccgaggccgccgaggccgaggagccctggggcgaggaggccagagagggcagaagaagaggccccagaagagagagcaagcccgaggagccccccccccccaagaagcccgccctggacaagggcctgggcaccggccagggcgccgtgagcggcccccccagaaagccccccggcaccgtggccggcaccgccagaggccccgagggcggcagcaccgcccaggtgcccgcccccaccgccagccccccccccgagggccccgtgctgaccttccagagcgagaagatgaagggcatgaaggagctgctggtggccaccaagatcaacagcagcgccatcaagctgcagctgaccgcccagagccaggtgcagatgaagaagcagaaggtgagcacccccagcgactacaccctgagcttcctgaagagacagagaaagggcctgtag

SEQ ID NO: 11605 - DNA, 1833 bp, synthetic construct; identical to SEQ ID NO: 11604
  misc_feature 1..1833: note = Description of Artificial Sequence: Synthetic coding sequence
  source 1..1833: mol_type = other DNA

SEQ ID NO: 11606 - DNA, 1848 bp, synthetic construct
  misc_feature 1..1848: note = Description of Artificial Sequence: Synthetic coding sequence
  source 1..1848: mol_type = other DNA
atgggcctgaaggccgcccagaagaccctgttccccctgagaagcatcgacgacgtggtgagactgttcgccgccgagctgggcagagaggagcccgacctggtgctgctgagcctggtgctgggcttcgtggagcacttcctggccgtgaacagagtgatccccaccaacgtgcccgagctgaccttccagcccagccccgcccccgacccccccggcggcctgacctacttccccgtggccgacctgagcatcatcgccgccctgtacgccagattcaccgcccagatcagaggcgccgtggacctgagcctgtaccccagagagggcggcgtgagcagcagagagctggtgaagaaggtgagcgacgtgatctggaacagcctgagcagaagctacttcaaggacagagcccacatccagagcctgttcagcttcatcaccggctggagccccgtgggcaccaagctggacagcagcggcgtggccttcgccgtggtgggcgcctgccaggccctgggcctgagagacgtgcacctggccctgagcgaggaccacgcctgggtggtgttcggccccaacggcgagcagaccgccgaggtgacctggcacggcaagggcaacgaggacagaagaggccagaccgtgaacgccggcgtggccgagagaagctggctgtacctgaagggcagctacatgagatgcgacagaaagatggaggtggccttcatggtgtgcgccatcaaccccagcatcgacctgcacaccgacagcctggagctgctgcagctgcagcagaagctgctgtggctgctgtacgacctgggccacctggagagataccccatggccctgggcaacctggccgacctggaggagctggagcccacccccggcagacccgaccccctgaccctgtaccacaagggcatcgccagcgccaagacctactacagagacgagcacatctacccctacatgtacctggccggctaccactgcagaaacagaaacgtgagagaggccctgcaggcctgggccgacaccgccaccgtgatccaggactacaactactgcagagaggacgaggagatctacaaggagttcttcgaggtggccaacgacgtgatccccaacctgctgaaggaggccgccagcctgctggaggccggcgaggagagacccggcgagcagagccagggcacccagagccagggcagcgccctgcaggaccccgagtgcttcgcccacctgctgagattctacgacggcatctgcaagtgggaggagggcagccccacccccgtgctgcacgtgggctgggccaccttcctggtgcagagcctgggcagattcgagggccaggtgagacagaaggtgagaatcgtgagcagagaggccgaggccgccgaggccgaggagccctggggcgaggaggccagagagggcagaagaagaggccccagaagagagagcaagcccgaggagccccccccccccaagaagcccgccctggacaagggcctgggcaccggccagggcgccgtgagcggcccccccagaaagccccccggcaccgtggccggcaccgccagaggccccgagggcggcagcaccgcccaggtgcccgcccccaccgccagccccccccccgagggccccgtgctgaccttccagagcgagaagatgaagggcatgaaggagctgctggtggccaccaagatcaacagcagcgccatcaagctgcagctgaccgcccagagccaggtgcagatgaagaagcagaaggtgagcacccccagcgactacaccctgagcttcctgaagagacagagaaagggcctgtag

SEQ ID NO: 11607 - DNA, 1848 bp, synthetic construct; identical to SEQ ID NO: 11606
  misc_feature 1..1848: note = Description of Artificial Sequence: Synthetic coding sequence
  source 1..1848: mol_type = other DNA

SEQ ID NO: 11608 - DNA, 1668 bp, synthetic construct
  misc_feature 1..1668: note = Description of Artificial Sequence: Synthetic coding sequence
  source 1..1668: mol_type = other DNA
atgggcctgaaggccgcccagaagaccctgttccccctgagaagcatcgacgacgtggtgagactgttcgccgccgagctgggcagagaggagcccgacctggtgctgctgagcctggtgctgggcttcgtggagcacttcctggccgtgaacagagtgatccccaccaacgtgcccgagctgaccttccagcccagccccgcccccgacccccccggcggcctgacctacttccccgtggccgacctgagcatcatcgccgccctgtacgccagattcaccgcccagatcagaggcgccgtggacctgagcctgtaccccagagagggcggcgtgagcagcagagagctggtgaagaaggtgagcgacgtgatctggaacagcctgagcagaagctacttcaaggacagagcccacatccagagcctgttcagcttcatcaccggcaccaagctggacagcagcggcgtggccttcgccgtggtgggcgcctgccaggccctgggcctgagagacgtgcacctggccctgagcgaggaccacgcctgggtggtgttcggccccaacggcgagcagaccgccgaggtgacctggcacggcaagggcaacgaggacagaagaggccagaccgtgaacgccggcgtggccgagagaagctggctgtacctgaagggcagctacatgagatgcgacagaaagatggaggtggccttcatggtgtgcgccatcaaccccagcatcgacctgcacaccgacagcctggagctgctgcagctgcagcagaagctgctgtggctgctgtacgacctgggccacctggagagataccccatggccctgggcaacctggccgacctggaggagctggagcccacccccggcagacccgaccccctgaccctgtaccacaagggcatcgccagcgccaagacctactacagagacgagcacatctacccctacatgtacctggccggctaccactgcagaaacagaaacgtgagagaggccctgcaggcctgggccgacaccgccaccgtgatccaggactacaactactgcagagaggacgaggagatctacaaggagttcttcgaggtggccaacgacgtgatccccaacctgctgaaggaggccgccagcctgctggaggccggcgaggagagacccggcgagcagagccaggtgagacagaaggtgagaatcgtgagcagagaggccgaggccgccgaggccgaggagccctggggcgaggaggccagagagggcagaagaagaggccccagaagagagagcaagcccgaggagccccccccccccaagaagcccgccctggacaagggcctgggcaccggccagggcgccgtgagcggcccccccagaaagccccccggcaccgtggccggcaccgccagaggccccgagggcggcagcaccgcccaggtgcccgcccccaccgccagccccccccccgagggccccgtgctgaccttccagagcgagaagatgaagggcatgaaggagctgctggtggccaccaagatcaacagcagcgccatcaagctgcagctgaccgcccagagccaggtgcagatgaagaagcagaaggtgagcacccccagcgactacaccctgagcttcctgaagagacagagaaagggcctgtag

SEQ ID NO: 11609 - DNA, 1728 bp, synthetic construct
  misc_feature 1..1728: note = Description of Artificial Sequence: Synthetic coding sequence
  source 1..1728: mol_type = other DNA
atgggcctgaaggccgcccagaagaccctgttccccctgagaagcatcgacgacgtggtgagactgttcgccgccgagctgggcagagaggagcccgacctggtgctgctgagcctggtgctgggcttcgtggagcacttcctggccgtgaacagagtgatccccaccaacgtgcccgagctgaccttccagcccagccccgcccccgacccccccggcggcctgacctacttccccgtggccgacctgagcatcatcgccgccctgtacgccagattcaccgcccagatcagaggcgccgtggacctgagcctgtaccccagagagggcggcgtgagcagcagagagctggtgaagaaggtgagcgacgtgatctggaacagcctgagcagaagctacttcaaggacagagcccacatccagagcctgttcagcttcatcaccggcaccaagctggacagcagcggcgtggccttcgccgtggtgggcgcctgccaggccctgggcctgagagacgtgcacctggccctgagcgaggaccacgcctggagctggctgtacctgaagggcagctacatgagatgcgacagaaagatggaggtggccttcatggtgtgcgccatcaaccccagcatcgacctgcacaccgacagcctggagctgctgcagctgcagcagaagctgctgtggctgctgtacgacctgggccacctggagagataccccatggccctgggcaacctggccgacctggaggagctggagcccacccccggcagacccgaccccctgaccctgtaccacaagggcatcgccagcgccaagacctactacagagacgagcacatctacccctacatgtacctggccggctaccactgcagaaacagaaacgtgagagaggccctgcaggcctgggccgacaccgccaccgtgatccaggactacaactactgcagagaggacgaggagatctacaaggagttcttcgaggtggccaacgacgtgatccccaacctgctgaaggaggccgccagcctgctggaggccggcgaggagagacccggcgagcagagccagggcacccagagccagggcagcgccctgcaggaccccgagtgcttcgcccacctgctgagattctacgacggcatctgcaagtgggaggagggcagccccacccccgtgctgcacgtgggctgggccaccttcctggtgcagagcctgggcagattcgagggccaggtgagacagaaggtgagaatcgtgagcagagaggccgaggccgccgaggccgaggagccctggggcgaggaggccagagagggcagaagaagaggccccagaagagagagcaagcccgaggagccccccccccccaagaagcccgccctggacaagggcctgggcaccggccagggcgccgtgagcggcccccccagaaagccccccggcaccgtggccggcaccgccagaggccccgagggcggcagcaccgcccaggtgcccgcccccaccgccagccccccccccgagggccccgtgctgaccttccagagcgagaagatgaagggcatgaaggagctgctggtggccaccaagatcaacagcagcgccatcaagctgcagctgaccgcccagagccaggtgcagatgaagaagcagaaggtgagcacccccagcgactacaccctgagcttcctgaagagacagagaaagggcctgtag

SEQ ID NO: 11610 - DNA, 1833 bp, synthetic construct; identical to SEQ ID NO: 11604
  misc_feature 1..1833: note = Description of Artificial Sequence: Synthetic coding sequence
  source 1..1833: mol_type = other DNA

SEQ ID NO: 11611 - DNA, 1848 bp, synthetic construct; identical to SEQ ID NO: 11606
  misc_feature 1..1848: note = Description of Artificial Sequence: Synthetic coding sequence
  source 1..1848: mol_type = other DNA

SEQ ID NO: 11612 - DNA, 1848 bp, synthetic construct; identical to SEQ ID NO: 11606
  misc_feature 1..1848: note = Description of Artificial Sequence: Synthetic coding sequence
  source 1..1848: mol_type = other DNA

SEQ ID NO: 11613 - DNA, 786 bp, synthetic construct
  misc_feature 1..786: note = Description of Artificial Sequence: Synthetic coding sequence
  source 1..786: mol_type = other DNA
atgggcctgaaggccgcccagaagaccctgttccccctgagaagcatcgacgacgtggtgagactgttcgccgccgagctgggcagagaggagcccgacctggtgctgctgagcctggtgctgggcttcgtggagcacttcctggccgtgaacagagtgatccccaccaacgtgcccgagctgaccttccagcccagccccgcccccgacccccccggcggcctgacctacttccccgtggccgacctgagcatcatcgccgccctgtacgccagattcaccgcccagatcagaggcgccgtggacctgagcctgtaccccagagagggcggcgtgagcagcagagagctggtgaagaaggtgagcgacgtgatctggaacagcctgagcagaagctacttcaaggacagagcccacatccagagcctgttcagcttcatcaccggcaccaagctggacagcagcggcgtggccttcgccgtggtgggcgcctgccaggccctgggcctgagagacgtgcacctggccctgagcgaggaccacgcctgggtggtgttcggccccaacggcgagcagaccgccgaggtgacctggcacggcaagggcaacgaggacagaagaggccagaccgtgaacgccggcgtggccgagagaagctggctgtacctgaagggcagctacatgagatgcgacagaaagatggaggtggccttcatggtgtgcgccatcaaccccagcatcgacctgcacaccgacagcctggagctgctgcagctgcagcagtag

SEQ ID NO: 11614 - DNA, 441 bp, synthetic construct
  misc_feature 1..441: note = Description of Artificial Sequence: Synthetic coding sequence
  source 1..441: mol_type = other DNA
atgggcctgaaggccgcccagaagaccctgttccccctgagaagcatcgacgacgtggtgagactgttcgccgccgagctgggcagagaggagcccgacctggtgctgctgagcctggtgctgggcttcgtggagcacttcctggccgtgaacagagtgatccccaccaacgtgcccgagctgaccttccagcccagccccgcccccgacccccccggcggcctgacctacttccccgtggccgacctgagcatcatcgccgccctgtacgccagattcaccgcccagatcagaggcgccgtggacctgagcctgtaccccagagagggcggcgtgagcagcagagagctggtgaagaaggtgagcgacgtgatctggaacagcctgagcagaagctacttcaaggacagagcccacatccagagcctgttcagcttctag

SEQ ID NO: 11615 - DNA, 441 bp, synthetic construct; identical to SEQ ID NO: 11614
  misc_feature 1..441: note = Description of Artificial Sequence: Synthetic coding sequence
  source 1..441: mol_type = other DNA

SEQ ID NO: 11616 - DNA, 1041 bp, synthetic construct
  misc_feature 1..1041: note = Description of Artificial Sequence: Synthetic coding sequence
  source 1..1041: mol_type = other DNA
atgggcctgaaggccgcccagaagaccctgttccccctgagaagcatcgacgacgtggtgagactgttcgccgccgagctgggcagagaggagcccgacctggtgctgctgagcctggtgctgggcttcgtggagcacttcctggccgtgaacagagtgatccccaccaacgtgcccgagctgaccttccagcccagccccgcccccgacccccccggcggcctgacctacttccccgtggccgacctgagcatcatcgccgccctgtacgccagattcaccgcccagatcagaggcgccgtggacctgagcctgtaccccagagagggcggcgtgagcagcagagagctggtgaagaaggtgagcgacgtgatctggaacagcctgagcagaagctacttcaaggacagagcccacatccagagcctgttcagcttcatcaccggcaccaagctggacagcagcggcgtggccttcgccgtggtgggcgcctgccaggccctgggcctgagagacgtgcacctggccctgagcgaggaccacgcctgggtggtgttcggccccaacggcgagcagaccgccgaggtgacctggcacggcaagggcaacgaggacagaagaggccagaccgtgaacgccggcgtggccgagagaagctggctgtacctgaagggcagctacatgagatgcgacagaaagatggaggtggccttcatggtgtgcgccatcaaccccagcatcgacctgcacaccgacagcctggagctgctgcagctgcagcagaagctgctgtggctgctgtacgacctgggccacctggagagataccccatggccctgggcaacctggccgacctggaggagctggagcccacccccggcagacccgaccccctgaccctgtaccacaagggcatcgccagcgccaagacctactacagagacgagcacatctacccctacatgtacctggccggctaccactgcagaaacagaaacgtgagagaggccctgcaggcctgggccgacaccgccacctag

SEQ ID NO: 11617 - DNA, 1848 bp, synthetic construct; identical to SEQ ID NO: 11606
  misc_feature 1..1848: note = Description of Artificial Sequence: Synthetic coding sequence
  source 1..1848: mol_type = other DNA

SEQ ID NO: 11618 - DNA, 846 bp, synthetic construct
  misc_feature 1..846: note = Description of Artificial Sequence: Synthetic coding sequence
  source 1..846: mol_type = other DNA
atgggcctgaaggccgcccagaagaccctgttccccctgagaagcatcgacgacgtggtgagactgttcgccgccgagctgggcagagaggagcccgacctggtgctgctgagcctggtgctgggcttcgtggagcacttcctggccgtgaacagagtgatccccaccaacgtgcccgagctgaccttccagcccagccccgcccccgacccccccggcggcctgacctacttccccgtggccgacctgagcatcatcgccgccctgtacgccagattcaccgcccagatcagaggcgccgtggacctgagcctgtaccccagagagggcggcgtgagcagcagagagctggtgaagaaggtgagcgacgtgatctggaacagcctgagcagaagctacttcaaggacagagcccacatccagagcctgttcagcttcatcaccggcaccaagctggacagcagcggcgtggccttcgccgtggtgggcgcctgccaggccctgggcctgagagacgtgcacctggccctgagcgaggaccacgcctgggtggtgttcggccccaacggcgagcagaccgccgaggtgacctggcacggcaagggcaacgaggacagaagaggccagaccgtgaacgccggcgtggccgagagaagctggctgtacctgaagggcagctacatgagatgcgacagaaagatggaggtggccttcatggtgtgcgccatcaaccccagcatcgacctgcacaccgacagcctggagctgctgcagctgcagcagaagctgctgtggctgctgtacgacctgggccacctggagagataccccatggccctgggctag

SEQ ID NO: 11619 - DNA, 1656 bp, synthetic construct
  misc_feature 1..1656: note = Description of Artificial Sequence: Synthetic coding sequence
  source 1..1656: mol_type = other DNA
atggccgcccccgtgagactgggcagaaagagacccctgcccgcctgccccaaccccctgttcgtgagatggctgaccgagtggagagacgaggccaccagaagcagaagaagaaccagattcgtgttccagaaggccctgagaagcctgagaagataccccctgcccctgagaagcggcaaggaggccaagatcctgcagcacttcggcgacggcctgtgcagaatgctggacgagagactgcagagacacagaaccagcggcggcgaccacgcccccgacagccccagcggcgagaacagccccgccccccagggcagactggccgaggtgcaggacagcagcatgcccgtgcccgcccagcccaaggccggcggcagcggcagctactggcccgccagacacagcggcgccagagtgatcctgctggtgctgtacagagagcacctgaaccccaacggccaccacttcctgaccaaggaggagctgctgcagagatgcgcccagaagagccccagagtggcccccggcagcgccagaccctggcccgccctgagaagcctgctgcacagaaacctggtgctgagaacccaccagcccgccagatacagcctgacccccgagggcctggagctggcccagaagctggccgagagcgagggcctgagcctgctgaacgtgggcatcggccccaaggagccccccggcgaggagaccgccgtgcccggcgccgccagcgccgagctggccagcgaggccggcgtgcagcagcagcccctggagctgagacccggcgagtacagagtgctgctgtgcgtggacatcggcgagaccagaggcggcggccacagacccgagctgctgagagagctgcagagactgcacgtgacccacaccgtgagaaagctgcacgtgggcgacttcgtgtgggtggcccaggagaccaaccccagagaccccgccaaccccggcgagctggtgctggaccacatcgtggagagaaagagactggacgacctgtgcagcagcatcatcgacggcagattcagagagcagaagttcagactgaagagatgcggcctggagagaagagtgtacctggtggaggagcacggcagcgtgcacaacctgagcctgcccgagagcaccctgctgcaggccgtgaccaacacccaggtgatcgacggcttcttcgtgaagagaaccgccgacatcaaggagagcgccgcctacctggccctgctgaccagaggcctgcagagactgtaccagggccacaccctgagaagcagaccctggggcacccccggcaaccccgagagcggcgccatgaccagccccaaccccctgtgcagcctgctgaccttcagcgacttcaacgccggcgccatcaagaacaaggcccagagcgtgagagaggtgttcgccagacagctgatgcaggtgagaggcgtgagcggcgagaaggccgccgccctggtggacagatacagcacccccgccagcctgctggccgcctacgacgcctgcgccacccccaaggagcaggagaccctgctgagcaccatcaagtgcggcagactgcagagaaacctgggccccgccctgagcagaaccctgagccagctgtactgcagctacggccccctgacctag

SEQ ID NO: 11620 - DNA, 1656 bp, synthetic construct; identical to SEQ ID NO: 11619
  misc_feature 1..1656: note = Description of Artificial Sequence: Synthetic coding sequence
  source 1..1656: mol_type = other DNA

SEQ ID NO: 11621 - DNA, 2490 bp, synthetic construct
  misc_feature 1..2490: note = Description of Artificial Sequence: Synthetic coding sequence
  source 1..2490: mol_type = other DNA
atgaacagcggcgtggccatgaagtacggcaacgacagcagcgccgagctgagcgagctgcacagcgccgccctggccagcctgaagggcgacatcgtggagctgaacaagagactgcagcagaccgagagagagagagacctgctggagaagaagctggccaaggcccagtgcgagcagagccacctgatgagagagcacgaggacgtgcaggagagaaccaccctgagatacgaggagagaatcaccgagctgcacagcgtgatcgccgagctgaacaagaagatcgacagactgcagggcaccaccatcagagaggaggacgagtacagcgagctgagaagcgagctgagccagagccagcacgaggtgaacgaggacagcagaagcatggaccaggaccagaccagcgtgagcatccccgagaaccagagcaccatggtgaccgccgacatggacaactgcagcgacctgaacagcgagctgcagagagtgctgaccggcctggagaacgtggtgtgcggcagaaagaagagcagctgcagcctgagcgtggccgaggtggacaagcacatcgagcagctgaccaccgccagcgagcactgcgacctggccatcaagaccgtggaggagatcgagggcgtgctgggcagagacctgtaccccaacctggccgaggagagaagcagatgggagaaggagctggccggcctgagagaggagaacgagagcctgaccgccatgctgtgcagcaaggaggaggagctgaacagaaccaaggccaccatgaacgccatcagagaggagagagacagactgagaagaagagtgagagagctgcagaccagactgcagagcgtgcaggccaccggccccagcagccccggcagactgaccagcaccaacagacccatcaaccccagcaccggcgagctgagcaccagcagcagcagcaacgacatccccatcgccaagatcgccgagagagtgaagctgagcaagaccagaagcgagagcagcagcagcgacagacccgtgctgggcagcgagatcagcagcatcggcgtgagcagcagcgtggccgagcacctggcccacagcctgcaggactgcagcaacatccaggagatcttccagaccctgtacagccacggcagcgccatcagcgagagcaagatcagagagttcgaggtggagaccgagagactgaacagcagaatcgagcacctgaagagccagaacgacctgctgaccatcaccctggaggagtgcaagagcaacgccgagagaatgagcatgctggtgggcaagtacgagagcaacgccaccgccctgagactggccctgcagtacagcgagcagtgcatcgaggcctacgagctgctgctggccctggccgagagcgagcagagcctgatcctgggccagttcagagccgccggcgtgggcagcagccccggcgaccagagcggcgacgagaacatcacccagatgctgaagagagcccacgactgcagaaagaccgccgagaacgccgccaaggccctgctgatgaagctggacggcagctgcggcggcgccttcgccgtggccggctgcagcgtgcagccctgggagagcctgagcagcaacagccacaccagcaccaccagcagcaccgccagcagctgcgacaccgagttcaccaaggaggacgagcagagactgaaggactacatccagcagctgaagaacgacagagccgccgtgaagctgaccatgctggagctggagagcatccacatcgaccccctgagctacgacgtgaagcccagaggcgacagccagagactggacctggagaacgccgtgctgatgcaggagctgatggccatgaaggaggagatggccgagctgaaggcccagctgtacctgctggagaaggagaagaaggccctggagctgaagctgagcaccagagaggcccaggagcaggcctacctggtgcacatcgagcacctgaagagcgaggtggaggagcagaaggagcagagaatgagaagcctgagcagcaccagcagcggcagcaaggacaagcccggcaaggagtgcgccgacgccgccagccccgccctgagcctggccgagctgagaaccacctgcagcgagaacgagctggccgccgagttcaccaacgccatcagaagagagaagaagctgaaggccagagtgcaggagctggtgagcgccctggagagactgaccaagagcagcgagatcagacaccagcagagcgccgagttcgtgaacgacctgaagagagccaacagcaacctggtggccgcctacgagaaggccaagaagaagcaccagaacaagctgaagaagctggagagccagatgatggccatggtggagagacacgagacccaggtgagaatgctgaagcagagaatcgccctgctggaggaggagaacagcagaccccacaccaacgagaccagcctgtag

SEQ ID NO: 11622 - DNA, 2133 bp, synthetic construct
  misc_feature 1..2133: note = Description of Artificial Sequence: Synthetic coding sequence
  source 1..2133: mol_type = other DNA
atgaagctggtgttcctggtgctgctgttcctgggcgccctgggcctgtgcctggccggcagaagaagaagcgtgcagtggtgcgccgtgagccagcccgaggccaccaagtgcttccagtggcagagaaacatgagaaaggtgagaggcccccccgtgagctgcatcaagagagacagccccatccagtgcatccaggccatcgccgagaacagagccgacgccgtgaccctggacggcggcttcatctacgaggccggcctggccccctacaagctgagacccgtggccgccgaggtgtacggcaccgagagacagcccagaacccactactacgccgtggccgtggtgaagaagggcggcagcttccagctgaacgagctgcagggcctgaagagctgccacaccggcctgagaagaaccgccggctggaacgtgcccatcggcaccctgagacccttcctgaactggaccggcccccccgagcccatcgaggccgccgtggccagattcttcagcgccagctgcgtgcccggcgccgacaagggccagttccccaacctgtgcagactgtgcgccggcaccggcgagaacaagtgcgccttcagcagccaggagccctacttcagctacagcggcgccttcaagtgcctgagagacggcgccggcgacgtggccttcatcagagagagcaccgtgttcgaggacctgagcgacgaggccgagagagacgagtacgagctgctgtgccccgacaacaccagaaagcccgtggacaagttcaaggactgccacctggccagagtgcccagccacgccgtggtggccagaagcgtgaacggcaaggaggacgccatctggaacctgctgagacaggcccaggagaagttcggcaaggacaagagccccaagttccagctgttcggcagccccagcggccagaaggacctgctgttcaaggacagcgccatcggcttcagcagagtgccccccagaatcgacagcggcctgtacctgggcagcggctacttcaccgccatccagaacctgagaaagagcgaggaggaggtggccgccagaagagccagagtggtgtggtgcgccgtgggcgagcaggagctgagaaagtgcaaccagtggagcggcctgagcgagggcagcgtgacctgcagcagcgccagcaccaccgaggactgcatcgccctggtgctgaagggcgaggccgacgccatgagcctggacggcggctacgtgtacaccgccggcaagtgcggcctggtgcccgtgctggccgagaactacaagagccagcagagcagcgaccccgaccccaactgcgtggacagacccgtggagggctacctggccgtggccgtggtgagaagaagcgacaccagcctgacctggaacagcgtgaagggcaagaagagctgccacaccgccgtggacagaaccgccggctggaacatccccatgggcctgctgttcaaccagaccggcagctgcaagttcgacgagtacttcagccagagctgcgcccccggcagcgaccccagaagcaacctgtgcgccctgtgcatcggcgacgagcagggcgagaacaagtgcgtgcccaacagcaacgagagatactacggctacaccggcgccttcagatgcctggccgagaacgccggcgacgtggccttcgtgaaggacgtgaccgtgctgcagaacaccgacggcaacaacaacgaggcctgggccaaggacctgaagctggccgacttcgccctgctgtgcctggacggcaagagaaagcccgtgaccgaggccagaagctgccacctggccatggcccccaaccacgccgtggtgagcagaatggacaaggtggagagactgaagcaggtgctgctgcaccagcaggccaagttcggcagaaacggcagcgactgccccgacaagttctgcctgttccagagcgagaccaagaacctgctgttcaacgacaacaccgagtgcctggccagactgcacggcaagaccacctacgagaagtacctgggcccccagtacgtggccggcatcaccaacctgaagaagtgcagcaccagccccctgctggaggcctgcgagttcctgagaaagtag

SEQ ID NO: 11623 - DNA, 1656 bp, synthetic construct
  misc_feature 1..1656: note = Description of Artificial Sequence: Synthetic coding sequence
  source 1..1656: mol_type = other DNA
aagcccctgctgaaccacgtgctggccatcaagggccccagaagcagatggagaaccttctacaacatcgccaccagaagaaaggccctgaagaaccccagcgaggagtacggcaagatcctggaggtggtgggcagatacagcgtgcacaacgccggcatcagcttcagcgtgaagaagcagggcgagaccgtggccgacgtgagaaccctgcccaacgccagcaccgtggacaacatcagaagcatcttcggcaacgccgtgagcagagagctgatcgagatcggctgcgaggacaagaccctggccttcaagatgaacggctacatcagcaacgccaactacagcgtgaagaagtgcatcttcctgctgttcatcaaccacagactggtggagagcaccagcctgagaaaggccatcgagaccgtgtacgccgcctacctgcccaagaacacccaccccttcctgtacctgagcctggagatcagcccccagaacgtggacgtgaacgtgcaccccaccaagcacgaggtgcacttcctgcacgaggagagcatcctggagagagtgcagcagcacatcgagagcaagctgctgggcagcaacagcagcagaatgtacttcacccagaccctgctgcccggcctggccggccccagcggcgagatggtgaagagcaccaccagcctgaccagcagcagcaccagcggcagcagcgacaaggtgtacgcccaccagatggtgagaaccgacagcagagagcagaagctggacgccttcctgcagcccctgagcaagcccctgagcagccagccccaggccatcgtgaccgaggacaagaccgacatcagcagcggcagagccagacagcaggacgaggagatgctggagctgcccgcccccgccgaggtggccgccaagaaccagagcctggagggcgacaccaccaagggcaccagcgagatgagcgagaagagaggccccaccagcagcaaccccagaaagagacacagagaggacagcgacgtggagatggtggaggacgacagcagaaaggagatgaccgccgcctgcacccccagaagaagaatcatcaacctgaccagcgtgctgagcctgcaggaggagatcaacgagcagggccacgaggtgctgagagagatgctgcacaaccacagcttcgtgggctgcgtgaacccccagtgggccctggcccagcaccagaccaagctgtacctgctgaacaccaccaagctgagcgaggagctgttctaccagatcctgatctacgacttcgccaacttcggcgtgctgagactgagcgagcccgcccccctgttcgacctggccatgctggccctggacagccccgagagcggctggaccgaggaggacggccccaaggagggcctggccgagtacatcgtggagttcctgaagaagaaggccgagatgctggccgactacttcagcctggagatcgacgagagcgaggtgcccggcagcatccccaacagctggaagtggaccgtggagcacatcgtgtacaaggccctgagaagccacatcctgccccccaagcacttcaccgaggacggcaacatcctgcagctggccaacctgcccgacctgtacaaggtgttcgagagatgctag

SEQ ID NO: 11624 - DNA, 351 bp, synthetic construct
  misc_feature 1..351: note = Description of Artificial Sequence: Synthetic coding sequence
  source 1..351: mol_type = other DNA
atgagcgagaagagaggccccaccagcagcaaccccagaaagagacacagagaggacagcgacgtggagatggtggaggacgacagcagaaaggagatgaccgccgcctgcacccccagaagaagaatcatcaacctgaccagcgtgctgagcctgcaggaggagatcaacgagcagggccacgaggtgctgagagagatgctgcacaaccacagcttcgtgggctgcgtgaacccccagtgggccctggcccagcaccagaccaagctgtacctgctgaacaccaccaagctgagagtgaagtgcctggcccccttccagacccccggcagcggcctgtggaacacctag

SEQ ID NO: 11625 - DNA, 525 bp, synthetic construct
  misc_feature 1..525: note = Description of Artificial Sequence: Synthetic coding sequence
  source 1..525: mol_type = other DNA
atgagcgagaagagaggccccaccagcagcaaccccagaaagagacacagagaggacagcgacgtggagatggtggaggacgacagcagaaaggagatgaccgccgcctgcacccccagaagaagaatcatcaacctgaccagcgtgctgagcctgcaggaggagatcaacgagcagggccacgaggtgctgagagagatgctgcacaaccacagcttcgtgggctgcgtgaacccccagccctggcacagcatcaagcccagctacaccttcagcaccccccccagcttcagcgaggagctgttctaccagatcctgatctacgacttcgccaacttcggcgtgctgagactgagcagcgaggtgcccggcagcatccccaacagctggaagtggaccgtggagcacatcgtgtacaaggccctgagaagccacatcctgccccccaagcacttcaccgaggacggcaacatcctgcagctggccaacctgcccgacctgtacaaggtgttcgagagatgctag

SEQ ID NO: 11626 - DNA, 1977 bp, synthetic construct
  misc_feature 1..1977: note = Description of Artificial Sequence: Synthetic coding sequence
  source 1..1977: mol_type = other DNA
atggccttcgaggccctggccagcatcagccacgtggcccacgtgaccatcaccaccaagaccgccgacggcaagtgcgcctacagagccagctacagcgacggcaagctgaaggccccccccaagccctgcgccggcaaccagggcacccagatcaccgtggaggacctgttctacaacatcgccaccagaagaaaggccctgaagaaccccagcgaggagtacggcaagatcctggaggtggtgggcagatacagcgtgcacaacgccggcatcagcttcagcgtgaagaagcagggcgagaccgtggccgacgtgagaaccctgcccaacgccagcaccgtggacaacatcagaagcatcttcggcaacgccgtgagcagagagctgatcgagatcggctgcgaggacaagaccctggccttcaagatgaacggctacatcagcaacgccaactacagcgtgaagaagtgcatcttcctgctgttcatcaaccacagactggtggagagcaccagcctgagaaaggccatcgagaccgtgtacgccgcctacctgcccaagaacacccaccccttcctgtacctgagcctggagatcagcccccagaacgtggacgtgaacgtgcaccccaccaagcacgaggtgcacttcctgcacgaggagagcatcctggagagagtgcagcagcacatcgagagcaagctgctgggcagcaacagcagcagaatgtacttcacccagaccctgctgcccggcctggccggccccagcggcgagatggtgaagagcaccaccagcctgaccagcagcagcaccagcggcagcagcgacaaggtgtacgcccaccagatggtgagaaccgacagcagagagcagaagctggacgccttcctgcagcccctgagcaagcccctgagcagccagccccaggccatcgtgaccgaggacaagaccgacatcagcagcggcagagccagacagcaggacgaggagatgctggagctgcccgcccccgccgaggtggccgccaagaaccagagcctggagggcgacaccaccaagggcaccagcgagatgagcgagaagagaggccccaccagcagcaaccccagaaagagacacagagaggacagcgacgtggagatggtggaggacgacagcagaaaggagatgaccgccgcctgcacccccagaagaagaatcatcaacctgaccagcgtgctgagcctgcaggaggagatcaacgagcagggccacgaggtgctgagagagatgctgcacaaccacagcttcgtgggctgcgtgaacccccagtgggccctggcccagcaccagaccaagctgtacctgctgaacaccaccaagctgagcgaggagctgttctaccagatcctgatctacgacttcgccaacttcggcgtgctgagactgagcgagcccgcccccctgttcgacctggccatgctggccctggacagccccgagagcggctggaccgaggaggacggccccaaggagggcctggccgagtacatcgtggagttcctgaagaagaaggccgagatgctggccgactacttcagcctggagatcgacgaggagggcaacctgatcggcctgcccctgctgatcgacaactacgtgccccccctggagggcctgcccatcttcatcctgagactggccaccgaggtgaactgggacgaggagaaggagtgcttcgagagcctgagcaaggagtgcgccatgttctacagcatcagaaagcagtacatcagcgaggagagcaccctgagcggccagcagagcgaggtgcccggcagcatccccaacagctggaagtggaccgtggagcacatcgtgtacaaggccctgagaagccacatcctgccccccaagcacttcaccgaggacggcaacatcctgcagctggccaacctgcccgacctgtacaaggtgttcgagagatgctag

SEQ ID NO: 11627 - DNA, 960 bp, synthetic construct
  misc_feature 1..960: note = Description of Artificial Sequence: Synthetic coding sequence
  source 1..960: mol_type = other DNA
atgatcgagaactgcctggacgccaagagcaccagcatccaggtgatcgtgaaggagggcggcctgaagctgatccagatccaggacaacggcaccggcatcagaaaggaggacctggacatcgtgtgcgagagattcaccaccagcaagctgcagagcttcgaggacctggccagcatcagcacctacggcttcagaggcgaggccctggccagcatcagccacgtggcccacgtgaccatcaccaccaagaccgccgacggcaagtgcgcctacagagccagctacagcgacggcaagctgaaggccccccccaagccctgcgccggcaaccagggcacccagatcaccgtggaggacctgttctacaacatcgccaccagaagaaaggccctgaagaaccccagcgaggagtacggcaagatcctggaggtggtgggcagatacagcgtgcacaacgccggcatcagcttcagcgtgaagaagcagggcgagaccgtggccgacgtgagaaccctgcccaacgccagcaccgtggacaacatcagaagcatcttcggcaacgccgtgagcagagagctgatcgagatcggctgcgaggacaagaccctggccttcaagatgaacggctacatcagcaacgccaactacagcgtgaagaagtgcatcttcctgctgttcatcaaccacagactggtggagagcaccagcctgagaaaggccatcgagaccgtgtacgccgcctacctgcccaagaacacccaccccttcctgtacctgagcctggagatcagcccccagaacgtggacgtgaacgtgcaccccaccaagcacgaggtgcacttcctgcacgaggagagcatcctggagagagtgcagcagcacatcgagagcaagctgctgggcagcaacagcagcagaatgtacttcacccagaaggagaccagcggcagattctag

SEQ ID NO: 11628 - DNA, 1548 bp, synthetic construct
  misc_feature 1..1548: note = Description of Artificial Sequence: Synthetic coding sequence
  source 1..1548: mol_type = other DNA
atgaacggctacatcagcaacgccaactacagcgtgaagaagtgcatcttcctgctgttcatcaaccacagactggtggagagcaccagcctgagaaaggccatcgagaccgtgtacgccgcctacctgcccaagaacacccaccccttcctgtacctgagcctggagatcagcccccagaacgtggacgtgaacgtgcaccccaccaagcacgaggtgcacttcctgcacgaggagagcatcctggagagagtgcagcagcacatcgagagcaagctgctgggcagcaacagcagcagaatgtacttcacccagaccctgctgcccggcctggccggccccagcggcgagatggtgaagagcaccaccagcctgaccagcagcagcaccagcggcagcagcgacaaggtgtacgcccaccagatggtgagaaccgacagcagagagcagaagctggacgccttcctgcagcccctgagcaagcccctgagcagccagccccaggccatcgtgaccgaggacaagaccgacatcagcagcggcagagccagacagcaggacgaggagatgctggagctgcccgcccccgccgaggtggccgccaagaaccagagcctggagggcgacaccaccaagggcaccagcgagatgagcgagaagagaggccccaccagcagcaaccccagaaagagacacagagaggacagcgacgtggagatggtggaggacgacagcagaaaggagatgaccgccgcctgcacccccagaagaagaatcatcaacctgaccagcgtgctgagcctgcaggaggagatcaacgagcagggccacgaggtgctgagagagatgctgcacaaccacagcttcgtgggctgcgtgaacccccagtgggccctggcccagcaccagaccaagctgtacctgctgaacaccaccaagctgagcgaggagctgttctaccagatcctgatctacgacttcgccaacttcggcgtgctgagactgagcgagcccgcccccctgttcgacctggccatgctggccctggacagccccgagagcggctggaccgaggaggacggccccaaggagggcctggccgagtacatcgtggagttcctgaagaagaaggccgagatgctggccgactacttcagcctggagatcgacgaggagggcaacctgatcggcctgcccctgctgatcgacaactacgtgccccccctggagggcctgcccatcttcatcctgagactggccaccgaggtgaactgggacgaggagaaggagtgcttcgagagcctgagcaaggagtgcgccatgttctacagcatcagaaagcagtacatcagcgaggagagcaccctgagcggccagcagagcgaggtgcccggcagcatccccaacagctggaagtggaccgtggagcacatcgtgtacaaggccctgagaagccacatcctgccccccaagcacttcaccgaggacggcaacatcctgcagctggccaacctgcccgacctgtacaaggtgttcgagagatgctag

SEQ ID NO: 11629 - DNA, 2040 bp, synthetic construct
  misc_feature 1..2040: note = Description of Artificial Sequence: Synthetic coding sequence
  source 1..2040: mol_type = other DNA
tgaagactggacgagaccgtggtgaacagaatcgccgccggcgaggtgatccagagacccgccaacgccatcaaggagatgatcgagaactgcctggacgccaagagcaccagcatccaggtgatcgtgaaggagggcggcctgaagctgatccagatccaggacaacggcaccggcatcagaaaggaggacctggacatcgtgtgcgagagattcaccaccagcaagctgcagagcttcgaggacctggccagcatcagcacctacggcttcagaggcgaggccctggccagcatcagccacgtggcccacgtgaccatcaccaccaagaccgccgacggcaagtgcgcctacagagccagctacagcgacggcaagctgaaggccccccccaagccctgcgccggcaaccagggcacccagatcaccgtggaggacctgttctacaacatcgccaccagaagaaaggccctgaagaaccccagcgaggagtacggcaagatcctggaggtggtgggcagatacagcgtgcacaacgccggcatcagcttcagcgtgaagaagcagggcgagaccgtggccgacgtgagaaccctgcccaacgccagcaccgtggacaacatcagaagcatcttcggcaacgccgtgagcagagagctgatcgagatcggctgcgaggacaagaccctggccttcaagatgaacggctacatcagcaacgccaactacagcgtgaagaagtgcatcttcctgctgttcatcaaccacagactggtggagagcaccagcctgagaaaggccatcgagaccgtgtacgccgcctacctgcccaagaacacccaccccttcctgtacctgagcctggagatcagcccccagaacgtggacgtgaacgtgcaccccaccaagcacgaggtgcacttcctgcacgaggagagcatcctggagagagtgcagcagcacatcgagagcaagctgctgggcagcaacagcagcagaatgtacttcacccagaccctgctgcccggcctggccggccccagcggcgagatggtgaagagcaccaccagcctgaccagcagcagcaccagcggcagcagcgacaaggtgtacgcccaccagatggtgagaaccgacagcagagagcagaagctggacgccttcctgcagcccctgagcaagcccctgagcagccagccccaggccatcgtgaccgaggacaagaccgacatcagcagcggcagagccagacagcaggacgaggagatgctggagctgcccgcccccgccgaggtggccgccaagaaccagagcctggagggcgacaccaccaagggcaccagcgagatgagcgagaagagaggccccaccagcagcaaccccagaaagagacacagagaggacagcgacgtggagatggtggaggacgacagcagaaaggagatgaccgccgcctgcacccccagaagaagaatcatcaacctgaccagcgtgctgagcctgcaggaggagatcaacgagcagggccacgaggtgctgagagagatgctgcacaaccacagcttcgtgggctgcgtgaacccccagtgggccctggcccagcaccagaccaagctgtacctgctgaacaccaccaagctgagcgaggagctgttctaccagatcctgatctacgacttcgccaacttcggcgtgctgagactgagcgagcccgcccccctgttcgacctggccatgctggccctggacagccccgagagcggctggaccgaggaggacggccccaaggagggcctggccgagtacatcgtggagttcctgaagaagaaggccgagatgctggccgactacttcagcctggagatcgacgagagcgaggtgcccggcagcatccccaacagctggaagtggaccgtggagcacatcgtgtacaaggccctgagaagccacatcctgccccccaagcacttcaccgaggacggcaacatcctgcagctggccaacctgcccgacctgtacaaggtgttcgagagatgctag

SEQ ID NO: 11630 - DNA, 1548 bp, synthetic construct; identical to SEQ ID NO: 11628
  misc_feature 1..1548: note = Description of Artificial Sequence: Synthetic coding sequence
  source 1..1548: mol_type = other DNA

SEQ ID NO: 11631 - DNA, 1383 bp, synthetic construct
  misc_feature 1..1383: note = Description of Artificial Sequence: Synthetic coding sequence
  source 1..1383: mol_type = other DNA
atgaacggctacatcagcaacgccaactacagcgtgaagaagtgcatcttcctgctgttcatcaaccacagactggtggagagcaccagcctgagaaaggccatcgagaccgtgtacgccgcctacctgcccaagaacacccaccccttcctgtacctgagcctggagatcagcccccagaacgtggacgtgaacgtgcaccccaccaagcacgaggtgcacttcctgcacgaggagagcatcctggagagagtgcagcagcacatcgagagcaagctgctgggcagcaacagcagcagaatgtacttcacccagaccctgctgcccggcctggccggccccagcggcgagatggtgaagagcaccaccagcctgaccagcagcagcaccagcggcagcagcgacaaggtgtacgcccaccagatggtgagaaccgacagcagagagcagaagctggacgccttcctgcagcccctgagcaagcccctgagcagccagccccaggccatcgtgaccgaggacaagaccgacatcagcagcggcagagccagacagcaggacgaggagatgctggagctgcccgcccccgccgaggtggccgccaagaaccagagcctggagggcgacaccaccaagggcaccagcgagatgagcgagaagagaggccccaccagcagcaaccccagaaagagacacagagaggacagcgacgtggagatggtggaggacgacagcagaaaggagatgaccgccgcctgcacccccagaagaagaatcatcaacctgaccagcgtgctgagcctgcaggaggagatcaacgagcagggccacgaggtgctgagagagatgctgcacaaccacagcttcgtgggctgcgtgaacccccagtgggccctggcccagcaccagaccaagctgtacctgctgaacaccaccaagctgagcgaggagctgttctaccagatcctgatctacgacttcgccaacttcggcgtgctgagactgagcgagcccgcccccctgttcgacctggccatgctggccctggacagccccgagagcggctggaccgaggaggacggccccaaggagggcctggccgagtacatcgtggagttcctgaagaagaaggccgagatgctggccgactacttcagcctggagatcgacgaggagggcaacctgatcggcctgcccctgctgatcgacaactacgtgccccccctggagggcctgcccatcttcatcctgagactggccaccgaggtgaactgggacgaggagaaggagtgcttcgagagcctgagcaaggagtgcgccatgttctacagcatcagaaagcagtacatcagcgaggagagcaccctgagcggccagcagtag

SEQ ID NO: 11632 - DNA, 843 bp, synthetic construct
  misc_feature 1..843: note = Description of Artificial Sequence: Synthetic coding sequence
  source 1..843: mol_type = other DNA
atgatcgagaactgcctggacgccaagagcaccagcatccaggtgatcgtgaaggagggcggcctgaagctgatccagatccaggacaacggcaccggcatcagaaaggaggacctggacatcgtgtgcgagagattcaccaccagcaagctgcagagcttcgaggacctggccagcatcagcacctacggcttcagaggcgaggccctggccagcatcagccacgtggcccacgtgaccatcaccaccaagaccgccgacggcaagtgcgcctacagagccagctacagcgacggcaagctgaaggccccccccaagccctgcgccggcaaccagggcacccagatcaccgtggaggacctgttctacaacatcgccaccagaagaaaggccctgaagaaccccagcgaggagtacggcaagatcctggaggtggtgggcagatacagcgtgcacaacgccggcatcagcttcagcgtgaagaagcagggcgagaccgtggccgacgtgagaaccctgcccaacgccagcaccgtggacaacatcagaagcatcttcggcaacgccgtgagcagagagctgatcgagatcggctgcgaggacaagaccctggccttcaagatgaacggctacatcagcaacgccaactacagcgtgaagaagtgcatcttcctgctgttcatcaaccacagactggtggagagcaccagcctgagaaaggccatcgagaccgtgtacgccgcctacctgcccaagaacacccaccccttcctgtacctgagactgtgctaccaggacctgctggcccccctgggcagatggctgaacccccagcaggtgtag

SEQ ID NO: 11633 - DNA, 1548 bp, synthetic construct; identical to SEQ ID NO: 11628
  misc_feature 1..1548: note = Description of Artificial Sequence: Synthetic coding sequence
  source 1..1548: mol_type = other DNA

SEQ ID NO: 11634 - DNA, 4290 bp, synthetic construct
  misc_feature 1..4290: note = Description of Artificial Sequence: Synthetic coding sequence
  source 1..4290: mol_type = other DNA
atgatcaagtgcctgagcgtggaggtgcaggccaagctgagaagcggcctggccatcagcagcctgggccagtgcgtggaggagctggccctgaacagcatcgacgccgaggccaagtgcgtggccgtgagagtgaacatggagaccttccaggtgcaggtgatcgacaacggcttcggcatgggcagcgacgacgtggagaaggtgggcaacagatacttcaccagcaagtgccacagcgtgcaggacctggagaaccccagattctacggcttcagaggcgaggccctggccaacatcgccgacatggccagcgccgtggagatcagcagcaagaagaacagaaccatgaagaccttcgtgaagctgttccagagcggcaaggccctgaaggcctgcgaggccgacgtgaccagagccagcgccggcaccaccgtgaccgtgtacaacctgttctaccagctgcccgtgagaagaaagtgcatggaccccagactggagttcgagaaggtgagacagagaatcgaggccctgagcctgatgcaccccagcatcagcttcagcctgagaaacgacgtgagcggcagcatggtgctgcagctgcccaagaccaaggacgtgtgcagcagattctgccagatctacggcctgggcaagagccagaagctgagagagatcagcttcaagtacaaggagttcgagctgagcggctacatcagcagcgaggcccactacaacaagaacatgcagttcctgttcgtgaacaagagactggtgctgagaaccaagctgcacaagctgatcgacttcctgctgagaaaggagagcatcatctgcaagcccaagaacggccccaccagcagacagatgaacagcagcctgagacacagaagcacccccgagctgtacggcatctacgtgatcaacgtgcagtgccagttctgcgagtacgacgtgtgcatggagcccgccaagaccctgatcgagttccagaactgggacaccctgctgttctgcatccaggagggcgtgaagatgttcctgaagcaggagaagctgttcgtggagctgagcggcgaggacatcaaggagttcagcgaggacaacggcttcagcctgttcgacgccaccctgcagaagagagtgaccagcgacgagagaagcaacttccaggaggcctgcaacaacatcctggacagctacgagatgttcaacctgcagagcaaggccgtgaagagaaagaccaccgccgagaacgtgaacacccagagcagcagagacagcgaggccaccagaaagaacaccaacgacgccttcctgtacatctacgagagcggcggccccggccacagcaagatgaccgagcccagcctgcagaacaaggacagcagctgcagcgagagcaagatgctggagcaggagaccatcgtggccagcgaggccggcgagaacgagaagcacaagaagagcttcctggagcacagcagcctggagaacccctgcggcaccagcctggagatgttcctgagccccttccagaccccctgccacttcgaggagagcggccaggacctggagatctggaaggagagcaccaccgtgaacggcatggccgccaacatcctgaagaacaacagaatccagaaccagcccaagagattcaaggacgccaccgaggtgggctgccagcccctgcccttcgccaccaccctgtggggcgtgcacagcgcccagaccgagaaggagaagaagaaggagagcagcaactgcggcagaagaaacgtgttcagctacggcagagtgaagctgtgcagcaccggcttcatcacccacgtggtgcagaacgagaagaccaagagcaccgagaccgagcacagcttcaagaactacgtgagacccggccccaccagagcccaggagaccttcggcaacagaaccagacacagcgtggagacccccgacatcaaggacctggccagcaccctgagcaaggagagcggccagctgcccaacaagaagaactgcagaaccaacatcagctacggcctggagaacgagcccaccgccacctacaccatgttcagcgccttccaggagggcagcaagaagagccagaccgactgcatcctgagcgacaccagccccagcttcccctggtacagacacgtgagcaacgacagcagaaagaccgacaagctgatcggcttcagcaagcccatcgtgagaaagaagctgagcctgagcagccagctgggcagcctggagaagttcaagagacagtacggcaaggtggagaaccccctggacaccgaggtggaggagagcaacggcgtgaccaccaacctgagcctgcaggtggagcccgacatcctgctgaaggacaagaacagactggagaacagcgacgtgtgcaagatcaccaccatggagcacagcgacagcgacagcagctgccagcccgccagccacatcctgaacagcgagaagttccccttcagcaaggacgaggactgcctggagcagcagatgcccagcctgagagagagccccatgaccctgaaggagctgagcctgttcaacagaaagcccctggacctggagaagagcagcgagagcctggccagcaagctgagcagactgaagggcagcgagagagagacccagaccatgggcatgatgagcagattcaacgagctgcccaacagcgacagcagcagaaaggacagcaagctgtgcagcgtgctgacccaggacttctgcatgctgttcaacaacaagcacgagaagaccgagaacggcgtgatccccaccagcgacagcgccacccaggacaacagcttcaacaagaacagcaagacccacagcaacagcaacaccaccgagaactgcgtgatcagcgagacccccctggtgctgccctacaacaacagcaaggtgaccggcaaggacagcgacgtgctgatcagagccagcgagcagcagatcggcagcctggacagccccagcggcatgctgatgaaccccgtggaggacgccaccggcgaccagaacggcatctgcttccagagcgaggagagcaaggccagagcctgcagcgagaccgaggagagcaacacctgctgcagcgactggcagagacacttcgacgtggccctgggcagaatggtgtacgtgaacaagatgaccggcctgagcaccttcatcgcccccaccgaggacatccaggccgcctgcaccaaggacctgaccaccgtggccgtggacgtggtgctggagaacggcagccagtacagatgccagcccttcagaagcgacctggtgctgcccttcctgcccagagccagagccgagagaaccgtgatgagacaggacaacagagacaccgtggacgacaccgtgagcagcgagagcctgcagagcctgttcagcgagtgggacaaccccgtgttcgccagataccccgaggtggccgtggacgtgagcagcggccaggccgagagcctggccgtgaagatccacaacatcctgtacccctacagattcaccaagggcatgatccacagcatgcaggtgctgcagcaggtggacaacaagttcatcgcctgcctgatgagcaccaagaccgaggagaacggcgaggccgacagctacgagaagcagcaggcccagggcagcggcagaaagaagctgctgagcagcaccctgatcccccccctggagatcaccgtgaccgaggagcagagaagactgctgtggtgctaccacaagaacctggaggacctgggcctggagttcgtgttccccgacaccagcgacagcctggtgctggtgggcaaggtgcccctgtgcttcgtggagagagaggccaacgagctgagaagaggcagaagcaccgtgaccaagagcatcgtggaggagttcatcagagagcagctggagctgctgcagaccaccggcggcatccagggcaccctgcccctgaccgtgcagaaggtgctggccagccaggcctgccacggcgccatcaagttcaacgacggcctgagcctgcaggagagctgcagactgatcgaggccctgagcagctgccagctgcccttccagtgcgcccacggcagacccagcatgctgcccctggccgacatcgaccacctggagcaggagaagcagatcaagcccaacctgaccaagctgagaaagatggcccaggcctggagactgttcggcaaggccgagtgcgacaccagacagagcctgcagcagagcatgcccccctgcgagcccccctag

SEQ ID NO: 11635 - DNA, 4362 bp, synthetic construct
  misc_feature 1..4362: note = Description of Artificial Sequence: Synthetic coding sequence
  source 1..4362: mol_type = other DNA
atgatcaagtgcctgagcgtggaggtgcaggccaagctgagaagcggcctggccatcagcagcctgggccagtgcgtggaggagctggccctgaacagcatcgacgccgaggccaagtgcgtggccgtgagagtgaacatggagaccttccaggtgcaggtgatcgacaacggcttcggcatgggcagcgacgacgtggagaaggtgggcaacagatacttcaccagcaagtgccacagcgtgcaggacctggagaaccccagattctacggcttcagaggcgaggccctggccaacatcgccgacatggccagcgccgtggagatcagcagcaagaagaacagaaccatgaagaccttcgtgaagctgttccagagcggcaaggccctgaaggcctgcgaggccgacgtgaccagagccagcgccggcaccaccgtgaccgtgtacaacctgttctaccagctgcccgtgagaagaaagtgcatggaccccagactggagttcgagaaggtgagacagagaatcgaggccctgagcctgatgcaccccagcatcagcttcagcctgagaaacgacgtgagcggcagcatggtgctgcagctgcccaagaccaaggacgtgtgcagcagattctgccagatctacggcctgggcaagagccagaagctgagagagatcagcttcaagtacaaggagttcgagctgagcggctacatcagcagcgaggcccactacaacaagaacatgcagttcctgttcgtgaacaagagactggtgctgagaaccaagctgcacaagctgatcgacttcctgctgagaaaggagagcatcatctgcaagcccaagaacggccccaccagcagacagatgaacagcagcctgagacacagaagcacccccgagctgtacggcatctacgtgatcaacgtgcagtgccagttctgcgagtacgacgtgtgcatggagcccgccaagaccctgatcgagttccagaactgggacaccctgctgttctgcatccaggagggcgtgaagatgttcctgaagcaggagaagctgttcgtggagctgagcggcgaggacatcaaggagttcagcgaggacaacggcttcagcctgttcgacgccaccctgcagaagagagtgaccagcgacgagagaagcaacttccaggaggcctgcaacaacatcctggacagctacgagatgttcaacctgcagagcaaggccgtgaagagaaagaccaccgccgagaacgtgaacacccagagcagcagagacagcgaggccaccagaaagaacaccaacgacgccttcctgtacatctacgagagcggcggccccggccacagcaagatgaccgagcccagcctgcagaacaaggacagcagctgcagcgagagcaagatgctggagcaggagaccatcgtggccagcgaggccggcgagaacgagaagcacaagaagagcttcctggagcacagcagcctggagaacccctgcggcaccagcctggagatgttcctgagccccttccagaccccctgccacttcgaggagagcggccaggacctggagatctggaaggagagcaccaccgtgaacggcatggccgccaacatcctgaagaacaacagaatccagaaccagcccaagagattcaaggacgccaccgaggtgggctgccagcccctgcccttcgccaccaccctgtggggcgtgcacagcgcccagaccgagaaggagaagaagaaggagagcagcaactgcggcagaagaaacgtgttcagctacggcagagtgaagctgtgcagcaccggcttcatcacccacgtggtgcagaacgagaagaccaagagcaccgagaccgagcacagcttcaagaactacgtgagacccggccccaccagagcccaggagaccttcggcaacagaaccagacacagcgtggagacccccgacatcaaggacctggccagcaccctgagcaaggagagcggccagctgcccaacaagaagaactgcagaaccaacatcagctacggcctggagaacgagcccaccgccacctacaccatgttcagcgccttccaggagggcagcaagaagagccagaccgactgcatcctgagcgacaccagccccagcttcccctggtacagacacgtgagcaacgacagcagaaagaccgacaagctgatcggcttcagcaagcccatcgtgagaaagaagctgagcctgagcagccagctgggcagcctggagaagttcaagagacagtacggcaaggtggagaaccccctggacaccgaggtggaggagagcaacggcgtgaccaccaacctgagcctgcaggtggagcccgacatcctgctgaaggacaagaacagactggagaacagcgacgtgtgcaagatcaccaccatggagcacagcgacagcgacagcagctgccagcccgccagccacatcctgaacagcgagaagttccccttcagcaaggacgaggactgcctggagcagcagatgcccagcctgagagagagccccatgaccctgaaggagctgagcctgttcaacagaaagcccctggacctggagaagagcagcgagagcctggccagcaagctgagcagactgaagggcagcgagagagagacccagaccatgggcatgatgagcagattcaacgagctgcccaacagcgacagcagcagaaaggacagcaagctgtgcagcgtgctgacccaggacttctgcatgctgttcaacaacaagcacgagaagaccgagaacggcgtgatccccaccagcgacagcgccacccaggacaacagcttcaacaagaacagcaagacccacagcaacagcaacaccaccgagaactgcgtgatcagcgagacccccctggtgctgccctacaacaacagcaaggtgaccggcaaggacagcgacgtgctgatcagagccagcgagcagcagatcggcagcctggacagccccagcggcatgctgatgaaccccgtggaggacgccaccggcgaccagaacggcatctgcttccagagcgaggagagcaaggccagagcctgcagcgagaccgaggagagcaacacctgctgcagcgactggcagagacacttcgacgtggccctgggcagaatggtgtacgtgaacaagatgaccggcctgagcaccttcatcgcccccaccgaggacatccaggccgcctgcaccaaggacctgaccaccgtggccgtggacgtggtgctggagaacggcagccagtacagatgccagcccttcagaagcgacctggtgctgcccttcctgcccagagccagagccgagagaaccgtgatgagacaggacaacagagacaccgtggacgacaccgtgagcagcgagagcctgcagagcctgttcagcgagtgggacaaccccgtgttcgccagataccccgaggtggccgtggacgtgagcagcggccaggccgagagcctggccgtgaagatccacaacatcctgtacccctacagattcaccaagggcatgatccacagcatgcaggtgctgcagcaggtggacaacaagttcatcgcctgcctgatgagcaccaagaccgaggagaacggcgaggccggcggcaacctgctggtgctggtggaccagcacgccgcccacgagagaatcagactggagcagctgatcatcgacagctacgagaagcagcaggcccagggcagcggcagaaagaagctgctgagcagcaccctgatcccccccctggagatcaccgtgaccgaggagcagagaagactgctgtggtgctaccacaagaacctggaggacctgggcctggagttcgtgttccccgacaccagcgacagcctggtgctggtgggcaaggtgcccctgtgcttcgtggagagagaggccaacgagctgagaagaggcagaagcaccgtgaccaagagcatcgtggaggagttcatcagagagcagctggagctgctgcagaccaccggcggcatccagggcaccctgcccctgaccgtgcagaaggtgctggccagccaggcctgccacggcgccatcaagttcaacgacggcctgagcctgcaggagagctgcagactgatcgaggccctgagcagctgccagctgcccttccagtgcgcccacggcagacccagcatgctgcccctggccgacatcgaccacctggagcaggagaagcagatcaagcccaacctgaccaagctgagaaagatggcccaggcctggagactgttcggcaaggccgagtgcgacaccagacagagcctgcagcagagcatgcccccctgcgagcccccctag

SEQ ID NO: 11636 - DNA, 1176 bp, synthetic construct
  misc_feature 1..1176: note = Description of Artificial Sequence: Synthetic coding sequence
  source 1..1176: mol_type = other DNA
atggtgtacgtgaacaagatgaccggcctgagcaccttcatcgcccccaccgaggacatccaggccgcctgcaccaaggacctgaccaccgtggccgtggacgtggtgctggagaacggcagccagtacagatgccagcccttcagaagcgacctggtgctgcccttcctgcccagagccagagccgagagaaccgtgatgagacaggacaacagagacaccgtggacgacaccgtgagcagcgagagcctgcagagcctgttcagcgagtgggacaaccccgtgttcgccagataccccgaggtggccgtggacgtgagcagcggccaggccgagagcctggccgtgaagatccacaacatcctgtacccctacagattcaccaagggcatgatccacagcatgcaggtgctgcagcaggtggacaacaagttcatcgcctgcctgatgagcaccaagaccgaggagaacggcgaggccggcggcaacctgctggtgctggtggaccagcacgccgcccacgagagaatcagactggagcagctgatcatcgacagctacgagaagcagcaggcccagggcagcggcagaaagaagctgctgagcagcaccctgatcccccccctggagatcaccgtgaccgaggagcagagaagactgctgtggtgctaccacaagaacctggaggacctgggcctggagttcgtgttccccgacaccagcgacagcctggtgctggtgggcaaggtgcccctgtgcttcgtggagagagaggccaacgagctgagaagaggcagaagcaccgtgaccaagagcatcgtggagctgctgcagaccaccggcggcatccagggcaccctgcccctgaccgtgcagaaggtgctggccagccaggcctgccacggcgccatcaagttcaacgacggcctgagcctgcaggagagctgcagactgatcgaggccctgagcagctgccagctgcccttccagtgcgcccacggcagacccagcatgctgcccctggccgacatcgaccacctggagcaggagaagcagatcaagcccaacctgaccaagctgagaaagatggcccaggcctggagactgttcggcaaggccgagtgcgacaccagacagagcctgcagcagagcatgcccccctgcgagcccccctag

SEQ ID NO: 11637 - DNA, 597 bp, synthetic construct
  misc_feature 1..597: note = Description of Artificial Sequence: Synthetic coding sequence
  source 1..597: mol_type = other DNA
atgaaccccgtggaggacgccaccggcgaccagaacggcatctgcttccagagcgaggagagcaaggccagagcctgcagcgagaccgaggagagcaacacctgctgcagcgactggcagagacacttcgacgtggccctgggcagaatggtgtacgtgaacaagatgaccggcctgagcaccttcatcgcccccaccgaggacatccaggccgcctgcaccaaggacctgaccaccgtggccgtggacgtggtgctggagaacggcagccagtacagatgccagcccttcagaagcgacctggtgctgcccttcctgcccagagccagagccgagagaaccgtgatgagacaggacaacagagacaccgtggacgacaccgtgagcagcgagagcctgcagagcctgttcagcgagtgggacaaccccgtgttcgccagataccccgaggtgctgcagcaggtggacaacaagttcatcgcctgcctgatgagcaccaagaccgaggagaacggcgaggccgccgagctgatgatgctgcaggacccctgctgcagacagagcagagaggacgagaaccacgagttcagcctgtag

SEQ ID NO: 11638 - DNA, 489 bp, synthetic construct
  misc_feature 1..489: note = Description of Artificial Sequence: Synthetic coding sequence
  source 1..489: mol_type = other DNA
atgatcaagtgcctgagcgtggaggtgcaggccaagctgagaagcggcctggccatcagcagcctgggccagtgcgtggaggagctggccctgaacagcatcgacgccgaggccaagtgcgtggccgtgagagtgaacatggagaccttccaggtgcaggtgatcgacaacggcttcggcatgggcagcgacgacgtggagaaggtgggcaacagatacttcaccagcaagtgccacagcgtgcaggacctggagaaccccagattctacggcttcagaggcgaggccctggccaacatcgccgacatggccagcgccgtggagatcagcagcaagaagaacagaaccatgaagaccttcgtgaagctgttccagagcggcaaggccctgaaggcctgcgaggccgacgtgaccagagccagcgccggcaccaccgtgaccgtgtacaacctgttctaccagctgcccgtgagaagaaagtgcatgtag

SEQ ID NO: 11639 - DNA, 4362 bp, synthetic construct; identical to SEQ ID NO: 11635
  misc_feature 1..4362: note = Description of Artificial Sequence: Synthetic coding sequence
  source 1..4362: mol_type = other DNA

SEQ ID NO: 11640 - DNA, 321 bp, synthetic construct
  misc_feature 1..321: note = Description of Artificial Sequence: Synthetic coding sequence
  source 1..321: mol_type = other DNA
atgatcaagtgcctgagcgtggaggtgcaggccaagctgagaagcggcctggccatcagcagcctgggccagtgcgtggaggagctggccctgaacagcatcgacgccgaggccaagtgcgtggccgtgagagtgaacatggagaccttccaggtgcaggtgatcgacaacggcttcggcatgggcagcgacgacgtggagaaggtgggcaacagatacttcaccagcaagtgccacagcgtgcaggacctggagaaccccagattctacggcttcagaggcgaggccctggccaacatcgccgacatggccagcgcctag

SEQ ID NO: 11641 - DNA, 135 bp, synthetic construct
  misc_feature 1..135: note = Description of Artificial Sequence: Synthetic coding sequence
  source 1..135: mol_type = other DNA
atggccgacaagcccgacatgggcgagatcgccagcttcgacaaggccaagctgaagaagaccgagacccaggagaagaacaccctgcccaccaaggagaccatcgagcaggagaagagaagcgagatcagctag

SEQ ID NO: 11642 - DNA, 1026 bp, synthetic construct
  misc_feature 1..1026: note = Description of Artificial Sequence: Synthetic coding sequence
  source 1..1026: mol_type = other DNA
atggccgtgcagcccaaggagaccctgcagctggagagcgccgccgaggtgggcttcgtgagattcttccagggcatgcccgagaagcccaccaccaccgtgagactgttcgacagaggcgacttctacaccgcccacggcgaggacgccctgctggccgccagagaggtgttcaagacccagggcgtgatcaagtacatgggccccgccggcgccaagaacctgcagagcgtggtgctgagcaagatgaacttcgagagcttcgtgaaggacctgctgctggtgagacagtacagagtggaggtgtacaagaacagagccggcaacaaggccagcaaggagaacgactggtacctggcctacaaggccagccccggcaacctgagccagttcgaggacatcctgttcggcaacaacgacatgagcgccagcatcggcgtggtgggcgtgaagatgagcgccgtggacggccagagacaggtgggcgtgggctacgtggacagcatccagagaaagctgggcctgtgcgagttccccgacaacgaccagttcagcaacctggaggccctgctgatccagatcggccccaaggagtgcgtgctgcccggcggcgagaccgccggcgacatgggcaagctgagacagatcatccagagaggcggcatcctgatcaccgagagaaagaaggccgacttcagcaccaaggacatctaccaggacctgaacagactgctgaagggcaagaagggcgagcagatgaacagcgccgtgctgcccgagatggagaaccaggtggccgtgagcagcctgagcgccgtgatcaagttcctggagctgctgagcgacgacagcaacttcggccagttcgagctgaccaccttcgacttcagccagtacatgaagctggacatcgccgccgtgagagccctgaacctgttccagggcagcgtggaggacaccaccggcagccagagcctggccgccctgctgaacaagtgcaagaccccccagggccagacctgctag

SEQ ID NO: 11643 - DNA, 2766 bp, synthetic construct
  misc_feature 1..2766: note = Description of Artificial Sequence: Synthetic coding sequence
  source 1..2766: mol_type = other DNA
atggccgtgcagcccaaggagaccctgcagctggagagcgccgccgaggtgggcttcgtgagattcttccagggcatgcccgagaagcccaccaccaccgtgagactgttcgacagaggcgacttctacaccgcccacggcgaggacgccctgctggccgccagagaggtgttcaagacccagggcgtgatcaagtacatgggccccgccggcgccaagaacctgcagagcgtggtgctgagcaagatgaacttcgagagcttcgtgaaggacctgctgctggtgagacagtacagagtggaggtgtacaagaacagagccggcaacaaggccagcaaggagaacgactggtacctggcctacaaggccagccccggcaacctgagccagttcgaggacatcctgttcggcaacaacgacatgagcgccagcatcggcgtggtgggcgtgaagatgagcgccgtggacggccagagacaggtgggcgtgggctacgtggacagcatccagagaaagctgggcctgtgcgagttccccgacaacgaccagttcagcaacctggaggccctgctgatccagatcggccccaaggagtgcgtgctgcccggcggcgagaccgccggcgacatgggcaagctgagacagatcatccagagaggcggcatcctgatcaccgagagaaagaaggccgacttcagcaccaaggacatctaccaggacctgaacagactgctgaagggcaagaagggcgagcagatgaacagcgccgtgctgcccgagatggagaaccaggtggccgtgagcagcctgagcgccgtgatcaagttcctggagctgctgagcgacgacagcaacttcggccagttcgagctgaccaccttcgacttcagccagtacatgaagctggacatcgccgccgtgagagccctgaacctgttccagggcagcgtggaggacaccaccggcagccagagcctggccgccctgctgaacaagtgcaagaccccccagggccagagactggtgaaccagtggatcaagcagcccctgatggacaagaacagaatcgaggagagactgaacctggtggaggccttcgtggaggacgccgagctgagacagaccctgcaggaggacctgctgagaagattccccgacctgaacagactggccaagaagttccagagacaggccgccaacctgcaggactgctacagactgtaccagggcatcaaccagctgcccaacgtgatccaggccctggagaagcacgagggcaagcaccagaagctgctgctggccgtgttcgtgacccccctgaccgacctgagaagcgacttcagcaagttccaggagatgatcgagaccaccctggacatggaccaggtggagaaccacgagttcctggtgaagcccagcttcgaccccaacctgagcgagctgagagagatcatgaacgacctggagaagaagatgcagagcaccctgatcagcgccgccagagacctgggcctggaccccggcaagcagatcaagctggacagcagcgcccagttcggctactacttcagagtgacctgcaaggaggagaaggtgctgagaaacaacaagaacttcagcaccgtggacatccagaagaacggcgtgaagttcaccaacagcaagctgaccagcctgaacgaggagtacaccaagaacaagaccgagtacgaggaggcccaggacgccatcgtgaaggagatcgtgaacatcagcagcggctacgtggagcccatgcagaccctgaacgacgtgctggcccagctggacgccgtggtgagcttcgcccacgtgagcaacggcgcccccgtgccctacgtgagacccgccatcctggagaagggccagggcagaatcatcctgaaggccagcagacacgcctgcgtggaggtgcaggacgagatcgccttcatccccaacgacgtgtacttcgagaaggacaagcagatgttccacatcatcaccggccccaacatgggcggcaagagcacctacatcagacagaccggcgtgatcgtgctgatggcccagatcggctgcttcgtgccctgcgagagcgccgaggtgagcatcgtggactgcatcctggccagagtgggcgccggcgacagccagctgaagggcgtgagcaccttcatggccgagatgctggagaccgccagcatcctgagaagcgccaccaaggacagcctgatcatcatcgacgagctgggcagaggcaccagcacctacgacggcttcggcctggcctgggccatcagcgagtacatcgccaccaagatcggcgccttctgcatgttcgccacccacttccacgagctgaccgccctggccaaccagatccccaccgtgaacaacctgcacgtgaccgccctgaccaccgaggagaccctgaccatgctgtaccaggtgaagaagggcgtgtgcgaccagagcttcggcatccacgtggccgagctggccaacttccccaagcacgtgatcgagtgcgccaagcagaaggccctggagctggaggagttccagtacatcggcgagagccagggctacgacatcatggagcccgccgccaagaagtgctacctggagagagagaacctgagagtgaccgagcccaaggaccagtgcctgatcctgctgacctggaagagaaagctgagaggcggcaagagaagcgcctgcagcagacccgagagacagaaccagggcagcggcgagctgagctag

SEQ ID NO: 11644 - DNA, 2163 bp, synthetic construct
  misc_feature 1..2163: note = Description of Artificial Sequence: Synthetic coding sequence
  source 1..2163: mol_type = other DNA
atgatcggcatctggcacatcagactgctgctggccatcagcctgagcctgaagaccttcagcctggtgaccatgatctgccagctgcccctggtgctgtgggtgctgaagtgcccccagctgatggccagagacatgggcaagctgagacagatcatccagagaggcggcatcctgatcaccgagagaaagaaggccgacttcagcaccaaggacatctaccaggacctgaacagactgctgaagggcaagaagggcgagcagatgaacagcgccgtgctgcccgagatggagaaccagggcagcgtggaggacaccaccggcagccagagcctggccgccctgctgaacaagtgcaagaccccccagggccagagactggtgaaccagtggatcaagcagcccctgatggacaagaacagaatcgaggagagactgaacctggtggaggccttcgtggaggacgccgagctgagacagaccctgcaggaggacctgctgagaagattccccgacctgaacagactggccaagaagttccagagacaggccgccaacctgcaggactgctacagactgtaccagggcatcaaccagctgcccaacgtgatccaggccctggagaagcacgagggcaagcaccagaagctgctgctggccgtgttcgtgacccccctgaccgacctgagaagcgacttcagcaagttccaggagatgatcgagaccaccctggacatggaccaggtggagaaccacgagttcctggtgaagcccagcttcgaccccaacctgagcgagctgagagagatcatgaacgacctggagaagaagatgcagagcaccctgatcagcgccgccagagacctgggcctggaccccggcaagcagatcaagctggacagcagcgcccagttcggctactacttcagagtgacctgcaaggaggagaaggtgctgagaaacaacaagaacttcagcaccgtggacatccagaagaacggcgtgaagttcaccaacagcaagctgaccagcctgaacgaggagtacaccaagaacaagaccgagtacgaggaggcccaggacgccatcgtgaaggagatcgtgaacatcagcagcggctacgtggagcccatgcagaccctgaacgacgtgctggcccagctggacgccgtggtgagcttcgcccacgtgagcaacggcgcccccgtgccctacgtgagacccgccatcctggagaagggccagggcagaatcatcctgaaggccagcagacacgcctgcgtggaggtgcaggacgagatcgccttcatccccaacgacgtgtacttcgagaaggacaagcagatgttccacatcatcaccggccccaacatgggcggcaagagcacctacatcagacagaccggcgtgatcgtgctgatggcccagatcggctgcttcgtgccctgcgagagcgccgaggtgagcatcgtggactgcatcctggccagagtgggcgccggcgacagccagctgaagggcgtgagcaccttcatggccgagatgctggagaccgccagcatcctgagaagcgccaccaaggacagcctgatcatcatcgacgagctgggcagaggcaccagcacctacgacggcttcggcctggcctgggccatcagcgagtacatcgccaccaagatcggcgccttctgcatgttcgccacccacttccacgagctgaccgccctggccaaccagatccccaccgtgaacaacctgcacgtgaccgccctgaccaccgaggagaccctgaccatgctgtaccaggtgaagaagggcgtgtgcgaccagagcttcggcatccacgtggccgagctggccaacttccccaagcacgtgatcgagtgcgccaagcagaaggccctggagctggaggagttccagtacatcggcgagagccagggctacgacatcatggagcccgccgccaagaagtgctacctggagagagagcagggcgagaagatcatccaggagttcctgagcaaggtgaagcagatgcccttcaccgagatgagcgaggagaacatcaccatcaagctgaagcagctgaaggccgaggtgatcgccaagaacaacagcttcgtgaacgagatcatcagcagaatcaaggtgaccacctag

SEQ ID NO: 11645 - DNA, 2433 bp, synthetic construct
  misc_feature 1..2433: note = Description of Artificial Sequence: Synthetic coding sequence
  source 1..2433: mol_type = other DNA
atggccgtgcagcccaaggagaccctgcagctggagagcgccgccgaggtgggcttcgtgagattcttccagggcatgcccgagaagcccaccaccaccgtgagactgttcgacagaggcgacttctacaccgcccacggcgaggacgccctgctggccgccagagaggtgttcaagacccagggcgtgatcaagtacatgggccccgccggcgccaagaacctgcagagcgtggtgctgagcaagatgaacttcgagagcttcgtgaaggacctgctgctggtgagacagtacagagtggaggtgtacaagaacagagccggcaacaaggccagcaaggagaacgactggtacctggcctacaaggccagccccggcaacctgagccagttcgaggacatcctgttcggcaacaacgacatgagcgccagcatcggcgtggtgggcgtgaagatgagcgccgtggacggccagagacaggtgggcgtgggctacgtggacagcatccagagaaagctgggcctgtgcgagttccccgacaacgaccagttcagcaacctggaggccctgctgatccagatcggccccaaggagtgcgtgctgcccggcggcgagaccgccggcgacatgggcaagctgagacagatcatccagagaggcggcatcctgatcaccgagagaaagaaggccgacttcagcaccaaggacatctaccaggacctgaacagactgctgaagggcaagaagggcgagcagatgaacagcgccgtgctgcccgagatggagaaccaggtggccgtgagcagcctgagcgccgtgatcaagttcctggagctgctgagcgacgacagcaacttcggccagttcgagctgaccaccttcgacttcagccagtacatgaagctggacatcgccgccgtgagagccctgaacctgttccagggcagcgtggaggacaccaccggcagccagagcctggccgccctgctgaacaagtgcaagaccccccagggccagagactggtgaaccagtggatcaagcagcccctgatggacaagaacagaatcgaggagagactgaacctggtggaggccttcgtggaggacgccgagctgagacagaccctgcaggaggacctgctgagaagattccccgacctgaacagactggccaagaagttccagagacaggccgccaacctgcaggactgctacagactgtaccagggcatcaaccagctgcccaacgtgatccaggccctggagaagcacgagggcaagcaccagaagctgctgctggccgtgttcgtgacccccctgaccgacctgagaagcgacttcagcaagttccaggagatgatcgagaccaccctggacatggaccaggtggagaaccacgagttcctggtgaagcccagcttcgaccccaacctgagcgagctgagagagatcatgaacgacctggagaagaagatgcagagcaccctgatcagcgccgccagagacctgggcctggaccccggcaagcagatcaagctggacagcagcgcccagttcggctactacttcagagtgacctgcaaggaggagaaggtgctgagaaacaacaagaacttcagcaccgtggacatccagaagaacggcgtgaagttcaccaacagcaagctgaccagcctgaacgaggagtacaccaagaacaagaccgagtacgaggaggcccaggacgccatcgtgaaggagatcgtgaacatcagcagcggctacgtggagcccatgcagaccctgaacgacgtgctggcccagctggacgccgtggtgagcttcgcccacgtgagcaacggcgcccccgtgccctacgtgagacccgccatcctggagaagggccagggcagaatcatcctgaaggccagcagacacgcctgcgtggaggtgcaggacgagatcgccttcatccccaacgacgtgtacttcgagaaggacaagcagatgttccacatcatcaccggccccaacatgggcggcaagagcacctacatcagacagaccggcgtgatcgtgctgatggcccagatcggctgcttcgtgccctgcgagagcgccgaggtgagcatcgtggactgcatcctggccagagtgggcgccggcgacagccagctgaagggcgtgagcaccttcatggccgagatgctggagaccgccagcatcctgagaagcgccaccaaggacagcctgatcatcatcgacgagctgggcagaggcaccagcacctacgacggcttcggcctggcctgggccatcagcgagtacatcgccaccaagatcggcgccttctgcatgttcgccaccatcttcatgaacctgctgccctggcccatcagataccagctgctgatcatctacatgagccagcacagccccctgaagagaccctag

SEQ ID NO: 11646 - DNA, 507 bp, synthetic construct
  misc_feature 1..507: note = Description of Artificial Sequence: Synthetic coding sequence
  source 1..507: mol_type = other DNA
atggacaagaacagaatcgaggagagactgaacctggtggaggccttcgtggaggacgccgagctgagacagaccctgcaggaggacctgctgagaagattccccgacctgaacagactggccaagaagttccagagacaggccgccaacctgcaggactgctacagactgtaccagggcatcaaccagctgcccaacgtgatccaggccctggagaagcacgagggcaagcaccagaagctgctgctggccgtgttcgtgacccccctgaccgacctgagaagcgacttcagcaagttccaggagatgatcgagaccaccctggacatggaccaggtggagaaccacgagttcctggtgaagcccagcttcgaccccaacctgagcgagctgagagagatcatgaacgacctggagaagaagatgcagagcaccctgatcagcgccgccagagacctgggcggcagcctgcagcccagaagcagcagactggcctgcgccacctag

SEQ ID NO: 11647 - DNA, 1602 bp, synthetic construct
  misc_feature 1..1602: note = Description of Artificial Sequence: Synthetic coding sequence
  source 1..1602: mol_type = other DNA
atggccgtgcagcccaaggagaccctgcagctggagagcgccgccgaggtgggcttcgtgagattcttccagggcatgcccgagaagcccaccaccaccgtgagactgttcgacagaggcgacttctacaccgcccacggcgaggacgccctgctggccgccagagaggtgttcaagacccagggcgtgatcaagtacatgggccccgccggcgccaagaacctgcagagcgtggtgctgagcaagatgaacttcgagagcttcgtgaaggacctgctgctggtgagacagtacagagtggaggtgtacaagaacagagccggcaacaaggccagcaaggagaacgactggtacctggcctacaaggccagccccggcaacctgagccagttcgaggacatcctgttcggcaacaacgacatgagcgccagcatcggcgtggtgggcgtgaagatgagcgccgtggacggccagagacaggtgggcgtgggctacgtggacagcatccagagaaagctgggcctgtgcgagttccccgacaacgaccagttcagcaacctggaggccctgctgatccagatcggccccaaggagtgcgtgctgcccggcggcgagaccgccggcgacatgggcaagctgagacagatcatccagagaggcggcatcctgatcaccgagagaaagaaggccgacttcagcaccaaggacatctaccaggacctgaacagactgctgaagggcaagaagggcgagcagatgaacagcgccgtgctgcccgagatggagaaccaggtggccgtgagcagcctgagcgccgtgatcaagttcctggagctgctgagcgacgacagcaacttcggccagttcgagctgaccaccttcgacttcagccagtacatgaagctggacatcgccgccgtgagagccctgaacctgttccagggcagcgtggaggacaccaccggcagccagagcctggccgccctgctgaacaagtgcaagaccccccagggccagagactggtgaaccagtggatcaagcagcccctgatggacaagaacagaatcgaggagagactgaacctggtggaggccttcgtggaggacgccgagctgagacagaccctgcaggaggacctgctgagaagattccccgacctgaacagactggccaagaagttccagagacaggccgccaacctgcaggactgctacagactgtaccagggcatcaaccagctgcccaacgtgatccaggccctggagaagcacgagggcaagcaccagaagctgctgctggccgtgttcgtgacccccctgaccgacctgagaagcgacttcagcaagttccaggagatgatcgagaccaccctggacatggaccaggtggagaaccacgagttcctggtgaagcccagcttcgaccccaacctgagcgagctgagagagatcatgaacgacctggagaagaagatgcagagcaccctgatcagcgccgccagagacctgggcctggaccccggcaagcagatcaagctggacagcagcgcccagttcggctactacttcagagtgacctgcaaggagaagagccccagctag

SEQ ID NO: 11648 - DNA, 1233 bp, synthetic construct
  misc_feature 1..1233: note = Description of Artificial Sequence: Synthetic coding sequence
  source 1..1233: mol_type = other DNA
atggccgtgcagcccaaggagaccctgcagctggagagcgccgccgaggtgggcttcgtgagattcttccagggcatgcccgagaagcccaccaccaccgtgagactgttcgacagaggcgacttctacaccgcccacggcgaggacgccctgctggccgccagagaggtgttcaagacccagggcgtgatcaagtacatgggccccgccggcgccaagaacctgcagagcgtggtgctgagcaagatgaacttcgagagcttcgtgaaggacctgctgctggtgagacagtacagagtggaggtgtacaagaacagagccggcaacaaggccagcaaggagaacgactggtacctggcctacaaggccagccccggcaacctgagccagttcgaggacatcctgttcggcaacaacgacatgagcgccagcatcggcgtggtgggcgtgaagatgagcgccgtggacggccagagacaggtgggcgtgggctacgtggacagcatccagagaaagctgggcctgtgcgagttccccgacaacgaccagttcagcaacctggaggccctgctgatccagatcggccccaaggagtgcgtgctgcccggcggcgagaccgccggcgacatgggcaagctgagacagatcatccagagaggcggcatcctgatcaccgagagaaagaaggccgacttcagcaccaaggacatctaccaggacctgaacagactgctgaagggcaagaagggcgagcagatgaacagcgccgtgctgcccgagatggagaaccaggtggccgtgagcagcctgagcgccgtgatcaagttcctggagctgctgagcgacgacagcaacttcggccagttcgagctgaccaccttcgacttcagccagtacatgaagctggacatcgccgccgtgagagccctgaacctgttccagggcagcgtggaggacaccaccggcagccagagcctggccgccctgctgaacaagtgcaagaccccccagggccagagactggtgaaccagtggatcaagcagcccctgatggacaagaacagaatcgaggagagactgaacctggtggaggccttcgtggaggacgccgagctgagacagaccctgcaggaggactacttcgtggacagccagatcctgaccgacctgcccagaagcttcaaggacaagcagcagacctacaagatcgtgaccgacagcatcagagtgtag

SEQ ID NO: 11649 - DNA, 1458 bp, synthetic construct
  misc_feature 1..1458: note = Description of Artificial Sequence: Synthetic coding sequence
  source 1..1458: mol_type = other DNA
atggccgtgcagcccaaggagaccctgcagctggagagcgccgccgaggtgggcttcgtgagattcttccagggcatgcccgagaagcccaccaccaccgtgagactgttcgacagaggcgacttctacaccgcccacggcgaggacgccctgctggccgccagagaggtgttcaagacccagggcgtgatcaagtacatgggccccgccggcgccaagaacctgcagagcgtggtgctgagcaagatgaacttcgagagcttcgtgaaggacctgctgctggtgagacagtacagagtggaggtgtacaagaacagagccggcaacaaggccagcaaggagaacgactggtacctggcctacaaggccagccccggcaacctgagccagttcgaggacatcctgttcggcaacaacgacatgagcgccagcatcggcgtggtgggcgtgaagatgagcgccgtggacggccagagacaggtgggcgtgggctacgtggacagcatccagagaaagctgggcctgtgcgagttccccgacaacgaccagttcagcaacctggaggccctgctgatccagatcggccccaaggagtgcgtgctgcccggcggcgagaccgccggcgacatgggcaagctgagacagatcatccagagaggcggcatcctgatcaccgagagaaagaaggccgacttcagcaccaaggacatctaccaggacctgaacagactgctgaagggcaagaagggcgagcagatgaacagcgccgtgctgcccgagatggagaaccaggtggccgtgagcagcctgagcgccgtgatcaagttcctggagctgctgagcgacgacagcaacttcggccagttcgagctgaccaccttcgacttcagccagtacatgaagctggacatcgccgccgtgagagccctgaacctgttccagggcagcgtggaggacaccaccggcagccagagcctggccgccctgctgaacaagtgcaagaccccccagggccagagactggtgaaccagtggatcaagcagcccctgatggacaagaacagaatcgaggagagactgaacctggtggaggccttcgtggaggacgccgagctgagacagaccctgcaggaggacctgctgagaagattccccgacctgaacagactggccaagaagttccagagacaggccgccaacctgcaggactgctacagactgtaccagggcatcaaccagctgcccaacgtgatccaggccctggagaagcacgagggcaagcaccagaagctgctgctggccgtgttcgtgacccccctgaccgacctgagaagcgacttcagcaagttccaggagatgatcgagaccaccctggacatggaccaggtggagaaccacgagttcctggtgaagcccagcttcgaccccaacctgagcgagctgagaaacaacgagtag

SEQ ID NO: 11650 - DNA, 2607 bp, synthetic construct
  misc_feature 1..2607: note = Description of Artificial Sequence: Synthetic coding sequence
  source 1..2607: mol_type = other DNA
atgggccccgccggcgccaagaacctgcagagcgtggtgctgagcaagatgaacttcgagagcttcgtgaaggacctgctgctggtgagacagtacagagtggaggtgtacaagaacagagccggcaacaaggccagcaaggagaacgactggtacctggcctacaaggccagccccggcaacctgagccagttcgaggacatcctgttcggcaacaacgacatgagcgccagcatcggcgtggtgggcgtgaagatgagcgccgtggacggccagagacaggtgggcgtgggctacgtggacagcatccagagaaagctgggcctgtgcgagttccccgacaacgaccagttcagcaacctggaggccctgctgatccagatcggccccaaggagtgcgtgctgcccggcggcgagaccgccggcgacatgggcaagctgagacagatcatccagagaggcggcatcctgatcaccgagagaaagaaggccgacttcagcaccaaggacatctaccaggacctgaacagactgctgaagggcaagaagggcgagcagatgaacagcgccgtgctgcccgagatggagaaccaggtggccgtgagcagcctgagcgccgtgatcaagttcctggagctgctgagcgacgacagcaacttcggccagttcgagctgaccaccttcgacttcagccagtacatgaagctggacatcgccgccgtgagagccctgaacctgttccagggcagcgtggaggacaccaccggcagccagagcctggccgccctgctgaacaagtgcaagaccccccagggccagagactggtgaaccagtggatcaagcagcccctgatggacaagaacagaatcgaggagagactgaacctggtggaggccttcgtggaggacgccgagctgagacagaccctgcaggaggacctgctgagaagattccccgacctgaacagactggccaagaagttccagagacaggccgccaacctgcaggactgctacagactgtaccagggcatcaaccagctgcccaacgtgatccaggccctggagaagcacgagggcaagcaccagaagctgctgctggccgtgttcgtgacccccctgaccgacctgagaagcgacttcagcaagttccaggagatgatcgagaccaccctggacatggaccaggtggagaaccacgagttcctggtgaagcccagcttcgaccccaacctgagcgagctgagagagatcatgaacgacctggagaagaagatgcagagcaccctgatcagcgccgccagagacctgggcctggaccccggcaagcagatcaagctggacagcagcgcccagttcggctactacttcagagtgacctgcaaggaggagaaggtgctgagaaacaacaagaacttcagcaccgtggacatccagaagaacggcgtgaagttcaccaacagcaagctgaccagcctgaacgaggagtacaccaagaacaagaccgagtacgaggaggcccaggacgccatcgtgaaggagatcgtgaacatcagcagcggctacgtggagcccatgcagaccctgaacgacgtgctggcccagctggacgccgtggtgagcttcgcccacgtgagcaacggcgcccccgtgccctacgtgagacccgccatcctggagaagggccagggcagaatcatcctgaaggccagcagacacgcctgcgtggaggtgcaggacgagatcgccttcatccccaacgacgtgtacttcgagaaggacaagcagatgttccacatcatcaccggccccaacatgggcggcaagagcacctacatcagacagaccggcgtgatcgtgctgatggcccagatcggctgcttcgtgccctgcgagagcgccgaggtgagcatcgtggactgcatcctggccagagtgggcgccggcgacagccagctgaagggcgtgagcaccttcatggccgagatgctggagaccgccagcatcctgagaagcgccaccaaggacagcctgatcatcatcgacgagctgggcagaggcaccagcacctacgacggcttcggcctggcctgggccatcagcgagtacatcgccaccaagatcggcgccttctgcatgttcgccacccacttccacgagctgaccgccctggccaaccagatccccaccgtgaacaacctgcacgtgaccgccctgaccaccgaggagaccctgaccatgctgtaccaggtgaagaagggcgtgtgcgaccagagcttcggcatccacgtggccgagctggccaacttccccaagcacgtgatcgagtgcgccaagcagaaggccctggagctggaggagttccagtacatcggcgagagccagggctacgacatcatggagcccgccgccaagaagtgctacctggagagagagcagggcgagaagatcatccaggagttcctgagcaaggtgaagcagatgcccttcaccgagatgagcgaggagaacatcaccatcaagctgaagcagctgaaggccgaggtgatcgccaagaacaacagcttcgtgaacgagatcatcagcagaatcaaggtgaccacctag

SEQ ID NO: 11651 - DNA, 3414 bp, synthetic construct
  misc_feature 1..3414: note = Description of Artificial Sequence: Synthetic coding sequence
  source 1..3414: mol_type = other DNA
atgagcagaagaaagcccgccagcggcggcctggccgccagcagcagcgcccccgccagacaggccgtgctgagcagattcttccagagcaccggcagcctgaagagcaccagcagcagcaccggcgccgccgaccaggtggaccccggcgccgccgccgccgccgccgccgccgccgccgccgccccccccgccccccccgcccccgccttccccccccagctgcccccccacatcgccaccgagatcgacagaagaaagaagagacccctggagaacgacggccccgtgaagaagaaggtgaagaaggtgcagcagaaggagggcggcagcgacctgggcatgagcggcaacagcgagcccaagaagtgcctgagaaccagaaacgtgagcaagagcctggagaagctgaaggagttctgctgcgacagcgccctgccccagagcagagtgcagaccgagagcctgcaggagagattcgccgtgctgcccaagtgcaccgacttcgacgacatcagcctgctgcacgccaagaacgccgtgagcagcgaggacagcaagagacagatcaaccagaaggacaccaccctgttcgacctgagccagttcggcagcagcaacaccagccacgagaacctgcagaagaccgccagcaagagcgccaacaagagaagcaagagcatctacacccccctggagctgcagtacatcgagatgaagcagcagcacaaggacgccgtgctgtgcgtggagtgcggctacaagtacagattcttcggcgaggacgccgagatcgccgccagagagctgaacatctactgccacctggaccacaacttcatgaccgccagcatccccacccacagactgttcgtgcacgtgagaagactggtggccaagggctacaaggtgggcgtggtgaagcagaccgagaccgccgccctgaaggccatcggcgacaacagaagcagcctgttcagcagaaagctgaccgccctgtacaccaagagcaccctgatcggcgaggacgtgaaccccctgatcaagctggacgacgccgtgaacgtggacgagatcatgaccgacaccagcaccagctacctgctgtgcatcagcgagaacaaggagaacgtgagagacaagaagaagggcaacatcttcatcggcatcgtgggcgtgcagcccgccaccggcgaggtggtgttcgacagcttccaggacagcgccagcagaagcgagctggagaccagaatgagcagcctgcagcccgtggagctgctgctgcccagcgccctgagcgagcagaccgaggccctgatccacagagccaccagcgtgagcgtgcaggacgacagaatcagagtggagagaatggacaacatctacttcgagtacagccacgccttccaggccgtgaccgagttctacgccaaggacaccgtggacatcaagggcagccagatcatcagcggcatcgtgaacctggagaagcccgtgatctgcagcctggccgccatcatcaagtacctgaaggagttcaacctggagaagatgctgagcaagcccgagaacttcaagcagctgagcagcaagatggagttcatgaccatcaacggcaccaccctgagaaacctggagatcctgcagaaccagaccgacatgaagaccaagggcagcctgctgtgggtgctggaccacaccaagaccagcttcggcagaagaaagctgaagaagtgggtgacccagcccctgctgaagctgagagagatcaacgccagactggacgccgtgagcgaggtgctgcacagcgagagcagcgtgttcggccagatcgagaaccacctgagaaagctgcccgacatcgagagaggcctgtgcagcatctaccacaagaagtgcagcacccaggagttcttcctgatcgtgaagaccctgtaccacctgaagagcgagttccaggccatcatccccgccgtgaacagccacatccagagcgacctgctgagaaccgtgatcctggagatccccgagctgctgagccccgtggagcactacctgaagatcctgaacgagcaggccgccaaggtgggcgacaagaccgagctgttcaaggacctgagcgacttccccctgatcaagaagagaaaggacgagatccagggcgtgatcgacgagatcagaatgcacctgcaggagatcagaaagatcctgaagaaccccagcgcccagtacgtgaccgtgagcggccaggagttcatgatcgagatcaagaacagcgccgtgagctgcatccccaccgactgggtgaaggtgggcagcaccaaggccgtgagcagattccacagccccttcatcgtggagaactacagacacctgaaccagctgagagagcagctggtgctggactgcagcgccgagtggctggacttcctggagaagttcagcgagcactaccacagcctgtgcaaggccgtgcaccacctggccaccgtggactgcatcttcagcctggccaaggtggccaagcagggcgactactgcagacccaccgtgcaggaggagagaaagatcgtgatcaagaacggcagacaccccgtgatcgacgtgctgctgggcgagcaggaccagtacgtgcccaacaacaccgacctgagcgaggacagcgagagagtgatgatcatcaccggccccaacatgggcggcaagagcagctacatcaagcaggtggccctgatcaccatcatggcccagatcggcagctacgtgcccgccgaggaggccaccatcggcatcgtggacggcatcttcaccagaatgggcgccgccgacaacatctacaagggccagagcaccttcatggaggagctgaccgacaccgccgagatcatcagaaaggccaccagccagagcctggtgatcctggacgagctgggcagaggcaccagcacccacgacggcatcgccatcgcctacgccaccctggagtacttcatcagagacgtgaagagcctgaccctgttcgtgacccactacccccccgtgtgcgagctggagaagaactacagccaccaggtgggcaactaccacatgggcttcctggtgagcgaggacgagagcaagctggaccccggcgccgccgagcaggtgcccgacttcgtgaccttcctgtaccagatcaccagaggcatcgccgccagaagctacggcctgaacgtggccaagctggccgacgtgcccggcgagatcctgaagaaggccgcccacaagagcaaggagctggagggcctgatcaacaccaagagaaagagactgaagtacttcgccaagctgtggaccatgcacaacgcccaggacctgcagaagtggaccgaggagttcaacatggaggagacccagaccagcctgctgcactag

SEQ ID NO: 11652 - DNA, 3387 bp, synthetic construct
  misc_feature 1..3387: note = Description of Artificial Sequence: Synthetic coding sequence
  source 1..3387: mol_type = other DNA
atgagcagaagaaagcccgccagcggcggcctggccgccagcagcagcgcccccgccagacaggccgtgctgagcagattcttccagagcaccggcagcctgaagagcaccagcagcagcaccggcgccgccgaccaggtggaccccggcgccgccgccgccgccgccccccccgcccccgccttccccccccagctgcccccccacatcgccaccgagatcgacagaagaaagaagagacccctggagaacgacggccccgtgaagaagaaggtgaagaaggtgcagcagaaggagggcggcagcgacctgggcatgagcggcaacagcgagcccaagaagtgcctgagaaccagaaacgtgagcaagagcctggagaagctgaaggagttctgctgcgacagcgccctgccccagagcagagtgcagaccgagagcctgcaggagagattcgccgtgctgcccaagtgcaccgacttcgacgacatcagcctgctgcacgccaagaacgccgtgagcagcgaggacagcaagagacagatcaaccagaaggacaccaccctgttcgacctgagccagttcggcagcagcaacaccagccacgagaacctgcagaagaccgccagcaagagcgccaacaagagaagcaagagcatctacacccccctggagctgcagtacatcgagatgaagcagcagcacaaggacgccgtgctgtgcgtggagtgcggctacaagtacagattcttcggcgaggacgccgagatcgccgccagagagctgaacatctactgccacctggaccacaacttcatgaccgccagcatccccacccacagactgttcgtgcacgtgagaagactggtggccaagggctacaaggtgggcgtggtgaagcagaccgagaccgccgccctgaaggccatcggcgacaacagaagcagcctgttcagcagaaagctgaccgccctgtacaccaagagcaccctgatcggcgaggacgtgaaccccctgatcaagctggacgacgccgtgaacgtggacgagatcatgaccgacaccagcaccagctacctgctgtgcatcagcgagaacaaggagaacgtgagagacaagaagaagggcaacatcttcatcggcatcgtgggcgtgcagcccgccaccggcgaggtggtgttcgacagcttccaggacagcgccagcagaagcgagctggagaccagaatgagcagcctgcagcccgtggagctgctgctgcccagcgccctgagcgagcagaccgaggccctgatccacagagccaccagcgtgagcgtgcaggacgacagaatcagagtggagagaatggacaacatctacttcgagtacagccacgccttccaggccgtgaccgagttctacgccaaggacaccgtggacatcaagggcagccagatcatcagcggcatcgtgaacctggagaagcccgtgatctgcagcctggccgccatcatcaagtacctgaaggagttcaacctggagaagatgctgagcaagcccgagaacttcaagcagctgagcagcaagatggagttcatgaccatcaacggcaccaccctgagaaacctggagatcctgcagaaccagaccgacatgaagaccaagggcagcctgctgtgggtgctggaccacaccaagaccagcttcggcagaagaaagctgaagaagtgggtgacccagcccctgctgaagctgagagagatcaacgccagactggacgccgtgagcgaggtgctgcacagcgagagcagcgtgttcggccagatcgagaaccacctgagaaagctgcccgacatcgagagaggcctgtgcagcatctaccacaagaagtgcagcacccaggagttcttcctgatcgtgaagaccctgtaccacctgaagagcgagttccaggccatcatccccgccgtgaacagccacatccagagcgacctgctgagaaccgtgatcctggagatccccgagctgctgagccccgtggagcactacctgaagatcctgaacgagcaggccgccaaggtgggcgacaagaccgagctgttcaaggacctgagcgacttccccctgatcaagaagagaaaggacgagatccagggcgtgatcgacgagatcagaatgcacctgcaggagatcagaaagatcctgaagaaccccagcgcccagtacgtgaccgtgagcggccaggagttcatgatcgagatcaagaacagcgccgtgagctgcatccccaccgactgggtgaaggtgggcagcaccaaggccgtgagcagattccacagccccttcatcgtggagaactacagacacctgaaccagctgagagagcagctggtgctggactgcagcgccgagtggctggacttcctggagaagttcagcgagcactaccacagcctgtgcaaggccgtgcaccacctggccaccgtggactgcatcttcagcctggccaaggtggccaagcagggcgactactgcagacccaccgtgcaggaggagagaaagatcgtgatcaagaacggcagacaccccgtgatcgacgtgctgctgggcgagcaggaccagtacgtgcccaacaacaccgacctgagcgaggacagcgagagagtgatgatcatcaccggccccaacatgggcggcaagagcagctacatcaagcaggtggccctgatcaccatcatggcccagatcggcagctacgtgcccgccgaggaggccaccatcggcatcgtggacggcatcttcaccagaatgggcgccgccgacaacatctacaagggccagagcaccttcatggaggagctgaccgacaccgccgagatcatcagaaaggccaccagccagagcctggtgatcctggacgagctgggcagaggcaccagcacccacgacggcatcgccatcgcctacgccaccctggagtacttcatcagagacgtgaagagcctgaccctgttcgtgacccactacccccccgtgtgcgagctggagaagaactacagccaccaggtgggcaactaccacatgggcttcctggtgagcgaggacgagagcaagctggaccccggcgccgccgagcaggtgcccgacttcgtgaccttcctgtaccagatcaccagaggcatcgccgccagaagctacggcctgaacgtggccaagctggccgacgtgcccggcgagatcctgaagaaggccgcccacaagagcaaggagctggagggcctgatcaacaccaagagaaagagactgaagtacttcgccaagctgtggaccatgcacaacgcccaggacctgcagaagtggaccgaggagttcaacatggaggagacccagaccagcctgctgcactag

SEQ ID NO: 11653 - DNA, 2811 bp, synthetic construct
  misc_feature 1..2811: note = Description of Artificial Sequence: Synthetic coding sequence
  source 1..2811: mol_type = other DNA
atgctgagacccgagatcagcagcaccagccccagcgcccccgccgtgagccccagcagcggcgagaccagaagcccccagggccccagatacaacttcggcctgcaggagaccccccagagcagacccagcgtgcaggtggtgagcgccagcacctgccccggcaccagcggcgccgccggcgacagaagcagcagcagcagcagcctgccctgccccgcccccaacagcagacccgcccagggcagctacttcggcaacaagagagcctacgccgagaacaccgtggccagcaacttcaccttcggcgccagcagcagcagcgccagagacaccaactacccccagaccctgaagacccccctgagcaccggcaacccccagagaagcggctacaagagctggaccccccaggtgggctacagcgccagcagcagcagcgccatcagcgcccacagccccagcgtgatcgtggccgtggtggagggcagaggcctggccagaggcgagatcggcatggccagcatcgacctgaagaacccccagatcatcctgagccagttcgccgacaacaccacctacgccaaggtgatcaccaagctgaagatcctgagccccctggagatcatcatgagcaacaccgcctgcgccgtgggcaacagcaccaagctgttcaccctgatcaccgagaacttcaagaacgtgaacttcaccaccatccagagaaagtacttcaacgagaccaagggcctggagtacatcgagcagctgtgcatcgccgagttcagcaccgtgctgatggaggtgcagagcaagtactactgcctggccgccgtggccgccctgctgaagtacgtggagttcatccagaacagcgtgtacgcccccaagagcctgaagatctgcttccagggcagcgagcagaccgccatgatcgacagcagcagcgcccagaacctggagctgctgatcaacaaccaggactacagaaacaaccacaccctgttcggcgtgctgaactacaccaagacccccggcggcagcagaagactgagaagcaacatcctggagcccctggtggacatcgagaccatcaacatgagactggactgcgtgcaggagctgctgcaggacgaggagctgttcttcggcctgcagagcgtgatcagcagattcctggacaccgagcagctgctgagcgtgctggtgcagatccccaagcaggacaccgtgaacgccgccgagagcaagatcaccaacctgatctacctgaagcacaccctggagctggtggaccccctgaagatcgccatgaagaactgcaacacccccctgctgagagcctactacggcagcctggaggacaagagattcggcatcatcctggagaagatcaagaccgtgatcaacgacgacgccagatacatgaagggctgcctgaacatgagaacccagaagtgctacgccgtgagaagcaacatcaacgagttcctggacatcgccagaagaacctacaccgagatcgtggacgacatcgccggcatgatcagccagctgggcgagaagtacagcctgcccctgagaaccagcttcagcagcgccagaggcttcttcatccagatgaccaccgactgcatcgccctgcccagcgaccagctgcccagcgagttcatcaagatcagcaaggtgaagaacagctacagcttcaccagcgccgacctgatcaagatgaacgagagatgccaggagagcctgagagagatctaccacatgacctacatgatcgtgtgcaagctgctgagcgagatctacgagcacatccactgcctgtacaagctgagcgacaccgtgagcatgctggacatgctgctgagcttcgcccacgcctgcaccctgagcgactacgtgagacccgagttcaccgacaccctggccatcaagcagggctggcaccccatcctggagaagatcagcgccgagaagcccatcgccaacaacacctacgtgaccgagggcagcaacttcctgatcatcaccggccccaacatgagcggcaagagcacctacctgaagcagatcgccctgtgccagatcatggcccagatcggcagctacgtgcccgccgagtacagcagcttcagaatcgccaagcagatcttcaccagaatcagcaccgacgacgacatcgagaccaacagcagcaccttcatgaaggagatgaaggagatcgcctacatcctgcacaacgccaacgacaagagcctgatcctgatcgacgagctgggcagaggcaccaacaccgaggagggcatcggcatctgctacgccgtgtgcgagtacctgctgagcctgaaggccttcaccctgttcgccacccacttcctggagctgtgccacatcgacgccctgtaccccaacgtggagaacatgcacttcgaggtgcagcacgtgaagaacaccagcagaaacaaggaggccatcctgtacacctacaagctgagcaagggcctgaccgaggagaagaactacggcctgaaggccgccgaggtgagcagcctgccccccagcatcgtgctggacgccaaggagatcaccacccagatcaccagacagatcctgcagaaccagagaagcacccccgagatggagagacagagagccgtgtaccacctggccaccagactggtgcagaccgccagaaacagccagctggaccccgacagcctgagaatctacctgagcaacctgaagaagaagtacaaggaggacttccccagaaccgagcaggtgcccgagaagaccgaggagtag

SEQ ID NO: 11654 - DNA, 813 bp, synthetic construct
  misc_feature 1..813: note = Description of Artificial Sequence: Synthetic coding sequence
  source 1..813: mol_type = other DNA
atggccagcctgggcgccaaccccagaagaaccccccagggccccagacccggcgccgccagcagcggcttccccagccccgcccccgtgcccggccccagagaggccgaggaggaggaggtggaggaggaggaggagctggccgagatccacctgtgcgtgctgtggaacagcggctacctgggcatcgcctactacgacaccagcgacagcaccatccacttcatgcccgacgcccccgaccacgagagcctgaagctgctgcagagagtgctggacgagatcaacccccagagcgtggtgaccagcgccaagcaggacgagaacatgaccagattcctgggcaagctggccagccaggagcacagagagcccaagagacccgagatcatcttcctgcccagcgtggacttcggcctggagatcagcaagcagagactgctgagcggcaactacagcttcatccccgacgccatgaccgccaccgagaagatcctgttcctgagcagcatcatccccttcgactgcctgctgaccgtgagagccctgggcggcctgctgaagttcctgggcagaagaagaatcggcgtggagctggaggactacaacgtgagcgtgcccatcctgggcttcaagaagttcatgctgacccacctggtgaacatcgaccaggacacctacagcgtgctgcagatcttcaagagcgagagccaccccagcgtgtacaaggtggccagcggcctgaaggagggcctgagcctgttcggcatcctgaacagatgccactgcaagtggggcgagaagctgctgtag

SEQ ID NO: 11655 - DNA, 813 bp, synthetic construct; identical to SEQ ID NO: 11654
  misc_feature 1..813: note = Description of Artificial Sequence: Synthetic coding sequence
  source 1..813: mol_type = other DNA

SEQ ID NO: 11656 - DNA, 585 bp, synthetic construct
  misc_feature 1..585: note = Description of Artificial Sequence: Synthetic coding sequence
  source 1..585: mol_type = other DNA
atggccagcctgggcgccaaccccagaagaaccccccagggccccagacccggcgccgccagcagcggcttccccagccccgcccccgtgcccggccccagagaggccgaggaggaggaggtggaggaggaggaggagctggccgagatccacctgtgcgtgctgtggaacagcggctacctgggcatcgcctactacgacaccagcgacagcaccatccacttcatgcccgacgcccccgaccacgagagcctgaagctgctgcagagagtgctggacgagatcaacccccagagcgtggtgaccagcgccaagcaggacgagaacatgaccagattcctgggcaagctggccagccaggagcacagagagcccaagagacccgagatcatcttcctgcccagcgtggacttcggcctggagatcagcaagcagagactgctgagcggcaactacagcttcatccccgacgccatgaccgccaccgagaagatcctgttcctgagcagcatcatccccttcgactgcctgctgaccgtgagagccctgggcggcctgctgaagttcctgggcagaagaagatag

SEQ ID NO: 11657 - DNA, 813 bp, synthetic construct; identical to SEQ ID NO: 11654
  misc_feature 1..813: note = Description of Artificial Sequence: Synthetic coding sequence
  source 1..813: mol_type = other DNA

SEQ ID NO: 11658 - DNA, 864 bp, synthetic construct
  misc_feature 1..864: note = Description of Artificial Sequence: Synthetic coding sequence
  source 1..864: mol_type = other DNA
atggccagcctgggcgccaaccccagaagaaccccccagggccccagacccggcgccgccagcagcggcttccccagccccgcccccgtgcccggccccagagaggccgaggaggaggaggtggaggaggaggaggagctggccgagatccacctgtgcgtgctgtggaacagcggctacctgggcatcgcctactacgacaccagcgacagcaccatccacttcatgcccgacgcccccgaccacgagagcctgaagctgctgcagagagtgctggacgagatcaacccccagagcgtggtgaccagcgccaagcaggacgagaacatgaccagattcctgggcaagctggccagccaggagcacagagagcccaagagacccgagatcatcttcctgcccagcgtggacttcggcctggagatcagcaagcagagactgctgagcggcaactacagcttcatccccgacgccatgaccgccaccgagaagatcctgttcctgagcagcatcatccccttcgactgcctgctgaccccccccggcgacctgagattcacccccatccccctgctgatccccagccaggtgagagccctgggcggcctgctgaagttcctgggcagaagaagaatcggcgtggagctggaggactacaacgtgagcgtgcccatcctgggcttcaagaagttcatgctgacccacctggtgaacatcgaccaggacacctacagcgtgctgcagatcttcaagagcgagagccaccccagcgtgtacaaggtggccagcggcctgaaggagggcctgagcctgttcggcatcctgaacagatgccactgcaagtggggcgagaagctgctgtag

SEQ ID NO: 11659 - DNA, 324 bp, synthetic construct
  misc_feature 1..324: note = Description of Artificial Sequence: Synthetic coding sequence
  source 1..324: mol_type = other DNA
aagatcctgttcctgagcagcatcatccccttcgactgcctgctgaccgtgagagccctgggcggcctgctgaagttcctgggcagaagaagaatcggcgtggagctggaggactacaacgtgagcgtgcccatcctgggcttcaagaagttcatgctgacccacctggtgaacatcgaccaggacacctacagcgtgctgcagatcttcaagagcgagagccaccccagcgtgtacaaggtggccagcggcctgaaggagggcctgagcctgttcggcatcctgaacagatgccactgcaagtggggcgagaagctgctgtag

SEQ ID NO: 11660 - DNA, 765 bp, synthetic construct
  misc_feature 1..765: note = Description of Artificial Sequence: Synthetic coding sequence
  source 1..765: mol_type = other DNA
atggccagcctgggcgccaaccccagaagaaccccccagggccccagacccggcgccgccagcagcggcttccccagccccgcccccgtgcccggccccagagaggccgaggaggaggaggtggaggaggaggaggagctggccgagatccacctgtgcgtgctgtggaacagcggctacctgggcatcgcctactacgacaccagcgacagcaccatccacttcatgcccgacgcccccgaccacgagagcctgaagctgctgcagagagtgctggacgagatcaacccccagagcgtggtgaccagcgccaagcaggacgagaacatgaccagattcctgggcaagctggccagccaggagcacagagagcccaagagacccgagatcatcttcctgcccagcgtggacttcggcctggagatcagcaagcagagactgctgagcggcaactacagcttcatccccgacgccatgaccgccaccgagaagatcctgttcctgagcagcatcatccccttcgactgcctgctgaccgtgagagccctgggcggcctgctgaagttcctgggcagaagaagaatcggcgtggagctggaggactacaacgtgagcgtgcccatcctgggcttcaagaagttcatgctgacccacctggtgaacatcgaccaggacacctacagactggagtgcaacggcgccatcagcgcccagtgcaacctgtgcctgctgggcagcagcgacagccccgccagcgccagctag

SEQ ID NO: 11661 - DNA, 1542 bp, synthetic construct
  misc_feature 1..1542: note = Description of Artificial Sequence: Synthetic coding sequence
  source 1..1542: mol_type = other DNA
atggccatggagatcgacagcagacccggcggcctgcccggcagcagctgcaacctgggcgccgccagagagcacatgcaggccgtgaccagaaactacatcacccaccccagagtgacctacagaaccgtgtgcagcgtgaacggccccctggtggtgctggacagagtgaagttcgcccagtacgccgagatcgtgcacttcaccctgcccgacggcacccagagaagcggccaggtgctggaggtggccggcaccaaggccatcgtgcaggtgttcgagggcaccagcggcatcgacgccagaaagaccacctgcgagttcaccggcgacatcctgagaacccccgtgagcgaggacatgctgggcagagtgttcaacggcagcggcaagcccatcgacaagggccccgtggtgatggccgaggacttcctggacatcaacggccagcccatcaacccccacagcagaatctaccccgaggagatgatccagaccggcatcagccccatcgacgtgatgaacagcatcgccagaggccagaagatccccatcttcagcgccgccggcctgccccacaacgagatcgccgcccagatctgcagacaggccggcctggtgaagaagagcaaggccgtgctggactaccacgacgacaacttcgccatcgtgttcgccgccatgggcgtgaacatggagaccgccagattcttcaagagcgacttcgagcagaacggcaccatgggcaacgtgtgcctgttcctgaacctggccaacgaccccaccatcgagagaatcatcacccccagactggccctgaccaccgccgagttcctggcctaccagtgcgagaagcacgtgctggtgatcctgaccgacatgagcagctacgccgaggccctgagagaggtgagcgccgccagagaggaggtgcccggcagaagaggcttccccggctacatgtacaccgacctggccaccatctacgagagagccggcagagtggagggcagaggcggcagcatcacccagatccccatcctgaccatgcccaacgacgacatcacccaccccatccccgacctgaccggcttcatcaccgagggccagatctacgtggacagacagctgcacaacagacagatctacccccccatcaacgtgctgcccagcctgagcagactgatgaagagcgccatcggcgagggcatgaccagaaaggaccacggcgacgtgagcaaccagctgtacgcctgctacgccatcggcaaggacgtgcaggccatgaaggccgtggtgggcgaggaggccctgaccagcgaggacctgctgtacctggagttcctgcagaagttcgagaagaacttcatcaaccagggcccctacgagaacagaagcgtgttcgagagcctggacctgggctggaagctgctgagaatcttccccaaggagatgctgaagagaatcccccaggccgtgatcgacgagttctacagcagagagggcgccctgcaggacctggcccccgacaccgccctgtag

SEQ ID NO: 11662 - DNA, 759 bp, synthetic construct
  misc_feature 1..759: note = Description of Artificial Sequence: Synthetic coding sequence
  source 1..759: mol_type = other DNA
atgagcagacagagcaccctgtacagcttcttccccaagagccccgccctgagcgacgccaacaaggccagcgccagagccagcagagagggcggcagagccgccgccgcccccggcgccagccccagccccggcggcgacgccgcctggagcgaggccggccccggccccagacccctggccagaagcgccagcccccccaaggccaagaacctgaacggcggcctgagaagaagcgtggcccccgccgcccccaccagctgcgacttcagccccggcgacctggtgtgggccaagatggagggctacccctggtggccctgcctggtgtacaaccaccccttcgacggcaccttcatcagagagaagggcaagagcgtgagagtgcacgtgcagttcttcgacgacagccccaccagaggctgggtgagcaagagactgctgaagccctacaccggcagcaagagcaaggaggcccagaagggcggccacttctacagcgccaagcccgagatcctgagagccatgcagagagccgacgaggccctgaacaaggacaagatcaagagactggagctggccgtgtgcgacgagcccagcgagcccgaggaggaggaggagatggaggtgggcaccacctacgtgaccgacaagagcgaggaggacaacgagatcgagagcgaggaggaggtgcagcccaagacccagggcagcagaagaagcagcagacagatcaagaagagaagaaagaagagatag

SEQ ID NO: 11663 - DNA, 3177 bp, synthetic construct
  misc_feature 1..3177: note = Description of Artificial Sequence: Synthetic coding sequence
  source 1..3177: mol_type = other DNA
atggtgaccggcaacggcagcctgaagagaaagagcagcagaaaggagacccccagcgccaccaagcaggccaccagcatcagcagcgagaccaagaacaccctgagagccttcagcgccccccagaacagcgagagccaggcccacgtgagcggcggcggcgacgacagcagcagacccaccgtgtggtaccacgagaccctggagtggctgaaggaggagaagagaagagacgagcacagaagaagacccgaccaccccgacttcgacgccagcaccctgtacgtgcccgaggacttcctgaacagctgcacccccggcatgagaaagtggtggcagatcaagagccagaacttcgacctggtgatctgctacaaggtgggcaagttctacgagctgtaccacatggacgccctgatcggcgtgagcgagctgggcctggtgttcatgaagggcaactgggcccacagcggcttccccgagatcgccttcggcagatacagcgacagcctggtgcagaagggctacaaggtggccagagtggagcagaccgagacccccgagatgatggaggccagatgcagaaagatggcccacatcagcaagtacgacagagtggtgagaagagagatctgcagaatcatcaccaagggcacccagacctacagcgtgctggagggcgaccccagcgagaactacagcaagtacctgctgagcctgaaggagaaggaggaggacagcagcggccacaccagagcctacggcgtgtgcttcgtggacaccagcctgggcaagttcttcatcggccagttcagcgacgacagacactgcagcagattcagaaccctggtggcccactacccccccgtgcaggtgctgttcgagaagggcaacctgagcaaggagaccaagaccatcctgaagagcagcctgagctgcagcctgcaggagggcctgatccccggcagccagttctgggacgccagcaagaccctgagaaccctgctggaggaggagtacttcagagagaagctgagcgacggcatcggcgtgatgctgccccaggtgctgaagggcatgaccagcgagagcgacagcatcggcctgacccccggcgagaagagcgagctggccctgagcgccctgggcggctgcgtgttctacctgaagaagtgcctgatcgaccaggagctgctgagcatggccaacttcgaggagtacatccccctggacagcgacaccgtgagcaccaccagaagcggcgccatcttcaccaaggcctaccagagaatggtgctggacgccgtgaccctgaacaacctggagatcttcctgaacggcaccaacggcagcaccgagggcaccctgctggagagagtggacacctgccacacccccttcggcaagagactgctgaagcagtggctgtgcgcccccctgtgcaaccactacgccatcaacgacagactggacgccatcgaggacctgatggtggtgcccgacaagatcagcgaggtggtggagctgctgaagaagctgcccgacctggagagactgctgagcaagatccacaacgtgggcagccccctgaagagccagaaccaccccgacagcagagccatcatgtacgaggagaccacctacagcaagaagaagatcatcgacttcctgagcgccctggagggcttcaaggtgatgtgcaagatcatcggcatcatggaggaggtggccgacggcttcaagagcaagatcctgaagcaggtgatcagcctgcagaccaagaaccccgagggcagattccccgacctgaccgtggagctgaacagatgggacaccgccttcgaccacgagaaggccagaaagaccggcctgatcacccccaaggccggcttcgacagcgactacgaccaggccctggccgacatcagagagaacgagcagagcctgctggagtacctggagaagcagagaaacagaatcggctgcagaaccatcgtgtactggggcatcggcagaaacagataccagctggagatccccgagaacttcaccaccagaaacctgcccgaggagtacgagctgaagagcaccaagaagggctgcaagagatactggaccaagaccatcgagaagaagctggccaacctgatcaacgccgaggagagaagagacgtgagcctgaaggactgcatgagaagactgttctacaacttcgacaagaactacaaggactggcagagcgccgtggagtgcatcgccgtgctggacgtgctgctgtgcctggccaactacagcagaggcggcgacggccccatgtgcagacccgtgatcctgctgcccgaggacaccccccccttcctggagctgaagggcagcagacacccctgcatcaccaagaccttcttcggcgacgacttcatccccaacgacatcctgatcggctgcgaggaggaggagcaggagaacggcaaggcctactgcgtgctggtgaccggccccaacatgggcggcaagagcaccctgatgagacaggccggcctgctggccgtgatggcccagatgggctgctacgtgcccgccgaggtgtgcagactgacccccatcgacagagtgttcaccagactgggcgccagcgacagaatcatgagcggcgagagcaccttcttcgtggagctgagcgagaccgccagcatcctgatgcacgccaccgcccacagcctggtgctggtggacgagctgggcagaggcaccgccaccttcgacggcaccgccatcgccaacgccgtggtgaaggagctggccgagaccatcaagtgcagaaccctgttcagcacccactaccacagcctggtggaggactacagccagaacgtggccgtgagactgggccacatggcctgcatggtggagaacgagtgcgaggaccccagccaggagaccatcaccttcctgtacaagttcatcaagggcgcctgccccaagagctacggcttcaacgccgccagactggccaacctgcccgaggaggtgatccagaagggccacagaaaggccagagagttcgagaagatgaaccagagcctgagactgttcagagaggtgtgcctggccagcgagagaagcaccgtggacgccgaggccgtgcacaagctgctgaccctgatcaaggagctgtag

SEQ ID NO: 11664 - DNA, 3693 bp, synthetic construct
  misc_feature 1..3693: note = Description of Artificial Sequence: Synthetic coding sequence
  source 1..3693: mol_type = other DNA
atgagcagacagagcaccctgtacagcttcttccccaagagccccgccctgagcgacgccaacaaggccagcgccagagccagcagagagggcggcagagccgccgccgcccccggcgccagccccagccccggcggcgacgccgcctggagcgaggccggccccggccccagacccctggccagaagcgccagcccccccaaggccaagaacctgaacggcggcctgagaagaagcgtgggcaccacctacgtgaccgacaagagcgaggaggacaacgagatcgagagcgaggaggaggtgcagcccaagacccagggcagcagaagaagcagcagacagatcaagaagagaagagtgatcagcgacagcgagagcgacatcggcggcagcgacgtggagttcaagcccgacaccaaggaggagggcagcagcgacgagatcagcagcggcgtgggcgacagcgagagcgagggcctgaacagccccgtgaaggtggccagaaagagaaagagaatggtgaccggcaacggcagcctgaagagaaagagcagcagaaaggagacccccagcgccaccaagcaggccaccagcatcagcagcgagaccaagaacaccctgagagccttcagcgccccccagaacagcgagagccaggcccacgtgagcggcggcggcgacgacagcagcagacccaccgtgtggtaccacgagaccctggagtggctgaaggaggagaagagaagagacgagcacagaagaagacccgaccaccccgacttcgacgccagcaccctgtacgtgcccgaggacttcctgaacagctgcacccccggcatgagaaagtggtggcagatcaagagccagaacttcgacctggtgatctgctacaaggtgggcaagttctacgagctgtaccacatggacgccctgatcggcgtgagcgagctgggcctggtgttcatgaagggcaactgggcccacagcggcttccccgagatcgccttcggcagatacagcgacagcctggtgcagaagggctacaaggtggccagagtggagcagaccgagacccccgagatgatggaggccagatgcagaaagatggcccacatcagcaagtacgacagagtggtgagaagagagatctgcagaatcatcaccaagggcacccagacctacagcgtgctggagggcgaccccagcgagaactacagcaagtacctgctgagcctgaaggagaaggaggaggacagcagcggccacaccagagcctacggcgtgtgcttcgtggacaccagcctgggcaagttcttcatcggccagttcagcgacgacagacactgcagcagattcagaaccctggtggcccactacccccccgtgcaggtgctgttcgagaagggcaacctgagcaaggagaccaagaccatcctgaagagcagcctgagctgcagcctgcaggagggcctgatccccggcagccagttctgggacgccagcaagaccctgagaaccctgctggaggaggagtacttcagagagaagctgagcgacggcatcggcgtgatgctgccccaggtgctgaagggcatgaccagcgagagcgacagcatcggcctgacccccggcgagaagagcgagctggccctgagcgccctgggcggctgcgtgttctacctgaagaagtgcctgatcgaccaggagctgctgagcatggccaacttcgaggagtacatccccctggacagcgacaccgtgagcaccaccagaagcggcgccatcttcaccaaggcctaccagagaatggtgctggacgccgtgaccctgaacaacctggagatcttcctgaacggcaccaacggcagcaccgagggcaccctgctggagagagtggacacctgccacacccccttcggcaagagactgctgaagcagtggctgtgcgcccccctgtgcaaccactacgccatcaacgacagactggacgccatcgaggacctgatggtggtgcccgacaagatcagcgaggtggtggagctgctgaagaagctgcccgacctggagagactgctgagcaagatccacaacgtgggcagccccctgaagagccagaaccaccccgacagcagagccatcatgtacgaggagaccacctacagcaagaagaagatcatcgacttcctgagcgccctggagggcttcaaggtgatgtgcaagatcatcggcatcatggaggaggtggccgacggcttcaagagcaagatcctgaagcaggtgatcagcctgcagaccaagaaccccgagggcagattccccgacctgaccgtggagctgaacagatgggacaccgccttcgaccacgagaaggccagaaagaccggcctgatcacccccaaggccggcttcgacagcgactacgaccaggccctggccgacatcagagagaacgagcagagcctgctggagtacctggagaagcagagaaacagaatcggctgcagaaccatcgtgtactggggcatcggcagaaacagataccagctggagatccccgagaacttcaccaccagaaacctgcccgaggagtacgagctgaagagcaccaagaagggctgcaagagatactggaccaagaccatcgagaagaagctggccaacctgatcaacgccgaggagagaagagacgtgagcctgaaggactgcatgagaagactgttctacaacttcgacaagaactacaaggactggcagagcgccgtggagtgcatcgccgtgctggacgtgctgctgtgcctggccaactacagcagaggcggcgacggccccatgtgcagacccgtgatcctgctgcccgaggacaccccccccttcctggagctgaagggcagcagacacccctgcatcaccaagaccttcttcggcgacgacttcatccccaacgacatcctgatcggctgcgaggaggaggagcaggagaacggcaaggcctactgcgtgctggtgaccggccccaacatgggcggcaagagcaccctgatgagacaggccggcctgctggccgtgatggcccagatgggctgctacgtgcccgccgaggtgtgcagactgacccccatcgacagagtgttcaccagactgggcgccagcgacagaatcatgagcggcgagagcaccttcttcgtggagctgagcgagaccgccagcatcctgatgcacgccaccgcccacagcctggtgctggtggacgagctgggcagaggcaccgccaccttcgacggcaccgccatcgccaacgccgtggtgaaggagctggccgagaccatcaagtgcagaaccctgttcagcacccactaccacagcctggtggaggactacagccagaacgtggccgtgagactgggccacatggcctgcatggtggagaacgagtgcgaggaccccagccaggagaccatcaccttcctgtacaagttcatcaagggcgcctgccccaagagctacggcttcaacgccgccagactggccaacctgcccgaggaggtgatccagaagggccacagaaaggccagagagttcgagaagatgaaccagagcctgagactgttcagagaggtgtgcctggccagcgagagaagcaccgtggacgccgaggccgtgcacaagctgctgaccctgatcaaggagctgtag

SEQ ID NO: 11665 - DNA, 975 bp, synthetic construct
  misc_feature 1..975: note = Description of Artificial Sequence: Synthetic coding sequence
  source 1..975: mol_type = other DNA
atgagaagactgttctacaacttcgacaagaactacaaggactggcagagcgccgtggagtgcatcgccgtgctggacgtgctgctgtgcctggccaactacagcagaggcggcgacggccccatgtgcagacccgtgatcctgctgcccgaggacaccccccccttcctggagctgaagggcagcagacacccctgcatcaccaagaccttcttcggcgacgacttcatccccaacgacatcctgatcggctgcgaggaggaggagcaggagaacggcaagatcgtgtgcctgctgctggaccagatctggggcgccagcctgagaatgagacaggccggcctgctggccgtgatggcccagatgggctgctacgtgcccgccgaggtgtgcagactgacccccatcgacagagtgttcaccagactgggcgccagcgacagaatcatgagcggcgagagcaccttcttcgtggagctgagcgagaccgccagcatcctgatgcacgccaccgcccacagcctggtgctggtggacgagctgggcagaggcaccgccaccttcgacggcaccgccatcgccaacgccgtggtgaaggagctggccgagaccatcaagtgcagaaccctgttcagcacccactaccacatcagcagaagactgttcagcaagtgctgctgcctgggccacatggcctgcatggtggagaacgagtgcgaggaccccagccaggagaccatcaccttcctgtacaagttcatcaagggcgcctgccccaagagctacggcttcaacgccgccagactggccaacctgcccgaggaggtgatccagaagggccacagaaaggccagagagttcgagaagatgaaccagagcctgagactgttcagagaggtgtgcctggccagcgagagaagcaccgtggacgccgaggccgtgcacaagctgctgaccctgatcaaggagctgtag

SEQ ID NO: 11666 - DNA, 3201 bp, synthetic construct
  misc_feature 1..3201: note = Description of Artificial Sequence: Synthetic coding sequence
  source 1..3201: mol_type = other DNA
atgagcagacagagcaccctgtacagcttcttccccaagagccccgccctgagcgacgccaacaaggccagcgccagagccagcagagagggcggcagagccgcctgccccagaggcctgagcttccccagaagaggctgcggcctggagagaggctgggcctggagacccctggccagaagcgccagcccccccaaggccaagaacctgaacggcggcctgagaagaagcgtggcccccgccgcccccaccagctgcgacttcagccccggcgacctggtgtgggccaagatggagggctacccctggtggccctgcctggtgtacaaccaccccttcgacggcaccttcatcagagagaagggcaagagcgtgagagtgcacgtgcagttcttcgacgacagccccaccagaggctgggtgagcaagagactgctgaagccctacaccggcagcaagagcaaggaggcccagaagggcggccacttctacagcgccaagcccgagatcctgagagccatgcagagagccgacgaggccctgaacaaggacaagatcaagagactggagctggccgtgtgcgacgagcccagcgagcccgaggaggaggaggagatggaggtgggcaccacctacgtgaccgacaagagcgaggaggacaacgagatcgagagcgaggaggaggtgcagcccaagacccagggcagcagaagaagcagcagacagatcaagaagagaagagtgatcagcgacagcgagagcgacatcggcggcagcgacgtggagttcaagcccgacaccaaggaggagggcagcagcgacgagatcagcagcggcgtgggcgacagcgagagcgagggcctgaacagccccgtgaaggtggccagaaagagaaagagaatggtgaccggcaacggcagcctgaagagaaagagcagcagaaaggagacccccagcgccaccaagcaggccaccagcatcagcagcgagaccaagaacaccctgagagccttcagcgccccccagaacagcgagagccaggcccacgtgagcggcggcggcgacgacagcagcagacccaccgtgtggtaccacgagaccctggagtggctgaaggaggagaagagaagagacgagcacagaagaagacccgaccaccccgacttcgacgccagcaccctgtacgtgcccgaggacttcctgaacagctgcacccccggcatgagaaagtggtggcagatcaagagccagaacttcgacctggtgatctgctacaaggtgggcaagttctacgagctgtaccacatggacgccctgatcggcgtgagcgagctgggcctggtgttcatgaagggcaactgggcccacagcggcttccccgagatcgccttcggcagatacagcgacagcctggtgcagaagggctacaaggtggccagagtggagcagaccgagacccccgagatgatggaggccagatgcagaaagatggcccacatcagcaagtacgacagagtggtgagaagagagatctgcagaatcatcaccaagggcacccagacctacagcgtgctggagggcgaccccagcgagaactacagcaagtacctgctgagcctgaaggagaaggaggaggacagcagcggccacaccagagcctacggcgtgtgcttcgtggacaccagcctgggcaagttcttcatcggccagttcagcgacgacagacactgcagcagattcagaaccctggtggcccactacccccccgtgcaggtgctgttcgagaagggcaacctgagcaaggagaccaagaccatcctgaagagcagcctgagctgcagcctgcaggagggcctgatccccggcagccagttctgggacgccagcaagaccctgagaaccctgctggaggaggagtacttcagagagaagctgagcgacggcatcggcgtgatgctgccccaggtgctgaagggcatgaccagcgagagcgacagcatcggcctgacccccggcgagaagagcgagctggccctgagcgccctgggcggctgcgtgttctacctgaagaagtgcctgatcgaccaggagctgctgagcatggccaacttcgaggagtacatccccctggacagcgacaccgtgagcaccaccagaagcggcgccatcttcaccaaggcctaccagagaatggtgctggacgccgtgaccctgaacaacctggagatcttcctgaacggcaccaacggcagcaccgagggcaccctgctggagagagtggacacctgccacacccccttcggcaagagactgctgaagcagtggctgtgcgcccccctgtgcaaccactacgccatcaacgacagactggacgccatcgaggacctgatggtggtgcccgacaagatcagcgaggtggtggagctgctgaagaagctgcccgacctggagagactgctgagcaagatccacaacgtgggcagccccctgaagagccagaaccaccccgacagcagagccatcatgtacgaggagaccacctacagcaagaagaagatcatcgacttcctgagcgccctggagggcttcaaggtgatgtgcaagatcatcggcatcatggaggaggtggccgacggcttcaagagcaagatcctgaagcaggtgatcagcctgcagaccaagaaccccgagggcagattccccgacctgaccgtggagctgaacagatgggacaccgccttcgaccacgagaaggccagaaagaccggcctgatcacccccaaggccggcttcgacagcgactacgaccaggccctggccgacatcagagagaacgagcagagcctgctggagtacctggagaagcagagaaacagaatcggctgcagaaccatcgtgtactggggcatcggcagaaacagataccagctggagatccccgagaacttcaccaccagaaacctgcccgaggagtacgagctgaagagcaccaagaagggctgcaagagatactggaccaagaccatcgagaagaagctggccaacctgatcaacgccgaggagagaagagacgtgagcctgaaggactgcatgagaagactgttctacaacttcgacaagaactacaaggactggcagagcgccgtggagtgcatcgccgtgctgggcaagaccctgaacaagctggtgctgagactgtag

SEQ ID NO: 11667 - DNA, 1569 bp, synthetic construct
  misc_feature 1..1569: note = Description of Artificial Sequence: Synthetic coding sequence
  source 1..1569: mol_type = other DNA
atgagaaagcccagagccgccgtgggcagcggccacagaaagcaggccgccagccaggagggcagacagaagcacgccaagaacaacagccaggccaagcccagcgcctgcgacgccggcctggccagacagcccgaggaggtggtgctgcaggccagcgtgagcagctaccacctgttcagagacgtggccgaggtgaccgccttcagaggcagcctgctgagctggtacgaccaggagaagagagacctgccctggagaagaagagccgaggacgagatggacctggacagaagagcctacgccgtgtgggtgagcgaggtgatgctgcagcagacccaggtggccaccgtgatcaactactacaccggctggatgcagaagtggcccaccctgcaggacctggccagcgccagcctggaggaggtgaaccagctgtgggccggcctgggctactacagcagaggcagaagactgcaggagggcgccagaaaggtggtggaggagctgggcggccacatgcccagaaccgccgagaccctgcagcagctgctgcccggcgtgggcagatacaccgccggcgccatcgccagcatcgccttcggccaggccaccggcgtggtggacggcaacgtggccagagtgctgtgcagagtgagagccatcggcgccgaccccagcagcaccctggtgagccagcagctgtggggcctggcccagcagctggtggaccccgccagacccggcgacttcaaccaggccgccatggagctgggcgccaccgtgtgcaccccccagagacccctgtgcagccagtgccccgtggagagcctgtgcagagccagacagagagtggagcaggagcagctgctggccagcggcagcctgagcggcagccccgacgtggaggagtgcgcccccaacaccggccagtgccacctgtgcctgccccccagcgagccctgggaccagaccctgggcgtggtgaacttccccagaaaggccagcagaaagccccccagagaggagagcagcgccacctgcgtgctggagcagcccggcgccctgggcgcccagatcctgctggtgcagagacccaacagcggcctgctggccggcctgtgggagttccccagcgtgacctgggagcccagcgagcagctgcagagaaaggccctgctgcaggagctgcagagatgggccggccccctgcccgccacccacctgagacacctgggcgaggtggtgcacaccttcagccacatcaagctgacctaccaggtgtacggcctggccctggagggccagacccccgtgaccaccgtgccccccggcgccagatggctgacccaggaggagttccacaccgccgccgtgagcaccgccatgaagaaggtgttcagagtgtaccagggccagcagcccggcacctgcatgggcagcaagagaagccaggtgagcagcccctgcagcagaaagaagcccagaatgggccagcaggtgctggacaacttcttcagaagccacatcagcaccgacgcccacagcctgaacagcgccgcccagtag

SEQ ID NO: 11668 - DNA, 1566 bp, synthetic construct
  misc_feature 1..1566: note = Description of Artificial Sequence: Synthetic coding sequence
  source 1..1566: mol_type = other DNA
atgagaaagcccagagccgccgtgggcagcggccacagaaagcaggccgccagccaggagggcagacagaagcacgccaagaacaacagccaggccaagcccagcgcctgcgacggcctggccagacagcccgaggaggtggtgctgcaggccagcgtgagcagctaccacctgttcagagacgtggccgaggtgaccgccttcagaggcagcctgctgagctggtacgaccaggagaagagagacctgccctggagaagaagagccgaggacgagatggacctggacagaagagcctacgccgtgtgggtgagcgaggtgatgctgcagcagacccaggtggccaccgtgatcaactactacaccggctggatgcagaagtggcccaccctgcaggacctggccagcgccagcctggaggaggtgaaccagctgtgggccggcctgggctactacagcagaggcagaagactgcaggagggcgccagaaaggtggtggaggagctgggcggccacatgcccagaaccgccgagaccctgcagcagctgctgcccggcgtgggcagatacaccgccggcgccatcgccagcatcgccttcggccaggccaccggcgtggtggacggcaacgtggccagagtgctgtgcagagtgagagccatcggcgccgaccccagcagcaccctggtgagccagcagctgtggggcctggcccagcagctggtggaccccgccagacccggcgacttcaaccaggccgccatggagctgggcgccaccgtgtgcaccccccagagacccctgtgcagccagtgccccgtggagagcctgtgcagagccagacagagagtggagcaggagcagctgctggccagcggcagcctgagcggcagccccgacgtggaggagtgcgcccccaacaccggccagtgccacctgtgcctgccccccagcgagccctgggaccagaccctgggcgtggtgaacttccccagaaaggccagcagaaagccccccagagaggagagcagcgccacctgcgtgctggagcagcccggcgccctgggcgcccagatcctgctggtgcagagacccaacagcggcctgctggccggcctgtgggagttccccagcgtgacctgggagcccagcgagcagctgcagagaaaggccctgctgcaggagctgcagagatgggccggccccctgcccgccacccacctgagacacctgggcgaggtggtgcacaccttcagccacatcaagctgacctaccaggtgtacggcctggccctggagggccagacccccgtgaccaccgtgccccccggcgccagatggctgacccaggaggagttccacaccgccgccgtgagcaccgccatgaagaaggtgttcagagtgtaccagggccagcagcccggcacctgcatgggcagcaagagaagccaggtgagcagcccctgcagcagaaagaagcccagaatgggccagcaggtgctggacaacttcttcagaagccacatcagcaccgacgcccacagcctgaacagcgccgcccagtag

SEQ ID NO: 11669 - DNA, 1641 bp, synthetic construct
  misc_feature 1..1641: note = Description of Artificial Sequence: Synthetic coding sequence
  source 1..1641: mol_type = other DNA
atgacccccctggtgagcagactgagcagactgtgggccatcatgagaaagcccagagccgccgtgggcagcggccacagaaagcaggccgccagccaggagggcagacagaagcacgccaagaacaacagccaggccaagcccagcgcctgcgacggcatgatcgccgagtgccccggcgcccccgccggcctggccagacagcccgaggaggtggtgctgcaggccagcgtgagcagctaccacctgttcagagacgtggccgaggtgaccgccttcagaggcagcctgctgagctggtacgaccaggagaagagagacctgccctggagaagaagagccgaggacgagatggacctggacagaagagcctacgccgtgtgggtgagcgaggtgatgctgcagcagacccaggtggccaccgtgatcaactactacaccggctggatgcagaagtggcccaccctgcaggacctggccagcgccagcctggaggaggtgaaccagctgtgggccggcctgggctactacagcagaggcagaagactgcaggagggcgccagaaaggtggtggaggagctgggcggccacatgcccagaaccgccgagaccctgcagcagctgctgcccggcgtgggcagatacaccgccggcgccatcgccagcatcgccttcggccaggccaccggcgtggtggacggcaacgtggccagagtgctgtgcagagtgagagccatcggcgccgaccccagcagcaccctggtgagccagcagctgtggggcctggcccagcagctggtggaccccgccagacccggcgacttcaaccaggccgccatggagctgggcgccaccgtgtgcaccccccagagacccctgtgcagccagtgccccgtggagagcctgtgcagagccagacagagagtggagcaggagcagctgctggccagcggcagcctgagcggcagccccgacgtggaggagtgcgcccccaacaccggccagtgccacctgtgcctgccccccagcgagccctgggaccagaccctgggcgtggtgaacttccccagaaaggccagcagaaagccccccagagaggagagcagcgccacctgcgtgctggagcagcccggcgccctgggcgcccagatcctgctggtgcagagacccaacagcggcctgctggccggcctgtgggagttccccagcgtgacctgggagcccagcgagcagctgcagagaaaggccctgctgcaggagctgcagagatgggccggccccctgcccgccacccacctgagacacctgggcgaggtggtgcacaccttcagccacatcaagctgacctaccaggtgtacggcctggccctggagggccagacccccgtgaccaccgtgccccccggcgccagatggctgacccaggaggagttccacaccgccgccgtgagcaccgccatgaagaaggtgttcagagtgtaccagggccagcagcccggcacctgcatgggcagcaagagaagccaggtgagcagcccctgcagcagaaagaagcccagaatgggccagcaggtgctggacaacttcttcagaagccacatcagcaccgacgcccacagcctgaacagcgccgcccagtag

SEQ ID NO: 11670 - DNA, 1599 bp, synthetic construct
  misc_feature 1..1599: note = Description of Artificial Sequence: Synthetic coding sequence
  source 1..1599: mol_type = other DNA
atgagaaagcccagagccgccgtgggcagcggccacagaaagcaggccgccagccaggagggcagacagaagcacgccaagaacaacagccaggccaagcccagcgcctgcgacggcatgatcgccgagtgccccggcgcccccgccggcctggccagacagcccgaggaggtggtgctgcaggccagcgtgagcagctaccacctgttcagagacgtggccgaggtgaccgccttcagaggcagcctgctgagctggtacgaccaggagaagagagacctgccctggagaagaagagccgaggacgagatggacctggacagaagagcctacgccgtgtgggtgagcgaggtgatgctgcagcagacccaggtggccaccgtgatcaactactacaccggctggatgcagaagtggcccaccctgcaggacctggccagcgccagcctggaggaggtgaaccagctgtgggccggcctgggctactacagcagaggcagaagactgcaggagggcgccagaaaggtggtggaggagctgggcggccacatgcccagaaccgccgagaccctgcagcagctgctgcccggcgtgggcagatacaccgccggcgccatcgccagcatcgccttcggccaggccaccggcgtggtggacggcaacgtggccagagtgctgtgcagagtgagagccatcggcgccgaccccagcagcaccctggtgagccagcagctgtggggcctggcccagcagctggtggaccccgccagacccggcgacttcaaccaggccgccatggagctgggcgccaccgtgtgcaccccccagagacccctgtgcagccagtgccccgtggagagcctgtgcagagccagacagagagtggagcaggagcagctgctggccagcggcagcctgagcggcagccccgacgtggaggagtgcgcccccaacaccggccagtgccacctgtgcctgccccccagcgagccctgggaccagaccctgggcgtggtgaacttccccagaaaggccagcagaaagccccccagagaggagagcagcgccacctgcgtgctggagcagcccggcgccctgggcgcccagatcctgctggtgcagagacccaacagcggcctgctggccggcctgtgggagttccccagcgtgacctgggagcccagcgagcagctgcagagaaaggccctgctgcaggagctgcagagatgggccggccccctgcccgccacccacctgagacacctgggcgaggtggtgcacaccttcagccacatcaagctgacctaccaggtgtacggcctggccctggagggccagacccccgtgaccaccgtgccccccggcgccagatggctgacccaggaggagttccacaccgccgccgtgagcaccgccatgaagaaggtgttcagagtgtaccagggccagcagcccggcacctgcatgggcagcaagagaagccaggtgagcagcccctgcagcagaaagaagcccagaatgggccagcaggtgctggacaacttcttcagaagccacatcagcaccgacgcccacagcctgaacagcgccgcccagtag

SEQ ID NO: 11671 - DNA, 1566 bp, synthetic construct; identical to SEQ ID NO: 11668
  misc_feature 1..1566: note = Description of Artificial Sequence: Synthetic coding sequence
  source 1..1566: mol_type = other DNA

SEQ ID NO: 11672 - DNA, 1611 bp, synthetic construct
  misc_feature 1..1611: note = Description of Artificial Sequence: Synthetic coding sequence
  source 1..1611: mol_type = other DNA
atgacccccctggtgagcagactgagcagactgtgggccatcatgagaaagcccagagccgccgtgggcagcggccacagaaagcaggccgccagccaggagggcagacagaagcacgccaagaacaacagccaggccaagcccagcgcctgcgacgccggcctggccagacagcccgaggaggtggtgctgcaggccagcgtgagcagctaccacctgttcagagacgtggccgaggtgaccgccttcagaggcagcctgctgagctggtacgaccaggagaagagagacctgccctggagaagaagagccgaggacgagatggacctggacagaagagcctacgccgtgtgggtgagcgaggtgatgctgcagcagacccaggtggccaccgtgatcaactactacaccggctggatgcagaagtggcccaccctgcaggacctggccagcgccagcctggaggaggtgaaccagctgtgggccggcctgggctactacagcagaggcagaagactgcaggagggcgccagaaaggtggtggaggagctgggcggccacatgcccagaaccgccgagaccctgcagcagctgctgcccggcgtgggcagatacaccgccggcgccatcgccagcatcgccttcggccaggccaccggcgtggtggacggcaacgtggccagagtgctgtgcagagtgagagccatcggcgccgaccccagcagcaccctggtgagccagcagctgtggggcctggcccagcagctggtggaccccgccagacccggcgacttcaaccaggccgccatggagctgggcgccaccgtgtgcaccccccagagacccctgtgcagccagtgccccgtggagagcctgtgcagagccagacagagagtggagcaggagcagctgctggccagcggcagcctgagcggcagccccgacgtggaggagtgcgcccccaacaccggccagtgccacctgtgcctgccccccagcgagccctgggaccagaccctgggcgtggtgaacttccccagaaaggccagcagaaagccccccagagaggagagcagcgccacctgcgtgctggagcagcccggcgccctgggcgcccagatcctgctggtgcagagacccaacagcggcctgctggccggcctgtgggagttccccagcgtgacctgggagcccagcgagcagctgcagagaaaggccctgctgcaggagctgcagagatgggccggccccctgcccgccacccacctgagacacctgggcgaggtggtgcacaccttcagccacatcaagctgacctaccaggtgtacggcctggccctggagggccagacccccgtgaccaccgtgccccccggcgccagatggctgacccaggaggagttccacaccgccgccgtgagcaccgccatgaagaaggtgttcagagtgtaccagggccagcagcccggcacctgcatgggcagcaagagaagccaggtgagcagcccctgcagcagaaagaagcccagaatgggccagcaggtgctggacaacttcttcagaagccacatcagcaccgacgcccacagcctgaacagcgccgcccagtag

SEQ ID NO: 11673 - DNA, 1608 bp, synthetic construct
  misc_feature 1..1608: note = Description of Artificial Sequence: Synthetic coding sequence
  source 1..1608: mol_type = other DNA
atgacccccctggtgagcagactgagcagactgtgggccatcatgagaaagcccagagccgccgtgggcagcggccacagaaagcaggccgccagccaggagggcagacagaagcacgccaagaacaacagccaggccaagcccagcgcctgcgacggcctggccagacagcccgaggaggtggtgctgcaggccagcgtgagcagctaccacctgttcagagacgtggccgaggtgaccgccttcagaggcagcctgctgagctggtacgaccaggagaagagagacctgccctggagaagaagagccgaggacgagatggacctggacagaagagcctacgccgtgtgggtgagcgaggtgatgctgcagcagacccaggtggccaccgtgatcaactactacaccggctggatgcagaagtggcccaccctgcaggacctggccagcgccagcctggaggaggtgaaccagctgtgggccggcctgggctactacagcagaggcagaagactgcaggagggcgccagaaaggtggtggaggagctgggcggccacatgcccagaaccgccgagaccctgcagcagctgctgcccggcgtgggcagatacaccgccggcgccatcgccagcatcgccttcggccaggccaccggcgtggtggacggcaacgtggccagagtgctgtgcagagtgagagccatcggcgccgaccccagcagcaccctggtgagccagcagctgtggggcctggcccagcagctggtggaccccgccagacccggcgacttcaaccaggccgccatggagctgggcgccaccgtgtgcaccccccagagacccctgtgcagccagtgccccgtggagagcctgtgcagagccagacagagagtggagcaggagcagctgctggccagcggcagcctgagcggcagccccgacgtggaggagtgcgcccccaacaccggccagtgccacctgtgcctgccccccagcgagccctgggaccagaccctgggcgtggtgaacttccccagaaaggccagcagaaagccccccagagaggagagcagcgccacctgcgtgctggagcagcccggcgccctgggcgcccagatcctgctggtgcagagacccaacagcggcctgctggccggcctgtgggagttccccagcgtgacctgggagcccagcgagcagctgcagagaaaggccctgctgcaggagctgcagagatgggccggccccctgcccgccacccacctgagacacctgggcgaggtggtgcacaccttcagccacatcaagctgacctaccaggtgtacggcctggccctggagggccagacccccgtgaccaccgtgccccccggcgccagatggctgacccaggaggagttccacaccgccgccgtgagcaccgccatgaagaaggtgttcagagtgtaccagggccagcagcccggcacctgcatgggcagcaagagaagccaggtgagcagcccctgcagcagaaagaagcccagaatgggccagcaggtgctggacaacttcttcagaagccacatcagcaccgacgcccacagcctgaacagcgccgcccagtag

SEQ ID NO: 11674 - DNA, 876 bp, synthetic construct
  misc_feature 1..876: note = Description of Artificial Sequence: Synthetic coding sequence
  source 1..876: mol_type = other DNA
atgagaaagcccagagccgccgtgggcagcggccacagaaagcaggccgccagccaggagggcagacagaagcacgccaagaacaacagccaggccaagcccagcgcctgcgacggcatgatcgccgagtgccccggcgcccccgccggcctggccagacagcccgaggaggtggtgctgcaggccagcgtgagcagctaccacctgttcagagacgtggccgaggtgaccgccttcagaggcagcctgctgagctggtacgaccaggagaagagagacctgccctggagaagaagagccgaggacgagatggacctggacagaagagcctacgccgtgtgggtgagcgaggtgatgctgcagcagacccaggtggccaccgtgatcaactactacaccggctggatgcagaagtggcccaccctgcaggacctggccagcgccagcctggaggaggtgaaccagctgtgggccggcctgggctactacagcagaggcagaagactgcaggagggcgccagaaaggtggtggaggagctgggcggccacatgcccagaaccgccgagaccctgcagcagctgctgcccggcgtgggcagatacaccgccggcgccatcgccagcatcgccttcggccaggccaccggcgtggtggacggcaacgtggccagagtgctgtgcagagtgagagccatcggcgccgaccccagcagcaccctggtgagccagcagctgtggggcctggcccagcagctggtggaccccgccagacccggcgacttcaaccaggccgccatggagctgggcgccaccgtgtgcaccccccagagacccctgtgcagccagtgccccgtggagagcctgtgcagagcctag

SEQ ID NO: 11675 - DNA, 1599 bp, synthetic construct; identical to SEQ ID NO: 11670
  misc_feature 1..1599: note = Description of Artificial Sequence: Synthetic coding sequence
  source 1..1599: mol_type = other DNA

SEQ ID NO: 11676 - DNA, 1650 bp, synthetic construct
  misc_feature 1..1650: note = Description of Artificial Sequence: Synthetic coding sequence
  source 1..1650: mol_type = other DNA
atgacccccctggtgagcagactgagcagactgtgggccatcatgagaaagcccagagccgccgtgggcagcggccacagaaagcaggccgccagccaggagggcagacagaagcacgccaagaacaacagccaggccaagcccagcgcctgcgacgcctgcgccggcatgatcgccgagtgccccggcgcccccgccggcctggccagacagcccgaggaggtggtgctgcaggccagcgtgagcagctaccacctgttcagagacgtggccgaggtgaccgccttcagaggcagcctgctgagctggtacgaccaggagaagagagacctgccctggagaagaagagccgaggacgagatggacctggacagaagagcctacgccgtgtgggtgagcgaggtgatgctgcagcagacccaggtggccaccgtgatcaactactacaccggctggatgcagaagtggcccaccctgcaggacctggccagcgccagcctggaggaggtgaaccagctgtgggccggcctgggctactacagcagaggcagaagactgcaggagggcgccagaaaggtggtggaggagctgggcggccacatgcccagaaccgccgagaccctgcagcagctgctgcccggcgtgggcagatacaccgccggcgccatcgccagcatcgccttcggccaggccaccggcgtggtggacggcaacgtggccagagtgctgtgcagagtgagagccatcggcgccgaccccagcagcaccctggtgagccagcagctgtggggcctggcccagcagctggtggaccccgccagacccggcgacttcaaccaggccgccatggagctgggcgccaccgtgtgcaccccccagagacccctgtgcagccagtgccccgtggagagcctgtgcagagccagacagagagtggagcaggagcagctgctggccagcggcagcctgagcggcagccccgacgtggaggagtgcgcccccaacaccggccagtgccacctgtgcctgccccccagcgagccctgggaccagaccctgggcgtggtgaacttccccagaaaggccagcagaaagccccccagagaggagagcagcgccacctgcgtgctggagcagcccggcgccctgggcgcccagatcctgctggtgcagagacccaacagcggcctgctggccggcctgtgggagttccccagcgtgacctgggagcccagcgagcagctgcagagaaaggccctgctgcaggagctgcagagatgggccggccccctgcccgccacccacctgagacacctgggcgaggtggtgcacaccttcagccacatcaagctgacctaccaggtgtacggcctggccctggagggccagacccccgtgaccaccgtgccccccggcgccagatggctgacccaggaggagttccacaccgccgccgtgagcaccgccatgaagaaggtgttcagagtgtaccagggccagcagcccggcacctgcatgggcagcaagagaagccaggtgagcagcccctgcagcagaaagaagcccagaatgggccagcaggtgctggacaacttcttcagaagccacatcagcaccgacgcccacagcctgaacagcgccgcccagtag

SEQ ID NO: 11677 - DNA, 1566 bp, synthetic construct; identical to SEQ ID NO: 11668
  misc_feature 1..1566: note = Description of Artificial Sequence: Synthetic coding sequence
  source 1..1566: mol_type = other DNA

SEQ ID NO: 11678 - DNA, 648 bp, synthetic construct
  misc_feature 1..648: note = Description of Artificial Sequence: Synthetic coding sequence
  source 1..648: mol_type = other DNA
atgacccccctggtgagcagactgagcagactgtgggaggtgaaccagctgtgggccggcctgggctactacagcagaggcagaagactgcaggagggcgccagaaaggtggtggaggagctgggcggccacatgcccagaaccgccgagaccctgcagcagctgctgcccggcgtgggcagatacaccgccggcgccatcgccagcatcgccttcggccaggccaccggcgtggtggacggcaacgtggccagagtgctgtgcagagtgagagccatcggcgccgaccccagcagcaccctggtgagccagcagctgtggggcctggcccagcagctggtggaccccgccagacccggcgacttcaaccaggccgccatggagctgggcgccaccgtgtgcaccccccagagacccctgtgcagccagtgccccgtggagagcctgtgcagagccagacagagagtggagcaggagcagctgctggccagcggcagcctgagcggcagccccgacgtggaggagtgcgcccccaacaccggccagtgccacctgtgcctgccccccagcgagccctgggaccagaccctgggcgtggtgaacttccccagaaaggccagcagaaagccccccagagaggagagctag

SEQ ID NO: 11679 - DNA, 693 bp, synthetic construct
  misc_feature 1..693: note = Description of Artificial Sequence: Synthetic coding sequence
  source 1..693: mol_type = other DNA
atgacccccctggtgagcagactgagcagactgtgggccatcatgagaaagcccagagccgccgtgggcagcggccacagaaagcaggccgccagccaggagggcagacagaagcacgccaagaacaacagccaggccaagcccagcgcctgcgacggcggcgagagcaccctgggctggcccggcctgctgttcagctggcccgccgccgccggcggcagcagcgagggcctgctggccggcctgtgggagttccccagcgtgacctgggagcccagcgagcagctgcagagaaaggccctgctgcaggagctgcagagatgggccggccccctgcccgccacccacctgagacacctgggcgaggtggtgcacaccttcagccacatcaagctgacctaccaggtgtacggcctggccctggagggccagacccccgtgaccaccgtgccccccggcgccagatggctgacccaggaggagttccacaccgccgccgtgagcaccgccatgaagaaggtgttcagagtgtaccagggccagcagcccggcacctgcatgggcagcaagagaagccaggtgagcagcccctgcagcagaaagaagcccagaatgggccagcaggtgctggacaacttcttcagaagccacatcagcaccgacgcccacagcctgaacagcgccgcccagtag

SEQ ID NO: 11680 - DNA, 291 bp, synthetic construct
  misc_feature 1..291: note = Description of Artificial Sequence: Synthetic coding sequence
  source 1..291: mol_type = other DNA
atgagcgacaacgacgacatcgaggtggagagcgacgaggagcagcccagattccagagcgccgccgacaagagagcccaccacaacgccctggagagaaagagaagagaccacatcaaggacagcttccacagcctgagagacagcgtgcccagcctgcagggcgagaagctgtacttcctgttctggaagctgtgcacccccgtgctgcacagacagagcctgatgcagaagtgccacaccttcatcagcagctaccaggtgcacaagaagaaggagtgcaagatctag

SEQ ID NO: 11681 - DNA, 405 bp, synthetic construct
  misc_feature 1..405: note = Description of Artificial Sequence: Synthetic coding sequence
  source 1..405: mol_type = other DNA
atgagcgacaacgacgacatcgaggtggagagcgacgaggagcagcccagattccagagcgccgccgacaagagagcccaccacaacgccctggagagaaagagaagagaccacatcaaggacagcttccacagcctgagagacagcgtgcccagcctgcagggcgagaaggccagcagagcccagatcctggacaaggccaccgagtacatccagtacatgagaagaaagaaccacacccaccagcaggacatcgacgacctgaagagacagaacgccctgctggagcagcagggcgagcaccccagcagctggggcagctggccctgctgcgcccccgccagaagcggcttcggcacctgggcctgcagagtgagagccagccacggcgtgtgcgcccagtag

SEQ ID NO: 11682 - DNA, 252 bp, synthetic construct
  misc_feature 1..252: note = Description of Artificial Sequence: Synthetic coding sequence
  source 1..252: mol_type = other DNA
atgagcgacaacgacgacatcgaggtggagagcgacgaggagcagcccagattccagagcgccgccgacaagagagcccaccacaacgccctggagagaaagagaagagaccacatcaaggacagcttccacagcctgagagacagcgtgcccagcctgcagggcgagaagggcaccaagatgaagctgaccctgccccccgtgttcccctacgagcacctgcccttccccaccgtgttctgccacggctag

SEQ ID NO: 11683 - DNA, 456 bp, synthetic construct
  misc_feature 1..456: note = Description of Artificial Sequence: Synthetic coding sequence
  source 1..456: mol_type = other DNA
atgagcgacaacgacgacatcgaggtggagagcgacgccgacaagagagcccaccacaacgccctggagagaaagagaagagaccacatcaaggacagcttccacagcctgagagacagcgtgcccagcctgcagggcgagaaggccagcagagcccagatcctggacaaggccaccgagtacatccagtacatgagaagaaagaaccacacccaccagcaggacatcgacgacctgaagagacagaacgccctgctggagcagcaggtgagagccctggagaaggccagaagcagcgcccagctgcagaccaactaccccagcagcgacaacagcctgtacaccaacgccaagggcagcaccatcagcgccttcgacggcggcagcgacagcagcagcgagagcgagcccgaggagccccagagcagaaagaagctgagaatggaggccagctag

SEQ ID NO: 11684 - DNA, 483 bp, synthetic construct
  misc_feature 1..483: note = Description of Artificial Sequence: Synthetic coding sequence
  source 1..483: mol_type = other DNA
atgagcgacaacgacgacatcgaggtggagagcgacgaggagcagcccagattccagagcgccgccgacaagagagcccaccacaacgccctggagagaaagagaagagaccacatcaaggacagcttccacagcctgagagacagcgtgcccagcctgcagggcgagaaggccagcagagcccagatcctggacaaggccaccgagtacatccagtacatgagaagaaagaaccacacccaccagcaggacatcgacgacctgaagagacagaacgccctgctggagcagcaggtgagagccctggagaaggccagaagcagcgcccagctgcagaccaactaccccagcagcgacaacagcctgtacaccaacgccaagggcagcaccatcagcgccttcgacggcggcagcgacagcagcagcgagagcgagcccgaggagccccagagcagaaagaagctgagaatggaggccagctag

SEQ ID NO: 11685 - DNA, 426 bp, synthetic construct
  misc_feature 1..426: note = Description of Artificial Sequence: Synthetic coding sequence
  source 1..426: mol_type = other DNA
atgctgagcgtgaagatcaccagcatcttcagcatcttcttcttcctgctgttccaggaggagcagcccagattccagagcgccgccgacaagagagcccaccacaacgccctggagagaaagagaagagaccacatcaaggacagcttccacagcctgagagacagcgtgcccagcctgcagggcgagaaggccagcagagcccagatcctggacaaggccaccgagtacatccagtacatgagaagaaagaaccacacccaccagcaggacatcgacgacctgaagagacagaacgccctgctggagcagcagggcgagcaccccagcagctggggcagctggccctgctgcgcccccgccagaagcggcttcggcacctgggcctgcagagtgagagccagccacggcgtgtgcgcccagtag

SEQ ID NO: 11686 - DNA, 312 bp, synthetic construct
  misc_feature 1..312: note = Description of Artificial Sequence: Synthetic coding sequence
  source 1..312: mol_type = other DNA
atgagcgacaacgacgacatcgaggtggagagcgacgaggagcagcccagattccagagcgccgccgacaagagagcccaccacaacgccctggagagaaagagaagagaccacatcaaggacagcttccacagcctgagagacagcgtgcccagcctgcagggcgagaaggccagcagagcccagatcctggacaaggccaccgagtacatccagtacatgagaagaaagaaccacacccaccagcaggacatcgacgacctgaagagacagaacgccctgctggagcagcagggcgagagcgagagctag

SEQ ID NO: 11687 - DNA, 312 bp, synthetic construct; identical to SEQ ID NO: 11686
  misc_feature 1..312: note = Description of Artificial Sequence: Synthetic coding sequence
  source 1..312: mol_type = other DNA

SEQ ID NO: 11688 - DNA, 13923 bp, synthetic construct
  misc_feature 1..13923: note = Description of Artificial Sequence: Synthetic coding sequence
  source 1..13923: mol_type = other DNA
atgcccgtgcccgacggcagcgtggccgccgccggcctgggcctgggcctgcccgccgccgacagcagaggccactaccagctgctgctgagcggcagagccctggccgacagatacagaagaatctacaccgccgccctgaacgacagagaccagggcggcggcagcgccggccaccccgccagcagaaacaagaagatcctgaacaagaagaagctgaagagaaagcagaagagcaagagcaaggtgaagaccagaagcaagagcgagaacctggagaacaccgtgatcatccccgacatcaagctgcacagcaaccccagcgccttcaacatctactgcaacgtgagacactgcgtgctggagtggcagaagaaggagatcagcctggccgccgccagcaagaacagcgtgcagagcggcgagagcgacagcgacgaggaggaggagagcaaggagccccccatcaagctgcccaagatcatcgaggtgggcctgtgcgaggtgttcgagctgatcaaggagaccagattcagccaccccagcctgtgcctgagaagcctgcaggccctgctgaacgtgctgcagggccagcagcccgagggcctgcagagcgagccccccgaggtgctggagagcctgttccagctgctgctggagatcaccgtgagaagcaccggcatgaacgacagcaccggccagagcctgaccgccctgagctgcgcctgcctgttcagcctggtggccagctggggcgagaccggcagaaccctgcaggccatcagcgccatcctgaccaacaacggcagccacgcctgccagaccatccaggtgcccaccatcctgaacagcctgcagagaagcgtgcaggccgtgctggtgggcaagatccagatccaggactggttcagcaacggcatcaagaaggccgccctgatgcacaagtggcccctgaaggagatcagcgtggacgaggacgaccagtgcctgctgcagaacgacggcttcttcctgtacctgctgtgcaaggacggcctgtacaagatcggcagcggctacagcggcaccgtgagaggccacatctacaacagcaccagcagaatcagaaacagaaaggagaagaagagctggctgggctacgcccagggctacctgctgtacagagacgtgaacaaccacagcatgaccgccatcagaatcagccccgagaccctggagcaggacggcaccgtgatgctgcccgactgccacaccgagggccagaacatcctgttcaccgacggcgagtacatcaaccagatcgccgccagcagagacgacggcttcgtggtgagaatcttcgccaccagcaccgagcccgtgctgcagcaggagctgcagctgaagctggccagaaagtgcctgcacgcctgcggcatcagcctgttcgacctggagaaggacctgcacatcatcagcaccggcttcgacgaggagagcgccatcctgggcgccggcagagagttcgccctgatgaagaccgccaacggcaagatctactacaccggcaagtaccagagcctgggcatcaagcagggcggccccagcgccggcaagtgggtggagctgcccatcaccaagagccccaagatcgtgcacttcagcgtgggccacgacggcagccacgccctgctggtggccgaggacggcagcatcttcttcaccggcagcgccagcaagggcgaggacggcgagagcaccaagagcagaagacagagcaagccctacaagcccaagaagatcatcaagatggagggcaagatcgtggtgtacaccgcctgcaacaacggcagcagcagcgtgatcagcaaggacggcgagctgtacatgttcggcaaggacgccatctacagcgacagcagcagcctggtgaccgacctgaagggccacttcgtgacccaggtggccatgggcaaggcccacacctgcgtgctgatgaagaacggcgaggtgtggaccttcggcgtgaacaacaagggccagtgcggcagagacaccggcgccatgaaccagggcggcaagggcttcggcgtggagaacatggccaccgccatggacgaggacctggaggaggagctggacgagaaggacgagaagagcatgatgtgcccccccggcatgcacaagtggaagctggagcagtgcatggtgtgcaccgtgtgcggcgactgcaccggctacggcgccagctgcgtgagcagcggcagacccgacagagtgcccggcggcatctgcggctgcggcagcggcgagagcggctgcgccgtgtgcggctgctgcaaggcctgcgccagagagctggacggccaggaggccagacagagaggcatcctggacgccgtgaaggagatgatccccctggacctgctgctggccgtgcccgtgcccggcgtgaacatcgaggagcacctgcagctgagacaggaggagaagagacagagagtgatcagaagacacagactggaggagggcagaggccccctggtgttcgccggccccatcttcatgaaccacagagagcaggccctggccagactgagaagccaccccgcccagctgaagcacaagagagacaagcacaaggacggcagcggcgagagaggcgagaaggacgccagcaagatcaccacctacccccccggcagcgtgagattcgactgcgagctgagagccgtgcaggtgagctgcggcttccaccacagcgtggtgctgatggagaacggcgacgtgtacaccttcggctacggccagcacggccagctgggccacggcgacgtgaacagcagaggctgccccaccctggtgcaggccctgcccggccccagcacccaggtgaccgccggcagcaaccacaccgccgtgctgctgatggacggccaggtgttcaccttcggcagcttcagcaagggccagctgggcagacccatcctggacgtgccctactggaacgccaagcccgcccccatgcccaacatcggcagcaagtacggcagaaaggccacctggatcggcgccagcggcgaccagaccttcctgagaatcgacgaggccctgatcaacagccacgtgctggccaccagcgagatcttcgccagcaagcacatcatcggcctggtgcccgccagcatcagcgagcccccccccttcaagtgcctgctgatcaacaaggtggacggcagctgcaagaccttcaacgacagcgagcaggaggacctgcagggcttcggcgtgtgcctggaccccgtgtacgacgtgatctggagattcagacccaacaccagagagctgtggtgctacaacgccgtggtggccgacgccagactgcccagcgccgccgacatgcagagcagatgcagcatcctgagccccgagctggccctgcccaccggcagcagagccctgaccaccagaagccacgccgccctgcacatcctgggctgcctggacaccctggccgccatgcaggacctgaagatgggcgtggccagcaccgaggaggagacccaggccgtgatgaaggtgtacagcaaggaggactacagcgtggtgaacagattcgagagccacggcggcggctggggctacagcgcccacagcgtggaggccatcagattcagcgccgacaccgacatcctgctgggcggcctgggcctgttcggcggcagaggcgagtacaccgccaagatcaagctgttcgagctgggccccgacggcggcgaccacgagaccgacggcgacctgctggccgagaccgacgtgctggcctacgactgcgccgccagagagaagtacgccatgatgttcgacgagcccgtgctgctgcaggccggctggtggtacgtggcctgggccagagtgagcggccccagcagcgactgcggcagccacggccaggccagcatcaccaccgacgacggcgtggtgttccagttcaagagcagcaagaagagcaacaacggcaccgacgtgaacgccggccagatcccccagctgctgtacagactgcccaccagcgacggcagcgccagcaagggcaagcagcagaccagcgagcccgtgcacatcctgaagagaagcttcgccagaaccgtgagcgtggagtgcttcgagagcctgctgagcatcctgcactggagctggaccaccctggtgctgggcgtggaggagctgagaggcctgaagggcttccagttcaccgccaccctgctggacctggagagactgagattcgtgggcacctgctgcctgagactgctgagagtgtacacctgcgagatctaccccgtgagcgccaccggcaaggccgtggtggaggagaccagcaagctggccgagtgcatcggcaagaccagaaccctgctgagaaagatcctgagcgagggcgtggaccactgcatggtgaagctggacaacgacccccagggctacctgagccagcccctgagcctgctggaggccgtgctgcaggagtgccacaacaccttcaccgcctgcttccacagcttctaccccacccccgccctgcagtgggcctgcctgtgcgacctgctgaactgcctggaccaggacatccaggaggccaacttcaagaccagcagcagcagactgctggccgccgtgatgagcgccctgtgccacaccagcgtgaagctgaccagcatcttccccatcgcctacgacggcgaggtgctgctgagaagcatcgtgaagcaggtgagcaccgagaacgacagcaccctggtgcacagattccccctgctggtggcccacatggagaagctgagccagagcgaggagaacatcagcggcatgaccagcttcagagaggtgctggagaagatgctggtgatcgtggtgctgcccgtgagaaacagcctgagaagagagaacgagctgttcagcagccacctggtgagcaacacctgcggcctgctggccagcatcgtgagcgagctgaccgccagcgccctgggcagcgaggtggacggcctgaacagcctgcacagcgtgaaggccagcgccaacagattcaccaagaccagccagggcagaagctggaacaccggcaacggcagccccgacgccatctgcttcagcgtggacaagcccggcatcgtggtggtgggcttcagcgtgtacggcggcggcggcatccacgagtacgagctggaggtgctggtggacgacagcgagcacgccggcgacagcacccacagccacagatggaccagcctggagctggtgaagggcacctacaccaccgacgacagccccagcgacatcgccgagatcagactggacaaggtggtgcccctgaaggagaacgtgaagtacgccgtgagactgagaaactacggcagcagaaccgccaacggcgacggcggcatgaccaccgtgcagtgccccgacggcgtgaccttcaccttcagcacctgcagcctgagcagcaacggcaccaaccagaccagaggccagatcccccagatcctgtactacagaagcgagttcgacggcgacctgcagagccagctgctgagcaaggccaacgaggaggacaagaactgcagcagagccctgagcgtggtgagcaccgtggtgagagccagcaaggacctgctgcacagagccctggccgtggacgccgacgacatccccgagctgctgagcagcagcagcctgttcagcatgctgctgcccctgatcatcgcctacatcggccccgtggccgccgccatccccaaggtggccgtggaggtgttcggcctggtgcagcagctgctgcccagcgtggccatcctgaaccagaagtacgccccccccgccttcaaccccaaccagagcaccgacagcaccaccggcaaccagcccgagcagggcctgagcgcctgcaccaccagcagccactacgccgtgatcgagagcgagcacccctacaagcccgcctgcgtgatgcactacaaggtgaccttccccgagtgcgtgagatggatgaccatcgagttcgacccccagtgcggcaccgcccagagcgaggacgtgctgagactgctgatccccgtgagaaccgtgcagaacagcggctacggccccaagctgaccagcgtgcacgagaacctgaacagctggatcgagctgaagaagttcagcggcagcagcggctggcccaccatggtgctggtgctgcccggcaacgaggccctgttcagcctggagaccgccagcgactacgtgaaggacgacaaggccagcttctacggcttcaagtgcttcgccatcggctacgagttcagccccggccccgacgagggcgtgatccagctggagaaggagctggccaacctgggcggcgtgtgcgccgccgccctgatgaagaaggacctggccctgcccatcggcaacgagctggaggaggacctggagatcctggaggaggccgccctgcaggtgtgcaagacccacagcggcatcctgggcaagggcctggccctgagccacagccccaccatcctggaggccctggagggcaacctgcccctgcagatccagagcaacgagcagagcttcctggacgacttcatcgcctgcgtgcccggcagcagcggcggcagactggccagatggctgcagcccgacagctacgccgacccccagaagaccagcctgatcctgaacaaggacgacatcagatgcggctggcccaccaccatcaccgtgcagaccaaggaccagtacggcgacgtggtgcacgtgcccaacatgaaggtggaggtgaaggccgtgcccgtgagccagaagaagatgagcctgcagcaggaccaggccaagaagccccagagaatccccggcagccccgccgtgaccgccgccagcagcaacaccgacatgacctacggcggcctggccagccccaagctggacgtgagctacgagcccatgatcgtgaaggaggccagatacatcgccatcaccatgatgaaggtgtacgagaactacagcttcgaggagctgagattcgccagccccacccccaagagacccagcgagaacatgctgatcagagtgaacaacgacggcacctactgcgccaactggacccccggcgccatcggcctgtacaccctgcacgtgaccatcgacggcatcgagatcgacgccggcctggaggtgaaggtgaaggacccccccaagggcatgatcccccccggcacccagctggtgaagcccaagagcgagccccagcccaacaaggtgagaaagttcgtggccaaggacagcgccggcctgagaatcagaagccaccccagcctgcagagcgagcagatcggcatcgtgaaggtgaacggcaccatcaccttcatcgacgagatccacaacgacgacggcgtgtggctgagactgaacgacgagaccatcaagaagtacgtgcccaacatgaacggctacaccgaggcctggtgcctgagcttcaaccagcacctgggcaagagcctgctggtgcccgtggacgagagcaagaccaacaccgacgacttcttcaaggacatcaacagctgctgcccccaggaggccaccatgcaggagcaggacatgcccttcctgagaggcggccccggcatgtacaaggtggtgaagaccggccccagcggccacaacatcagaagctgccccaacctgagaggcatccccatcggcatgctggtgctgggcaacaaggtgaaggccgtgggcgaggtgaccaacagcgagggcacctgggtgcagctggaccagaacagcatggtggagttctgcgagagcgacgagggcgaggcctggagcctggccagagacagaggcggcaaccagtacctgagacacgaggacgagcaggccctgctggaccagaacagccagacccccccccccagccccttcagcgtgcaggccttcaacaagggcgccagctgcagcgcccagggcttcgactacggcctgggcaacagcaagggcgacagaggcaacatcagcaccagcagcaagcccgccagcaccagcggcaagagcgagctgagcagcaagcacagcagaagcctgaagcccgacggcagaatgagcagaaccaccgccgaccagaagaagcccagaggcaccgagagcctgagcgccagcgagagcctgatcctgaagagcgacgccgccaagctgagaagcgacagccacagcagaagcctgagccccaaccacaacaccctgcagaccctgaagagcgacggcagaatgcccagcagcagcagagccgagagccccggccccggcagcagactgagcagccccaagcccaagaccctgcccgccaacagaagcagccccagcggcgccagcagccccagaagcagcagcccccacgacaagaacctgccccagaagagcaccgcccccgtgaagaccaagctggacccccccagagagagaagcaagagcgacagctacaccctggaccccgacaccctgagaaagaagaagatgcccctgaccgagcccctgagaggcagaagcaccagccccaagcccaagagcgtgcccaaggacagcaccgacagccccggcagcgagaacagagcccccagcccccacgtggtgcaggagaacctgcacagcgaggtggtggaggtgtgcaccagcagcaccctgaagaccaacagcctgaccgacagcacctgcgacgacagcagcgagttcaagagcgtggacgagggcagcaacaaggtgcacttcagcatcggcaaggcccccctgaaggacgagcaggagatgagagccagccccaagatcagcagaaagtgcgccaacagacacaccagacccaagaaggagaagagcagcttcctgttcaagggcgacggcagcaagcccctggagcccgccaagcaggccatgagccccagcgtggccgagtgcgccagagccgtgttcgccagcttcctgtggcacgagggcatcgtgcacgacgccatggcctgcagcagcttcctgaagttccaccccgagctgagcaaggagcacgcccccatcagaagcagcctgaacagccagcagcccaccgaggagaaggagaccaagctgaagaacagacacagcctggagatcagcagcgccctgaacatgttcaacatcgccccccacggccccgacatcagcaagatgggcagcatcaacaagaacaaggtgctgagcatgctgaaggagccccccctgcacgagaagtgcgaggacggcaagaccgagaccaccttcgagatgagcatgcacaacaccatgaagagcaagagccccctgcccctgaccctgcagcacctggtggccttctgggaggacatcagcctggccaccatcaaggccgccagccagaacatgatcttccccagccccggcagctgcgccgtgctgaagaagaaggagtgcgagaaggagaacaagaagagcaagaaggagaagaagaagaaggagaaggccgaggtgagacccagaggcaacctgttcggcgagatggcccagctggccgtgggcggccccgagaaggacaccatctgcgagctgtgcggcgagagccacccctaccccgtgacctaccacatgagacaggcccaccccggctgcggcagatacgccggcggccagggctacaacagcatcggccacttctgcggcggctgggccggcaactgcggcgacggcggcatcggcggcagcacctggtacctggtgtgcgacagatgcagagagaagtacctgagagagaagcaggccgccgccagagagaaggtgaagcagagcagaagaaagcccatgcaggtgaagacccccagagccctgcccaccatggaggcccaccaggtgatcaaggccaacgccctgttcctgctgagcctgagcagcgccgccgagcccagcatcctgtgctaccaccccgccaagcccttccagagccagctgcccagcgtgaaggagggcatcagcgaggacctgcccgtgaagatgccctgcctgtacctgcagaccctggccagacaccaccacgagaacttcgtgggctaccaggacgacaacctgttccaggacgagatgagatacctgagaagcaccagcgtgcccgccccctacatcagcgtgacccccgacgccagccccaacgtgttcgaggagcccgagagcaacatgaagagcatgccccccagcctggagaccagccccatcaccgacaccgacctggccaagagaaccgtgttccagagaagctacagcgtggtggccagcgagtacgacaagcagcacagcatcctgcccgccagagtgaaggccatccccagaagaagagtgaacagcggcgacaccgaggtgggcagcagcctgctgagacaccccagccccgagctgagcagactgatcagcgcccacagcagcctgagcaagggcgagagaaacttccagtggcccgtgctggccttcgtgatccagcaccacgacctggagggcctggagatcgccatgaagcaggccctgagaaagagcgcctgcagagtgttcgccatggaggccttcaactggctgctgtgcaacgtgatccagaccaccagcctgcacgacatcctgtggcacttcgtggccagcctgacccccgcccccgtggagcccgaggaggaggaggacgaggagaacaagaccagcaaggagaacagcgagcaggagaaggacaccagagtgtgcgagcaccccctgagcgacatcgtgatcgccggcgaggccgcccaccccctgccccacaccttccacagactgctgcagaccatcagcgacctgatgatgagcctgcccagcggcagcagcctgcagcagatggccctgagatgctggagcctgaagttcaagcagagcgaccaccagttcctgcaccagagcaacgtgttccaccacatcaacaacatcctgagcaagagcgacgacggcgacagcgaggagagcttcagcatcagcatccagagcggcttcgaggccatgagccaggagctgtgcatcgtgatgtgcctgaaggacctgaccagcatcgtggacatcaagaccagcagcagacccgccatgatcggcagcctgaccgacggcagcaccgagaccttctgggagagcggcgacgaggacaagaacaagaccaagaacatcaccatcaactgcgtgaagggcatcaacgccagatacgtgagcgtgcacgtggacaacagcagagacctgggcaacaaggtgaccagcatgaccttcctgaccggcaaggccgtggaggacctgtgcagaatcaagcaggtggacctggacagcagacacatcggctgggtgaccagcgagctgcccggcggcgacaaccacatcatcaagatcgagctgaagggccccgagaacaccctgagagtgagacaggtgaaggtgctgggctggaaggacggcgagagcaccaagatcgccggccagatcagcgccagcgtggcccagcagagaaactgcgaggccgagaccctgagagtgttcagactgatcaccagccaggtgttcggcaagctgatcagcggcgacgccgagcccacccccgagcaggaggagaaggccctgctgagcagccccgagggcgaggagaaggtgtacaacgccaccagcgacgccgacctgaaggagcacatggtgggcatcatcttcagcagaagcaagctgaccaacctgcagaagcaggtgtgcgcccacatcgtgcaggccatcagaatggaggccaccagagtgagagaggagtgggagcacgccatcagcagcaaggagaacgccaacagccagcccaacgacgaggacgccagcagcgacgcctactgcttcgagctgctgagcatggtgctggccctgagcggcagcaacgtgggcagacagtacctggcccagcagctgaccctgctgcaggacctgttcagcctgctgcacaccgccagccccagagtgcagagacaggtgaccagcctgctgagaagagtgctgcccgaggtgacccccagcagactggccagcatcatcggcgtgaagagcctgccccccgccgacatcagcgacatcatccacagcaccgagaagggcgactggaacaagctgggcatcctggacatgttcctgggctgcatcgccaaggccctgaccgtgcagctgaaggccaagggcaccaccatcaccggcaccgccggcaccaccgtgggcaagggcgtgaccaccgtgaccctgcccatgatcttcaacagcagctacctgagaagaggcgagagccactggtggatgaagggcagcacccccacccagatcagcgagatcatcatcaagctgatcaaggacatggccgccggccacctgagcgaggcctggagcagagtgaccaagaacgccatcgccgagaccatcatcgccctgaccaagatggaggaggagttcagaagccccgtgagatgcatcgccaccaccagactgtggctggccctggccagcctgtgcgtgctggaccaggaccacgtggacagactgagcagcggcagatggatgggcaaggacggccagcagaagcagatgcccatgtgcgacaaccacgacgacggcgagaccgccgccatcatcctgtgcaacgtgtgcggcaacctgtgcaccgactgcgacagattcctgcacctgcacagaagaaccaagacccaccagagacaggtgttcaaggaggaggaggaggccatcaaggtggacctgcacgagggctgcggcagaaccaagctgttctggctgatggccctggccgacagcaagaccatgaaggccatggtggagttcagagagcacaccggcaagcccaccaccagcagcagcgaggcctgcagattctgcggcagcagaagcggcaccgagctgagcgccgtgggcagcgtgtgcagcgacgccgactgccaggagtacgccaagatcgcctgcagcaagacccacccctgcggccacccctgcggcggcgtgaagaacgaggagcactgcctgccctgcctgcacggctgcgacaagagcgccaccagcctgaagcaggacgccgacgacatgtgcatgatctgcttcaccgaggccctgagcgccgcccccgccatccagctggactgcagccacatcttccacctgcagtgctgcagaagagtgctggagaacagatggctgggccccagaatcaccttcggcttcatcagctgccccatctgcaagaacaagatcaaccacatcgtgctgaaggacctgctggaccccatcaaggagctgtacgaggacgtgagaagaaaggccctgatgagactggagtacgagggcctgcacaagagcgaggccatcaccacccccggcgtgagattctacaacgaccccgccggctacgccatgaacagatacgcctactacgtgtgctacaagtgcagaaaggcctacttcggcggcgaggccagatgcgacgccgaggccggcagaggcgacgactacgaccccagagagctgatctgcggcgcctgcagcgacgtgagcagagcccagatgtgccccaagcacggcaccgacttcctggagtacaagtgcagatactgctgcagcgtggccgtgttcttctgcttcggcaccacccacttctgcaacgcctgccacgacgacttccagagaatgaccagcatccccaaggaggagctgccccactgccccgccggccccaagggcaagcagctggagggcaccgagtgccccctgcacgtggtgcacccccccaccggcgaggagttcgccctgggctgcggcgtgtgcagaaacgcccacaccttctag

SEQ ID NO: 11689 - DNA, 1542 bp, synthetic construct
  misc_feature 1..1542: note = Description of Artificial Sequence: Synthetic coding sequence
  source 1..1542: mol_type = other DNA
atgcaggagcaggacatgcccttcctgagaggcggccccggcatgtacaaggtggtgaagaccggccccagcggccacaacatcagaagctgccccaacctgagaggcatccccatcggcatgctggtgctgggcaacaaggtgaaggccgtgggcgaggtgaccaacagcgagggcacctgggtgcagctggaccagaacagcatggtggagttctgcgagagcgacgagggcgaggcctggagcctggccagagacagaggcggcaaccagtacctgagacacgaggacgagcaggccctgctggaccagaacagccagacccccccccccagccccttcagcgtgcaggccttcaacaagggcgccagctgcagcgcccagggcttcgactacggcctgggcaacagcaaggtgctgaccgtgctgcccaccgccggcgaccagctgagcgccatcctgaacagcatccagagcagacccaacctgcccgcccccagcatcttcgaccaggccgccaagccccccagcagcctggtgcacagccccttcgtgttcggccagcccctgagcttccagcagccccagctgcagagcgacagaggcaacatcagcaccagcagcaagcccgccagcaccagcggcaagagcgagctgagcagcaagcacagcagaagcctgaagcccgacggcagaatgagcagaaccaccgccgaccagaagaagcccagaggcaccgagagcctgagcgccagcgagagcctgatcctgaagagcgacgccgccaagctgagaagcgacagccacagcagaagcctgagccccaaccacaacaccctgcagaccctgaagagcgacggcagaatgcccagcagcagcagagccgagagccccggccccggcagcagactgagcagccccaagcccaagaccctgcccgccaacagaagcagccccagcggcgccagcagccccagaagcagcagcccccacgacaagaacctgccccagaagagcaccgcccccgtgaagaccaagctggacccccccagagagagaagcaagagcgacagctacaccctggaccccgacaccctgagaaagaagaagatgcccctgaccgagcccctgagaggcagaagcaccagccccaagcccaagagcgtgcccaaggacagcaccgacagccccggcagcgagaacagagcccccagcccccacgtggtgcaggagaacctgcacagcgaggtggtggaggtgtgcaccagcagcaccctgaagaccaacagcctgaccgacagcacctgcgacgacagcagcgagttcaagagcgtggacgagggcagcaacaaggtgcacttcagcatcggcaaggcccccctgaaggacgagcaggagatgagagccagccccaagatcagcagaaagtgcgccaacagacacaccagacccaagagaaagatcgagttcagcttccagagaagatggatccaggccttcagagccagccaggccagccacgtgagcttctgcggcagatag

SEQ ID NO: 11690 - DNA, 14037 bp, synthetic construct
  misc_feature 1..14037: note = Description of Artificial Sequence: Synthetic coding sequence
  source 1..14037: mol_type = other DNA
atgatgatgtgcgccgccaccgccagccccgccgccgccagcagcggcctgggcggcgacggcttctaccccgccgccaccttcagcagcagccccgcccccggcgccctgttcatgcccgtgcccgacggcagcgtggccgccgccggcctgggcctgggcctgcccgccgccgacagcagaggccactaccagctgctgctgagcggcagagccctggccgacagatacagaagaatctacaccgccgccctgaacgacagagaccagggcggcggcagcgccggccaccccgccagcagaaacaagaagatcctgaacaagaagaagctgaagagaaagcagaagagcaagagcaaggtgaagaccagaagcaagagcgagaacctggagaacaccgtgatcatccccgacatcaagctgcacagcaaccccagcgccttcaacatctactgcaacgtgagacactgcgtgctggagtggcagaagaaggagatcagcctggccgccgccagcaagaacagcgtgcagagcggcgagagcgacagcgacgaggaggaggagagcaaggagccccccatcaagctgcccaagatcatcgaggtgggcctgtgcgaggtgttcgagctgatcaaggagaccagattcagccaccccagcctgtgcctgagaagcctgcaggccctgctgaacgtgctgcagggccagcagcccgagggcctgcagagcgagccccccgaggtgctggagagcctgttccagctgctgctggagatcaccgtgagaagcaccggcatgaacgacagcaccggccagagcctgaccgccctgagctgcgcctgcctgttcagcctggtggccagctggggcgagaccggcagaaccctgcaggccatcagcgccatcctgaccaacaacggcagccacgcctgccagaccatccaggtgcccaccatcctgaacagcctgcagagaagcgtgcaggccgtgctggtgggcaagatccagatccaggactggttcagcaacggcatcaagaaggccgccctgatgcacaagtggcccctgaaggagatcagcgtggacgaggacgaccagtgcctgctgcagaacgacggcttcttcctgtacctgctgtgcaaggacggcctgtacaagatcggcagcggctacagcggcaccgtgagaggccacatctacaacagcaccagcagaatcagaaacagaaaggagaagaagagctggctgggctacgcccagggctacctgctgtacagagacgtgaacaaccacagcatgaccgccatcagaatcagccccgagaccctggagcaggacggcaccgtgatgctgcccgactgccacaccgagggccagaacatcctgttcaccgacggcgagtacatcaaccagatcgccgccagcagagacgacggcttcgtggtgagaatcttcgccaccagcaccgagcccgtgctgcagcaggagctgcagctgaagctggccagaaagtgcctgcacgcctgcggcatcagcctgttcgacctggagaaggacctgcacatcatcagcaccggcttcgacgaggagagcgccatcctgggcgccggcagagagttcgccctgatgaagaccgccaacggcaagatctactacaccggcaagtaccagagcctgggcatcaagcagggcggccccagcgccggcaagtgggtggagctgcccatcaccaagagccccaagatcgtgcacttcagcgtgggccacgacggcagccacgccctgctggtggccgaggacggcagcatcttcttcaccggcagcgccagcaagggcgaggacggcgagagcaccaagagcagaagacagagcaagccctacaagcccaagaagatcatcaagatggagggcaagatcgtggtgtacaccgcctgcaacaacggcagcagcagcgtgatcagcaaggacggcgagctgtacatgttcggcaaggacgccatctacagcgacagcagcagcctggtgaccgacctgaagggccacttcgtgacccaggtggccatgggcaaggcccacacctgcgtgctgatgaagaacggcgaggtgtggaccttcggcgtgaacaacaagggccagtgcggcagagacaccggcgccatgaaccagggcggcaagggcttcggcgtggagaacatggccaccgccatggacgaggacctggaggaggagctggacgagaaggacgagaagagcatgatgtgcccccccggcatgcacaagtggaagctggagcagtgcatggtgtgcaccgtgtgcggcgactgcaccggctacggcgccagctgcgtgagcagcggcagacccgacagagtgcccggcggcatctgcggctgcggcagcggcgagagcggctgcgccgtgtgcggctgctgcaaggcctgcgccagagagctggacggccaggaggccagacagagaggcatcctggacgccgtgaaggagatgatccccctggacctgctgctggccgtgcccgtgcccggcgtgaacatcgaggagcacctgcagctgagacaggaggagaagagacagagagtgatcagaagacacagactggaggagggcagaggccccctggtgttcgccggccccatcttcatgaaccacagagagcaggccctggccagactgagaagccaccccgcccagctgaagcacaagagagacaagcacaaggacggcagcggcgagagaggcgagaaggacgccagcaagatcaccacctacccccccggcagcgtgagattcgactgcgagctgagagccgtgcaggtgagctgcggcttccaccacagcgtggtgctgatggagaacggcgacgtgtacaccttcggctacggccagcacggccagctgggccacggcgacgtgaacagcagaggctgccccaccctggtgcaggccctgcccggccccagcacccaggtgaccgccggcagcaaccacaccgccgtgctgctgatggacggccaggtgttcaccttcggcagcttcagcaagggccagctgggcagacccatcctggacgtgccctactggaacgccaagcccgcccccatgcccaacatcggcagcaagtacggcagaaaggccacctggatcggcgccagcggcgaccagaccttcctgagaatcgacgaggccctgatcaacagccacgtgctggccaccagcgagatcttcgccagcaagcacatcatcggcctggtgcccgccagcatcagcgagcccccccccttcaagtgcctgctgatcaacaaggtggacggcagctgcaagaccttcaacgacagcgagcaggaggacctgcagggcttcggcgtgtgcctggaccccgtgtacgacgtgatctggagattcagacccaacaccagagagctgtggtgctacaacgccgtggtggccgacgccagactgcccagcgccgccgacatgcagagcagatgcagcatcctgagccccgagctggccctgcccaccggcagcagagccctgaccaccagaagccacgccgccctgcacatcctgggctgcctggacaccctggccgccatgcaggacctgaagatgggcgtggccagcaccgaggaggagacccaggccgtgatgaaggtgtacagcaaggaggactacagcgtggtgaacagattcgagagccacggcggcggctggggctacagcgcccacagcgtggaggccatcagattcagcgccgacaccgacatcctgctgggcggcctgggcctgttcggcggcagaggcgagtacaccgccaagatcaagctgttcgagctgggccccgacggcggcgaccacgagaccgacggcgacctgctggccgagaccgacgtgctggcctacgactgcgccgccagagagaagtacgccatgatgttcgacgagcccgtgctgctgcaggccggctggtggtacgtggcctgggccagagtgagcggccccagcagcgactgcggcagccacggccaggccagcatcaccaccgacgacggcgtggtgttccagttcaagagcagcaagaagagcaacaacggcaccgacgtgaacgccggccagatcccccagctgctgtacagactgcccaccagcgacggcagcgccagcaagggcaagcagcagaccagcgagcccgtgcacatcctgaagagaagcttcgccagaaccgtgagcgtggagtgcttcgagagcctgctgagcatcctgcactggagctggaccaccctggtgctgggcgtggaggagctgagaggcctgaagggcttccagttcaccgccaccctgctggacctggagagactgagattcgtgggcacctgctgcctgagactgctgagagtgtacacctgcgagatctaccccgtgagcgccaccggcaaggccgtggtggaggagaccagcaagctggccgagtgcatcggcaagaccagaaccctgctgagaaagatcctgagcgagggcgtggaccactgcatggtgaagctggacaacgacccccagggctacctgagccagcccctgagcctgctggaggccgtgctgcaggagtgccacaacaccttcaccgcctgcttccacagcttctaccccacccccgccctgcagtgggcctgcctgtgcgacctgctgaactgcctggaccaggacatccaggaggccaacttcaagaccagcagcagcagactgctggccgccgtgatgagcgccctgtgccacaccagcgtgaagctgaccagcatcttccccatcgcctacgacggcgaggtgctgctgagaagcatcgtgaagcaggtgagcaccgagaacgacagcaccctggtgcacagattccccctgctggtggcccacatggagaagctgagccagagcgaggagaacatcagcggcatgaccagcttcagagaggtgctggagaagatgctggtgatcgtggtgctgcccgtgagaaacagcctgagaagagagaacgagctgttcagcagccacctggtgagcaacacctgcggcctgctggccagcatcgtgagcgagctgaccgccagcgccctgggcagcgaggtggacggcctgaacagcctgcacagcgtgaaggccagcgccaacagattcaccaagaccagccagggcagaagctggaacaccggcaacggcagccccgacgccatctgcttcagcgtggacaagcccggcatcgtggtggtgggcttcagcgtgtacggcggcggcggcatccacgagtacgagctggaggtgctggtggacgacagcgagcacgccggcgacagcacccacagccacagatggaccagcctggagctggtgaagggcacctacaccaccgacgacagccccagcgacatcgccgagatcagactggacaaggtggtgcccctgaaggagaacgtgaagtacgccgtgagactgagaaactacggcagcagaaccgccaacggcgacggcggcatgaccaccgtgcagtgccccgacggcgtgaccttcaccttcagcacctgcagcctgagcagcaacggcaccaaccagaccagaggccagatcccccagatcctgtactacagaagcgagttcgacggcgacctgcagagccagctgctgagcaaggccaacgaggaggacaagaactgcagcagagccctgagcgtggtgagcaccgtggtgagagccagcaaggacctgctgcacagagccctggccgtggacgccgacgacatccccgagctgctgagcagcagcagcctgttcagcatgctgctgcccctgatcatcgcctacatcggccccgtggccgccgccatccccaaggtggccgtggaggtgttcggcctggtgcagcagctgctgcccagcgtggccatcctgaaccagaagtacgccccccccgccttcaaccccaaccagagcaccgacagcaccaccggcaaccagcccgagcagggcctgagcgcctgcaccaccagcagccactacgccgtgatcgagagcgagcacccctacaagcccgcctgcgtgatgcactacaaggtgaccttccccgagtgcgtgagatggatgaccatcgagttcgacccccagtgcggcaccgcccagagcgaggacgtgctgagactgctgatccccgtgagaaccgtgcagaacagcggctacggccccaagctgaccagcgtgcacgagaacctgaacagctggatcgagctgaagaagttcagcggcagcagcggctggcccaccatggtgctggtgctgcccggcaacgaggccctgttcagcctggagaccgccagcgactacgtgaaggacgacaaggccagcttctacggcttcaagtgcttcgccatcggctacgagttcagccccggccccgacgagggcgtgatccagctggagaaggagctggccaacctgggcggcgtgtgcgccgccgccctgatgaagaaggacctggccctgcccatcggcaacgagctggaggaggacctggagatcctggaggaggccgccctgcaggtgtgcaagacccacagcggcatcctgggcaagggcctggccctgagccacagccccaccatcctggaggccctggagggcaacctgcccctgcagatccagagcaacgagcagagcttcctggacgacttcatcgcctgcgtgcccggcagcagcggcggcagactggccagatggctgcagcccgacagctacgccgacccccagaagaccagcctgatcctgaacaaggacgacatcagatgcggctggcccaccaccatcaccgtgcagaccaaggaccagtacggcgacgtggtgcacgtgcccaacatgaaggtggaggtgaaggccgtgcccgtgagccagaagaagatgagcctgcagcaggaccaggccaagaagccccagagaatccccggcagccccgccgtgaccgccgccagcagcaacaccgacatgacctacggcggcctggccagccccaagctggacgtgagctacgagcccatgatcgtgaaggaggccagatacatcgccatcaccatgatgaaggtgtacgagaactacagcttcgaggagctgagattcgccagccccacccccaagagacccagcgagaacatgctgatcagagtgaacaacgacggcacctactgcgccaactggacccccggcgccatcggcctgtacaccctgcacgtgaccatcgacggcatcgagatcgacgccggcctggaggtgaaggtgaaggacccccccaagggcatgatcccccccggcacccagctggtgaagcccaagagcgagccccagcccaacaaggtgagaaagttcgtggccaaggacagcgccggcctgagaatcagaagccaccccagcctgcagagcgagcagatcggcatcgtgaaggtgaacggcaccatcaccttcatcgacgagatccacaacgacgacggcgtgtggctgagactgaacgacgagaccatcaagaagtacgtgcccaacatgaacggctacaccgaggcctggtgcctgagcttcaaccagcacctgggcaagagcctgctggtgcccgtggacgagagcaagaccaacaccgacgacttcttcaaggacatcaacagctgctgcccccaggaggccaccatgcaggagcaggacatgcccttcctgagaggcggccccggcatgtacaaggtggtgaagaccggccccagcggccacaacatcagaagctgccccaacctgagaggcatccccatcggcatgctggtgctgggcaacaaggtgaaggccgtgggcgaggtgaccaacagcgagggcacctgggtgcagctggaccagaacagcatggtggagttctgcgagagcgacgagggcgaggcctggagcctggccagagacagaggcggcaaccagtacctgagacacgaggacgagcaggccctgctggaccagaacagccagacccccccccccagccccttcagcgtgcaggccttcaacaagggcgccagctgcagcgcccagggcttcgactacggcctgggcaacagcaagggcgacagaggcaacatcagcaccagcagcaagcccgccagcaccagcggcaagagcgagctgagcagcaagcacagcagaagcctgaagcccgacggcagaatgagcagaaccaccgccgaccagaagaagcccagaggcaccgagagcctgagcgccagcgagagcctgatcctgaagagcgacgccgccaagctgagaagcgacagccacagcagaagcctgagccccaaccacaacaccctgcagaccctgaagagcgacggcagaatgcccagcagcagcagagccgagagccccggccccggcagcagactgagcagccccaagcccaagaccctgcccgccaacagaagcagccccagcggcgccagcagccccagaagcagcagcccccacgacaagaacctgccccagaagagcaccgcccccgtgaagaccaagctggacccccccagagagagaagcaagagcgacagctacaccctggaccccgacaccctgagaaagaagaagatgcccctgaccgagcccctgagaggcagaagcaccagccccaagcccaagagcgtgcccaaggacagcaccgacagccccggcagcgagaacagagcccccagcccccacgtggtgcaggagaacctgcacagcgaggtggtggaggtgtgcaccagcagcaccctgaagaccaacagcctgaccgacagcacctgcgacgacagcagcgagttcaagagcgtggacgagggcagcaacaaggtgcacttcagcatcggcaaggcccccctgaaggacgagcaggagatgagagccagccccaagatcagcagaaagtgcgccaacagacacaccagacccaagaaggagaagagcagcttcctgttcaagggcgacggcagcaagcccctggagcccgccaagcaggccatgagccccagcgtggccgagtgcgccagagccgtgttcgccagcttcctgtggcacgagggcatcgtgcacgacgccatggcctgcagcagcttcctgaagttccaccccgagctgagcaaggagcacgcccccatcagaagcagcctgaacagccagcagcccaccgaggagaaggagaccaagctgaagaacagacacagcctggagatcagcagcgccctgaacatgttcaacatcgccccccacggccccgacatcagcaagatgggcagcatcaacaagaacaaggtgctgagcatgctgaaggagccccccctgcacgagaagtgcgaggacggcaagaccgagaccaccttcgagatgagcatgcacaacaccatgaagagcaagagccccctgcccctgaccctgcagcacctggtggccttctgggaggacatcagcctggccaccatcaaggccgccagccagaacatgatcttccccagccccggcagctgcgccgtgctgaagaagaaggagtgcgagaaggagaacaagaagagcaagaaggagaagaagaagaaggagaaggccgaggtgagacccagaggcaacctgttcggcgagatggcccagctggccgtgggcggccccgagaaggacaccatctgcgagctgtgcggcgagagccacccctaccccgtgacctaccacatgagacaggcccaccccggctgcggcagatacgccggcggccagggctacaacagcatcggccacttctgcggcggctgggccggcaactgcggcgacggcggcatcggcggcagcacctggtacctggtgtgcgacagatgcagagagaagtacctgagagagaagcaggccgccgccagagagaaggtgaagcagagcagaagaaagcccatgcaggtgaagacccccagagccctgcccaccatggaggcccaccaggtgatcaaggccaacgccctgttcctgctgagcctgagcagcgccgccgagcccagcatcctgtgctaccaccccgccaagcccttccagagccagctgcccagcgtgaaggagggcatcagcgaggacctgcccgtgaagatgccctgcctgtacctgcagaccctggccagacaccaccacgagaacttcgtgggctaccaggacgacaacctgttccaggacgagatgagatacctgagaagcaccagcgtgcccgccccctacatcagcgtgacccccgacgccagccccaacgtgttcgaggagcccgagagcaacatgaagagcatgccccccagcctggagaccagccccatcaccgacaccgacctggccaagagaaccgtgttccagagaagctacagcgtggtggccagcgagtacgacaagcagcacagcatcctgcccgccagagtgaaggccatccccagaagaagagtgaacagcggcgacaccgaggtgggcagcagcctgctgagacaccccagccccgagctgagcagactgatcagcgcccacagcagcctgagcaagggcgagagaaacttccagtggcccgtgctggccttcgtgatccagcaccacgacctggagggcctggagatcgccatgaagcaggccctgagaaagagcgcctgcagagtgttcgccatggaggccttcaactggctgctgtgcaacgtgatccagaccaccagcctgcacgacatcctgtggcacttcgtggccagcctgacccccgcccccgtggagcccgaggaggaggaggacgaggagaacaagaccagcaaggagaacagcgagcaggagaaggacaccagagtgtgcgagcaccccctgagcgacatcgtgatcgccggcgaggccgcccaccccctgccccacaccttccacagactgctgcagaccatcagcgacctgatgatgagcctgcccagcggcagcagcctgcagcagatggccctgagatgctggagcctgaagttcaagcagagcgaccaccagttcctgcaccagagcaacgtgttccaccacatcaacaacatcctgagcaagagcgacgacggcgacagcgaggagagcttcagcatcagcatccagagcggcttcgaggccatgagccaggagctgtgcatcgtgatgtgcctgaaggacctgaccagcatcgtggacatcaagaccagcagcagacccgccatgatcggcagcctgaccgacggcagcaccgagaccttctgggagagcggcgacgaggacaagaacaagaccaagaacatcaccatcaactgcgtgaagggcatcaacgccagatacgtgagcgtgcacgtggacaacagcagagacctgggcaacaaggtgaccagcatgaccttcctgaccggcaaggccgtggaggacctgtgcagaatcaagcaggtggacctggacagcagacacatcggctgggtgaccagcgagctgcccggcggcgacaaccacatcatcaagatcgagctgaagggccccgagaacaccctgagagtgagacaggtgaaggtgctgggctggaaggacggcgagagcaccaagatcgccggccagatcagcgccagcgtggcccagcagagaaactgcgaggccgagaccctgagagtgttcagactgatcaccagccaggtgttcggcaagctgatcagcggcgacgccgagcccacccccgagcaggaggagaaggccctgctgagcagccccgagggcgaggagaaggtgtacaacgccaccagcgacgccgacctgaaggagcacatggtgggcatcatcttcagcagaagcaagctgaccaacctgcagaagcaggtgtgcgcccacatcgtgcaggccatcagaatggaggccaccagagtgagagaggagtgggagcacgccatcagcagcaaggagaacgccaacagccagcccaacgacgaggacgccagcagcgacgcctactgcttcgagctgctgagcatggtgctggccctgagcggcagcaacgtgggcagacagtacctggcccagcagctgaccctgctgcaggacctgttcagcctgctgcacaccgccagccccagagtgcagagacaggtgaccagcctgctgagaagagtgctgcccgaggtgacccccagcagactggccagcatcatcggcgtgaagagcctgccccccgccgacatcagcgacatcatccacagcaccgagaagggcgactggaacaagctgggcatcctggacatgttcctgggctgcatcgccaaggccctgaccgtgcagctgaaggccaagggcaccaccatcaccggcaccgccggcaccaccgtgggcaagggcgtgaccaccgtgaccctgcccatgatcttcaacagcagctacctgagaagaggcgagagccactggtggatgaagggcagcacccccacccagatcagcgagatcatcatcaagctgatcaaggacatggccgccggccacctgagcgaggcctggagcagagtgaccaagaacgccatcgccgagaccatcatcgccctgaccaagatggaggaggagttcagaagccccgtgagatgcatcgccaccaccagactgtggctggccctggccagcctgtgcgtgctggaccaggaccacgtggacagactgagcagcggcagatggatgggcaaggacggccagcagaagcagatgcccatgtgcgacaaccacgacgacggcgagaccgccgccatcatcctgtgcaacgtgtgcggcaacctgtgcaccgactgcgacagattcctgcacctgcacagaagaaccaagacccaccagagacaggtgttcaaggaggaggaggaggccatcaaggtggacctgcacgagggctgcggcagaaccaagctgttctggctgatggccctggccgacagcaagaccatgaaggccatggtggagttcagagagcacaccggcaagcccaccaccagcagcagcgaggcctgcagattctgcggcagcagaagcggcaccgagctgagcgccgtgggcagcgtgtgcagcgacgccgactgccaggagtacgccaagatcgcctgcagcaagacccacccctgcggccacccctgcggcggcgtgaagaacgaggagcactgcctgccctgcctgcacggctgcgacaagagcgccaccagcctgaagcaggacgccgacgacatgtgcatgatctgcttcaccgaggccctgagcgccgcccccgccatccagctggactgcagccacatcttccacctgcagtgctgcagaagagtgctggagaacagatggctgggccccagaatcaccttcggcttcatcagctgccccatctgcaagaacaagatcaaccacatcgtgctgaaggacctgctggaccccatcaaggagctgtacgaggacgtgagaagaaaggccctgatgagactggagtacgagggcctgcacaagagcgaggccatcaccacccccggcgtgagattctacaacgaccccgccggctacgccatgaacagatacgcctactacgtgtgctacaagtgcagaaaggcctacttcggcggcgaggccagatgcgacgccgaggccggcagaggcgacgactacgaccccagagagctgatctgcggcgcctgcagcgacgtgagcagagcccagatgtgccccaagcacggcaccgacttcctggagtacaagtgcagatactgctgcagcgtggccgtgttcttctgcttcggcaccacccacttctgcaacgcctgccacgacgacttccagagaatgaccagcatccccaaggaggagctgccccactgccccgccggccccaagggcaagcagctggagggcaccgagtgccccctgcacgtggtgcacccccccaccggcgaggagttcgccctgggctgcggcgtgtgcagaaacgcccacaccttctag

SEQ ID NO: 11691 - DNA, 13923 bp, synthetic construct; identical to SEQ ID NO: 11688
  misc_feature 1..13923: note = Description of Artificial Sequence: Synthetic coding sequence
  source 1..13923: mol_type = other DNA

SEQ ID NO: 11692 - DNA, 930 bp, synthetic construct
  misc_feature 1..930: note = Description of Artificial Sequence: Synthetic coding sequence
  source 1..930: mol_type = other DNA
atgagacccgacagagccgaggcccccggcccccccgccatggccgccggcggccccggcgccggcagcgccgcccccgtgagcagcaccagcagcctgcccctggccgccctgaacatgagagtgagaagaagactgagcctgttcctgaacgtgagaacccaggtggccgccgactggaccgccctggccgaggagatggacttcgagtacctggagatcagacagctggagacccaggccgaccccaccggcagactgctggacgcctggcagggcagacccggcgccagcgtgggcagactgctggagctgctgaccaagctgggcagagacgacgtgctgctggagctgggccccagcatcgaggaggactgccagaagtacatcctgaagcagcagcaggaggaggccgagaagcccctgcaggtggccgccgtggacagcagcgtgcccagaaccgccgagctggccggcatcaccaccctggacgaccccctgggccacatgcccgagagattcgacgccttcatctgctactgccccagcgacatccagttcgtgcaggagatgatcagacagctggagcagaccaactacagactgaagctgtgcgtgagcgacagagacgtgctgcccggcacctgcgtgtggagcatcgccagcgagctgatcgagaagagatgcagaagaatggtggtggtggtgagcgacgactacctgcagagcaaggagtgcgacttccagaccaagttcgccctgagcctgagccccggcgcccaccagaagagactgatccccatcaagtacaaggccatgaagaaggagttccccagcatcctgagattcatcaccgtgtgcgactacaccaacccctgcaccaagagctggttctggaccagactggccaaggccctgagcctgccctag

SEQ ID NO: 11693 - DNA, 858 bp, synthetic construct
  misc_feature 1..858: note = Description of Artificial Sequence: Synthetic coding sequence
  source 1..858: mol_type = other DNA
atggccgccggcggccccggcgccggcagcgccgcccccgtgagcagcaccagcagcctgcccctggccgccctgaacatgagagtgagaagaagactgagcctgttcctgaacgtgagaacccaggtggccgccgactggaccgccctggccgaggagatggacttcgagtacctggagatcagacagctggagacccaggccgaccccaccggcgccagcgtgggcagactgctggagctgctgaccaagctgggcagagacgacgtgctgctggagctgggccccagcatcgaggaggactgccagaagtacatcctgaagcagcagcaggaggaggccgagaagcccctgcaggtggccgccgtggacagcagcgtgcccagaaccgccgagctggccggcatcaccaccctggacgaccccctgggccacatgcccgagagattcgacgccttcatctgctactgccccagcgacatccagttcgtgcaggagatgatcagacagctggagcagaccaactacagactgaagctgtgcgtgagcgacagagacgtgctgcccggcacctgcgtgtggagcatcgccagcgagctgatcgagaagagatgcagaagaatggtggtggtggtgagcgacgactacctgcagagcaaggagtgcgacttccagaccaagttcgccctgagcctgagccccggcgcccaccagaagagactgatccccatcaagtacaaggccatgaagaaggagttccccagcatcctgagattcatcaccgtgtgcgactacaccaacccctgcaccaagagctggttctggaccagactggccaaggccctgagcctgccctag

SEQ ID NO: 11694 - DNA, 954 bp, synthetic construct
  misc_feature 1..954: note = Description of Artificial Sequence: Synthetic coding sequence
  source 1..954: mol_type = other DNA
atgagacccgacagagccgaggcccccggcccccccgccatggccgccggcggccccggcgccggcagcgccgcccccgtgagcagcaccagcagcctgcccctggccgccctgaacatgagagtgagaagaagactgagcctgttcctgaacgtgagaacccaggtggccgccgactggaccgccctggccgaggagatggacttcgagtacctggagatcagacagctggagacccaggccgaccccaccggcagactgctggacgcctggcagggcagacccggcgccagcgtgggcagactgctggagctgctgaccaagctgggcagagacgacgtgctgctggagctgggccccagcatcgaggaggactgccagaagtacatcctgaagcagcagcaggaggaggccgagaagcccctgcaggtggccgccgtggacagcagcgtgcccagaaccgccgagctggccggcatcaccaccctggacgaccccctgggccacatgcccgagagattcgacgccttcatctgctactgccccagcgacatccagttcgtgcaggagatgatcagacagctggagcagaccaactacagactgaagctgtgcgtgagcgacagagacgtgctgcccggcacctgcgtgtggagcatcgccagcgagctgatcgagaagagactggccagaagacccagaggcggctgcagaagaatggtggtggtggtgagcgacgactacctgcagagcaaggagtgcgacttccagaccaagttcgccctgagcctgagccccggcgcccaccagaagagactgatccccatcaagtacaaggccatgaagaaggagttccccagcatcctgagattcatcaccgtgtgcgactacaccaacccctgcaccaagagctggttctggaccagactggccaaggccctgagcctgccctag

SEQ ID NO: 11695 - DNA, 510 bp, synthetic construct
  misc_feature 1..510: note = Description of Artificial Sequence: Synthetic coding sequence
  source 1..510: mol_type = other DNA
atggccgccggcggccccggcgccggcagcgccgcccccgtgagcagcaccagcagcctgcccctggccgccctgaacatgagagtgagaagaagactgagcctgttcctgaacgtgagaacccaggtggccgccgactggaccgccctggccgaggagatggacttcgagtacctggagatcagacagctggagacccaggccgaccccaccggcagactgctggacgcctggcagggcagacccggcgccagcgtgggcagactgctggagctgctgaccaagctgggcagagacgacgtgctgctggagctgggccccagcatcgaggaggactgccagaagtacatcctgaagcagcagcaggaggaggccgagaagcccctgcaggtggccgccgtggacagcagcgtgcccccccacctgatgaccccctggggcatctgcctgagcgtgagcatgcccagcagcgccatcgcccccgccaccagcagcctgtgcagaagatag

SEQ ID NO: 11696 - DNA, 963 bp, synthetic construct
  misc_feature 1..963: note = Description of Artificial Sequence: Synthetic coding sequence
  source 1..963: mol_type = other DNA
atggagctgctgagcccccccctgagagacgtggacctgaccgcccccgacggcagcctgtgcagcttcgccaccaccgacgacttctacgacgacccctgcttcgacagccccgacctgagattcttcgaggacctggaccccagactgatgcacgtgggcgccctgctgaagcccgaggagcacagccacttccccgccgccgtgcaccccgcccccggcgccagagaggacgagcacgtgagagcccccagcggccaccaccaggccggcagatgcctgctgtgggcctgcaaggcctgcaagagaaagaccaccaacgccgacagaagaaaggccgccaccatgagagagagaagaagactgagcaaggtgaacgaggccttcgagaccctgaagagatgcaccagcagcaaccccaaccagagactgcccaaggtggagatcctgagaaacgccatcagatacatcgagggcctgcaggccctgctgagagaccaggacgccgccccccccggcgccgccgccgccttctacgcccccggccccctgccccccggcagaggcggcgagcactacagcggcgacagcgacgccagcagccccagaagcaactgcagcgacggcatgatggactacagcggcccccccagcggcgccagaagaagaaactgctacgagggcgcctactacaacgaggcccccagcgagcccagacccggcaagagcgccgccgtgagcagcctggactgcctgagcagcatcgtggagagaatcagcaccgagagccccgccgcccccgccctgctgctggccgacgtgcccagcgagagcccccccagaagacaggaggccgccgcccccagcgagggcgagagcagcggcgaccccacccagagccccgacgccgccccccagtgccccgccggcgccaaccccaaccccatctaccaggtgctgtag

SEQ ID NO: 11697 - DNA, 5538 bp, synthetic construct
  misc_feature 1..5538: note = Description of Artificial Sequence: Synthetic coding sequence
  source 1..5538: mol_type = other DNA
atgggcgacgtgaagctggtggccagcagccacatcagcaagaccagcctgagcgtggaccccagcagagtggacagcatgcccctgaccgaggcccccgccttcatcctgccccccagaaacctgtgcatcaaggagggcgccaccgccaagttcgagggcagagtgagaggctaccccgagccccaggtgacctggcacagaaacggccagcccatcaccagcggcggcagattcctgctggactgcggcatcagaggcaccttcagcctggtgatccacgccgtgcacgaggaggacagaggcaagtacacctgcgaggccaccaacggcagcggcgccagacaggtgaccgtggagctgaccgtggagggcagcttcgccaagcagctgggccagcccgtggtgagcaagaccctgggcgacagattcagcgcccccgccgtggagaccagacccagcatctggggcgagtgcccccccaagttcgccaccaagctgggcagagtggtggtgaaggagggccagatgggcagattcagctgcaagatcaccggcagaccccagccccaggtgacctggctgaagggcaacgtgcccctgcagcccagcgccagagtgagcgtgagcgagaagaacggcatgcaggtgctggagatccacggcgtgaaccaggacgacgtgggcgtgtacacctgcctggtggtgaacggcagcggcaaggccagcatgagcgccgagctgagcatccagggcctggacagcgccaacagaagcttcgtgagagagaccaaggccaccaacagcgacgtgagaaaggaggtgaccaacgtgatcagcaaggagagcaagctggacagcctggaggccgccgccaagagcaagaactgcagcagcccccagagaggcggcagccccccctgggccgccaacagccagccccagccccccagagagagcaagctggagagctgcaaggacagccccagaaccgccccccagacccccgtgctgcagaagaccagcagcagcatcaccctgcaggccgccagagtgcagcccgagcccagagcccccggcctgggcgtgctgagccccagcggcgaggagagaaagagacccgccccccccagacccgccaccttccccaccagacagcccggcctgggcagccaggacgtggtgagcaaggccgccaacagaagaatccccatggagggccagagagacagcgccttccccaagttcgagagcaagccccagagccaggaggtgaaggagaaccagaccgtgaagttcagatgcgagggcctggccgtgatggaggtggcccccagcttcagcagcgtgctgaaggactgcgccgtgatcgagggccaggacttcgtgctgcagtgcagcgtgagaggcacccccgtgcccagaatcacctggctgctgaacggccagcccatccagtacgccagaagcacctgcgaggccggcgtggccgagctgcacatccaggacgccctgcccgaggaccacggcacctacacctgcctggccgagaacgccctgggccaggtgagctgcagcgcctgggtgaccgtgcacgagaagaagagcagcagaaagagcgagtacctgctgcccgtggcccccagcaagcccaccgcccccatcttcctgcagggcctgagcgacctgaaggtgatggacggcagccaggtgaccatgaccgtgcaggtgagcggcaaccccccccccgaggtgatctggctgcacaacggcaacgagatccaggagagcgaggacttccacttcgagcagagaggcacccagcacagcctgtgcatccaggaggtgttccccgaggacaccggcacctacacctgcgaggcctggaacagcgccggcgaggtgagaacccaggccgtgctgaccgtgcaggagccccacgacggcacccagccctggttcatcagcaagcccagaagcgtgaccgccagcctgggccagagcgtgctgatcagctgcgccatcgccggcgaccccttccccaccgtgcactggctgagagacggcaaggccctgtgcaaggacaccggccacttcgaggtgctgcagaacgaggacgtgttcaccctggtgctgaagaaggtgcagccctggcacgccggccagtacgagatcctgctgaagaacagagtgggcgagtgcagctgccaggtgagcctgatgctgcagaacagcagcgccagagccctgcccagaggcagagagcccgccagctgcgaggacctgtgcggcggcggcgtgggcgccgacggcggcggcagcgacagatacggcagcctgagacccggctggcccgccagaggccagggctggctggaggaggaggacggcgaggacgtgagaggcgtgctgaagagaagagtggagaccagacagcacaccgaggaggccatcagacagcaggaggtggagcagctggacttcagagacctgctgggcaagaaggtgagcaccaagaccctgagcgaggacgacctgaaggagatccccgccgagcagatggacttcagagccaacctgcagagacaggtgaagcccaagaccgtgagcgaggaggagagaaaggtgcacagcccccagcaggtggacttcagaagcgtgctggccaagaagggcaccagcaagacccccgtgcccgagaaggtgcccccccccaagcccgccacccccgacttcagaagcgtgctgggcggcaagaagaagctgcccgccgagaacggcagcagcagcgccgagaccctgaacgccaaggccgtggagagcagcaagcccctgagcaacgcccagcccagcggccccctgaagcccgtgggcaacgccaagcccgccgagaccctgaagcccatgggcaacgccaagcccgccgagaccctgaagcccatgggcaacgccaagcccgacgagaacctgaagagcgccagcaaggaggagctgaagaaggacgtgaagaacgacgtgaactgcaagagaggccacgccggcaccaccgacaacgagaagagaagcgagagccagggcaccgcccccgccttcaagcagaagctgcaggacgtgcacgtggccgagggcaagaagctgctgctgcagtgccaggtgagcagcgacccccccgccaccatcatctggaccctgaacggcaagaccctgaagaccaccaagttcatcatcctgagccaggagggcagcctgtgcagcgtgagcatcgagaaggccctgcccgaggacagaggcctgtacaagtgcgtggccaagaacgacgccggccaggccgagtgcagctgccaggtgaccgtggacgacgcccccgccagcgagaacaccaaggcccccgagatgaagagcagaagacccaagagcagcctgccccccgtgctgggcaccgagagcgacgccaccgtgaagaagaagcccgcccccaagaccccccccaaggccgccatgcccccccagatcatccagttccccgaggaccagaaggtgagagccggcgagagcgtggagctgttcggcaaggtgaccggcacccagcccatcacctgcacctggatgaagttcagaaagcagatccaggagagcgagcacatgaaggtggagaacagcgagaacggcagcaagctgaccatcctggccgccagacaggagcactgcggctgctacaccctgctggtggagaacaagctgggcagcagacaggcccaggtgaacctgaccgtggtggacaagcccgacccccccgccggcaccccctgcgccagcgacatcagaagcagcagcctgaccctgagctggtacggcagcagctacgacggcggcagcgccgtgcagagctacagcatcgagatctgggacagcgccaacaagacctggaaggagctggccacctgcagaagcaccagcttcaacgtgcaggacctgctgcccgaccacgagtacaagttcagagtgagagccatcaacgtgtacggcaccagcgagcccagccaggagagcgagctgaccaccgtgggcgagaagcccgaggagcccaaggacgaggtggaggtgagcgacgacgacgagaaggagcccgaggtggactacagaaccgtgaccatcaacaccgagcagaaggtgagcgacttctacgacatcgaggagagactgggcagcggcaagttcggccaggtgttcagactggtggagaagaagaccagaaaggtgtgggccggcaagttcttcaaggcctacagcgccaaggagaaggagaacatcagacaggagatcagcatcatgaactgcctgcaccaccccaagctggtgcagtgcgtggacgccttcgaggagaaggccaacatcgtgatggtgctggagatcgtgagcggcggcgagctgttcgagagaatcatcgacgaggacttcgagctgaccgagagagagtgcatcaagtacatgagacagatcagcgagggcgtggagtacatccacaagcagggcatcgtgcacctggacctgaagcccgagaacatcatgtgcgtgaacaagaccggcaccagaatcaagctgatcgacttcggcctggccagaagactggagaacgccggcagcctgaaggtgctgttcggcacccccgagttcgtggcccccgaggtgatcaactacgagcccatcggctacgccaccgacatgtggagcatcggcgtgatctgctacatcctggtgagcggcctgagccccttcatgggcgacaacgacaacgagaccctggccaacgtgaccagcgccacctgggacttcgacgacgaggccttcgacgagatcagcgacgacgccaaggacttcatcagcaacctgctgaagaaggacatgaagaacagactggactgcacccagtgcctgcagcacccctggctgatgaaggacaccaagaacatggaggccaagaagctgagcaaggacagaatgaagaagtacatggccagaagaaagtggcagaagaccggcaacgccgtgagagccatcggcagactgagcagcatggccatgatcagcggcctgagcggcagaaagagcagcaccggcagccccaccagccccctgaacgccgagaagctggagagcgaggaggacgtgagccaggccttcctggaggccgtggccgaggagaagccccacgtgaagccctacttcagcaagaccatcagagacctggaggtggtggagggcagcgccgccagattcgactgcaagatcgagggctaccccgaccccgaggtggtgtggttcaaggacgaccagagcatcagagagagcagacacttccagatcgactacgacgaggacggcaactgcagcctgatcatcagcgacgtgtgcggcgacgacgacgccaagtacacctgcaaggccgtgaacagcctgggcgaggccacctgcaccgccgagctgatcgtggagaccatggaggagggcgagggcgagggcgaggaggaggaggagtag

SEQ ID NO: 11698 - DNA, 2145 bp, synthetic construct
  misc_feature 1..2145: note = Description of Artificial Sequence: Synthetic coding sequence
  source 1..2145: mol_type = other DNA
atgaagagcagaagacccaagagcagcctgccccccgtgctgggcaccgagagcgacgccaccgtgaagaagaagcccgcccccaagaccccccccaaggccgccatgcccccccagatcatccagttccccgaggaccagaaggtgagagccggcgagagcgtggagctgttcggcaaggtgaccggcacccagcccatcacctgcacctggatgaagttcagaaagcagatccaggagagcgagcacatgaaggtggagaacagcgagaacggcagcaagctgaccatcctggccgccagacaggagcactgcggctgctacaccctgctggtggagaacaagctgggcagcagacaggcccaggtgaacctgaccgtggtggacaagcccgacccccccgccggcaccccctgcgccagcgacatcagaagcagcagcctgaccctgagctggtacggcagcagctacgacggcggcagcgccgtgcagagctacagcatcgagatctgggacagcgccaacaagacctggaaggagctggccacctgcagaagcaccagcttcaacgtgcaggacctgctgcccgaccacgagtacaagttcagagtgagagccatcaacgtgtacggcaccagcgagcccagccaggagagcgagctgaccaccgtgggcgagaagcccgaggagcccaaggacgaggtggaggtgagcgacgacgacgagaaggagcccgaggtggactacagaaccgtgaccatcaacaccgagcagaaggtgagcgacttctacgacatcgaggagagactgggcagcggcaagttcggccaggtgttcagactggtggagaagaagaccagaaaggtgtgggccggcaagttcttcaaggcctacagcgccaaggagaaggagaacatcagacaggagatcagcatcatgaactgcctgcaccaccccaagctggtgcagtgcgtggacgccttcgaggagaaggccaacatcgtgatggtgctggagatcgtgagcggcggcgagctgttcgagagaatcatcgacgaggacttcgagctgaccgagagagagtgcatcaagtacatgagacagatcagcgagggcgtggagtacatccacaagcagggcatcgtgcacctggacctgaagcccgagaacatcatgtgcgtgaacaagaccggcaccagaatcaagctgatcgacttcggcctggccagaagactggagaacgccggcagcctgaaggtgctgttcggcacccccgagttcgtggcccccgaggtgatcaactacgagcccatcggctacgccaccgacatgtggagcatcggcgtgatctgctacatcctggtgagcggcctgagccccttcatgggcgacaacgacaacgagaccctggccaacgtgaccagcgccacctgggacttcgacgacgaggccttcgacgagatcagcgacgacgccaaggacttcatcagcaacctgctgaagaaggacatgaagaacagactggactgcacccagtgcctgcagcacccctggctgatgaaggacaccaagaacatggaggccaagaagctgagcaaggacagaatgaagaagtacatggccagaagaaagtggcagaagaccggcaacgccgtgagagccatcggcagactgagcagcatggccatgatcagcggcctgagcggcagaaagagcagcaccggcagccccaccagccccctgaacgccgagaagctggagagcgaggaggacgtgagccaggccttcctggaggccgtggccgaggagaagccccacgtgaagccctacttcagcaagaccatcagagacctggaggtggtggagggcagcgccgccagattcgactgcaagatcgagggctaccccgaccccgaggtggtgtggttcaaggacgaccagagcatcagagagagcagacacttccagatcgactacgacgaggacggcaactgcagcctgatcatcagcgacgtgtgcggcgacgacgacgccaagtacacctgcaaggccgtgaacagcctgggcgaggccacctgcaccgccgagctgatcgtggagaccatggaggagggcgagggcgagggcgaggaggaggaggagtag

SEQ ID NO: 11699 - DNA, 5592 bp, synthetic construct
  misc_feature 1..5592: note = Description of Artificial Sequence: Synthetic coding sequence
  source 1..5592: mol_type = other DNA
atgggcgacgtgaagctggtggccagcagccacatcagcaagaccagcctgagcgtggaccccagcagagtggacagcatgcccctgaccgaggcccccgccttcatcctgccccccagaaacctgtgcatcaaggagggcgccaccgccaagttcgagggcagagtgagaggctaccccgagccccaggtgacctggcacagaaacggccagcccatcaccagcggcggcagattcctgctggactgcggcatcagaggcaccttcagcctggtgatccacgccgtgcacgaggaggacagaggcaagtacacctgcgaggccaccaacggcagcggcgccagacaggtgaccgtggagctgaccgtggagggcagcttcgccaagcagctgggccagcccgtggtgagcaagaccctgggcgacagattcagcgcccccgccgtggagaccagacccagcatctggggcgagtgcccccccaagttcgccaccaagctgggcagagtggtggtgaaggagggccagatgggcagattcagctgcaagatcaccggcagaccccagccccaggtgacctggctgaagggcaacgtgcccctgcagcccagcgccagagtgagcgtgagcgagaagaacggcatgcaggtgctggagatccacggcgtgaaccaggacgacgtgggcgtgtacacctgcctggtggtgaacggcagcggcaaggccagcatgagcgccgagctgagcatccagggcctggacagcgccaacagaagcttcgtgagagagaccaaggccaccaacagcgacgtgagaaaggaggtgaccaacgtgatcagcaaggagagcaagctggacagcctggaggccgccgccaagagcaagaactgcagcagcccccagagaggcggcagccccccctgggccgccaacagccagccccagccccccagagagagcaagctggagagctgcaaggacagccccagaaccgccccccagacccccgtgctgcagaagaccagcagcagcatcaccctgcaggccgccagagtgcagcccgagcccagagcccccggcctgggcgtgctgagccccagcggcgaggagagaaagagacccgccccccccagacccgccaccttccccaccagacagcccggcctgggcagccaggacgtggtgagcaaggccgccaacagaagaatccccatggagggccagagagacagcgccttccccaagttcgagagcaagccccagagccaggaggtgaaggagaaccagaccgtgaagttcagatgcgaggtgagcggcatccccaagcccgaggtggcctggttcctggagggcacccccgtgagaagacaggagggcagcatcgaggtgtacgaggacgccggcagccactacctgtgcctgctgaaggccagaaccagagacagcggcacctacagctgcaccgccagcaacgcccagggccagctgagctgcagctggaccctgcaggtggagagactggccgtgatggaggtggcccccagcttcagcagcgtgctgaaggactgcgccgtgatcgagggccaggacttcgtgctgcagtgcagcgtgagaggcacccccgtgcccagaatcacctggctgctgaacggccagcccatccagtacgccagaagcacctgcgaggccggcgtggccgagctgcacatccaggacgccctgcccgaggaccacggcacctacacctgcctggccgagaacgccctgggccaggtgagctgcagcgcctgggtgaccgtgcacgagaagaagagcagcagaaagagcgagtacctgctgcccgtggcccccagcaagcccaccgcccccatcttcctgcagggcctgagcgacctgaaggtgatggacggcagccaggtgaccatgaccgtgcaggtgagcggcaaccccccccccgaggtgatctggctgcacaacggcaacgagatccaggagagcgaggacttccacttcgagcagagaggcacccagcacagcctgtgcatccaggaggtgttccccgaggacaccggcacctacacctgcgaggcctggaacagcgccggcgaggtgagaacccaggccgtgctgaccgtgcaggagccccacgacggcacccagccctggttcatcagcaagcccagaagcgtgaccgccagcctgggccagagcgtgctgatcagctgcgccatcgccggcgaccccttccccaccgtgcactggctgagagacggcaaggccctgtgcaaggacaccggccacttcgaggtgctgcagaacgaggacgtgttcaccctggtgctgaagaaggtgcagccctggcacgccggccagtacgagatcctgctgaagaacagagtgggcgagtgcagctgccaggtgagcctgatgctgcagaacagcagcgccagagccctgcccagaggcagagagcccgccagctgcgaggacctgtgcggcggcggcgtgggcgccgacggcggcggcagcgacagatacggcagcctgagacccggctggcccgccagaggccagggctggctggaggaggaggacggcgaggacgtgagaggcgtgctgaagagaagagtggagaccagacagcacaccgaggaggccatcagacagcaggaggtggagcagctggacttcagagacctgctgggcaagaaggtgagcaccaagaccctgagcgaggacgacctgaaggagatccccgccgagcagatggacttcagagccaacctgcagagacaggtgaagcccaagaccgtgagcgaggaggagagaaaggtgcacagcccccagcaggtggacttcagaagcgtgctggccaagaagggcaccagcaagacccccgtgcccgagaaggtgcccccccccaagcccgccacccccgacttcagaagcgtgctgggcggcaagaagaagctgcccgccgagaacggcagcagcagcgccgagaccctgaacgccaaggccgtggagagcagcaagcccctgagcaacgcccagcccagcggccccctgaagcccgtgggcaacgccaagcccgccgagaccctgaagcccatgggcaacgccaagcccgccgagaccctgaagcccatgggcaacgccaagcccgacgagaacctgaagagcgccagcaaggaggagctgaagaaggacgtgaagaacgacgtgaactgcaagagaggccacgccggcaccaccgacaacgagaagagaagcgagagccagggcaccgcccccgccttcaagcagaagctgcaggacgtgcacgtggccgagggcaagaagctgctgctgcagtgccaggtgagcagcgacccccccgccaccatcatctggaccctgaacggcaagaccctgaagaccaccaagttcatcatcctgagccaggagggcagcctgtgcagcgtgagcatcgagaaggccctgcccgaggacagaggcctgtacaagtgcgtggccaagaacgacgccggccaggccgagtgcagctgccaggtgaccgtggacgacgcccccgccagcgagaacaccaaggcccccgagatgaagagcagaagacccaagagcagcctgccccccgtgctgggcaccgagagcgacgccaccgtgaagaagaagcccgcccccaagaccccccccaaggccgccatgcccccccagatcatccagttccccgaggaccagaaggtgagagccggcgagagcgtggagctgttcggcaaggtgaccggcacccagcccatcacctgcacctggatgaagttcagaaagcagatccaggagagcgagcacatgaaggtggagaacagcgagaacggcagcaagctgaccatcctggccgccagacaggagcactgcggctgctacaccctgctggtggagaacaagctgggcagcagacaggcccaggtgaacctgaccgtggtggacaagcccgacccccccgccggcaccccctgcgccagcgacatcagaagcagcagcctgaccctgagctggtacggcagcagctacgacggcggcagcgccgtgcagagctacagcatcgagatctgggacagcgccaacaagacctggaaggagctggccacctgcagaagcaccagcttcaacgtgcaggacctgctgcccgaccacgagtacaagttcagagtgagagccatcaacgtgtacggcaccagcgagcccagccaggagagcgagctgaccaccgtgggcgagaagcccgaggagcccaaggacgaggtggaggtgagcgacgacgacgagaaggagcccgaggtggactacagaaccgtgaccatcaacaccgagcagaaggtgagcgacttctacgacatcgaggagagactgggcagcggcaagttcggccaggtgttcagactggtggagaagaagaccagaaaggtgtgggccggcaagttcttcaaggcctacagcgccaaggagaaggagaacatcagacaggagatcagcatcatgaactgcctgcaccaccccaagctggtgcagtgcgtggacgccttcgaggagaaggccaacatcgtgatggtgctggagatcgtgagcggcggcgagctgttcgagagaatcatcgacgaggacttcgagctgaccgagagagagtgcatcaagtacatgagacagatcagcgagggcgtggagtacatccacaagcagggcatcgtgcacctggacctgaagcccgagaacatcatgtgcgtgaacaagaccggcaccagaatcaagctgatcgacttcggcctggccagaagactggagaacgccggcagcctgaaggtgctgttcggcacccccgagttcgtggcccccgaggtgatcaactacgagcccatcggctacgccaccgacatgtggagcatcggcgtgatctgctacatcctgaacagactggactgcacccagtgcctgcagcacccctggctgatgaaggacaccaagaacatggaggccaagaagctgagcaaggacagaatgaagaagtacatggccagaagaaagtggcagaagaccggcaacgccgtgagagccatcggcagactgagcagcatggccatgatcagcggcctgagcggcagaaagagcagcaccggcagccccaccagccccctgaacgccgagaagctggagagcgaggaggacgtgagccaggccttcctggaggccgtggccgaggagaagccccacgtgaagccctacttcagcaagaccatcagagacctggaggtggtggagggcagcgccgccagattcgactgcaagatcgagggctaccccgaccccgaggtggtgtggttcaaggacgaccagagcatcagagagagcagacacttccagatcgactacgacgaggacggcaactgcagcctgatcatcagcgacgtgtgcggcgacgacgacgccaagtacacctgcaaggccgtgaacagcctgggcgaggccacctgcaccgccgagctgatcgtggagaccatggaggagggcgagggcgagggcgaggaggaggaggagtag

SEQ ID NO: 11700 - DNA, 5745 bp, synthetic construct
  misc_feature 1..5745: note = Description of Artificial Sequence: Synthetic coding sequence
  source 1..5745: mol_type = other DNA
atgggcgacgtgaagctggtggccagcagccacatcagcaagaccagcctgagcgtggaccccagcagagtggacagcatgcccctgaccgaggcccccgccttcatcctgccccccagaaacctgtgcatcaaggagggcgccaccgccaagttcgagggcagagtgagaggctaccccgagccccaggtgacctggcacagaaacggccagcccatcaccagcggcggcagattcctgctggactgcggcatcagaggcaccttcagcctggtgatccacgccgtgcacgaggaggacagaggcaagtacacctgcgaggccaccaacggcagcggcgccagacaggtgaccgtggagctgaccgtggagggcagcttcgccaagcagctgggccagcccgtggtgagcaagaccctgggcgacagattcagcgcccccgccgtggagaccagacccagcatctggggcgagtgcccccccaagttcgccaccaagctgggcagagtggtggtgaaggagggccagatgggcagattcagctgcaagatcaccggcagaccccagccccaggtgacctggctgaagggcaacgtgcccctgcagcccagcgccagagtgagcgtgagcgagaagaacggcatgcaggtgctggagatccacggcgtgaaccaggacgacgtgggcgtgtacacctgcctggtggtgaacggcagcggcaaggccagcatgagcgccgagctgagcatccagggcctggacagcgccaacagaagcttcgtgagagagaccaaggccaccaacagcgacgtgagaaaggaggtgaccaacgtgatcagcaaggagagcaagctggacagcctggaggccgccgccaagagcaagaactgcagcagcccccagagaggcggcagccccccctgggccgccaacagccagccccagccccccagagagagcaagctggagagctgcaaggacagccccagaaccgccccccagacccccgtgctgcagaagaccagcagcagcatcaccctgcaggccgccagagtgcagcccgagcccagagcccccggcctgggcgtgctgagccccagcggcgaggagagaaagagacccgccccccccagacccgccaccttccccaccagacagcccggcctgggcagccaggacgtggtgagcaaggccgccaacagaagaatccccatggagggccagagagacagcgccttccccaagttcgagagcaagccccagagccaggaggtgaaggagaaccagaccgtgaagttcagatgcgaggtgagcggcatccccaagcccgaggtggcctggttcctggagggcacccccgtgagaagacaggagggcagcatcgaggtgtacgaggacgccggcagccactacctgtgcctgctgaaggccagaaccagagacagcggcacctacagctgcaccgccagcaacgcccagggccagctgagctgcagctggaccctgcaggtggagagactggccgtgatggaggtggcccccagcttcagcagcgtgctgaaggactgcgccgtgatcgagggccaggacttcgtgctgcagtgcagcgtgagaggcacccccgtgcccagaatcacctggctgctgaacggccagcccatccagtacgccagaagcacctgcgaggccggcgtggccgagctgcacatccaggacgccctgcccgaggaccacggcacctacacctgcctggccgagaacgccctgggccaggtgagctgcagcgcctgggtgaccgtgcacgagaagaagagcagcagaaagagcgagtacctgctgcccgtggcccccagcaagcccaccgcccccatcttcctgcagggcctgagcgacctgaaggtgatggacggcagccaggtgaccatgaccgtgcaggtgagcggcaaccccccccccgaggtgatctggctgcacaacggcaacgagatccaggagagcgaggacttccacttcgagcagagaggcacccagcacagcctgtgcatccaggaggtgttccccgaggacaccggcacctacacctgcgaggcctggaacagcgccggcgaggtgagaacccaggccgtgctgaccgtgcaggagccccacgacggcacccagccctggttcatcagcaagcccagaagcgtgaccgccagcctgggccagagcgtgctgatcagctgcgccatcgccggcgaccccttccccaccgtgcactggctgagagacggcaaggccctgtgcaaggacaccggccacttcgaggtgctgcagaacgaggacgtgttcaccctggtgctgaagaaggtgcagccctggcacgccggccagtacgagatcctgctgaagaacagagtgggcgagtgcagctgccaggtgagcctgatgctgcagaacagcagcgccagagccctgcccagaggcagagagcccgccagctgcgaggacctgtgcggcggcggcgtgggcgccgacggcggcggcagcgacagatacggcagcctgagacccggctggcccgccagaggccagggctggctggaggaggaggacggcgaggacgtgagaggcgtgctgaagagaagagtggagaccagacagcacaccgaggaggccatcagacagcaggaggtggagcagctggacttcagagacctgctgggcaagaaggtgagcaccaagaccctgagcgaggacgacctgaaggagatccccgccgagcagatggacttcagagccaacctgcagagacaggtgaagcccaagaccgtgagcgaggaggagagaaaggtgcacagcccccagcaggtggacttcagaagcgtgctggccaagaagggcaccagcaagacccccgtgcccgagaaggtgcccccccccaagcccgccacccccgacttcagaagcgtgctgggcggcaagaagaagctgcccgccgagaacggcagcagcagcgccgagaccctgaacgccaaggccgtggagagcagcaagcccctgagcaacgcccagcccagcggccccctgaagcccgtgggcaacgccaagcccgccgagaccctgaagcccatgggcaacgccaagcccgccgagaccctgaagcccatgggcaacgccaagcccgacgagaacctgaagagcgccagcaaggaggagctgaagaaggacgtgaagaacgacgtgaactgcaagagaggccacgccggcaccaccgacaacgagaagagaagcgagagccagggcaccgcccccgccttcaagcagaagctgcaggacgtgcacgtggccgagggcaagaagctgctgctgcagtgccaggtgagcagcgacccccccgccaccatcatctggaccctgaacggcaagaccctgaagaccaccaagttcatcatcctgagccaggagggcagcctgtgcagcgtgagcatcgagaaggccctgcccgaggacagaggcctgtacaagtgcgtggccaagaacgacgccggccaggccgagtgcagctgccaggtgaccgtggacgacgcccccgccagcgagaacaccaaggcccccgagatgaagagcagaagacccaagagcagcctgccccccgtgctgggcaccgagagcgacgccaccgtgaagaagaagcccgcccccaagaccccccccaaggccgccatgcccccccagatcatccagttccccgaggaccagaaggtgagagccggcgagagcgtggagctgttcggcaaggtgaccggcacccagcccatcacctgcacctggatgaagttcagaaagcagatccaggagagcgagcacatgaaggtggagaacagcgagaacggcagcaagctgaccatcctggccgccagacaggagcactgcggctgctacaccctgctggtggagaacaagctgggcagcagacaggcccaggtgaacctgaccgtggtggacaagcccgacccccccgccggcaccccctgcgccagcgacatcagaagcagcagcctgaccctgagctggtacggcagcagctacgacggcggcagcgccgtgcagagctacagcatcgagatctgggacagcgccaacaagacctggaaggagctggccacctgcagaagcaccagcttcaacgtgcaggacctgctgcccgaccacgagtacaagttcagagtgagagccatcaacgtgtacggcaccagcgagcccagccaggagagcgagctgaccaccgtgggcgagaagcccgaggagcccaaggacgaggtggaggtgagcgacgacgacgagaaggagcccgaggtggactacagaaccgtgaccatcaacaccgagcagaaggtgagcgacttctacgacatcgaggagagactgggcagcggcaagttcggccaggtgttcagactggtggagaagaagaccagaaaggtgtgggccggcaagttcttcaaggcctacagcgccaaggagaaggagaacatcagacaggagatcagcatcatgaactgcctgcaccaccccaagctggtgcagtgcgtggacgccttcgaggagaaggccaacatcgtgatggtgctggagatcgtgagcggcggcgagctgttcgagagaatcatcgacgaggacttcgagctgaccgagagagagtgcatcaagtacatgagacagatcagcgagggcgtggagtacatccacaagcagggcatcgtgcacctggacctgaagcccgagaacatcatgtgcgtgaacaagaccggcaccagaatcaagctgatcgacttcggcctggccagaagactggagaacgccggcagcctgaaggtgctgttcggcacccccgagttcgtggcccccgaggtgatcaactacgagcccatcggctacgccaccgacatgtggagcatcggcgtgatctgctacatcctggtgagcggcctgagccccttcatgggcgacaacgacaacgagaccctggccaacgtgaccagcgccacctgggacttcgacgacgaggccttcgacgagatcagcgacgacgccaaggacttcatcagcaacctgctgaagaaggacatgaagaacagactggactgcacccagtgcctgcagcacccctggctgatgaaggacaccaagaacatggaggccaagaagctgagcaaggacagaatgaagaagtacatggccagaagaaagtggcagaagaccggcaacgccgtgagagccatcggcagactgagcagcatggccatgatcagcggcctgagcggcagaaagagcagcaccggcagccccaccagccccctgaacgccgagaagctggagagcgaggaggacgtgagccaggccttcctggaggccgtggccgaggagaagccccacgtgaagccctacttcagcaagaccatcagagacctggaggtggtggagggcagcgccgccagattcgactgcaagatcgagggctaccccgaccccgaggtggtgtggttcaaggacgaccagagcatcagagagagcagacacttccagatcgactacgacgaggacggcaactgcagcctgatcatcagcgacgtgtgcggcgacgacgacgccaagtacacctgcaaggccgtgaacagcctgggcgaggccacctgcaccgccgagctgatcgtggagaccatggaggagggcgagggcgagggcgaggaggaggaggagtag

SEQ ID NO: 11701 - DNA, 231 bp, synthetic construct
  misc_feature 1..231: note = Description of Artificial Sequence: Synthetic coding sequence
  source 1..231: mol_type = other DNA
atgggcgacgtgaagctggtggccagcagccacatcagcaagaccagcctgagcgtggaccccagcagagtggacagcatgcccctgaccgaggcccccgccttcatcctgccccccagaaacctgtgcatcaaggagggcgccaccgccaagttcgagggcagagtgagaggctaccccgagccccaggtgacctggcacagaaacggccagcccatcaccagcggctag

SEQ ID NO: 11702 - DNA, 5592 bp, synthetic construct; identical to SEQ ID NO: 11699
  misc_feature 1..5592: note = Description of Artificial Sequence: Synthetic coding sequence
  source 1..5592: mol_type = other DNA

SEQ ID NO: 11703 - DNA, 465 bp, synthetic construct
  misc_feature 1..465: note = Description of Artificial Sequence: Synthetic coding sequence
  source 1..465: mol_type = other DNA
atggccatgatcagcggcctgagcggcagaaagagcagcaccggcagccccaccagccccctgaacgccgagaagctggagagcgaggaggacgtgagccaggccttcctggaggccgtggccgaggagaagccccacgtgaagccctacttcagcaagaccatcagagacctggaggtggtggagggcagcgccgccagattcgactgcaagatcgagggctaccccgaccccgaggtggtgtggttcaaggacgaccagagcatcagagagagcagacacttccagatcgactacgacgaggacggcaactgcagcctgatcatcagcgacgtgtgcggcgacgacgacgccaagtacacctgcaaggccgtgaacagcctgggcgaggccacctgcaccgccgagctgatcgtggagaccatggaggagggcgagggcgagggcgaggaggaggaggagtag

SEQ ID NO: 11704 - DNA, 5745 bp, synthetic construct; identical to SEQ ID NO: 11700
  misc_feature 1..5745: note = Description of Artificial Sequence: Synthetic coding sequence
  source 1..5745: mol_type = other DNA

SEQ ID NO: 11705 - DNA, 5931 bp, synthetic construct
  misc_feature 1..5931: note = Description of Artificial Sequence: Synthetic coding sequence
  source 1..5931: mol_type = other DNA
atggcccagagaaccggcctggaggaccccgagagatacctgttcgtggacagagccgtgatctacaaccccgccacccaggccgactggaccgccaagaagctggtgtggatccccagcgagagacacggcttcgaggccgccagcatcaaggaggagagaggcgacgaggtgatggtggagctggccgagaacggcaagaaggccatggtgaacaaggacgacatccagaagatgaacccccccaagttcagcaaggtggaggacatggccgagctgacctgcctgaacgaggccagcgtgctgcacaacctgaaggacagatactacagcggcctgatctacacctacagcggcctgttctgcgtggtgatcaacccctacaagaacctgcccatctacagcgagaacatcatcgagatgtacagaggcaagaagagacacgagatgcccccccacatctacgccatcagcgagagcgcctacagatgcatgctgcaggacagagaggaccagagcatcctgtgcaccggcgagagcggcgccggcaagaccgagaacaccaagaaggtgatccagtacctggcccacgtggccagcagccacaagggcagaaaggaccacaacatccccggcgagctggagagacagctgctgcaggccaaccccatcctggagagcttcggcaacgccaagaccgtgaagaacgacaacagcagcagattcggcaagttcatcagaatcaacttcgacgtgaccggctacatcgtgggcgccaacatcgagacctacctgctggagaagagcagagccgtgagacaggccaaggacgagagaaccttccacatcttctaccagctgctgagcggcgccggcgagcacctgaagagcgacctgctgctggagggcttcaacaactacagattcctgagcaacggctacatccccatccccggccagcaggacaaggacaacttccaggagaccatggaggccatgcacatcatgggcttcagccacgaggagatcctgagcatgctgaaggtggtgagcagcgtgctgcagttcggcaacatcagcttcaagaaggagagaaacaccgaccaggccagcatgcccgagaacaccgtggcccagaagctgtgccacctgctgggcatgaacgtgatggagttcaccagagccatcctgacccccagaatcaaggtgggcagagactacgtgcagaaggcccagaccaaggagcaggccgacttcgccgtggaggccctggccaaggccacctacgagagactgttcagatggctggtgcacagaatcaacaaggccctggacagaaccaagagacagggcgccagcttcatcggcatcctggacatcgccggcttcgagatcttcgagctgaacagcttcgagcagctgtgcatcaactacaccaacgagaagctgcagcagctgttcaaccacaccatgttcatcctggagcaggaggagtaccagagagagggcatcgagtggaacttcatcgacttcggcctggacctgcagccctgcatcgacctgatcgagagacccgccaacccccccggcgtgctggccctgctggacgaggagtgctggttccccaaggccaccgacaagaccttcgtggagaagctggtgcaggagcagggcagccacagcaagttccagaagcccagacagctgaaggacaaggccgacttctgcatcatccactacgccggcaaggtggactacaaggccgacgagtggctgatgaagaacatggaccccctgaacgacaacgtggccaccctgctgcaccagagcagcgacagattcgtggccgagctgtggaaggacgtggacagaatcgtgggcctggaccaggtgaccggcatgaccgagaccgccttcggcagcgcctacaagaccaagaagggcatgttcagaaccgtgggccagctgtacaaggagagcctgaccaagctgatggccaccctgagaaacaccaaccccaacttcgtgagatgcatcatccccaaccacgagaagagagccggcaagctggacccccacctggtgctggaccagctgagatgcaacggcgtgctggagggcatcagaatctgcagacagggcttccccaacagaatcgtgttccaggagttcagacagagatacgagatcctgacccccaacgccatccccaagggcttcatggacggcaagcaggcctgcgagagaatgatcagagccctggagctggaccccaacctgtacagaatcggccagagcaagatcttcttcagagccggcgtgctggcccacctggaggaggagagagacctgaagatcaccgacatcatcatcttcttccaggccgtgtgcagaggctacctggccagaaaggccttcgccaagaagcagcagcagctgagcgccctgaaggtgctgcagagaaactgcgccgcctacctgaagctgagacactggcagtggtggagagtgttcaccaaggtgaagcccctgctgcaggtgaccagacaggaggaggagctgcaggccaaggacgaggagctgctgaaggtgaaggagaagcagaccaaggtggagggcgagctggaggagatggagagaaagcaccagcagctgctggaggagaagaacatcctggccgagcagctgcaggccgagaccgagctgttcgccgaggccgaggagatgagagccagactggccgccaagaagcaggagctggaggagatcctgcacgacctggagagcagagtggaggaggaggaggagagaaaccagatcctgcagaacgagaagaagaagatgcaggcccacatccaggacctggaggagcagctggacgaggaggagggcgccagacagaagctgcagctggagaaggtgaccgccgaggccaagatcaagaagatggaggaggagatcctgctgctggaggaccagaacagcaagttcatcaaggagaagaagctgatggaggacagaatcgccgagtgcagcagccagctggccgaggaggaggagaaggccaagaacctggccaagatcagaaacaagcaggaggtgatgatcagcgacctggaggagagactgaagaaggaggagaagaccagacaggagctggagaaggccaagagaaagctggacggcgagaccaccgacctgcaggaccagatcgccgagctgcaggcccagatcgacgagctgaagctgcagctggccaagaaggaggaggagctgcagggcgccctggccagaggcgacgacgagaccctgcacaagaacaacgccctgaaggtggtgagagagctgcaggcccagatcgccgagctgcaggaggacttcgagagcgagaaggccagcagaaacaaggccgagaagcagaagagagacctgagcgaggagctggaggccctgaagaccgagctggaggacaccctggacaccaccgccgcccagcaggagctgagaaccaagagagagcaggaggtggccgagctgaagaaggccctggaggaggagaccaagaaccacgaggcccagatccaggacatgagacagagacacgccaccgccctggaggagctgagcgagcagctggagcaggccaagagattcaaggccaacctggagaagaacaagcagggcctggagaccgacaacaaggagctggcctgcgaggtgaaggtgctgcagcaggtgaaggccgagagcgagcacaagagaaagaagctggacgcccaggtgcaggagctgcacgccaaggtgagcgagggcgacagactgagagtggagctggccgagaaggccagcaagctgcagaacgagctggacaacgtgagcaccctgctggaggaggccgagaagaagggcatcaagttcgccaaggacgccgccagcctggagagccagctgcaggacacccaggagctgctgcaggaggagaccagacagaagctgaacctgagcagcagaatcagacagctggaggaggagaagaacagcctgcaggagcagcaggaggaggaggaggaggccagaaagaacctggagaagcaggtgctggccctgcagagccagctggccgacaccaagaagaaggtggacgacgacctgggcaccatcgagagcctggaggaggccaagaagaagctgctgaaggacgccgaggccctgagccagagactggaggagaaggccctggcctacgacaagctggagaagaccaagaacagactgcagcaggagctggacgacctgaccgtggacctggaccaccagagacaggtggccagcaacctggagaagaagcagaagaagttcgaccagctgctggccgaggagaagagcatcagcgccagatacgccgaggagagagacagagccgaggccgaggccagagagaaggagaccaaggccctgagcctggccagagccctggaggaggccctggaggccaaggaggagttcgagagacagaacaagcagctgagagccgacatggaggacctgatgagcagcaaggacgacgtgggcaagaacgtgcacgagctggagaagagcaagagagccctggagcagcaggtggaggagatgagaacccagctggaggagctggaggacgagctgcaggccaccgaggacgccaagctgagactggaggtgaacatgcaggccatgaaggcccagttcgagagagacctgcagaccagagacgagcagaacgaggagaagaagagactgctgatcaagcaggtgagagagctggaggccgagctggaggacgagagaaagcagagagccctggccgtggccagcaagaagaagatggagatcgacctgaaggacctggaggcccagatcgaggccgccaacaaggccagagacgaggtgatcaagcagctgagaaagctgcaggcccagatgaaggactaccagagagagctggaggaggccagagccagcagagacgagatcttcgcccagagcaaggagagcgagaagaagctgaagagcctggaggccgagatcctgcagctgcaggaggagctggccagcagcgagagagccagaagacacgccgagcaggagagagacgagctggccgacgagatcaccaacagcgccagcggcaagagcgccctgctggacgagaagagaagactggaggccagaatcgcccagctggaggaggagctggaggaggagcagagcaacatggagctgctgaacgacagattcagaaagaccaccctgcaggtggacaccctgaacgccgagctggccgccgagagaagcgccgcccagaagagcgacaacgccagacagcagctggagagacagaacaaggagctgaaggccaagctgcaggagctggagggcgccgtgaagagcaagttcaaggccaccatcagcgccctggaggccaagatcggccagctggaggagcagctggagcaggaggccaaggagagagccgccgccaacaagctggtgagaagaaccgagaagaagctgaaggagatcttcatgcaggtggaggacgagagaagacacgccgaccagtacaaggagcagatggagaaggccaacgccagaatgaagcagctgaagagacagctggaggaggccgaggaggaggccaccagagccaacgccagcagaagaaagctgcagagagagctggacgacgccaccgaggccaacgagggcctgagcagagaggtgagcaccctgaagaacagactgagaagaggcggccccatcagcttcagcagcagcagaagcggcagaagacagctgcacctggagggcgccagcctggagctgagcgacgacgacaccgagagcaagaccagcgacgtgaacgagacccagcccccccagagcgagtag

SEQ ID NO: 11706 - DNA, 6024 bp, synthetic construct
  misc_feature 1..6024: note = Description of Artificial Sequence: Synthetic coding sequence
  source 1..6024: mol_type = other DNA
atggcccagagaaccggcctggaggaccccgagagatacctgttcgtggacagagccgtgatctacaaccccgccacccaggccgactggaccgccaagaagctggtgtggatccccagcgagagacacggcttcgaggccgccagcatcaaggaggagagaggcgacgaggtgatggtggagctggccgagaacggcaagaaggccatggtgaacaaggacgacatccagaagatgaacccccccaagttcagcaaggtggaggacatggccgagctgacctgcctgaacgaggccagcgtgctgcacaacctgaaggacagatactacagcggcctgatctacacctacagcggcctgttctgcgtggtgatcaacccctacaagaacctgcccatctacagcgagaacatcatcgagatgtacagaggcaagaagagacacgagatgcccccccacatctacgccatcagcgagagcgcctacagatgcatgctgcaggacagagaggaccagagcatcctgtgcaccggcgagagcggcgccggcaagaccgagaacaccaagaaggtgatccagtacctggcccacgtggccagcagccacaagggcagaaaggaccacaacatcccccaggagagccccaagcccgtgaagcaccagggcgagctggagagacagctgctgcaggccaaccccatcctggagagcttcggcaacgccaagaccgtgaagaacgacaacagcagcagattcggcaagttcatcagaatcaacttcgacgtgaccggctacatcgtgggcgccaacatcgagacctacctgctggagaagagcagagccgtgagacaggccaaggacgagagaaccttccacatcttctaccagctgctgagcggcgccggcgagcacctgaagagcgacctgctgctggagggcttcaacaactacagattcctgagcaacggctacatccccatccccggccagcaggacaaggacaacttccaggagaccatggaggccatgcacatcatgggcttcagccacgaggagatcctgagcatgctgaaggtggtgagcagcgtgctgcagttcggcaacatcagcttcaagaaggagagaaacaccgaccaggccagcatgcccgagaacaccgtggcccagaagctgtgccacctgctgggcatgaacgtgatggagttcaccagagccatcctgacccccagaatcaaggtgggcagagactacgtgcagaaggcccagaccaaggagcaggccgacttcgccgtggaggccctggccaaggccacctacgagagactgttcagatggctggtgcacagaatcaacaaggccctggacagaaccaagagacagggcgccagcttcatcggcatcctggacatcgccggcttcgagatcttcgagctgaacagcttcgagcagctgtgcatcaactacaccaacgagaagctgcagcagctgttcaaccacaccatgttcatcctggagcaggaggagtaccagagagagggcatcgagtggaacttcatcgacttcggcctggacctgcagccctgcatcgacctgatcgagagacccgccaacccccccggcgtgctggccctgctggacgaggagtgctggttccccaaggccaccgacaagaccttcgtggagaagctggtgcaggagcagggcagccacagcaagttccagaagcccagacagctgaaggacaaggccgacttctgcatcatccactacgccggcaaggtggactacaaggccgacgagtggctgatgaagaacatggaccccctgaacgacaacgtggccaccctgctgcaccagagcagcgacagattcgtggccgagctgtggaaggacgagatccagaacatccagagagccagcttctacgacagcgtgagcggcctgcacgagccccccgtggacagaatcgtgggcctggaccaggtgaccggcatgaccgagaccgccttcggcagcgcctacaagaccaagaagggcatgttcagaaccgtgggccagctgtacaaggagagcctgaccaagctgatggccaccctgagaaacaccaaccccaacttcgtgagatgcatcatccccaaccacgagaagagagccggcaagctggacccccacctggtgctggaccagctgagatgcaacggcgtgctggagggcatcagaatctgcagacagggcttccccaacagaatcgtgttccaggagttcagacagagatacgagatcctgacccccaacgccatccccaagggcttcatggacggcaagcaggcctgcgagagaatgatcagagccctggagctggaccccaacctgtacagaatcggccagagcaagatcttcttcagagccggcgtgctggcccacctggaggaggagagagacctgaagatcaccgacatcatcatcttcttccaggccgtgtgcagaggctacctggccagaaaggccttcgccaagaagcagcagcagctgagcgccctgaaggtgctgcagagaaactgcgccgcctacctgaagctgagacactggcagtggtggagagtgttcaccaaggtgaagcccctgctgcaggtgaccagacaggaggaggagctgcaggccaaggacgaggagctgctgaaggtgaaggagaagcagaccaaggtggagggcgagctggaggagatggagagaaagcaccagcagctgctggaggagaagaacatcctggccgagcagctgcaggccgagaccgagctgttcgccgaggccgaggagatgagagccagactggccgccaagaagcaggagctggaggagatcctgcacgacctggagagcagagtggaggaggaggaggagagaaaccagatcctgcagaacgagaagaagaagatgcaggcccacatccaggacctggaggagcagctggacgaggaggagggcgccagacagaagctgcagctggagaaggtgaccgccgaggccaagatcaagaagatggaggaggagatcctgctgctggaggaccagaacagcaagttcatcaaggagaagaagctgatggaggacagaatcgccgagtgcagcagccagctggccgaggaggaggagaaggccaagaacctggccaagatcagaaacaagcaggaggtgatgatcagcgacctggaggagagactgaagaaggaggagaagaccagacaggagctggagaaggccaagagaaagctggacggcgagaccaccgacctgcaggaccagatcgccgagctgcaggcccagatcgacgagctgaagctgcagctggccaagaaggaggaggagctgcagggcgccctggccagaggcgacgacgagaccctgcacaagaacaacgccctgaaggtggtgagagagctgcaggcccagatcgccgagctgcaggaggacttcgagagcgagaaggccagcagaaacaaggccgagaagcagaagagagacctgagcgaggagctggaggccctgaagaccgagctggaggacaccctggacaccaccgccgcccagcaggagctgagaaccaagagagagcaggaggtggccgagctgaagaaggccctggaggaggagaccaagaaccacgaggcccagatccaggacatgagacagagacacgccaccgccctggaggagctgagcgagcagctggagcaggccaagagattcaaggccaacctggagaagaacaagcagggcctggagaccgacaacaaggagctggcctgcgaggtgaaggtgctgcagcaggtgaaggccgagagcgagcacaagagaaagaagctggacgcccaggtgcaggagctgcacgccaaggtgagcgagggcgacagactgagagtggagctggccgagaaggccagcaagctgcagaacgagctggacaacgtgagcaccctgctggaggaggccgagaagaagggcatcaagttcgccaaggacgccgccagcctggagagccagctgcaggacacccaggagctgctgcaggaggagaccagacagaagctgaacctgagcagcagaatcagacagctggaggaggagaagaacagcctgcaggagcagcaggaggaggaggaggaggccagaaagaacctggagaagcaggtgctggccctgcagagccagctggccgacaccaagaagaaggtggacgacgacctgggcaccatcgagagcctggaggaggccaagaagaagctgctgaaggacgccgaggccctgagccagagactggaggagaaggccctggcctacgacaagctggagaagaccaagaacagactgcagcaggagctggacgacctgaccgtggacctggaccaccagagacaggtggccagcaacctggagaagaagcagaagaagttcgaccagctgctggccgaggagaagagcatcagcgccagatacgccgaggagagagacagagccgaggccgaggccagagagaaggagaccaaggccctgagcctggccagagccctggaggaggccctggaggccaaggaggagttcgagagacagaacaagcagctgagagccgacatggaggacctgatgagcagcaaggacgacgtgggcaagaacgtgcacgagctggagaagagcaagagagccctggagcagcaggtggaggagatgagaacccagctggaggagctggaggacgagctgcaggccaccgaggacgccaagctgagactggaggtgaacatgcaggccatgaaggcccagttcgagagagacctgcagaccagagacgagcagaacgaggagaagaagagactgctgatcaagcaggtgagagagctggaggccgagctggaggacgagagaaagcagagagccctggccgtggccagcaagaagaagatggagatcgacctgaaggacctggaggcccagatcgaggccgccaacaaggccagagacgaggtgatcaagcagctgagaaagctgcaggcccagatgaaggactaccagagagagctggaggaggccagagccagcagagacgagatcttcgcccagagcaaggagagcgagaagaagctgaagagcctggaggccgagatcctgcagctgcaggaggagctggccagcagcgagagagccagaagacacgccgagcaggagagagacgagctggccgacgagatcaccaacagcgccagcggcaagagcgccctgctggacgagaagagaagactggaggccagaatcgcccagctggaggaggagctggaggaggagcagagcaacatggagctgctgaacgacagattcagaaagaccaccctgcaggtggacaccctgaacgccgagctggccgccgagagaagcgccgcccagaagagcgacaacgccagacagcagctggagagacagaacaaggagctgaaggccaagctgcaggagctggagggcgccgtgaagagcaagttcaaggccaccatcagcgccctggaggccaagatcggccagctggaggagcagctggagcaggaggccaaggagagagccgccgccaacaagctggtgagaagaaccgagaagaagctgaaggagatcttcatgcaggtggaggacgagagaagacacgccgaccagtacaaggagcagatggagaaggccaacgccagaatgaagcagctgaagagacagctggaggaggccgaggaggaggccaccagagccaacgccagcagaagaaagctgcagagagagctggacgacgccaccgaggccaacgagggcctgagcagagaggtgagcaccctgaagaacagactgagaagaggcggccccatcagcttcagcagcagcagaagcggcagaagacagctgcacctggagggcgccagcctggagctgagcgacgacgacaccgagagcaagaccagcgacgtgaacgagacccagcccccccagagcgagtag

SEQ ID NO: 11707 - DNA, 5979 bp, synthetic construct
  misc_feature 1..5979: note = Description of Artificial Sequence: Synthetic coding sequence
  source 1..5979: mol_type = other DNA
atggcccagagaaccggcctggaggaccccgagagatacctgttcgtggacagagccgtgatctacaaccccgccacccaggccgactggaccgccaagaagctggtgtggatccccagcgagagacacggcttcgaggccgccagcatcaaggaggagagaggcgacgaggtgatggtggagctggccgagaacggcaagaaggccatggtgaacaaggacgacatccagaagatgaacccccccaagttcagcaaggtggaggacatggccgagctgacctgcctgaacgaggccagcgtgctgcacaacctgaaggacagatactacagcggcctgatctacacctacagcggcctgttctgcgtggtgatcaacccctacaagaacctgcccatctacagcgagaacatcatcgagatgtacagaggcaagaagagacacgagatgcccccccacatctacgccatcagcgagagcgcctacagatgcatgctgcaggacagagaggaccagagcatcctgtgcaccggcgagagcggcgccggcaagaccgagaacaccaagaaggtgatccagtacctggcccacgtggccagcagccacaagggcagaaaggaccacaacatcccccaggagagccccaagcccgtgaagcaccaggccagcgccctgctgtacggcgagctggagagacagctgctgcaggccaaccccatcctggagagcttcggcaacgccaagaccgtgaagaacgacaacagcagcagattcggcaagttcatcagaatcaacttcgacgtgaccggctacatcgtgggcgccaacatcgagacctacctgctggagaagagcagagccgtgagacaggccaaggacgagagaaccttccacatcttctaccagctgctgagcggcgccggcgagcacctgaagagcgacctgctgctggagggcttcaacaactacagattcctgagcaacggctacatccccatccccggccagcaggacaaggacaacttccaggagaccatggaggccatgcacatcatgggcttcagccacgaggagatcctgagcatgctgaaggtggtgagcagcgtgctgcagttcggcaacatcagcttcaagaaggagagaaacaccgaccaggccagcatgcccgagaacaccgtggcccagaagctgtgccacctgctgggcatgaacgtgatggagttcaccagagccatcctgacccccagaatcaaggtgggcagagactacgtgcagaaggcccagaccaaggagcaggccgacttcgccgtggaggccctggccaaggccacctacgagagactgttcagatggctggtgcacagaatcaacaaggccctggacagaaccaagagacagggcgccagcttcatcggcatcctggacatcgccggcttcgagatcttcgagctgaacagcttcgagcagctgtgcatcaactacaccaacgagaagctgcagcagctgttcaaccacaccatgttcatcctggagcaggaggagtaccagagagagggcatcgagtggaacttcatcgacttcggcctggacctgcagccctgcatcgacctgatcgagagacccgccaacccccccggcgtgctggccctgctggacgaggagtgctggttccccaaggccaccgacaagaccttcgtggagaagctggtgcaggagcagggcagccacagcaagttccagaagcccagacagctgaaggacaaggccgacttctgcatcatccactacgccggcaaggtggactacaaggccgacgagtggctgatgaagaacatggaccccctgaacgacaacgtggccaccctgctgcaccagagcagcgacagattcgtggccgagctgtggaaggacgtggacagaatcgtgggcctggaccaggtgaccggcatgaccgagaccgccttcggcagcgcctacaagaccaagaagggcatgttcagaaccgtgggccagctgtacaaggagagcctgaccaagctgatggccaccctgagaaacaccaaccccaacttcgtgagatgcatcatccccaaccacgagaagagagccggcaagctggacccccacctggtgctggaccagctgagatgcaacggcgtgctggagggcatcagaatctgcagacagggcttccccaacagaatcgtgttccaggagttcagacagagatacgagatcctgacccccaacgccatccccaagggcttcatggacggcaagcaggcctgcgagagaatgatcagagccctggagctggaccccaacctgtacagaatcggccagagcaagatcttcttcagagccggcgtgctggcccacctggaggaggagagagacctgaagatcaccgacatcatcatcttcttccaggccgtgtgcagaggctacctggccagaaaggccttcgccaagaagcagcagcagctgagcgccctgaaggtgctgcagagaaactgcgccgcctacctgaagctgagacactggcagtggtggagagtgttcaccaaggtgaagcccctgctgcaggtgaccagacaggaggaggagctgcaggccaaggacgaggagctgctgaaggtgaaggagaagcagaccaaggtggagggcgagctggaggagatggagagaaagcaccagcagctgctggaggagaagaacatcctggccgagcagctgcaggccgagaccgagctgttcgccgaggccgaggagatgagagccagactggccgccaagaagcaggagctggaggagatcctgcacgacctggagagcagagtggaggaggaggaggagagaaaccagatcctgcagaacgagaagaagaagatgcaggcccacatccaggacctggaggagcagctggacgaggaggagggcgccagacagaagctgcagctggagaaggtgaccgccgaggccaagatcaagaagatggaggaggagatcctgctgctggaggaccagaacagcaagttcatcaaggagaagaagctgatggaggacagaatcgccgagtgcagcagccagctggccgaggaggaggagaaggccaagaacctggccaagatcagaaacaagcaggaggtgatgatcagcgacctggaggagagactgaagaaggaggagaagaccagacaggagctggagaaggccaagagaaagctggacggcgagaccaccgacctgcaggaccagatcgccgagctgcaggcccagatcgacgagctgaagctgcagctggccaagaaggaggaggagctgcagggcgccctggccagaggcgacgacgagaccctgcacaagaacaacgccctgaaggtggtgagagagctgcaggcccagatcgccgagctgcaggaggacttcgagagcgagaaggccagcagaaacaaggccgagaagcagaagagagacctgagcgaggagctggaggccctgaagaccgagctggaggacaccctggacaccaccgccgcccagcaggagctgagaaccaagagagagcaggaggtggccgagctgaagaaggccctggaggaggagaccaagaaccacgaggcccagatccaggacatgagacagagacacgccaccgccctggaggagctgagcgagcagctggagcaggccaagagattcaaggccaacctggagaagaacaagcagggcctggagaccgacaacaaggagctggcctgcgaggtgaaggtgctgcagcaggtgaaggccgagagcgagcacaagagaaagaagctggacgcccaggtgcaggagctgcacgccaaggtgagcgagggcgacagactgagagtggagctggccgagaaggccagcaagctgcagaacgagctggacaacgtgagcaccctgctggaggaggccgagaagaagggcatcaagttcgccaaggacgccgccagcctggagagccagctgcaggacacccaggagctgctgcaggaggagaccagacagaagctgaacctgagcagcagaatcagacagctggaggaggagaagaacagcctgcaggagcagcaggaggaggaggaggaggccagaaagaacctggagaagcaggtgctggccctgcagagccagctggccgacaccaagaagaaggtggacgacgacctgggcaccatcgagagcctggaggaggccaagaagaagctgctgaaggacgccgaggccctgagccagagactggaggagaaggccctggcctacgacaagctggagaagaccaagaacagactgcagcaggagctggacgacctgaccgtggacctggaccaccagagacaggtggccagcaacctggagaagaagcagaagaagttcgaccagctgctggccgaggagaagagcatcagcgccagatacgccgaggagagagacagagccgaggccgaggccagagagaaggagaccaaggccctgagcctggccagagccctggaggaggccctggaggccaaggaggagttcgagagacagaacaagcagctgagagccgacatggaggacctgatgagcagcaaggacgacgtgggcaagaacgtgcacgagctggagaagagcaagagagccctggagcagcaggtggaggagatgagaacccagctggaggagctggaggacgagctgcaggccaccgaggacgccaagctgagactggaggtgaacatgcaggccatgaaggcccagttcgagagagacctgcagaccagagacgagcagaacgaggagaagaagagactgctgatcaagcaggtgagagagctggaggccgagctggaggacgagagaaagcagagagccctggccgtggccagcaagaagaagatggagatcgacctgaaggacctggaggcccagatcgaggccgccaacaaggccagagacgaggtgatcaagcagctgagaaagctgcaggcccagatgaaggactaccagagagagctggaggaggccagagccagcagagacgagatcttcgcccagagcaaggagagcgagaagaagctgaagagcctggaggccgagatcctgcagctgcaggaggagctggccagcagcgagagagccagaagacacgccgagcaggagagagacgagctggccgacgagatcaccaacagcgccagcggcaagagcgccctgctggacgagaagagaagactggaggccagaatcgcccagctggaggaggagctggaggaggagcagagcaacatggagctgctgaacgacagattcagaaagaccaccctgcaggtggacaccctgaacgccgagctggccgccgagagaagcgccgcccagaagagcgacaacgccagacagcagctggagagacagaacaaggagctgaaggccaagctgcaggagctggagggcgccgtgaagagcaagttcaaggccaccatcagcgccctggaggccaagatcggccagctggaggagcagctggagcaggaggccaaggagagagccgccgccaacaagctggtgagaagaaccgagaagaagctgaaggagatcttcatgcaggtggaggacgagagaagacacgccgaccagtacaaggagcagatggagaaggccaacgccagaatgaagcagctgaagagacagctggaggaggccgaggaggaggccaccagagccaacgccagcagaagaaagctgcagagagagctggacgacgccaccgaggccaacgagggcctgagcagagaggtgagcaccctgaagaacagactgagaagaggcggccccatcagcttcagcagcagcagaagcggcagaagacagctgcacctggagggcgccagcctggagctgagcgacgacgacaccgagagcaagaccagcgacgtgaacgagacccagcccccccagagcgagtag

SEQ ID NO: 11708 - DNA, 5994 bp, synthetic construct
  misc_feature 1..5994: note = Description of Artificial Sequence: Synthetic coding sequence
  source 1..5994: mol_type = other DNA
atggcccagagaaccggcctggaggaccccgagagatacctgttcgtggacagagccgtgatctacaaccccgccacccaggccgactggaccgccaagaagctggtgtggatccccagcgagagacacggcttcgaggccgccagcatcaaggaggagagaggcgacgaggtgatggtggagctggccgagaacggcaagaaggccatggtgaacaaggacgacatccagaagatgaacccccccaagttcagcaaggtggaggacatggccgagctgacctgcctgaacgaggccagcgtgctgcacaacctgaaggacagatactacagcggcctgatctacacctacagcggcctgttctgcgtggtgatcaacccctacaagaacctgcccatctacagcgagaacatcatcgagatgtacagaggcaagaagagacacgagatgcccccccacatctacgccatcagcgagagcgcctacagatgcatgctgcaggacagagaggaccagagcatcctgtgcaccggcgagagcggcgccggcaagaccgagaacaccaagaaggtgatccagtacctggcccacgtggccagcagccacaagggcagaaaggaccacaacatccccggcgagctggagagacagctgctgcaggccaaccccatcctggagagcttcggcaacgccaagaccgtgaagaacgacaacagcagcagattcggcaagttcatcagaatcaacttcgacgtgaccggctacatcgtgggcgccaacatcgagacctacctgctggagaagagcagagccgtgagacaggccaaggacgagagaaccttccacatcttctaccagctgctgagcggcgccggcgagcacctgaagagcgacctgctgctggagggcttcaacaactacagattcctgagcaacggctacatccccatccccggccagcaggacaaggacaacttccaggagaccatggaggccatgcacatcatgggcttcagccacgaggagatcctgagcatgctgaaggtggtgagcagcgtgctgcagttcggcaacatcagcttcaagaaggagagaaacaccgaccaggccagcatgcccgagaacaccgtggcccagaagctgtgccacctgctgggcatgaacgtgatggagttcaccagagccatcctgacccccagaatcaaggtgggcagagactacgtgcagaaggcccagaccaaggagcaggccgacttcgccgtggaggccctggccaaggccacctacgagagactgttcagatggctggtgcacagaatcaacaaggccctggacagaaccaagagacagggcgccagcttcatcggcatcctggacatcgccggcttcgagatcttcgagctgaacagcttcgagcagctgtgcatcaactacaccaacgagaagctgcagcagctgttcaaccacaccatgttcatcctggagcaggaggagtaccagagagagggcatcgagtggaacttcatcgacttcggcctggacctgcagccctgcatcgacctgatcgagagacccgccaacccccccggcgtgctggccctgctggacgaggagtgctggttccccaaggccaccgacaagaccttcgtggagaagctggtgcaggagcagggcagccacagcaagttccagaagcccagacagctgaaggacaaggccgacttctgcatcatccactacgccggcaaggtggactacaaggccgacgagtggctgatgaagaacatggaccccctgaacgacaacgtggccaccctgctgcaccagagcagcgacagattcgtggccgagctgtggaaggacgagatccagaacatccagagagccagcttctacgacagcgtgagcggcctgcacgagccccccgtggacagaatcgtgggcctggaccaggtgaccggcatgaccgagaccgccttcggcagcgcctacaagaccaagaagggcatgttcagaaccgtgggccagctgtacaaggagagcctgaccaagctgatggccaccctgagaaacaccaaccccaacttcgtgagatgcatcatccccaaccacgagaagagagccggcaagctggacccccacctggtgctggaccagctgagatgcaacggcgtgctggagggcatcagaatctgcagacagggcttccccaacagaatcgtgttccaggagttcagacagagatacgagatcctgacccccaacgccatccccaagggcttcatggacggcaagcaggcctgcgagagaatgatcagagccctggagctggaccccaacctgtacagaatcggccagagcaagatcttcttcagagccggcgtgctggcccacctggaggaggagagagacctgaagatcaccgacatcatcatcttcttccaggccgtgtgcagaggctacctggccagaaaggccttcgccaagaagcagcagcagctgagcgccctgaaggtgctgcagagaaactgcgccgcctacctgaagctgagacactggcagtggtggagagtgttcaccaaggtgaagcccctgctgcaggtgaccagacaggaggaggagctgcaggccaaggacgaggagctgctgaaggtgaaggagaagcagaccaaggtggagggcgagctggaggagatggagagaaagcaccagcagctgctggaggagaagaacatcctggccgagcagctgcaggccgagaccgagctgttcgccgaggccgaggagatgagagccagactggccgccaagaagcaggagctggaggagatcctgcacgacctggagagcagagtggaggaggaggaggagagaaaccagatcctgcagaacgagaagaagaagatgcaggcccacatccaggacctggaggagcagctggacgaggaggagggcgccagacagaagctgcagctggagaaggtgaccgccgaggccaagatcaagaagatggaggaggagatcctgctgctggaggaccagaacagcaagttcatcaaggagaagaagctgatggaggacagaatcgccgagtgcagcagccagctggccgaggaggaggagaaggccaagaacctggccaagatcagaaacaagcaggaggtgatgatcagcgacctggaggagagactgaagaaggaggagaagaccagacaggagctggagaaggccaagagaaagctggacggcgagaccaccgacctgcaggaccagatcgccgagctgcaggcccagatcgacgagctgaagctgcagctggccaagaaggaggaggagctgcagggcgccctggccagaggcgacgacgagaccctgcacaagaacaacgccctgaaggtggtgagagagctgcaggcccagatcgccgagctgcaggaggacttcgagagcgagaaggccagcagaaacaaggccgagaagcagaagagagacctgagcgaggagctggaggccctgaagaccgagctggaggacaccctggacaccaccgccgcccagcaggagctgagaaccaagagagagcaggaggtggccgagctgaagaaggccctggaggaggagaccaagaaccacgaggcccagatccaggacatgagacagagacacgccaccgccctggaggagctgagcgagcagctggagcaggccaagagattcaaggccaacctggagaagaacaagcagggcctggagaccgacaacaaggagctggcctgcgaggtgaaggtgctgcagcaggtgaaggccgagagcgagcacaagagaaagaagctggacgcccaggtgcaggagctgcacgccaaggtgagcgagggcgacagactgagagtggagctggccgagaaggccagcaagctgcagaacgagctggacaacgtgagcaccctgctggaggaggccgagaagaagggcatcaagttcgccaaggacgccgccagcctggagagccagctgcaggacacccaggagctgctgcaggaggagaccagacagaagctgaacctgagcagcagaatcagacagctggaggaggagaagaacagcctgcaggagcagcaggaggaggaggaggaggccagaaagaacctggagaagcaggtgctggccctgcagagccagctggccgacaccaagaagaaggtggacgacgacctgggcaccatcgagagcctggaggaggccaagaagaagctgctgaaggacgccgaggccctgagccagagactggaggagaaggccctggcctacgacaagctggagaagaccaagaacagactgcagcaggagctggacgacctgaccgtggacctggaccaccagagacaggtggccagcaacctggagaagaagcagaagaagttcgaccagctgctggccgaggagaagagcatcagcgccagatacgccgaggagagagacagagccgaggccgaggccagagagaaggagaccaaggccctgagcctggccagagccctggaggaggccctggaggccaaggaggagttcgagagacagaacaagcagctgagagccgacatggaggacctgatgagcagcaaggacgacgtgggcaagaacgtgcacgagctggagaagagcaagagagccctggagcagcaggtggaggagatgagaacccagctggaggagctggaggacgagctgcaggccaccgaggacgccaagctgagactggaggtgaacatgcaggccatgaaggcccagttcgagagagacctgcagaccagagacgagcagaacgaggagaagaagagactgctgatcaagcaggtgagagagctggaggccgagctggaggacgagagaaagcagagagccctggccgtggccagcaagaagaagatggagatcgacctgaaggacctggaggcccagatcgaggccgccaacaaggccagagacgaggtgatcaagcagctgagaaagctgcaggcccagatgaaggactaccagagagagctggaggaggccagagccagcagagacgagatcttcgcccagagcaaggagagcgagaagaagctgaagagcctggaggccgagatcctgcagctgcaggaggagctggccagcagcgagagagccagaagacacgccgagcaggagagagacgagctggccgacgagatcaccaacagcgccagcggcaagagcgccctgctggacgagaagagaagactggaggccagaatcgcccagctggaggaggagctggaggaggagcagagcaacatggagctgctgaacgacagattcagaaagaccaccctgcaggtggacaccctgaacgccgagctggccgccgagagaagcgccgcccagaagagcgacaacgccagacagcagctggagagacagaacaaggagctgaaggccaagctgcaggagctggagggcgccgtgaagagcaagttcaaggccaccatcagcgccctggaggccaagatcggccagctggaggagcagctggagcaggaggccaaggagagagccgccgccaacaagctggtgagaagaaccgagaagaagctgaaggagatcttcatgcaggtggaggacgagagaagacacgccgaccagtacaaggagcagatggagaaggccaacgccagaatgaagcagctgaagagacagctggaggaggccgaggaggaggccaccagagccaacgccagcagaagaaagctgcagagagagctggacgacgccaccgaggccaacgagggcctgagcagagaggtgagcaccctgaagaacagactgagaagaggcggccccatcagcttcagcagcagcagaagcggcagaagacagctgcacctggagggcgccagcctggagctgagcgacgacgacaccgagagcaagaccagcgacgtgaacgagacccagcccccccagagcgagtag

SEQ ID NO: 11709 - DNA, 567 bp, synthetic construct
  misc_feature 1..567: note = Description of Artificial Sequence: Synthetic coding sequence
  source 1..567: mol_type = other DNA
atggcccagagaaccggcctggaggaccccgagagatacctgttcgtggacagagccgtgatctacaaccccgccacccaggccgactggaccgccaagaagctggtgtggatccccagcgagagacacggcttcgaggccgccagcatcaaggaggagagaggcgacgaggtgatggtggagctggccgagaacggcaagaaggccatggtgaacaaggacgacatccagaagatgaacccccccaagttcagcaaggtggaggacatggccgagctgacctgcctgaacgaggccagcgtgctgcacaacctgaaggacagatactacagcggcctgatctacacctacagcggcctgttctgcgtggtgatcaacccctacaagaacctgcccatctacagcgagaacatcatcgagatgtacagaggcaagaagagacacgagatgcccccccacatctacgccatcagcgagagcgcctacagatgcatgctgcaggacagagaggaccagagcatcctgtgcaccggcgagagcggcgccggcaagaccgagaacacctag

SEQ ID NO: 11710 - DNA, 1446 bp, synthetic construct
  misc_feature 1..1446: note = Description of Artificial Sequence: Synthetic coding sequence
  source 1..1446: mol_type = other DNA
atgtacgacgccgagagaggctggagcctgagcttcgccggctgcggcttcctgggcttctaccacgtgggcgccaccagatgcctgagcgagcacgccccccacctgctgagagacgccagaatgctgttcggcgccagcgccggcgccctgcactgcgtgggcgtgctgagcggcatccccctggagcagaccctgcaggtgctgagcgacctggtgagaaaggccagaagcagaaacatcggcatcttccaccccagcttcaacctgagcaagttcctgagacagggcctgtgcaagtgcctgcccgccaacgtgcaccagctgatcagcggcaagatcggcatcagcctgaccagagtgagcgacggcgagaacgtgctggtgagcgacttcagaagcaaggacgaggtggtggacgccctggtgtgcagctgcttcatccccttctacagcggcctgatcccccccagcttcagaggcgtgagatacgtggacggcggcgtgagcgacaacgtgcccttcatcgacgccaagaccaccatcaccgtgagccccttctacggcgagtacgacatctgccccaaggtgaagagcaccaacttcctgcacgtggacatcaccaagctgagcctgagactgtgcaccggcaacctgtacctgctgagcagagccttcgtgccccccgacctgaaggtgctgggcgagatctgcctgagaggctacctggacgccttcagattcctggaggagaagggcatctgcaacagaccccagcccggcctgaagagcagcagcgagggcatggaccccgaggtggccatgcccagctgggccaacatgagcctggacagcagccccgagagcgccgccctggccgtgagactggagggcgacgagctgctggaccacctgagactgagcatcctgccctgggacgagagcatcctggacaccctgagccccagactggccaccgccctgagcgaggagatgaaggacaagggcggctacatgagcaagatctgcaacctgctgcccatcagaatcatgagctacgtgatgctgccctgcaccctgcccgtggagagcgccatcgccatcgtgcagagactggtgacctggctgcccgacatgcccgacgacgtgctgtggctgcagtgggtgaccagccaggtgttcaccagagtgctgatgtgcctgctgcccgccagcagaagccagatgcccgtgagcagccagcaggccagcccctgcacccccgagcaggactggccctgctggaccccctgcagccccaagggctgccccgccgagaccaaggccgaggccacccccagaagcatcctgagaagcagcctgaacttcttcctgggcaacaaggtgcccgccggcgccgagggcctgagcaccttccccagcttcagcctggagaagagcctgtag

SEQ ID NO: 11711 - DNA, 4149 bp, synthetic construct
  misc_feature 1..4149: note = Description of Artificial Sequence: Synthetic coding sequence
  source 1..4149: mol_type = other DNA
atgtacaagggcaagaagagacacgagatgcccccccacatctacgccatcaccgacaccgcctacagaagcatgatgcaggacagagaggaccagagcatcctgtgcaccggcgagagcggcgccggcaagaccgagaacaccaagaaggtgatccagtacctggcctacgtggccagcagccacaagagcaagaaggaccagggcgagctggagagacagctgctgcaggccaaccccatcctggaggccttcggcaacgccaagaccgtgaagaacgacaacagcagcagattcggcaagttcatcagaatcaacttcgacgtgaacggctacatcgtgggcgccaacatcgagacctacctgctggagaagagcagagccatcagacaggccaaggaggagagaaccttccacatcttctactacctgctgagcggcgccggcgagcacctgaagaccgacctgctgctggagccctacaacaagtacagattcctgagcaacggccacgtgaccatccccggccagcaggacaaggacatgttccaggagaccatggaggccatgagaatcatgggcatccccgaggaggagcagatgggcctgctgagagtgatcagcggcgtgctgcagctgggcaacatcgtgttcaagaaggagagaaacaccgaccaggccagcatgcccgacaacaccgccgcccagaaggtgagccacctgctgggcatcaacgtgaccgacttcaccagaggcatcctgacccccagaatcaaggtgggcagagactacgtgcagaaggcccagaccaaggagcaggccgacttcgccatcgaggccctggccaaggccacctacgagagaatgttcagatggctggtgctgagaatcaacaaggccctggacaagaccaagagacagggcgccagcttcatcggcatcctggacatcgccggcttcgagatcttcgacctgaacagcttcgagcagctgtgcatcaactacaccaacgagaagctgcagcagctgttcaaccacaccatgttcatcctggagcaggaggagtaccagagagagggcatcgagtggaacttcatcgacttcggcctggacctgcagccctgcatcgacctgatcgagaagcccgccggcccccccggcatcctggccctgctggacgaggagtgctggttccccaaggccaccgacaagagcttcgtggagaaggtgatgcaggagcagggcacccaccccaagttccagaagcccaagcagctgaaggacaaggccgacttctgcatcatccactacgccggcaaggtggactacaaggccgacgagtggctgatgaagaacatggaccccctgaacgacaacatcgccaccctgctgcaccagagcagcgacaagttcgtgagcgagctgtggaaggacgtggacagaatcatcggcctggaccaggtggccggcatgagcgagaccgccctgcccggcgccttcaagaccagaaagggcatgttcagaaccgtgggccagctgtacaaggagcagctggccaagctgatggccaccctgagaaacaccaaccccaacttcgtgagatgcatcatccccaaccacgagaagaaggccggcaagctggacccccacctggtgctggaccagctgagatgcaacggcgtgctggagggcatcagaatctgcagacagggcttccccaacagagtggtgttccaggagttcagacagagatacgagatcctgacccccaacagcatccccaagggcttcatggacggcaagcaggcctgcgtgctgatgatcaaggccctggagctggacagcaacctgtacagaatcggccagagcaaggtgttcttcagagccggcgtgctggcccacctggaggaggagagagacctgaagatcaccgacgtgatcatcggcttccaggcctgctgcagaggctacctggccagaaaggccttcgccaagagacagcagcagctgaccgccatgaaggtgctgcagagaaactgcgccgcctacctgaagctgagaaactggcagtggtggagactgttcaccaaggtgaagcccctgctgcaggtgagcagacaggaggaggagatgatggccaaggaggaggagctggtgaaggtgagagagaagcagctggccgccgagaacagactgaccgagatggagaccctgcagagccagctgatggccgagaagctgcagctgcaggagcagctgcaggccgagaccgagctgtgcgccgaggccgaggagctgagagccagactgaccgccaagaagcaggagctggaggagatctgccacgacctggaggccagagtggaggaggaggaggagagatgccagcacctgcaggccgagaagaagaagatgcagcagaacatccaggagctggaggagcagctggaggaggaggagagcgccagacagaagctgcagctggagaaggtgaccaccgaggccaagctgaagaagctggaggaggagctggacgacctgctggtggacctggaccaccagagacagagcgcctgcaacctggagaagaagcagaagaagttcgaccagctgctggccgaggagaagaccatcagcgccaagtacgccgaggagagagacagagccgaggccgaggccagagagaaggagaccaaggccctgagcctggccagagccctggaggaggccatggagcagaaggccgagctggagagactgaacaagcagttcagaaccgagatggaggacctgatgagcagcaaggacgacgtgggcaagagcgtgcacgagctggagaagagcaagagagccctggagcagcaggtggaggagatgaagacccagctggaggagctggaggacgagctgcaggccaccgaggacgccaagctgagactggaggtgaacctgcaggccatgaaggcccagttcgagagagacctgcagggcagagacgagcagagcgaggagaagaagaagcagctggtgagacaggtgagagagatggaggccgagctggaggacgagagaaagcagagaagcatggccgtggccgccagaaagaagctggagatggacctgaaggacctggaggcccacatcgacagcgccaacaagaacagagacgaggccatcaagcagctgagaaagctgcaggcccagatgaaggactgcatgagagagctggacgacaccagagccagcagagaggagatcctggcccaggccaaggagaacgagaagaagctgaagagcatggaggccgagatgatccagctgcaggaggagctggccgccgccgagagagccaagagacaggcccagcaggagagagacgagctggccgacgagatcgccaacagcagcggcaagggcgccctggccctggaggagaagagaagactggaggccagaatcgcccagctggaggaggagctggaggaggagcagggcaacaccgagctgatcaacgacagactgaagaaggccaacctgcagatcgaccagatcaacaccgacctgaacctggagagaagccacgcccagaagaacgagaacgccagacagcagctggagagacagaacaaggagctgaaggtgaagctgcaggagatggagggcaccgtgaagagcaagtacaaggccagcatcaccgccctggaggccaagatcgcccagctggaggagcagctggacaacgagaccaaggagagacaggccgcctgcaagcaggtgagaagaaccgagaagaagctgaaggacgtgctgctgcaggtggacgacgagagaagaaacgccgagcagtacaaggaccaggccgacaaggccagcaccagactgaagcagctgaagagacagctggaggaggccgaggaggaggcccagagagccaacgccagcagaagaaagctgcagagagagctggaggacgccaccgagaccgccgacgccatgaacagagaggtgagcagcctgaagaacaagctgagaagaggcgacctgcccttcgtggtgcccagaagaatggccagaaagggcgccggcgacggcagcgacgaggaggtggacggcaaggccgacggcgccgaggccaagcccgccgagtag

SEQ ID NO: 11712 - DNA, 1689 bp, synthetic construct
  misc_feature 1..1689: note = Description of Artificial Sequence: Synthetic coding sequence
  source 1..1689: mol_type = other DNA
gccagcggcaccagaagaagatggccccccaccaccagctggagaagacccagaagaggctgcagcagaagctggaccacctgctggtggacctggaccaccagcgccagagccagagccacctggagaagaagcagaagaagcctgaccagcagctggagaagaagaagacccagcctgcccagcatgcagagaagcgccaccggcctgagaagaagacccgagagaagaagacccagactgtgcagatggcccggccccgaggaggccatggagcagaaggccgagctggagagactgaacaagcagttcagaaccgagatggaggacctgatgagcagcaaggacgacgtgggcaagagcgtgcacgagctggagaagagcaagagagccctggagcagcaggtggaggagatgaagacccagctggaggagctggaggacgagctgcaggccaccgaggacgccaagctgagactggaggtgaacctgcaggccatgaaggcccagttcgagagagacctgcagggcagagacgagcagagcgaggagaagaagaagcagctggtgagacaggtgagagagatggaggccgagctggaggacgagagaaagcagagaagcatggccgtggccgccagaaagaagctggagatggacctgaaggacctggaggcccacatcgacagcgccaacaagaacagagacgaggccatcaagcagctgagaaagctgcaggcccagatgaaggactgcatgagagagctggacgacaccagagccagcagagaggagatcctggcccaggccaaggagaacgagaagaagctgaagagcatggaggccgagatgatccagctgcaggaggagctggccgccgccgagagagccaagagacaggcccagcaggagagagacgagctggccgacgagatcgccaacagcagcggcaagggcgccctggccctggaggagaagagaagactggaggccagaatcgcccagctggaggaggagctggaggaggagcagggcaacaccgagctgatcaacgacagactgaagaaggccaacctgcagatcgaccagatcaacaccgacctgaacctggagagaagccacgcccagaagaacgagaacgccagacagcagctggagagacagaacaaggagctgaaggtgaagctgcaggagatggagggcaccgtgaagagcaagtacaaggccagcatcaccgccctggaggccaagatcgcccagctggaggagcagctggacaacgagaccaaggagagacaggccgcctgcaagcaggtgagaagaaccgagaagaagctgaaggacgtgctgctgcaggtggacgacgagagaagaaacgccgagcagtacaaggaccaggccgacaaggccagcaccagactgaagcagctgaagagacagctggaggaggccgaggaggaggcccagagagccaacgccagcagaagaaagctgcagagagagctggaggacgccaccgagaccgccgacgccatgaacagagaggtgagcagcctgaagaacaagctgagaagaggcgacctgcccttcgtggtgcccagaagaatggccagaaagggcgccggcgacggcagcgacgaggaggtggacggcaaggccgacggcgccgaggccaagcccgccgagtag

SEQ ID NO: 11713 - DNA, 657 bp, synthetic construct
  misc_feature 1..657: note = Description of Artificial Sequence: Synthetic coding sequence
  source 1..657: mol_type = other DNA
atggcccagcaggccgccgacaagtacctgtacgtggacaagaacttcatcaacaaccccctggcccaggccgactgggccgccaagaagctggtgtgggtgcccagcgacaagagcggcttcgagcccgccagcctgaaggaggaggtgggcgaggaggccatcgtggagctggtggagaacggcaagaaggtgaaggtgaacaaggacgacatccagaagatgaacccccccaagttcagcaaggtggaggacatggccgagctgacctgcctgaacgaggccagcgtgctgcacaacctgaaggagagatactacagcggcctgatctacacctacagcggcctgttctgcgtggtgatcaacccctacaagaacctgcccatctacagcgaggagatcgtggagatgtacaagggcaagaagagacacgagatgcccccccacatctacgccatcaccgacaccgcctacagaagcatgatgcaggacagagaggaccagagcatcctgtgcaccggcgagagcggcgccggcaagaccgagaacaccaagaaggtgatccagtacctggcctacgtggccagcagccacaagagcaagaaggaccaggaggcctacttcaagaacagagccgtgagactgggcgtgctgtag

SEQ ID NO: 11714 - DNA, 312 bp, synthetic construct
  misc_feature 1..312: note = Description of Artificial Sequence: Synthetic coding sequence
  source 1..312: mol_type = other DNA
atggcccagcaggccgccgacaagtacctgtacgtggacaagaacttcatcaacaaccccctggcccaggccgactgggccgccaagaagctggtgtgggtgcccagcgacaagagcggcttcgagcccgccagcctgaaggaggaggtgggcgaggaggccatcgtggagctggtggagaacggcaagaaggtgaaggtgaacaaggacgacatccagaagatgaacccccccaagttcagcaaggtggaggacatggccgagctgacctgcctgaacgaggccagcgtgctgcacaacctgaaggagtag

SEQ ID NO: 11715 - DNA, 519 bp, synthetic construct
  misc_feature 1..519: note = Description of Artificial Sequence: Synthetic coding sequence
  source 1..519: mol_type = other DNA
atgagcagcaagagagccaaggccaagaccaccaagaagagaccccagagagccaccagcaacgtgttcgccatgttcgaccagagccagatccaggagttcaaggaggccttcaacatgatcgaccagaacagagacggcttcatcgacaaggaggacctgcacgacatgctggccagcctgggcaagaaccccaccgacgagtacctggagggcatgatgagcgaggcccccggccccatcaacttcaccatgttcctgaccatgttcggcgagaagctgaacggcaccgaccccgaggacgtgatcagaaacgccttcgcctgcttcgacgaggaggccagcggcttcatccacgaggaccacctgagagagctgctgaccaccatgggcgacagattcaccgacgaggaggtggacgagatgtacagagaggcccccatcgacaagaagggcaacttcaactacgtggagttcaccagaatcctgaagcacggcgccaaggacaaggacgactag

SEQ ID NO: 11716 - DNA, 357 bp, synthetic construct
  misc_feature 1..357: note = Description of Artificial Sequence: Synthetic coding sequence
  source 1..357: mol_type = other DNA
atgagcagcaagagagccaaggccaagaccaccaagaagagaccccagagagccaccagcaacgtgttcgccatgttcgaccagagccagatccaggagttcaaggaggccttcaacatgatcgaccagaacagagacggcttcatcgacaaggaggacctgcacgacatgctggccagcctgggcttcatccacgaggaccacctgagagagctgctgaccaccatgggcgacagattcaccgacgaggaggtggacgagatgtacagagaggcccccatcgacaagaagggcaacttcaactacgtggagttcaccagaatcctgaagcacggcgccaaggacaaggacgactag

SEQ ID NO: 11717 - DNA, 927 bp, synthetic construct
  misc_feature 1..927: note = Description of Artificial Sequence: Synthetic coding sequence
  source 1..927: mol_type = other DNA
atgcaggagctgaccctgagccccggccccgccaagctgacccccaccctggaccccacccacagaatggagctgatcctgagcaccagccccgccgagctgaccctggaccccgcctgccagcccaagctgcccctggacagcacctgccagcccgagatgaccttcaaccccggccccaccgagctgaccctggaccccgagcaccagcccgaggagacccccgcccccagcctggccgagctgaccctggagcccgtgcacagaagacccgagctgctggacgcctgcgccgacctgatcaacgaccagtggcccagaagcagaaccagcagactgcacagcctgggccagagcagcgacgccttccccctgtgcctgatgctgctgagcccccaccccaccctggaggccgcccccgtggtggtgggccacgccagactgagcagagtgctgaaccagccccagagcctgctggtggagaccgtggtggtggccagagccctgagaggcagaggcttcggcagaagactgatggagggcctggaggtgttcgccagagccagaggcttcagaaagctgcacctgaccacccacgaccaggtgcacttctacacccacctgggctaccagctgggcgagcccgtgcagggcctggtgttcaccagcagaagactgcccgccaccctgctgaacgccttccccaccgcccccagccccagaccccccagaaaggcccccaacctgaccgcccaggccgcccccagaggccccaagggcccccccctgcccccccccccccccctgcccgagtgcctgaccatcagcccccccgtgcccagcggcccccccagcaagagcctgctggagacccagtaccagaacgtgagaggcagacccatcttctggatggagaaggacatctag

SEQ ID NO: 11718 - DNA, 861 bp, synthetic construct
  misc_feature 1..861: note = Description of Artificial Sequence: Synthetic coding sequence
  source 1..861: mol_type = other DNA
atggagctgatcctgagcaccagccccgccgagctgaccctggaccccgcctgccagcccaagctgcccctggacagcacctgccagcccgagatgaccttcaaccccggccccaccgagctgaccctggaccccgagcaccagcccgaggagacccccgcccccagcctggccgagctgaccctggagcccgtgcacagaagacccgagctgctggacgcctgcgccgacctgatcaacgaccagtggcccagaagcagaaccagcagactgcacagcctgggccagagcagcgacgccttccccctgtgcctgatgctgctgagcccccaccccaccctggaggccgcccccgtggtggtgggccacgccagactgagcagagtgctgaaccagccccagagcctgctggtggagaccgtggtggtggccagagccctgagaggcagaggcttcggcagaagactgatggagggcctggaggtgttcgccagagccagaggcttcagaaagctgcacctgaccacccacgaccaggtgcacttctacacccacctgggctaccagctgggcgagcccgtgcagggcctggtgttcaccagcagaagactgcccgccaccctgctgaacgccttccccaccgcccccagccccagaccccccagaaaggcccccaacctgaccgcccaggccgcccccagaggccccaagggcccccccctgcccccccccccccccctgcccgagtgcctgaccatcagcccccccgtgcccagcggcccccccagcaagagcctgctggagacccagtaccagaacgtgagaggcagacccatcttctggatggagaaggacatctag

SEQ ID NO: 11719 - DNA, 174 bp, synthetic construct
  misc_feature 1..174: note = Description of Artificial Sequence: Synthetic coding sequence
  source 1..174: mol_type = other DNA
atggagctgatcctgagcaccagccccgccgagctgaccctggaccccgcctgccagcccaagctgcccctggacagcacctgccagcccgagatgaccttcaaccccggccccaccgagctgaccctggaccccgagcaccagcccgaggagacccccgcccccagcctgtag

SEQ ID NO: 11720 - DNA, 861 bp, synthetic construct; identical to SEQ ID NO: 11718
  misc_feature 1..861: note = Description of Artificial Sequence: Synthetic coding sequence
  source 1..861: mol_type = other DNA

SEQ ID NO: 11721 - DNA, 861 bp, synthetic construct; identical to SEQ ID NO: 11718
  misc_feature 1..861: note = Description of Artificial Sequence: Synthetic coding sequence
  source 1..861: mol_type = other DNA

SEQ ID NO: 11722 - DNA, 261 bp, synthetic construct
  misc_feature 1..261: note = Description of Artificial Sequence: Synthetic coding sequence
  source 1..261: mol_type = other DNA
atggagctgatcctgagcaccagccccgccgagctgaccctggaccccgcctgccagcccaagctgcccctggacagcacctgccagcccgagatgaccttcaaccccggccccaccgagctgaccctggaccccgagcaccagcccgaggagacccccgcccccagcctggccgagctgaccctggagcccgtgcacagaagacccgagctgctggacgcctgcgccgacctgatcaacgaccagtggcccagaagctag

SEQ ID NO: 11723 - DNA, 30 bp, synthetic construct
  misc_feature 1..30: note = Description of Artificial Sequence: Synthetic coding sequence
  source 1..30: mol_type = other DNA
atggagctgatcctgagcaccagcccctag

SEQ ID NO: 11724 - DNA, 987 bp, synthetic construct
  misc_feature 1..987: note = Description of Artificial Sequence: Synthetic coding sequence
  source 1..987: mol_type = other DNA
atggccgagctgcaggaggtgcagatcaccgaggagaagcccctgctgcccggccagacccccgaggccgccaagacccacagcgtggagaccccctacggcagcgtgaccttcaccgtgtacggcacccccaagcccaagagacccgccatcctgacctaccacgacgtgggcctgaactacaagagctgcttccagcccctgttccagttcgaggacatgcaggagatcatccagaacttcgtgagagtgcacgtggacgcccccggcatggaggagggcgcccccgtgttccccctgggctaccagtaccccagcctggaccagctggccgacatgatcccctgcgtgctgcagtacctgaacttcagcaccatcatcggcgtgggcgtgggcgccggcgcctacatcctggccagatacgccctgaccggcctgaccagcagcatccccgagatgatcctgggccacctgttcagccaggaggagctgagcggcaacagcgagctgatccagaagtacagaaacatcatcacccacgcccccaacctggacaacatcgagctgtactggaacagctacaacaacagaagagacctgaacttcgagagaggcggcgacatcaccctgagatgccccgtgatgctggtggtgggcgaccaggccccccacgaggacgccgtggtggagtgcaacagcaagctggaccccacccagaccagcttcctgaagatggccgacagcggcggccagccccagctgacccagcccggcaagctgaccgaggccttcaagtacttcctgcagggcatgggctacatggccagcagctgcatgaccagactgagcagaagcagaaccgccagcctgaccagcgccgccagcgtggacggcaacagaagcagaagcagaaccctgagccagagcagcgagagcggcaccctgagcagcggcccccccggccacaccatggaggtgagctgctag

SEQ ID NO: 11725 - DNA, 1116 bp, synthetic construct
  misc_feature 1..1116: note = Description of Artificial Sequence: Synthetic coding sequence
  source 1..1116: mol_type = other DNA
atggccgagctgcaggaggtgcagatcaccgaggagaagcccctgctgcccggccagacccccgaggccgccaaggaggccgagctggccgccagaatcctgctggaccagggccagacccacagcgtggagaccccctacggcagcgtgaccttcaccgtgtacggcacccccaagcccaagagacccgccatcctgacctaccacgacgtgggcctgaactacaagagctgcttccagcccctgttccagttcgaggacatgcaggagatcatccagaacttcgtgagagtgcacgtggacgcccccggcatggaggagggcgcccccgtgttccccctgggctaccagtaccccagcctggaccagctggccgacatgatcccctgcgtgctgcagtacctgaacttcagcaccatcatcggcgtgggcgtgggcgccggcgcctacatcctggccagatacgccctgaaccaccccgacaccgtggagggcctggtgctgatcaacatcgaccccaacgccaagggctggatggactgggccgcccacaagctgaccggcctgaccagcagcatccccgagatgatcctgggccacctgttcagccaggaggagctgagcggcaacagcgagctgatccagaagtacagaaacatcatcacccacgcccccaacctggacaacatcgagctgtactggaacagctacaacaacagaagagacctgaacttcgagagaggcggcgacatcaccctgagatgccccgtgatgctggtggtgggcgaccaggccccccacgaggacgccgtggtggagtgcaacagcaagctggaccccacccagaccagcttcctgaagatggccgacagcggcggccagccccagctgacccagcccggcaagctgaccgaggccttcaagtacttcctgcagggcatgggctacatggccagcagctgcatgaccagactgagcagaagcagaaccgccagcctgaccagcgccgccagcgtggacggcaacagaagcagaagcagaaccctgagccagagcagcgagagcggcaccctgagcagcggcccccccggccacaccatggaggtgagctgctag

SEQ ID NO: 11726 - DNA, 1074 bp, synthetic construct
  misc_feature 1..1074: note = Description of Artificial Sequence: Synthetic coding sequence
  source 1..1074: mol_type = other DNA
atggccgagctgcaggaggtgcagatcaccgaggagaagcccctgctgcccggccagacccccgaggccgccaagacccacagcgtggagaccccctacggcagcgtgaccttcaccgtgtacggcacccccaagcccaagagacccgccatcctgacctaccacgacgtgggcctgaactacaagagctgcttccagcccctgttccagttcgaggacatgcaggagatcatccagaacttcgtgagagtgcacgtggacgcccccggcatggaggagggcgcccccgtgttccccctgggctaccagtaccccagcctggaccagctggccgacatgatcccctgcgtgctgcagtacctgaacttcagcaccatcatcggcgtgggcgtgggcgccggcgcctacatcctggccagatacgccctgaaccaccccgacaccgtggagggcctggtgctgatcaacatcgaccccaacgccaagggctggatggactgggccgcccacaagctgaccggcctgaccagcagcatccccgagatgatcctgggccacctgttcagccaggaggagctgagcggcaacagcgagctgatccagaagtacagaaacatcatcacccacgcccccaacctggacaacatcgagctgtactggaacagctacaacaacagaagagacctgaacttcgagagaggcggcgacatcaccctgagatgccccgtgatgctggtggtgggcgaccaggccccccacgaggacgccgtggtggagtgcaacagcaagctggaccccacccagaccagcttcctgaagatggccgacagcggcggccagccccagctgacccagcccggcaagctgaccgaggccttcaagtacttcctgcagggcatgggctacatggccagcagctgcatgaccagactgagcagaagcagaaccgccagcctgaccagcgccgccagcgtggacggcaacagaagcagaagcagaaccctgagccagagcagcgagagcggcaccctgagcagcggcccccccggccacaccatggaggtgagctgctag

SEQ ID NO: 11727 - DNA, 1074 bp, synthetic construct; identical to SEQ ID NO: 11726
  misc_feature 1..1074: note = Description of Artificial Sequence: Synthetic coding sequence
  source 1..1074: mol_type = other DNA

SEQ ID NO: 11728 - DNA, 1026 bp, synthetic construct
  misc_feature 1..1026: note = Description of Artificial Sequence: Synthetic coding sequence
  source 1..1026: mol_type = other DNA
atggccgagctgcaggaggtgcagatcaccgaggagaagcccctgctgcccggccagacccccgaggccgccaagacccacagcgtggagaccccctacggcagcgtgaccttcaccgtgtacggcacccccaagcccaagagacccgccatcctgacctaccacgacgtgggcctgaactacaagagctgcttccagcccctgttccagttcgaggacatgcaggagatcatccagaacttcgtgagagtgcacgtggacgcccccggcatggaggagggcgcccccgtgttccccctgggctaccagtaccccagcctggaccagctggccgacatgatcccctgcgtgctgcagtacctgaacttcagcaccatcatcggcgtgggcgtgggcgccggcgcctacatcctggccagatacgccctgaaccaccccgacaccgtggagggcctggtgctgatcaacatcgaccccaacgccaagggctggatggactgggccgcccacaagctgaccggcctgaccagcagcatccccgagatgatcctgggccacctgttcagccaggaggagctgagcggcaacagcgagctgatccagaagtacagaaacatcatcacccacgcccccaacctggacaacatcgagctgtactggaacagctacaacaacagaagagacctgaacttcgagagaggcggcgacatcaccctgagatgccccgtgatgctggtggtgggcgaccaggccccccacgaggacgccgtgatggccgacagcggcggccagccccagctgacccagcccggcaagctgaccgaggccttcaagtacttcctgcagggcatgggctacatggccagcagctgcatgaccagactgagcagaagcagaaccgccagcctgaccagcgccgccagcgtggacggcaacagaagcagaagcagaaccctgagccagagcagcgagagcggcaccctgagcagcggcccccccggccacaccatggaggtgagctgctag

SEQ ID NO: 11729 - DNA, 1083 bp, synthetic construct
  misc_feature 1..1083: note = Description of Artificial Sequence: Synthetic coding sequence
  source 1..1083: mol_type = other DNA
atggccgagctgcaggaggtgcagatcaccgaggagaagcccctgctgcccggccagacccccgaggccgccaaggaggccgagctggccgccagaatcctgctggaccagggccagacccacagcgtggagaccccctacggcagcgtgaccttcaccgtgtacggcacccccaagcccaagagacccgccatcctgacctaccacgacgtgggcctgaactacaagagctgcttccagcccctgttccagttcgaggacatgcaggagatcatccagaacttcgtgagagtgcacgtggacgcccccggcatggaggagggcgcccccgtgttccccctgggctaccagtaccccagcctggaccagctggccgacatgatcccctgcgtgctgcagtacctgaacttcagcaccatcatcggcgtgggcgtgggcgccggcgcctacatcctggccagatacgccctgaaccaccccgacaccgtggagggcctggtgctgatcaacatcgaccccaacgccaagggctggatggactgggccgcccacaagctgaccggcctgaccagcagcatccccgagatgatcctgggccacctgttcagccaggaggagctgagcggcaacagcgagctgatccagaagtacagaaacatcatcacccacgcccccaacctggacaacatcgagctgtactggaacagctacaacaacagaagagacctgaacttcgagagaggcggcgacatcaccctgagatgccccgtgatgctggtggtggagtgcaacagcaagctggaccccacccagaccagcttcctgaagatggccgacagcggcggccagccccagctgacccagcccggcaagctgaccgaggccttcaagtacttcctgcagggcatgggctacatggccagcagctgcatgaccagactgagcagaagcagaaccgccagcctgaccagcgccgccagcgtggacggcaacagaagcagaagcagaaccctgagccagagcagcgagagcggcaccctgagcagcggcccccccggccacaccatggaggtgagctgctag

SEQ ID NO: 11730 - DNA, 1116 bp, synthetic construct; identical to SEQ ID NO: 11725
  misc_feature 1..1116: note = Description of Artificial Sequence: Synthetic coding sequence
  source 1..1116: mol_type = other DNA

SEQ ID NO: 11731 - DNA, 1116 bp, synthetic construct; identical to SEQ ID NO: 11725
  misc_feature 1..1116: note = Description of Artificial Sequence: Synthetic coding sequence
  source 1..1116: mol_type = other DNA

SEQ ID NO: 11732 - DNA, 987 bp, synthetic construct; identical to SEQ ID NO: 11724
  misc_feature 1..987: note = Description of Artificial Sequence: Synthetic coding sequence
  source 1..987: mol_type = other DNA

SEQ ID NO: 11733 - DNA, 1026 bp, synthetic construct; identical to SEQ ID NO: 11728
  misc_feature 1..1026: note = Description of Artificial Sequence: Synthetic coding sequence
  source 1..1026: mol_type = other DNA

SEQ ID NO: 11734 - DNA, 1116 bp, synthetic construct; identical to SEQ ID NO: 11725
  misc_feature 1..1116: note = Description of Artificial Sequence: Synthetic coding sequence
  source 1..1116: mol_type = other DNA

SEQ ID NO: 11735 - DNA, 1104 bp, synthetic construct
  misc_feature 1..1104: note = Description of Artificial Sequence: Synthetic coding sequence
  source 1..1104: mol_type = other DNA
atggagaacggcggcagcatgcaggccaccatggccgagctgcaggaggtgcagatcaccgaggagaagcccctgctgcccggccagacccccgaggccgccaagacccacagcgtggagaccccctacggcagcgtgaccttcaccgtgtacggcacccccaagcccaagagacccgccatcctgacctaccacgacgtgggcctgaactacaagagctgcttccagcccctgttccagttcgaggacatgcaggagatcatccagaacttcgtgagagtgcacgtggacgcccccggcatggaggagggcgcccccgtgttccccctgggctaccagtaccccagcctggaccagctggccgacatgatcccctgcgtgctgcagtacctgaacttcagcaccatcatcggcgtgggcgtgggcgccggcgcctacatcctggccagatacgccctgaaccaccccgacaccgtggagggcctggtgctgatcaacatcgaccccaacgccaagggctggatggactgggccgcccacaagctgaccggcctgaccagcagcatccccgagatgatcctgggccacctgttcagccaggaggagctgagcggcaacagcgagctgatccagaagtacagaaacatcatcacccacgcccccaacctggacaacatcgagctgtactggaacagctacaacaacagaagagacctgaacttcgagagaggcggcgacatcaccctgagatgccccgtgatgctggtggtgggcgaccaggccccccacgaggacgccgtggtggagtgcaacagcaagctggaccccacccagaccagcttcctgaagatggccgacagcggcggccagccccagctgacccagcccggcaagctgaccgaggccttcaagtacttcctgcagggcatgggctacatggccagcagctgcatgaccagactgagcagaagcagaaccgccagcctgaccagcgccgccagcgtggacggcaacagaagcagaagcagaaccctgagccagagcagcgagagcggcaccctgagcagcggcccccccggccacaccatggaggtgagctgctag

SEQ ID NO: 11736 - DNA, 504 bp, synthetic construct
  misc_feature 1..504: note = Description of Artificial Sequence: Synthetic coding sequence
  source 1..504: mol_type = other DNA
atggccgagctgcaggaggtgcagatcaccgaggagaagcccctgctgcccggccagacccccgaggccgccaagacccacagcgtggagaccccctacggcagcgtgaccttcaccgtgtacggcacccccaagcccaagagacccgccatcctgacctaccacgacgtgggcctgaactacaagagctgcttccagcccctgttccagttcgaggacatgcaggagatcatccagaacttcgtgagagtgcacgtggacgcccccggcatggaggagggcgcccccgtgttccccctgggctaccagtaccccagcctggaccagctggccgacatgatcccctgcgtgctgcagtacctgaacttcagcaccatcatcggcgtgggcgtgggcgccggcgcctacatcctggccagatacgccctgaaccaccccgacaccgtggagggcctggtgctgatcaacatcgaccccaacgccaagggctggatggactggtag

SEQ ID NO: 11737 - DNA, 1074 bp, synthetic construct; identical to SEQ ID NO: 11726
  misc_feature 1..1074: note = Description of Artificial Sequence: Synthetic coding sequence
  source 1..1074: mol_type = other DNA

SEQ ID NO: 11738 - DNA, 522 bp, synthetic construct
  misc_feature 1..522: note = Description of Artificial Sequence: Synthetic coding sequence
  source 1..522: mol_type = other DNA
atggccgagctgcaggaggtgcagatcaccgaggagaagcccctgctgcccggccagacccccgaggccgccaaggaggccgagctggccgccagaatcctgctggaccagggccagacccacagcgtggagaccccctacggcagcgtgaccttcaccgtgtacggcacccccaagcccaagagacccgccatcctgacctaccacgacgtgggcctgaactacaagagctgcttccagcccctgttccagttcgaggacatgcaggagatcatccagaacttcgtgagagtgcacgtggacgcccccggcatggaggagggcgcccccgtgttccccctgggctaccagtaccccagcctggaccagctggccgacatgatcccctgcgtgctgcagtacctgaacttcagcaccatcatcggcgtgggcgtgggcgccggcgcctacatcctggccagatacgccctgaaccaccccgacaccgtggagggcctggtgctgatcaacatcgacccctag

SEQ ID NO: 11739 - DNA, 759 bp, synthetic construct
  misc_feature 1..759: note = Description of Artificial Sequence: Synthetic coding sequence
  source 1..759: mol_type = other DNA
atggccgagctgcaggaggtgcagatcaccgaggagaagcccctgctgcccggccagacccccgaggccgccaaggaggccgagctggccgccagaatcctgctggaccagggccagacccacagcgtggagaccccctacggcagcgtgaccttcaccgtgtacggcacccccaagcccaagagacccgccatcctgacctaccacgacgtgggcctgaactacaagagctgcttccagcccctgttccagttcgaggacatgcaggagatcatccagaacttcgtgagagtgcacgtggacgcccccggcatggaggagggcgcccccgtgttccccctgggctaccagtaccccagcctggaccagctggccgacatgatcccctgcgtgctgcagtacctgaacttcagcaccatcatcggcgtgggcgtgggcgccggcgcctacatcctggccagatacgccctgaaccaccccgacaccgtggagggcctggtgctgatcaacatcgaccccaacgccaagggctggatggactgggccgcccacaagctgaccggcctgaccagcagcatccccgagatgatcctgggccacctgttcagccaggaggagctgagcggcaacagcgagctgatccagaagtacagaaacatcatcacccacgcccccaacctggacaacatcgagctgtactggaacagctacaacaacagaagagacctgaacttcgagagaggcggcgacatcacctag

SEQ ID NO: 11740 - DNA, 525 bp, synthetic construct
  misc_feature 1..525: note = Description of Artificial Sequence: Synthetic coding sequence
  source 1..525: mol_type = other DNA
atggccgagctgcaggaggtgcagatcaccgaggagaagcccctgctgcccggccagacccccgaggccgccaagacccacagcgtggagaccccctacggcagcgtgaccttcaccgtgtacggcacccccaagcccaagagacccgccatcctgacctaccacgacgtgggcctgaactacaagagctgcttccagcccctgttccagttcgaggacatgcaggagatcatccagaacttcgtgagagtgcacgtggacgcccccggcatggaggagggcgcccccgtgttccccctgggctaccagtaccccagcctggaccagctggccgacatgatcccctgcgtgctgcagtacctgaacttcagcaccatcatcggcgtgggcgtgggcgccggcgcctacatcctggccagatacgccctgaaccaccccgacaccgtggagggcctggtgctgatcaacatcgaccccaacgccaagggctggatggactgggccgcccacaagctgaccggctag

SEQ ID NO: 11741 - DNA, 1074 bp, synthetic construct; identical to SEQ ID NO: 11726
  misc_feature 1..1074: note = Description of Artificial Sequence: Synthetic coding sequence
  source 1..1074: mol_type = other DNA

SEQ ID NO: 11742 - DNA, 450 bp, synthetic construct
  misc_feature 1..450: note = Description of Artificial Sequence: Synthetic coding sequence
  source 1..450: mol_type = other DNA
atggccgagctgcaggaggtgcagatcaccgaggagaagcccctgctgcccggccagacccccgaggccgccaaggaggccgagctggccgccagaatcctgctggaccagggccagacccacagcgtggagaccccctacggcagcgtgaccttcaccgtgtacggcacccccaagcccaagagacccgccatcctgacctaccacgacgtgggcctgaactacaagagctgcttccagcccctgttccagttcgaggacatgcaggagatcatccagaacttcgtgagagtgcacgtggacgcccccggcatggaggagggcgcccccgtgttccccctgggctaccagtaccccagcctggaccagctggccgacatgatcccctgcgtgctgcagtacctgaacttcagcaccatcatcggcgtgggcgtgggcgccggcgcctag

SEQ ID NO: 11743 - DNA, 261 bp, synthetic construct
  misc_feature 1..261: note = Description of Artificial Sequence: Synthetic coding sequence
  source 1..261: mol_type = other DNA
atggccgagctgcaggaggtgcagatcaccgaggagaagcccctgctgcccggccagacccccgaggccgccaaggaggccgagctggccgccagaatcctgctggaccagggccagacccacagcgtggagaccccctacggcagcgtgaccttcaccgtgtacggcacccccaagcccaagagacccgccatcctgacctaccacgacgtgggcctgaactacaagagctgcttccagcccctgttccagttcgagtag

SEQ ID NO: 11744 - DNA, 390 bp, synthetic construct
  misc_feature 1..390: note = Description of Artificial Sequence: Synthetic coding sequence
  source 1..390: mol_type = other DNA
atggccgagctgcaggaggtgcagatcaccgaggagaagcccctgctgcccggccagacccccgaggccgccaaggaggccgagctggccgccagaatcctgctggaccagggccagacccacagcgtggagaccccctacggcagcgtgaccttcaccgtgtacggcacccccaagcccaagagacccgccatcctgacctaccacgacgtgggcctgaactacaagagctgcttccagcccctgttccagttcgaggacatgcaggagatcatccagaacttcgtgagagtgcacgtggacgcccccggcatggaggagggcgcccccgtgttccccctgggctaccagtaccccagcctggaccagctggccgacatgatcccctag

SEQ ID NO: 11745 - DNA, 447 bp, synthetic construct
  misc_feature 1..447: note = Description of Artificial Sequence: Synthetic coding sequence
  source 1..447: mol_type = other DNA
atggccgagctgcaggaggtgcagatcaccgaggagaagcccctgctgcccggccagacccccgaggccgccaaggaggccgagctggccgccagaatcctgctggaccagggccagacccacagcgtggagaccccctacggcagcgtgaccttcaccgtgtacggcacccccaagcccaagagacccgccatcctgacctaccacgacgtgggcctgaactacaagagctgcttccagcccctgttccagttcgaggacatgcaggagatcatccagaacttcgtgagagtgcacgtggacgcccccggcatggaggagggcgcccccgtgttccccctgggctaccagtaccccagcctggaccagctggccgacatgatcccctgcgtgctgcagtacctgaacttcagcaccatcatcggcgtgggcgtgggcgccggctag

SEQ ID NO: 11746 - DNA, 405 bp, synthetic construct
  misc_feature 1..405: note = Description of Artificial Sequence: Synthetic coding sequence
  source 1..405: mol_type = other DNA
atggccgagctgcaggaggtgcagatcaccgaggagaagcccctgctgcccggccagacccccgaggccgccaagacccacagcgtggagaccccctacggcagcgtgaccttcaccgtgtacggcacccccaagcccaagagacccgccatcctgacctaccacgacgtgggcctgaactacaagagctgcttccagcccctgttccagttcgaggacatgcaggagatcatccagaacttcgtgagagtgcacgtggacgcccccggcatggaggagggcgcccccgtgttccccctgggctaccagtaccccagcctggaccagctggccgacatgatcccctgcgtgctgcagtacctgaacttcagcaccatcatcggcgtgggcgtgggcgccggctag

SEQ ID NO: 11747 - DNA, 327 bp, synthetic construct
  misc_feature 1..327: note = Description of Artificial Sequence: Synthetic coding sequence
  source 1..327: mol_type = other DNA
atggccgagctgcaggaggtgcagatcaccgaggagaagcccctgctgcccggccagacccccgaggccgccaagacccacagcgtggagaccccctacggcagcgtgaccttcaccgtgtacggcacccccaagcccaagagacccgccatcctgacctaccacgacgtgggcctgaactacaagagctgcttccagcccctgttccagttcgaggacatgcaggagatcatccagaacttcgtgagagtgcacgtggacgcccccggcatggaggagggcgcccccgtgttccccctgggctaccagtaccccagcctggactag

SEQ ID NO: 11748 - DNA, 363 bp, synthetic construct
  misc_feature 1..363: note = Description of Artificial Sequence: Synthetic coding sequence
  source 1..363: mol_type = other DNA
atggccgagctgcaggaggtgcagatcaccgaggagaagcccctgctgcccggccagacccccgaggccgccaagacccacagcgtggagaccccctacggcagcgtgaccttcaccgtgtacggcacccccaagcccaagagacccgccatcctgacctaccacgacgtgggcctgaactacaagagctgcttccagcccctgttccagttcgaggacatgcaggagatcatccagaacttcgtgagagtgcacgtggacgcccccggcatggaggagggcgcccccgtgttccccctgggctaccagtaccccagcctggaccagctggccgacatgatcccctgcgtgctgcagtactag

SEQ ID NO: 11749 - DNA, 300 bp, synthetic construct
  misc_feature 1..300: note = Description of Artificial Sequence: Synthetic coding sequence
  source 1..300: mol_type = other DNA
atggccgagctgcaggaggtgcagatcaccgaggagaagcccctgctgcccggccagacccccgaggccgccaaggaggccgagctggccgccagaatcctgctggaccagggccagacccacagcgtggagaccccctacggcagcgtgaccttcaccgtgtacggcacccccaagcccaagagacccgccatcctgacctaccacgacgtgggcctgaactacaagagctgcttccagcccctgttccagttcgaggacatgcaggagatcatccagaacttcgtgagagtgcactag

SEQ ID NO: 11750 - DNA, 279 bp, synthetic construct
  misc_feature 1..279: note = Description of Artificial Sequence: Synthetic coding sequence
  source 1..279: mol_type = other DNA
atggccgagctgcaggaggtgcagatcaccgaggagaagcccctgctgcccggccagacccccgaggccgccaagacccacagcgtggagaccccctacggcagcgtgaccttcaccgtgtacggcacccccaagcccaagagacccgccatcctgacctaccacgacgtgggcctgaactacaagagctgcttccagcccctgttccagttcgaggacatgcaggagatcatccagaacttcgtgagagtgcacgtggacgcccccggcatggagtag

SEQ ID NO: 11751 - DNA, 462 bp, synthetic construct
  misc_feature 1..462: note = Description of Artificial Sequence: Synthetic coding sequence
  source 1..462: mol_type = other DNA
atggccgagctgcaggaggtgcagatcaccgaggagaagcccctgctgcccggccagacccccgaggccgccaagacccacagcgtggagaccccctacggcagcgtgaccttcaccgtgtacggcacccccaagcccaagagacccgccatcctgacctaccacgacgtgggcctgaactacaagagctgcttccagcccctgttccagttcgaggacatgcaggagatcatccagaacttcgtgagagtgcacgtggacgcccccggcatggaggagggcgcccccgtgttccccctgggctaccagtaccccagcctggaccagctggccgacatgatcccctgcgtgctgcagtacctgaacttcagcaccatcatcggcgtgggcgtgggcgccggcgcctacatcctggccagatacgccctgaaccaccccgacaccgtggagggcctggtgtag

SEQ ID NO: 11752 - DNA, 1074 bp, synthetic construct; identical to SEQ ID NO: 11726
  misc_feature 1..1074: note = Description of Artificial Sequence: Synthetic coding sequence
  source 1..1074: mol_type = other DNA

SEQ ID NO: 11753 - DNA, 585 bp, synthetic construct
  misc_feature 1..585: note = Description of Artificial Sequence: Synthetic coding sequence
  source 1..585: mol_type = other DNA
atggccgagctgcaggaggtgcagatcaccgaggagaagcccctgctgcccggccagacccccgaggccgccaaggaggccgagctggccgccagaatcctgctggaccagggccagacccacagcgtggagaccccctacggcagcgtgaccttcaccgtgtacggcacccccaagcccaagagacccgccatcctgacctaccacgacgtgggcctgaactacaagagctgcttccagcccctgttccagttcgaggacatgcaggagatcatccagaacttcgtgagagtgcacgtggacgcccccggcatggaggagggcgcccccgtgttccccctgggctaccagtaccccagcctggaccagctggccgacatgatcccctgcgtgctgcagtacctgaacttcagcaccatcatcggcgtgggcgtgggcgccggcgcctacatcctggccagatacgccctgaaccaccccgacaccgtggagggcctggtgctgatcaacatcgaccccaacgccaagggctggatggactgggccgcccacaagctgaccggcctgaccagcagcatcccctag

SEQ ID NO: 11754 - DNA, 387 bp, synthetic construct
  misc_feature 1..387: note = Description of Artificial Sequence: Synthetic coding sequence
  source 1..387: mol_type = other DNA
atggccgagctgcaggaggtgcagatcaccgaggagaagcccctgctgcccggccagacccccgaggccgccaagacccacagcgtggagaccccctacggcagcgtgaccttcaccgtgtacggcacccccaagcccaagagacccgccatcctgacctaccacgacgtgggcctgaactacaagagctgcttccagcccctgttccagttcgaggacatgcaggagatcatccagaacttcgtgagagtgcacgtggacgcccccggcatggaggagggcgcccccgtgttccccctgggctaccagtaccccagcctggaccagctggccgacatgatcccctgcgtgctgcagtacctgaacttcagcaccatcatcggctag

SEQ ID NO: 11755 - DNA, 660 bp, synthetic construct
  misc_feature 1..660: note = Description of Artificial Sequence: Synthetic coding sequence
  source 1..660: mol_type = other DNA
atggccgagctgcaggaggtgcagatcaccgaggagaagcccctgctgcccggccagacccccgaggccgccaaggaggccgagctggccgccagaatcctgctggaccagggccagacccacagcgtggagaccccctacggcagcgtgaccttcaccgtgtacggcacccccaagcccaagagacccgccatcctgacctaccacgacgtgggcctgaactacaagagctgcttccagcccctgttccagttcgaggacatgcaggagatcatccagaacttcgtgagagtgcacgtggacgcccccggcatggaggagggcgcccccgtgttccccctgggctaccagtaccccagcctggaccagctggccgacatgatcccctgcgtgctgcagtacctgaacttcagcaccatcatcggcgtgggcgtgggcgccggcgcctacatcctggccagatacgccctgaaccaccccgacaccgtggagggcctggtgctgatcaacatcgaccccaacgccaagggctggatggactgggccgcccacaagctgaccggcctgaccagcagcatccccgagatgatcctgggccacctgttcagccaggaggagctgagcggcaacagcgagctgatccagaagtacagaaactag

SEQ ID NO: 11756 - DNA, 666 bp, synthetic construct
  misc_feature 1..666: note = Description of Artificial Sequence: Synthetic coding sequence
  source 1..666: mol_type = other DNA
atggccgagctgcaggaggtgcagatcaccgaggagaagcccctgctgcccggccagacccccgaggccgccaagacccacagcgtggagaccccctacggcagcgtgaccttcaccgtgtacggcacccccaagcccaagagacccgccatcctgacctaccacgacgtgggcctgaactacaagagctgcttccagcccctgttccagttcgaggacatgcaggagatcatccagaacttcgtgagagtgcacgtggacgcccccggcatggaggagggcgcccccgtgttccccctgggctaccagtaccccagcctggaccagctggccgacatgatcccctgcgtgctgcagtacctgaacttcagcaccatcatcggcgtgggcgtgggcgccggcgcctacatcctggccagatacgccctgaaccaccccgacaccgtggagggcctggtgctgatcaacatcgaccccaacgccaagggctggatggactgggccgcccacaagctgaccggcctgaccagcagcatccccgagatgatcctgggccacctgttcagccaggaggagctgagcggcaacagcgagctgatccagaagtacagaaacatcatcacccacgcccccaacctggacaacatcgagctgtactggaactag

SEQ ID NO: 11757 - DNA, 1116 bp, synthetic construct; identical to SEQ ID NO: 11725
  misc_feature 1..1116: note = Description of Artificial Sequence: Synthetic coding sequence
  source 1..1116: mol_type = other DNA

SEQ ID NO: 11758 - DNA, 432 bp, synthetic construct
  misc_feature 1..432: note = Description of Artificial Sequence: Synthetic coding sequence
  source 1..432: mol_type = other DNA
atggccgagctgcaggaggtgcagatcaccgaggagaagcccctgctgcccggccagacccccgaggccgccaagacccacagcgtggagaccccctacggcagcgtgaccttcaccgtgtacggcacccccaagcccaagagacccgccatcctgacctaccacgacgtgggcctgaactacaagagctgcttccagcccctgttccagttcgaggacatgcaggagatcatccagaacttcgtgagagtgcacgtggacgcccccggcatggaggagggcgcccccgtgttccccctgggctaccagtaccccagcctggaccagctggccgacatgatcccctgcgtgctgcagtacctgaacttcagcaccatcatcggcgtgggcgtgggcgccggcgcctacatcctggccagatacgccctgtag

SEQ ID NO: 11759 - DNA, 483 bp, synthetic construct
  misc_feature 1..483: note = Description of Artificial Sequence: Synthetic coding sequence
  source 1..483: mol_type = other DNA
atggccgagctgcaggaggtgcagatcaccgaggagaagcccctgctgcccggccagacccccgaggccgccaagacccacagcgtggagaccccctacggcagcgtgaccttcaccgtgtacggcacccccaagcccaagagacccgccatcctgacctaccacgacgtgggcctgaactacaagagctgcttccagcccctgttccagttcgaggacatgcaggagatcatccagaacttcgtgagagtgcacgtggacgcccccggcatggaggagggcgcccccgtgttccccctgggctaccagtaccccagcctggaccagctggccgacatgatcccctgcgtgctgcagtacctgaacttcagcaccatcatcggcgtgggcgtgggcgccggcgcctacatcctggccagatacgccctgaaccaccccgacaccgtggagggcctggtgctgatcaacatcgaccccaactag

SEQ ID NO: 11760 - DNA, 426 bp, synthetic construct
  misc_feature 1..426: note = Description of Artificial Sequence: Synthetic coding sequence
  source 1..426: mol_type = other DNA
atggccgagctgcaggaggtgcagatcaccgaggagaagcccctgctgcccggccagacccccgaggccgccaaggaggccgagctggccgccagaatcctgctggaccagggccagacccacagcgtggagaccccctacggcagcgtgaccttcaccgtgtacggcacccccaagcccaagagacccgccatcctgacctaccacgacgtgggcctgaactacaagagctgcttccagcccctgttccagttcgaggacatgcaggagatcatccagaacttcgtgagagtgcacgtggacgcccccggcatggaggagggcgcccccgtgttccccctgggctaccagtaccccagcctggaccagctggccgacatgatcccctgcgtgctgcagtacctgaacttcagcaccatcatctag

SEQ ID NO: 11761 - DNA, 357 bp, synthetic construct
  misc_feature 1..357: note = Description of Artificial Sequence: Synthetic coding sequence
  source 1..357: mol_type = other DNA
atggccgagctgcaggaggtgcagatcaccgaggagaagcccctgctgcccggccagacccccgaggccgccaaggaggccgagctggccgccagaatcctgctggaccagggccagacccacagcgtggagaccccctacggcagcgtgaccttcaccgtgtacggcacccccaagcccaagagacccgccatcctgacctaccacgacgtgggcctgaactacaagagctgcttccagcccctgttccagttcgaggacatgcaggagatcatccagaacttcgtgagagtgcacgtggacgcccccggcatggaggagggcgcccccgtgttccccctgggctaccagtactag

SEQ ID NO: 11762 - DNA, 423 bp, synthetic construct
  misc_feature 1..423: note = Description of Artificial Sequence: Synthetic coding sequence
  source 1..423: mol_type = other DNA
atggccgagctgcaggaggtgcagatcaccgaggagaagcccctgctgcccggccagacccccgaggccgccaaggaggccgagctggccgccagaatcctgctggaccagggccagacccacagcgtggagaccccctacggcagcgtgaccttcaccgtgtacggcacccccaagcccaagagacccgccatcctgacctaccacgacgtgggcctgaactacaagagctgcttccagcccctgttccagttcgaggacatgcaggagatcatccagaacttcgtgagagtgcacgtggacgcccccggcatggaggagggcgcccccgtgttccccctgggctaccagtaccccagcctggaccagctggccgacatgatcccctgcgtgctgcagtacctgaacttcagcaccatctag

SEQ ID NO: 11763 - DNA, 435 bp, synthetic construct
  misc_feature 1..435: note = Description of Artificial Sequence: Synthetic coding sequence
  source 1..435: mol_type = other DNA
atggccgagctgcaggaggtgcagatcaccgaggagaagcccctgctgcccggccagacccccgaggccgccaagacccacagcgtggagaccccctacggcagcgtgaccttcaccgtgtacggcacccccaagcccaagagacccgccatcctgacctaccacgacgtgggcctgaactacaagagctgcttccagcccctgttccagttcgaggacatgcaggagatcatccagaacttcgtgagagtgcacgtggacgcccccggcatggaggagggcgcccccgtgttccccctgggctaccagtaccccagcctggaccagctggccgacatgatcccctgcgtgctgcagtacctgaacttcagcaccatcatcggcgtgggcgtgggcgccggcgcctacatcctggccagatacgccctgaactag

SEQ ID NO: 11764 - DNA, 462 bp, synthetic construct; identical to SEQ ID NO: 11751
  misc_feature 1..462: note = Description of Artificial Sequence: Synthetic coding sequence
  source 1..462: mol_type = other DNA

SEQ ID NO: 11765 - DNA, 675 bp, synthetic construct
  misc_feature 1..675: note = Description of Artificial Sequence: Synthetic coding sequence
  source 1..675: mol_type = other DNA
atggccgagctgcaggaggtgcagatcaccgaggagaagcccctgctgcccggccagacccccgaggccgccaagacccacagcgtggagaccccctacggcagcgtgaccttcaccgtgtacggcacccccaagcccaagagacccgccatcctgacctaccacgacgtgggcctgaactacaagagctgcttccagcccctgttccagttcgaggacatgcaggagatcatccagaacttcgtgagagtgcacgtggacgcccccggcatggaggagggcgcccccgtgttccccctgggctaccagtaccccagcctggaccagctggccgacatgatcccctgcgtgctgcagtacctgaacttcagcaccatcatcggcgtgggcgtgggcgccggcgcctacatcctggccagatacgccctgaaccaccccgacaccgtggagggcctggtgctgatcaacatcgaccccaacgccaagggctggatggactgggccgcccacaagctgaccggcctgaccagcagcatccccgagatgatcctgggccacctgttcagccaggaggagctgagcggcaacagcgagctgatccagaagtacagaaacatcatcacccacgcccccaacctggacaacatcgagctgtactggaacagctacaactag

SEQ ID NO: 11766 - DNA, 453 bp, synthetic construct
  misc_feature 1..453: note = Description of Artificial Sequence: Synthetic coding sequence
  source 1..453: mol_type = other DNA
atggccgagctgcaggaggtgcagatcaccgaggagaagcccctgctgcccggccagacccccgaggccgccaagacccacagcgtggagaccccctacggcagcgtgaccttcaccgtgtacggcacccccaagcccaagagacccgccatcctgacctaccacgacgtgggcctgaactacaagagctgcttccagcccctgttccagttcgaggacatgcaggagatcatccagaacttcgtgagagtgcacgtggacgcccccggcatggaggagggcgcccccgtgttccccctgggctaccagtaccccagcctggaccagctggccgacatgatcccctgcgtgctgcagtacctgaacttcagcaccatcatcggcgtgggcgtgggcgccggcgcctacatcctggccagatacgccctgaaccaccccgacaccgtggagtag

SEQ ID NO: 11767 - DNA, 384 bp, synthetic construct
  misc_feature 1..384: note = Description of Artificial Sequence: Synthetic coding sequence
  source 1..384: mol_type = other DNA
atggccgagctgcaggaggtgcagatcaccgaggagaagcccctgctgcccggccagacccccgaggccgccaagacccacagcgtggagaccccctacggcagcgtgaccttcaccgtgtacggcacccccaagcccaagagacccgccatcctgacctaccacgacgtgggcctgaactacaagagctgcttccagcccctgttccagttcgaggacatgcaggagatcatccagaacttcgtgagagtgcacgtggacgcccccggcatggaggagggcgcccccgtgttccccctgggctaccagtaccccagcctggaccagctggccgacatgatcccctgcgtgctgcagtacctgaacttcagcaccatcatctag

SEQ ID NO: 11768 - DNA, 450 bp, synthetic construct
  misc_feature 1..450: note = Description of Artificial Sequence: Synthetic coding sequence
  source 1..450: mol_type = other DNA
atggccgagctgcaggaggtgcagatcaccgaggagaagcccctgctgcccggccagacccccgaggccgccaagacccacagcgtggagaccccctacggcagcgtgaccttcaccgtgtacggcacccccaagcccaagagacccgccatcctgacctaccacgacgtgggcctgaactacaagagctgcttccagcccctgttccagttcgaggacatgcaggagatcatccagaacttcgtgagagtgcacgtggacgcccccggcatggaggagggcgcccccgtgttccccctgggctaccagtaccccagcctggaccagctggccgacatgatcccctgcgtgctgcagtacctgaacttcagcaccatcatcggcgtgggcgtgggcgccggcgcctacatcctggccagatacgccctgaaccaccccgacaccgtgtag

SEQ ID NO: 11769 - DNA, 1128 bp, synthetic construct
  misc_feature 1..1128: note = Description of Artificial Sequence: Synthetic coding sequence
  source 1..1128: mol_type = other DNA
atggacgagctgcaggacgtgcagctgaccgagatcaagcccctgctgaacgacaagaacggcaccagaaacttccaggacttcgactgccaggagcacgacatcgagaccacccacggcgtggtgcacgtgaccatcagaggcctgcccaagggcaacagacccgtgatcctgacctaccacgacatcggcctgaaccacaagagctgcttcaacgccttcttcaacttcgaggacatgcaggagatcacccagcacttcgccgtgtgccacgtggacgcccccggccagcaggagggcgcccccagcttccccaccggctaccagtaccccaccatggacgagctggccgagatgctgccccccgtgctgacccacctgagcctgaagagcatcatcggcatcggcgtgggcgccggcgcctacatcctgagcagattcgccctgaaccaccccgagctggtggagggcctggtgctgatcaacgtggacccctgcgccaagggctggatcgactgggccgccagcaagctgagcggcctgaccaccaacgtggtggacatcatcctggcccaccacttcggccaggaggagctgcaggccaacctggacctgatccagacctacagaatgcacatcgcccaggacatcaaccaggacaacctgcagctgttcctgaacagctacaacggcagaagagacctggagatcgagagacccatcctgggccagaacgacaacaagagcaagaccctgaagtgcagcaccctgctggtggtgggcgacaacagccccgccgtggaggccgtggtggagtgcaacagcagactgaaccccatcaacaccaccctgctgaagatggccgactgcggcggcctgccccaggtggtgcagcccggcaagctgaccgaggccttcaagtacttcctgcagggcatgggctacatccccagcgccagcatgaccagactggccagaagcagaacccacagcaccagcagcagcctgggcagcggcgagagccccttcagcagaagcgtgaccagcaaccagagcgacggcacccaggagagctgcgagagccccgacgtgctggacagacaccagaccatggaggtgagctgctag

SEQ ID NO: 11770 - DNA, 1092 bp, synthetic construct
  misc_feature 1..1092: note = Description of Artificial Sequence: Synthetic coding sequence
  source 1..1092: mol_type = other DNA
atggacgagctgcaggacgtgcagctgaccgagatcaagcccctgctgaacgacaaggagcacgacatcgagaccacccacggcgtggtgcacgtgaccatcagaggcctgcccaagggcaacagacccgtgatcctgacctaccacgacatcggcctgaaccacaagagctgcttcaacgccttcttcaacttcgaggacatgcaggagatcacccagcacttcgccgtgtgccacgtggacgcccccggccagcaggagggcgcccccagcttccccaccggctaccagtaccccaccatggacgagctggccgagatgctgccccccgtgctgacccacctgagcctgaagagcatcatcggcatcggcgtgggcgccggcgcctacatcctgagcagattcgccctgaaccaccccgagctggtggagggcctggtgctgatcaacgtggacccctgcgccaagggctggatcgactgggccgccagcaagctgagcggcctgaccaccaacgtggtggacatcatcctggcccaccacttcggccaggaggagctgcaggccaacctggacctgatccagacctacagaatgcacatcgcccaggacatcaaccaggacaacctgcagctgttcctgaacagctacaacggcagaagagacctggagatcgagagacccatcctgggccagaacgacaacaagagcaagaccctgaagtgcagcaccctgctggtggtgggcgacaacagccccgccgtggaggccgtggtggagtgcaacagcagactgaaccccatcaacaccaccctgctgaagatggccgactgcggcggcctgccccaggtggtgcagcccggcaagctgaccgaggccttcaagtacttcctgcagggcatgggctacatccccagcgccagcatgaccagactggccagaagcagaacccacagcaccagcagcagcctgggcagcggcgagagccccttcagcagaagcgtgaccagcaaccagagcgacggcacccaggagagctgcgagagccccgacgtgctggacagacaccagaccatggaggtgagctgctag

SEQ ID NO: 11771 - DNA, 843 bp, synthetic construct
  misc_feature 1..843: note = Description of Artificial Sequence: Synthetic coding sequence
  source 1..843: mol_type = other DNA
atggtgcaggagaccagcagaaccctgaccgtgagataccagtaccccaccatggacgagctggccgagatgctgccccccgtgctgacccacctgagcctgaagagcatcatcggcatcggcgtgggcgccggcgcctacatcctgagcagattcgccctgaaccaccccgagctggtggagggcctggtgctgatcaacgtggacccctgcgccaagggctggatcgactgggccgccagcaagctgagcggcctgaccaccaacgtggtggacatcatcctggcccaccacttcggccaggaggagctgcaggccaacctggacctgatccagacctacagaatgcacatcgcccaggacatcaaccaggacaacctgcagctgttcctgaacagctacaacggcagaagagacctggagatcgagagacccatcctgggccagaacgacaacaagagcaagaccctgaagtgcagcaccctgctggtggtgggcgacaacagccccgccgtggaggccgtggtggagtgcaacagcagactgaaccccatcaacaccaccctgctgaagatggccgactgcggcggcctgccccaggtggtgcagcccggcaagctgaccgaggccttcaagtacttcctgcagggcatgggctacatccccagcgccagcatgaccagactggccagaagcagaacccacagcaccagcagcagcctgggcagcggcgagagccccttcagcagaagcgtgaccagcaaccagagcgacggcacccaggagagctgcgagagccccgacgtgctggacagacaccagaccatggaggtgagctgctag

SEQ ID NO: 11772 - DNA, 816 bp, synthetic construct
  misc_feature 1..816: note = Description of Artificial Sequence: Synthetic coding sequence
  source 1..816: mol_type = other DNA
atgatcagataccagtaccccaccatggacgagctggccgagatgctgccccccgtgctgacccacctgagcctgaagagcatcatcggcatcggcgtgggcgccggcgcctacatcctgagcagattcgccctgaaccaccccgagctggtggagggcctggtgctgatcaacgtggacccctgcgccaagggctggatcgactgggccgccagcaagctgagcggcctgaccaccaacgtggtggacatcatcctggcccaccacttcggccaggaggagctgcaggccaacctggacctgatccagacctacagaatgcacatcgcccaggacatcaaccaggacaacctgcagctgttcctgaacagctacaacggcagaagagacctggagatcgagagacccatcctgggccagaacgacaacaagagcaagaccctgaagtgcagcaccctgctggtggtgggcgacaacagccccgccgtggaggccgtggtggagtgcaacagcagactgaaccccatcaacaccaccctgctgaagatggccgactgcggcggcctgccccaggtggtgcagcccggcaagctgaccgaggccttcaagtacttcctgcagggcatgggctacatccccagcgccagcatgaccagactggccagaagcagaacccacagcaccagcagcagcctgggcagcggcgagagccccttcagcagaagcgtgaccagcaaccagagcgacggcacccaggagagctgcgagagccccgacgtgctggacagacaccagaccatggaggtgagctgctag

SEQ ID NO: 11773 - DNA, 420 bp, synthetic construct
  misc_feature 1..420: note = Description of Artificial Sequence: Synthetic coding sequence
  source 1..420: mol_type = other DNA
atgcccgagggccccgagctgcacctggccagccagttcgtgaacgaggcctgcagagccctggtgttcggcggctgcgtggagaagagcagcgtgagcagaaaccccgaggtgcccttcgagagcagcgcctacagaatcagcgccagcgccagaggcaaggagctgagactgatcctgagccccctgcccggcgcccagccccagcaggagcccagagcccccagaggcgccgccaccccctgcccccccgccctgctgcacggccccgcctggccccccgccagacccatgttcagaggccacccccccgtgagacccctgggcccctggggcaaggtggccgccggccccagagccctgtgcctggccggcgtgcccgccgtgcagggcgagtgcgccaccaagcccagcggctag

SEQ ID NO: 11774 - DNA, 1173 bp, synthetic construct
  misc_feature 1..1173: note = Description of Artificial Sequence: Synthetic coding sequence
  source 1..1173: mol_type = other DNA
atgcccgagggccccgagctgcacctggccagccagttcgtgaacgaggcctgcagagccctggtgttcggcggctgcgtggagaagagcagcgtgagcagaaaccccgaggtgcccttcgagagcagcgcctacagaatcagcgccagcgccagaggcaaggagctgagactgatcctgagccccctgcccggcgcccagccccagcaggagcccctggccctggtgttcagattcggcatgagcggcagcttccagctggtgcccagagaggagctgcccagacacgcccacctgagattctacaccgccccccccggccccagactggccctgtgcttcgtggacatcagaagattcggcagatgggacctgggcggcaagtggcagcccggcagaggcccctgcgtgctgcaggagtaccagcagttcagagagaacgtgctgagaaacctggccgacaaggccttcgacagacccatctgcgaggccctgctggaccagagattcttcaacggcatcggcaactacctgagagccgagatcctgtacagactgaagatcccccccttcgagaaggccagaagcgtgctggaggccctgcagcagcacagacccagccccgagctgaccctgagccagaagatcagaaccaagctgcagaaccccgacctgctggagctgtgccacagcgtgcccaaggaggtggtgcagctgggcggcaagggctacggcagcgagagcggcgaggaggacttcgccgccttcagagcctggctgagatgctacggcatgcccggcatgagcagcctgcaggacagacacggcagaaccatctggttccagggcgaccccggccccctggcccccaagggcagaaagagcagaaagaagaagagcaaggccacccagctgagccccgaggacagagtggaggacgccctgccccccagcaaggcccccagcagaaccagaagagccaagagagacctgcccaagagaaccgccacccagagacccgagggcaccagcctgcagcaggaccccgaggcccccaccgtgcccaagaagggcagaagaaagggcagacaggccgccagcggccactgcagacccagaaaggtgaaggccgacatccccagcctggagcccgagggcaccagcgccagctag

SEQ ID NO: 11775 - DNA, 1173 bp, synthetic construct; identical to SEQ ID NO: 11774
  misc_feature 1..1173: note = Description of Artificial Sequence: Synthetic coding sequence
  source 1..1173: mol_type = other DNA

SEQ ID NO: 11776 - DNA, 999 bp, synthetic construct
  misc_feature 1..999: note = Description of Artificial Sequence: Synthetic coding sequence
  source 1..999: mol_type = other DNA
atgcccgagggccccctggtgagaaagttccaccacctggtgagccccttcgtgggccagcaggtggtgaagaccggcggcagcagcaagaagctgcagcccgccagcctgcagagcctgtggctgcaggacacccaggtgcacggcaagaagctgttcctgagattcgacctggacgaggagatgggcccccccggcagcagccccacccccgagcccccccagaaggaggtgcagaaggagggcgccgccgaccccaagcaggtgggcgagcccagcggccagaagaccctggacggcagcagcagaagcgccgagctggtgccccagggcgaggacgacagcgagtacctggagagagacgcccccgccggcgacgccggcagatggctgagagtgagcttcggcctgttcggcagcgtgtgggtgaacgacttcagcagagccaagaaggccaacaagagaggcgactggagagaccccagccccagactggtgctgcacttcggcggcggcggcttcctggccttctacaactgccagctgagctggagcagcagccccgtggtgacccccacctgcgacatcctgagcgagaagttccacagaggccaggccctggaggccctgggccaggcccagcccgtgtgctacaccctgctggaccagagatacttcagcggcctgggcaacatcatcaagaacgaggccctgtacagagccggcatccaccccctgagcctgggcagcgtgctgagcgccagcagaagagaggtgctggtggaccacgtggtggagttcagcaccgcctggctgcagggcaagttccagggcagaccccagcacacccaggtgtaccagaaggagcagtgccccgccggccaccaggtgatgaaggaggccttcggccccgaggacggcctgcagagactgacctggtggtgcccccagtgccagccccagctgagcgaggagcccgagcagtgccagttcagctag

SEQ ID NO: 11777 - DNA, 954 bp, synthetic construct
  misc_feature 1..954: note = Description of Artificial Sequence: Synthetic coding sequence
  source 1..954: mol_type = other DNA
atgcccgagggccccctggtgagaaagttccaccacctggtgagccccttcgtgggccagcaggtggtgaagaccggcggcagcagcaagaagctgcagcccgccagcctgcagagcctgtggctgcaggacacccaggtgcacggcaagaagctgttcctgagattcgacctggacgaggagatgggcccccccggcagcagccccacccccgagcccccccagaaggaggtgcagaagaagaccctggacggcagcagcagaagcgccgagctggtgccccagggcgaggacgacagcgagtacctggagagagacgcccccgccggcgacgccggcagatggctgagagtgagcttcggcctgttcggcagcgtgtgggtgaacgacttcagcagagccaagaaggccaacaagagaggcgactggagagaccccagccccagactggtgctgcacttcggcggcggcggcttcctggccttctacaactgccagctgagctggagcagcagccccgtggtgacccccacctgcgacatcctgagcgagaagttccacagaggccaggccctggaggccctgggccaggcccagcccgtgtgctacaccctgctggaccagagatacttcagcggcctgggcaacatcatcaagaacgaggccctgtacagagccggcatccaccccctgagcctgggcagcgtgctgagcgccagcagaagagaggtgctggtggaccacgtggtggagttcagcaccgcctggctgcagggcaagttccagggcagaccccagcacacccaggtgtaccagaaggagcagtgccccgccggccaccaggtgatgaaggaggccttcggccccgaggacggcctgcagagactgacctggtggtgcccccagtgccagccccagctgagcgaggagcccgagcagtgccagttcagctag

SEQ ID NO: 11778 - DNA, 816 bp, synthetic construct
  misc_feature 1..816: note = Description of Artificial Sequence: Synthetic coding sequence
  source 1..816: mol_type = other DNA
atgggcccccccggcagcagccccacccccgagcccccccagaaggaggtgcagaaggagggcgccgccgaccccaagcaggtgggcgagcccagcggccagaagaccctggacggcagcagcagaagcgccgagctggtgccccagggcgaggacgacagcgagtacctggagagagacgcccccgccggcgacgccggcagatggctgagagtgagcttcggcctgttcggcagcgtgtgggtgaacgacttcagcagagccaagaaggccaacaagagaggcgactggagagaccccagccccagactggtgctgcacttcggcggcggcggcttcctggccttctacaactgccagctgagctggagcagcagccccgtggtgacccccacctgcgacatcctgagcgagaagttccacagaggccaggccctggaggccctgggccaggcccagcccgtgtgctacaccctgctggaccagagatacttcagcggcctgggcaacatcatcaagaacgaggccctgtacagagccggcatccaccccctgagcctgggcagcgtgctgagcgccagcagaagagaggtgctggtggaccacgtggtggagttcagcaccgcctggctgcagggcaagttccagggcagaccccagcacacccaggtgtaccagaaggagcagtgccccgccggccaccaggtgatgaaggaggccttcggccccgaggacggcctgcagagactgacctggtggtgcccccagtgccagccccagctgagcgaggagcccgagcagtgccagttcagctag

SEQ ID NO: 11779 - DNA, 999 bp, synthetic construct; identical to SEQ ID NO: 11776
  misc_feature 1..999: note = Description of Artificial Sequence: Synthetic coding sequence
  source 1..999: mol_type = other DNA

SEQ ID NO: 11780 - DNA, 999 bp, synthetic construct; identical to SEQ ID NO: 11776
  misc_feature 1..999: note = Description of Artificial Sequence: Synthetic coding sequence
  source 1..999: mol_type = other DNA

SEQ ID NO: 11781 - DNA, 651 bp, synthetic construct
  misc_feature 1..651: note = Description of Artificial Sequence: Synthetic coding sequence
  source 1..651: mol_type = other DNA
atgcccgagggccccctggtgagaaagttccaccacctggtgagccccttcgtgggccagcaggtggtgaagaccggcggcagcagcaagaagctgcagcccgccagcctgcagagcctgtggctgcaggacacccaggtgagactggtgctgcacttcggcggcggcggcttcctggccttctacaactgccagctgagctggagcagcagccccgtggtgacccccacctgcgacatcctgagcgagaagttccacagaggccaggccctggaggccctgggccaggcccagcccgtgtgctacaccctgctggaccagagatacttcagcggcctgggcaacatcatcaagaacgaggccctgtacagagccggcatccaccccctgagcctgggcagcgtgctgagcgccagcagaagagaggtgctggtggaccacgtggtggagttcagcaccgcctggctgcagggcaagttccagggcagaccccagcacacccaggtgtaccagaaggagcagtgccccgccggccaccaggtgatgaaggaggccttcggccccgaggacggcctgcagagactgacctggtggtgcccccagtgccagccccagctgagcgaggagcccgagcagtgccagttcagctag

SEQ ID NO: 11782 - DNA, 1818 bp, synthetic construct
  misc_feature 1..1818: note = Description of Artificial Sequence: Synthetic coding sequence
  source 1..1818: mol_type = other DNA
atggtggagggccccggctgcaccctgaacggcgagaagatcagagccagagtgctgcccggccaggccgtgaccggcgtgagaggcagcgccctgagaagcctgcagggcagagccctgagactggccgccagcaccgtggtggtgagcccccaggccgccgccctgaacaacgacagcagccagaacgtgctgagcctgttcaacggctacgtgtacagcggcgtggagaccctgggcaaggagctgttcatgtacttcggccccaaggccctgagaatccacttcggcatgaagggcttcatcatgatcaaccccctggagtacaagtacaagaacggcgccagccccgtgctggaggtgcagctgaccaaggacctgatctgcttcttcgacagcagcgtggagctgagaaacagcatggagagccagcagagaatcagaatgatgaaggagctggacgtgtgcagccccgagttcagcttcctgagagccgagagcgaggtgaagaagcagaagggcagaatgctgggcgacgtgctgatggaccagaacgtgctgcccggcgtgggcaacatcatcaagaacgaggccctgttcgacagcggcctgcaccccgccgtgaaggtgtgccagctgaccgacgagcagatccaccacctgatgaagatgatcagagacttcagcatcctgttctacagatgcagaaaggccggcctggccctgagcaagcactacaaggtgtacaagagacccaactgcggccagtgccactgcagaatcaccgtgtgcagattcggcgacaacaacagaatgacctacttctgcccccactgccagaaggagaacccccagcacgtggacatctgcaagctgcccaccagaaacaccatcatcagctggaccagcagcagagtggaccacgtgatggacagcgtggccagaaagagcgaggagcactggacctgcgtggtgtgcaccctgatcaacaagcccagcagcaaggcctgcgacgcctgcctgaccagcagacccatcgacagcgtgctgaagagcgaggagaacagcaccgtgttcagccacctgatgaagtacccctgcaacaccttcggcaagccccacaccgaggtgaagatcaacagaaagaccgccttcggcaccaccaccctggtgctgaccgacttcagcaacaagagcagcaccctggagagaaagaccaagcagaaccagatcctggacgaggagttccagaacagcccccccgccagcgtgtgcctgaacgacatccagcaccccagcaagaagaccaccaacgacatcacccagcccagcagcaaggtgaacatcagccccaccatcagcagcgagagcaagctgttcagccccgcccacaagaagcccaagaccgcccagtacagcagccccgagctgaagagctgcaaccccggctacagcaacagcgagctgcagatcaacatgaccgacggccccagaaccctgaaccccgacagccccagatgcagcaagcacaacagactgtgcatcctgagagtggtgggcaaggacggcgagaacaagggcagacagttctacgcctgccccctgcccagagaggcccagtgcggcttcttcgagtgggccgacctgagcttccccttctgcaaccacggcaagagaagcaccatgaagaccgtgctgaagatcggccccaacaacggcaagaacttcttcgtgtgccccctgggcaaggagaagcagtgcaacttcttccagtgggccgagaacggccccggcatcaagatcatccccggctgctag

SEQ ID NO: 11783 - DNA, 1743 bp, synthetic construct
  misc_feature 1..1743: note = Description of Artificial Sequence: Synthetic coding sequence
  source 1..1743: mol_type = other DNA
atgcccggctggccctggggcctgctgctgaccgccggcaccctgttcgccgccctgagccccggcccccccgcccccgccgacccctgccacgacgagggcggcgcccccagaggctgcgtgcccggcctggtgaacgccgccctgggcagagaggtgctggccagcagcacctgcggcagacccgccaccagagcctgcgacgccagcgaccccagaagagcccacagccccgccctgctgaccagccccggcggcaccgccagccccctgtgctggagaagcgagagcctgcccagagcccccctgaacgtgaccctgaccgtgcccctgggcaaggccttcgagctggtgttcgtgagcctgagattctgcagcgccccccccgccagcgtggccctgctgaagagccaggaccacggcagaagctgggcccccctgggcttcttcagcagccactgcgacctggactacggcagactgcccgcccccgccaacggccccgccggccccggccccgaggccctgtgcttccccgcccccctggcccagcccgacggcagcggcctgctggccttcagcatgcaggacagcagcccccccggcctggacctggacagcagccccgtgctgcaggactgggtgaccgccaccgacgtgagagtggtgctgaccagacccagcaccgccggcgaccccagagacatggaggccgtggtgccctacagctacgccgccaccgacctgcaggtgggcggcagatgcaagtgcaacggccacgccagcagatgcctgctggacacccagggccacctgatctgcgactgcagacacggcaccgagggccccgactgcggcagatgcaagcccttctactgcgacagaccctggcagagagccaccgccagagagagccacgcctgcctggcctgcagctgcaacggccacgccagaagatgcagattcaacatggagctgtacagactgagcggcagaagaagcggcggcgtgtgcctgaactgcagacacaacaccgccggcagacactgccactactgcagagagggcttctacagagaccccggcagagccctgagcgacagaagagcctgcagagcctgcgactgccaccccgtgggcgccgccggcaagacctgcaaccagaccaccggccagtgcccctgcaaggacggcgtgaccggcctgacctgcaacagatgcgcccccggcttccagcagagcagaagccccgtggccccctgcgtgaagacccccatccccggccccaccgaggacagcagccccgtgcagccccaggactgcgacagccactgcaagcccgccagaggcagctacagaatcagcctgaagaagttctgcaagaaggactacgccgtgcaggtggccgtgggcgccagaggcgaggccagaggcgcctggaccagattccccgtggccgtgctggccgtgttcagaagcggcgaggagagagccagaagaggcagcagcgccctgtgggtgcccgccggcgacgccgcctgcggctgccccagactgctgcccggcagaagatacctgctgctgggcggcggccccggcgccgccgccggcggcgccggcggcagaggccccggcctgatcgccgccagaggcagcctggtgctgccctggagagacgcctggaccagaagactgagaagactgcagagaagagagagaagaggcagatgcagcgccgcctag

SEQ ID NO: 11784 - DNA, 2547 bp, synthetic construct
  misc_feature 1..2547: note = Description of Artificial Sequence: Synthetic coding sequence
  source 1..2547: mol_type = other DNA
ctgttctgcttcgtgttcagcgtgagcctgcaggtggacatcgtgcccagccagggcgagatcagcgtgggcgagagcaagttcttcctgtgccaggtggccggcgacgccaaggacaaggacatcagctggttcagccccaacggcgagaagctgacccccaaccagcagagaatcagcgtggtgtggaacgacgacagcagcagcaccctgaccatctacaacgccaacatcgacgacgccggcatctacaagtgcgtggtgaccggcgaggacggcagcgagagcgaggccaccgtgaacgtgaagatcttccagaagctgatgttcaagaacgcccccaccccccaggagttcagagagggcgaggacgccgtgatcgtgtgcgacgtggtgagcagcctgccccccaccatcatctggaagcacaagggcagagacgtgatcctgaagaaggacgtgagattcatcgtgctgagcaacaactacctgcagatcagaggcatcaagaagaccgacgagggcacctacagatgcgagggcagaatcctggccagaggcgagatcaacttcaaggacatccaggtgatcgtgaacgtgccccccaccatccaggccagacagaacatcgtgaacgccaccgccaacctgggccagagcgtgaccctggtgtgcgacgccgagggcttccccgagcccaccatgagctggaccaaggacggcgagcagatcgagcaggaggaggacgacgagaagtacatcttcagcgacgacagcagccagctgaccatcaagaaggtggacaagaacgacgaggccgagtacatctgcatcgccgagaacaaggccggcgagcaggacgccaccatccacctgaaggtgttcgccaagcccaagatcacctacgtggagaaccagaccgccatggagctggaggagcaggtgaccctgacctgcgaggccagcggcgaccccatccccagcatcacctggagaaccagcaccagaaacatcagcagcgaggagaaggccagctggaccagacccgagaagcaggagaccctggacggccacatggtggtgagaagccacgccagagtgagcagcctgaccctgaagagcatccagtacaccgacgccggcgagtacatctgcaccgccagcaacaccatcggccaggacagccagagcatgtacctggaggtgcagtacgcccccaagctgcagggccccgtggccgtgtacacctgggagggcaaccaggtgaacatcacctgcgaggtgttcgcctaccccagcgccaccatcagctggttcagagacggccagctgctgcccagcagcaactacagcaacatcaagatctacaacacccccagcgccagctacctggaggtgacccccgacagcgagaacgacttcggcaactacaactgcaccgccgtgaacagaatcggccaggagagcctggagttcatcctggtgcaggccgacacccccagcagccccagcatcgaccaggtggagccctacagcagcaccgcccaggtgcagttcgacgagcccgaggccaccggcggcgtgcccatcctgaagtacaaggccgagtggagagccgtgggcgaggaggtgtggcacagcaagtggtacgacgccaaggaggccagcatggagggcatcgtgaccatcgtgggcctgaagcccgagaccacctacgccgtgagactggccgccctgaacggcaagggcctgggcgagatcagcgccgccagcgagttcaagacccagcccgtgcccggcgagcccagcgcccccaagctggagggccagatgggcgaggacggcaacagcatcaaggtgaacctgatcaagcaggacgacggcggcagccccatcagacactacctggtgagatacagagccctgagcagcgagtggaagcccgagatcagactgcccagcggcagcgaccacgtgatgctgaagagcctggactggaacgccgagtacgaggtgtacgtggtggccgagaaccagcagggcaagagcaaggccgcccacttcgtgttcagaaccagcgcccagcccaccgccatccccgccaacggcagccccaccagcggcctgagcaccggcgccatcgtgggcatcctgatcgtgatcttcgtgctgctgctggtggtggtggacatcacctgctacttcctgaacaagtgcggcctgttcatgtgcatcgccgtgaacctgtgcggcaaggccggccccggcgccaagggcaaggacatggaggagggcaaggccgccttcagcaaggacgagagcaaggagcccatcgtggaggtgagaaccgaggaggagagaacccccaaccacgacggcggcaagcacaccgagcccaacgagaccacccccctgaccgagcccgagaagggccccgtggaggccaagcccgagtgccaggagaccgagaccaagcccgcccccgccgaggtgaagaccgtgcccaacgacgccacccagaccaaggagaacgagagcaaggcctag

SEQ ID NO: 11785 - DNA, 1995 bp, synthetic construct
  misc_feature 1..1995: note = Description of Artificial Sequence: Synthetic coding sequence
  source 1..1995: mol_type = other DNA
atcaccatcagagacgagatctgggtgctgttctgcttcgtgttcagcgtgagcctgcaggtggacatcgtgcccagccagggcgagatcagcgtgggcgagagcaagttcttcctgtgccaggtggccggcgacgccaaggacaaggacatcagctggttcagccccaacggcgagaagctgacccccaaccagcagagaatcagcgtggtgtggaacgacgacagcagcagcaccctgaccatctacaacgccaacatcgacgacgccggcatctacaagtgcgtggtgaccggcgaggacggcagcgagagcgaggccaccgtgaacgtgaagatcttccagaagctgatgttcaagaacgcccccaccccccaggagttcagagagggcgaggacgccgtgatcgtgtgcgacgtggtgagcagcctgccccccaccatcatctggaagcacaagggcagagacgtgatcctgaagaaggacgtgagattcatcgtgctgagcaacaactacctgcagatcagaggcatcaagaagaccgacgagggcacctacagatgcgagggcagaatcctggccagaggcgagatcaacttcaaggacatccaggtgatcgtgaacgtgccccccaccatccaggccagacagaacatcgtgaacgccaccgccaacctgggccagagcgtgaccctggtgtgcgacgccgagggcttccccgagcccaccatgagctggaccaaggacggcgagcagatcgagcaggaggaggacgacgagaagtacatcttcagcgacgacagcagccagctgaccatcaagaaggtggacaagaacgacgaggccgagtacatctgcatcgccgagaacaaggccggcgagcaggacgccaccatccacctgaaggtgttcgccaagcccaagatcacctacgtggagaaccagaccgccatggagctggaggagcaggtgaccctgacctgcgaggccagcggcgaccccatccccagcatcacctggagaaccagcaccagaaacatcagcagcgaggagaaggccagctggaccagacccgagaagcaggagaccctggacggccacatggtggtgagaagccacgccagagtgagcagcctgaccctgaagagcatccagtacaccgacgccggcgagtacatctgcaccgccagcaacaccatcggccaggacagccagagcatgtacctggaggtgcagtacgcccccaagctgcagggccccgtggccgtgtacacctgggagggcaaccaggtgaacatcacctgcgaggtgttcgcctaccccagcgccaccatcagctggttcagagacggccagctgctgcccagcagcaactacagcaacatcaagatctacaacacccccagcgccagctacctggaggtgacccccgacagcgagaacgacttcggcaactacaactgcaccgccgtgaacagaatcggccaggagagcctggagttcatcctggtgcaggccgacacccccagcagccccagcatcgaccaggtggagccctacagcagcaccgcccaggtgcagttcgacgagcccgaggccaccggcggcgtgcccatcctgaagtacaaggccgagtggagagccgtgggcgaggaggtgtggcacagcaagtggtacgacgccaaggaggccagcatggagggcatcgtgaccatcgtgggcctgaagcccgagaccacctacgccgtgagactggccgccctgaacggcaagggcctgggcgagatcagcgccgccagcgagttcaagacccagcccgtgcaggcccccccccccaccgccagcgccagcagcagcacccccgtgcccctgagcccccccgacaccacctggcccctgcccgccctggccaccaccgagcccgccaagaacatcgcccagaaccactgctgcaacatgttccaggccggcctgcacaacgccctgatgaagtag

SEQ ID NO: 11786 - DNA, 942 bp, synthetic construct
  misc_feature 1..942: note = Description of Artificial Sequence: Synthetic coding sequence
  source 1..942: mol_type = other DNA
atggagggcatcgtgaccatcgtgggcctgaagcccgagaccacctacgccgtgagactggccgccctgaacggcaagggcctgggcgagatcagcgccgccagcgagttcaagacccagcccgtgcacagcccccccccccccgccagcgccagcagcagcacccccgtgcccctgagcccccccgacaccggcgagcccagcgcccccaagctggagggccagatgggcgaggacggcaacagcatcaaggtgaacctgatcaagcaggacgacggcggcagccccatcagacactacctggtgagatacagagccctgagcagcgagtggaagcccgagatcagactgcccagcggcagcgaccacgtgatgctgaagagcctggactggaacgccgagtacgaggtgtacgtggtggccgagaaccagcagggcaagagcaaggccgcccacttcgtgttcagaaccagcgcccagcccaccgccatccccgccaacggcagccccaccagcggcctgagcaccggcgccatcgtgggcatcctgatcgtgatcttcgtgctgctgctggtggtggtggacatcacctgctacttcctgaacaagtgcggcctgttcatgtgcatcgccgtgaacctgtgcggcaaggccggccccggcgccaagggcaaggacatggaggagggcaaggccgccttcagcaaggacgagagcaaggagcccatcgtggaggtgagaaccgaggaggagagaacccccaaccacgacggcggcaagcacaccgagcccaacgagaccacccccctgaccgagcccgagaagggccccgtggaggccaagcccgagtgccaggagaccgagaccaagcccgcccccgccgaggtgaagaccgtgcccaacgacgccacccagaccaaggagaacgagagcaaggcctag

SEQ ID NO: 11787 - DNA, 570 bp, synthetic construct
  misc_feature 1..570: note = Description of Artificial Sequence: Synthetic coding sequence
  source 1..570: mol_type = other DNA
atgaccgagtacaagctggtggtggtgggcgccggcggcgtgggcaagagcgccctgaccatccagctgatccagaaccacttcgtggacgagtacgaccccaccatcgaggacagctacagaaagcaggtggtgatcgacggcgagacctgcctgctggacatcctggacaccgccggccaggaggagtacagcgccatgagagaccagtacatgagaaccggcgagggcttcctgtgcgtgttcgccatcaacaacagcaagagcttcgccgacatcaacctgtacagagagcagatcaagagagtgaaggacagcgacgacgtgcccatggtgctggtgggcaacaagtgcgacctgcccaccagaaccgtggacaccaagcaggcccacgagctggccaagagctacggcatccccttcatcgagaccagcgccaagaccagacagggcgtggaggacgccttctacaccctggtgagagagatcagacagtacagaatgaagaagctgaacagcagcgacgacggcacccagggctgcatgggcctgccctgcgtggtgatgtag

SEQ ID NO: 11788 - DNA, 651 bp, synthetic construct
  misc_feature 1..651: note = Description of Artificial Sequence: Synthetic coding sequence
  source 1..651: mol_type = other DNA
atgcccggcaacctgatgagccagaccagcagagccgtgagcatctggaagttccccgccaagctgggcaagacccacggccacagagccctggaggccaccggcatgatgctgagagtgctggtgggcgccgtgctgcccgccatgctgctggccgcccccccccccatcaacaagctggccctgttccccgacaagagcgcctggtgcgaggccaagaacatcacccagatcgtgggccacagcggctgcgaggccaagagcatccagaacagagcctgcctgggccagtgcttcagctacagcgtgcccaacaccttcccccagagcaccgagagcctggtgcactgcgacagctgcatgcccgcccagagcatgtgggagatcgtgaccctggagtgccccggccacgaggaggtgcccagagtggacaagctggtggagaagatcctgcactgcagctgccaggcctgcggcaaggagcccagccacgagggcctgagcgtgtacgtgcagggcgaggacggccccggcagccagcccggcacccacccccacccccacccccacccccaccccggcggccagacccccgagcccgaggacccccccggcgccccccacaccgaggaggagggcgccgaggactag

SEQ ID NO: 11789 - DNA, 546 bp, synthetic construct
  misc_feature 1..546: note = Description of Artificial Sequence: Synthetic coding sequence
  source 1..546: mol_type = other DNA
atgatgctgagagtgctggtgggcgccgtgctgcccgccatgctgctggccgcccccccccccatcaacaagctggccctgttccccgacaagagcgcctggtgcgaggccaagaacatcacccagatcgtgggccacagcggctgcgaggccaagagcatccagaacagagcctgcctgggccagtgcttcagctacagcgtgcccaacaccttcccccagagcaccgagagcctggtgcactgcgacagctgcatgcccgcccagagcatgtgggagatcgtgaccctggagtgccccggccacgaggaggtgcccagagtggacaagctggtggagaagatcctgcactgcagctgccaggcctgcggcaaggagcccagccacgagggcctgagcgtgtacgtgcagggcgaggacggccccggcagccagcccggcacccacccccacccccacccccacccccaccccggcggccagacccccgagcccgaggacccccccggcgccccccacaccgaggaggagggcgccgaggactag

SEQ ID NO: 11790 - DNA, 351 bp, synthetic construct
  misc_feature 1..351: note = Description of Artificial Sequence: Synthetic coding sequence
  source 1..351: mol_type = other DNA
atgatgctgagagtgctggtgggcgccgtgctgcccgccatgctgctggccgcccccccccccatcaacaagctggccctgttccccgacaagagcgcctggtgcgaggccaagaacatcacccagatcgtgggccacagcggctgcgaggccaagagcatccagaacagagcctgcctgggccagtgcttcagctacagcgtgcccaacaccttcccccagagcaccgagagcctggtgcactgcgacagctgcatgcccgcccagagcatgtgggagatcgtgaccctggagtgccccggccacgaggaggtgcccagagtggacaagctggtggagaagatcctgtag

SEQ ID NO: 11791 - DNA, 492 bp, synthetic construct
  misc_feature 1..492: note = Description of Artificial Sequence: Synthetic coding sequence
  source 1..492: mol_type = other DNA
atgctgagagtgctggtgggcgccgtgctgcccgccatgctgctggccgcccccccccccatcaacaagctggccctgttccccgacaagagcgcctggtgcgaggccaagaacatcacccagatcgtgggccacagcggctgcgaggccaagagcatccagaacagagcctgcctgggccagtgcttcagctacagcgtgcccaacaccttcccccagagcaccgagagcctggtgcactgcgacagctgcatgcccgcccagagcatgtgggagatcgtgaccctggagtgccccggccacgaggaggtgcccagagtggacaagctggtggagaagatcctgcactgcagctgccaggcctgcggcaaggagcccagccacgagggcctgagcgtgtacgtgcagggcgaggacggccccggcagccagcccggcacccacccccacccccacccccacccccaccccggcggccagacccccgagtag

SEQ ID NO: 11792 - DNA, 354 bp, synthetic construct
  misc_feature 1..354: note = Description of Artificial Sequence: Synthetic coding sequence
  source 1..354: mol_type = other DNA
atgatgctgagagtgctggtgggcgccgtgctgcccgccatgctgctggccgcccccccccccatcaacaagctggccctgttccccgacaagagcgcctggtgcgaggccaagaacatcacccagatcgtgggccacagcggctgcgaggccaagagcatccagaacagagcctgcctgggccagtgcttcagctacagcgtgcccaacaccttcccccagagcaccgagagcctggtgcactgcgacagctgcatgcccgcccagagcatgtgggagatcgtgaccctggagtgccccggccacgaggaggtgcccagagtggacaagctggtggagaagatcctgcactag

SEQ ID NO: 11793 - DNA, 330 bp, synthetic construct
  misc_feature 1..330: note = Description of Artificial Sequence: Synthetic coding sequence
  source 1..330: mol_type = other DNA
atgatgctgagagtgctggtgggcgccgtgctgcccgccatgctgctggccgcccccccccccatcaacaagctggccctgttccccgacaagagcgcctggtgcgaggccaagaacatcacccagatcgtgggccacagcggctgcgaggccaagagcatccagaacagagcctgcctgggccagtgcttcagctacagcgtgcccaacaccttcccccagagcaccgagagcctggtgcactgcgacagctgcatgcccgcccagagcatgtgggagatcgtgaccctggagtgccccggccacgaggaggtgcccagagtggactag

SEQ ID NO: 11794 - DNA, 387 bp, synthetic construct
  misc_feature 1..387: note = Description of Artificial Sequence: Synthetic coding sequence
  source 1..387: mol_type = other DNA
atgatgctgagagtgctggtgggcgccgtgctgcccgccatgctgctggccgcccccccccccatcaacaagctggccctgttccccgacaagagcgcctggtgcgaggccaagaacatcacccagatcgtgggccacagcggctgcgaggccaagagcatccagaacagagcctgcctgggccagtgcttcagctacagcgtgcccaacaccttcccccagagcaccgagagcctggtgcactgcgacagctgcatgcccgcccagagcatgtgggagatcgtgaccctggagtgccccggccacgaggaggtgcccagagtggacaagctggtggagaagatcctgcactgcagctgccaggcctgcggcaaggagcccagctag

SEQ ID NO: 11795 - DNA, 543 bp, synthetic construct
  misc_feature 1..543: note = Description of Artificial Sequence: Synthetic coding sequence
  source 1..543: mol_type = other DNA
atgctgagagtgctggtgggcgccgtgctgcccgccatgctgctggccgcccccccccccatcaacaagctggccctgttccccgacaagagcgcctggtgcgaggccaagaacatcacccagatcgtgggccacagcggctgcgaggccaagagcatccagaacagagcctgcctgggccagtgcttcagctacagcgtgcccaacaccttcccccagagcaccgagagcctggtgcactgcgacagctgcatgcccgcccagagcatgtgggagatcgtgaccctggagtgccccggccacgaggaggtgcccagagtggacaagctggtggagaagatcctgcactgcagctgccaggcctgcggcaaggagcccagccacgagggcctgagcgtgtacgtgcagggcgaggacggccccggcagccagcccggcacccacccccacccccacccccacccccaccccggcggccagacccccgagcccgaggacccccccggcgccccccacaccgaggaggagggcgccgaggactag

SEQ ID NO: 11796 - DNA, 8457 bp, synthetic construct
  misc_feature 1..8457: note = Description of Artificial Sequence: Synthetic coding sequence
  source 1..8457: mol_type = other DNA
atggccgcccacagacccgtggagtgggtgcaggccgtggtgagcagattcgacgagcagctgcccatcaagaccggccagcagaacacccacaccaaggtgagcaccgagcacaacaaggagtgcctgatcaacatcagcaagtacaagttcagcctggtgatcagcggcctgaccaccatcctgaagaacgtgaacaacatgagaatcttcggcgaggccgccgagaagaacctgtacctgagccagctgatcatcctggacaccctggagaagtgcctggccggccagcccaaggacaccatgagactggacgagaccatgctggtgaagcagctgctgcccgagatctgccacttcctgcacacctgcagagagggcaaccagcacgccgccgagctgagaaacagcgccagcggcgtgctgttcagcctgagctgcaacaacttcaacgccgtgttcagcagaatcagcaccagactgcaggagctgaccgtgtgcagcgaggacaacgtggacgtgcacgacatcgagctgctgcagtacatcaacgtggactgcgccaagctgaagagactgctgaaggagaccgccttcaagttcaaggccctgaagaaggtggcccagctggccgtgatcaacagcctggagaaggccttctggaactgggtggagaactaccccgacgagttcaccaagctgtaccagatcccccagaccgacatggccgagtgcgccgagaagctgttcgacctggtggacggcttcgccgagagcaccaagagaaaggccgccgtgtggcccctgcagatcatcctgctgatcctgtgccccgagatcatccaggacatcagcaaggacgtggtggacgagaacaacatgaacaagaagctgttcctggacagcctgagaaaggccctggccggccacggcggcagcagacagctgaccgagagcgccgccatcgcctgcgtgaagctgtgcaaggccagcacctacatcaactgggaggacaacagcgtgatcttcctgctggtgcagagcatggtggtggacctgaagaacctgctgttcaaccccagcaagcccttcagcagaggcagccagcccgccgacgtggacctgatgatcgactgcctggtgagctgcttcagaatcagcccccacaacaaccagcacttcaagatctgcctggcccagaacagccccagcaccttccactacgtgctggtgaacagcctgcacagaatcatcaccaacagcgccctggactggtggcccaagatcgacgccgtgtactgccacagcgtggagctgagaaacatgttcggcgagaccctgcacaaggccgtgcagggctgcggcgcccaccccgccatcagaatggcccccagcctgaccttcaaggagaaggtgaccagcctgaagttcaaggagaagcccaccgacctggagaccagaagctacaagtacctgctgctgagcatggtgaagctgatccacgccgaccccaagctgctgctgtgcaaccccagaaagcagggccccgagacccagggcagcaccgccgagctgatcaccggcctggtgcagctggtgccccagagccacatgcccgagatcgcccaggaggccatggaggccctgctggtgctgcaccagctggacagcatcgacctgtggaaccccgacgcccccgtggagaccttctgggagatcagcagccagatgctgttctacatctgcaagaagctgaccagccaccagatgctgagcagcaccgagatcctgaagtggctgagagagatcctgatctgcagaaacaagttcctgctgaagaacaagcaggccgacagaagcagctgccacttcctgctgttctacggcgtgggctgcgacatccccagcagcggcaacaccagccagatgagcatggaccacgaggagctgctgagaacccccggcgccagcctgagaaagggcaagggcaacagcagcatggacagcgccgccggctgcagcggcaccccccccatctgcagacaggcccagaccaagctggaggtggccctgtacatgttcctgtggaaccccgacaccgaggccgtgctggtggccatgagctgcttcagacacctgtgcgaggaggccgacatcagatgcggcgtggacgaggtgagcgtgcacaacctgctgcccaactacaacaccttcatggagttcgccagcgtgagcaacatgatgagcaccggcagagccgccctgcagaagagagtgatggccctgctgagaagaatcgagcaccccaccgccggcaacaccgaggcctgggaggacacccacgccaagtgggagcaggccaccaagctgatcctgaactaccccaaggccaagatggaggacggccaggccgccgagagcctgcacaagaccatcgtgaagagaagaatgagccacgtgagcggcggcggcagcatcgacctgagcgacaccgacagcctgcaggagtggatcaacatgaccggcttcctgtgcgccctgggcggcgtgtgcctgcagcagagaagcaacagcggcctggccacctacagcccccccatgggccccgtgagcgagagaaagggcagcatgatcagcgtgatgagcagcgagggcaacgccgacacccccgtgagcaagttcatggacagactgctgagcctgatggtgtgcaaccacgagaaggtgggcctgcagatcagaaccaacgtgaaggacctggtgggcctggagctgagccccgccctgtaccccatgctgttcaacaagctgaagaacaccatcagcaagttcttcgacagccagggccaggtgctgctgaccgacaccaacacccagttcgtggagcagaccatcgccatcatgaagaacctgctggacaaccacaccgagggcagcagcgagcacctgggccaggccagcatcgagaccatgatgctgaacctggtgagatacgtgagagtgctgggcaacatggtgcacgccatccagatcaagaccaagctgtgccagctggtggaggtgatgatggccagaagagacgacctgagcttctgccaggagatgaagttcagaaacaagatggtggagtacctgaccgactgggtgatgggcaccagcaaccaggccgccgacgacgacgtgaagtgcctgaccagagacctggaccaggccagcatggaggccgtggtgagcctgctggccggcctgcccctgcagcccgaggagggcgacggcgtggagctgatggaggccaagagccagctgttcctgaagtacttcaccctgttcatgaacctgctgaacgactgcagcgaggtggaggacgagagcgcccagaccggcggcagaaagagaggcatgagcagaagactggccagcctgagacactgcaccgtgctggccatgagcaacctgctgaacgccaacgtggacagcggcctgatgcacagcatcggcctgggctaccacaaggacctgcagaccagagccaccttcatggaggtgctgaccaagatcctgcagcagggcaccgagttcgacaccctggccgagaccgtgctggccgacagattcgagagactggtggagctggtgaccatgatgggcgaccagggcgagctgcccatcgccatggccctggccaacgtggtgccctgcagccagtgggacgagctggccagagtgctggtgaccctgttcgacagcagacacctgctgtaccagctgctgtggaacatgttcagcaaggaggtggagctggccgacagcatgcagaccctgttcagaggcaacagcctggccagcaagatcatgaccttctgcttcaaggtgtacggcgccacctacctgcagaagctgctggaccccctgctgagaatcgtgatcaccagcagcgactggcagcacgtgagcttcgaggtggaccccaccagactggagcccagcgagagcctggaggagaaccagagaaacctgctgcagatgaccgagaagttcttccacgccatcatcagcagcagcagcgagttccccccccagctgagaagcgtgtgccactgcctgtaccaggtggtgagccagagattcccccagaacagcatcggcgccgtgggcagcgccatgttcctgagattcatcaaccccgccatcgtgagcccctacgaggccggcatcctggacaagaagcccccccccagaatcgagagaggcctgaagctgatgagcaagatcctgcagagcatcgccaaccacgtgctgttcaccaaggaggagcacatgagacccttcaacgacttcgtgaagagcaacttcgacgccgccagaagattcttcctggacatcgccagcgactgccccaccagcgacgccgtgaaccacagcctgagcttcatcagcgacggcaacgtgctggccctgcacagactgctgtggaacaaccaggagaagatcggccagtacctgagcagcaacagagaccacaaggccgtgggcagaagacccttcgacaagatggccaccctgctggcctacctgggcccccccgagcacaagcccgtggccgacacccactggagcagcctgaacctgaccagcagcaagttcgaggagttcatgaccagacaccaggtgcacgagaaggaggagttcaaggccctgaagaccctgagcatcttctaccaggccggcaccagcaaggccggcaaccccatcttctactacgtggccagaagattcaagaccggccagatcaacggcgacctgctgatctaccacgtgctgctgaccctgaagccctactacgccaagccctacgagatcgtggtggacctgacccacaccggccccagcaacagattcaagaccgacttcctgagcaagtggttcgtggtgttccccggcttcgcctacgacaacgtgagcgccgtgtacatctacaactgcaacagctgggtgagagagtacaccaagtaccacgagagactgctgaccggcctgaagggcagcaagagactggtgttcatcgactgccccggcaagctggccgagcacatcgagcacgagcagcagaagctgcccgccgccaccctggccctggaggaggacctgaaggtgttccacaacgccctgaagctggcccacaaggacaccaaggtgagcatcaaggtgggcagcaccgccgtgcaggtgaccagcgccgagagaaccaaggtgctgggccagagcgtgttcctgaacgacatctactacgccagcgagatcgaggagatctgcctggtggacgagaaccagttcaccctgaccatcgccaaccagggcacccccctgaccttcatgcaccaggagtgcgaggccatcgtgcagagcatcatccacatcagaaccagatgggagctgagccagcccgacagcatcccccagcacaccaagatcagacccaaggacgtgcccggcaccctgctgaacatcgccctgctgaacctgggcagcagcgaccccagcctgagaagcgccgcctacaacctgctgtgcgccctgacctgcaccttcaacctgaagatcgagggccagctgctggagaccagcggcctgtgcatccccgccaacaacaccctgttcatcgtgagcatcagcaagaccctggccgccaacgagccccacctgaccctggagttcctggaggagtgcatcagcggcttcagcaagagcagcatcgagctgaagcacctgtgcctggagtacatgaccccctggctgagcaacctggtgagattctgcaagcacaacgacgacgccaagagacagagagtgaccgccatcctggacaagctgatcaccatgaccatcaacgagaagcagatgtaccccagcatccaggccaagatctggggcagcctgggccagatcaccgacctgctggacgtggtgctggacagcttcatcaagaccagcgccaccggcggcctgggcagcatcaaggccgaggtgatggccgacaccgccgtggccctggccagcggcaacgtgaagctggtgagcagcaaggtgatcggcagaatgtgcaagatcatcgacaagacctgcctgagccccacccccaccctggagcagcacctgatgtgggacgacatcgccatcctggccagatacatgctgatgctgagcttcaacaacagcctggacgtggccgcccacctgccctacctgttccacgtggtgaccttcctggtggccaccggccccctgagcctgagagccagcacccacggcctggtgatcaacatcatccacagcctgtgcacctgcagccagctgcacttcagcgaggagaccaagcaggtgctgagactgagcctgaccgagttcagcctgcccaagttctacctgctgttcggcatcagcaaggtgaagagcgccgccgtgatcgccttcagaagcagctacagagacagaagcttcagccccggcagctacgagagagagaccttcgccctgaccagcctggagaccgtgaccgaggccctgctggagatcatggaggcctgcatgagagacatccccacctgcaagtggctggaccagtggaccgagctggcccagagattcgccttccagtacaaccccagcctgcagcccagagccctggtggtgttcggctgcatcagcaagagagtgagccacggccagatcaagcagatcatcagaatcctgagcaaggccctggagagctgcctgaagggccccgacacctacaacagccaggtgctgatcgaggccaccgtgatcgccctgaccaagctgcagcccctgctgaacaaggacagccccctgcacaaggccctgttctgggtggccgtggccgtgctgcagctggacgaggtgaacctgtacagcgccggcaccgccctgctggagcagaacctgcacaccctggacagcctgagaatcttcaacgacaagagccccgaggaggtgttcatggccatcagaaaccccctggagtggcactgcaagcagatggaccacttcgtgggcctgaacttcaacagcaacttcaacttcgccctggtgggccacctgctgaagggctacagacaccccagccccgccatcgtggccagaaccgtgagaatcctgcacaccctgctgaccctggtgaacaagcacagaaactgcgacaagttcgaggtgaacacccagagcgtggcctacctggccgccctgctgaccgtgagcgaggaggtgagaagcagatgcagcctgaagcacagaaagagcctgctgctgaccgacatcagcatggagaacgtgcccatggacacctaccccatccaccacggcgaccccagctacagaaccctgaaggagacccagccctggagcagccccaagggcagcgagggctacctggccgccacctaccccaccgtgggccagaccagccccagagccagaaagagcatgagcctggacatgggccagcccagccaggccaacaccaagaagctgctgggcaccagaaagagcttcgaccacctgatcagcgacaccaaggcccccaagagacaggagatggagagcggcatcaccaccccccccaagatgagaagagtggccgagaccgactacgagatggagacccagagaatcagcagcagccagcagcacccccacctgagaaaggtgagcgtgagcgagagcaacgtgctgctggacgaggaggtgctgaccgaccccaagatccaggccctgctgctgaccgtgctggccaccctggtgaagtacaccaccgacgagttcgaccagagaatcctgtacgagtacctggccgaggccagcgtggtgttccccaaggtgttccccgtggtgcacaacctgctggacagcaagatcaacaccctgctgagcctgtgccaggaccccaacctgctgaaccccatccacggcatcgtgcagagcgtggtgtaccacgaggagagccccccccagtaccagaccagctacctgcagagcttcggcttcaacggcctgtggagattcgccggccccttcagcaagcagacccagatccccgactacgccgagctgatcgtgaagttcctggacgccctgatcgacacctacctgcccggcatcgacgaggagaccagcgaggagagcctgctgacccccaccagcccctacccccccgccctgcagagccagctgagcatcaccgccaacctgaacctgagcaacagcatgaccagcctggccaccagccagcacagccccggcatcgacaaggagaacgtggagctgagccccaccaccggccactgcaacagcggcagaaccagacacggcagcgccagccaggtgcagaagcagagaagcgccggcagcttcaagagaaacagcatcaagaagatcgtgtag

SEQ ID NO: 11797 - DNA, 8520 bp, synthetic construct
  misc_feature 1..8520: note = Description of Artificial Sequence: Synthetic coding sequence
  source 1..8520: mol_type = other DNA
atggccgcccacagacccgtggagtgggtgcaggccgtggtgagcagattcgacgagcagctgcccatcaagaccggccagcagaacacccacaccaaggtgagcaccgagcacaacaaggagtgcctgatcaacatcagcaagtacaagttcagcctggtgatcagcggcctgaccaccatcctgaagaacgtgaacaacatgagaatcttcggcgaggccgccgagaagaacctgtacctgagccagctgatcatcctggacaccctggagaagtgcctggccggccagcccaaggacaccatgagactggacgagaccatgctggtgaagcagctgctgcccgagatctgccacttcctgcacacctgcagagagggcaaccagcacgccgccgagctgagaaacagcgccagcggcgtgctgttcagcctgagctgcaacaacttcaacgccgtgttcagcagaatcagcaccagactgcaggagctgaccgtgtgcagcgaggacaacgtggacgtgcacgacatcgagctgctgcagtacatcaacgtggactgcgccaagctgaagagactgctgaaggagaccgccttcaagttcaaggccctgaagaaggtggcccagctggccgtgatcaacagcctggagaaggccttctggaactgggtggagaactaccccgacgagttcaccaagctgtaccagatcccccagaccgacatggccgagtgcgccgagaagctgttcgacctggtggacggcttcgccgagagcaccaagagaaaggccgccgtgtggcccctgcagatcatcctgctgatcctgtgccccgagatcatccaggacatcagcaaggacgtggtggacgagaacaacatgaacaagaagctgttcctggacagcctgagaaaggccctggccggccacggcggcagcagacagctgaccgagagcgccgccatcgcctgcgtgaagctgtgcaaggccagcacctacatcaactgggaggacaacagcgtgatcttcctgctggtgcagagcatggtggtggacctgaagaacctgctgttcaaccccagcaagcccttcagcagaggcagccagcccgccgacgtggacctgatgatcgactgcctggtgagctgcttcagaatcagcccccacaacaaccagcacttcaagatctgcctggcccagaacagccccagcaccttccactacgtgctggtgaacagcctgcacagaatcatcaccaacagcgccctggactggtggcccaagatcgacgccgtgtactgccacagcgtggagctgagaaacatgttcggcgagaccctgcacaaggccgtgcagggctgcggcgcccaccccgccatcagaatggcccccagcctgaccttcaaggagaaggtgaccagcctgaagttcaaggagaagcccaccgacctggagaccagaagctacaagtacctgctgctgagcatggtgaagctgatccacgccgaccccaagctgctgctgtgcaaccccagaaagcagggccccgagacccagggcagcaccgccgagctgatcaccggcctggtgcagctggtgccccagagccacatgcccgagatcgcccaggaggccatggaggccctgctggtgctgcaccagctggacagcatcgacctgtggaaccccgacgcccccgtggagaccttctgggagatcagcagccagatgctgttctacatctgcaagaagctgaccagccaccagatgctgagcagcaccgagatcctgaagtggctgagagagatcctgatctgcagaaacaagttcctgctgaagaacaagcaggccgacagaagcagctgccacttcctgctgttctacggcgtgggctgcgacatccccagcagcggcaacaccagccagatgagcatggaccacgaggagctgctgagaacccccggcgccagcctgagaaagggcaagggcaacagcagcatggacagcgccgccggctgcagcggcaccccccccatctgcagacaggcccagaccaagctggaggtggccctgtacatgttcctgtggaaccccgacaccgaggccgtgctggtggccatgagctgcttcagacacctgtgcgaggaggccgacatcagatgcggcgtggacgaggtgagcgtgcacaacctgctgcccaactacaacaccttcatggagttcgccagcgtgagcaacatgatgagcaccggcagagccgccctgcagaagagagtgatggccctgctgagaagaatcgagcaccccaccgccggcaacaccgaggcctgggaggacacccacgccaagtgggagcaggccaccaagctgatcctgaactaccccaaggccaagatggaggacggccaggccgccgagagcctgcacaagaccatcgtgaagagaagaatgagccacgtgagcggcggcggcagcatcgacctgagcgacaccgacagcctgcaggagtggatcaacatgaccggcttcctgtgcgccctgggcggcgtgtgcctgcagcagagaagcaacagcggcctggccacctacagcccccccatgggccccgtgagcgagagaaagggcagcatgatcagcgtgatgagcagcgagggcaacgccgacacccccgtgagcaagttcatggacagactgctgagcctgatggtgtgcaaccacgagaaggtgggcctgcagatcagaaccaacgtgaaggacctggtgggcctggagctgagccccgccctgtaccccatgctgttcaacaagctgaagaacaccatcagcaagttcttcgacagccagggccaggtgctgctgaccgacaccaacacccagttcgtggagcagaccatcgccatcatgaagaacctgctggacaaccacaccgagggcagcagcgagcacctgggccaggccagcatcgagaccatgatgctgaacctggtgagatacgtgagagtgctgggcaacatggtgcacgccatccagatcaagaccaagctgtgccagctggtggaggtgatgatggccagaagagacgacctgagcttctgccaggagatgaagttcagaaacaagatggtggagtacctgaccgactgggtgatgggcaccagcaaccaggccgccgacgacgacgtgaagtgcctgaccagagacctggaccaggccagcatggaggccgtggtgagcctgctggccggcctgcccctgcagcccgaggagggcgacggcgtggagctgatggaggccaagagccagctgttcctgaagtacttcaccctgttcatgaacctgctgaacgactgcagcgaggtggaggacgagagcgcccagaccggcggcagaaagagaggcatgagcagaagactggccagcctgagacactgcaccgtgctggccatgagcaacctgctgaacgccaacgtggacagcggcctgatgcacagcatcggcctgggctaccacaaggacctgcagaccagagccaccttcatggaggtgctgaccaagatcctgcagcagggcaccgagttcgacaccctggccgagaccgtgctggccgacagattcgagagactggtggagctggtgaccatgatgggcgaccagggcgagctgcccatcgccatggccctggccaacgtggtgccctgcagccagtgggacgagctggccagagtgctggtgaccctgttcgacagcagacacctgctgtaccagctgctgtggaacatgttcagcaaggaggtggagctggccgacagcatgcagaccctgttcagaggcaacagcctggccagcaagatcatgaccttctgcttcaaggtgtacggcgccacctacctgcagaagctgctggaccccctgctgagaatcgtgatcaccagcagcgactggcagcacgtgagcttcgaggtggaccccaccagactggagcccagcgagagcctggaggagaaccagagaaacctgctgcagatgaccgagaagttcttccacgccatcatcagcagcagcagcgagttccccccccagctgagaagcgtgtgccactgcctgtaccaggccacctgccacagcctgctgaacaaggccaccgtgaaggagaagaaggagaacaagaagagcgtggtgagccagagattcccccagaacagcatcggcgccgtgggcagcgccatgttcctgagattcatcaaccccgccatcgtgagcccctacgaggccggcatcctggacaagaagcccccccccagaatcgagagaggcctgaagctgatgagcaagatcctgcagagcatcgccaaccacgtgctgttcaccaaggaggagcacatgagacccttcaacgacttcgtgaagagcaacttcgacgccgccagaagattcttcctggacatcgccagcgactgccccaccagcgacgccgtgaaccacagcctgagcttcatcagcgacggcaacgtgctggccctgcacagactgctgtggaacaaccaggagaagatcggccagtacctgagcagcaacagagaccacaaggccgtgggcagaagacccttcgacaagatggccaccctgctggcctacctgggcccccccgagcacaagcccgtggccgacacccactggagcagcctgaacctgaccagcagcaagttcgaggagttcatgaccagacaccaggtgcacgagaaggaggagttcaaggccctgaagaccctgagcatcttctaccaggccggcaccagcaaggccggcaaccccatcttctactacgtggccagaagattcaagaccggccagatcaacggcgacctgctgatctaccacgtgctgctgaccctgaagccctactacgccaagccctacgagatcgtggtggacctgacccacaccggccccagcaacagattcaagaccgacttcctgagcaagtggttcgtggtgttccccggcttcgcctacgacaacgtgagcgccgtgtacatctacaactgcaacagctgggtgagagagtacaccaagtaccacgagagactgctgaccggcctgaagggcagcaagagactggtgttcatcgactgccccggcaagctggccgagcacatcgagcacgagcagcagaagctgcccgccgccaccctggccctggaggaggacctgaaggtgttccacaacgccctgaagctggcccacaaggacaccaaggtgagcatcaaggtgggcagcaccgccgtgcaggtgaccagcgccgagagaaccaaggtgctgggccagagcgtgttcctgaacgacatctactacgccagcgagatcgaggagatctgcctggtggacgagaaccagttcaccctgaccatcgccaaccagggcacccccctgaccttcatgcaccaggagtgcgaggccatcgtgcagagcatcatccacatcagaaccagatgggagctgagccagcccgacagcatcccccagcacaccaagatcagacccaaggacgtgcccggcaccctgctgaacatcgccctgctgaacctgggcagcagcgaccccagcctgagaagcgccgcctacaacctgctgtgcgccctgacctgcaccttcaacctgaagatcgagggccagctgctggagaccagcggcctgtgcatccccgccaacaacaccctgttcatcgtgagcatcagcaagaccctggccgccaacgagccccacctgaccctggagttcctggaggagtgcatcagcggcttcagcaagagcagcatcgagctgaagcacctgtgcctggagtacatgaccccctggctgagcaacctggtgagattctgcaagcacaacgacgacgccaagagacagagagtgaccgccatcctggacaagctgatcaccatgaccatcaacgagaagcagatgtaccccagcatccaggccaagatctggggcagcctgggccagatcaccgacctgctggacgtggtgctggacagcttcatcaagaccagcgccaccggcggcctgggcagcatcaaggccgaggtgatggccgacaccgccgtggccctggccagcggcaacgtgaagctggtgagcagcaaggtgatcggcagaatgtgcaagatcatcgacaagacctgcctgagccccacccccaccctggagcagcacctgatgtgggacgacatcgccatcctggccagatacatgctgatgctgagcttcaacaacagcctggacgtggccgcccacctgccctacctgttccacgtggtgaccttcctggtggccaccggccccctgagcctgagagccagcacccacggcctggtgatcaacatcatccacagcctgtgcacctgcagccagctgcacttcagcgaggagaccaagcaggtgctgagactgagcctgaccgagttcagcctgcccaagttctacctgctgttcggcatcagcaaggtgaagagcgccgccgtgatcgccttcagaagcagctacagagacagaagcttcagccccggcagctacgagagagagaccttcgccctgaccagcctggagaccgtgaccgaggccctgctggagatcatggaggcctgcatgagagacatccccacctgcaagtggctggaccagtggaccgagctggcccagagattcgccttccagtacaaccccagcctgcagcccagagccctggtggtgttcggctgcatcagcaagagagtgagccacggccagatcaagcagatcatcagaatcctgagcaaggccctggagagctgcctgaagggccccgacacctacaacagccaggtgctgatcgaggccaccgtgatcgccctgaccaagctgcagcccctgctgaacaaggacagccccctgcacaaggccctgttctgggtggccgtggccgtgctgcagctggacgaggtgaacctgtacagcgccggcaccgccctgctggagcagaacctgcacaccctggacagcctgagaatcttcaacgacaagagccccgaggaggtgttcatggccatcagaaaccccctggagtggcactgcaagcagatggaccacttcgtgggcctgaacttcaacagcaacttcaacttcgccctggtgggccacctgctgaagggctacagacaccccagccccgccatcgtggccagaaccgtgagaatcctgcacaccctgctgaccctggtgaacaagcacagaaactgcgacaagttcgaggtgaacacccagagcgtggcctacctggccgccctgctgaccgtgagcgaggaggtgagaagcagatgcagcctgaagcacagaaagagcctgctgctgaccgacatcagcatggagaacgtgcccatggacacctaccccatccaccacggcgaccccagctacagaaccctgaaggagacccagccctggagcagccccaagggcagcgagggctacctggccgccacctaccccaccgtgggccagaccagccccagagccagaaagagcatgagcctggacatgggccagcccagccaggccaacaccaagaagctgctgggcaccagaaagagcttcgaccacctgatcagcgacaccaaggcccccaagagacaggagatggagagcggcatcaccaccccccccaagatgagaagagtggccgagaccgactacgagatggagacccagagaatcagcagcagccagcagcacccccacctgagaaaggtgagcgtgagcgagagcaacgtgctgctggacgaggaggtgctgaccgaccccaagatccaggccctgctgctgaccgtgctggccaccctggtgaagtacaccaccgacgagttcgaccagagaatcctgtacgagtacctggccgaggccagcgtggtgttccccaaggtgttccccgtggtgcacaacctgctggacagcaagatcaacaccctgctgagcctgtgccaggaccccaacctgctgaaccccatccacggcatcgtgcagagcgtggtgtaccacgaggagagccccccccagtaccagaccagctacctgcagagcttcggcttcaacggcctgtggagattcgccggccccttcagcaagcagacccagatccccgactacgccgagctgatcgtgaagttcctggacgccctgatcgacacctacctgcccggcatcgacgaggagaccagcgaggagagcctgctgacccccaccagcccctacccccccgccctgcagagccagctgagcatcaccgccaacctgaacctgagcaacagcatgaccagcctggccaccagccagcacagccccggcatcgacaaggagaacgtggagctgagccccaccaccggccactgcaacagcggcagaaccagacacggcagcgccagccaggtgcagaagcagagaagcgccggcagcttcaagagaaacagcatcaagaagatcgtgtag

SEQ ID NO: 11798 - DNA, 615 bp, synthetic construct
  misc_feature 1..615: note = Description of Artificial Sequence: Synthetic coding sequence
  source 1..615: mol_type = other DNA
atgcacgagagatacagcaacgtgcaggtggccggccccgtggacagaaccagcagcaaggacagccccctgcacaaggccctgttctgggtggccgtggccgtgctgcagctggacgaggtgaacctgtacagcgccggcaccgccctgctggagcagaacctgcacaccctggacagcctgagaatcttcaacgacaagagccccgaggaggtgttcatggccatcagaaaccccctggagtggcactgcaagcagatggaccacttcgtgggcctgaacttcaacagcaacttcaacttcgccctggtgggccacctgctgaagggctacagacaccccagccccgccatcgtggccagaaccgtgagaatcctgcacaccctgctgaccctggtgaacaagcacagaaactgcgacaagttcgaggtgaacacccagagcgtggcctacctggccgccctgctgaccgtgagcgaggaggtgagaagcagatgcagcctgaagcacagaaagagcctgctgctgaccgacatcagcatggagaacgtgcccatggacacctaccccatccaccacggcgaccccagctacagaaacaaggagaagttctag

SEQ ID NO: 11799 - DNA, 1782 bp, synthetic construct
  misc_feature 1..1782: note = Description of Artificial Sequence: Synthetic coding sequence
  source 1..1782: mol_type = other DNA
atggccgcccacagacccgtggagtgggtgcaggccgtggtgagcagattcgacgagcagctgcccatcaagaccggccagcagaacacccacaccaaggtgagcaccgagcacaacaaggagtgcctgatcaacatcagcaagtacaagttcagcctggtgatcagcggcctgaccaccatcctgaagaacgtgaacaacatgagaatcttcggcgaggccgccgagaagaacctgtacctgagccagctgatcatcctggacaccctggagaagtgcctggccggccagcccaaggacaccatgagactggacgagaccatgctggtgaagcagctgctgcccgagatctgccacttcctgcacacctgcagagagggcaaccagcacgccgccgagctgagaaacagcgccagcggcgtgctgttcagcctgagctgcaacaacttcaacgccgtgttcagcagaatcagcaccagactgcaggagctgaccgtgtgcagcgaggacaacgtggacgtgcacgacatcgagctgctgcagtacatcaacgtggactgcgccaagctgaagagactgctgaaggagaccgccttcaagttcaaggccctgaagaaggtggcccagctggccgtgatcaacagcctggagaaggccttctggaactgggtggagaactaccccgacgagttcaccaagctgtaccagatcccccagaccgacatggccgagtgcgccgagaagctgttcgacctggtggacggcttcgccgagagcaccaagagaaaggccgccgtgtggcccctgcagatcatcctgctgatcctgtgccccgagatcatccaggacatcagcaaggacgtggtggacgagaacaacatgaacaagaagctgttcctggacagcctgagaaaggccctggccggccacggcggcagcagacagctgaccgagagcgccgccatcgcctgcgtgaagctgtgcaaggccagcacctacatcaactgggaggacaacagcgtgatcttcctgctggtgcagagcatggtggtggacctgaagaacctgctgttcaaccccagcaagcccttcagcagaggcagccagcccgccgacgtggacctgatgatcgactgcctggtgagctgcttcagaatcagcccccacaacaaccagcacttcaagatctgcctggcccagaacagccccagcaccttccactacgtgctggtgaacagcctgcacagaatcatcaccaacagcgccctggactggtggcccaagatcgacgccgtgtactgccacagcgtggagctgagaaacatgttcggcgagaccctgcacaaggccgtgcagggctgcggcgcccaccccgccatcagaatggcccccagcctgaccttcaaggagaaggtgaccagcctgaagttcaaggagaagcccaccgacctggagaccagaagctacaagtacctgctgctgagcatggtgaagctgatccacgccgaccccaagctgctgctgtgcaaccccagaaagcagggccccgagacccagggcagcaccgccgagctgatcaccggcctggtgcagctggtgccccagagccacatgcccgagatcgcccaggaggccatggaggccctgctggtgctgcaccagctggacagcatcgacctgtggaaccccgacgcccccgtggagaccttctgggagatcagatacatgtacttctacttcctgaacagcaccttcaagttctacttcgtgttcctgagctag

SEQ ID NO: 11800 - DNA, 1917 bp, synthetic construct
  misc_feature 1..1917: note = Description of Artificial Sequence: Synthetic coding sequence
  source 1..1917: mol_type = other DNA
atgcacgagagatacagcaacgtgcaggtggccggccccgtggacagaaccagcagcaagttctgcggcagcttcaactgcagattcgccttccagtacaaccccagcctgcagcccagagccctggtggtgttcggctgcatcagcaagagagtgagccacggccagatcaagcagatcatcagaatcctgagcaaggccctggagagctgcctgaagggccccgacacctacaacagccaggtgctgatcgaggccaccgtgatcgccctgaccaagctgcagcccctgctgaacaaggacagccccctgcacaaggccctgttctgggtggccgtggccgtgctgcagctggacgaggtgaacctgtacagcgccggcaccgccctgctggagcagaacctgcacaccctggacagcctgagaatcttcaacgacaagagccccgaggaggtgttcatggccatcagaaaccccctggagtggcactgcaagcagatggaccacttcgtgggcctgaacttcaacagcaacttcaacttcgccctggtgggccacctgctgaagggctacagacaccccagccccgccatcgtggccagaaccgtgagaatcctgcacaccctgctgaccctggtgaacaagcacagaaactgcgacaagttcgaggtgaacacccagagcgtggcctacctggccgccctgctgaccgtgagcgaggaggtgagaagcagatgcagcctgaagcacagaaagagcctgctgctgaccgacatcagcatggagaacgtgcccatggacacctaccccatccaccacggcgaccccagctacagaaccctgaaggagacccagccctggagcagccccaagggcagcgagggctacctggccgccacctaccccaccgtgggccagaccagccccagagccagaaagagcatgagcctggacatgggccagcccagccaggccaacaccaagaagctgctgggcaccagaaagagcttcgaccacctgatcagcgacaccaaggcccccaagagacaggagatggagagcggcatcaccaccccccccaagatgagaagagtggccgagaccgactacgagatggagacccagagaatcagcagcagccagcagcacccccacctgagaaaggtgagcgtgagcgagagcaacgtgctgctggacgaggaggtgctgaccgaccccaagatccaggccctgctgctgaccgtgctggccaccctggtgaagtacaccaccgacgagttcgaccagagaatcctgtacgagtacctggccgaggccagcgtggtgttccccaaggtgttccccgtggtgcacaacctgctggacagcaagatcaacaccctgctgagcctgtgccaggaccccaacctgctgaaccccatccacggcatcgtgcagagcgtggtgtaccacgaggagagccccccccagtaccagaccagctacctgcagagcttcggcttcaacggcctgtggagattcgccggccccttcagcaagcagacccagatccccgactacgccgagctgatcgtgaagttcctggacgccctgatcgacacctacctgcccggcatcgacgaggagaccagcgaggagagcctgctgacccccaccagcccctacccccccgccctgcagagccagctgagcatcaccgccaacctgaacctgagcaacagcatgaccagcctggccaccagccagcacagccccggcatcgacaaggagaacgtggagctgagccccaccaccggccactgcaacagcggcagaaccagacacggcagcgccagccaggtgcagaagcagagaagcgccggcagcttcaagctggccctgctgaacctgctgaccgcccaccagaacagcctgtag

SEQ ID NO: 11801 - DNA, 7509 bp, synthetic construct
  misc_feature 1..7509: note = Description of Artificial Sequence: Synthetic coding sequence
  source 1..7509: mol_type = other DNA
aactgggaggacaacagcgtgatcttcctgctggtgcagagcatggtggtggacctgaagaacctgctgttcaaccccagcaagcccttcagcagaggcagccagcccgccgacgtggacctgatgatcgactgcctggtgagctgcttcagaatcagcccccacaacaaccagcacttcaagatctgcctggcccagaacagccccagcaccttccactacgtgctggtgaacagcctgcacagaatcatcaccaacagcgccctggactggtggcccaagatcgacgccgtgtactgccacagcgtggagctgagaaacatgttcggcgagaccctgcacaaggccgtgcagggctgcggcgcccaccccgccatcagaatggcccccagcctgaccttcaaggagaaggtgaccagcctgaagttcaaggagaagcccaccgacctggagaccagaagctacaagtacctgctgctgagcatggtgaagctgatccacgccgaccccaagctgctgctgtgcaaccccagaaagcagggccccgagacccagggcagcaccgccgagctgatcaccggcctggtgcagctggtgccccagagccacatgcccgagatcgcccaggaggccatggaggccctgctggtgctgcaccagctggacagcatcgacctgtggaaccccgacgcccccgtggagaccttctgggagatcagcagccagatgctgttctacatctgcaagaagctgaccagccaccagatgctgagcagcaccgagatcctgaagtggctgagagagatcctgatctgcagaaacaagttcctgctgaagaacaagcaggccgacagaagcagctgccacttcctgctgttctacggcgtgggctgcgacatccccagcagcggcaacaccagccagatgagcatggaccacgaggagctgctgagaacccccggcgccagcctgagaaagggcaagggcaacagcagcatggacagcgccgccggctgcagcggcaccccccccatctgcagacaggcccagaccaagctggaggtggccctgtacatgttcctgtggaaccccgacaccgaggccgtgctggtggccatgagctgcttcagacacctgtgcgaggaggccgacatcagatgcggcgtggacgaggtgagcgtgcacaacctgctgcccaactacaacaccttcatggagttcgccagcgtgagcaacatgatgagcaccggcagagccgccctgcagaagagagtgatggccctgctgagaagaatcgagcaccccaccgccggcaacaccgaggcctgggaggacacccacgccaagtgggagcaggccaccaagctgatcctgaactaccccaaggccaagatggaggacggccaggccgccgagagcctgcacaagaccatcgtgaagagaagaatgagccacgtgagcggcggcggcagcatcgacctgagcgacaccgacagcctgcaggagtggatcaacatgaccggcttcctgtgcgccctgggcggcgtgtgcctgcagcagagaagcaacagcggcctggccacctacagcccccccatgggccccgtgagcgagagaaagggcagcatgatcagcgtgatgagcagcgagggcaacgccgacacccccgtgagcaagttcatggacagactgctgagcctgatggtgtgcaaccacgagaaggtgggcctgcagatcagaaccaacgtgaaggacctggtgggcctggagctgagccccgccctgtaccccatgctgttcaacaagctgaagaacaccatcagcaagttcttcgacagccagggccaggtgctgctgaccgacaccaacacccagttcgtggagcagaccatcgccatcatgaagaacctgctggacaaccacaccgagggcagcagcgagcacctgggccaggccagcatcgagaccatgatgctgaacctggtgagatacgtgagagtgctgggcaacatggtgcacgccatccagatcaagaccaagctgtgccagctggtggaggtgatgatggccagaagagacgacctgagcttctgccaggagatgaagttcagaaacaagatggtggagtacctgaccgactgggtgatgggcaccagcaaccaggccgccgacgacgacgtgaagtgcctgaccagagacctggaccaggccagcatggaggccgtggtgagcctgctggccggcctgcccctgcagcccgaggagggcgacggcgtggagctgatggaggccaagagccagctgttcctgaagtacttcaccctgttcatgaacctgctgaacgactgcagcgaggtggaggacgagagcgcccagaccggcggcagaaagagaggcatgagcagaagactggccagcctgagacactgcaccgtgctggccatgagcaacctgctgaacgccaacgtggacagcggcctgatgcacagcatcggcctgggctaccacaaggacctgcagaccagagccaccttcatggaggtgctgaccaagatcctgcagcagggcaccgagttcgacaccctggccgagaccgtgctggccgacagattcgagagactggtggagctggtgaccatgatgggcgaccagggcgagctgcccatcgccatggccctggccaacgtggtgccctgcagccagtgggacgagctggccagagtgctggtgaccctgttcgacagcagacacctgctgtaccagctgctgtggaacatgttcagcaaggaggtggagctggccgacagcatgcagaccctgttcagaggcaacagcctggccagcaagatcatgaccttctgcttcaaggtgtacggcgccacctacctgcagaagctgctggaccccctgctgagaatcgtgatcaccagcagcgactggcagcacgtgagcttcgaggtggaccccaccagactggagcccagcgagagcctggaggagaaccagagaaacctgctgcagatgaccgagaagttcttccacgccatcatcagcagcagcagcgagttccccccccagctgagaagcgtgtgccactgcctgtaccaggtggtgagccagagattcccccagaacagcatcggcgccgtgggcagcgccatgttcctgagattcatcaaccccgccatcgtgagcccctacgaggccggcatcctggacaagaagcccccccccagaatcgagagaggcctgaagctgatgagcaagatcctgcagagcatcgccaaccacgtgctgttcaccaaggaggagcacatgagacccttcaacgacttcgtgaagagcaacttcgacgccgccagaagattcttcctggacatcgccagcgactgccccaccagcgacgccgtgaaccacagcctgagcttcatcagcgacggcaacgtgctggccctgcacagactgctgtggaacaaccaggagaagatcggccagtacctgagcagcaacagagaccacaaggccgtgggcagaagacccttcgacaagatggccaccctgctggcctacctgggcccccccgagcacaagcccgtggccgacacccactggagcagcctgaacctgaccagcagcaagttcgaggagttcatgaccagacaccaggtgcacgagaaggaggagttcaaggccctgaagaccctgagcatcttctaccaggccggcaccagcaaggccggcaaccccatcttctactacgtggccagaagattcaagaccggccagatcaacggcgacctgctgatctaccacgtgctgctgaccctgaagccctactacgccaagccctacgagatcgtggtggacctgacccacaccggccccagcaacagattcaagaccgacttcctgagcaagtggttcgtggtgttccccggcttcgcctacgacaacgtgagcgccgtgtacatctacaactgcaacagctgggtgagagagtacaccaagtaccacgagagactgctgaccggcctgaagggcagcaagagactggtgttcatcgactgccccggcaagctggccgagcacatcgagcacgagcagcagaagctgcccgccgccaccctggccctggaggaggacctgaaggtgttccacaacgccctgaagctggcccacaaggacaccaaggtgagcatcaaggtgggcagcaccgccgtgcaggtgaccagcgccgagagaaccaaggtgctgggccagagcgtgttcctgaacgacatctactacgccagcgagatcgaggagatctgcctggtggacgagaaccagttcaccctgaccatcgccaaccagggcacccccctgaccttcatgcaccaggagtgcgaggccatcgtgcagagcatcatccacatcagaaccagatgggagctgagccagcccgacagcatcccccagcacaccaagatcagacccaaggacgtgcccggcaccctgctgaacatcgccctgctgaacctgggcagcagcgaccccagcctgagaagcgccgcctacaacctgctgtgcgccctgacctgcaccttcaacctgaagatcgagggccagctgctggagaccagcggcctgtgcatccccgccaacaacaccctgttcatcgtgagcatcagcaagaccctggccgccaacgagccccacctgaccctggagttcctggaggagtgcatcagcggcttcagcaagagcagcatcgagctgaagcacctgtgcctggagtacatgaccccctggctgagcaacctggtgagattctgcaagcacaacgacgacgccaagagacagagagtgaccgccatcctggacaagctgatcaccatgaccatcaacgagaagcagatgtaccccagcatccaggccaagatctggggcagcctgggccagatcaccgacctgctggacgtggtgctggacagcttcatcaagaccagcgccaccggcggcctgggcagcatcaaggccgaggtgatggccgacaccgccgtggccctggccagcggcaacgtgaagctggtgagcagcaaggtgatcggcagaatgtgcaagatcatcgacaagacctgcctgagccccacccccaccctggagcagcacctgatgtgggacgacatcgccatcctggccagatacatgctgatgctgagcttcaacaacagcctggacgtggccgcccacctgccctacctgttccacgtggtgaccttcctggtggccaccggccccctgagcctgagagccagcacccacggcctggtgatcaacatcatccacagcctgtgcacctgcagccagctgcacttcagcgaggagaccaagcaggtgctgagactgagcctgaccgagttcagcctgcccaagttctacctgctgttcggcatcagcaaggtgaagagcgccgccgtgatcgccttcagaagcagctacagagacagaagcttcagccccggcagctacgagagagagaccttcgccctgaccagcctggagaccgtgaccgaggccctgctggagatcatggaggcctgcatgagagacatccccacctgcaagtggctggaccagtggaccgagctggcccagagattcgccttccagtacaaccccagcctgcagcccagagccctggtggtgttcggctgcatcagcaagagagtgagccacggccagatcaagcagatcatcagaatcctgagcaaggccctggagagctgcctgaagggccccgacacctacaacagccaggtgctgatcgaggccaccgtgatcgccctgaccaagctgcagcccctgctgaacaaggacagccccctgcacaaggccctgttctgggtggccgtggccgtgctgcagctggacgaggtgaacctgtacagcgccggcaccgccctgctggagcagaacctgcacaccctggacagcctgagaatcttcaacgacaagagccccgaggaggtgttcatggccatcagaaaccccctggagtggcactgcaagcagatggaccacttcgtgggcctgaacttcaacagcaacttcaacttcgccctggtgggccacctgctgaagggctacagacaccccagccccgccatcgtggccagaaccgtgagaatcctgcacaccctgctgaccctggtgaacaagcacagaaactgcgacaagttcgaggtgaacacccagagcgtggcctacctggccgccctgctgaccgtgagcgaggaggtgagaagcagatgcagcctgaagcacagaaagagcctgctgctgaccgacatcagcatggagaacgtgcccatggacacctaccccatccaccacggcgaccccagctacagaaccctgaaggagacccagccctggagcagccccaagggcagcgagggctacctggccgccacctaccccaccgtgggccagaccagccccagagccagaaagagcatgagcctggacatgggccagcccagccaggccaacaccaagaagctgctgggcaccagaaagagcttcgaccacctgatcagcgacaccaaggcccccaagagacaggagatggagagcggcatcaccaccccccccaagatgagaagagtggccgagaccgactacgagatggagacccagagaatcagcagcagccagcagcacccccacctgagaaaggtgagcgtgagcgagagcaacgtgctgctggacgaggaggtgctgaccgaccccaagatccaggccctgctgctgaccgtgctggccaccctggtgaagtacaccaccgacgagttcgaccagagaatcctgtacgagtacctggccgaggccagcgtggtgttccccaaggtgttccccgtggtgcacaacctgctggacagcaagatcaacaccctgctgagcctgtgccaggaccccaacctgctgaaccccatccacggcatcgtgcagagcgtggtgtaccacgaggagagccccccccagtaccagaccagctacctgcagagcttcggcttcaacggcctgtggagattcgccggccccttcagcaagcagacccagatccccgactacgccgagctgatcgtgaagttcctggacgccctgatcgacacctacctgcccggcatcgacgaggagaccagcgaggagagcctgctgacccccaccagcccctacccccccgccctgcagagccagctgagcatcaccgccaacctgaacctgagcaacagcatgaccagcctggccaccagccagcacagccccgccagcctgccctgcagcaagagcgccgtgttcatgcagctgttcccccaccagggcatcgacaaggagaacgtggagctgagccccaccaccggccactgcaacagcggcagaaccagacacggcagcgccagccaggtgcagaagcagagaagcgccggcagcttcaagagaaacagcatcaagaagatcgtgtag

SEQ ID NO: 11802 - DNA, 1524 bp, synthetic construct
  misc_feature 1..1524: note = Description of Artificial Sequence: Synthetic coding sequence
  source 1..1524: mol_type = other DNA
atggccggcgccatcgccagcagaatgagcttcagcagcctgaagagaaagcagcccaagaccttcaccgtgagaatcgtgaccatggacgccgagatggagttcaactgcgaggtgaagaagcagatcctggacgagaagatctactgcccccccgaggccagcgtgctgctggccagctacgccgtgcaggccaagtacggcgactacgaccccagcgtgcacaagagaggcttcctggcccaggaggagctgctgcccaagagagtgatcaacctgtaccagatgacccccgagatgtgggaggagagaatcaccgcctggtacgccgagcacagaggcagagccagagacgaggccgagatggagtacctgaagatcgcccaggacctggagatgtacggcgtgaactacttcgccatcagaaacaagaagggcaccgagctgctgctgggcgtggacgccctgggcctgcacatctacgaccccgagaacagactgacccccaagatcagcttcccctggaacgagatcagaaacatcagctacagcgacaaggagttcaccatcaagcccctggacaagaagatcgacgtgttcaagttcaacagcagcaagctgagagtgaacaagctgatcctgcagctgtgcatcggcaaccacgacctgttcatgagaagaagaaaggccgacagcctggaggtgcagcagatgaaggcccaggccagagaggagaaggccagaaagcagatggagagacagagactggccagagagaagcagatgagagaggaggccgagagaaccagagacgagctggagagaagactgctgcagatgaaggaggaggccaccatggccaacgaggccctgatgagaagcgaggagaccgccgacctgctggccgagaaggcccagatcaccgaggaggaggccaagctgctggcccagaaggccgccgaggccgagcaggagatgcagagaatcaaggccaccgccatcagaaccgaggaggagaagagactgatggagcagaaggtgctggaggccgaggtgctggccctgaagatggccgaggagagcgagagaagagccaaggaggccgaccagctgaagcaggacctgcaggaggccagagaggccgagagaagagccaagcagaagctgctggagatcgccaccaagcccacctacccccccatgaaccccatccccgcccccctgccccccgacatccccagcttcaacctgatcggcgacagcctgagcttcgacttcaaggacaccgacatgaagagactgagcatggagatcgagaaggagaaggtggagtacatggagaagagcaagcacctgcaggagcagctgaacgagctgaagaccgagatcgaggccctgaagctgaaggagagagagaccgccctggacatcctgcacaacgagaacagcgacagaggcggcagcagcaagcacaacaccatcaagaagccccaggcccagggcagaagacccatctgcatctag

SEQ ID NO: 11803 - DNA, 1788 bp, synthetic construct
  misc_feature 1..1788: note = Description of Artificial Sequence: Synthetic coding sequence
  source 1..1788: mol_type = other DNA
atggccggcgccatcgccagcagaatgagcttcagcagcctgaagagaaagcagcccaagaccttcaccgtgagaatcgtgaccatggacgccgagatggagttcaactgcgagatgaagtggaagggcaaggacctgttcgacctggtgtgcagaaccctgggcctgagagagacctggttcttcggcctgcagtacaccatcaaggacaccgtggcctggctgaagatggacaagaaggtgctggaccacgacgtgagcaaggaggagcccgtgaccttccacttcctggccaagttctaccccgagaacgccgaggaggagctggtgcaggagatcacccagcacctgttcttcctgcaggtgaagaagcagatcctggacgagaagatctactgcccccccgaggccagcgtgctgctggccagctacgccgtgcaggccaagtacggcgactacgaccccagcgtgcacaagagaggcttcctggcccaggaggagctgctgcccaagagagtgatcaacctgtaccagatgacccccgagatgtgggaggagagaatcaccgcctggtacgccgagcacagaggcagagccagagacgaggccgagatggagtacctgaagatcgcccaggacctggagatgtacggcgtgaactacttcgccatcagaaacaagaagggcaccgagctgctgctgggcgtggacgccctgggcctgcacatctacgaccccgagaacagactgacccccaagatcagcttcccctggaacgagatcagaaacatcagctacagcgacaaggagttcaccatcaagcccctggacaagaagatcgacgtgttcaagttcaacagcagcaagctgagagtgaacaagctgatcctgcagctgtgcatcggcaaccacgacctgttcatgagaagaagaaaggccgacagcctggaggtgcagcagatgaaggcccaggccagagaggagaaggccagaaagcagatggagagacagagactggccagagagaagcagatgagagaggaggccgagagaaccagagacgagctggagagaagactgctgcagatgaaggaggaggccaccatggccaacgaggccctgatgagaagcgaggagaccgccgacctgctggccgagaaggcccagatcaccgaggaggaggccaagctgctggcccagaaggccgccgaggccgagcaggagatgcagagaatcaaggccaccgccatcagaaccgaggaggagaagagactgatggagcagaaggtgctggaggccgaggtgctggccctgaagatggccgaggagagcgagagaagagccaaggaggccgaccagctgaagcaggacctgcaggaggccagagaggccgagagaagagccaagcagaagctgctggagatcgccaccaagcccacctacccccccatgaaccccatccccgcccccctgccccccgacatccccagcttcaacctgatcggcgacagcctgagcttcgacttcaaggacaccgacatgaagagactgagcatggagatcgagaaggagaaggtggagtacatggagaagagcaagcacctgcaggagcagctgaacgagctgaagaccgagatcgaggccctgaagctgaaggagagagagaccgccctggacatcctgcacaacgagaacagcgacagaggcggcagcagcaagcacaacaccatcaagaagctgaccctgcagagcgccaagagcagagtggccttcttcgaggagctgtag

SEQ ID NO: 11804 - DNA, 663 bp, synthetic construct
  misc_feature 1..663: note = Description of Artificial Sequence: Synthetic coding sequence
  source 1..663: mol_type = other DNA
atggccggcgccatcgccagcagaatgagcttcagcagcctgaagagaaagcagcccaagaccttcaccgtgagaatcgtgaccatggacgccgagatggagttcaactgcgaggtgaagaagcagatcctggacgagaagatctactgcccccccgaggccagcgtgctgctggccagctacgccgtgcaggccaagaacaagaagggcaccgagctgctgctgggcgtggacgccctgggcctgcacatctacgaccccgagaacagactgacccccaagatcagcttcccctggaacgagatcagaaacatcagctacagcgacaaggagttcaccatcaagcccctggacaagaagatcgacgtgttcaagttcaacagcagcaagctgagagtgaacaagctgatcctgcagctgtgcatcggcaaccacgacctgttcatgagaagaagaaaggccgacagcctggaggtgcagcagatgaaggcccaggccagagaggagaaggccagaaagcagggccagagaggcagaagcgccgaggccggccccgccggcagcaccagaggcggcgccaagagccaggccgaggcccccggcgactgccaccaggcccacgtgcccgcccacgagcccaacagcagcaccgtggccagctag

SEQ ID NO: 11805 - DNA, 1524 bp, synthetic construct; identical to SEQ ID NO: 11802
  misc_feature 1..1524: note = Description of Artificial Sequence: Synthetic coding sequence
  source 1..1524: mol_type = other DNA

SEQ ID NO: 11806 - DNA, 1773 bp, synthetic construct
  misc_feature 1..1773: note = Description of Artificial Sequence: Synthetic coding sequence
  source 1..1773: mol_type = other DNA
atggccggcgccatcgccagcagaatgagcttcagcagcctgaagagaaagcagcccaagaccttcaccgtgagaatcgtgaccatggacgccgagatggagttcaactgcgagatgaagtggaagggcaaggacctgttcgacctggtgtgcagaaccctgggcctgagagagacctggttcttcggcctgcagtacaccatcaaggacaccgtggcctggctgaagatggacaagaaggtgctggaccacgacgtgagcaaggaggagcccgtgaccttccacttcctggccaagttctaccccgagaacgccgaggaggagctggtgcaggagatcacccagcacctgttcttcctgcaggtgaagaagcagatcctggacgagaagatctactgcccccccgaggccagcgtgctgctggccagctacgccgtgcaggccaagtacggcgactacgaccccagcgtgcacaagagaggcttcctggcccaggaggagctgctgcccaagagagtgatcaacctgtaccagatgacccccgagatgtgggaggagagaatcaccgcctggtacgccgagcacagaggcagagccagagacgaggccgagatggagtacctgaagatcgcccaggacctggagatgtacggcgtgaactacttcgccatcagaaacaagaagggcaccgagctgctgctgggcgtggacgccctgggcctgcacatctacgaccccgagaacagactgacccccaagatcagcttcccctggaacgagatcagaaacatcagctacagcgacaaggagttcaccatcaagcccctggacaagaagatcgacgtgttcaagttcaacagcagcaagctgagagtgaacaagctgatcctgcagctgtgcatcggcaaccacgacctgttcatgagaagaagaaaggccgacagcctggaggtgcagcagatgaaggcccaggccagagaggagaaggccagaaagcagatggagagacagagactggccagagagaagcagatgagagaggaggccgagagaaccagagacgagctggagagaagactgctgcagatgaaggaggaggccaccatggccaacgaggccctgatgagaagcgaggagaccgccgacctgctggccgagaaggcccagatcaccgaggaggaggccaagctgctggcccagaaggccgccgaggccgagcaggagatgcagagaatcaaggccaccgccatcagaaccgaggaggagaagagactgatggagcagaaggtgctggaggccgaggtgctggccctgaagatggccgaggagagcgagagaagagccaaggaggccgaccagctgaagcaggacctgcaggaggccagagaggccgagagaagagccaagcagaagctgctggagatcgccaccaagcccacctacccccccatgaaccccatccccgcccccctgccccccgacatccccagcttcaacctgatcggcgacagcctgagcttcgacttcaaggacaccgacatgaagagactgagcatggagatcgagaaggagaaggtggagtacatggagaagagcaagcacctgcaggagcagctgaacgagctgaagaccgagatcgaggccctgaagctgaaggagagagagaccgccctggacatcctgcacaacgagaacagcgacagaggcggcagcagcaagcacaacaccatcaagaagccccaggcccagggcagaagacccatctgcatctag

SEQ ID NO: 11807 - DNA, 1650 bp, synthetic construct
  misc_feature 1..1650: note = Description of Artificial Sequence: Synthetic coding sequence
  source 1..1650: mol_type = other DNA
atggccggcgccatcgccagcagaatgagcttcagcagcctgaagagaaagcagcccaagaccttcaccgtgagaatcgtgaccatggacgccgagatggagttcaactgcgagatgaagtggaagggcaaggacctgttcgacctggtgtgcagaaccctgggcctgagagagacctggttcttcggcctgcagtacaccatcaaggacaccgtggcctggctgaagatggacaagaaggtgaagaagcagatcctggacgagaagatctactgcccccccgaggccagcgtgctgctggccagctacgccgtgcaggccaagtacggcgactacgaccccagcgtgcacaagagaggcttcctggcccaggaggagctgctgcccaagagagtgatcaacctgtaccagatgacccccgagatgtgggaggagagaatcaccgcctggtacgccgagcacagaggcagagccagagacgaggccgagatggagtacctgaagatcgcccaggacctggagatgtacggcgtgaactacttcgccatcagaaacaagaagggcaccgagctgctgctgggcgtggacgccctgggcctgcacatctacgaccccgagaacagactgacccccaagatcagcttcccctggaacgagatcagaaacatcagctacagcgacaaggagttcaccatcaagcccctggacaagaagatcgacgtgttcaagttcaacagcagcaagctgagagtgaacaagctgatcctgcagctgtgcatcggcaaccacgacctgttcatgagaagaagaaaggccgacagcctggaggtgcagcagatgaaggcccaggccagagaggagaaggccagaaagcagatggagagacagagactggccagagagaagcagatgagagaggaggccgagagaaccagagacgagctggagagaagactgctgcagatgaaggaggaggccaccatggccaacgaggccctgatgagaagcgaggagaccgccgacctgctggccgagaaggcccagatcaccgaggaggaggccaagctgctggcccagaaggccgccgaggccgagcaggagatgcagagaatcaaggccaccgccatcagaaccgaggaggagaagagactgatggagcagaaggtgctggaggccgaggtgctggccctgaagatggccgaggagagcgagagaagagccaaggaggccgaccagctgaagcaggacctgcaggaggccagagaggccgagagaagagccaagcagaagctgctggagatcgccaccaagcccacctacccccccatgaaccccatccccgcccccctgccccccgacatccccagcttcaacctgatcggcgacagcctgagcttcgacttcaaggacaccgacatgaagagactgagcatggagatcgagaaggagaaggtggagtacatggagaagagcaagcacctgcaggagcagctgaacgagctgaagaccgagatcgaggccctgaagctgaaggagagagagaccgccctggacatcctgcacaacgagaacagcgacagaggcggcagcagcaagcacaacaccatcaagaagccccaggcccagggcagaagacccatctgcatctag

SEQ ID NO: 11808 - DNA, 1647 bp, synthetic construct
  misc_feature 1..1647: note = Description of Artificial Sequence: Synthetic coding sequence
  source 1..1647: mol_type = other DNA
atggccggcgccatcgccagcagaatgagcttcagcagcctgaagagaaagcagcccaagaccttcaccgtgagaatcgtgaccatggacgccgagatggagttcaactgcgaggtgctggaccacgacgtgagcaaggaggagcccgtgaccttccacttcctggccaagttctaccccgagaacgccgaggaggagctggtgcaggagatcacccagcacctgttcttcctgcaggtgaagaagcagatcctggacgagaagatctactgcccccccgaggccagcgtgctgctggccagctacgccgtgcaggccaagtacggcgactacgaccccagcgtgcacaagagaggcttcctggcccaggaggagctgctgcccaagagagtgatcaacctgtaccagatgacccccgagatgtgggaggagagaatcaccgcctggtacgccgagcacagaggcagagccagagacgaggccgagatggagtacctgaagatcgcccaggacctggagatgtacggcgtgaactacttcgccatcagaaacaagaagggcaccgagctgctgctgggcgtggacgccctgggcctgcacatctacgaccccgagaacagactgacccccaagatcagcttcccctggaacgagatcagaaacatcagctacagcgacaaggagttcaccatcaagcccctggacaagaagatcgacgtgttcaagttcaacagcagcaagctgagagtgaacaagctgatcctgcagctgtgcatcggcaaccacgacctgttcatgagaagaagaaaggccgacagcctggaggtgcagcagatgaaggcccaggccagagaggagaaggccagaaagcagatggagagacagagactggccagagagaagcagatgagagaggaggccgagagaaccagagacgagctggagagaagactgctgcagatgaaggaggaggccaccatggccaacgaggccctgatgagaagcgaggagaccgccgacctgctggccgagaaggcccagatcaccgaggaggaggccaagctgctggcccagaaggccgccgaggccgagcaggagatgcagagaatcaaggccaccgccatcagaaccgaggaggagaagagactgatggagcagaaggtgctggaggccgaggtgctggccctgaagatggccgaggagagcgagagaagagccaaggaggccgaccagctgaagcaggacctgcaggaggccagagaggccgagagaagagccaagcagaagctgctggagatcgccaccaagcccacctacccccccatgaaccccatccccgcccccctgccccccgacatccccagcttcaacctgatcggcgacagcctgagcttcgacttcaaggacaccgacatgaagagactgagcatggagatcgagaaggagaaggtggagtacatggagaagagcaagcacctgcaggagcagctgaacgagctgaagaccgagatcgaggccctgaagctgaaggagagagagaccgccctggacatcctgcacaacgagaacagcgacagaggcggcagcagcaagcacaacaccatcaagaagccccaggcccagggcagaagacccatctgcatctag

SEQ ID NO: 11809 - DNA, 1773 bp, synthetic construct; identical to SEQ ID NO: 11806
  misc_feature 1..1773: note = Description of Artificial Sequence: Synthetic coding sequence
  source 1..1773: mol_type = other DNA

SEQ ID NO: 11810 - DNA, 1806 bp, synthetic construct
  misc_feature 1..1806: note = Description of Artificial Sequence: Synthetic coding sequence
  source 1..1806: mol_type = other DNA
atggccggcgccatcgccagcagaatgagcttcagcagcctgaagagaaagcagcccaagaccttcaccgtgagaatcgtgaccatggacgccgagatggagttcaactgcgagatgaagtggaagggcaaggacctgttcgacctggtgtgcagaaccctgggcctgagagagacctggttcttcggcctgcagtacaccatcaaggacaccgtggcctggctgaagatggacaagaaggtgctggaccacgacgtgagcaaggaggagcccgtgaccttccacttcctggccaagttctaccccgagaacgccgaggaggagctggtgcaggagatcacccagcacctgttcttcctgcaggtgaagaagcagatcctggacgagaagatctactgcccccccgaggccagcgtgctgctggccagctacgccgtgcaggccaagtacggcgactacgaccccagcgtgcacaagagaggcttcctggcccaggaggagctgctgcccaagagagtgatcaacctgtaccagatgacccccgagatgtgggaggagagaatcaccgcctggtacgccgagcacagaggcagagccagagacgaggccgagatggagtacctgaagatcgcccaggacctggagatgtacggcgtgaactacttcgccatcagaaacaagaagggcaccgagctgctgctgggcgtggacgccctgggcctgcacatctacgaccccgagaacagactgacccccaagatcagcttcccctggaacgagatcagaaacatcagctacagcgacaaggagttcaccatcaagcccctggacaagaagatcgacgtgttcaagttcaacagcagcaagctgagagtgaacaagctgatcctgcagctgtgcatcggcaaccacgacctgttcatgagaagaagaaaggccgacagcctggaggtgcagcagatgaaggcccaggccagagaggagaaggccagaaagcagatggagagacagagactggccagagagaagcagatgagagaggaggccgagagaaccagagacgagctggagagaagactgctgcagatgaaggaggaggccaccatggccaacgaggccctgatgagaagcgaggaggccgagcaggagatgcagagaatcaaggccaccgccatcagaaccgaggaggagaagagactgatggagcagaaggtgctggaggccgaggtgctggccctgaagatggccgaggagagcgagagaagagccaaggaggccgaccagctgaagcaggacctgcaggaggccagagaggccgagagaagagccaagcagaagctgctggagatcgccaccaagcccacctacccccccatgaaccccatccccgcccccctgccccccgacatccccagcttcaacctgatcggcgacagcctgagcttcgacttcaaggacaccgacatgaagagactgagcatggagatcgagaaggagaaggtggagtacatggagaagagcaagcacctgcaggagcagctgaacgagctgaagaccgagatcgaggccctgaagctgaaggagagagagaccgccctggacatcctgcacaacgagaacagcgacagaggcggcagcagcaagcacaacaccatcaagaagggcatgttcctgttcttcttcatcctgttctgctggttcagcctgaagcccaaggccgaggacctgagcgccttcgagcccagcaacagcccctgcagagcccccagccccgagtggcccagcctgaagagcagcagcagatag

SEQ ID NO: 11811 - DNA, 1686 bp, synthetic construct
  misc_feature 1..1686: note = Description of Artificial Sequence: Synthetic coding sequence
  source 1..1686: mol_type = other DNA
atggccggcgccatcgccagcagaatgagcttcagcagcctgaagagaaagcagcccaagaccttcaccgtgagaatcgtgaccatggacgccgagatggagttcaactgcgagatgaagtggaagggcaaggacctgttcgacctggtgtgcagaaccctgggcctgagagagacctggttcttcggcctgcagtacaccatcaaggacaccgtggcctggctgaagatggacaagaaggtgctggaccacgacgtgagcaaggaggagcccgtgaccttccacttcctggccaagttctaccccgagaacgccgaggaggagctggtgcaggagatcacccagcacctgttcttcctgcaggtgaagaagcagatcctggacgagaagatctactgcccccccgaggccagcgtgctgctggccagctacgccgtgcaggccaagtacggcgactacgaccccagcgtgcacaagagaggcttcctggcccaggaggagctgctgcccaagagagtgatcaacctgtaccagatgacccccgagatgtgggaggagagaatcaccgcctggtacgccgagcacagaggcagagccagagacgaggccgagatggagtacctgaagatcgcccaggacctggagatgtacggcgtgaactacttcgccatcagaaacaagaagggcaccgagctgctgctgggcgtggacgccctgggcctgcacatctacgaccccgagaacagactgacccccaagatcagcttcccctggaacgagatcagaaacatcagctacagcgacaaggagttcaccatcaagcccctggacaagaagatcgacgtgttcaagttcaacagcagcaagctgagagtgaacaagctgatcctgcagctgtgcatcggcaaccacgacctgttcatgagaagaagaaaggccgacagcctggaggtgcagcagatgaaggcccaggccagagaggagaaggccagaaagcagatgaaggaggaggccaccatggccaacgaggccctgatgagaagcgaggagaccgccgacctgctggccgagaaggcccagatcaccgaggaggaggccaagctgctggcccagaaggccgccgaggccgagcaggagatgcagagaatcaaggccaccgccatcagaaccgaggaggagaagagactgatggagcagaaggtgctggaggccgaggtgctggccctgaagatggccgaggagagcgagagaagagccaaggaggccgaccagctgaagcaggacctgcaggaggccagagaggccgagagaagagccaagcagaagctgctggagatcgccaccaagcccacctacccccccatgaaccccatccccgcccccctgccccccgacatccccagcttcaacctgatcggcgacagcctgagcttcgacttcaaggacaccgacatgaagagactgagcatggagatcgagaaggagaaggtggagtacatggagaagagcaagcacctgcaggagcagctgaacgagctgaagaccgagatcgaggccctgaagctgaaggagagagagaccgccctggacatcctgcacaacgagaacagcgacagaggcggcagcagcaagcacaacaccatcaagaagccccaggcccagggcagaagacccatctgcatctag

SEQ ID NO: 11812 - DNA, 1773 bp, synthetic construct; identical to SEQ ID NO: 11806
  misc_feature 1..1773: note = Description of Artificial Sequence: Synthetic coding sequence
  source 1..1773: mol_type = other DNA

SEQ ID NO: 11813 - DNA, 498 bp, synthetic construct
  misc_feature 1..498: note = Description of Artificial Sequence: Synthetic coding sequence
  source 1..498: mol_type = other DNA
atggccggcgccatcgccagcagaatgagcttcagcagcctgaagagaaagcagcccaagaccttcaccgtgagaatcgtgaccatggacgccgagatggagttcaactgcgagatgaagtggaagggcaaggacctgttcgacctggtgtgcagaaccctgggcctgagagagacctggttcttcggcctgcagtacaccatcaaggacaccgtggcctggctgaagatggacaagaaggtgctggaccacgacgtgagcaaggaggagcccgtgaccttccacttcctggccaagttctaccccgagaacgccgaggaggagctggtgcaggagatcacccagcacctgttcttcctgcaggtgaagaagcagatcctggacgagaagatctactgcccccccgaggccagcgtgctgctggccagctacgccgtgcaggccaagctgaccctgcagagcgccaagagcagagtggccttcttcgaggagctgtag

SEQ ID NO: 11814 - DNA, 663 bp, synthetic construct; identical to SEQ ID NO: 11804
  misc_feature 1..663: note = Description of Artificial Sequence: Synthetic coding sequence
  source 1..663: mol_type = other DNA

SEQ ID NO: 11815 - DNA, 2772 bp, synthetic construct
  misc_feature 1..2772: note = Description of Artificial Sequence: Synthetic coding sequence
  source 1..2772: mol_type = other DNA
atggagagaggcctgcccctgctgtgcgccgtgctggccctggtgctggcccccgccggcgccttcagaaacgacaagtgcggcgacaccatcaagatcgagagccccggctacctgaccagccccggctacccccacagctaccaccccagcgagaagtgcgagtggctgatccaggcccccgacccctaccagagaatcatgatcaacttcaacccccacttcgacctggaggacagagactgcaagtacgactacgtggaggtgttcgacggcgagaacgagaacggccacttcagaggcaagttctgcggcaagatcgcccccccccccgtggtgagcagcggccccttcctgttcatcaagttcgtgagcgactacgagacccacggcgccggcttcagcatcagatacgagatcttcaagagaggccccgagtgcagccagaactacaccacccccagcggcgtgatcaagagccccggcttccccgagaagtaccccaacagcctggagtgcacctacatcgtgttcgtgcccaagatgagcgagatcatcctggagttcgagagcttcgacctggagcccgacagcaacccccccggcggcatgttctgcagatacgacagactggagatctgggacggcttccccgacgtgggcccccacatcggcagatactgcggccagaagacccccggcagaatcagaagcagcagcggcatcctgagcatggtgttctacaccgacagcgccatcgccaaggagggcttcagcgccaactacagcgtgctgcagagcagcgtgagcgaggacttcaagtgcatggaggccctgggcatggagagcggcgagatccacagcgaccagatcaccgccagcagccagtacagcaccaactggagcgccgagagaagcagactgaactaccccgagaacggctggacccccggcgaggacagctacagagagtggatccaggtggacctgggcctgctgagattcgtgaccgccgtgggcacccagggcgccatcagcaaggagaccaagaagaagtactacgtgaagacctacaagatcgacgtgagcagcaacggcgaggactggatcaccatcaaggagggcaacaagcccgtgctgttccagggcaacaccaaccccaccgacgtggtggtggccgtgttccccaagcccctgatcaccagattcgtgagaatcaagcccgccacctgggagaccggcatcagcatgagattcgaggtgtacggctgcaagatcaccgactacccctgcagcggcatgctgggcatggtgagcggcctgatcagcgacagccagatcaccagcagcaaccagggcgacagaaactggatgcccgagaacatcagactggtgaccagcagaagcggctgggccctgccccccgccccccacagctacatcaacgagtggctgcagatcgacctgggcgaggagaagatcgtgagaggcatcatcatccagggcggcaagcacagagagaacaaggtgttcatgagaaagttcaagatcggctacagcaacaacggcagcgactggaagatgatcatggacgacagcaagagaaaggccaagagcttcgagggcaacaacaactacgacacccccgagctgagaaccttccccgccctgagcaccagattcatcagaatctaccccgagagagccacccacggcggcctgggcctgagaatggagctgctgggctgcgaggtggaggcccccaccgccggccccaccacccccaacggcaacctggtggacgagtgcgacgacgaccaggccaactgccacagcggcaccggcgacgacttccagctgaccggcggcaccaccgtgctggccaccgagaagcccaccgtgatcgacagcaccatccagagcgagttccccacctacggcttcaactgcgagttcggctggggcagccacaagaccttctgccactgggagcacgacaaccacgtgcagctgaagtggagcgtgctgaccagcaagaccggccccatccaggaccacaccggcgacggcaacttcatctacagccaggccgacgagaaccagaagggcaaggtggccagactggtgagccccgtggtgtacagccagaacagcgcccactgcatgaccttctggtaccacatgagcggcagccacgtgggcaccctgagagtgaagctgagataccagaagcccgaggagtacgaccagctggtgtggatggccatcggccaccagggcgaccactggaaggagggcagagtgctgctgcacaagagcctgaagctgtaccaggtgatcttcgagggcgagatcggcaagggcaacctgggcggcatcgccgtggacgacatcagcatcaacaaccacatcagccaggaggactgcgccaagcccgccgacctggacaagaagaaccccgagatcaagatcgacgagaccggcagcacccccggctacgagggcgagggcgagggcgacaagaacatcagcagaaagcccggcaacgtgctgaagaccctggaccccatcctgatcaccatcatcgccatgagcgccctgggcgtgctgctgggcgccgtgtgcggcgtggtgctgtactgcgcctgctggcacaacggcatgagcgagagaaacctgagcgccctggagaactacaacttcgagctggtggacggcgtgaagctgaagaaggacaagctgaacacccagagcacctacagcgaggcctag

SEQ ID NO: 11816 - DNA, 420 bp, synthetic construct
  misc_feature 1..420: note = Description of Artificial Sequence: Synthetic coding sequence
  source 1..420: mol_type = other DNA
atggacgacagcaagagaaaggccaagagcttcgagggcaacaacaactacgacacccccgagctgagaaccttccccgccctgagcaccagattcatcagaatctaccccgagagagccacccacggcggcctgggcctgagaatggagctgctgggctgcgaggtggaggcccccaccgccggccccaccacccccaacggcaacctggtggacgagtgcgacgacgaccaggccaactgccacagcggcaccggcgacgacttccagctgaccggcggcaccaccgtgctggccaccgagaagcccaccgtgatcgacagcaccatccagagcggcagcagattcttcaagcaccaccacaagcagcagagcatgagaccccagaacctgcaccacaacagcatcctgctgctgtag

SEQ ID NO: 11817 - DNA, 1926 bp, synthetic construct
  misc_feature 1..1926: note = Description of Artificial Sequence: Synthetic coding sequence
  source 1..1926: mol_type = other DNA
atggagagaggcctgcccctgctgtgcgccgtgctggccctggtgctggcccccgccggcgccttcagaaacgacaagtgcggcgacaccatcaagatcgagagccccggctacctgaccagccccggctacccccacagctaccaccccagcgagaagtgcgagtggctgatccaggcccccgacccctaccagagaatcatgatcaacttcaacccccacttcgacctggaggacagagactgcaagtacgactacgtggaggtgttcgacggcgagaacgagaacggccacttcagaggcaagttctgcggcaagatcgcccccccccccgtggtgagcagcggccccttcctgttcatcaagttcgtgagcgactacgagacccacggcgccggcttcagcatcagatacgagatcttcaagagaggccccgagtgcagccagaactacaccacccccagcggcgtgatcaagagccccggcttccccgagaagtaccccaacagcctggagtgcacctacatcgtgttcgtgcccaagatgagcgagatcatcctggagttcgagagcttcgacctggagcccgacagcaacccccccggcggcatgttctgcagatacgacagactggagatctgggacggcttccccgacgtgggcccccacatcggcagatactgcggccagaagacccccggcagaatcagaagcagcagcggcatcctgagcatggtgttctacaccgacagcgccatcgccaaggagggcttcagcgccaactacagcgtgctgcagagcagcgtgagcgaggacttcaagtgcatggaggccctgggcatggagagcggcgagatccacagcgaccagatcaccgccagcagccagtacagcaccaactggagcgccgagagaagcagactgaactaccccgagaacggctggacccccggcgaggacagctacagagagtggatccaggtggacctgggcctgctgagattcgtgaccgccgtgggcacccagggcgccatcagcaaggagaccaagaagaagtactacgtgaagacctacaagatcgacgtgagcagcaacggcgaggactggatcaccatcaaggagggcaacaagcccgtgctgttccagggcaacaccaaccccaccgacgtggtggtggccgtgttccccaagcccctgatcaccagattcgtgagaatcaagcccgccacctgggagaccggcatcagcatgagattcgaggtgtacggctgcaagatcaccgactacccctgcagcggcatgctgggcatggtgagcggcctgatcagcgacagccagatcaccagcagcaaccagggcgacagaaactggatgcccgagaacatcagactggtgaccagcagaagcggctgggccctgccccccgccccccacagctacatcaacgagtggctgcagatcgacctgggcgaggagaagatcgtgagaggcatcatcatccagggcggcaagcacagagagaacaaggtgttcatgagaaagttcaagatcggctacagcaacaacggcagcgactggaagatgatcatggacgacagcaagagaaaggccaagagcttcgagggcaacaacaactacgacacccccgagctgagaaccttccccgccctgagcaccagattcatcagaatctaccccgagagagccacccacggcggcctgggcctgagaatggagctgctgggctgcgaggtggagggcaccatcaacaccgaccaggagtgcccctgcgccagagccctggccaaggacgccaagaagaagaagagatgggccgacagcacccactgcagatgcgtgagaagcatccacggcgagatgtggagcagcggcaagggcgtgtgcagcctggacgccaacctgtag

SEQ ID NO: 11818 - DNA, 567 bp, synthetic construct
  misc_feature 1..567: note = Description of Artificial Sequence: Synthetic coding sequence
  source 1..567: mol_type = other DNA
atgagcgagatcatcctggagttcgagagcttcgacctggagcccgacagcaacccccccggcggcatgttctgcagatacgacagactggagatctgggacggcttccccgacgtgggcccccacatcggcagatactgcggccagaagacccccggcagaatcagaagcagcagcggcatcctgagcatggtgttctacaccgacagcgccatcgccaaggagggcttcagcgccaactacagcgtgctgcagagcagcgtgagcgaggacttcaagtgcatggaggccctgggcatggagagcggcgagatccacagcgaccagatcaccgccagcagccagtacagcaccaactggagcgccgagagaagcagactgaactaccccgagaacggctggacccccggcgaggacagctacagagagtggatccaggacgccaagtacagactgagagtgagcgtggtgagaagcaagagcagcagcagcagcaccagcctggagcccagacccctgagcagcctgaagctgagcttcttcagctacaagatcaagatcacctag

SEQ ID NO: 11819 - DNA, 1830 bp, synthetic construct
  misc_feature 1..1830: note = Description of Artificial Sequence: Synthetic coding sequence
  source 1..1830: mol_type = other DNA
atggagagaggcctgcccctgctgtgcgccgtgctggccctggtgctggcccccgccggcgccttcagaaacgacaagtgcggcgacaccatcaagatcgagagccccggctacctgaccagccccggctacccccacagctaccaccccagcgagaagtgcgagtggctgatccaggcccccgacccctaccagagaatcatgatcaacttcaacccccacttcgacctggaggacagagactgcaagtacgactacgtggaggtgttcgacggcgagaacgagaacggccacttcagaggcaagttctgcggcaagatcgcccccccccccgtggtgagcagcggccccttcctgttcatcaagttcgtgagcgactacgagacccacggcgccggcttcagcatcagatacgagatcttcaagagaggccccgagtgcagccagaactacaccacccccagcggcgtgatcaagagccccggcttccccgagaagtaccccaacagcctggagtgcacctacatcgtgttcgtgcccaagatgagcgagatcatcctggagttcgagagcttcgacctggagcccgacagcaacccccccggcggcatgttctgcagatacgacagactggagatctgggacggcttccccgacgtgggcccccacatcggcagatactgcggccagaagacccccggcagaatcagaagcagcagcggcatcctgagcatggtgttctacaccgacagcgccatcgccaaggagggcttcagcgccaactacagcgtgctgcagagcagcgtgagcgaggacttcaagtgcatggaggccctgggcatggagagcggcgagatccacagcgaccagatcaccgccagcagccagtacagcaccaactggagcgccgagagaagcagactgaactaccccgagaacggctggacccccggcgaggacagctacagagagtggatccaggtggacctgggcctgctgagattcgtgaccgccgtgggcacccagggcgccatcagcaaggagaccaagaagaagtactacgtgaagacctacaagatcgacgtgagcagcaacggcgaggactggatcaccatcaaggagggcaacaagcccgtgctgttccagggcaacaccaaccccaccgacgtggtggtggccgtgttccccaagcccctgatcaccagattcgtgagaatcaagcccgccacctgggagaccggcatcagcatgagattcgaggtgtacggctgcaagatcaccgactacccctgcagcggcatgctgggcatggtgagcggcctgatcagcgacagccagatcaccagcagcaaccagggcgacagaaactggatgcccgagaacatcagactggtgaccagcagaagcggctgggccctgccccccgccccccacagctacatcaacgagtggctgcagatcgacctgggcgaggagaagatcgtgagaggcatcatcatccagggcggcaagcacagagagaacaaggtgttcatgagaaagttcaagatcggctacagcaacaacggcagcgactggaagatgatcatggacgacagcaagagaaaggccaagagcttcgagggcaacaacaactacgacacccccgagctgagaaccttccccgccctgagcaccagattcatcagaatctaccccgagagagccacccacggcggcctgggcctgagaatggagctgctgggctgcgaggtggagggcggcaccaccgtgctggccaccgagaagcccaccgtgatcgacagcaccatccagagcggcatcaagtag

SEQ ID NO: 11820 - DNA, 1935 bp, synthetic construct
  misc_feature 1..1935: note = Description of Artificial Sequence: Synthetic coding sequence
  source 1..1935: mol_type = other DNA
atggagagaggcctgcccctgctgtgcgccgtgctggccctggtgctggcccccgccggcgccttcagaaacgacaagtgcggcgacaccatcaagatcgagagccccggctacctgaccagccccggctacccccacagctaccaccccagcgagaagtgcgagtggctgatccaggcccccgacccctaccagagaatcatgatcaacttcaacccccacttcgacctggaggacagagactgcaagtacgactacgtggaggtgttcgacggcgagaacgagaacggccacttcagaggcaagttctgcggcaagatcgcccccccccccgtggtgagcagcggccccttcctgttcatcaagttcgtgagcgactacgagacccacggcgccggcttcagcatcagatacgagatcttcaagagaggccccgagtgcagccagaactacaccacccccagcggcgtgatcaagagccccggcttccccgagaagtaccccaacagcctggagtgcacctacatcgtgttcgtgcccaagatgagcgagatcatcctggagttcgagagcttcgacctggagcccgacagcaacccccccggcggcatgttctgcagatacgacagactggagatctgggacggcttccccgacgtgggcccccacatcggcagatactgcggccagaagacccccggcagaatcagaagcagcagcggcatcctgagcatggtgttctacaccgacagcgccatcgccaaggagggcttcagcgccaactacagcgtgctgcagagcagcgtgagcgaggacttcaagtgcatggaggccctgggcatggagagcggcgagatccacagcgaccagatcaccgccagcagccagtacagcaccaactggagcgccgagagaagcagactgaactaccccgagaacggctggacccccggcgaggacagctacagagagtggatccaggtggacctgggcctgctgagattcgtgaccgccgtgggcacccagggcgccatcagcaaggagaccaagaagaagtactacgtgaagacctacaagatcgacgtgagcagcaacggcgaggactggatcaccatcaaggagggcaacaagcccgtgctgttccagggcaacaccaaccccaccgacgtggtggtggccgtgttccccaagcccctgatcaccagattcgtgagaatcaagcccgccacctgggagaccggcatcagcatgagattcgaggtgtacggctgcaagatcaccgactacccctgcagcggcatgctgggcatggtgagcggcctgatcagcgacagccagatcaccagcagcaaccagggcgacagaaactggatgcccgagaacatcagactggtgaccagcagaagcggctgggccctgccccccgccccccacagctacatcaacgagtggctgcagatcgacctgggcgaggagaagatcgtgagaggcatcatcatccagggcggcaagcacagagagaacaaggtgttcatgagaaagttcaagatcggctacagcaacaacggcagcgactggaagatgatcatggacgacagcaagagaaaggccaagagcttcgagggcaacaacaactacgacacccccgagctgagaaccttccccgccctgagcaccagattcatcagaatctaccccgagagagccacccacggcggcctgggcctgagaatggagctgctgggctgcgaggtggaggcccccaccgccggccccaccacccccaacggcaacctggtggacgagtgcgacgacgaccaggccaactgccacagcggcaccggcgacgacttccagctgaccggcggcaccaccgtgctggccaccgagaagcccaccgtgatcgacagcaccatccagagcggcatcaagtag

SEQ ID NO: 11821 - DNA, 2115 bp, synthetic construct
  misc_feature 1..2115: note = Description of Artificial Sequence: Synthetic coding sequence
  source 1..2115: mol_type = other DNA
atggagagaggcctgcccctgctgtgcgccgtgctggccctggtgctggcccccgccggcgccttcagaaacgacaagtgcggcgacaccatcaagatcgagagccccggctacctgaccagccccggctacccccacagctaccaccccagcgagaagtgcgagtggctgatccaggcccccgacccctaccagagaatcatgatcaacttcaacccccacttcgacctggaggacagagactgcaagtacgactacgtggaggtgttcgacggcgagaacgagaacggccacttcagaggcaagttctgcggcaagatcgcccccccccccgtggtgagcagcggccccttcctgttcatcaagttcgtgagcgactacgagacccacggcgccggcttcagcatcagatacgagatcttcaagagaggccccgagtgcagccagaactacaccacccccagcggcgtgatcaagagccccggcttccccgagaagtaccccaacagcctggagtgcacctacatcgtgttcgtgcccaagatgagcgagatcatcctggagttcgagagcttcgacctggagcccgacagcaacccccccggcggcatgttctgcagatacgacagactggagatctgggacggcttccccgacgtgggcccccacatcggcagatactgcggccagaagacccccggcagaatcagaagcagcagcggcatcctgagcatggtgttctacaccgacagcgccatcgccaaggagggcttcagcgccaactacagcgtgctgcagagcagcgtgagcgaggacttcaagtgcatggaggccctgggcatggagagcggcgagatccacagcgaccagatcaccgccagcagccagtacagcaccaactggagcgccgagagaagcagactgaactaccccgagaacggctggacccccggcgaggacagctacagagagtggatccaggtggacctgggcctgctgagattcgtgaccgccgtgggcacccagggcgccatcagcaaggagaccaagaagaagtactacgtgaagacctacaagatcgacgtgagcagcaacggcgaggactggatcaccatcaaggagggcaacaagcccgtgctgttccagggcaacaccaaccccaccgacgtggtggtggccgtgttccccaagcccctgatcaccagattcgtgagaatcaagcccgccacctgggagaccggcatcagcatgagattcgaggtgtacggctgcaagatcaccgactacccctgcagcggcatgctgggcatggtgagcggcctgatcagcgacagccagatcaccagcagcaaccagggcgacagaaactggatgcccgagaacatcagactggtgaccagcagaagcggctgggccctgccccccgccccccacagctacatcaacgagtggctgcagatcgacctgggcgaggagaagatcgtgagaggcatcatcatccagggcggcaagcacagagagaacaaggtgttcatgagaaagttcaagatcggctacagcaacaacggcagcgactggaagatgatcatggacgacagcaagagaaaggccaagagcttcgagggcaacaacaactacgacacccccgagctgagaaccttccccgccctgagcaccagattcatcagaatctaccccgagagagccacccacggcggcctgggcctgagaatggagctgctgggctgcgaggtggaggcccccaccgccggccccaccacccccaacggcaacctggtggacgagtgcgacgacgaccaggccaactgccacagcggcaccggcgacgacttccagctgaccggcgccgagaccatcttcatccccctgctgtaccacttcagcagctgcctgagctgggaccagctgacccccgtgtgcgtgctggtgaccccccacggcagagagctgcccagaaacagaagctgcctggccagaaccagagccagcagcttcccccacgtgatctggatcgacgagctgttcctgatcgccaccaccatctgcaacaacaacctgagccacttcgagagccagagactgggcctgagctag

SEQ ID NO: 11822 - DNA, 261 bp, synthetic construct
  misc_feature 1..261: note = Description of Artificial Sequence: Synthetic coding sequence
  source 1..261: mol_type = other DNA
atggagctgctgggctgcgaggtggaggcccccaccgccggccccaccacccccaacggcaacctggtggacgagtgcgacgacgaccaggccaactgccacagcggcaccggcgacgacttccagctgaccggcggcaccaccgtgctggccaccgagaagcccaccgtgatcgacagcaccatccagagcgccagactggaggtgagcaccctgaacctgagcctgcacaaccccccccagcagaaggccctgatctag

SEQ ID NO: 11823 - DNA, 2772 bp, synthetic construct; identical to SEQ ID NO: 11815
  misc_feature 1..2772: note = Description of Artificial Sequence: Synthetic coding sequence
  source 1..2772: mol_type = other DNA

SEQ ID NO: 11824 - DNA, 2208 bp, synthetic construct
  misc_feature 1..2208: note = Description of Artificial Sequence: Synthetic coding sequence
  source 1..2208: mol_type = other DNA
atgagcgagatcatcctggagttcgagagcttcgacctggagcccgacagcaacccccccggcggcatgttctgcagatacgacagactggagatctgggacggcttccccgacgtgggcccccacatcggcagatactgcggccagaagacccccggcagaatcagaagcagcagcggcatcctgagcatggtgttctacaccgacagcgccatcgccaaggagggcttcagcgccaactacagcgtgctgcagagcagcgtgagcgaggacttcaagtgcatggaggccctgggcatggagagcggcgagatccacagcgaccagatcaccgccagcagccagtacagcaccaactggagcgccgagagaagcagactgaactaccccgagaacggctggacccccggcgaggacagctacagagagtggatccaggtggacctgggcctgctgagattcgtgaccgccgtgggcacccagggcgccatcagcaaggagaccaagaagaagtactacgtgaagacctacaagatcgacgtgagcagcaacggcgaggactggatcaccatcaaggagggcaacaagcccgtgctgttccagggcaacaccaaccccaccgacgtggtggtggccgtgttccccaagcccctgatcaccagattcgtgagaatcaagcccgccacctgggagaccggcatcagcatgagattcgaggtgtacggctgcaagatcaccgactacccctgcagcggcatgctgggcatggtgagcggcctgatcagcgacagccagatcaccagcagcaaccagggcgacagaaactggatgcccgagaacatcagactggtgaccagcagaagcggctgggccctgccccccgccccccacagctacatcaacgagtggctgcagatcgacctgggcgaggagaagatcgtgagaggcatcatcatccagggcggcaagcacagagagaacaaggtgttcatgagaaagttcaagatcggctacagcaacaacggcagcgactggaagatgatcatggacgacagcaagagaaaggccaagagcttcgagggcaacaacaactacgacacccccgagctgagaaccttccccgccctgagcaccagattcatcagaatctaccccgagagagccacccacggcggcctgggcctgagaatggagctgctgggctgcgaggtggaggcccccaccgccggccccaccacccccaacggcaacctggtggacgagtgcgacgacgaccaggccaactgccacagcggcaccggcggcaccaccgtgctggccaccgagaagcccaccgtgatcgacagcaccatccagagcgagttccccacctacggcttcaactgcgagttcggctggggcagccacaagaccttctgccactgggagcacgacaaccacgtgcagctgaagtggagcgtgctgaccagcaagaccggccccatccaggaccacaccggcgacggcaacttcatctacagccaggccgacgagaaccagaagggcaaggtggccagactggtgagccccgtggtgtacagccagaacagcgcccactgcatgaccttctggtaccacatgagcggcagccacgtgggcaccctgagagtgaagctgagataccagaagcccgaggagtacgaccagctggtgtggatggccatcggccaccagggcgaccactggaaggagggcagagtgctgctgcacaagagcctgaagctgtaccaggtgatcttcgagggcgagatcggcaagggcaacctgggcggcatcgccgtggacgacatcagcatcaacaaccacatcagccaggaggactgcgccaagcccgccgacctggacaagaagaaccccgagatcaagatcgacgagaccggcagcacccccggctacgagggcgagggcgagggcgacaagaacatcagcagaaagcccggcaacgtgctgaagaccctggaccccatcctgatcaccatcatcgccatgagcgccctgggcgtgctgctgggcgccgtgtgcggcgtggtgctgtactgcgcctgctggcacaacggcatgagcgagagaaacctgagcgccctggagaactacaacttcgagctggtggacggcgtgaagctgaagaaggacaagctgaacacccagagcacctacagcgaggcctag

SEQ ID NO: 11825 - DNA, 2721 bp, synthetic construct
  misc_feature 1..2721: note = Description of Artificial Sequence: Synthetic coding sequence
  source 1..2721: mol_type = other DNA
atggagagaggcctgcccctgctgtgcgccgtgctggccctggtgctggcccccgccggcgccttcagaaacgacaagtgcggcgacaccatcaagatcgagagccccggctacctgaccagccccggctacccccacagctaccaccccagcgagaagtgcgagtggctgatccaggcccccgacccctaccagagaatcatgatcaacttcaacccccacttcgacctggaggacagagactgcaagtacgactacgtggaggtgttcgacggcgagaacgagaacggccacttcagaggcaagttctgcggcaagatcgcccccccccccgtggtgagcagcggccccttcctgttcatcaagttcgtgagcgactacgagacccacggcgccggcttcagcatcagatacgagatcttcaagagaggccccgagtgcagccagaactacaccacccccagcggcgtgatcaagagccccggcttccccgagaagtaccccaacagcctggagtgcacctacatcgtgttcgtgcccaagatgagcgagatcatcctggagttcgagagcttcgacctggagcccgacagcaacccccccggcggcatgttctgcagatacgacagactggagatctgggacggcttccccgacgtgggcccccacatcggcagatactgcggccagaagacccccggcagaatcagaagcagcagcggcatcctgagcatggtgttctacaccgacagcgccatcgccaaggagggcttcagcgccaactacagcgtgctgcagagcagcgtgagcgaggacttcaagtgcatggaggccctgggcatggagagcggcgagatccacagcgaccagatcaccgccagcagccagtacagcaccaactggagcgccgagagaagcagactgaactaccccgagaacggctggacccccggcgaggacagctacagagagtggatccaggtggacctgggcctgctgagattcgtgaccgccgtgggcacccagggcgccatcagcaaggagaccaagaagaagtactacgtgaagacctacaagatcgacgtgagcagcaacggcgaggactggatcaccatcaaggagggcaacaagcccgtgctgttccagggcaacaccaaccccaccgacgtggtggtggccgtgttccccaagcccctgatcaccagattcgtgagaatcaagcccgccacctgggagaccggcatcagcatgagattcgaggtgtacggctgcaagatcaccgactacccctgcagcggcatgctgggcatggtgagcggcctgatcagcgacagccagatcaccagcagcaaccagggcgacagaaactggatgcccgagaacatcagactggtgaccagcagaagcggctgggccctgccccccgccccccacagctacatcaacgagtggctgcagatcgacctgggcgaggagaagatcgtgagaggcatcatcatccagggcggcaagcacagagagaacaaggtgttcatgagaaagttcaagatcggctacagcaacaacggcagcgactggaagatgatcatggacgacagcaagagaaaggccaagagcttcgagggcaacaacaactacgacacccccgagctgagaaccttccccgccctgagcaccagattcatcagaatctaccccgagagagccacccacggcggcctgggcctgagaatggagctgctgggctgcgaggtggaggcccccaccgccggccccaccacccccaacggcaacctggtggacgagtgcgacgacgaccaggccaactgccacagcggcaccggcgacgacttccagctgaccggcggcaccaccgtgctggccaccgagaagcccaccgtgatcgacagcaccatccagagcgagttccccacctacggcttcaactgcgagttcggctggggcagccacaagaccttctgccactgggagcacgacaaccacgtgcagctgaagtggagcgtgctgaccagcaagaccggccccatccaggaccacaccggcgacggcaacttcatctacagccaggccgacgagaaccagaagggcaaggtggccagactggtgagccccgtggtgtacagccagaacagcgcccactgcatgaccttctggtaccacatgagcggcagccacgtgggcaccctgagagtgaagctgagataccagaagcccgaggagtacgaccagctggtgtggatggccatcggccaccagggcgaccactggaaggagggcagagtgctgctgcacaagagcctgaagctgtaccaggtgatcttcgagggcgagatcggcaagggcaacctgggcggcatcgccgtggacgacatcagcatcaacaaccacatcagccaggaggactgcgccagaagcacccccggctacgagggcgagggcgagggcgacaagaacatcagcagaaagcccggcaacgtgctgaagaccctggaccccatcctgatcaccatcatcgccatgagcgccctgggcgtgctgctgggcgccgtgtgcggcgtggtgctgtactgcgcctgctggcacaacggcatgagcgagagaaacctgagcgccctggagaactacaacttcgagctggtggacggcgtgaagctgaagaaggacaagctgaacacccagagcacctacagcgaggcctag

SEQ ID NO: 11826 - DNA, 318 bp, synthetic construct
  misc_feature 1..318: note = Description of Artificial Sequence: Synthetic coding sequence
  source 1..318: mol_type = other DNA
aaccacatcagccaggaggactgcgccagaagcacccccggctacgagggcgagggcgagggcgacaagaacatcagcagaaagcccggcaacgtgctgaagaccctggaccccatcctgatcaccatcatcgccatgagcgccctgggcgtgctgctgggcgccgtgtgcggcgtggtgctgtactgcgcctgctggcacaacggcatgagcgagagaaacctgagcgccctggagaactacaacttcgagctggtggacggcgtgaagctgaagaaggacaagctgaacacccagagcacctacagcgaggcctag

SEQ ID NO: 11827 - DNA, 234 bp, synthetic construct
  misc_feature 1..234: note = Description of Artificial Sequence: Synthetic coding sequence
  source 1..234: mol_type = other DNA
tgacccaccgccggccccaccacccccaacggcaacctggtggacgagtgcgacgacgaccaggccaactgccacagcggcaccggcgacgacttccagctgaccggcggcaccaccgtgctggccaccgagaagcccaccgtgatcgacagcaccatccagagcgccagactggaggtgagcaccctgaacctgagcctgcacaaccccccccagcagaaggccctgatctag

SEQ ID NO: 11828 - DNA, 303 bp, synthetic construct
  misc_feature 1..303: note = Description of Artificial Sequence: Synthetic coding sequence
  source 1..303: mol_type = other DNA
tgaacccacggcggcctgggcctgagaatggagctgctgggctgcgaggtggaggcccccaccgccggccccaccacccccaacggcaacctggtggacgagtgcgacgacgaccaggccaactgccacagcggcaccggcgacgacttccagctgaccggcggcaccaccgtgctggccaccgagaagcccaccgtgatcgacagcaccatccagagcggcagcagattcttcaagcaccaccacaagcagcagagcatgagaccccagaacctgcaccacaacagcatcctgctgctgtag

SEQ ID NO: 11829 - DNA, 711 bp, synthetic construct
  misc_feature 1..711: note = Description of Artificial Sequence: Synthetic coding sequence
  source 1..711: mol_type = other DNA
gtggacctgggcctgctgagattcgtgaccgccgtgggcacccagggcgccatcagcaaggagaccaagaagaagtactacgtgaagacctacaagatcgacgtgagcagcaacggcgaggactggatcaccatcaaggagggcaacaagcccgtgctgttccagggcaacaccaaccccaccgacgtggtggtggccgtgttccccaagcccctgatcaccagattcgtgagaatcaagcccgccacctgggagaccggcatcagcatgagattcgaggtgtacggctgcaagatcaccgactacccctgcagcggcatgctgggcatggtgagcggcctgatcagcgacagccagatcaccagcagcaaccagggcgacagaaactggatgcccgagaacatcagactggtgaccagcagaagcggctgggccctgccccccgccccccacagctacatcaacgagtggctgcagatcgacctgggcgaggagaagatcgtgagaggcatcatcatccagggcggcaagcacagagagaacaaggtgttcatgagaaagttcaagatcggctacagcaacaacggcagcgactggaagatgatcatggacgacagcaagagaaaggccaaggtgagagccggcgactgggaggaggtgatcccctacgtgctggacttcaaccagggccccctggccttcagcagatag

SEQ ID NO: 11830 - DNA, 513 bp, synthetic construct
  misc_feature 1..513: note = Description of Artificial Sequence: Synthetic coding sequence
  source 1..513: mol_type = other DNA
tgacccggcggcatgttctgcagatacgacagactggagatctgggacggcttccccgacgtgggcccccacatcggcagatactgcggccagaagacccccggcagaatcagaagcagcagcggcatcctgagcatggtgttctacaccgacagcgccatcgccaaggagggcttcagcgccaactacagcgtgctgcagagcagcgtgagcgaggacttcaagtgcatggaggccctgggcatggagagcggcgagatccacagcgaccagatcaccgccagcagccagtacagcaccaactggagcgccgagagaagcagactgaactaccccgagaacggctggacccccggcgaggacagctacagagagtggatccaggacgccaagtacagactgagagtgagcgtggtgagaagcaagagcagcagcagcagcaccagcctggagcccagacccctgagcagcctgaagctgagcttcttcagctacaagatcaagatcacctag

SEQ ID NO: 11831 - DNA, 2721 bp, synthetic construct
  misc_feature 1..2721: note = Description of Artificial Sequence: Synthetic coding sequence
  source 1..2721: mol_type = other DNA
atggacatgttccccctgacctgggtgttcctggccctgtacttcagcagacaccaggtgagaggccagcccgaccccccctgcggcggcagactgaacagcaaggacgccggctacatcaccagccccggctacccccaggactaccccagccaccagaactgcgagtggatcgtgtacgcccccgagcccaaccagaagatcgtgctgaacttcaacccccacttcgagatcgagaagcacgactgcaagtacgacttcatcgagatcagagacggcgacagcgagagcgccgacctgctgggcaagcactgcggcaacatcgccccccccaccatcatcagcagcggcagcatgctgtacatcagattcaccagcgactacgccagacagggcgccggcttcagcctgagatacgagatcttcaagaccggcagcgaggactgcagcaagaacttcaccagccccaacggcaccatcgagagccccggcttccccgagaagtacccccacaacctggactgcaccttcaccatcctggccaagcccaagatggagatcatcctgcagttcctgatcttcgacctggagcacgaccccctgcaggtgggcgagggcgactgcaagtacgactggctggacatctgggacggcatcccccacgtgggccccctgatcggcaagtactgcggcaccaagacccccagcgagctgagaagcagcaccggcatcctgagcctgaccttccacaccgacatggccgtggccaaggacggcttcagcgccagatactacctggtgcaccaggagcccctggagaacttccagtgcaacgtgcccctgggcatggagagcggcagaatcgccaacgagcagatcagcgccagcagcacctacagcgacggcagatggaccccccagcagagcagactgcacggcgacgacaacggctggacccccaacctggacagcaacaaggagtacctgcaggtggacctgagattcctgaccatgctgaccgccatcgccacccagggcgccatcagcagagagacccagaacggctactacgtgaagagctacaagctggaggtgagcaccaacggcgaggactggatggtgtacagacacggcaagaaccacaaggtgttccaggccaacaacgacgccaccgaggtggtgctgaacaagctgcacgcccccctgctgaccagattcgtgagaatcagaccccagacctggcacagcggcatcgccctgagactggagctgttcggctgcagagtgaccgacgccccctgcagcaacatgctgggcatgctgagcggcctgatcgccgacagccagatcagcgccagcagcacccaggagtacctgtggagccccagcgccgccagactggtgagcagcagaagcggctggttccccagaatcccccaggcccagcccggcgaggagtggctgcaggtggacctgggcacccccaagaccgtgaagggcgtgatcatccagggcgccagaggcggcgacagcatcaccgccgtggaggccagagccttcgtgagaaagttcaaggtgagctacagcctgaacggcaaggactgggagtacatccaggaccccagaacccagcagcccaagctgttcgagggcaacatgcactacgacacccccgacatcagaagattcgaccccatccccgcccagtacgtgagagtgtaccccgagagatggagccccgccggcatcggcatgagactggaggtgctgggctgcgactggaccgacagcaagcccaccgtggagaccctgggccccaccgtgaagagcgaggagaccaccaccccctaccccaccgaggaggaggccaccgagtgcggcgagaactgcagcttcgaggacgacaaggacctgcagctgcccagcggcttcaactgcaacttcgacttcctggaggagccctgcggctggatgtacgaccacgccaagtggctgagaaccacctgggccagcagcagcagccccaacgacagaaccttccccgacgacagaaacttcctgagactgcagagcgacagccagagagagggccagtacgccagactgatcagcccccccgtgcacctgcccagaagccccgtgtgcatggagttccagtaccaggccaccggcggcagaggcgtggccctgcaggtggtgagagaggccagccaggagagcaagctgctgtgggtgatcagagaggaccagggcggcgagtggaagcacggcagaatcatcctgcccagctacgacatggagtaccagatcgtgttcgagggcgtgatcggcaagggcagaagcggcgagatcgccatcgacgacatcagaatcagcaccgacgtgcccctggagaactgcatggagcccatcagcgccttcgccggcgagaacttcaagggcggcaccctgctgcccggcaccgagcccaccgtggacaccgtgcccatgcagcccatccccgcctactggtactacgtgatggccgccggcggcgccgtgctggtgctggtgagcgtggccctggccctggtgctgcactaccacagattcagatacgccgccaagaagaccgaccacagcatcacctacaagaccagccactacaccaacggcgcccccctggccgtggagcccaccctgaccatcaagctggagcaggacagaggcagccactgctag

SEQ ID NO: 11832 - DNA, 300 bp, synthetic construct
  misc_feature 1..300: note = Description of Artificial Sequence: Synthetic coding sequence
  source 1..300: mol_type = other DNA
atggacatgttccccctgacctgggtgttcctggccctgtacttcagcagacaccaggtgagaggccagcccgaccccccctgcggcggcagactgaacagcaaggacgccggctacatcaccagccccggctacccccaggactaccccagccaccagaactgcgagtggatcgtgtacgcccccgagcccaaccagaagatcgtgctgaacttcaacccccacttcgagatcgagaagcacgactgcaacctgctgagcgcctggaagatcagcctgaccagcagaagcttcgcctag

SEQ ID NO: 11833 - DNA, 1668 bp, synthetic construct
  misc_feature 1..1668: note = Description of Artificial Sequence: Synthetic coding sequence
  source 1..1668: mol_type = other DNA
atggacatgttccccctgacctgggtgttcctggccctgtacttcagcagacaccaggtgagaggccagcccgaccccccctgcggcggcagactgaacagcaaggacgccggctacatcaccagccccggctacccccaggactaccccagccaccagaactgcgagtggatcgtgtacgcccccgagcccaaccagaagatcgtgctgaacttcaacccccacttcgagatcgagaagcacgactgcaagtacgacttcatcgagatcagagacggcgacagcgagagcgccgacctgctgggcaagcactgcggcaacatcgccccccccaccatcatcagcagcggcagcatgctgtacatcagattcaccagcgactacgccagacagggcgccggcttcagcctgagatacgagatcttcaagaccggcagcgaggactgcagcaagaacttcaccagccccaacggcaccatcgagagccccggcttccccgagaagtacccccacaacctggactgcaccttcaccatcctggccaagcccaagatggagatcatcctgcagttcctgatcttcgacctggagcacgaccccctgcaggtgggcgagggcgactgcaagtacgactggctggacatctgggacggcatcccccacgtgggccccctgatcggcaagtactgcggcaccaagacccccagcgagctgagaagcagcaccggcatcctgagcctgaccttccacaccgacatggccgtggccaaggacggcttcagcgccagatactacctggtgcaccaggagcccctggagaacttccagtgcaacgtgcccctgggcatggagagcggcagaatcgccaacgagcagatcagcgccagcagcacctacagcgacggcagatggaccccccagcagagcagactgcacggcgacgacaacggctggacccccaacctggacagcaacaaggagtacctgcaggtggacctgagattcctgaccatgctgaccgccatcgccacccagggcgccatcagcagagagacccagaacggctactacgtgaagagctacaagctggaggtgagcaccaacggcgaggactggatggtgtacagacacggcaagaaccacaaggtgttccaggccaacaacgacgccaccgaggtggtgctgaacaagctgcacgcccccctgctgaccagattcgtgagaatcagaccccagacctggcacagcggcatcgccctgagactggagctgttcggctgcagagtgaccgacgccccctgcagcaacatgctgggcatgctgagcggcctgatcgccgacagccagatcagcgccagcagcacccaggagtacctgtggagccccagcgccgccagactggtgagcagcagaagcggctggttccccagaatcccccaggcccagcccggcgaggagtggctgcaggtggacctgggcacccccaagaccgtgaagggcgtgatcatccagggcgccagaggcggcgacagcatcaccgccgtggaggccagagccttcgtgagaaagttcaaggtgagctacagcctgaacggcaaggactgggagtacatccaggaccccagaacccagcagcccaaggtgggctgcagctggagacccctgtag

SEQ ID NO: 11834 - DNA, 2706 bp, synthetic construct
  misc_feature 1..2706: note = Description of Artificial Sequence: Synthetic coding sequence
  source 1..2706: mol_type = other DNA
atggacatgttccccctgacctgggtgttcctggccctgtacttcagcagacaccaggtgagaggccagcccgaccccccctgcggcggcagactgaacagcaaggacgccggctacatcaccagccccggctacccccaggactaccccagccaccagaactgcgagtggatcgtgtacgcccccgagcccaaccagaagatcgtgctgaacttcaacccccacttcgagatcgagaagcacgactgcaagtacgacttcatcgagatcagagacggcgacagcgagagcgccgacctgctgggcaagcactgcggcaacatcgccccccccaccatcatcagcagcggcagcatgctgtacatcagattcaccagcgactacgccagacagggcgccggcttcagcctgagatacgagatcttcaagaccggcagcgaggactgcagcaagaacttcaccagccccaacggcaccatcgagagccccggcttccccgagaagtacccccacaacctggactgcaccttcaccatcctggccaagcccaagatggagatcatcctgcagttcctgatcttcgacctggagcacgaccccctgcaggtgggcgagggcgactgcaagtacgactggctggacatctgggacggcatcccccacgtgggccccctgatcggcaagtactgcggcaccaagacccccagcgagctgagaagcagcaccggcatcctgagcctgaccttccacaccgacatggccgtggccaaggacggcttcagcgccagatactacctggtgcaccaggagcccctggagaacttccagtgcaacgtgcccctgggcatggagagcggcagaatcgccaacgagcagatcagcgccagcagcacctacagcgacggcagatggaccccccagcagagcagactgcacggcgacgacaacggctggacccccaacctggacagcaacaaggagtacctgcaggtggacctgagattcctgaccatgctgaccgccatcgccacccagggcgccatcagcagagagacccagaacggctactacgtgaagagctacaagctggaggtgagcaccaacggcgaggactggatggtgtacagacacggcaagaaccacaaggtgttccaggccaacaacgacgccaccgaggtggtgctgaacaagctgcacgcccccctgctgaccagattcgtgagaatcagaccccagacctggcacagcggcatcgccctgagactggagctgttcggctgcagagtgaccgacgccccctgcagcaacatgctgggcatgctgagcggcctgatcgccgacagccagatcagcgccagcagcacccaggagtacctgtggagccccagcgccgccagactggtgagcagcagaagcggctggttccccagaatcccccaggcccagcccggcgaggagtggctgcaggtggacctgggcacccccaagaccgtgaagggcgtgatcatccagggcgccagaggcggcgacagcatcaccgccgtggaggccagagccttcgtgagaaagttcaaggtgagctacagcctgaacggcaaggactgggagtacatccaggaccccagaacccagcagcccaagctgttcgagggcaacatgcactacgacacccccgacatcagaagattcgaccccatccccgcccagtacgtgagagtgtaccccgagagatggagccccgccggcatcggcatgagactggaggtgctgggctgcgactggaccgacagcaagcccaccgtggagaccctgggccccaccgtgaagagcgaggagaccaccaccccctaccccaccgaggaggaggccaccgagtgcggcgagaactgcagcttcgaggacgacaaggacctgcagctgcccagcggcttcaactgcaacttcgacttcctggaggagccctgcggctggatgtacgaccacgccaagtggctgagaaccacctgggccagcagcagcagccccaacgacagaaccttccccgacgacagaaacttcctgagactgcagagcgacagccagagagagggccagtacgccagactgatcagcccccccgtgcacctgcccagaagccccgtgtgcatggagttccagtaccaggccaccggcggcagaggcgtggccctgcaggtggtgagagaggccagccaggagagcaagctgctgtgggtgatcagagaggaccagggcggcgagtggaagcacggcagaatcatcctgcccagctacgacatggagtaccagatcgtgttcgagggcgtgatcggcaagggcagaagcggcgagatcgccatcgacgacatcagaatcagcaccgacgtgcccctggagaactgcatggagcccatcagcgccttcgccggcggcaccctgctgcccggcaccgagcccaccgtggacaccgtgcccatgcagcccatccccgcctactggtactacgtgatggccgccggcggcgccgtgctggtgctggtgagcgtggccctggccctggtgctgcactaccacagattcagatacgccgccaagaagaccgaccacagcatcacctacaagaccagccactacaccaacggcgcccccctggccgtggagcccaccctgaccatcaagctggagcaggacagaggcagccactgctag

SEQ ID NO: 11835 - DNA, 2781 bp, synthetic construct
  misc_feature 1..2781: note = Description of Artificial Sequence: Synthetic coding sequence
  source 1..2781: mol_type = other DNA
atggacatgttccccctgacctgggtgttcctggccctgtacttcagcagacaccaggtgagaggccagcccgaccccccctgcggcggcagactgaacagcaaggacgccggctacatcaccagccccggctacccccaggactaccccagccaccagaactgcgagtggatcgtgtacgcccccgagcccaaccagaagatcgtgctgaacttcaacccccacttcgagatcgagaagcacgactgcaagtacgacttcatcgagatcagagacggcgacagcgagagcgccgacctgctgggcaagcactgcggcaacatcgccccccccaccatcatcagcagcggcagcatgctgtacatcagattcaccagcgactacgccagacagggcgccggcttcagcctgagatacgagatcttcaagaccggcagcgaggactgcagcaagaacttcaccagccccaacggcaccatcgagagccccggcttccccgagaagtacccccacaacctggactgcaccttcaccatcctggccaagcccaagatggagatcatcctgcagttcctgatcttcgacctggagcacgaccccctgcaggtgggcgagggcgactgcaagtacgactggctggacatctgggacggcatcccccacgtgggccccctgatcggcaagtactgcggcaccaagacccccagcgagctgagaagcagcaccggcatcctgagcctgaccttccacaccgacatggccgtggccaaggacggcttcagcgccagatactacctggtgcaccaggagcccctggagaacttccagtgcaacgtgcccctgggcatggagagcggcagaatcgccaacgagcagatcagcgccagcagcacctacagcgacggcagatggaccccccagcagagcagactgcacggcgacgacaacggctggacccccaacctggacagcaacaaggagtacctgcaggtggacctgagattcctgaccatgctgaccgccatcgccacccagggcgccatcagcagagagacccagaacggctactacgtgaagagctacaagctggaggtgagcaccaacggcgaggactggatggtgtacagacacggcaagaaccacaaggtgttccaggccaacaacgacgccaccgaggtggtgctgaacaagctgcacgcccccctgctgaccagattcgtgagaatcagaccccagacctggcacagcggcatcgccctgagactggagctgttcggctgcagagtgaccgacgccccctgcagcaacatgctgggcatgctgagcggcctgatcgccgacagccagatcagcgccagcagcacccaggagtacctgtggagccccagcgccgccagactggtgagcagcagaagcggctggttccccagaatcccccaggcccagcccggcgaggagtggctgcaggtggacctgggcacccccaagaccgtgaagggcgtgatcatccagggcgccagaggcggcgacagcatcaccgccgtggaggccagagccttcgtgagaaagttcaaggtgagctacagcctgaacggcaaggactgggagtacatccaggaccccagaacccagcagcccaagctgttcgagggcaacatgcactacgacacccccgacatcagaagattcgaccccatccccgcccagtacgtgagagtgtaccccgagagatggagccccgccggcatcggcatgagactggaggtgctgggctgcgactggaccgacagcaagcccaccgtggagaccctgggccccaccgtgaagagcgaggagaccaccaccccctaccccaccgaggaggaggccaccgagtgcggcgagaactgcagcttcgaggacgacaaggacctgcagctgcccagcggcttcaactgcaacttcgacttcctggaggagccctgcggctggatgtacgaccacgccaagtggctgagaaccacctgggccagcagcagcagccccaacgacagaaccttccccgacgacagaaacttcctgagactgcagagcgacagccagagagagggccagtacgccagactgatcagcccccccgtgcacctgcccagaagccccgtgtgcatggagttccagtaccaggccaccggcggcagaggcgtggccctgcaggtggtgagagaggccagccaggagagcaagctgctgtgggtgatcagagaggaccagggcggcgagtggaagcacggcagaatcatcctgcccagctacgacatggagtaccagatcgtgttcgagggcgtgatcggcaagggcagaagcggcgagatcgccatcgacgacatcagaatcagcaccgacgtgcccctggagaactgcatggagcccatcagcgccttcgccgtggacatccccgagatccacgagagagagggctacgaggacgagatcgacgacgagtacgaggtggactggagcaacagcagcagcgccaccagcggcagcggcgcccccagcaccgacaaggagaagagctggctgtacaccctggaccccatcctgatcaccatcatcgccatgagcagcctgggcgtgctgctgggcgccacctgcgccggcctgctgctgtactgcacctgcagctacagcggcctgagcagcagaagctgcaccaccctggagaactacaacttcgagctgtacgacggcctgaagcacaaggtgaagatgaaccaccagaagtgctgcagcgaggcctag

SEQ ID NO: 11836 - DNA, 2796 bp, synthetic construct
  misc_feature 1..2796: note = Description of Artificial Sequence: Synthetic coding sequence
  source 1..2796: mol_type = other DNA
atggacatgttccccctgacctgggtgttcctggccctgtacttcagcagacaccaggtgagaggccagcccgaccccccctgcggcggcagactgaacagcaaggacgccggctacatcaccagccccggctacccccaggactaccccagccaccagaactgcgagtggatcgtgtacgcccccgagcccaaccagaagatcgtgctgaacttcaacccccacttcgagatcgagaagcacgactgcaagtacgacttcatcgagatcagagacggcgacagcgagagcgccgacctgctgggcaagcactgcggcaacatcgccccccccaccatcatcagcagcggcagcatgctgtacatcagattcaccagcgactacgccagacagggcgccggcttcagcctgagatacgagatcttcaagaccggcagcgaggactgcagcaagaacttcaccagccccaacggcaccatcgagagccccggcttccccgagaagtacccccacaacctggactgcaccttcaccatcctggccaagcccaagatggagatcatcctgcagttcctgatcttcgacctggagcacgaccccctgcaggtgggcgagggcgactgcaagtacgactggctggacatctgggacggcatcccccacgtgggccccctgatcggcaagtactgcggcaccaagacccccagcgagctgagaagcagcaccggcatcctgagcctgaccttccacaccgacatggccgtggccaaggacggcttcagcgccagatactacctggtgcaccaggagcccctggagaacttccagtgcaacgtgcccctgggcatggagagcggcagaatcgccaacgagcagatcagcgccagcagcacctacagcgacggcagatggaccccccagcagagcagactgcacggcgacgacaacggctggacccccaacctggacagcaacaaggagtacctgcaggtggacctgagattcctgaccatgctgaccgccatcgccacccagggcgccatcagcagagagacccagaacggctactacgtgaagagctacaagctggaggtgagcaccaacggcgaggactggatggtgtacagacacggcaagaaccacaaggtgttccaggccaacaacgacgccaccgaggtggtgctgaacaagctgcacgcccccctgctgaccagattcgtgagaatcagaccccagacctggcacagcggcatcgccctgagactggagctgttcggctgcagagtgaccgacgccccctgcagcaacatgctgggcatgctgagcggcctgatcgccgacagccagatcagcgccagcagcacccaggagtacctgtggagccccagcgccgccagactggtgagcagcagaagcggctggttccccagaatcccccaggcccagcccggcgaggagtggctgcaggtggacctgggcacccccaagaccgtgaagggcgtgatcatccagggcgccagaggcggcgacagcatcaccgccgtggaggccagagccttcgtgagaaagttcaaggtgagctacagcctgaacggcaaggactgggagtacatccaggaccccagaacccagcagcccaagctgttcgagggcaacatgcactacgacacccccgacatcagaagattcgaccccatccccgcccagtacgtgagagtgtaccccgagagatggagccccgccggcatcggcatgagactggaggtgctgggctgcgactggaccgacagcaagcccaccgtggagaccctgggccccaccgtgaagagcgaggagaccaccaccccctaccccaccgaggaggaggccaccgagtgcggcgagaactgcagcttcgaggacgacaaggacctgcagctgcccagcggcttcaactgcaacttcgacttcctggaggagccctgcggctggatgtacgaccacgccaagtggctgagaaccacctgggccagcagcagcagccccaacgacagaaccttccccgacgacagaaacttcctgagactgcagagcgacagccagagagagggccagtacgccagactgatcagcccccccgtgcacctgcccagaagccccgtgtgcatggagttccagtaccaggccaccggcggcagaggcgtggccctgcaggtggtgagagaggccagccaggagagcaagctgctgtgggtgatcagagaggaccagggcggcgagtggaagcacggcagaatcatcctgcccagctacgacatggagtaccagatcgtgttcgagggcgtgatcggcaagggcagaagcggcgagatcgccatcgacgacatcagaatcagcaccgacgtgcccctggagaactgcatggagcccatcagcgccttcgccggcgagaacttcaaggtggacatccccgagatccacgagagagagggctacgaggacgagatcgacgacgagtacgaggtggactggagcaacagcagcagcgccaccagcggcagcggcgcccccagcaccgacaaggagaagagctggctgtacaccctggaccccatcctgatcaccatcatcgccatgagcagcctgggcgtgctgctgggcgccacctgcgccggcctgctgctgtactgcacctgcagctacagcggcctgagcagcagaagctgcaccaccctggagaactacaacttcgagctgtacgacggcctgaagcacaaggtgaagatgaaccaccagaagtgctgcagcgaggcctag

SEQ ID NO: 11837 - DNA, 2730 bp, synthetic construct
  misc_feature 1..2730: note = Description of Artificial Sequence: Synthetic coding sequence
  source 1..2730: mol_type = other DNA
atggacatgttccccctgacctgggtgttcctggccctgtacttcagcagacaccaggtgagaggccagcccgaccccccctgcggcggcagactgaacagcaaggacgccggctacatcaccagccccggctacccccaggactaccccagccaccagaactgcgagtggatcgtgtacgcccccgagcccaaccagaagatcgtgctgaacttcaacccccacttcgagatcgagaagcacgactgcaagtacgacttcatcgagatcagagacggcgacagcgagagcgccgacctgctgggcaagcactgcggcaacatcgccccccccaccatcatcagcagcggcagcatgctgtacatcagattcaccagcgactacgccagacagggcgccggcttcagcctgagatacgagatcttcaagaccggcagcgaggactgcagcaagaacttcaccagccccaacggcaccatcgagagccccggcttccccgagaagtacccccacaacctggactgcaccttcaccatcctggccaagcccaagatggagatcatcctgcagttcctgatcttcgacctggagcacgaccccctgcaggtgggcgagggcgactgcaagtacgactggctggacatctgggacggcatcccccacgtgggccccctgatcggcaagtactgcggcaccaagacccccagcgagctgagaagcagcaccggcatcctgagcctgaccttccacaccgacatggccgtggccaaggacggcttcagcgccagatactacctggtgcaccaggagcccctggagaacttccagtgcaacgtgcccctgggcatggagagcggcagaatcgccaacgagcagatcagcgccagcagcacctacagcgacggcagatggaccccccagcagagcagactgcacggcgacgacaacggctggacccccaacctggacagcaacaaggagtacctgcaggtggacctgagattcctgaccatgctgaccgccatcgccacccagggcgccatcagcagagagacccagaacggctactacgtgaagagctacaagctggaggtgagcaccaacggcgaggactggatggtgtacagacacggcaagaaccacaaggtgttccaggccaacaacgacgccaccgaggtggtgctgaacaagctgcacgcccccctgctgaccagattcgtgagaatcagaccccagacctggcacagcggcatcgccctgagactggagctgttcggctgcagagtgaccgacgccccctgcagcaacatgctgggcatgctgagcggcctgatcgccgacagccagatcagcgccagcagcacccaggagtacctgtggagccccagcgccgccagactggtgagcagcagaagcggctggttccccagaatcccccaggcccagcccggcgaggagtggctgcaggtggacctgggcacccccaagaccgtgaagggcgtgatcatccagggcgccagaggcggcgacagcatcaccgccgtggaggccagagccttcgtgagaaagttcaaggtgagctacagcctgaacggcaaggactgggagtacatccaggaccccagaacccagcagcccaagctgttcgagggcaacatgcactacgacacccccgacatcagaagattcgaccccatccccgcccagtacgtgagagtgtaccccgagagatggagccccgccggcatcggcatgagactggaggtgctgggctgcgactggaccgacagcaagcccaccgtggagaccctgggccccaccgtgaagagcgaggagaccaccaccccctaccccaccgaggaggaggccaccgagtgcggcgagaactgcagcttcgaggacgacaaggacctgcagctgcccagcggcttcaactgcaacttcgacttcctggaggagccctgcggctggatgtacgaccacgccaagtggctgagaaccacctgggccagcagcagcagccccaacgacagaaccttccccgacgacagaaacttcctgagactgcagagcgacagccagagagagggccagtacgccagactgatcagcccccccgtgcacctgcccagaagccccgtgtgcatggagttccagtaccaggccaccggcggcagaggcgtggccctgcaggtggtgagagaggccagccaggagagcaagctgctgtgggtgatcagagaggaccagggcggcgagtggaagcacggcagaatcatcctgcccagctacgacatggagtaccagatcgtgttcgagggcgtgatcggcaagggcagaagcggcgagatcgccatcgacgacatcagaatcagcaccgacgtgcccctggagaactgcatggagcccatcagcgccttcgccgacgagtacgaggtggactggagcaacagcagcagcgccaccagcggcagcggcgcccccagcaccgacaaggagaagagctggctgtacaccctggaccccatcctgatcaccatcatcgccatgagcagcctgggcgtgctgctgggcgccacctgcgccggcctgctgctgtactgcacctgcagctacagcggcctgagcagcagaagctgcaccaccctggagaactacaacttcgagctgtacgacggcctgaagcacaaggtgaagatgaaccaccagaagtgctgcagcgaggcctag

SEQ ID NO: 11838 - DNA, 1668 bp, synthetic construct; identical to SEQ ID NO: 11833
  misc_feature 1..1668: note = Description of Artificial Sequence: Synthetic coding sequence
  source 1..1668: mol_type = other DNA

SEQ ID NO: 11839 - DNA, 309 bp, synthetic construct
  misc_feature 1..309: note = Description of Artificial Sequence: Synthetic coding sequence
  source 1..309: mol_type = other DNA
atggacatgttccccctgacctgggtgttcctggccctgtacttcagcagacaccaggtgagaggccagcccgaccccccctgcggcggcagactgaacagcaaggacgccggctacatcaccagccccggctacccccaggactaccccagccaccagaactgcgagtggatcgtgtacgcccccgagcccaaccagaagatcgtgctgaacttcaacccccacttcgagatcgagaagcacgactgcaagtacgacttcatcgagatcagagacggcgacagcgagagcgccgacctgctgggctag

SEQ ID NO: 11840 - DNA, 2781 bp, synthetic construct
  misc_feature 1..2781: note = Description of Artificial Sequence: Synthetic coding sequence
  source 1..2781: mol_type = other DNA
atggacatgttccccctgacctgggtgttcctggccctgtacttcagcagacaccaggtgagaggccagcccgaccccccctgcggcggcagactgaacagcaaggacgccggctacatcaccagccccggctacccccaggactaccccagccaccagaactgcgagtggatcgtgtacgcccccgagcccaaccagaagatcgtgctgaacttcaacccccacttcgagatcgagaagcacgactgcaagtacgacttcatcgagatcagagacggcgacagcgagagcgccgacctgctgggcaagcactgcggcaacatcgccccccccaccatcatcagcagcggcagcatgctgtacatcagattcaccagcgactacgccagacagggcgccggcttcagcctgagatacgagatcttcaagaccggcagcgaggactgcagcaagaacttcaccagccccaacggcaccatcgagagccccggcttccccgagaagtacccccacaacctggactgcaccttcaccatcctggccaagcccaagatggagatcatcctgcagttcctgatcttcgacctggagcacgaccccctgcaggtgggcgagggcgactgcaagtacgactggctggacatctgggacggcatcccccacgtgggccccctgatcggcaagtactgcggcaccaagacccccagcgagctgagaagcagcaccggcatcctgagcctgaccttccacaccgacatggccgtggccaaggacggcttcagcgccagatactacctggtgcaccaggagcccctggagaacttccagtgcaacgtgcccctgggcatggagagcggcagaatcgccaacgagcagatcagcgccagcagcacctacagcgacggcagatggaccccccagcagagcagactgcacggcgacgacaacggctggacccccaacctggacagcaacaaggagtacctgcaggtggacctgagattcctgaccatgctgaccgccatcgccacccagggcgccatcagcagagagacccagaacggctactacgtgaagagctacaagctggaggtgagcaccaacggcgaggactggatggtgtacagacacggcaagaaccacaaggtgttccaggccaacaacgacgccaccgaggtggtgctgaacaagctgcacgcccccctgctgaccagattcgtgagaatcagaccccagacctggcacagcggcatcgccctgagactggagctgttcggctgcagagtgaccgacgccccctgcagcaacatgctgggcatgctgagcggcctgatcgccgacagccagatcagcgccagcagcacccaggagtacctgtggagccccagcgccgccagactggtgagcagcagaagcggctggttccccagaatcccccaggcccagcccggcgaggagtggctgcaggtggacctgggcacccccaagaccgtgaagggcgtgatcatccagggcgccagaggcggcgacagcatcaccgccgtggaggccagagccttcgtgagaaagttcaaggtgagctacagcctgaacggcaaggactgggagtacatccaggaccccagaacccagcagcccaagctgttcgagggcaacatgcactacgacacccccgacatcagaagattcgaccccatccccgcccagtacgtgagagtgtaccccgagagatggagccccgccggcatcggcatgagactggaggtgctgggctgcgactggaccgacagcaagcccaccgtggagaccctgggccccaccgtgaagagcgaggagaccaccaccccctaccccaccgaggaggaggccaccgagtgcggcgagaactgcagcttcgaggacgacaaggacctgcagctgcccagcggcttcaactgcaacttcgacttcctggaggagccctgcggctggatgtacgaccacgccaagtggctgagaaccacctgggccagcagcagcagccccaacgacagaaccttccccgacgacagaaacttcctgagactgcagagcgacagccagagagagggccagtacgccagactgatcagcccccccgtgcacctgcccagaagccccgtgtgcatggagttccagtaccaggccaccggcggcagaggcgtggccctgcaggtggtgagagaggccagccaggagagcaagctgctgtgggtgatcagagaggaccagggcggcgagtggaagcacggcagaatcatcctgcccagctacgacatggagtaccagatcgtgttcgagggcgtgatcggcaagggcagaagcggcgagatcgccatcgacgacatcagaatcagcaccgacgtgcccctggagaactgcatggccaccgtgagcgccagcatcgtggacatccccgagatccacgagagagagggctacgaggacgagatcgacgacgagtacgaggtggactggagcaacagcagcagcgccaccagcggcagcggcgcccccagcaccgacaaggagaagagctggctgtacaccctggaccccatcctgatcaccatcatcgccatgagcagcctgggcgtgctgctgggcgccacctgcgccggcctgctgctgtactgcacctgcagctacagcggcctgagcagcagaagctgcaccaccctggagaactacaacttcgagctgtacgacggcctgaagcacaaggtgaagatgaaccaccagaagtgctgcagcgaggcctag

SEQ ID NO: 11841 - DNA, 2730 bp, synthetic construct
  misc_feature 1..2730: note = Description of Artificial Sequence: Synthetic coding sequence
  source 1..2730: mol_type = other DNA
atggacatgttccccctgacctgggtgttcctggccctgtacttcagcagacaccaggtgagaggccagcccgaccccccctgcggcggcagactgaacagcaaggacgccggctacatcaccagccccggctacccccaggactaccccagccaccagaactgcgagtggatcgtgtacgcccccgagcccaaccagaagatcgtgctgaacttcaacccccacttcgagatcgagaagcacgactgcaagtacgacttcatcgagatcagagacggcgacagcgagagcgccgacctgctgggcaagcactgcggcaacatcgccccccccaccatcatcagcagcggcagcatgctgtacatcagattcaccagcgactacgccagacagggcgccggcttcagcctgagatacgagatcttcaagaccggcagcgaggactgcagcaagaacttcaccagccccaacggcaccatcgagagccccggcttccccgagaagtacccccacaacctggactgcaccttcaccatcctggccaagcccaagatggagatcatcctgcagttcctgatcttcgacctggagcacgaccccctgcaggtgggcgagggcgactgcaagtacgactggctggacatctgggacggcatcccccacgtgggccccctgatcggcaagtactgcggcaccaagacccccagcgagctgagaagcagcaccggcatcctgagcctgaccttccacaccgacatggccgtggccaaggacggcttcagcgccagatactacctggtgcaccaggagcccctggagaacttccagtgcaacgtgcccctgggcatggagagcggcagaatcgccaacgagcagatcagcgccagcagcacctacagcgacggcagatggaccccccagcagagcagactgcacggcgacgacaacggctggacccccaacctggacagcaacaaggagtacctgcaggtggacctgagattcctgaccatgctgaccgccatcgccacccagggcgccatcagcagagagacccagaacggctactacgtgaagagctacaagctggaggtgagcaccaacggcgaggactggatggtgtacagacacggcaagaaccacaaggtgttccaggccaacaacgacgccaccgaggtggtgctgaacaagctgcacgcccccctgctgaccagattcgtgagaatcagaccccagacctggcacagcggcatcgccctgagactggagctgttcggctgcagagtgaccgacgccccctgcagcaacatgctgggcatgctgagcggcctgatcgccgacagccagatcagcgccagcagcacccaggagtacctgtggagccccagcgccgccagactggtgagcagcagaagcggctggttccccagaatcccccaggcccagcccggcgaggagtggctgcaggtggacctgggcacccccaagaccgtgaagggcgtgatcatccagggcgccagaggcggcgacagcatcaccgccgtggaggccagagccttcgtgagaaagttcaaggtgagctacagcctgaacggcaaggactgggagtacatccaggaccccagaacccagcagcccaagctgttcgagggcaacatgcactacgacacccccgacatcagaagattcgaccccatccccgcccagtacgtgagagtgtaccccgagagatggagccccgccggcatcggcatgagactggaggtgctgggctgcgactggaccgacagcaagcccaccgtggagaccctgggccccaccgtgaagagcgaggagaccaccaccccctaccccaccgaggaggaggccaccgagtgcggcgagaactgcagcttcgaggacgacaaggacctgcagctgcccagcggcttcaactgcaacttcgacttcctggaggagccctgcggctggatgtacgaccacgccaagtggctgagaaccacctgggccagcagcagcagccccaacgacagaaccttccccgacgacagaaacttcctgagactgcagagcgacagccagagagagggccagtacgccagactgatcagcccccccgtgcacctgcccagaagccccgtgtgcatggagttccagtaccaggccaccggcggcagaggcgtggccctgcaggtggtgagagaggccagccaggagagcaagctgctgtgggtgatcagagaggaccagggcggcgagtggaagcacggcagaatcatcctgcccagctacgacatggagtaccagatcgtgttcgagggcgtgatcggcaagggcagaagcggcgagatcgccatcgacgacatcagaatcagcaccgacgtgcccctggagaactgcatgggccccaaggcctgcatcgccgacgagtacgaggtggactggagcaacagcagcagcgccaccagcggcagcggcgcccccagcaccgacaaggagaagagctggctgtacaccctggaccccatcctgatcaccatcatcgccatgagcagcctgggcgtgctgctgggcgccacctgcgccggcctgctgctgtactgcacctgcagctacagcggcctgagcagcagaagctgcaccaccctggagaactacaacttcgagctgtacgacggcctgaagcacaaggtgaagatgaaccaccagaagtgctgcagcgaggcctag

SEQ ID NO: 11842 - DNA, 462 bp, synthetic construct
  misc_feature 1..462: note = Description of Artificial Sequence: Synthetic coding sequence
  source 1..462: mol_type = other DNA
atgaccaagatcaaggccgaccccgacggccccgaggcccaggccgaggcctgcagcggcgagagaacctaccaggagctgctggtgaaccagaaccccatcgcccagcccctggccagcagaagactgaccagaaagctgtacaagtgcatcaagaaggccgtgaagcagaagcagatcagaagaggcgtgaaggaggtgcagaagttcgtgaacaagggcgagaagggcatcatggtgctggccggcgacaccctgcccatcgaggtgtactgccacctgcccgtgatgtgcgaggacagaaacctgccctacgtgtacatccccagcaagaccgacctgggcgccgccgccggcagcaagagacccacctgcgtgatcatggtgaagccccacgaggagtaccaggaggcctacgacgagtgcctggaggaggtgcagagcctgcccctgcccctgtag

SEQ ID NO: 11843 - DNA, 273 bp, synthetic construct
  misc_feature 1..273: note = Description of Artificial Sequence: Synthetic coding sequence
  source 1..273: mol_type = other DNA
atgaccaagatcaaggccgaccccgacggccccgaggcccaggccgaggcctgcagcggcgagagaacctaccaggagctgctggtgaaccagaaccccatcgcccagcccctggccagcagaagactgaccagaaagctgtacaagtgcatcaagaaggccgtgaagcagaagcagatcagaagaggcgtgaaggaggtgcagaagttcgtgaacaagggcgagaagggcacctgggtgcagccccaggcccccagcgccccccccgtgtag

SEQ ID NO: 11844 - DNA, 2265 bp, synthetic construct
  misc_feature 1..2265: note = Description of Artificial Sequence: Synthetic coding sequence
  source 1..2265: mol_type = other DNA
atgtggaagctgctgcccgccgccggccccgccggcggcgagccctacagactgctgaccggcgtggagtacgtggtgggcagaaagaactgcgccatcctgatcgagaacgaccagagcatcagcagaaaccacgccgtgctgaccgccaacttcagcgtgaccaacctgagccagaccgacgagatccccgtgctgaccctgaaggacaacagcaagtacggcaccttcgtgaacgaggagaagatgcagaacggcttcagcagaaccctgaagagcggcgacggcatcaccttcggcgtgttcggcagcaagttcagaatcgagtacgagcccctggtggcctgcagcagctgcctggacgtgagcggcaagaccgccctgaaccaggccatcctgcagctgggcggcttcaccgtgaacaactggaccgaggagtgcacccacctggtgatggtgagcgtgaaggtgaccatcaagaccatctgcgccctgatctgcggcagacccatcgtgaagcccgagtacttcaccgagttcctgaaggccgtggagagcaagaagcagcccccccagatcgagagcttctacccccccctggacgagcccagcatcggcagcaagaacgtggacctgagcggcagacaggagagaaagcagatcttcaagggcaagaccttcatcttcctgaacgccaagcagcacaagaagctgagcagcgccgtggtgttcggcggcggcgaggccagactgatcaccgaggagaacgaggaggagcacaacttcttcctggcccccggcacctgcgtggtggacaccggcatcaccaacagccagaccctgatccccgactgccagaagaagtggatccagagcatcatggacatgctgcagagacagggcctgagacccatccccgaggccgagatcggcctggccgtgatcttcatgaccaccaagaactactgcgacccccagggccaccccagcaccggcctgaagaccaccacccccggccccagcctgagccagggcgtgagcgtggacgagaagctgatgcccagcgcccccgtgaacaccaccacctacgtggccgacaccgagagcgagcaggccgacacctgggacctgagcgagagacccaaggagatcaaggtgagcaagatggagcagaagttcagaatgctgagccaggacgcccccaccgtgaaggagagctgcaagaccagcagcaacaacaacagcatggtgagcaacaccctggccaagatgagaatccccaactaccagctgagccccaccaagctgcccagcatcaacaagagcaaggacagagccagccagcagcagcagaccaacagcatcagaaactacttccagcccagcaccaagaagagagagagagacgaggagaaccaggagatgagcagctgcaagagcgccagaatcgagaccagctgcagcctgctggagcagacccagcccgccacccccagcctgtggaagaacaaggagcagcacctgagcgagaacgagcccgtggacaccaacagcgacaacaacctgttcaccgacaccgacctgaagagcatcgtgaagaacagcgccagcaagagccacgccgccgagaagctgagaagcaacaagaagagagagatggacgacgtggccatcgaggacgaggtgctggagcagctgttcaaggacaccaagcccgagctggagatcgacgtgaaggtgcagaagcaggaggaggacgtgaacgtgagaaagagacccagaatggacatcgagaccaacgacaccttcagcgacgaggccgtgcccgagagcagcaagatcagccaggagaacgagatcggcaagaagagagagctgaaggaggacagcctgtggagcgccaaggagatcagcaacaacgacaagctgcaggacgacagcgagatgctgcccaagaagctgctgctgaccgagttcagaagcctggtgatcaagaacagcaccagcagaaaccccagcggcatcaacgacgactacggccagctgaagaacttcaagaagttcaagaaggtgacctaccccggcgccggcaagctgccccacatcatcggcggcagcgacctgatcgcccaccacgccagaaagaacaccgagctggaggagtggctgagacaggagatggaggtgcagaaccagcacgccaaggaggagagcctggccgacgacctgttcagatacaacccctacctgaagagaagaagatag

SEQ ID NO: 11845 - DNA, 1437 bp, synthetic construct
  misc_feature 1..1437: note = Description of Artificial Sequence: Synthetic coding sequence
  source 1..1437: mol_type = other DNA
atgtggaagctgctgcccgccgccggccccgccggcggcgagccctacagactgctgaccggcgtggagtacgtggtgggcagaaagaactgcgccatcctgatcgagaacgaccagagcatcagcagaaaccacgccgtgctgaccgccaacttcagcgtgaccaacctgagccagaccgacgagatccccgtgctgaccctgaaggacaacagcaagtacggcaccttcgtgaacgaggagaagatgcagaacggcttcagcagaaccctgaagagcggcgacggcatcaccttcggcgtgttcggcagcaagttcagaatcgagtacgagcccctggtggcctgcagcagctgcctggacgtgagcggcaagaccgccctgaaccaggccatcctgcagctgggcggcttcaccgtgaacaactggaccgaggagtgcacccacctggtgatggtgagcgtgaaggtgaccatcaagaccatctgcgccctgatctgcggcagacccatcgtgaagcccgagtacttcaccgagttcctgaaggccgtggagagcaagaagcagcccccccagatcgagagcttctacccccccctggacgagcccagcatcggcagcaagaacgtggacctgagcggcagacaggagagaaagcagatcttcaagggcaagaccttcatcttcctgaacgccaagcagcacaagaagctgagcagcgccgtggtgttcggcggcggcgaggccagactgatcaccgaggagaacgaggaggagcacaacttcttcctggcccccggcacctgcgtggtggacaccggcatcaccaacagccagaccctgatccccgactgccagaagaagtggatccagagcatcatggacatgctgcagagacagggcctgagacccatccccgaggccgagatcggcctggccgtgatcttcatgaccaccaagaactactgcgacccccagggccaccccagcaccggcctgaagaccaccacccccggccccagcctgagccagggcgtgagcgtggacgagaagctgatgcccagcgcccccgtgaacaccaccacctacgtggccgacaccgagagcgagcaggccgacacctgggacctgagcgagagacccaaggagatcaaggtgagcaagatggagcagaagttcagaatgctgagccaggacgcccccaccgtgaaggagagctgcaagaccagcagcaacaacaacagcatggtgagcaacaccctggccaagatgagaatccccaactaccagctgagccccaccaagctgcccagcatcaacaagagcaaggacagagccagccagcagcagcagaccaacagcatcagaaactacttccagcccagcaccaagaagagagagagactgcacctgaagaagaagaagaagaagaagtag

SEQ ID NO: 11846 - DNA, 333 bp, synthetic construct
  misc_feature 1..333: note = Description of Artificial Sequence: Synthetic coding sequence
  source 1..333: mol_type = other DNA
atgggcgccagcggcagcaaggccagaggcctgtggcccttcgccagcgccgccggcggcggcggcagcgaggccgccggcgccgagcaggccctggtgagacccagaggcagagccgtgccccccttcgtgttcaccagaagaggcagcatgttctacgacgaggacggcgacctggcccacgagttctacgaggagaccatcgtgaccaagaacggccagaagagagccaagctgagaagagtgcacaagaacctgatcccccagggcatcgtgaagctggaccaccccagaatccacgtggacttccccgtgatcctgtacgaggtgtag

SEQ ID NO: 11847 - DNA, 1206 bp, synthetic construct
  misc_feature 1..1206: note = Description of Artificial Sequence: Synthetic coding sequence
  source 1..1206: mol_type = other DNA
atgtggagcggcggcagcggcaaggccagaggctgggaggccgccgccggcggcagaagcagccccggcagactgagcagaagaagaatcatgagcatgagccccaagcacaccacccccttcagcgtgagcgacatcctgagccccctggaggagagctacaagaaggtgggcatggagggcggcggcctgggcgcccccctggccgcctacagacagggccaggccgccccccccaccgccgccatgcagcagcacgccgtgggccaccacggcgccgtgaccgccgcctaccacatgaccgccgccggcgtgccccagctgagccacagcgccgtgggcggctactgcaacggcaacctgggcaacatgagcgagctgcccccctaccaggacaccatgagaaacagcgccagcggccccggctggtacggcgccaaccccgaccccagattccccgccatcagcagattcatgggccccgccagcggcatgaacatgagcggcatgggcggcctgggcagcctgggcgacgtgagcaagaacatggcccccctgcccagcgcccccagaagaaagagaagagtgctgttcagccaggcccaggtgtacgagctggagagaagattcaagcagcagaagtacctgagcgcccccgagagagagcacctggccagcatgatccacctgacccccacccaggtgaagatctggttccagaaccacagatacaagatgaagagacaggccaaggacaaggccgcccagcagcagctgcagcaggacagcggcggcggcggcggcggcggcggcaccggctgcccccagcagcagcaggcccagcagcagagccccagaagagtggccgtgcccgtgctggtgaaggacggcaagccctgccaggccggcgcccccgcccccggcgccgccagcctgcagggccacgcccagcagcaggcccagcaccaggcccaggccgcccaggccgccgccgccgccatcagcgtgggcagcggcggcgccggcctgggcgcccaccccggccaccagcccggcagcgccggccagagccccgacctggcccaccacgccgccagccccgccgccctgcagggccaggtgagcagcctgagccacctgaacagcagcggcagcgactacggcaccatgagctgcagcaccctgctgtacggcagaacctggtag

SEQ ID NO: 11848 - DNA, 1116 bp, synthetic construct
  misc_feature 1..1116: note = Description of Artificial Sequence: Synthetic coding sequence
  source 1..1116: mol_type = other DNA
atgagcatgagccccaagcacaccacccccttcagcgtgagcgacatcctgagccccctggaggagagctacaagaaggtgggcatggagggcggcggcctgggcgcccccctggccgcctacagacagggccaggccgccccccccaccgccgccatgcagcagcacgccgtgggccaccacggcgccgtgaccgccgcctaccacatgaccgccgccggcgtgccccagctgagccacagcgccgtgggcggctactgcaacggcaacctgggcaacatgagcgagctgcccccctaccaggacaccatgagaaacagcgccagcggccccggctggtacggcgccaaccccgaccccagattccccgccatcagcagattcatgggccccgccagcggcatgaacatgagcggcatgggcggcctgggcagcctgggcgacgtgagcaagaacatggcccccctgcccagcgcccccagaagaaagagaagagtgctgttcagccaggcccaggtgtacgagctggagagaagattcaagcagcagaagtacctgagcgcccccgagagagagcacctggccagcatgatccacctgacccccacccaggtgaagatctggttccagaaccacagatacaagatgaagagacaggccaaggacaaggccgcccagcagcagctgcagcaggacagcggcggcggcggcggcggcggcggcaccggctgcccccagcagcagcaggcccagcagcagagccccagaagagtggccgtgcccgtgctggtgaaggacggcaagccctgccaggccggcgcccccgcccccggcgccgccagcctgcagggccacgcccagcagcaggcccagcaccaggcccaggccgcccaggccgccgccgccgccatcagcgtgggcagcggcggcgccggcctgggcgcccaccccggccaccagcccggcagcgccggccagagccccgacctggcccaccacgccgccagccccgccgccctgcagggccaggtgagcagcctgagccacctgaacagcagcggcagcgactacggcaccatgagctgcagcaccctgctgtacggcagaacctggtag

SEQ ID NO: 11849 - DNA, 1116 bp, synthetic construct; identical to SEQ ID NO: 11848
  misc_feature 1..1116: note = Description of Artificial Sequence: Synthetic coding sequence
  source 1..1116: mol_type = other DNA

SEQ ID NO: 11850 - DNA, 1116 bp, synthetic construct; identical to SEQ ID NO: 11848
  misc_feature 1..1116: note = Description of Artificial Sequence: Synthetic coding sequence
  source 1..1116: mol_type = other DNA

SEQ ID NO: 11851 - DNA, 105 bp, synthetic construct
  misc_feature 1..105: note = Description of Artificial Sequence: Synthetic coding sequence
  source 1..105: mol_type = other DNA
atgtggagcggcggcagcggcaaggccagaggctgggaggccgccgccggcggcagaagcagccccggcagactgagcgcctacgccccccccctggtggcctag

SEQ ID NO: 11852 - DNA, 573 bp, synthetic construct
  misc_feature 1..573: note = Description of Artificial Sequence: Synthetic coding sequence
  source 1..573: mol_type = other DNA
atgctgagagtgcccgagcccagacccggcgaggccaaggccgagggcgccgccccccccacccccagcaagcccctgaccagcttcctgatccaggacatcctgagagacggcgcccccgaggaggccgagaccctggccgagaccgagcccgagagacacctgggcagctacctgctggacagcgagaacaccagcggcgccctgcccagactgccccagacccccaagcagccccagaagagaagcagagccgccttcagccacacccaggtgatcgagctggagagaaagttcagccaccagaagtacctgagcgcccccgagagagcccacctggccaagaacctgaagctgaccgagacccaggtgaagatctggttccagaacagaagatacaagaccaagagaaagcagctgagcagcgagctgggcgacctggagaagcacagcagcctgcccgccctgaaggaggaggccttcagcagagccagcctggtgagcgtgtacaacagctacccctactacccctacctgtactgcgtgggcagctggagccccgccttctggtag

SEQ ID NO: 11853 - DNA, 705 bp, synthetic construct
  misc_feature 1..705: note = Description of Artificial Sequence: Synthetic coding sequence
  source 1..705: mol_type = other DNA
atgctgagagtgcccgagcccagacccggcgaggccaaggccgagggcgccgccccccccacccccagcaagcccctgaccagcttcctgatccaggacatcctgagagacggcgcccagagacagggcggcagaaccagcagccagagacagagagaccccgagcccgagcccgagcccgagcccgagggcggcagaagcagagccggcgcccagaacgaccagctgagcaccggccccagagccgcccccgaggaggccgagaccctggccgagaccgagcccgagagacacctgggcagctacctgctggacagcgagaacaccagcggcgccctgcccagactgccccagacccccaagcagccccagaagagaagcagagccgccttcagccacacccaggtgatcgagctggagagaaagttcagccaccagaagtacctgagcgcccccgagagagcccacctggccaagaacctgaagctgaccgagacccaggtgaagatctggttccagaacagaagatacaagaccaagagaaagcagctgagcagcgagctgggcgacctggagaagcacagcagcctgcccgccctgaaggaggaggccttcagcagagccagcctggtgagcgtgtacaacagctacccctactacccctacctgtactgcgtgggcagctggagccccgccttctggtag

SEQ ID NO: 11854 - DNA, 480 bp, synthetic construct
  misc_feature 1..480: note = Description of Artificial Sequence: Synthetic coding sequence
  source 1..480: mol_type = other DNA
atgctgagagtgcccgagcccagacccggcgaggccgagaccctggccgagaccgagcccgagagacacctgggcagctacctgctggacagcgagaacaccagcggcgccctgcccagactgccccagacccccaagcagccccagaagagaagcagagccgccttcagccacacccaggtgatcgagctggagagaaagttcagccaccagaagtacctgagcgcccccgagagagcccacctggccaagaacctgaagctgaccgagacccaggtgaagatctggttccagaacagaagatacaagaccaagagaaagcagctgagcagcgagctgggcgacctggagaagcacagcagcctgcccgccctgaaggaggaggccttcagcagagccagcctggtgagcgtgtacaacagctacccctactacccctacctgtactgcgtgggcagctggagccccgccttctggtag

SEQ ID NO: 11855 - DNA, 4212 bp, synthetic construct
  misc_feature 1..4212: note = Description of Artificial Sequence: Synthetic coding sequence
  source 1..4212: mol_type = other DNA
atggccacccagcagaaggccagcgacgagagaatcagccagttcgaccacaacctgctgcccgagctgagcgccctgctgggcctggacgccgtgcagctggccaaggagctggaggaggaggagcagaaggagagagccaagatgcagaagggctacaacagccagatgagaagcgaggccaagagactgaagaccttcgtgacctacgagccctacagcagctggatcccccaggagatggccgccgccggcttctacttcaccggcgtgaagagcggcatccagtgcttctgctgcagcctgatcctgttcggcgccggcctgaccagactgcccatcgaggaccacaagagattccaccccgactgcggcttcctgctgaacaaggacgtgggcaacatcgccaagtacgacatcagagtgaagaacctgaagagcagactgagaggcggcaagatgagataccaggaggaggaggccagactggccagcttcagaaactggcccttctacgtgcagggcatcagcccctgcgtgctgagcgaggccggcttcgtgttcaccggcaagcaggacaccgtgcagtgcttcagctgcggcggctgcctgggcaactgggaggagggcgacgacccctggaaggagcacgccaagtggttccccaagtgcgagttcctgagaagcaagaagagcagcgaggagatcacccagtacatccagagctacaagggcttcgtggacatcaccggcgagcacttcgtgaacagctgggtgcagagagagctgcccatggccagcgcctactgcaacgacagcatcttcgcctacgaggagctgagactggacagcttcaaggactggcccagagagagcgccgtgggcgtggccgccctggccaaggccggcctgttctacaccggcatcaaggacatcgtgcagtgcttcagctgcggcggctgcctggagaagtggcaggagggcgacgaccccctggacgaccacaccagatgcttccccaactgccccttcctgcagaacatgaagagcagcgccgaggtgacccccgacctgcagagcagaggcgagctgtgcgagctgctggagaccaccagcgagagcaacctggaggacagcatcgccgtgggccccatcgtgcccgagatggcccagggcgaggcccagtggttccaggaggccaagaacctgaacgagcagctgagagccgcctacaccagcgccagcttcagacacatgagcctgctggacatcagcagcgacctggccaccgaccacctgctgggctgcgacctgagcatcgccagcaagcacatcagcaagcccgtgcaggagcccctggtgctgcccgaggtgttcggcaacctgaacagcgtgatgtgcgtggagggcgaggccggcagcggcaagaccgtgctgctgaagaagatcgccttcctgtgggccagcggctgctgccccctgctgaacagattccagctggtgttctacctgagcctgagcagcaccagacccgacgagggcctggccagcatcatctgcgaccagctgctggagaaggagggcagcgtgaccgagatgtgcgtgagaaacatcatccagcagctgaagaaccaggtgctgttcctgctggacgactacaaggagatctgcagcatcccccaggtgatcggcaagctgatccagaagaaccacctgagcagaacctgcctgctgatcgccgtgagaaccaacagagccagagacatcagaagatacctggagaccatcctggagatcaaggccttccccttctacaacaccgtgtgcatcctgagaaagctgttcagccacaacatgaccagactgagaaagttcatggtgtacttcggcaagaaccagagcctgcagaagatccagaagacccccctgttcgtggccgccatctgcgcccactggttccagtaccccttcgaccccagcttcgacgacgtggccgtgttcaagagctacatggagagactgagcctgagaaacaaggccaccgccgagatcctgaaggccaccgtgagcagctgcggcgagctggccctgaagggcttcttcagctgctgcttcgagttcaacgacgacgacctggccgaggccggcgtggacgaggacgaggacctgaccatgtgcctgatgagcaagttcaccgcccagagactgagacccttctacagattcctgagccccgccttccaggagttcctggccggcatgagactgatcgagctgctggacagcgacagacaggagcaccaggacctgggcctgtaccacctgaagcagatcaacagccccatgatgaccgtgagcgcctacaacaacttcctgaactacgtgagcagcctgcccagcaccaaggccggccccaagatcgtgagccacctgctgcacctggtggacaacaaggagagcctggagaacatcagcgagaacgacgactacctgaagcaccagcccgagatcagcctgcagatgcagctgctgagaggcctgtggcagatctgcccccaggcctacttcagcatggtgagcgagcacctgctggtgctggccctgaagaccgcctaccagagcaacaccgtggccgcctgcagccccttcgtgctgcagttcctgcagggcagaaccctgaccctgggcgccctgaacctgcagtacttcttcgaccaccccgagagcctgagcctgctgagaagcatccacttccccatcagaggcaacaagaccagccccagagcccacttcagcgtgctggagacctgcttcgacaagagccaggtgcccaccatcgaccaggactacgccagcgccttcgagcccatgaacgagtgggagagaaacctggccgagaaggaggacaacgtgaagagctacatggacatgcagagaagagccagccccgacctgagcaccggctactggaagctgagccccaagcagtacaagatcccctgcctggaggtggacgtgaacgacatcgacgtggtgggccaggacatgctggagatcctgatgaccgtgttcagcgccagccagagaatcgagctgcacctgaaccacagcagaggcttcatcgagagcatcagacccgccctggagctgagcaaggccagcgtgaccaagtgcagcatcagcaagctggagctgagcgccgccgagcaggagctgctgctgaccctgcccagcctggagagcctggaggtgagcggcaccatccagagccaggaccagatcttccccaacctggacaagttcctgtgcctgaaggagctgagcgtggacctggagggcaacatcaacgtgttcagcgtgatccccgaggagttccccaacttccaccacatggagaagctgctgatccagatcagcgccgagtacgaccccagcaagctggtgaagctgatccagaacagccccaacctgcacgtgttccacctgaagtgcaacttcttcagcgacttcggcagcctgatgaccatgctggtgagctgcaagaagctgaccgagatcaagttcagcgacagcttcttccaggccgtgcccttcgtggccagcctgcccaacttcatcagcctgaagatcctgaacctggagggccagcagttccccgacgaggagaccagcgagaagttcgcctacatcctgggcagcctgagcaacctggaggagctgatcctgcccaccggcgacggcatctacagagtggccaagctgatcatccagcagtgccagcagctgcactgcctgagagtgctgagcttcttcaagaccctgaacgacgacagcgtggtggagatcgccaaggtggccatcagcggcggcttccagaagctggagaacctgaagctgagcatcaaccacaagatcaccgaggagggctacagaaacttcttccaggccctggacaacatgcccaacctgcaggagctggacatcagcagacacttcaccgagtgcatcaaggcccaggccaccaccgtgaagagcctgagccagtgcgtgctgagactgcccagactgatcagactgaacatgctgagctggctgctggacgccgacgacatcgccctgctgaacgtgatgaaggagagacacccccagagcaagtacctgaccatcctgcagaagtggatcctgcccttcagccccatcatccagaagtag

SEQ ID NO: 11856 - DNA, 3726 bp, synthetic construct
  misc_feature 1..3726: note = Description of Artificial Sequence: Synthetic coding sequence
  source 1..3726: mol_type = other DNA
atgcccctgcacatcggcgacttcgtgtgggacagcaaggtgcacagcctgcagagcagcctgaacatcttcagcctgctgcccaccaagggcagaaccgagcacctgttcttcagccacatcctgagcttccactggcccgccttcagcagcatcagactggagctgtggatcaacctgagatgcgagttcctgagaagcaagaagagcagcgaggagatcacccagtacatccagagctacaagggcttcgtggacatcaccggcgagcacttcgtgaacagctgggtgcagagagagctgcccatggccagcgcctactgcaacgacagcatcttcgcctacgaggagctgagactggacagcttcaaggactggcccagagagagcgccgtgggcgtggccgccctggccaaggccggcctgttctacaccggcatcaaggacatcgtgcagtgcttcagctgcggcggctgcctggagaagtggcaggagggcgacgaccccctggacgaccacaccagatgcttccccaactgccccttcctgcagaacatgaagagcagcgccgaggtgacccccgacctgcagagcagaggcgagctgtgcgagctgctggagaccaccagcgagagcaacctggaggacagcatcgccgtgggccccatcgtgcccgagatggcccagggcgaggcccagtggttccaggaggccaagaacctgaacgagcagctgagagccgcctacaccagcgccagcttcagacacatgagcctgctggacatcagcagcgacctggccaccgaccacctgctgggctgcgacctgagcatcgccagcaagcacatcagcaagcccgtgcaggagcccctggtgctgcccgaggtgttcggcaacctgaacagcgtgatgtgcgtggagggcgaggccggcagcggcaagaccgtgctgctgaagaagatcgccttcctgtgggccagcggctgctgccccctgctgaacagattccagctggtgttctacctgagcctgagcagcaccagacccgacgagggcctggccagcatcatctgcgaccagctgctggagaaggagggcagcgtgaccgagatgtgcgtgagaaacatcatccagcagctgaagaaccaggtgctgttcctgctggacgactacaaggagatctgcagcatcccccaggtgatcggcaagctgatccagaagaaccacctgagcagaacctgcctgctgatcgccgtgagaaccaacagagccagagacatcagaagatacctggagaccatcctggagatcaaggccttccccttctacaacaccgtgtgcatcctgagaaagctgttcagccacaacatgaccagactgagaaagttcatggtgtacttcggcaagaaccagagcctgcagaagatccagaagacccccctgttcgtggccgccatctgcgcccactggttccagtaccccttcgaccccagcttcgacgacgtggccgtgttcaagagctacatggagagactgagcctgagaaacaaggccaccgccgagatcctgaaggccaccgtgagcagctgcggcgagctggccctgaagggcttcttcagctgctgcttcgagttcaacgacgacgacctggccgaggccggcgtggacgaggacgaggacctgaccatgtgcctgatgagcaagttcaccgcccagagactgagacccttctacagattcctgagccccgccttccaggagttcctggccggcatgagactgatcgagctgctggacagcgacagacaggagcaccaggacctgggcctgtaccacctgaagcagatcaacagccccatgatgaccgtgagcgcctacaacaacttcctgaactacgtgagcagcctgcccagcaccaaggccggccccaagatcgtgagccacctgctgcacctggtggacaacaaggagagcctggagaacatcagcgagaacgacgactacctgaagcaccagcccgagatcagcctgcagatgcagctgctgagaggcctgtggcagatctgcccccaggcctacttcagcatggtgagcgagcacctgctggtgctggccctgaagaccgcctaccagagcaacaccgtggccgcctgcagccccttcgtgctgcagttcctgcagggcagaaccctgaccctgggcgccctgaacctgcagtacttcttcgaccaccccgagagcctgagcctgctgagaagcatccacttccccatcagaggcaacaagaccagccccagagcccacttcagcgtgctggagacctgcttcgacaagagccaggtgcccaccatcgaccaggactacgccagcgccttcgagcccatgaacgagtgggagagaaacctggccgagaaggaggacaacgtgaagagctacatggacatgcagagaagagccagccccgacctgagcaccggctactggaagctgagccccaagcagtacaagatcccctgcctggaggtggacgtgaacgacatcgacgtggtgggccaggacatgctggagatcctgatgaccgtgttcagcgccagccagagaatcgagctgcacctgaaccacagcagaggcttcatcgagagcatcagacccgccctggagctgagcaaggccagcgtgaccaagtgcagcatcagcaagctggagctgagcgccgccgagcaggagctgctgctgaccctgcccagcctggagagcctggaggtgagcggcaccatccagagccaggaccagatcttccccaacctggacaagttcctgtgcctgaaggagctgagcgtggacctggagggcaacatcaacgtgttcagcgtgatccccgaggagttccccaacttccaccacatggagaagctgctgatccagatcagcgccgagtacgaccccagcaagctggtgaagctgatccagaacagccccaacctgcacgtgttccacctgaagtgcaacttcttcagcgacttcggcagcctgatgaccatgctggtgagctgcaagaagctgaccgagatcaagttcagcgacagcttcttccaggccgtgcccttcgtggccagcctgcccaacttcatcagcctgaagatcctgaacctggagggccagcagttccccgacgaggagaccagcgagaagttcgcctacatcctgggcagcctgagcaacctggaggagctgatcctgcccaccggcgacggcatctacagagtggccaagctgatcatccagcagtgccagcagctgcactgcctgagagtgctgagcttcttcaagaccctgaacgacgacagcgtggtggagatcgccaaggtggccatcagcggcggcttccagaagctggagaacctgaagctgagcatcaaccacaagatcaccgaggagggctacagaaacttcttccaggccctggacaacatgcccaacctgcaggagctggacatcagcagacacttcaccgagtgcatcaaggcccaggccaccaccgtgaagagcctgagccagtgcgtgctgagactgcccagactgatcagactgaacatgctgagctggctgctggacgccgacgacatcgccctgctgaacgtgatgaaggagagacacccccagagcaagtacctgaccatcctgcagaagtggatcctgcccttcagccccatcatccagaagtag

SEQ ID NO: 11857 - DNA, 4212 bp, synthetic construct; identical to SEQ ID NO: 11855
  misc_feature 1..4212: note = Description of Artificial Sequence: Synthetic coding sequence
  source 1..4212: mol_type = other DNA

SEQ ID NO: 11858 - DNA, 3726 bp, synthetic construct; identical to SEQ ID NO: 11856
  misc_feature 1..3726: note = Description of Artificial Sequence: Synthetic coding sequence
  source 1..3726: mol_type = other DNA

SEQ ID NO: 11859 - DNA, 678 bp, synthetic construct
  misc_feature 1..678: note = Description of Artificial Sequence: Synthetic coding sequence
  source 1..678: mol_type = other DNA
atgctgggcctggacgcctgcgagctgggcgcccagctgctggagctgctgagactggccctgtgcgccagagtgctgctggccgacaaggagggcggcccccccgccgtggacgaggtgctggacgaggccgtgcccgagtacagagcccccggcagaaagagcctgctggagatcagacagctggaccccgacgacagaagcctggccaagtacaagagagtgctgctgggccccctgccccccgccgtggaccccagcctgcccaacgtgcaggtgaccagactgaccctgctgagcgagcaggcccccggccccgtggtgatggacctgaccggcgacctggccgtgctgaaggaccaggtgttcgtgctgaaggagggcgtggactacagagtgaagatcagcttcaaggtgcacagagagatcgtgagcggcctgaagtgcctgcaccacacctacagaagaggcctgagagtggacaagaccgtgtacatggtgggcagctacggccccagcgcccaggagtacgagttcgtgacccccgtggaggaggcccccagaggcgccctggtgagaggcccctacctggtggtgagcctgttcaccgacgacgacagaacccaccacctgagctgggagtggggcctgtgcatctgccaggactggaaggactag

SEQ ID NO: 11860 - DNA, 882 bp, synthetic construct
  misc_feature 1..882: note = Description of Artificial Sequence: Synthetic coding sequence
  source 1..882: mol_type = other DNA
atgcccgccagaagcggcgcccagttctgcagaagaatgggccagaagaagcagagacccgccagagccggccagccccacagcagcagcgacgccgcccaggcccccgccgagcagccccacagcagcagcgacgccgcccaggccccctgccccagagagagatgcctgggcccccccaccacccccggcccctacagaagcatctacttcagcagccccaagggccacctgaccagactgggcctggagttcttcgaccagcccgccgtgcccctggccagagccttcctgggccaggtgctggtgagaagactgcccaacggcaccgagctgagaggcagaatcgtggagaccgaggcctacctgggccccgaggacgaggccgcccacagcagaggcggcagacagacccccagaaacagaggcatgttcatgaagcccggcaccctgtacgtgtacatcatctacggcatgtacttctgcatgaacatcagcagccagggcgacggcgcctgcgtgctgctgagagccctggagcccctggagggcctggagaccatgagacagctgagaagcaccctgagaaagggcaccgccagcagagtgctgaaggacagagagctgtgcagcggccccagcaagctgtgccaggccctggccatcaacaagagcttcgaccagagagacctggcccaggacgaggccgtgtggctggagagaggccccctggagcccagcgagcccgccgtggtggccgccgccagagtgggcgtgggccacgccggcgagtgggccagaaagcccctgagattctacgtgagaggcagcccctgggtgagcgtggtggacagagtggccgagcaggacacccaggcctag

SEQ ID NO: 11861 - DNA, 846 bp, synthetic construct
  misc_feature 1..846: note = Description of Artificial Sequence: Synthetic coding sequence
  source 1..846: mol_type = other DNA
atgggccagaagaagcagagacccgccagagccggccagccccacagcagcagcgacgccgcccaggcccccgccgagcagccccacagcagcagcgacgccgcccaggccccctgccccagagagagatgcctgggcccccccaccacccccggcccctacagaagcatctacttcagcagccccaagggccacctgaccagactgggcctggagttcttcgaccagcccgccgtgcccctggccagagccttcctgggccaggtgctggtgagaagactgcccaacggcaccgagctgagaggcagaatcgtggagaccgaggcctacctgggccccgaggacgaggccgcccacagcagaggcggcagacagacccccagaaacagaggcatgttcatgaagcccggcaccctgtacgtgtacatcatctacggcatgtacttctgcatgaacatcagcagccagggcgacggcgcctgcgtgctgctgagagccctggagcccctggagggcctggagaccatgagacagctgagaagcaccctgagaaagggcaccgccagcagagtgctgaaggacagagagctgtgcagcggccccagcaagctgtgccaggccctggccatcaacaagagcttcgaccagagagacctggcccaggacgaggccgtgtggctggagagaggccccctggagcccagcgagcccgccgtggtggccgccgccagagtgggcgtgggccacgccggcgagtgggccagaaagcccctgagattctacgtgagaggcagcccctgggtgagcgtggtggacagagtggccgagcaggacacccaggcctag

SEQ ID NO: 11862 - DNA, 756 bp, synthetic construct
  misc_feature 1..756: note = Description of Artificial Sequence: Synthetic coding sequence
  source 1..756: mol_type = other DNA
atgggccagaagaagcagagacccgccagagccggccagccccacagcagcagcgacgccgcccaggcccccgccgagcagccccacagcagcagcgacgccgcccaggccccctgccccagagagagatgcctgggcccccccaccacccccggcccctacagaagcatctacttcagcagccccaagggccacctgaccagactgggcctggagttcttcgaccagcccgccgtgcccctggccagagccttcctgggccaggtgctggtgagaagactgcccaacggcaccgagctgagaggcagaatcgtggagaccgaggcctacctgggccccgaggacgaggccgcccacagcagaggcggcagacagacccccagaaacagaggcatgttcatgaagcccggcaccctgtacgtgtacatcatctacggcatgtacttctgcatgaacatcagcagccagggcgacggcgcctgcgtgctgctgagagccctggagcccctggagggcctggagaccatgagacagctgagaagcaccctgagaaagggcaccgccagcagagtgctgaaggacagagagctgtgcagcggccccagcaagctgtgccaggccctggccatcaacaagagcttcgaccagagagacctggcccaggacgaggccgtgtggctggagagaggccccctggagcccagcgagcccgccgtggtggccgccgccagagtgggcgtgggccacgccggctag

SEQ ID NO: 11863 - DNA, 1044 bp, synthetic construct
  misc_feature 1..1044: note = Description of Artificial Sequence: Synthetic coding sequence
  source 1..1044: mol_type = other DNA
atgcacgcccactgcctgcccttcctgctgcacgcctggtgggccctgctgcaggccggcgccgccaccgtggccaccgccctgctgagaaccagaggccagcccagcagccccagccccctggcctacatgctgagcctgtacagagaccccctgcccagagccgacatcatcagaagcctgcaggccgaggacgtggccgtggacggccagaactggaccttcgccttcgacttcagcttcctgagccagcaggaggacctggcctgggccgagctgagactgcagctgagcagccccgtggacctgcccaccgagggcagcctggccatcgagatcttccaccagcccaagcccgacaccgagcaggccagcgacagctgcctggagagattccagatggacctgttcaccgtgaccctgagccaggtgaccttcagcctgggcagcatggtgctggaggtgaccagacccctgagcaagtggctgaagcaccccggcgccctggagaagcagatgagcagagtggccggcgagtgctggcccagaccccccaccccccccgccaccaacgtgctgctgatgctgtacagcaacctgagccaggagcagagacagctgggcggcagcaccctgctgtgggaggccgagagcagctggagagcccaggagggccagctgagctgggagtggggcaagagacacagaagacaccacctgcccgacagaagccagctgtgcagaaaggtgaagttccaggtggacttcaacctgatcggctggggcagctggatcatctaccccaagcagtacaacgcctacagatgcgagggcgagtgccccaaccccgtgggcgaggagttccaccccaccaaccacgcctacatccagagcctgctgaagagataccagccccacagagtgcccagcacctgctgcgcccccgtgaagaccaagcccctgagcatgctgtacgtggacaacggcagagtgctgctggaccaccacaaggacatgatcgtggaggagtgcggctgcctgtag

SEQ ID NO: 11864 - DNA, 879 bp, synthetic construct
  misc_feature 1..879: note = Description of Artificial Sequence: Synthetic coding sequence
  source 1..879: mol_type = other DNA
gaccagcagctgggcatccagaccaaggacgtggccgtggacggccagaactggaccttcgccttcgacttcagcttcctgagccagcaggaggacctggcctgggccgagctgagactgcagctgagcagccccgtggacctgcccaccgagggcagcctggccatcgagatcttccaccagcccaagcccgacaccgagcaggccagcgacagctgcctggagagattccagatggacctgttcaccgtgaccctgagccaggtgaccttcagcctgggcagcatggtgctggaggtgaccagacccctgagcaagtggctgaagcaccccggcgccctggagaagcagatgagcagagtggccggcgagtgctggcccagaccccccaccccccccgccaccaacgtgctgctgatgctgtacagcaacctgagccaggagcagagacagctgggcggcagcaccctgctgtgggaggccgagagcagctggagagcccaggagggccagctgagctgggagtggggcaagagacacagaagacaccacctgcccgacagaagccagctgtgcagaaaggtgaagttccaggtggacttcaacctgatcggctggggcagctggatcatctaccccaagcagtacaacgcctacagatgcgagggcgagtgccccaaccccgtgggcgaggagttccaccccaccaaccacgcctacatccagagcctgctgaagagataccagccccacagagtgcccagcacctgctgcgcccccgtgaagaccaagcccctgagcatgctgtacgtggacaacggcagagtgctgctggaccaccacaaggacatgatcgtggaggagtgcggctgcctgtag

SEQ ID NO: 11865 - DNA, 534 bp, synthetic construct
  misc_feature 1..534: note = Description of Artificial Sequence: Synthetic coding sequence
  source 1..534: mol_type = other DNA
atggtgctgctgagcaccctgggcatcgtgttccagggcgagggcccccccatcagcagctgcgacaccggcaccatggccaactgcgagagaaccttcatcgccatcaagcccgacggcgtgcagagaggcctggtgggcgagatcatcaagagattcgagcagaagggcttcagactggtgggcctgaagttcatgcaggccagcgaggacctgctgaaggagcactacgtggacctgaaggacagacccttcttcgccggcctggtgaagtacatgcacagcggccccgtggtggccatggtgtgggagggcctgaacgtggtgaagaccggcagagtgatgctgggcgagaccaaccccgccgacagcaagcccggcaccatcagaggcgacttctgcatccaggtgggcagaaacatcatccacggcagcgacagcgtggagagcgccgagaaggagatcggcctgtggttccaccccgaggagctggtggactacaccagctgcgcccagaactggatctacgagtag

SEQ ID NO: 11866 - DNA, 534 bp, synthetic construct; identical to SEQ ID NO: 11865
  misc_feature 1..534: note = Description of Artificial Sequence: Synthetic coding sequence
  source 1..534: mol_type = other DNA

SEQ ID NO: 11867 - DNA, 459 bp, synthetic construct
  misc_feature 1..459: note = Description of Artificial Sequence: Synthetic coding sequence
  source 1..459: mol_type = other DNA
atggccaactgcgagagaaccttcatcgccatcaagcccgacggcgtgcagagaggcctggtgggcgagatcatcaagagattcgagcagaagggcttcagactggtgggcctgaagttcatgcaggccagcgaggacctgctgaaggagcactacgtggacctgaaggacagacccttcttcgccggcctggtgaagtacatgcacagcggccccgtggtggccatggtgtgggagggcctgaacgtggtgaagaccggcagagtgatgctgggcgagaccaaccccgccgacagcaagcccggcaccatcagaggcgacttctgcatccaggtgggcagaaacatcatccacggcagcgacagcgtggagagcgccgagaaggagatcggcctgtggttccaccccgaggagctggtggactacaccagctgcgcccagaactggatctacgagtag

SEQ ID NO: 11868 - DNA, 183 bp, synthetic construct
  misc_feature 1..183: note = Description of Artificial Sequence: Synthetic coding sequence
  source 1..183: mol_type = other DNA
atggtgctgctgagcaccctgggcatcgtgttccagggcgagggcccccccatcagcagctgcgacaccggcaccatggccaactgcgagagaaccttcatcgccatcaagcccgacggcgtgcagagaggcctggtgggcgagatcatcaagagattcgagcagaagggcttcagactgtag

SEQ ID NO: 11869 - DNA, 1443 bp, synthetic construct
  misc_feature 1..1443: note = Description of Artificial Sequence: Synthetic coding sequence
  source 1..1443: mol_type = other DNA
atggccaccgtgcccggcctgcagcccctgcccaccctggagcaggacctggagcaggaggagatcctgatcgtgaaggtggaggaggacttctgcctggaggaggagcccagcgtggagaccgaggaccccagccccgagaccttcagacagctgttcagactgttctgctaccaggaggtggccggccccagagaggccctgagcagactgtgggagctgtgctgcagatggctgagacccgagctgagaaccaaggagcagatcctggagctgctggtgctggagcagttcctgaccgtgctgcccggcgagatccaggccagagtgagagagcagcagcccgagagcggcgaggaggccgtggtgctggtggagggcctgcagagaaagcccagaaagcacagacagagaggcagcgagctgctgagcgacgacgaggtgcccctgggcatcggcggccagttcctgaagcaccaggccgaggcccagcccgaggacctgagcctggaggaggaggccagattcagcagccagcagccccccgcccagctgagccacagaccccagagaggccccctgctgtggcccgagagaggcccccccgcccccagacaccaggagatggccagcgccagccccttcctgagcgcctggagccaggtgcccgtgaacctggaggacgtggccgtgtacctgagcggcgaggagcccagatgcatggaccccgcccagagagacgcccccctggagaacgagggccccggcatccagctggaggacggcggcgacggcagagaggacgcccccctgagaatggagtggtacagagtgctgagcgccagatgccagggccccggccaccccctgcccggccagagacccgcccccgtgagaggcctggtgagacccgaccagcccagaggcggccccccccccggcagaagagccagccacggcgccgacaagccctacacctgccccgagtgcggcaagggcttcagcaagaccagccacctgaccaagcaccagagaacccacaccggcgagagaccctacaagtgcctggtgtgcggcaagggcttcagcgacagaagcaacttcagcacccaccagagagtgcacaccggcgagaagccctacccctgccccgagtgcggcaagagattcagccagagcagcagcctggtgatccacagaagaacccacagcggcgagagaccctacgcctgcacccagtgcggcaagagattcaacaacagcagccacttcagcgcccacagaagaacccacaccggcgagaagccctacacctgccccgcctgcggcagaggcttcagaagaggcaccgacctgcacaagcaccagagaacccacatgggcgccggcagcctgcccaccctgcagcccgtggcccccggcggccccggcgccaaggcctag

SEQ ID NO: 11870 - DNA, 588 bp, synthetic construct
  misc_feature 1..588: note = Description of Artificial Sequence: Synthetic coding sequence
  source 1..588: mol_type = other DNA
atgggcggcctgttctggagaagcgccctgagaggcctgagatgcggccccagagcccccggccccagcctgctggtgagacacggcagcggcctgccccccagcgccctgaagagaggccccagctggaccagagagagaaccctggtggccgtgaagcccgacggcgtgcagagaagactggtgggcgacgtgatccagagattcgagagaagaggcttcaccctggtgggcatgaagatgctgcaggcccccgagagcgtgctggccgagcactaccaggacctgagaagaaagcccttctaccccgccctgatcagatacatgagcagcggccccgtggtggccatggtgtgggagggctacaacgtggtgagagccagcagagccatgatcggccacaccgacagcgccgaggccgcccccggcaccatcagaggcgacttcagcgtgcacatcagcagaaacgtgatccacgccagcgacagcgtggagggcgcccagagagagatccagctgtggttccagagcagcgagctggtgagctgggccgacggcggccagcacagcagcatccaccccgcctag

SEQ ID NO: 11871 - DNA, 354 bp, synthetic construct
  misc_feature 1..354: note = Description of Artificial Sequence: Synthetic coding sequence
  source 1..354: mol_type = other DNA
atgaagatgctgcaggcccccgagagcgtgctggccgagcactaccaggacctgagaagaaagcccttctaccccgccctgatcagatacatgagcagcggccccgtggtggccatggtgtgggagggctacaacgtggtgagagccagcagagccatgatcggccacaccgacagcgccgaggccgcccccggcaccatcagaggcgacttcagcgtgcacatcagcagaaacgtgatccacgccagcgacagcgtggagggcgcccagagagagatccagctgtggttccagagcagcgagctggtgagctgggccgacggcggccagcacagcagcatccaccccgcctag

SEQ ID NO: 11872 - DNA, 510 bp, synthetic construct
  misc_feature 1..510: note = Description of Artificial Sequence: Synthetic coding sequence
  source 1..510: mol_type = other DNA
tgatggagaagcgccctgagaggcctgagatgcggccccagagcccccggccccagcctgctggtgagacacggcagcggcggccccagctggaccagagagagaaccctggtggccgtgaagcccgacggcgtgcagagaagactggtgggcgacgtgatccagagattcgagagaagaggcttcaccctggtgggcatgaagatgctgcaggcccccgagagcgtgctggccgagcactaccaggacctgagaagaaagcccttctaccccgccctgatcagatacatgagcagcggccccgtggtggccatggtgtgggagggctacaacgtggtgagagccagcagagccatgatcggccacaccgacagcgccgaggccgcccccggcaccatcagaggcgacttcagcgtgcacatcagcagccacagactggcccccctggacagaggccagagagagcagcagatggtgcccggcatcccccagggcgcccacgaggcctag

SEQ ID NO: 11873 - DNA, 702 bp, synthetic construct
  misc_feature 1..702: note = Description of Artificial Sequence: Synthetic coding sequence
  source 1..702: mol_type = other DNA
atgggcggcctgttctggagaagcgccctgagaggcctgagatgcggccccagagcccccggccccagcctgctggtgagacacggcagcggcggccccagctggaccagagagagaaccctggtggccgtgaagcccgacggcgtgcagagaagactggtgggcgacgtgatccagagattcgagagaagaggcttcaccctggtgggcatgaagatgctgcaggcccccgagagcgtgctggccgagcactaccaggacctgagaagaaagcccttctaccccgccctgatcagatacatgagcagcggccccgtggtggccatggtgtgggagggctacaacgtggtgagagccagcagagccatgatcggccacaccgacagcgccgaggccgcccccggcaccatcagaggcgacttcagcgtgcacatcagcagaaacgtgatccacgccagcgacagcgtggagggcgcccagagagagatccagctgtggttccagagcagcgagctgagccccaccggcgccccctggcccagcagaagacccacctggagaggcaccaccgtgagccccagaaccgccaccagcagcgccagaacctgctgcggcaccaagtggcccagcagccaggaggccgccctgggcctgggcagcggcctgctgagattcagctgcggcaccgccgccatcagatag

SEQ ID NO: 11874 - DNA, 354 bp, synthetic construct; identical to SEQ ID NO: 11871
  misc_feature 1..354: note = Description of Artificial Sequence: Synthetic coding sequence
  source 1..354: mol_type = other DNA

SEQ ID NO: 11875 - DNA, 114 bp, synthetic construct
  misc_feature 1..114: note = Description of Artificial Sequence: Synthetic coding sequence
  source 1..114: mol_type = other DNA
atgaagatgctgcaggcccccgagagcgtgctggccgagcactaccaggacctgagaagaaagcccttctaccccgccctgatcagatacatgagcagcggccccgtggtgtag

SEQ ID NO: 11876 - DNA, 195 bp, synthetic construct
  misc_feature 1..195: note = Description of Artificial Sequence: Synthetic coding sequence
  source 1..195: mol_type = other DNA
atgttcctgcagtactacctgaacgagcagggcgacagagtgtacaccctgaagaagttcgaccccatgggccagcagacctgcagcgcccaccccgccagattcagccccgacgacaagtacagcagacacagaatcaccatcaagaagagattcaaggtgctgatgacccagcagcccagacccgtgctgtag

SEQ ID NO: 11877 - DNA, 7668 bp, synthetic construct
  misc_feature 1..7668: note = Description of Artificial Sequence: Synthetic coding sequence
  source 1..7668: mol_type = other DNA
atgccccccctgctggcccccctgctgtgcctggccctgctgcccgccctggccgccagaggccccagatgcagccagcccggcgagacctgcctgaacggcggcaagtgcgaggccgccaacggcaccgaggcctgcgtgtgcggcggcgccttcgtgggccccagatgccaggaccccaacccctgcctgagcaccccctgcaagaacgccggcacctgccacgtggtggacagaagaggcgtggccgactacgcctgcagctgcgccctgggcttcagcggccccctgtgcctgacccccctggacaacgcctgcctgaccaacccctgcagaaacggcggcacctgcgacctgctgaccctgaccgagtacaagtgcagatgcccccccggctggagcggcaagagctgccagcaggccgacccctgcgccagcaacccctgcgccaacggcggccagtgcctgcccttcgaggccagctacatctgccactgcccccccagcttccacggccccacctgcagacaggacgtgaacgagtgcggccagaagcccggcctgtgcagacacggcggcacctgccacaacgaggtgggcagctacagatgcgtgtgcagagccacccacaccggccccaactgcgagagaccctacgtgccctgcagccccagcccctgccagaacggcggcacctgcagacccaccggcgacgtgacccacgagtgcgcctgcctgcccggcttcaccggccagaactgcgaggagaacatcgacgactgccccggcaacaactgcaagaacggcggcgcctgcgtggacggcgtgaacacctacaactgcagatgcccccccgagtggaccggccagtactgcaccgaggacgtggacgagtgccagctgatgcccaacgcctgccagaacggcggcacctgccacaacacccacggcggctacaactgcgtgtgcgtgaacggctggaccggcgaggactgcagcgagaacatcgacgactgcgccagcgccgcctgcttccacggcgccacctgccacgacagagtggccagcttctactgcgagtgcccccacggcagaaccggcctgctgtgccacctgaacgacgcctgcatcagcaacccctgcaacgagggcagcaactgcgacaccaaccccgtgaacggcaaggccatctgcacctgccccagcggctacaccggccccgcctgcagccaggacgtggacgagtgcagcctgggcgccaacccctgcgagcacgccggcaagtgcatcaacaccctgggcagcttcgagtgccagtgcctgcagggctacaccggccccagatgcgagatcgacgtgaacgagtgcgtgagcaacccctgccagaacgacgccacctgcctggaccagatcggcgagttccagtgcatctgcatgcccggctacgagggcgtgcactgcgaggtgaacaccgacgagtgcgccagcagcccctgcctgcacaacggcagatgcctggacaagatcaacgagttccagtgcgagtgccccaccggcttcaccggccacctgtgccagtacgacgtggacgagtgcgccagcaccccctgcaagaacggcgccaagtgcctggacggccccaacacctacacctgcgtgtgcaccgagggctacaccggcacccactgcgaggtggacatcgacgagtgcgaccccgacccctgccactacggcagctgcaaggacggcgtggccaccttcacctgcctgtgcagacccggctacaccggccaccactgcgagaccaacatcaacgagtgcagcagccagccctgcagacacggcggcacctgccaggacagagacaacgcctacctgtgcttctgcctgaagggcaccaccggccccaactgcgagatcaacctggacgactgcgccagcagcccctgcgacagcggcacctgcctggacaagatcgacggctacgagtgcgcctgcgagcccggctacaccggcagcatgtgcaacatcaacatcgacgagtgcgccggcaacccctgccacaacggcggcacctgcgaggacggcatcaacggcttcacctgcagatgccccgagggctaccacgaccccacctgcctgagcgaggtgaacgagtgcaacagcaacccctgcgtgcacggcgcctgcagagacagcctgaacggctacaagtgcgactgcgaccccggctggagcggcaccaactgcgacatcaacaacaacgagtgcgagagcaacccctgcgtgaacggcggcacctgcaaggacatgaccagcggctacgtgtgcacctgcagagagggcttcagcggccccaactgccagaccaacatcaacgagtgcgccagcaacccctgcctgaaccagggcacctgcatcgacgacgtggccggctacaagtgcaactgcctgctgccctacaccggcgccacctgcgaggtggtgctggccccctgcgcccccagcccctgcagaaacggcggcgagtgcagacagagcgaggactacgagagcttcagctgcgtgtgccccaccggctggcagggccagacctgcgaggtggacatcaacgagtgcgtgctgagcccctgcagacacggcgccagctgccagaacacccacggcggctacagatgccactgccaggccggctacagcggcagaaactgcgagaccgacatcgacgactgcagacccaacccctgccacaacggcggcagctgcaccgacggcatcaacaccgccttctgcgactgcctgcccggcttcagaggcaccttctgcgaggaggacatcaacgagtgcgccagcgacccctgcagaaacggcgccaactgcaccgactgcgtggacagctacacctgcacctgccccgccggcttcagcggcatccactgcgagaacaacacccccgactgcaccgagagcagctgcttcaacggcggcacctgcgtggacggcatcaacagcttcacctgcctgtgcccccccggcttcaccggcagctactgccagcacgacgtgaacgagtgcgacagccagccctgcctgcacggcggcacctgccaggacggctgcggcagctacagatgcacctgcccccagggctacaccggccccaactgccagaacctggtgcactggtgcgacagcagcccctgcaagaacggcggcaagtgctggcagacccacacccagtacagatgcgagtgccccagcggctggaccggcctgtactgcgacgtgcccagcgtgagctgcgaggtggccgcccagagacagggcgtggacgtggccagactgtgccagcacggcggcctgtgcgtggacgccggcaacacccaccactgcagatgccaggccggctacaccggcagctactgcgaggacctggtggacgagtgcagccccagcccctgccagaacggcgccacctgcaccgactacctgggcggctacagctgcaagtgcgtggccggctaccacggcgtgaactgcagcgaggagatcgacgagtgcctgagccacccctgccagaacggcggcacctgcctggacctgcccaacacctacaagtgcagctgccccagaggcacccagggcgtgcactgcgagatcaacgtggacgactgcaacccccccgtggaccccgtgagcagaagccccaagtgcttcaacaacggcacctgcgtggaccaggtgggcggctacagctgcacctgcccccccggcttcgtgggcgagagatgcgagggcgacgtgaacgagtgcctgagcaacccctgcgacgccagaggcacccagaactgcgtgcagagagtgaacgacttccactgcgagtgcagagccggccacaccggcagaagatgcgagagcgtgatcaacggctgcaagggcaagccctgcaagaacggcggcacctgcgccgtggccagcaacaccgccagaggcttcatctgcaagtgccccgccggcttcgagggcgccacctgcgagaacgacgccagaacctgcggcagcctgagatgcctgaacggcggcacctgcatcagcggccccagaagccccacctgcctgtgcctgggccccttcaccggccccgagtgccagttccccgccagcagcccctgcctgggcggcaacccctgctacaaccagggcacctgcgagcccaccagcgagagccccttctacagatgcctgtgccccgccaagttcaacggcctgctgtgccacatcctggactacagcttcggcggcggcgccggcagagacatccccccccccctgatcgaggaggcctgcgagctgcccgagtgccaggaggacgccggcaacaaggtgtgcagcctgcagtgcaacaaccacgcctgcggctgggacggcggcgactgcagcctgaacttcaacgacccctggaagaactgcacccagagcctgcagtgctggaagtacttcagcgacggccactgcgacagccagtgcaacagcgccggctgcctgttcgacggcttcgactgccagagagccgagggccagtgcaaccccctgtacgaccagtactgcaaggaccacttcagcgacggccactgcgaccagggctgcaacagcgccgagtgcgagtgggacggcctggactgcgccgagcacgtgcccgagagactggccgccggcaccctggtggtggtggtgctgatgccccccgagcagctgagaaacagcagcttccacttcctgagagagctgagcagagtgctgcacaccaacgtggtgttcaagagagacgcccacggccagcagatgatcttcccctactacggcagagaggaggagctgagaaagcaccccatcaagagagccgccgagggctgggccgcccccgacgccctgctgggccaggtgaaggccagcctgctgcccggcggcagcgagggcggcagaagaagaagagagctggaccccatggacgtgagaggcagcatcgtgtacctggagatcgacaacagacagtgcgtgcaggccagcagccagtgcttccagagcgccaccgacgtggccgccttcctgggcgccctggccagcctgggcagcctgaacatcccctacaagatcgaggccgtgcagagcgagaccgtggagccccccccccccgcccagctgcacttcatgtacgtggccgccgccgccttcgtgctgctgttcttcgtgggctgcggcgtgctgctgagcagaaagagaagaagacagcacggccagctgtggttccccgagggcttcaaggtgagcgaggccagcaagaagaagagaagagagcccctgggcgaggacagcgtgggcctgaagcccctgaagaacgccagcgacggcgccctgatggacgacaaccagaacgagtggggcgacgaggacctggagaccaagaagttcagattcgaggagcccgtggtgctgcccgacctggacgaccagaccgaccacagacagtggacccagcagcacctggacgccgccgacctgagaatgagcgccatggcccccacccccccccagggcgaggtggacgccgactgcatggacgtgaacgtgagaggccccgacggcttcacccccctgatgatcgccagctgcagcggcggcggcctggagaccggcaacagcgaggaggaggaggacgcccccgccgtgatcagcgacttcatctaccagggcgccagcctgcacaaccagaccgacagaaccggcgagaccgccctgcacctggccgccagatacagcagaagcgacgccgccaagagactgctggaggccagcgccgacgccaacatccaggacaacatgggcagaacccccctgcacgccgccgtgagcgccgacgcccagggcgtgttccagatcctgatcagaaacagagccaccgacctggacgccagaatgcacgacggcaccacccccctgatcctggccgccagactggccgtggagggcatgctggaggacctgatcaacagccacgccgacgtgaacgccgtggacgacctgggcaagagcgccctgcactgggccgccgccgtgaacaacgtggacgccgccgtggtgctgctgaagaacggcgccaacaaggacatgcagaacaacagagaggagacccccctgttcctggccgccagagagggcagctacgagaccgccaaggtgctgctggaccacttcgccaacagagacatcaccgaccacatggacagactgcccagagacatcgcccaggagagaatgcaccacgacatcgtgagactgctggacgagtacaacctggtgagaagcccccagctgcacggcgcccccctgggcggcacccccaccctgagcccccccctgtgcagccccaacggctacctgggcagcctgaagcccggcgtgcagggcaagaaggtgagaaagcccagcagcaagggcctggcctgcggcagcaaggaggccaaggacctgaaggccagaagaaagaagagccaggacggcaagggctgcctgctggacagcagcggcatgctgagccccgtggacagcctggagagcccccacggctacctgagcgacgtggccagcccccccctgctgcccagccccttccagcagagccccagcgtgcccctgaaccacctgcccggcatgcccgacacccacctgggcatcggccacctgaacgtggccgccaagcccgagatggccgccctgggcggcggcggcagactggccttcgagaccggcccccccagactgagccacctgcccgtggccagcggcaccagcaccgtgctgggcagcagcagcggcggcgccctgaacttcaccgtgggcggcagcaccagcctgaacggccagtgcgagtggctgagcagactgcagagcggcatggtgcccaaccagtacaaccccctgagaggcagcgtggcccccggccccctgagcacccaggcccccagcctgcagcacggcatggtgggccccctgcacagcagcctggccgccagcgccctgagccagatgatgagctaccagggcctgcccagcaccagactggccacccagccccacctggtgcagacccagcaggtgcagccccagaacctgcagatgcagcagcagaacctgcagcccgccaacatccagcagcagcagagcctgcagcccccccccccccccccccagccccacctgggcgtgagcagcgccgccagcggccacctgggcagaagcttcctgagcggcgagcccagccaggccgacgtgcagcccctgggccccagcagcctggccgtgcacaccatcctgccccaggagagccccgccctgcccaccagcctgcccagcagcctggtgccccccgtgaccgccgcccagttcctgaccccccccagccagcacagctacagcagccccgtggacaacacccccagccaccagctgcaggtgcccgagcaccccttcctgacccccagccccgagagccccgaccagtggagcagcagcagcccccacagcaacgtgagcgactggagcgagggcgtgagcagcccccccaccagcatgcagagccagatcgccagaatccccgaggccttcaagtag

SEQ ID NO: 11878 - DNA, 6012 bp, synthetic construct
  misc_feature 1..6012: note = Description of Artificial Sequence: Synthetic coding sequence
  source 1..6012: mol_type = other DNA
atgcagccccccagcctgctgctgctgctgctgctgctgctgctgctgtgcgtgagcgtggtgagacccagaggcctgctgtgcggcagcttccccgagccctgcgccaacggcggcacctgcctgagcctgagcctgggccagggcacctgccagtgcgcccccggcttcctgggcgagacctgccagttccccgacccctgccagaacgcccagctgtgccagaacggcggcagctgccaggccctgctgcccgcccccctgggcctgcccagcagccccagccccctgacccccagcttcctgtgcacctgcctgcccggcttcaccggcgagagatgccaggccaagctggaggacccctgcccccccagcttctgcagcaagagaggcagatgccacatccaggccagcggcagaccccagtgcagctgcatgcccggctggaccggcgagcagtgccagctgagagacttctgcagcgccaacccctgcgtgaacggcggcgtgtgcctggccacctacccccagatccagtgccactgcccccccggcttcgagggccacgcctgcgagagagacgtgaacgagtgcttccaggaccccggcccctgccccaagggcaccagctgccacaacaccctgggcagcttccagtgcctgtgccccgtgggccaggagggccccagatgcgagctgagagccggcccctgcccccccagaggctgcagcaacggcggcacctgccagctgatgcccgagaaggacagcaccttccacctgtgcctgtgcccccccggcttcatcggccccgactgcgaggtgaaccccgacaactgcgtgagccaccagtgccagaacggcggcacctgccaggacggcctggacacctacacctgcctgtgccccgagacctggaccggctgggactgcagcgaggacgtggacgagtgcgagacccagggccccccccactgcagaaacggcggcacctgccagaacagcgccggcagcttccactgcgtgtgcgtgagcggctggggcggcaccagctgcgaggagaacctggacgactgcatcgccgccacctgcgcccccggcagcacctgcatcgacagagtgggcagcttcagctgcctgtgcccccccggcagaaccggcctgctgtgccacctggaggacatgtgcctgagccagccctgccacggcgacgcccagtgcagcaccaaccccctgaccggcagcaccctgtgcctgtgccagcccggctacagcggccccacctgccaccaggacctggacgagtgcctgatggcccagcagggccccagcccctgcgagcacggcggcagctgcctgaacacccccggcagcttcaactgcctgtgcccccccggctacaccggcagcagatgcgaggccgaccacaacgagtgcctgagccagccctgccaccccggcagcacctgcctggacctgctggccaccttccactgcctgtgcccccccggcctggagggccagctgtgcgaggtggagaccaacgagtgcgccagcgccccctgcctgaaccacgccgactgccacgacctgctgaacggcttccagtgcatctgcctgcccggcttcagcggcaccagatgcgaggaggacatcgacgagtgcagaagcagcccctgcgccaacggcggccagtgccaggaccagcccggcgccttccactgcaagtgcctgcccggcttcgagggccccagatgccagaccgaggtggacgagtgcctgagcgacccctgccccgtgggcgccagctgcctggacctgcccggcgccttcttctgcctgtgccccagcggcttcaccggccagctgtgcgaggtgcccctgtgcgcccccaacctgtgccagcccaagcagatctgcaaggaccagaaggacaaggccaactgcctgtgccccgacggcagccccggctgcgccccccccgaggacaactgcacctgccaccacggccactgccagagaagcagctgcgtgtgcgacgtgggctggaccggccccgagtgcgaggccgagctgggcggctgcatcagcgccccctgcgcccacggcggcacctgctacccccagcccagcggctacaactgcacctgccccaccggctacaccggccccacctgcagcgaggagatgaccgcctgccacagcggcccctgcctgaacggcggcagctgcaaccccagccccggcggctactactgcacctgcccccccagccacaccggcccccagtgccagaccagcaccgactactgcgtgagcgccccctgcttcaacggcggcacctgcgtgaacagacccggcaccttcagctgcctgtgcgccatgggcttccagggccccagatgcgagggcaagctgagacccagctgcgccgacagcccctgcagaaacagagccacctgccaggacagcccccagggccccagatgcctgtgccccaccgtgtacaccggcggcagctgccagaccctgatggacctgtgcgcccagaagccctgccccagaaacagccactgcctgcagaccggccccagcttccactgcctgtgcctgcagggctggaccggccccctgtgcaacctgcccctgagcagctgccagaaggccgccctgagccagggcatcgacgtgagcagcctgtgccacaacggcggcctgtgcgtggacagcggccccagctacttctgccactgcccccccggcttccagggcagcctgtgccaggaccacgtgaacccctgcgagagcagaccctgccagaacggcgccacctgcatggcccagcccagcggctacctgtgccagtgcgcccccggctacgacggccagaactgcagcaaggagctggacgcctgccagagccagccctgccacaaccacggcacctgcacccccaagcccggcggcttccactgcgcctgcccccccggcttcgtgggcctgagatgcgagggcgacgtggacgagtgcctggaccagccctgccaccccaccggcaccgccgcctgccacagcctggccaacgccttctactgccagtgcctgcccggccacaccggccagtggtgcgaggtggagatcgacccctgccacagccagccctgcttccacggcggcacctgcgaggccaccgccggcagccccctgggcttcatctgccactgccccaagggcttcgagggccccacctgcagccacagagcccccagctgcggcttccaccactgccaccacggcggcctgtgcctgcccagccccaagcccggcttcccccccagatgcgcctgcctgagcggctacggcggccccgactgcctgaccccccccgcccccaagggctgcggcccccccagcccctgcctgtacaacggcagctgcagcgagaccaccggcctgggcggccccggcttcagatgcagctgcccccacagcagccccggccccagatgccagaagcccggcgccaagggctgcgagggcagaagcggcgacggcgcctgcgacgccggctgcagcggccccggcggcaactgggacggcggcgactgcagcctgggcgtgcccgacccctggaagggctgccccagccacagcagatgctggctgctgttcagagacggccagtgccacccccagtgcgacagcgaggagtgcctgttcgacggctacgactgcgagaccccccccgcctgcacccccgcctacgaccagtactgccacgaccacttccacaacggccactgcgagaagggctgcaacaccgccgagtgcggctgggacggcggcgactgcagacccgaggacggcgaccccgagtggggccccagcctggccctgctggtggtgctgagcccccccgccctggaccagcagctgttcgccctggccagagtgctgagcctgaccctgagagtgggcctgtgggtgagaaaggacagagacggcagagacatggtgtacccctaccccggcgccagagccgaggagaagctgggcggcaccagagaccccacctaccaggagagagccgccccccagacccagcccctgggcaaggagaccgacagcctgagcgccggcttcgtggtggtgatgggcgtggacctgagcagatgcggccccgaccaccccgccagcagatgcccctgggaccccggcctgctgctgagattcctggccgccatggccgccgtgggcgccctggagcccctgctgcccggccccctgctggccgtgcacccccacgccggcaccgccccccccgccaaccagctgccctggcccgtgctgtgcagccccgtggccggcgtgatcctgctggccctgggcgccctgctggtgctgcagctgatcagaagaagaagaagagagcacggcgccctgtggctgccccccggcttcaccagaagacccagaacccagagcgccccccacagaagaagaccccccctgggcgaggacagcatcggcctgaaggccctgaagcccaaggccgaggtggacgaggacggcgtggtgatgtgcagcggccccgaggagggcgaggaggtgggccaggccgaggagaccggcccccccagcacctgccagctgtggagcctgagcggcggctgcggcgccctgccccaggccgccatgctgacccccccccaggagagcgagatggaggcccccgacctggacaccagaggccccgacggcgtgacccccctgatgagcgccgtgtgctgcggcgaggtgcagagcggcaccttccagggcgcctggctgggctgccccgagccctgggagcccctgctggacggcggcgcctgcccccaggcccacaccgtgggcaccggcgagacccccctgcacctggccgccagattcagcagacccaccgccgccagaagactgctggaggccggcgccaaccccaaccagcccgacagagccggcagaacccccctgcacgccgccgtggccgccgacgccagagaggtgtgccagctgctgctgagaagcagacagaccgccgtggacgccagaaccgaggacggcaccacccccctgatgctggccgccagactggccgtggaggacctggtggaggagctgatcgccgcccaggccgacgtgggcgccagagacaagtggggcaagaccgccctgcactgggccgccgccgtgaacaacgccagagccgccagaagcctgctgcaggccggcgccgacaaggacgcccaggacaacagagagcagacccccctgttcctggccgccagagagggcgccgtggaggtggcccagctgctgctgggcctgggcgccgccagagagctgagagaccaggccggcctggcccccgccgacgtggcccaccagagaaaccactgggacctgctgaccctgctggagggcgccggcccccccgaggccagacacaaggccacccccggcagagaggccggccccttccccagagccagaaccgtgagcgtgagcgtgcccccccacggcggcggcgccctgcccagatgcagaaccctgagcgccggcgccggccccagaggcggcggcgcctgcctgcaggccagaacctggagcgtggacctggccgccagaggcggcggcgcctacagccactgcagaagcctgagcggcgtgggcgccggcggcggccccacccccagaggcagaagattcagcgccggcatgagaggccccagacccaaccccgccatcatgagaggcagatacggcgtggccgccggcagaggcggcagagtgagcaccgacgactggccctgcgactgggtggccctgggcgcctgcggcagcgccagcaacatccccatcccccccccctgcctgacccccagccccgagagaggcagcccccagctggactgcggcccccccgccctgcaggagatgcccatcaaccagggcggcgagggcaagaagtag

SEQ ID NO: 11879 - DNA, 561 bp, synthetic construct
  misc_feature 1..561: note = Description of Artificial Sequence: Synthetic coding sequence
  source 1..561: mol_type = other DNA
atgagcgccgtgtgctgcggcgaggtgcagagcggcaccttccagggcgcctggctgggctgccccgagccctgggagcccctgctggacggcggcgcctgcccccaggcccacaccgtgggcaccggcgagacccccctgcacctggccgccagattcagcagacccaccgccgccagaagactgctggaggccggcgccaaccccaaccagcccgacagagccggcagaacccccctgcacgccgccgtggccgccgacgccagagaggtgtgccagctgctgctgagaagcagacagaccgccgtggacgccagaaccgaggacggcaccacccccctgatgctggccgccagactggccgtggaggacctggtggaggagctgatcgccgcccaggccgacgtgggcgccagagacaagtggggcgccgacgccgccatccccggcggcgccggcagaagcggcggcagcagccccgccaccgccggcgccggcggcagccccagagccgccggccccggctgggccagcgccggcggcagaagaagccccacctag

SEQ ID NO: 11880 - DNA, 1734 bp, synthetic construct
  misc_feature 1..1734: note = Description of Artificial Sequence: Synthetic coding sequence
  source 1..1734: mol_type = other DNA
atgcactggctgagaaaggtgcagggcctgtgcaccctgtggggcacccagatgagcagcagaaccctgtacatcaacagcagacagctggtgagcctgcagtggggccaccaggaggtgcccgccaagttcaacttcgccagcgacgtgctggaccactgggccgacatggagaaggccggcaagagactgcccagccccgccctgtggtgggtgaacggcaagggcaaggagctgatgtggaacttcagagagctgagcgagaacagccagcaggccgccaacgtgctgagcggcgcctgcggcctgcagagaggcgacagagtggccgtggtgctgcccagagtgcccgagtggtggctggtgatcctgggctgcatcagagccggcctgatcttcatgcccggcaccatccagatgaagagcaccgacatcctgtacagactgcagatgagcaaggccaaggccatcgtggccggcgacgaggtgatccaggaggtggacaccgtggccagcgagtgccccagcctgagaatcaagctgctggtgagcgagaagagctgcgacggctggctgaacttcaagaagctgctgaacgaggccagcaccacccaccactgcgtggagaccggcagccaggaggccagcgccatctacttcaccagcggcaccagcggcctgcccaagatggccgagcacagctacagcagcctgggcctgaaggccaagatggacgccggctggaccggcctgcaggccagcgacatcatgtggaccatcagcgacaccggctggatcctgaacatcctgtgcagcctgatggagccctgggccctgggcgcctgcaccttcgtgcacctgctgcccaagttcgaccccctggtgatcctgaagaccctgagcagctaccccatcaagagcatgatgggcgcccccatcgtgtacagaatgctgctgcagcaggacctgagcagctacaagttcccccacctgcagaactgcgtgaccgtgggcgagagcctgctgcccgagaccctggagaactggagagcccagaccggcctggacatcagagagagctacggccagaccgagaccggcctgacctgcatggtgagcaagaccatgaagatcaagcccggctacatgggcaccgccgccagctgctacgacgtgcagatcatcgacgacaagggcaacgtgctgccccccggcaccgagggcgacatcggcatcagagtgaagcccatcagacccatcggcatcttcagcggctacgtggacaaccccgacaagaccgccgccaacatcagaggcgacttctggctgctgggcgacagaggcatcaaggacgaggacggctacttccagttcatgggcagagccaacgacatcatcaacagcagcggctacagaatcggccccagcgaggtggagaacgccctgatggagcaccccgccgtggtggagaccgccgtgatcagcagccccgaccccgtgagaggcgaggtggtgaaggccttcgtggtgctggccagccagttcctgagccacgaccccgagcagctgaccaaggagctgcagcagcacgtgaagagcgtgaccgccccctacaagtaccccagaaagatcgagttcgtgctgaacctgcccaagaccgtgaccggcaagatccagagagccaagctgagagacaaggagtggaagatgagcggcaaggccagagcccagtag

SEQ ID NO: 11881 - DNA, 4368 bp, synthetic construct
  misc_feature 1..4368: note = Description of Artificial Sequence: Synthetic coding sequence
  source 1..4368: mol_type = other DNA
atgggcggcgcctgcagcagcttcaccaccagcagcagccccaccatctacagcaccagcgtgaccgacagcaaggccatgcaggtggagagctgcagcagcgccgtgggcgtgagcaacagaggcgtgagcgagaagcagctgaccagcaacaccgtgcagcagcaccccagcacccccaagagacacaccgtgctgtacatcagccccccccccgaggacctgctggacaacagcagaatgagctgccaggacgagggctgcggcctggagagcgagcagagctgcagcatgtggatggaggacagccccagcaacttcagcaacatgagcaccagcagctacaacgacaacaccgaggtgcccagaaagagcagaaagagaaaccccaagcagagacccggcgtgaagagaagagactgcgaggagagcaacatggacatcttcgacgccgacagcgccaaggccccccactacgtgctgagccagctgaccaccgacaacaagggcaacagcaaggccggcaacggcaccctggagaaccagaagggcaccggcgtgaagaagagccccatgctgtgcggccagtaccccgtgaagagcgagggcaaggagctgaagatcgtggtgcagcccgagacccagcacagagccagatacctgaccgagggcagcagaggcagcgtgaaggacagaacccagcagggcttccccaccgtgaagctggagggccacaacgagcccgtggtgctgcaggtgttcgtgggcaacgacagcggcagagtgaagccccacggcttctaccaggcctgcagagtgaccggcagaaacaccaccccctgcaaggaggtggacatcgagggcaccaccgtgatcgaggtgggcctggaccccagcaacaacatgaccctggccgtggactgcgtgggcatcctgaagctgagaaacgccgacgtggaggccagaatcggcatcgccggcagcaagaagaagagcaccagagccagactggtgttcagagtgaacatcatgagaaaggacggcagcaccctgaccctgcagacccccagcagccccatcctgtgcacccagcccgccggcgtgcccgagatcctgaagaagagcctgcacagctgcagcgtgaagggcgaggaggaggtgttcctgatcggcaagaacttcctgaagggcaccaaggtgatcttccaggagaacgtgagcgacgagaacagctggaagagcgaggccgagatcgacatggagctgttccaccagaaccacctgatcgtgaaggtgcccccctaccacgaccagcacatcaccctgcccgtgagcgtgggcatctacgtggtgaccaacgccggcagaagccacgacgtgcagcccttcacctacacccccgaccccgccgccgccggcgccctgaacgtgaacgtgaagaaggagatcagcagccccgccagaccctgcagcttcgaggaggccatgaaggccatgaagaccaccggctgcaacctggacaaggtgaacatcatccccaacgccctgatgacccccctgatccccagcagcatgatcaagagcgaggacgtgacccccatggaggtgaccgccgagaagagaagcagcaccatcttcaagaccaccaagagcgtgggcagcacccagcagaccctggagaacatcagcaacatcgccggcaacggcagcttcagcagccccagcagcagccacctgcccagcgagaacgagaagcagcagcagatccagcccaaggcctacaaccccgagaccctgaccaccatccagacccaggacatcagccagcccggcaccttccccgccgtgagcgccagcagccagctgcccaacagcgacgccctgctgcagcaggccacccagttccagaccagagagacccagagcagagagatcctgcagagcgacggcaccgtggtgaacctgagccagctgaccgaggccagccagcagcagcagcagagccccctgcaggagcaggcccagaccctgcagcagcagatcagcagcaacatcttccccagccccaacagcgtgagccagctgcagaacaccatccagcagctgcaggccggcagcttcaccggcagcaccgccagcggcagcagcggcagcgtggacctggtgcagcaggtgctggaggcccagcagcagctgagcagcgtgctgttcagcgcccccgacggcaacgagaacgtgcaggagcagctgagcgccgacatcttccagcaggtgagccagatccagagcggcgtgagccccggcatgttcagcagcaccgagcccaccgtgcacaccagacccgacaacctgctgcccggcagagccgagagcgtgcacccccagagcgagaacaccctgagcaaccagcagcagcagcagcagcagcagcagcaggtgatggagagcagcgccgccatggtgatggagatgcagcagagcatctgccaggccgccgcccagatccagagcgagctgttccccagcaccgccagcgccaacggcaacctgcagcagagccccgtgtaccagcagaccagccacatgatgagcgccctgagcaccaacgaggacatgcagatgcagtgcgagctgttcagcagcccccccgccgtgagcggcaacgagaccagcaccaccaccacccagcaggtggccacccccggcaccaccatgttccagaccagcagcagcggcgacggcgaggagaccggcacccaggccaagcagatccagaacagcgtgttccagaccatggtgcagatgcagcacagcggcgacaaccagccccaggtgaacctgttcagcagcaccaagagcatgatgagcgtgcagaacagcggcacccagcagcagggcaacggcctgttccagcagggcaacgagatgatgagcctgcagagcggcaacttcctgcagcagagcagccacagccaggcccagctgttccacccccagaaccccatcgccgacgcccagaacctgagccaggagacccagggcagcctgttccacagccccaaccccatcgtgcacagccagaccagcaccaccagcagcgagcagatgcagccccccatgttccacagccagagcaccatcgccgtgctgcagggcagcagcgtgccccaggaccagcagagcaccaacatcttcctgagccagagccccatgaacaacctgcagaccaacaccgtggcccaggaggccttcttcgccgcccccaacagcatcagccccctgcagagcaccagcaacagcgagcagcaggccgccttccagcagcaggcccccatcagccacatccagacccccatgctgagccaggagcaggcccagcccccccagcagggcctgttccagccccaggtggccctgggcagcctgccccccaaccccatgccccagagccagcagggcaccatgttccagagccagcacagcatcgtggccatgcagagcaacagccccagccaggagcagcagcagcagcagcagcagcagcagcagcagcagcagcagcagcagcagagcatcctgttcagcaaccagaacaccatggccaccatggccagccccaagcagcccccccccaacatgatcttcaaccccaaccagaaccccatggccaaccaggagcagcagaaccagagcatcttccaccagcagagcaacatggcccccatgaaccaggagcagcagcccatgcagttccagagccagagcaccgtgagcagcctgcagaaccccggccccacccagagcgagagcagccagacccccctgttccacagcagcccccagatccagctggtgcagggcagccccagcagccaggagcagcaggtgaccctgttcctgagccccgccagcatgagcgccctgcagaccagcatcaaccagcaggacatgcagcagagccccctgtacagcccccagaacaacatgcccggcatccagggcgccaccagcagcccccagccccaggccaccctgttccacaacaccgccggcggcaccatgaaccagctgcagaacagccccggcagcagccagcagaccagcggcatgttcctgttcggcatccagaacaactgcagccagctgctgaccagcggccccgccaccctgcccgaccagctgatggccatcagccagcccggccagccccagaacgagggccagccccccgtgaccaccctgctgagccagcagatgcccgagaacagccccctggccagcagcatcaacaccaaccagaacatcgagaagatcgacctgctggtgagcctgcagaaccagggcaacaacctgaccggcagcttctag

SEQ ID NO: 11882 - DNA, 4647 bp, synthetic construct
  misc_feature 1..4647: note = Description of Artificial Sequence: Synthetic coding sequence
  source 1..4647: mol_type = other DNA
atgcccagcgacttcatcagcctgctgagcgccgacctggacctggagagccccaagagcctgtacagcagagacagcctgaagctgcaccccagccagaacttccacagagccggcctgctggaggagagcgtgtacgacctgctgcccaaggagctgcagctgccccccagcagagagaccagcgtggccagcatgagccagaccagcggcggcgaggccggcagccccccccccgccgtggtggccgccgacgccagcagcgcccccagcagcagcagcatgggcggcgcctgcagcagcttcaccaccagcagcagccccaccatctacagcaccagcgtgaccgacagcaaggccatgcaggtggagagctgcagcagcgccgtgggcgtgagcaacagaggcgtgagcgagaagcagctgaccagcaacaccgtgcagcagcaccccagcacccccaagagacacaccgtgctgtacatcagccccccccccgaggacctgctggacaacagcagaatgagctgccaggacgagggctgcggcctggagagcgagcagagctgcagcatgtggatggaggacagccccagcaacttcagcaacatgagcaccagcagctacaacgacaacaccgaggtgcccagaaagagcagaaagagaaaccccaagcagagacccggcgtgaagagaagagactgcgaggagagcaacatggacatcttcgacgccgacagcgccaaggccccccactacgtgctgagccagctgaccaccgacaacaagggcaacagcaaggccggcaacggcaccctggagaaccagaagggcaccggcgtgaagaagagccccatgctgtgcggccagtaccccgtgaagagcgagggcaaggagctgaagatcgtggtgcagcccgagacccagcacagagccagatacctgaccgagggcagcagaggcagcgtgaaggacagaacccagcagggcttccccaccgtgaagctggagggccacaacgagcccgtggtgctgcaggtgttcgtgggcaacgacagcggcagagtgaagccccacggcttctaccaggcctgcagagtgaccggcagaaacaccaccccctgcaaggaggtggacatcgagggcaccaccgtgatcgaggtgggcctggaccccagcaacaacatgaccctggccgtggactgcgtgggcatcctgaagctgagaaacgccgacgtggaggccagaatcggcatcgccggcagcaagaagaagagcaccagagccagactggtgttcagagtgaacatcatgagaaaggacggcagcaccctgaccctgcagacccccagcagccccatcctgtgcacccagcccgccggcgtgcccgagatcctgaagaagagcctgcacagctgcagcgtgaagggcgaggaggaggtgttcctgatcggcaagaacttcctgaagggcaccaaggtgatcttccaggagaacgtgagcgacgagaacagctggaagagcgaggccgagatcgacatggagctgttccaccagaaccacctgatcgtgaaggtgcccccctaccacgaccagcacatcaccctgcccgtgagcgtgggcatctacgtggtgaccaacgccggcagaagccacgacgtgcagcccttcacctacacccccgaccccgccgccggcgccctgaacgtgaacgtgaagaaggagatcagcagccccgccagaccctgcagcttcgaggaggccatgaaggccatgaagaccaccggctgcaacctggacaaggtgaacatcatccccaacgccctgatgacccccctgatccccagcagcatgatcaagagcgaggacgtgacccccatggaggtgaccgccgagaagagaagcagcaccatcttcaagaccaccaagagcgtgggcagcacccagcagaccctggagaacatcagcaacatcgccggcaacggcagcttcagcagccccagcagcagccacctgcccagcgagaacgagaagcagcagcagatccagcccaaggcctacaaccccgagaccctgaccaccatccagacccaggacatcagccagcccggcaccttccccgccgtgagcgccagcagccagctgcccaacagcgacgccctgctgcagcaggccacccagttccagaccagagagacccagagcagagagatcctgcagagcgacggcaccgtggtgaacctgagccagctgaccgaggccagccagcagcagcagcagagccccctgcaggagcaggcccagaccctgcagcagcagatcagcagcaacatcttccccagccccaacagcgtgagccagctgcagaacaccatccagcagctgcaggccggcagcttcaccggcagcaccgccagcggcagcagcggcagcgtggacctggtgcagcaggtgctggaggcccagcagcagctgagcagcgtgctgttcagcgcccccgacggcaacgagaacgtgcaggagcagctgagcgccgacatcttccagcaggtgagccagatccagagcggcgtgagccccggcatgttcagcagcaccgagcccaccgtgcacaccagacccgacaacctgctgcccggcagagccgagagcgtgcacccccagagcgagaacaccctgagcaaccagcagcagcagcagcagcagcagcagcaggtgatggagagcagcgccgccatggtgatggagatgcagcagagcatctgccaggccgccgcccagatccagagcgagctgttccccagcaccgccagcgccaacggcaacctgcagcagagccccgtgtaccagcagaccagccacatgatgagcgccctgagcaccaacgaggacatgcagatgcagtgcgagctgttcagcagcccccccgccgtgagcggcaacgagaccagcaccaccaccacccagcaggtggccacccccggcaccaccatgttccagaccagcagcagcggcgacggcgaggagaccggcacccaggccaagcagatccagaacagcgtgttccagaccatggtgcagatgcagcacagcggcgacaaccagccccaggtgaacctgttcagcagcaccaagagcatgatgagcgtgcagaacagcggcacccagcagcagggcaacggcctgttccagcagggcaacgagatgatgagcctgcagagcggcaacttcctgcagcagagcagccacagccaggcccagctgttccacccccagaaccccatcgccgacgcccagaacctgagccaggagacccagggcagcctgttccacagccccaaccccatcgtgcacagccagaccagcaccaccagcagcgagcagatgcagccccccatgttccacagccagagcaccatcgccgtgctgcagggcagcagcgtgccccaggaccagcagagcaccaacatcttcctgagccagagccccatgaacaacctgcagaccaacaccgtggcccaggaggccttcttcgccgcccccaacagcatcagccccctgcagagcaccagcaacagcgagcagcaggccgccttccagcagcaggcccccatcagccacatccagacccccatgctgagccaggagcaggcccagcccccccagcagggcctgttccagccccaggtggccctgggcagcctgccccccaaccccatgccccagagccagcagggcaccatgttccagagccagcacagcatcgtggccatgcagagcaacagccccagccaggagcagcagcagcagcagcagcagcagcagcagcagcagcagcagcagcagcagagcatcctgttcagcaaccagaacaccatggccaccatggccagccccaagcagcccccccccaacatgatcttcaaccccaaccagaaccccatggccaaccaggagcagcagaaccagagcatcttccaccagcagagcaacatggcccccatgaaccaggagcagcagcccatgcagttccagagccagagcaccgtgagcagcctgcagaaccccggccccacccagagcgagagcagccagacccccctgttccacagcagcccccagatccagctggtgcagggcagccccagcagccaggagcagcaggtgaccctgttcctgagccccgccagcatgagcgccctgcagaccagcatcaaccagcaggacatgcagcagagccccctgtacagcccccagaacaacatgcccggcatccagggcgccaccagcagcccccagccccaggccaccctgttccacaacaccgccggcggcaccatgaaccagctgcagaacagccccggcagcagccagcagaccagcggcatgttcctgttcggcatccagaacaactgcagccagctgctgaccagcggccccgccaccctgcccgaccagctgatggccatcagccagcccggccagccccagaacgagggccagccccccgtgaccaccctgctgagccagcagatgcccgagaacagccccctggccagcagcatcaacaccaaccagaacatcgagaagatcgacctgctggtgagcctgcagaaccagggcaacaacctgaccggcagcttctag

SEQ ID NO: 11883 - DNA, 4368 bp, synthetic construct; identical to SEQ ID NO: 11881
  misc_feature 1..4368: note = Description of Artificial Sequence: Synthetic coding sequence
  source 1..4368: mol_type = other DNA

SEQ ID NO: 11884 - DNA, 4596 bp, synthetic construct
  misc_feature 1..4596: note = Description of Artificial Sequence: Synthetic coding sequence
  source 1..4596: mol_type = other DNA
atgcccagcgacttcatcagcctgctgagcgccgacctggacctggagagccccaagagcctgtacagcagagagagcgtgtacgacctgctgcccaaggagctgcagctgccccccagcagagagaccagcgtggccagcatgagccagaccagcggcggcgaggccggcagccccccccccgccgtggtggccgccgacgccagcagcgcccccagcagcagcagcatgggcggcgcctgcagcagcttcaccaccagcagcagccccaccatctacagcaccagcgtgaccgacagcaaggccatgcaggtggagagctgcagcagcgccgtgggcgtgagcaacagaggcgtgagcgagaagcagctgaccagcaacaccgtgcagcagcaccccagcacccccaagagacacaccgtgctgtacatcagccccccccccgaggacctgctggacaacagcagaatgagctgccaggacgagggctgcggcctggagagcgagcagagctgcagcatgtggatggaggacagccccagcaacttcagcaacatgagcaccagcagctacaacgacaacaccgaggtgcccagaaagagcagaaagagaaaccccaagcagagacccggcgtgaagagaagagactgcgaggagagcaacatggacatcttcgacgccgacagcgccaaggccccccactacgtgctgagccagctgaccaccgacaacaagggcaacagcaaggccggcaacggcaccctggagaaccagaagggcaccggcgtgaagaagagccccatgctgtgcggccagtaccccgtgaagagcgagggcaaggagctgaagatcgtggtgcagcccgagacccagcacagagccagatacctgaccgagggcagcagaggcagcgtgaaggacagaacccagcagggcttccccaccgtgaagctggagggccacaacgagcccgtggtgctgcaggtgttcgtgggcaacgacagcggcagagtgaagccccacggcttctaccaggcctgcagagtgaccggcagaaacaccaccccctgcaaggaggtggacatcgagggcaccaccgtgatcgaggtgggcctggaccccagcaacaacatgaccctggccgtggactgcgtgggcatcctgaagctgagaaacgccgacgtggaggccagaatcggcatcgccggcagcaagaagaagagcaccagagccagactggtgttcagagtgaacatcatgagaaaggacggcagcaccctgaccctgcagacccccagcagccccatcctgtgcacccagcccgccggcgtgcccgagatcctgaagaagagcctgcacagctgcagcgtgaagggcgaggaggaggtgttcctgatcggcaagaacttcctgaagggcaccaaggtgatcttccaggagaacgtgagcgacgagaacagctggaagagcgaggccgagatcgacatggagctgttccaccagaaccacctgatcgtgaaggtgcccccctaccacgaccagcacatcaccctgcccgtgagcgtgggcatctacgtggtgaccaacgccggcagaagccacgacgtgcagcccttcacctacacccccgaccccgccgccgccggcgccctgaacgtgaacgtgaagaaggagatcagcagccccgccagaccctgcagcttcgaggaggccatgaaggccatgaagaccaccggctgcaacctggacaaggtgaacatcatccccaacgccctgatgacccccctgatccccagcagcatgatcaagagcgaggacgtgacccccatggaggtgaccgccgagaagagaagcagcaccatcttcaagaccaccaagagcgtgggcagcacccagcagaccctggagaacatcagcaacatcgccggcaacggcagcttcagcagccccagcagcagccacctgcccagcgagaacgagaagcagcagcagatccagcccaaggcctacaaccccgagaccctgaccaccatccagacccaggacatcagccagcccggcaccttccccgccgtgagcgccagcagccagctgcccaacagcgacgccctgctgcagcaggccacccagttccagaccagagagacccagagcagagagatcctgcagagcgacggcaccgtggtgaacctgagccagctgaccgaggccagccagcagcagcagcagagccccctgcaggagcaggcccagaccctgcagcagcagatcagcagcaacatcttccccagccccaacagcgtgagccagctgcagaacaccatccagcagctgcaggccggcagcttcaccggcagcaccgccagcggcagcagcggcagcgtggacctggtgcagcaggtgctggaggcccagcagcagctgagcagcgtgctgttcagcgcccccgacggcaacgagaacgtgcaggagcagctgagcgccgacatcttccagcaggtgagccagatccagagcggcgtgagccccggcatgttcagcagcaccgagcccaccgtgcacaccagacccgacaacctgctgcccggcagagccgagagcgtgcacccccagagcgagaacaccctgagcaaccagcagcagcagcagcagcagcagcagcaggtgatggagagcagcgccgccatggtgatggagatgcagcagagcatctgccaggccgccgcccagatccagagcgagctgttccccagcaccgccagcgccaacggcaacctgcagcagagccccgtgtaccagcagaccagccacatgatgagcgccctgagcaccaacgaggacatgcagatgcagtgcgagctgttcagcagcccccccgccgtgagcggcaacgagaccagcaccaccaccacccagcaggtggccacccccggcaccaccatgttccagaccagcagcagcggcgacggcgaggagaccggcacccaggccaagcagatccagaacagcgtgttccagaccatggtgcagatgcagcacagcggcgacaaccagccccaggtgaacctgttcagcagcaccaagagcatgatgagcgtgcagaacagcggcacccagcagcagggcaacggcctgttccagcagggcaacgagatgatgagcctgcagagcggcaacttcctgcagcagagcagccacagccaggcccagctgttccacccccagaaccccatcgccgacgcccagaacctgagccaggagacccagggcagcctgttccacagccccaaccccatcgtgcacagccagaccagcaccaccagcagcgagcagatgcagccccccatgttccacagccagagcaccatcgccgtgctgcagggcagcagcgtgccccaggaccagcagagcaccaacatcttcctgagccagagccccatgaacaacctgcagaccaacaccgtggcccaggaggccttcttcgccgcccccaacagcatcagccccctgcagagcaccagcaacagcgagcagcaggccgccttccagcagcaggcccccatcagccacatccagacccccatgctgagccaggagcaggcccagcccccccagcagggcctgttccagccccaggtggccctgggcagcctgccccccaaccccatgccccagagccagcagggcaccatgttccagagccagcacagcatcgtggccatgcagagcaacagccccagccaggagcagcagcagcagcagcagcagcagcagcagcagcagcagcagcagcagcagagcatcctgttcagcaaccagaacaccatggccaccatggccagccccaagcagcccccccccaacatgatcttcaaccccaaccagaaccccatggccaaccaggagcagcagaaccagagcatcttccaccagcagagcaacatggcccccatgaaccaggagcagcagcccatgcagttccagagccagagcaccgtgagcagcctgcagaaccccggccccacccagagcgagagcagccagacccccctgttccacagcagcccccagatccagctggtgcagggcagccccagcagccaggagcagcaggtgaccctgttcctgagccccgccagcatgagcgccctgcagaccagcatcaaccagcaggacatgcagcagagccccctgtacagcccccagaacaacatgcccggcatccagggcgccaccagcagcccccagccccaggccaccctgttccacaacaccgccggcggcaccatgaaccagctgcagaacagccccggcagcagccagcagaccagcggcatgttcctgttcggcatccagaacaactgcagccagctgctgaccagcggccccgccaccctgcccgaccagctgatggccatcagccagcccggccagccccagaacgagggccagccccccgtgaccaccctgctgagccagcagatgcccgagaacagccccctggccagcagcatcaacaccaaccagaacatcgagaagatcgacctgctggtgagcctgcagaaccagggcaacaacctgaccggcagcttctag

SEQ ID NO: 11885 - DNA, 4368 bp, synthetic construct; identical to SEQ ID NO: 11881
  misc_feature 1..4368: note = Description of Artificial Sequence: Synthetic coding sequence
  source 1..4368: mol_type = other DNA

SEQ ID NO: 11886 - DNA, 4647 bp, synthetic construct; identical to SEQ ID NO: 11882
  misc_feature 1..4647: note = Description of Artificial Sequence: Synthetic coding sequence
  source 1..4647: mol_type = other DNA

SEQ ID NO: 11887 - DNA, 4650 bp, synthetic construct
  misc_feature 1..4650: note = Description of Artificial Sequence: Synthetic coding sequence
  source 1..4650: mol_type = other DNA
atgcccagcgacttcatcagcctgctgagcgccgacctggacctggagagccccaagagcctgtacagcagagacagcctgaagctgcaccccagccagaacttccacagagccggcctgctggaggagagcgtgtacgacctgctgcccaaggagctgcagctgccccccagcagagagaccagcgtggccagcatgagccagaccagcggcggcgaggccggcagccccccccccgccgtggtggccgccgacgccagcagcgcccccagcagcagcagcatgggcggcgcctgcagcagcttcaccaccagcagcagccccaccatctacagcaccagcgtgaccgacagcaaggccatgcaggtggagagctgcagcagcgccgtgggcgtgagcaacagaggcgtgagcgagaagcagctgaccagcaacaccgtgcagcagcaccccagcacccccaagagacacaccgtgctgtacatcagccccccccccgaggacctgctggacaacagcagaatgagctgccaggacgagggctgcggcctggagagcgagcagagctgcagcatgtggatggaggacagccccagcaacttcagcaacatgagcaccagcagctacaacgacaacaccgaggtgcccagaaagagcagaaagagaaaccccaagcagagacccggcgtgaagagaagagactgcgaggagagcaacatggacatcttcgacgccgacagcgccaaggccccccactacgtgctgagccagctgaccaccgacaacaagggcaacagcaaggccggcaacggcaccctggagaaccagaagggcaccggcgtgaagaagagccccatgctgtgcggccagtaccccgtgaagagcgagggcaaggagctgaagatcgtggtgcagcccgagacccagcacagagccagatacctgaccgagggcagcagaggcagcgtgaaggacagaacccagcagggcttccccaccgtgaagctggagggccacaacgagcccgtggtgctgcaggtgttcgtgggcaacgacagcggcagagtgaagccccacggcttctaccaggcctgcagagtgaccggcagaaacaccaccccctgcaaggaggtggacatcgagggcaccaccgtgatcgaggtgggcctggaccccagcaacaacatgaccctggccgtggactgcgtgggcatcctgaagctgagaaacgccgacgtggaggccagaatcggcatcgccggcagcaagaagaagagcaccagagccagactggtgttcagagtgaacatcatgagaaaggacggcagcaccctgaccctgcagacccccagcagccccatcctgtgcacccagcccgccggcgtgcccgagatcctgaagaagagcctgcacagctgcagcgtgaagggcgaggaggaggtgttcctgatcggcaagaacttcctgaagggcaccaaggtgatcttccaggagaacgtgagcgacgagaacagctggaagagcgaggccgagatcgacatggagctgttccaccagaaccacctgatcgtgaaggtgcccccctaccacgaccagcacatcaccctgcccgtgagcgtgggcatctacgtggtgaccaacgccggcagaagccacgacgtgcagcccttcacctacacccccgaccccgccgccgccggcgccctgaacgtgaacgtgaagaaggagatcagcagccccgccagaccctgcagcttcgaggaggccatgaaggccatgaagaccaccggctgcaacctggacaaggtgaacatcatccccaacgccctgatgacccccctgatccccagcagcatgatcaagagcgaggacgtgacccccatggaggtgaccgccgagaagagaagcagcaccatcttcaagaccaccaagagcgtgggcagcacccagcagaccctggagaacatcagcaacatcgccggcaacggcagcttcagcagccccagcagcagccacctgcccagcgagaacgagaagcagcagcagatccagcccaaggcctacaaccccgagaccctgaccaccatccagacccaggacatcagccagcccggcaccttccccgccgtgagcgccagcagccagctgcccaacagcgacgccctgctgcagcaggccacccagttccagaccagagagacccagagcagagagatcctgcagagcgacggcaccgtggtgaacctgagccagctgaccgaggccagccagcagcagcagcagagccccctgcaggagcaggcccagaccctgcagcagcagatcagcagcaacatcttccccagccccaacagcgtgagccagctgcagaacaccatccagcagctgcaggccggcagcttcaccggcagcaccgccagcggcagcagcggcagcgtggacctggtgcagcaggtgctggaggcccagcagcagctgagcagcgtgctgttcagcgcccccgacggcaacgagaacgtgcaggagcagctgagcgccgacatcttccagcaggtgagccagatccagagcggcgtgagccccggcatgttcagcagcaccgagcccaccgtgcacaccagacccgacaacctgctgcccggcagagccgagagcgtgcacccccagagcgagaacaccctgagcaaccagcagcagcagcagcagcagcagcagcaggtgatggagagcagcgccgccatggtgatggagatgcagcagagcatctgccaggccgccgcccagatccagagcgagctgttccccagcaccgccagcgccaacggcaacctgcagcagagccccgtgtaccagcagaccagccacatgatgagcgccctgagcaccaacgaggacatgcagatgcagtgcgagctgttcagcagcccccccgccgtgagcggcaacgagaccagcaccaccaccacccagcaggtggccacccccggcaccaccatgttccagaccagcagcagcggcgacggcgaggagaccggcacccaggccaagcagatccagaacagcgtgttccagaccatggtgcagatgcagcacagcggcgacaaccagccccaggtgaacctgttcagcagcaccaagagcatgatgagcgtgcagaacagcggcacccagcagcagggcaacggcctgttccagcagggcaacgagatgatgagcctgcagagcggcaacttcctgcagcagagcagccacagccaggcccagctgttccacccccagaaccccatcgccgacgcccagaacctgagccaggagacccagggcagcctgttccacagccccaaccccatcgtgcacagccagaccagcaccaccagcagcgagcagatgcagccccccatgttccacagccagagcaccatcgccgtgctgcagggcagcagcgtgccccaggaccagcagagcaccaacatcttcctgagccagagccccatgaacaacctgcagaccaacaccgtggcccaggaggccttcttcgccgcccccaacagcatcagccccctgcagagcaccagcaacagcgagcagcaggccgccttccagcagcaggcccccatcagccacatccagacccccatgctgagccaggagcaggcccagcccccccagcagggcctgttccagccccaggtggccctgggcagcctgccccccaaccccatgccccagagccagcagggcaccatgttccagagccagcacagcatcgtggccatgcagagcaacagccccagccaggagcagcagcagcagcagcagcagcagcagcagcagcagcagcagcagcagcagagcatcctgttcagcaaccagaacaccatggccaccatggccagccccaagcagcccccccccaacatgatcttcaaccccaaccagaaccccatggccaaccaggagcagcagaaccagagcatcttccaccagcagagcaacatggcccccatgaaccaggagcagcagcccatgcagttccagagccagagcaccgtgagcagcctgcagaaccccggccccacccagagcgagagcagccagacccccctgttccacagcagcccccagatccagctggtgcagggcagccccagcagccaggagcagcaggtgaccctgttcctgagccccgccagcatgagcgccctgcagaccagcatcaaccagcaggacatgcagcagagccccctgtacagcccccagaacaacatgcccggcatccagggcgccaccagcagcccccagccccaggccaccctgttccacaacaccgccggcggcaccatgaaccagctgcagaacagccccggcagcagccagcagaccagcggcatgttcctgttcggcatccagaacaactgcagccagctgctgaccagcggccccgccaccctgcccgaccagctgatggccatcagccagcccggccagccccagaacgagggccagccccccgtgaccaccctgctgagccagcagatgcccgagaacagccccctggccagcagcatcaacaccaaccagaacatcgagaagatcgacctgctggtgagcctgcagaaccagggcaacaacctgaccggcagcttctag

SEQ ID NO: 11888 - DNA, 2151 bp, synthetic construct
  misc_feature 1..2151: note = Description of Artificial Sequence: Synthetic coding sequence
  source 1..2151: mol_type = other DNA
atgcccagcaccagcttccccgtgcccagcaagttccccctgggccccgccgccgccgtgttcggcagaggcgagaccctgggccccgcccccagagccggcggcaccatgaagagcgccgaggaggagcactacggctacgccagcagcaacgtgagccccgccctgcccctgcccaccgcccacagcaccctgcccgccccctgccacaacctgcagaccagcacccccggcatcatcccccccgccgaccaccccagcggctacggcgccgccctggacggcggccccgccggctacttcctgagcagcggccacaccagacccgacggcgcccccgccctggagagccccagaatcgagatcaccagctgcctgggcctgtaccacaacaacaaccagttcttccacgacgtggaggtggaggacgtgctgcccagcagcaagagaagccccagcaccgccaccctgagcctgcccagcctggaggcctacagagaccccagctgcctgagccccgccagcagcctgagcagcagaagctgcaacagcgaggccagcagctacgagagcaactacagctacccctacgccagcccccagaccagcccctggcagagcccctgcgtgagccccaagaccaccgaccccgaggagggcttccccagaggcctgggcgcctgcaccctgctgggcagccccagacacagccccagcaccagccccagagccagcgtgaccgaggagagctggctgggcgccagaagcagcagacccgccagcccctgcaacaagagaaagtacagcctgaacggcagacagcccccctacagcccccaccacagccccacccccagcccccacggcagccccagagtgagcgtgaccgacgacagctggctgggcaacaccacccagtacaccagcagcgccatcgtggccgccatcaacgccctgaccaccgacagcagcctggacctgggcgacggcgtgcccgtgaagagcagaaagaccaccctggagcagccccccagcgtggccctgaaggtggagcccgtgggcgaggacctgggcagcccccccccccccgccgacttcgcccccgaggactacagcagcttccagcacatcagaaagggcggcttctgcgaccagtacctggccgtgccccagcacccctaccagtgggccaagcccaagcccctgagccccaccagctacatgagccccaccctgcccgccctggactggcagctgcccagccacagcggcccctacgagctgagaatcgaggtgcagcccaagagccaccacagagcccactacgagaccgagggcagcagaggcgccgtgaaggccagcgccggcggccaccccatcgtgcagctgcacggctacctggagaacgagcccctgatgctgcagctgttcatcggcaccgccgacgacagactgctgagaccccacgccttctaccaggtgcacagaatcaccggcaagaccgtgagcaccaccagccacgaggccatcctgagcaacaccaaggtgctggagatccccctgctgcccgagaacagcatgagagccgtgatcgactgcgccggcatcctgaagctgagaaacagcgacatcgagctgagaaagggcgagaccgacatcggcagaaagaacaccagagtgagactggtgttcagagtgcacgtgccccagcccagcggcagaaccctgagcctgcaggtggccagcaaccccatcgagtgcagccagagaagcgcccaggagctgcccctggtggagaagcagagcaccgacagctaccccgtggtgggcggcaagaagatggtgctgagcggccacaacttcctgcaggacagcaaggtgatcttcgtggagaaggcccccgacggccaccacgtgtgggagatggaggccaagaccgacagagacctgtgcaagcccaacagcctggtggtggagatcccccccttcagaaaccagagaatcaccagccccgtgcacgtgagcttctacgtgtgcaacggcaagagaaagagaagccagtaccagagattcacctacctgcccgccaacggcaacgccatcttcctgaccgtgagcagagagcacgagagagtgggctgcttcttctag

SEQ ID NO: 11889 - DNA, 2478 bp, synthetic construct
  misc_feature 1..2478: note = Description of Artificial Sequence: Synthetic coding sequence
  source 1..2478: mol_type = other DNA
atgcccagcaccagcttccccgtgcccagcaagttccccctgggccccgccgccgccgtgttcggcagaggcgagaccctgggccccgcccccagagccggcggcaccatgaagagcgccgaggaggagcactacggctacgccagcagcaacgtgagccccgccctgcccctgcccaccgcccacagcaccctgcccgccccctgccacaacctgcagaccagcacccccggcatcatcccccccgccgaccaccccagcggctacggcgccgccctggacggcggccccgccggctacttcctgagcagcggccacaccagacccgacggcgcccccgccctggagagccccagaatcgagatcaccagctgcctgggcctgtaccacaacaacaaccagttcttccacgacgtggaggtggaggacgtgctgcccagcagcaagagaagccccagcaccgccaccctgagcctgcccagcctggaggcctacagagaccccagctgcctgagccccgccagcagcctgagcagcagaagctgcaacagcgaggccagcagctacgagagcaactacagctacccctacgccagcccccagaccagcccctggcagagcccctgcgtgagccccaagaccaccgaccccgaggagggcttccccagaggcctgggcgcctgcaccctgctgggcagccccagacacagccccagcaccagccccagagccagcgtgaccgaggagagctggctgggcgccagaagcagcagacccgccagcccctgcaacaagagaaagtacagcctgaacggcagacagcccccctacagcccccaccacagccccacccccagcccccacggcagccccagagtgagcgtgaccgacgacagctggctgggcaacaccacccagtacaccagcagcgccatcgtggccgccatcaacgccctgaccaccgacagcagcctggacctgggcgacggcgtgcccgtgaagagcagaaagaccaccctggagcagccccccagcgtggccctgaaggtggagcccgtgggcgaggacctgggcagcccccccccccccgccgacttcgcccccgaggactacagcagcttccagcacatcagaaagggcggcttctgcgaccagtacctggccgtgccccagcacccctaccagtgggccaagcccaagcccctgagccccaccagctacatgagccccaccctgcccgccctggactggcagctgcccagccacagcggcccctacgagctgagaatcgaggtgcagcccaagagccaccacagagcccactacgagaccgagggcagcagaggcgccgtgaaggccagcgccggcggccaccccatcgtgcagctgcacggctacctggagaacgagcccctgatgctgcagctgttcatcggcaccgccgacgacagactgctgagaccccacgccttctaccaggtgcacagaatcaccggcaagaccgtgagcaccaccagccacgaggccatcctgagcaacaccaaggtgctggagatccccctgctgcccgagaacagcatgagagccgtgatcgactgcgccggcatcctgaagctgagaaacagcgacatcgagctgagaaagggcgagaccgacatcggcagaaagaacaccagagtgagactggtgttcagagtgcacgtgccccagcccagcggcagaaccctgagcctgcaggtggccagcaaccccatcgagtgcagccagagaagcgcccaggagctgcccctggtggagaagcagagcaccgacagctaccccgtggtgggcggcaagaagatggtgctgagcggccacaacttcctgcaggacagcaaggtgatcttcgtggagaaggcccccgacggccaccacgtgtgggagatggaggccaagaccgacagagacctgtgcaagcccaacagcctggtggtggagatcccccccttcagaaaccagagaatcaccagccccgtgcacgtgagcttctacgtgtgcaacggcaagagaaagagaagccagtaccagagattcacctacctgcccgccaacgtgcccatcatcaagaccgagcccaccgacgactacgagcccgcccccacctgcggccccgtgagccagggcctgagccccctgcccagaccctactacagccagcagctggccatgccccccgaccccagcagctgcctggtggccggcttccccccctgcccccagagaagcaccctgatgcccgccgcccccggcgtgagccccaagctgcacgacctgagccccgccgcctacaccaagggcgtggccagccccggccactgccacctgggcctgccccagcccgccggcgaggcccccgccgtgcaggacgtgcccagacccgtggccacccaccccggcagccccggccagcccccccccgccctgctgccccagcagtag

SEQ ID NO: 11890 - DNA, 2832 bp, synthetic construct
  misc_feature 1..2832: note = Description of Artificial Sequence: Synthetic coding sequence
  source 1..2832: mol_type = other DNA
atgcccagcaccagcttccccgtgcccagcaagttccccctgggccccgccgccgccgtgttcggcagaggcgagaccctgggccccgcccccagagccggcggcaccatgaagagcgccgaggaggagcactacggctacgccagcagcaacgtgagccccgccctgcccctgcccaccgcccacagcaccctgcccgccccctgccacaacctgcagaccagcacccccggcatcatcccccccgccgaccaccccagcggctacggcgccgccctggacggcggccccgccggctacttcctgagcagcggccacaccagacccgacggcgcccccgccctggagagccccagaatcgagatcaccagctgcctgggcctgtaccacaacaacaaccagttcttccacgacgtggaggtggaggacgtgctgcccagcagcaagagaagccccagcaccgccaccctgagcctgcccagcctggaggcctacagagaccccagctgcctgagccccgccagcagcctgagcagcagaagctgcaacagcgaggccagcagctacgagagcaactacagctacccctacgccagcccccagaccagcccctggcagagcccctgcgtgagccccaagaccaccgaccccgaggagggcttccccagaggcctgggcgcctgcaccctgctgggcagccccagacacagccccagcaccagccccagagccagcgtgaccgaggagagctggctgggcgccagaagcagcagacccgccagcccctgcaacaagagaaagtacagcctgaacggcagacagcccccctacagcccccaccacagccccacccccagcccccacggcagccccagagtgagcgtgaccgacgacagctggctgggcaacaccacccagtacaccagcagcgccatcgtggccgccatcaacgccctgaccaccgacagcagcctggacctgggcgacggcgtgcccgtgaagagcagaaagaccaccctggagcagccccccagcgtggccctgaaggtggagcccgtgggcgaggacctgggcagcccccccccccccgccgacttcgcccccgaggactacagcagcttccagcacatcagaaagggcggcttctgcgaccagtacctggccgtgccccagcacccctaccagtgggccaagcccaagcccctgagccccaccagctacatgagccccaccctgcccgccctggactggcagctgcccagccacagcggcccctacgagctgagaatcgaggtgcagcccaagagccaccacagagcccactacgagaccgagggcagcagaggcgccgtgaaggccagcgccggcggccaccccatcgtgcagctgcacggctacctggagaacgagcccctgatgctgcagctgttcatcggcaccgccgacgacagactgctgagaccccacgccttctaccaggtgcacagaatcaccggcaagaccgtgagcaccaccagccacgaggccatcctgagcaacaccaaggtgctggagatccccctgctgcccgagaacagcatgagagccgtgatcgactgcgccggcatcctgaagctgagaaacagcgacatcgagctgagaaagggcgagaccgacatcggcagaaagaacaccagagtgagactggtgttcagagtgcacgtgccccagcccagcggcagaaccctgagcctgcaggtggccagcaaccccatcgagtgcagccagagaagcgcccaggagctgcccctggtggagaagcagagcaccgacagctaccccgtggtgggcggcaagaagatggtgctgagcggccacaacttcctgcaggacagcaaggtgatcttcgtggagaaggcccccgacggccaccacgtgtgggagatggaggccaagaccgacagagacctgtgcaagcccaacagcctggtggtggagatcccccccttcagaaaccagagaatcaccagccccgtgcacgtgagcttctacgtgtgcaacggcaagagaaagagaagccagtaccagagattcacctacctgcccgccaacgtgcccatcatcaagaccgagcccaccgacgactacgagcccgcccccacctgcggccccgtgagccagggcctgagccccctgcccagaccctactacagccagcagctggccatgccccccgaccccagcagctgcctggtggccggcttccccccctgcccccagagaagcaccctgatgcccgccgcccccggcgtgagccccaagctgcacgacctgagccccgccgcctacaccaagggcgtggccagccccggccactgccacctgggcctgccccagcccgccggcgaggcccccgccgtgcaggacgtgcccagacccgtggccacccaccccggcagccccggccagcccccccccgccctgctgccccagcaggtgagcgccccccccagcagcagctgcccccccggcctggagcacagcctgtgccccagcagccccagcccccccctgccccccgccacccaggagcccacctgcctgcagccctgcagccccgcctgcccccccgccaccggcagaccccagcacctgcccagcaccgtgagaagagacgagagccccaccgccggccccagactgctgcccgaggtgcacgaggacggcagccccaacctggcccccatccccgtgaccgtgaagagagagcccgaggagctggaccagctgtacctggacgacgtgaacgagatcatcagaaacgacctgagcagcaccagcacccacagctag

SEQ ID NO: 11891 - DNA, 2793 bp, synthetic construct
  misc_feature 1..2793: note = Description of Artificial Sequence: Synthetic coding sequence
  source 1..2793: mol_type = other DNA
atgaccggcctggaggaccaggagttcgacttcgagttcctgttcgagttcaaccagagagacgagggcgccgccgccgccgcccccgagcactacggctacgccagcagcaacgtgagccccgccctgcccctgcccaccgcccacagcaccctgcccgccccctgccacaacctgcagaccagcacccccggcatcatcccccccgccgaccaccccagcggctacggcgccgccctggacggcggccccgccggctacttcctgagcagcggccacaccagacccgacggcgcccccgccctggagagccccagaatcgagatcaccagctgcctgggcctgtaccacaacaacaaccagttcttccacgacgtggaggtggaggacgtgctgcccagcagcaagagaagccccagcaccgccaccctgagcctgcccagcctggaggcctacagagaccccagctgcctgagccccgccagcagcctgagcagcagaagctgcaacagcgaggccagcagctacgagagcaactacagctacccctacgccagcccccagaccagcccctggcagagcccctgcgtgagccccaagaccaccgaccccgaggagggcttccccagaggcctgggcgcctgcaccctgctgggcagccccagacacagccccagcaccagccccagagccagcgtgaccgaggagagctggctgggcgccagaagcagcagacccgccagcccctgcaacaagagaaagtacagcctgaacggcagacagcccccctacagcccccaccacagccccacccccagcccccacggcagccccagagtgagcgtgaccgacgacagctggctgggcaacaccacccagtacaccagcagcgccatcgtggccgccatcaacgccctgaccaccgacagcagcctggacctgggcgacggcgtgcccgtgaagagcagaaagaccaccctggagcagccccccagcgtggccctgaaggtggagcccgtgggcgaggacctgggcagcccccccccccccgccgacttcgcccccgaggactacagcagcttccagcacatcagaaagggcggcttctgcgaccagtacctggccgtgccccagcacccctaccagtgggccaagcccaagcccctgagccccaccagctacatgagccccaccctgcccgccctggactggcagctgcccagccacagcggcccctacgagctgagaatcgaggtgcagcccaagagccaccacagagcccactacgagaccgagggcagcagaggcgccgtgaaggccagcgccggcggccaccccatcgtgcagctgcacggctacctggagaacgagcccctgatgctgcagctgttcatcggcaccgccgacgacagactgctgagaccccacgccttctaccaggtgcacagaatcaccggcaagaccgtgagcaccaccagccacgaggccatcctgagcaacaccaaggtgctggagatccccctgctgcccgagaacagcatgagagccgtgatcgactgcgccggcatcctgaagctgagaaacagcgacatcgagctgagaaagggcgagaccgacatcggcagaaagaacaccagagtgagactggtgttcagagtgcacgtgccccagcccagcggcagaaccctgagcctgcaggtggccagcaaccccatcgagtgcagccagagaagcgcccaggagctgcccctggtggagaagcagagcaccgacagctaccccgtggtgggcggcaagaagatggtgctgagcggccacaacttcctgcaggacagcaaggtgatcttcgtggagaaggcccccgacggccaccacgtgtgggagatggaggccaagaccgacagagacctgtgcaagcccaacagcctggtggtggagatcccccccttcagaaaccagagaatcaccagccccgtgcacgtgagcttctacgtgtgcaacggcaagagaaagagaagccagtaccagagattcacctacctgcccgccaacgtgcccatcatcaagaccgagcccaccgacgactacgagcccgcccccacctgcggccccgtgagccagggcctgagccccctgcccagaccctactacagccagcagctggccatgccccccgaccccagcagctgcctggtggccggcttccccccctgcccccagagaagcaccctgatgcccgccgcccccggcgtgagccccaagctgcacgacctgagccccgccgcctacaccaagggcgtggccagccccggccactgccacctgggcctgccccagcccgccggcgaggcccccgccgtgcaggacgtgcccagacccgtggccacccaccccggcagccccggccagcccccccccgccctgctgccccagcaggtgagcgccccccccagcagcagctgcccccccggcctggagcacagcctgtgccccagcagccccagcccccccctgccccccgccacccaggagcccacctgcctgcagccctgcagccccgcctgcccccccgccaccggcagaccccagcacctgcccagcaccgtgagaagagacgagagccccaccgccggccccagactgctgcccgaggtgcacgaggacggcagccccaacctggcccccatccccgtgaccgtgaagagagagcccgaggagctggaccagctgtacctggacgacgtgaacgagatcatcagaaacgacctgagcagcaccagcacccacagctag

SEQ ID NO: 11892 - DNA, 1062 bp, synthetic construct
  misc_feature 1..1062: note = Description of Artificial Sequence: Synthetic coding sequence
  source 1..1062: mol_type = other DNA
atgctgcagctgttcatcggcaccgccgacgacagactgctgagaccccacgccttctaccaggtgcacagaatcaccggcaagaccgtgagcaccaccagccacgaggccatcctgagcaacaccaaggtgctggagatccccctgctgcccgagaacagcatgagagccgtgatcgactgcgccggcatcctgaagctgagaaacagcgacatcgagctgagaaagggcgagaccgacatcggcagaaagaacaccagagtgagactggtgttcagagtgcacgtgccccagcccagcggcagaaccctgagcctgcaggtggccagcaaccccatcgagtgcagccagagaagcgcccaggagctgcccctggtggagaagcagagcaccgacagctaccccgtggtgggcggcaagaagatggtgctgagcggccacaacttcctgcaggacagcaaggtgatcttcgtggagaaggcccccgacggccaccacgtgtgggagatggaggccaagaccgacagagacctgtgcaagcccaacagcctggtggtggagatcccccccttcagaaaccagagaatcaccagccccgtgcacgtgagcttctacgtgtgcaacggcaagagaaagagaagccagtaccagagattcacctacctgcccgccaacgtgcccatcatcaagaccgagcccaccgacgactacgagcccgcccccacctgcggccccgtgagccagggcctgagccccctgcccagaccctactacagccagcagctggccatgccccccgaccccagcagctgcctggtggccggcttccccccctgcccccagagaagcaccctgatgcccgccgcccccggcgtgagccccaagctgcacgacctgagccccgccgcctacaccaagggcgtggccagccccggccactgccacctgggcctgccccagcccgccggcgaggcccccgccgtgcaggacgtgcccagacccgtggccacccaccccggcagccccggccagcccccccccgccctgctgccccagcagtag

SEQ ID NO: 11893 - DNA, 2724 bp, synthetic construct
  misc_feature 1..2724: note = Description of Artificial Sequence: Synthetic coding sequence
  source 1..2724: mol_type = other DNA
atgaagagcggcaccctggagcactacggctacgccagcagcaacgtgagccccgccctgcccctgcccaccgcccacagcaccctgcccgccccctgccacaacctgcagaccagcacccccggcatcatcccccccgccgaccaccccagcggctacggcgccgccctggacggcggccccgccggctacttcctgagcagcggccacaccagacccgacggcgcccccgccctggagagccccagaatcgagatcaccagctgcctgggcctgtaccacaacaacaaccagttcttccacgacgtggaggtggaggacgtgctgcccagcagcaagagaagccccagcaccgccaccctgagcctgcccagcctggaggcctacagagaccccagctgcctgagccccgccagcagcctgagcagcagaagctgcaacagcgaggccagcagctacgagagcaactacagctacccctacgccagcccccagaccagcccctggcagagcccctgcgtgagccccaagaccaccgaccccgaggagggcttccccagaggcctgggcgcctgcaccctgctgggcagccccagacacagccccagcaccagccccagagccagcgtgaccgaggagagctggctgggcgccagaagcagcagacccgccagcccctgcaacaagagaaagtacagcctgaacggcagacagcccccctacagcccccaccacagccccacccccagcccccacggcagccccagagtgagcgtgaccgacgacagctggctgggcaacaccacccagtacaccagcagcgccatcgtggccgccatcaacgccctgaccaccgacagcagcctggacctgggcgacggcgtgcccgtgaagagcagaaagaccaccctggagcagccccccagcgtggccctgaaggtggagcccgtgggcgaggacctgggcagcccccccccccccgccgacttcgcccccgaggactacagcagcttccagcacatcagaaagggcggcttctgcgaccagtacctggccgtgccccagcacccctaccagtgggccaagcccaagcccctgagccccaccagctacatgagccccaccctgcccgccctggactggcagctgcccagccacagcggcccctacgagctgagaatcgaggtgcagcccaagagccaccacagagcccactacgagaccgagggcagcagaggcgccgtgaaggccagcgccggcggccaccccatcgtgcagctgcacggctacctggagaacgagcccctgatgctgcagctgttcatcggcaccgccgacgacagactgctgagaccccacgccttctaccaggtgcacagaatcaccggcaagaccgtgagcaccaccagccacgaggccatcctgagcaacaccaaggtgctggagatccccctgctgcccgagaacagcatgagagccgtgatcgactgcgccggcatcctgaagctgagaaacagcgacatcgagctgagaaagggcgagaccgacatcggcagaaagaacaccagagtgagactggtgttcagagtgcacgtgccccagcccagcggcagaaccctgagcctgcaggtggccagcaaccccatcgagtgcagccagagaagcgcccaggagctgcccctggtggagaagcagagcaccgacagctaccccgtggtgggcggcaagaagatggtgctgagcggccacaacttcctgcaggacagcaaggtgatcttcgtggagaaggcccccgacggccaccacgtgtgggagatggaggccaagaccgacagagacctgtgcaagcccaacagcctggtggtggagatcccccccttcagaaaccagagaatcaccagccccgtgcacgtgagcttctacgtgtgcaacggcaagagaaagagaagccagtaccagagattcacctacctgcccgccaacgtgcccatcatcaagaccgagcccaccgacgactacgagcccgcccccacctgcggccccgtgagccagggcctgagccccctgcccagaccctactacagccagcagctggccatgccccccgaccccagcagctgcctggtggccggcttccccccctgcccccagagaagcaccctgatgcccgccgcccccggcgtgagccccaagctgcacgacctgagccccgccgcctacaccaagggcgtggccagccccggccactgccacctgggcctgccccagcccgccggcgaggcccccgccgtgcaggacgtgcccagacccgtggccacccaccccggcagccccggccagcccccccccgccctgctgccccagcaggtgagcgccccccccagcagcagctgcccccccggcctggagcacagcctgtgccccagcagccccagcccccccctgccccccgccacccaggagcccacctgcctgcagccctgcagccccgcctgcccccccgccaccggcagaccccagcacctgcccagcaccgtgagaagagacgagagccccaccgccggccccagactgctgcccgaggtgcacgaggacggcagccccaacctggcccccatccccgtgaccgtgaagagagagcccgaggagctggaccagctgtacctggacgacgtgaacgagatcatcagaaacgacctgagcagcaccagcacccacagctag

SEQ ID NO: 11894 - DNA, 2745 bp, synthetic construct
  misc_feature 1..2745: note = Description of Artificial Sequence: Synthetic coding sequence
  source 1..2745: mol_type = other DNA
atgaccggcctggaggaccaggagttcgacttcgagttcctgttcgagttcaaccagagagacgagggcgccgccgccgccgcccccgagcactacggctacgccagcagcaacgtgagccccgccctgcccctgcccaccgcccacagcaccctgcccgccccctgccacaacctgcagaccagcacccccggcatcatcccccccgccgaccaccccagcggctacggcgccgccctggacggcggccccgccggctacttcctgagcagcggccacaccagacccgacggcgcccccgccctggagagccccagaatcgagatcaccagctgcctgggcctgtaccacaacaacaaccagttcttccacgacgtggaggtggaggacgtgctgcccagcagcaagagaagccccagcaccgccaccctgagcctgcccagcctggaggcctacagagaccccagctgcctgagccccgccagcagcctgagcagcagaagctgcaacagcgaggccagcagctacgagagcaactacagctacccctacgccagcccccagaccagcccctggcagagcccctgcgtgagccccaagaccaccgaccccgaggagggcttccccagaggcctgggcgcctgcaccctgctgggcagccccagacacagccccagcaccagccccagagccagcgtgaccgaggagagctggctgggcgccagaagcagcagacccgccagcccctgcaacaagagaaagtacagcctgaacggcagacagcccccctacagcccccaccacagccccacccccagcccccacggcagccccagagtgagcgtgaccgacgacagctggctgggcaacaccacccagtacaccagcagcgccatcgtggccgccatcaacgccctgaccaccgacagcagcctggacctgggcgacggcgtgcccgtgaagagcagaaagaccaccctggagcagccccccagcgtggccctgaaggtggagcccgtgggcgaggacctgggcagcccccccccccccgccgacttcgcccccgaggactacagcagcttccagcacatcagaaagggcggcttctgcgaccagtacctggccgtgccccagcacccctaccagtgggccaagcccaagcccctgagccccaccagctacatgagccccaccctgcccgccctggactggcagctgcccagccacagcggcccctacgagctgagaatcgaggtgcagcccaagagccaccacagagcccactacgagaccgagggcagcagaggcgccgtgaaggccagcgccggcggccaccccatcgtgcagctgcacggctacctggagaacgagcccctgatgctgcagctgttcatcggcaccgccgacgacagactgctgagaccccacgccttctaccaggtgcacagaatcaccggcaagaccgtgagcaccaccagccacgaggccatcctgagcaacaccaaggtgctggagatccccctgctgcccgagaacagcatgagagccgtgatcgactgcgccggcatcctgaagctgagaaacagcgacatcgagctgagaaagggcgagaccgacatcggcagaaagaacaccagagtgagactggtgttcagagtgcacgtgccccagcccagcggcagaaccctgagcctgcaggtggccagcaaccccatcgagtgcagccagagaagcgcccaggagctgcccctggtggagaagcagagcaccgacagctaccccgtggtgggcggcaagaagatggtgctgagcggccacaacttcctgcaggacagcaaggtgatcttcgtggagaaggcccccgacggccaccacgtgtgggagatggaggccaagaccgacagagacctgtgcaagcccaacagcctggtggtggagatcccccccttcagaaaccagagaatcaccagccccgtgcacgtgagcttctacgtgtgcaacggcaagagaaagagaagccagtaccagagattcacctacctgcccgccaacgtgcccatcatcaagaccgagcccaccgacgactacgagcccgcccccacctgcggccccgtgagccagggcctgagccccctgcccagaccctactacagccagcagctggccatgccccccgaccccagcagctgcctggtggccggcttccccccctgcccccagagaagcaccctgatgcccgccgcccccggcgtgagccccaagctgcacgacctgagccccgccgcctacaccaagggcgtggccagccccggccactgccacctgggcctgccccagcccgccggcgaggcccccgccgtgcaggacgtgcccagacccgtggccacccaccccggcagccccggccagcccccccccgccctgctgccccagcaggtgagcgccccccccagcagcagctgcccccccggcctggagcacagcctgtgccccagcagccccagcccccccctgccccccgccacccaggagcccacctgcctgcagccctgcagccccgcctgcccccccgccaccggcagaccccagcacctgcccagcaccgtgagaagagacgagagccccaccgccggccccagactgctgcccgaggtgcacgaggacggcagccccaacctggcccccatccccgtgaccgtgaagagagagcccgaggagctggaccagctgtacctggacgactag

SEQ ID NO: 11895 - DNA, 2142 bp, synthetic construct
  misc_feature 1..2142: note = Description of Artificial Sequence: Synthetic coding sequence
  source 1..2142: mol_type = other DNA
atgcccagcaccagcttccccgtgcccagcaagttccccctgggccccgccgccgccgtgttcggcagaggcgagaccctgggccccgcccccagagccggcggcaccatgaagagcgccgaggaggagcactacggctacgccagcagcaacgtgagccccgccctgcccctgcccaccgcccacagcaccctgcccgccccctgccacaacctgcagaccagcacccccggcatcatcccccccgccgaccaccccagcggctacggcgccgccctggacggcggccccgccggctacttcctgagcagcggccacaccagacccgacggcgcccccgccctggagagccccagaatcgagatcaccagctgcctgggcctgtaccacaacaacaaccagttcttccacgacgtggaggtggaggacgtgctgcccagcagcaagagaagccccagcaccgccaccctgagcctgcccagcctggaggcctacagagaccccagctgcctgagccccgccagcagcctgagcagcagaagctgcaacagcgaggccagcagctacgagagcaactacagctacccctacgccagcccccagaccagcccctggcagagcccctgcgtgagccccaagaccaccgaccccgaggagggcttccccagaggcctgggcgcctgcaccctgctgggcagccccagacacagccccagcaccagccccagagccagcgtgaccgaggagagctggctgggcgccagaagcagcagacccgccagcccctgcaacaagagaaagtacagcctgaacggcagacagcccccctacagcccccaccacagccccacccccagcccccacggcagccccagagtgagcgtgaccgacgacagctggctgggcaacaccacccagtacaccagcagcgccatcgtggccgccatcaacgccctgaccaccgacagcagcctggacctgggcgacggcgtgcccgtgaagagcagaaagaccaccctggagcagccccccagcgtggccctgaaggtggagcccgtgggcgaggacctgggcagcccccccccccccgccgacttcgcccccgaggactacagcagcttccagcacatcagaaagggcggcttctgcgaccagtacctggccgtgccccagcacccctaccagtgggccaagcccaagcccctgagccccaccagctacatgagccccaccctgcccgccctggactggcagctgcccagccacagcggcccctacgagctgagaatcgaggtgcagcccaagagccaccacagagcccactacgagaccgagggcagcagaggcgccgtgaaggccagcgccggcggccaccccatcgtgcagctgcacggctacctggagaacgagcccctgatgctgcagctgttcatcggcaccgccgacgacagactgctgagaccccacgccttctaccaggtgcacagaatcaccggcaagaccgtgagcaccaccagccacgaggccatcctgagcaacaccaaggtgctggagatccccctgctgcccgagaacagcatgagagccgtgatcgactgcgccggcatcctgaagctgagaaacagcgacatcgagctgagaaagggcgagaccgacatcggcagaaagaacaccagagtgagactggtgttcagagtgcacgtgccccagcccagcggcagaaccctgagcctgcaggtggccagcaaccccatcgagtgcagccagagaagcgcccaggagctgcccctggtggagaagcagagcaccgacagctaccccgtggtgggcggcaagaagatggtgctgagcggccacaacttcctgcaggacagcaaggtgatcttcgtggagaaggcccccgacggccaccacgtgtgggagatggaggccaagaccgacagagacctgtgcaagcccaacagcctggtggtggagatcccccccttcagaaaccagagaatcaccagccccgtgcacgtgagcttctacgtgtgcaacggcaagagaaagagaagccagtaccagagattcacctacctgcccgccaacgtgaacgagatcatcagaaacgacctgagcagcaccagcacccacagctag

SEQ ID NO: 11896 - DNA, 1416 bp, synthetic construct
  misc_feature 1..1416: note = Description of Artificial Sequence: Synthetic coding sequence
  source 1..1416: mol_type = other DNA
atgctgcagctgttcatcggcaccgccgacgacagactgctgagaccccacgccttctaccaggtgcacagaatcaccggcaagaccgtgagcaccaccagccacgaggccatcctgagcaacaccaaggtgctggagatccccctgctgcccgagaacagcatgagagccgtgatcgactgcgccggcatcctgaagctgagaaacagcgacatcgagctgagaaagggcgagaccgacatcggcagaaagaacaccagagtgagactggtgttcagagtgcacgtgccccagcccagcggcagaaccctgagcctgcaggtggccagcaaccccatcgagtgcagccagagaagcgcccaggagctgcccctggtggagaagcagagcaccgacagctaccccgtggtgggcggcaagaagatggtgctgagcggccacaacttcctgcaggacagcaaggtgatcttcgtggagaaggcccccgacggccaccacgtgtgggagatggaggccaagaccgacagagacctgtgcaagcccaacagcctggtggtggagatcccccccttcagaaaccagagaatcaccagccccgtgcacgtgagcttctacgtgtgcaacggcaagagaaagagaagccagtaccagagattcacctacctgcccgccaacgtgcccatcatcaagaccgagcccaccgacgactacgagcccgcccccacctgcggccccgtgagccagggcctgagccccctgcccagaccctactacagccagcagctggccatgccccccgaccccagcagctgcctggtggccggcttccccccctgcccccagagaagcaccctgatgcccgccgcccccggcgtgagccccaagctgcacgacctgagccccgccgcctacaccaagggcgtggccagccccggccactgccacctgggcctgccccagcccgccggcgaggcccccgccgtgcaggacgtgcccagacccgtggccacccaccccggcagccccggccagcccccccccgccctgctgccccagcaggtgagcgccccccccagcagcagctgcccccccggcctggagcacagcctgtgccccagcagccccagcccccccctgccccccgccacccaggagcccacctgcctgcagccctgcagccccgcctgcccccccgccaccggcagaccccagcacctgcccagcaccgtgagaagagacgagagccccaccgccggccccagactgctgcccgaggtgcacgaggacggcagccccaacctggcccccatccccgtgaccgtgaagagagagcccgaggagctggaccagctgtacctggacgacgtgaacgagatcatcagaaacgacctgagcagcaccagcacccacagctag

SEQ ID NO: 11897 - DNA, 2766 bp, synthetic construct
  misc_feature 1..2766: note = Description of Artificial Sequence: Synthetic coding sequence
  source 1..2766: mol_type = other DNA
atgaacgcccccgagagacagccccagcccgacggcggcgacgcccccggccacgagcccggcggcagcccccaggacgagctggacttcagcatcctgttcgactacgagtacctgaaccccaacgaggaggagcccaacgcccacaaggtggccagcccccccagcggccccgcctaccccgacgacgtgctggactacggcctgaagccctacagccccctggccagcctgagcggcgagccccccggcagattcggcgagcccgacagagtgggcccccagaagttcctgagcgccgccaagcccgccggcgccagcggcctgagccccagaatcgagatcacccccagccacgagctgatccaggccgtgggccccctgagaatgagagacgccggcctgctggtggagcagccccccctggccggcgtggccgccagccccagattcaccctgcccgtgcccggcttcgagggctacagagagcccctgtgcctgagccccgccagcagcggcagcagcgccagcttcatcagcgacaccttcagcccctacaccagcccctgcgtgagccccaacaacggcggccccgacgacctgtgcccccagttccagaacatccccgcccactacagccccagaaccagccccatcatgagccccagaaccagcctggccgaggacagctgcctgggcagacacagccccgtgcccagacccgccagcagaagcagcagccccggcgccaagagaagacacagctgcgccgaggccctggtggccctgccccccggcgccagcccccagagaagcagaagccccagcccccagcccagcagccacgtggccccccaggaccacggcagccccgccggctacccccccgtggccggcagcgccgtgatcatggacgccctgaacagcctggccaccgacagcccctgcggcatcccccccaagatgtggaagaccagccccgaccccagccccgtgagcgccgcccccagcaaggccggcctgcccagacacatctaccccgccgtggagttcctgggcccctgcgagcagggcgagagaagaaacagcgcccccgagagcatcctgctggtgccccccacctggcccaagcccctggtgcccgccatccccatctgcagcatccccgtgaccgccagcctgccccccctggagtggcccctgagcagccagagcggcagctacgagctgagaatcgaggtgcagcccaagccccaccacagagcccactacgagaccgagggcagcagaggcgccgtgaaggcccccaccggcggccaccccgtggtgcagctgcacggctacatggagaacaagcccctgggcctgcagatcttcatcggcaccgccgacgagagaatcctgaagccccacgccttctaccaggtgcacagaatcaccggcaagaccgtgaccaccaccagctacgagaagatcgtgggcaacaccaaggtgctggagatccccctggagcccaagaacaacatgagagccaccatcgactgcgccggcatcctgaagctgagaaacgccgacatcgagctgagaaagggcgagaccgacatcggcagaaagaacaccagagtgagactggtgttcagagtgcacatccccgagagcagcggcagaatcgtgagcctgcagaccgccagcaaccccatcgagtgcagccagagaagcgcccacgagctgcccatggtggagagacaggacaccgacagctgcctggtgtacggcggccagcagatgatcctgaccggccagaacttcaccagcgagagcaaggtggtgttcaccgagaagaccaccgacggccagcagatctgggagatggaggccaccgtggacaaggacaagagccagcccaacatgctgttcgtggagatccccgagtacagaaacaagcacatcagaacccccgtgaaggtgaacttctacgtgatcaacggcaagagaaagagaagccagccccagcacttcacctaccaccccgtgcccgccatcaagaccgagcccaccgacgagtacgaccccaccctgatctgcagccccacccacggcggcctgggcagccagccctactacccccagcaccccatggtggccgagagccccagctgcctggtggccaccatggccccctgccagcagttcagaaccggcctgagcagccccgacgccagataccagcagcagaaccccgccgccgtgctgtaccagagaagcaagagcctgagccccagcctgctgggctaccagcagcccgccctgatggccgcccccctgagcctggccgacgcccacagaagcgtgctggtgcacgccggcagccagggccagagcagcgccctgctgcaccccagccccaccaaccagcaggccagccccgtgatccactacagccccaccaaccagcagctgagatgcggcagccaccaggagttccagcacatcatgtactgcgagaacttcgcccccggcaccaccagacccggccccccccccgtgagccagggccagagactgagccccggcagctaccccaccgtgatccagcagcagaacgccaccagccagagagccgccaagaacggcccccccgtgagcgaccagaaggaggtgctgcccgccggcgtgaccatcaagcaggagcagaacctggaccagacctacctggacgacgagctgatcgacacccacctgagctggatccagaacatcctgtag

SEQ ID NO: 11898 - DNA, 978 bp, synthetic construct
  misc_feature 1..978: note = Description of Artificial Sequence: Synthetic coding sequence
  source 1..978: mol_type = other DNA
atgagccccagaaccagcctggccgaggacagctgcctgggcagacacagccccgtgcccagacccgccagcagaagcagcagccccggcgccaagagaagacacagctgcgccgaggccctggtggccctgccccccggcgccagcccccagagaagcagaagccccagcccccagcccagcagccacgtggccccccaggaccacggcagccccgccggctacccccccgtggccggcagcgccgtgatcatggacgccctgaacagcctggccaccgacagcccctgcggcatcccccccaagatgtggaagaccagccccgaccccagccccgtgagcgccgcccccagcaaggccggcctgcccagacacatctaccccgccgtggagttcctgggcccctgcgagcagggcgagagaagaaacagcgcccccgagagcatcctgctggtgccccccacctggcccaagcccctggtgcccgccatccccatctgcagcatccccgtgaccgccagcctgccccccctggagtggcccctgagcagccagagcggcagctacgagctgagaatcgaggtgcagcccaagccccaccacagagcccactacgagaccgagggcagcagaggcgccgtgaaggcccccaccggcggccaccccgtggtgcagctgcacggctacatggagaacaagcccctgggcctgcagatcttcatcggcaccgccgacgagagaatcctgaagccccacgccttctaccaggtgcacagaatcaccggcaagaccgtgaccaccaccagctacgagaagatcgtgggcaacaccaaggtgctggagatccccctggagcccagcaccgccccccacctgctgagccccttcatgttcatcagccagcccggcgtgcacaccagaatcaacgtgtgggccctgagcggcctgagcctgaaggagctggccaccagcctgtag

SEQ ID NO: 11899 - DNA, 2778 bp, synthetic construct
  misc_feature 1..2778: note = Description of Artificial Sequence: Synthetic coding sequence
  source 1..2778: mol_type = other DNA
atgaacgcccccgagagacagccccagcccgacggcggcgacgcccccggccacgagcccggcggcagcccccaggacgagctggacttcagcatcctgttcgactacgagtacctgaaccccaacgaggaggagcccaacgcccacaaggtggccagcccccccagcggccccgcctaccccgacgacgtgctggactacggcctgaagccctacagccccctggccagcctgagcggcgagccccccggcagattcggcgagcccgacagagtgggcccccagaagttcctgagcgccgccaagcccgccggcgccagcggcctgagccccagaatcgagatcacccccagccacgagctgatccaggccgtgggccccctgagaatgagagacgccggcctgctggtggagcagccccccctggccggcgtggccgccagccccagattcaccctgcccgtgcccggcttcgagggctacagagagcccctgtgcctgagccccgccagcagcggcagcagcgccagcttcatcagcgacaccttcagcccctacaccagcccctgcgtgagccccaacaacggcggccccgacgacctgtgcccccagttccagaacatccccgcccactacagccccagaaccagccccatcatgagccccagaaccagcctggccgaggacagctgcctgggcagacacagccccgtgcccagacccgccagcagaagcagcagccccggcgccaagagaagacacagctgcgccgaggccctggtggccctgccccccggcgccagcccccagagaagcagaagccccagcccccagcccagcagccacgtggccccccaggaccacggcagccccgccggctacccccccgtggccggcagcgccgtgatcatggacgccctgaacagcctggccaccgacagcccctgcggcatcccccccaagatgtggaagaccagccccgaccccagccccgtgagcgccgcccccagcaaggccggcctgcccagacacatctaccccgccgtggagttcctgggcccctgcgagcagggcgagagaagaaacagcgcccccgagagcatcctgctggtgccccccacctggcccaagcccctggtgcccgccatccccatctgcagcatccccgtgaccgccagcctgccccccctggagtggcccctgagcagccagagcggcagctacgagctgagaatcgaggtgcagcccaagccccaccacagagcccactacgagaccgagggcagcagaggcgccgtgaaggcccccaccggcggccaccccgtggtgcagctgcacggctacatggagaacaagcccctgggcctgcagatcttcatcggcaccgccgacgagagaatcctgaagccccacgccttctaccaggtgcacagaatcaccggcaagaccgtgaccaccaccagctacgagaagatcgtgggcaacaccaaggtgctggagatccccctggagcccaagaacaacatgagagccaccatcgactgcgccggcatcctgaagctgagaaacgccgacatcgagctgagaaagggcgagaccgacatcggcagaaagaacaccagagtgagactggtgttcagagtgcacatccccgagagcagcggcagaatcgtgagcctgcagaccgccagcaaccccatcgagtgcagccagagaagcgcccacgagctgcccatggtggagagacaggacaccgacagctgcctggtgtacggcggccagcagatgatcctgaccggccagaacttcaccagcgagagcaaggtggtgttcaccgagaagaccaccgacggccagcagatctgggagatggaggccaccgtggacaaggacaagagccagcccaacatgctgttcgtggagatccccgagtacagaaacaagcacatcagaacccccgtgaaggtgaacttctacgtgatcaacggcaagagaaagagaagccagccccagcacttcacctaccaccccgtgcccgccatcaagaccgagcccaccgacgagtacgaccccaccctgatctgcagccccacccacggcggcctgggcagccagccctactacccccagcaccccatggtggccgagagccccagctgcctggtggccaccatggccccctgccagcagttcagaaccggcctgagcagccccgacgccagataccagcagcagaaccccgccgccgtgctgtaccagagaagcaagagcctgagccccagcctgctgggctaccagcagcccgccctgatggccgcccccctgagcctggccgacgcccacagaagcgtgctggtgcacgccggcagccagggccagagcagcgccctgctgcaccccagccccaccaaccagcaggccagccccgtgatccactacagccccaccaaccagcagctgagatgcggcagccaccaggagttccagcacatcatgtactgcgagaacttcgcccccggcaccaccagacccggccccccccccgtgagccagggccagagactgagccccggcagctaccccaccgtgatccagcagcagaacgccaccagccagagagccgccaagaacggcccccccgtgagcgaccagaaggaggtgctgcccgccggcgtgaccatcaagcaggagcagaacctggaccagacctacctggacgacgtgaacgagatcatcagaaaggagttcagcggcccccccgccagaaaccagacctag

SEQ ID NO: 11900 - DNA, 2706 bp, synthetic construct
  misc_feature 1..2706: note = Description of Artificial Sequence: Synthetic coding sequence
  source 1..2706: mol_type = other DNA
atgcagagagaggccgccttcagactgggccactgccaccccctgagaatcatgggcagcgtggaccaggaggagcccaacgcccacaaggtggccagcccccccagcggccccgcctaccccgacgacgtgctggactacggcctgaagccctacagccccctggccagcctgagcggcgagccccccggcagattcggcgagcccgacagagtgggcccccagaagttcctgagcgccgccaagcccgccggcgccagcggcctgagccccagaatcgagatcacccccagccacgagctgatccaggccgtgggccccctgagaatgagagacgccggcctgctggtggagcagccccccctggccggcgtggccgccagccccagattcaccctgcccgtgcccggcttcgagggctacagagagcccctgtgcctgagccccgccagcagcggcagcagcgccagcttcatcagcgacaccttcagcccctacaccagcccctgcgtgagccccaacaacggcggccccgacgacctgtgcccccagttccagaacatccccgcccactacagccccagaaccagccccatcatgagccccagaaccagcctggccgaggacagctgcctgggcagacacagccccgtgcccagacccgccagcagaagcagcagccccggcgccaagagaagacacagctgcgccgaggccctggtggccctgccccccggcgccagcccccagagaagcagaagccccagcccccagcccagcagccacgtggccccccaggaccacggcagccccgccggctacccccccgtggccggcagcgccgtgatcatggacgccctgaacagcctggccaccgacagcccctgcggcatcccccccaagatgtggaagaccagccccgaccccagccccgtgagcgccgcccccagcaaggccggcctgcccagacacatctaccccgccgtggagttcctgggcccctgcgagcagggcgagagaagaaacagcgcccccgagagcatcctgctggtgccccccacctggcccaagcccctggtgcccgccatccccatctgcagcatccccgtgaccgccagcctgccccccctggagtggcccctgagcagccagagcggcagctacgagctgagaatcgaggtgcagcccaagccccaccacagagcccactacgagaccgagggcagcagaggcgccgtgaaggcccccaccggcggccaccccgtggtgcagctgcacggctacatggagaacaagcccctgggcctgcagatcttcatcggcaccgccgacgagagaatcctgaagccccacgccttctaccaggtgcacagaatcaccggcaagaccgtgaccaccaccagctacgagaagatcgtgggcaacaccaaggtgctggagatccccctggagcccaagaacaacatgagagccaccatcgactgcgccggcatcctgaagctgagaaacgccgacatcgagctgagaaagggcgagaccgacatcggcagaaagaacaccagagtgagactggtgttcagagtgcacatccccgagagcagcggcagaatcgtgagcctgcagaccgccagcaaccccatcgagtgcagccagagaagcgcccacgagctgcccatggtggagagacaggacaccgacagctgcctggtgtacggcggccagcagatgatcctgaccggccagaacttcaccagcgagagcaaggtggtgttcaccgagaagaccaccgacggccagcagatctgggagatggaggccaccgtggacaaggacaagagccagcccaacatgctgttcgtggagatccccgagtacagaaacaagcacatcagaacccccgtgaaggtgaacttctacgtgatcaacggcaagagaaagagaagccagccccagcacttcacctaccaccccgtgcccgccatcaagaccgagcccaccgacgagtacgaccccaccctgatctgcagccccacccacggcggcctgggcagccagccctactacccccagcaccccatggtggccgagagccccagctgcctggtggccaccatggccccctgccagcagttcagaaccggcctgagcagccccgacgccagataccagcagcagaaccccgccgccgtgctgtaccagagaagcaagagcctgagccccagcctgctgggctaccagcagcccgccctgatggccgcccccctgagcctggccgacgcccacagaagcgtgctggtgcacgccggcagccagggccagagcagcgccctgctgcaccccagccccaccaaccagcaggccagccccgtgatccactacagccccaccaaccagcagctgagatgcggcagccaccaggagttccagcacatcatgtactgcgagaacttcgcccccggcaccaccagacccggccccccccccgtgagccagggccagagactgagccccggcagctaccccaccgtgatccagcagcagaacgccaccagccagagagccgccaagaacggcccccccgtgagcgaccagaaggaggtgctgcccgccggcgtgaccatcaagcaggagcagaacctggaccagacctacctggacgacgagctgatcgacacccacctgagctggatccagaacatcctgtag

SEQ ID NO: 11901 - DNA, 3207 bp, synthetic construct
  misc_feature 1..3207: note = Description of Artificial Sequence: Synthetic coding sequence
  source 1..3207: mol_type = other DNA
atgaccaccgccaactgcggcgcccacgacgagctggacttcaagctggtgttcggcgaggacggcgcccccgccccccccccccccggcagcagacccgccgacctggagcccgacgactgcgccagcatctacatcttcaacgtggaccccccccccagcaccctgaccacccccctgtgcctgccccaccacggcctgcccagccacagcagcgtgctgagccccagcttccagctgcagagccacaagaactacgagggcacctgcgagatccccgagagcaagtacagccccctgggcggccccaagcccttcgagtgccccagcatccagatcaccagcatcagccccaactgccaccaggagctggacgcccacgaggacgacctgcagatcaacgaccccgagagagagttcctggagagacccagcagagaccacctgtacctgcccctggagcccagctacagagagagcagcctgagccccagccccgccagcagcatcagcagcagaagctggttcagcgacgccagcagctgcgagagcctgagccacatctacgacgacgtggacagcgagctgaacgaggccgccgccagattcaccctgggcagccccctgaccagccccggcggcagccccggcggctgccccggcgaggagacctggcaccagcagtacggcctgggccacagcctgagccccagacagagcccctgccacagccccagaagcagcgtgaccgacgagaactggctgagccccagacccgccagcggccccagcagcagacccaccagcccctgcggcaagagaagacacagcagcgccgaggtgtgctacgccggcagcctgagcccccaccacagccccgtgcccagccccggccacagccccagaggcagcgtgaccgaggacacctggctgaacgccagcgtgcacggcggcagcggcctgggccccgccgtgttccccttccagtactgcgtggagaccgacatccccctgaagaccagaaagaccagcgaggaccaggccgccatcctgcccggcaagctggagctgtgcagcgacgaccagggcagcctgagccccgccagagagaccagcatcgacgacggcctgggcagccagtaccccctgaagaaggacagctgcggcgaccagttcctgagcgtgcccagccccttcacctggagcaagcccaagcccggccacacccccatcttcagaaccagcagcctgccccccctggactggcccctgcccgcccacttcggccagtgcgagctgaagatcgaggtgcagcccaagacccaccacagagcccactacgagaccgagggcagcagaggcgccgtgaaggccagcaccggcggccaccccgtggtgaagctgctgggctacaacgagaagcccatcaacctgcagatgttcatcggcaccgccgacgacagatacctgagaccccacgccttctaccaggtgcacagaatcaccggcaagaccgtggccaccgccagccaggagatcatcatcgccagcaccaaggtgctggagatccccctgctgcccgagaacaacatgagcgccagcatcgactgcgccggcatcctgaagctgagaaacagcgacatcgagctgagaaagggcgagaccgacatcggcagaaagaacaccagagtgagactggtgttcagagtgcacatcccccagcccagcggcaaggtgctgagcctgcagatcgccagcatccccgtggagtgcagccagagaagcgcccaggagctgccccacatcgagaagtacagcatcaacagctgcagcgtgaacggcggccacgagatggtggtgaccggcagcaacttcctgcccgagagcaagatcatcttcctggagaagggccaggacggcagaccccagtgggaggtggagggcaagatcatcagagagaagtgccagggcgcccacatcgtgctggaggtgcccccctaccacaaccccgccgtgaccgccgccgtgcaggtgcacttctacctgtgcaacggcaagagaaagaagagccagagccagagattcacctacacccccgtgctgatgaagcaggagcacagagaggagatcgacctgagcagcgtgcccagcctgcccgtgccccaccccgcccagacccagagacccagcagcgacagcggctgcagccacgacagcgtgctgagcggccagagaagcctgatctgcagcatcccccagacctacgccagcatggtgaccagcagccacctgccccagctgcagtgcagagacgagagcgtgagcaaggagcagcacatgatccccagccccatcgtgcaccagcccttccaggtgacccccaccccccccgtgggcagcagctaccagcccatgcagaccaacgtggtgtacaacggccccacctgcctgcccatcaacgccgccagcagccaggagttcgacagcgtgctgttccagcaggacgccaccctgagcggcctggtgaacctgggctgccagcccctgagcagcatccccttccacagcagcaacagcggcagcaccggccacctgctggcccacaccccccacagcgtgcacaccctgccccacctgcagagcatgggctaccactgcagcaacaccggccagagaagcctgagcagccccgtggccgaccagatcaccggccagcccagcagccagctgcagcccatcacctacggccccagccacagcggcagcgccaccaccgccagccccgccgccagccaccccctggccagcagccccctgagcggcccccccagcccccagctgcagcccatgccctaccagagccccagcagcggcaccgccagcagccccagccccgccaccagaatgcacagcggccagcacagcacccaggcccagagcaccggccagggcggcctgagcgcccccagcagcctgatctgccacagcctgtgcgaccccgccagcttcccccccgacggcgccaccgtgagcatcaagcccgagcccgaggacagagagcccaacttcgccaccatcggcctgcaggacatcaccctggacgacgaccagttcatcagcgacctggagcaccagcccagcggcagcgccgagaagtggcccaaccacagcgtgctgagctgccccgcccccttctggagaatctag

SEQ ID NO: 11902 - DNA, 3228 bp, synthetic construct
  misc_feature 1..3228: note = Description of Artificial Sequence: Synthetic coding sequence
  source 1..3228: mol_type = other DNA
atgaccaccgccaactgcggcgcccacgacgagctggacttcaagctggtgttcggcgaggacggcgcccccgccccccccccccccggcagcagacccgccgacctggagcccgacgactgcgccagcatctacatcttcaacgtggaccccccccccagcaccctgaccacccccctgtgcctgccccaccacggcctgcccagccacagcagcgtgctgagccccagcttccagctgcagagccacaagaactacgagggcacctgcgagatccccgagagcaagtacagccccctgggcggccccaagcccttcgagtgccccagcatccagatcaccagcatcagccccaactgccaccaggagctggacgcccacgaggacgacctgcagatcaacgaccccgagagagagttcctggagagacccagcagagaccacctgtacctgcccctggagcccagctacagagagagcagcctgagccccagccccgccagcagcatcagcagcagaagctggttcagcgacgccagcagctgcgagagcctgagccacatctacgacgacgtggacagcgagctgaacgaggccgccgccagattcaccctgggcagccccctgaccagccccggcggcagccccggcggctgccccggcgaggagacctggcaccagcagtacggcctgggccacagcctgagccccagacagagcccctgccacagccccagaagcagcgtgaccgacgagaactggctgagccccagacccgccagcggccccagcagcagacccaccagcccctgcggcaagagaagacacagcagcgccgaggtgtgctacgccggcagcctgagcccccaccacagccccgtgcccagccccggccacagccccagaggcagcgtgaccgaggacacctggctgaacgccagcgtgcacggcggcagcggcctgggccccgccgtgttccccttccagtactgcgtggagaccgacatccccctgaagaccagaaagaccagcgaggaccaggccgccatcctgcccggcaagctggagctgtgcagcgacgaccagggcagcctgagccccgccagagagaccagcatcgacgacggcctgggcagccagtaccccctgaagaaggacagctgcggcgaccagttcctgagcgtgcccagccccttcacctggagcaagcccaagcccggccacacccccatcttcagaaccagcagcctgccccccctggactggcccctgcccgcccacttcggccagtgcgagctgaagatcgaggtgcagcccaagacccaccacagagcccactacgagaccgagggcagcagaggcgccgtgaaggccagcaccggcggccaccccgtggtgaagctgctgggctacaacgagaagcccatcaacctgcagatgttcatcggcaccgccgacgacagatacctgagaccccacgccttctaccaggtgcacagaatcaccggcaagaccgtggccaccgccagccaggagatcatcatcgccagcaccaaggtgctggagatccccctgctgcccgagaacaacatgagcgccagcatcgactgcgccggcatcctgaagctgagaaacagcgacatcgagctgagaaagggcgagaccgacatcggcagaaagaacaccagagtgagactggtgttcagagtgcacatcccccagcccagcggcaaggtgctgagcctgcagatcgccagcatccccgtggagtgcagccagagaagcgcccaggagctgccccacatcgagaagtacagcatcaacagctgcagcgtgaacggcggccacgagatggtggtgaccggcagcaacttcctgcccgagagcaagatcatcttcctggagaagggccaggacggcagaccccagtgggaggtggagggcaagatcatcagagagaagtgccagggcgcccacatcgtgctggaggtgcccccctaccacaaccccgccgtgaccgccgccgtgcaggtgcacttctacctgtgcaacggcaagagaaagaagagccagagccagagattcacctacacccccgtgctgatgaagcaggagcacagagaggagatcgacctgagcagcgtgcccagcctgcccgtgccccaccccgcccagacccagagacccagcagcgacagcggctgcagccacgacagcgtgctgagcggccagagaagcctgatctgcagcatcccccagacctacgccagcatggtgaccagcagccacctgccccagctgcagtgcagagacgagagcgtgagcaaggagcagcacatgatccccagccccatcgtgcaccagcccttccaggtgacccccaccccccccgtgggcagcagctaccagcccatgcagaccaacgtggtgtacaacggccccacctgcctgcccatcaacgccgccagcagccaggagttcgacagcgtgctgttccagcaggacgccaccctgagcggcctggtgaacctgggctgccagcccctgagcagcatccccttccacagcagcaacagcggcagcaccggccacctgctggcccacaccccccacagcgtgcacaccctgccccacctgcagagcatgggctaccactgcagcaacaccggccagagaagcctgagcagccccgtggccgaccagatcaccggccagcccagcagccagctgcagcccatcacctacggccccagccacagcggcagcgccaccaccgccagccccgccgccagccaccccctggccagcagccccctgagcggcccccccagcccccagctgcagcccatgccctaccagagccccagcagcggcaccgccagcagccccagccccgccaccagaatgcacagcggccagcacagcacccaggcccagagcaccggccagggcggcctgagcgcccccagcagcctgatctgccacagcctgtgcgaccccgccagcttcccccccgacggcgccaccgtgagcatcaagcccgagcccgaggacagagagcccaacttcgccaccatcggcctgcaggacatcaccctggacgacgtgaacgagatcatcggcagagacatgagccagatcagcgtgagccagggcgccggcgtgagcagacaggcccccctgcccagccccgagagcctggacctgggcagaagcgacggcctgtag

SEQ ID NO: 11903 - DNA, 3198 bp, synthetic construct
  misc_feature 1..3198: note = Description of Artificial Sequence: Synthetic coding sequence
  source 1..3198: mol_type = other DNA
atgaccaccgccaactgcggcgcccacgacgagctggacttcaagctggtgttcggcgaggacggcgcccccgccccccccccccccggcagcagacccgccgacctggagcccgacgactgcgccagcatctacatcttcaacgtggaccccccccccagcaccctgaccacccccctgtgcctgccccaccacggcctgcccagccacagcagcgtgctgagccccagcttccagctgcagagccacaagaactacgagggcacctgcgagatccccgagagcaagtacagccccctgggcggccccaagcccttcgagtgccccagcatccagatcaccagcatcagccccaactgccaccaggagctggacgcccacgaggacgacctgcagatcaacgaccccgagagagagttcctggagagacccagcagagaccacctgtacctgcccctggagcccagctacagagagagcagcctgagccccagccccgccagcagcatcagcagcagaagctggttcagcgacgccagcagctgcgagagcctgagccacatctacgacgacgtggacagcgagctgaacgaggccgccgccagattcaccctgggcagccccctgaccagccccggcggcagccccggcggctgccccggcgaggagacctggcaccagcagtacggcctgggccacagcctgagccccagacagagcccctgccacagccccagaagcagcgtgaccgacgagaactggctgagccccagacccgccagcggccccagcagcagacccaccagcccctgcggcaagagaagacacagcagcgccgaggtgtgctacgccggcagcctgagcccccaccacagccccgtgcccagccccggccacagccccagaggcagcgtgaccgaggacacctggctgaacgccagcgtgcacggcggcagcggcctgggccccgccgtgttccccttccagtactgcgtggagaccgacatccccctgaagaccagaaagaccagcgaggaccaggccgccatcctgcccggcaagctggagctgtgcagcgacgaccagggcagcctgagccccgccagagagaccagcatcgacgacggcctgggcagccagtaccccctgaagaaggacagctgcggcgaccagttcctgagcgtgcccagccccttcacctggagcaagcccaagcccggccacacccccatcttcagaaccagcagcctgccccccctggactggcccctgcccgcccacttcggccagtgcgagctgaagatcgaggtgcagcccaagacccaccacagagcccactacgagaccgagggcagcagaggcgccgtgaaggccagcaccggcggccaccccgtggtgaagctgctgggctacaacgagaagcccatcaacctgcagatgttcatcggcaccgccgacgacagatacctgagaccccacgccttctaccaggtgcacagaatcaccggcaagaccgtggccaccgccagccaggagatcatcatcgccagcaccaaggtgctggagatccccctgctgcccgagaacaacatgagcgccagcatcgactgcgccggcatcctgaagctgagaaacagcgacatcgagctgagaaagggcgagaccgacatcggcagaaagaacaccagagtgagactggtgttcagagtgcacatcccccagcccagcggcaaggtgctgagcctgcagatcgccagcatccccgtggagtgcagccagagaagcgcccaggagctgccccacatcgagaagtacagcatcaacagctgcagcgtgaacggcggccacgagatggtggtgaccggcagcaacttcctgcccgagagcaagatcatcttcctggagaagggccaggacggcagaccccagtgggaggtggagggcaagatcatcagagagaagtgccagggcgcccacatcgtgctggaggtgcccccctaccacaaccccgccgtgaccgccgccgtgcaggtgcacttctacctgtgcaacggcaagagaaagaagagccagagccagagattcacctacacccccgtgctgatgaagcaggagcacagagaggagatcgacctgagcagcgtgcccagcctgcccgtgccccaccccgcccagacccagagacccagcagcgacagcggctgcagccacgacagcgtgctgagcggccagagaagcctgatctgcagcatcccccagacctacgccagcatggtgaccagcagccacctgccccagctgcagtgcagagacgagagcgtgagcaaggagcagcacatgatccccagccccatcgtgcaccagcccttccaggtgacccccaccccccccgtgggcagcagctaccagcccatgcagaccaacgtggtgtacaacggccccacctgcctgcccatcaacgccgccagcagccaggagttcgacagcgtgctgttccagcaggacgccaccctgagcggcctggtgaacctgggctgccagcccctgagcagcatccccttccacagcagcaacagcggcagcaccggccacctgctggcccacaccccccacagcgtgcacaccctgccccacctgcagagcatgggctaccactgcagcaacaccggccagagaagcctgagcagccccgtggccgaccagatcaccggccagcccagcagccagctgcagcccatcacctacggccccagccacagcggcagcgccaccaccgccagccccgccgccagccaccccctggccagcagccccctgagcggcccccccagcccccagctgcagcccatgccctaccagagccccagcagcggcaccgccagcagccccagccccgccaccagaatgcacagcggccagcacagcacccaggcccagagcaccggccagggcggcctgagcgcccccagcagcctgatctgccacagcctgtgcgaccccgccagcttcccccccgacggcgccaccgtgagcatcaagcccgagcccgaggacagagagcccaacttcgccaccatcggcctgcaggacatcaccctggacgacgacctgttcaccagcaacaacttcgacctgctgcagctgagacccaccttctggcccgtgcccgccggcagatacctgagaaacctggagtag

SEQ ID NO: 11904 - DNA, 1770 bp, synthetic construct
  misc_feature 1..1770: note = Description of Artificial Sequence: Synthetic coding sequence
  source 1..1770: mol_type = other DNA
atgttcatcggcaccgccgacgacagatacctgagaccccacgccttctaccaggtgcacagaatcaccggcaagaccgtggccaccgccagccaggagatcatcatcgccagcaccaaggtgctggagatccccctgctgcccgagaacaacatgagcgccagcatcgactgcgccggcatcctgaagctgagaaacagcgacatcgagctgagaaagggcgagaccgacatcggcagaaagaacaccagagtgagactggtgttcagagtgcacatcccccagcccagcggcaaggtgctgagcctgcagatcgccagcatccccgtggagtgcagccagagaagcgcccaggagctgccccacatcgagaagtacagcatcaacagctgcagcgtgaacggcggccacgagatggtggtgaccggcagcaacttcctgcccgagagcaagatcatcttcctggagaagggccaggacggcagaccccagtgggaggtggagggcaagatcatcagagagaagtgccagggcgcccacatcgtgctggaggtgcccccctaccacaaccccgccgtgaccgccgccgtgcaggtgcacttctacctgtgcaacggcaagagaaagaagagccagagccagagattcacctacacccccgtgctgatgaagcaggagcacagagaggagatcgacctgagcagcgtgcccagcctgcccgtgccccaccccgcccagacccagagacccagcagcgacagcggctgcagccacgacagcgtgctgagcggccagagaagcctgatctgcagcatcccccagacctacgccagcatggtgaccagcagccacctgccccagctgcagtgcagagacgagagcgtgagcaaggagcagcacatgatccccagccccatcgtgcaccagcccttccaggtgacccccaccccccccgtgggcagcagctaccagcccatgcagaccaacgtggtgtacaacggccccacctgcctgcccatcaacgccgccagcagccaggagttcgacagcgtgctgttccagcaggacgccaccctgagcggcctggtgaacctgggctgccagcccctgagcagcatccccttccacagcagcaacagcggcagcaccggccacctgctggcccacaccccccacagcgtgcacaccctgccccacctgcagagcatgggctaccactgcagcaacaccggccagagaagcctgagcagccccgtggccgaccagatcaccggccagcccagcagccagctgcagcccatcacctacggccccagccacagcggcagcgccaccaccgccagccccgccgccagccaccccctggccagcagccccctgagcggcccccccagcccccagctgcagcccatgccctaccagagccccagcagcggcaccgccagcagccccagccccgccaccagaatgcacagcggccagcacagcacccaggcccagagcaccggccagggcggcctgagcgcccccagcagcctgatctgccacagcctgtgcgaccccgccagcttcccccccgacggcgccaccgtgagcatcaagcccgagcccgaggacagagagcccaacttcgccaccatcggcctgcaggacatcaccctggacgacgaccagttcatcagcgacctggagcaccagcccagcggcagcgccgagaagtggcccaaccacagcgtgctgagctgccccgcccccttctggagaatctag

SEQ ID NO: 11905 - DNA, 2709 bp, synthetic construct
  misc_feature 1..2709: note = Description of Artificial Sequence: Synthetic coding sequence
  source 1..2709: mol_type = other DNA
atgggcgccgccagctgcgaggacgaggagctggagttcaagctggtgttcggcgaggagaaggaggccccccccctgggcgccggcggcctgggcgaggagctggacagcgaggacgcccccccctgctgcagactggccctgggcgagccccccccctacggcgccgcccccatcggcatccccagaccccccccccccagacccggcatgcacagccccccccccagacccgcccccagccccggcacctgggagagccagcccgccagaagcgtgagactgggcggccccggcggcggcgccggcggcgccggcggcggcagagtgctggagtgccccagcatcagaatcaccagcatcagccccacccccgagccccccgccgccctggaggacaaccccgacgcctggggcgacggcagccccagagactaccccccccccgagggcttcggcggctacagagaggccggcggccagggcggcggcgccttcttcagccccagccccggcagcagcagcctgagcagctggagcttcttcagcgacgccagcgacgaggccgccctgtacgccgcctgcgacgaggtggagagcgagctgaacgaggccgccagcagattcggcctgggcagccccctgcccagccccagagccagccccagaccctggacccccgaggacccctggagcctgtacggccccagccccggcggcagaggccccgaggacagctggctgctgctgagcgcccccggccccacccccgccagccccagacccgccagcccctgcggcaagagaagatacagcagcagcggcacccccagcagcgccagccccgccctgagcagaagaggcagcctgggcgaggagggcagcgagccccccccccccccccccctgcccctggccagagaccccggcagccccggccccttcgactacgtgggcgccccccccgccgagagcatcccccagaagaccagaagaaccagcagcgagcaggccgtggccctgcccagaagcgaggagcccgccagctgcaacggcaagctgcccctgggcgccgaggagagcgtggccccccccggcggcagcagaaaggaggtggccggcatggactacctggccgtgcccagccccctggcctggagcaaggccagaatcggcggccacagccccatcttcagaaccagcgccctgccccccctggactggcccctgcccagccagtacgagcagctggagctgagaatcgaggtgcagcccagagcccaccacagagcccactacgagaccgagggcagcagaggcgccgtgaaggccgcccccggcggccaccccgtggtgaagctgctgggctacagcgagaagcccctgaccctgcagatgttcatcggcaccgccgacgagagaaacctgagaccccacgccttctaccaggtgcacagaatcaccggcaagatggtggccaccgccagctacgaggccgtggtgagcggcaccaaggtgctggagatgaccctgctgcccgagaacaacatggccgccaacatcgactgcgccggcatcctgaagctgagaaacagcgacatcgagctgagaaagggcgagaccgacatcggcagaaagaacaccagagtgagactggtgttcagagtgcacgtgccccagggcggcggcaaggtggtgagcgtgcaggccgccagcgtgcccatcgagtgcagccagagaagcgcccaggagctgccccaggtggaggcctacagccccagcgcctgcagcgtgagaggcggcgaggagctggtgctgaccggcagcaacttcctgcccgacagcaaggtggtgttcatcgagagaggccccgacggcaagctgcagtgggaggaggaggccaccgtgaacagactgcagagcaacgaggtgaccctgaccctgaccgtgcccgagtacagcaacaagagagtgagcagacccgtgcaggtgtacttctacgtgagcaacggcagaagaaagagaagccccacccagagcttcagattcctgcccgtgatctgcaaggaggagcccctgcccgacagcagcctgagaggcttccccagcgccagcgccacccccttcggcaccgacatggacttcagcccccccagacccccctaccccagctacccccacgaggaccccgcctgcgagaccccctacctgagcgagggcttcggctacggcatgccccccctgtacccccagaccggccccccccccagctacagacccggcctgagaatgttccccgagaccagaggcaccaccggctgcgcccagccccccgccgtgagcttcctgcccagacccttccccagcgacccctacggcggcagaggcagcagcttcagcctgggcctgcccttcagcccccccgcccccttcagacccccccccctgcccgccagcccccccctggagggccccttccccagccagagcgacgtgcaccccctgcccgccgagggctacaacaaggtgggccccggctacggccccggcgagggcgcccccgagcaggagaagagcagaggcggctacagcagcggcttcagagacagcgtgcccatccagggcatcaccctggaggaggtgagcgagatcatcggcagagacctgagcggcttccccgccccccccggcgaggagccccccgcctag

SEQ ID NO: 11906 - DNA, 2895 bp, synthetic construct
  misc_feature 1..2895: note = Description of Artificial Sequence: Synthetic coding sequence
  source 1..2895: mol_type = other DNA
atgatcaccaccctgcccagcctgctgcccgccagcctggccagcatcagccacagagtgaccaacctgcccagcaacagcctgagccacaaccccggcctgagcaagcccgacttccccggcaacagcagccccggcctgcccagcagcagcagccccggcagagacctgggcgcccccgccggcagcatgggcgccgccagctgcgaggacgaggagctggagttcaagctggtgttcggcgaggagaaggaggccccccccctgggcgccggcggcctgggcgaggagctggacagcgaggacgcccccccctgctgcagactggccctgggcgagccccccccctacggcgccgcccccatcggcatccccagaccccccccccccagacccggcatgcacagccccccccccagacccgcccccagccccggcacctgggagagccagcccgccagaagcgtgagactgggcggccccggcggcggcgccggcggcgccggcggcggcagagtgctggagtgccccagcatcagaatcaccagcatcagccccacccccgagccccccgccgccctggaggacaaccccgacgcctggggcgacggcagccccagagactaccccccccccgagggcttcggcggctacagagaggccggcggccagggcggcggcgccttcttcagccccagccccggcagcagcagcctgagcagctggagcttcttcagcgacgccagcgacgaggccgccctgtacgccgcctgcgacgaggtggagagcgagctgaacgaggccgccagcagattcggcctgggcagccccctgcccagccccagagccagccccagaccctggacccccgaggacccctggagcctgtacggccccagccccggcggcagaggccccgaggacagctggctgctgctgagcgcccccggccccacccccgccagccccagacccgccagcccctgcggcaagagaagatacagcagcagcggcacccccagcagcgccagccccgccctgagcagaagaggcagcctgggcgaggagggcagcgagccccccccccccccccccctgcccctggccagagaccccggcagccccggccccttcgactacgtgggcgccccccccgccgagagcatcccccagaagaccagaagaaccagcagcgagcaggccgtggccctgcccagaagcgaggagcccgccagctgcaacggcaagctgcccctgggcgccgaggagagcgtggccccccccggcggcagcagaaaggaggtggccggcatggactacctggccgtgcccagccccctggcctggagcaaggccagaatcggcggccacagccccatcttcagaaccagcgccctgccccccctggactggcccctgcccagccagtacgagcagctggagctgagaatcgaggtgcagcccagagcccaccacagagcccactacgagaccgagggcagcagaggcgccgtgaaggccgcccccggcggccaccccgtggtgaagctgctgggctacagcgagaagcccctgaccctgcagatgttcatcggcaccgccgacgagagaaacctgagaccccacgccttctaccaggtgcacagaatcaccggcaagatggtggccaccgccagctacgaggccgtggtgagcggcaccaaggtgctggagatgaccctgctgcccgagaacaacatggccgccaacatcgactgcgccggcatcctgaagctgagaaacagcgacatcgagctgagaaagggcgagaccgacatcggcagaaagaacaccagagtgagactggtgttcagagtgcacgtgccccagggcggcggcaaggtggtgagcgtgcaggccgccagcgtgcccatcgagtgcagccagagaagcgcccaggagctgccccaggtggaggcctacagccccagcgcctgcagcgtgagaggcggcgaggagctggtgctgaccggcagcaacttcctgcccgacagcaaggtggtgttcatcgagagaggccccgacggcaagctgcagtgggaggaggaggccaccgtgaacagactgcagagcaacgaggtgaccctgaccctgaccgtgcccgagtacagcaacaagagagtgagcagacccgtgcaggtgtacttctacgtgagcaacggcagaagaaagagaagccccacccagagcttcagattcctgcccgtgatctgcaaggaggagcccctgcccgacagcagcctgagaggcttccccagcgccagcgccacccccttcggcaccgacatggacttcagcccccccagacccccctaccccagctacccccacgaggaccccgcctgcgagaccccctacctgagcgagggcttcggctacggcatgccccccctgtacccccagaccggccccccccccagctacagacccggcctgagaatgttccccgagaccagaggcaccaccggctgcgcccagccccccgccgtgagcttcctgcccagacccttccccagcgacccctacggcggcagaggcagcagcttcagcctgggcctgcccttcagcccccccgcccccttcagacccccccccctgcccgccagcccccccctggagggccccttccccagccagagcgacgtgcaccccctgcccgccgagggctacaacaaggtgggccccggctacggccccggcgagggcgcccccgagcaggagaagagcagaggcggctacagcagcggcttcagagacagcgtgcccatccagggcatcaccctggaggagggcggctgcggcaccggcggctgcgagtgcgagtgcgtgcaggagatcgccctgcacgtgtgctag

SEQ ID NO: 11907 - DNA, 2670 bp, synthetic construct
  misc_feature 1..2670: note = Description of Artificial Sequence: Synthetic coding sequence
  source 1..2670: mol_type = other DNA
atgcccgccagcatcagcagcatcttccccggccccaccctgctgctgagctgcggcagcgaggagctggacagcgaggacgcccccccctgctgcagactggccctgggcgagccccccccctacggcgccgcccccatcggcatccccagaccccccccccccagacccggcatgcacagccccccccccagacccgcccccagccccggcacctgggagagccagcccgccagaagcgtgagactgggcggccccggcggcggcgccggcggcgccggcggcggcagagtgctggagtgccccagcatcagaatcaccagcatcagccccacccccgagccccccgccgccctggaggacaaccccgacgcctggggcgacggcagccccagagactaccccccccccgagggcttcggcggctacagagaggccggcggccagggcggcggcgccttcttcagccccagccccggcagcagcagcctgagcagctggagcttcttcagcgacgccagcgacgaggccgccctgtacgccgcctgcgacgaggtggagagcgagctgaacgaggccgccagcagattcggcctgggcagccccctgcccagccccagagccagccccagaccctggacccccgaggacccctggagcctgtacggccccagccccggcggcagaggccccgaggacagctggctgctgctgagcgcccccggccccacccccgccagccccagacccgccagcccctgcggcaagagaagatacagcagcagcggcacccccagcagcgccagccccgccctgagcagaagaggcagcctgggcgaggagggcagcgagccccccccccccccccccctgcccctggccagagaccccggcagccccggccccttcgactacgtgggcgccccccccgccgagagcatcccccagaagaccagaagaaccagcagcgagcaggccgtggccctgcccagaagcgaggagcccgccagctgcaacggcaagctgcccctgggcgccgaggagagcgtggccccccccggcggcagcagaaaggaggtggccggcatggactacctggccgtgcccagccccctggcctggagcaaggccagaatcggcggccacagccccatcttcagaaccagcgccctgccccccctggactggcccctgcccagccagtacgagcagctggagctgagaatcgaggtgcagcccagagcccaccacagagcccactacgagaccgagggcagcagaggcgccgtgaaggccgcccccggcggccaccccgtggtgaagctgctgggctacagcgagaagcccctgaccctgcagatgttcatcggcaccgccgacgagagaaacctgagaccccacgccttctaccaggtgcacagaatcaccggcaagatggtggccaccgccagctacgaggccgtggtgagcggcaccaaggtgctggagatgaccctgctgcccgagaacaacatggccgccaacatcgactgcgccggcatcctgaagctgagaaacagcgacatcgagctgagaaagggcgagaccgacatcggcagaaagaacaccagagtgagactggtgttcagagtgcacgtgccccagggcggcggcaaggtggtgagcgtgcaggccgccagcgtgcccatcgagtgcagccagagaagcgcccaggagctgccccaggtggaggcctacagccccagcgcctgcagcgtgagaggcggcgaggagctggtgctgaccggcagcaacttcctgcccgacagcaaggtggtgttcatcgagagaggccccgacggcaagctgcagtgggaggaggaggccaccgtgaacagactgcagagcaacgaggtgaccctgaccctgaccgtgcccgagtacagcaacaagagagtgagcagacccgtgcaggtgtacttctacgtgagcaacggcagaagaaagagaagccccacccagagcttcagattcctgcccgtgatctgcaaggaggagcccctgcccgacagcagcctgagaggcttccccagcgccagcgccacccccttcggcaccgacatggacttcagcccccccagacccccctaccccagctacccccacgaggaccccgcctgcgagaccccctacctgagcgagggcttcggctacggcatgccccccctgtacccccagaccggccccccccccagctacagacccggcctgagaatgttccccgagaccagaggcaccaccggctgcgcccagccccccgccgtgagcttcctgcccagacccttccccagcgacccctacggcggcagaggcagcagcttcagcctgggcctgcccttcagcccccccgcccccttcagacccccccccctgcccgccagcccccccctggagggccccttccccagccagagcgacgtgcaccccctgcccgccgagggctacaacaaggtgggccccggctacggccccggcgagggcgcccccgagcaggagaagagcagaggcggctacagcagcggcttcagagacagcgtgcccatccagggcatcaccctggaggagggcggctgcggcaccggcggctgcgagtgcgagtgcgtgcaggagatcgccctgcacgtgtgctag

SEQ ID NO: 11908 - DNA, 2745 bp, synthetic construct
  misc_feature 1..2745: note = Description of Artificial Sequence: Synthetic coding sequence
  source 1..2745: mol_type = other DNA
atgctgagcggcagagacctgggcgcccccgccggcagcatgggcgccgccagctgcgaggacgaggagctggagttcaagctggtgttcggcgaggagaaggaggccccccccctgggcgccggcggcctgggcgaggagctggacagcgaggacgcccccccctgctgcagactggccctgggcgagccccccccctacggcgccgcccccatcggcatccccagaccccccccccccagacccggcatgcacagccccccccccagacccgcccccagccccggcacctgggagagccagcccgccagaagcgtgagactgggcggccccggcggcggcgccggcggcgccggcggcggcagagtgctggagtgccccagcatcagaatcaccagcatcagccccacccccgagccccccgccgccctggaggacaaccccgacgcctggggcgacggcagccccagagactaccccccccccgagggcttcggcggctacagagaggccggcggccagggcggcggcgccttcttcagccccagccccggcagcagcagcctgagcagctggagcttcttcagcgacgccagcgacgaggccgccctgtacgccgcctgcgacgaggtggagagcgagctgaacgaggccgccagcagattcggcctgggcagccccctgcccagccccagagccagccccagaccctggacccccgaggacccctggagcctgtacggccccagccccggcggcagaggccccgaggacagctggctgctgctgagcgcccccggccccacccccgccagccccagacccgccagcccctgcggcaagagaagatacagcagcagcggcacccccagcagcgccagccccgccctgagcagaagaggcagcctgggcgaggagggcagcgagccccccccccccccccccctgcccctggccagagaccccggcagccccggccccttcgactacgtgggcgccccccccgccgagagcatcccccagaagaccagaagaaccagcagcgagcaggccgtggccctgcccagaagcgaggagcccgccagctgcaacggcaagctgcccctgggcgccgaggagagcgtggccccccccggcggcagcagaaaggaggtggccggcatggactacctggccgtgcccagccccctggcctggagcaaggccagaatcggcggccacagccccatcttcagaaccagcgccctgccccccctggactggcccctgcccagccagtacgagcagctggagctgagaatcgaggtgcagcccagagcccaccacagagcccactacgagaccgagggcagcagaggcgccgtgaaggccgcccccggcggccaccccgtggtgaagctgctgggctacagcgagaagcccctgaccctgcagatgttcatcggcaccgccgacgagagaaacctgagaccccacgccttctaccaggtgcacagaatcaccggcaagatggtggccaccgccagctacgaggccgtggtgagcggcaccaaggtgctggagatgaccctgctgcccgagaacaacatggccgccaacatcgactgcgccggcatcctgaagctgagaaacagcgacatcgagctgagaaagggcgagaccgacatcggcagaaagaacaccagagtgagactggtgttcagagtgcacgtgccccagggcggcggcaaggtggtgagcgtgcaggccgccagcgtgcccatcgagtgcagccagagaagcgcccaggagctgccccaggtggaggcctacagccccagcgcctgcagcgtgagaggcggcgaggagctggtgctgaccggcagcaacttcctgcccgacagcaaggtggtgttcatcgagagaggccccgacggcaagctgcagtgggaggaggaggccaccgtgaacagactgcagagcaacgaggtgaccctgaccctgaccgtgcccgagtacagcaacaagagagtgagcagacccgtgcaggtgtacttctacgtgagcaacggcagaagaaagagaagccccacccagagcttcagattcctgcccgtgatctgcaaggaggagcccctgcccgacagcagcctgagaggcttccccagcgccagcgccacccccttcggcaccgacatggacttcagcccccccagacccccctaccccagctacccccacgaggaccccgcctgcgagaccccctacctgagcgagggcttcggctacggcatgccccccctgtacccccagaccggccccccccccagctacagacccggcctgagaatgttccccgagaccagaggcaccaccggctgcgcccagccccccgccgtgagcttcctgcccagacccttccccagcgacccctacggcggcagaggcagcagcttcagcctgggcctgcccttcagcccccccgcccccttcagacccccccccctgcccgccagcccccccctggagggccccttccccagccagagcgacgtgcaccccctgcccgccgagggctacaacaaggtgggccccggctacggccccggcgagggcgcccccgagcaggagaagagcagaggcggctacagcagcggcttcagagacagcgtgcccatccagggcatcaccctggaggagggcggctgcggcaccggcggctgcgagtgcgagtgcgtgcaggagatcgccctgcacgtgtgctag

SEQ ID NO: 11909 - DNA, 2802 bp, synthetic construct
  misc_feature 1..2802: note = Description of Artificial Sequence: Synthetic coding sequence
  source 1..2802: mol_type = other DNA
atggccgacggcggcgccgacagcgccgcccagagactgcccgagggccccggcagagtggcccccggcagagacctgggcgcccccgccggcagcatgggcgccgccagctgcgaggacgaggagctggagttcaagctggtgttcggcgaggagaaggaggccccccccctgggcgccggcggcctgggcgaggagctggacagcgaggacgcccccccctgctgcagactggccctgggcgagccccccccctacggcgccgcccccatcggcatccccagaccccccccccccagacccggcatgcacagccccccccccagacccgcccccagccccggcacctgggagagccagcccgccagaagcgtgagactgggcggccccggcggcggcgccggcggcgccggcggcggcagagtgctggagtgccccagcatcagaatcaccagcatcagccccacccccgagccccccgccgccctggaggacaaccccgacgcctggggcgacggcagccccagagactaccccccccccgagggcttcggcggctacagagaggccggcggccagggcggcggcgccttcttcagccccagccccggcagcagcagcctgagcagctggagcttcttcagcgacgccagcgacgaggccgccctgtacgccgcctgcgacgaggtggagagcgagctgaacgaggccgccagcagattcggcctgggcagccccctgcccagccccagagccagccccagaccctggacccccgaggacccctggagcctgtacggccccagccccggcggcagaggccccgaggacagctggctgctgctgagcgcccccggccccacccccgccagccccagacccgccagcccctgcggcaagagaagatacagcagcagcggcacccccagcagcgccagccccgccctgagcagaagaggcagcctgggcgaggagggcagcgagccccccccccccccccccctgcccctggccagagaccccggcagccccggccccttcgactacgtgggcgccccccccgccgagagcatcccccagaagaccagaagaaccagcagcgagcaggccgtggccctgcccagaagcgaggagcccgccagctgcaacggcaagctgcccctgggcgccgaggagagcgtggccccccccggcggcagcagaaaggaggtggccggcatggactacctggccgtgcccagccccctggcctggagcaaggccagaatcggcggccacagccccatcttcagaaccagcgccctgccccccctggactggcccctgcccagccagtacgagcagctggagctgagaatcgaggtgcagcccagagcccaccacagagcccactacgagaccgagggcagcagaggcgccgtgaaggccgcccccggcggccaccccgtggtgaagctgctgggctacagcgagaagcccctgaccctgcagatgttcatcggcaccgccgacgagagaaacctgagaccccacgccttctaccaggtgcacagaatcaccggcaagatggtggccaccgccagctacgaggccgtggtgagcggcaccaaggtgctggagatgaccctgctgcccgagaacaacatggccgccaacatcgactgcgccggcatcctgaagctgagaaacagcgacatcgagctgagaaagggcgagaccgacatcggcagaaagaacaccagagtgagactggtgttcagagtgcacgtgccccagggcggcggcaaggtggtgagcgtgcaggccgccagcgtgcccatcgagtgcagccagagaagcgcccaggagctgccccaggtggaggcctacagccccagcgcctgcagcgtgagaggcggcgaggagctggtgctgaccggcagcaacttcctgcccgacagcaaggtggtgttcatcgagagaggccccgacggcaagctgcagtgggaggaggaggccaccgtgaacagactgcagagcaacgaggtgaccctgaccctgaccgtgcccgagtacagcaacaagagagtgagcagacccgtgcaggtgtacttctacgtgagcaacggcagaagaaagagaagccccacccagagcttcagattcctgcccgtgatctgcaaggaggagcccctgcccgacagcagcctgagaggcttccccagcgccagcgccacccccttcggcaccgacatggacttcagcccccccagacccccctaccccagctacccccacgaggaccccgcctgcgagaccccctacctgagcgagggcttcggctacggcatgccccccctgtacccccagaccggccccccccccagctacagacccggcctgagaatgttccccgagaccagaggcaccaccggctgcgcccagccccccgccgtgagcttcctgcccagacccttccccagcgacccctacggcggcagaggcagcagcttcagcctgggcctgcccttcagcccccccgcccccttcagacccccccccctgcccgccagcccccccctggagggccccttccccagccagagcgacgtgcaccccctgcccgccgagggctacaacaaggtgggccccggctacggccccggcgagggcgcccccgagcaggagaagagcagaggcggctacagcagcggcttcagagacagcgtgcccatccagggcatcaccctggaggagggcggctgcggcaccggcggctgcgagtgcgagtgcgtgcaggagatcgccctgcacgtgtgctag

SEQ ID NO: 11910 - DNA, 2481 bp, synthetic construct
  misc_feature 1..2481: note = Description of Artificial Sequence: Synthetic coding sequence
  source 1..2481: mol_type = other DNA
atggccgacggcggcgccgacagcgccgcccagagactgcccgagggccccggcagagtggcccccggcagagacctgggcgcccccgccggcagcatgggcgccgccagctgcgaggacgaggagctggagttcaagctggtgttcggcgaggagaaggaggccccccccctgggcgccggcggcctgggcgaggagctggacagcgaggacgcccccccctgctgcagactggccctgggcgagccccccccctacggcgccgcccccatcggcatccccagaccccccccccccagacccggcatgcacagccccccccccagacccgcccccagccccggcacctgggagagccagcccgccagaagcgtgagactgggcggccccggcggcggcgccggcggcgccggcggcggcagagtgctggagtgccccagcatcagaatcaccagcatcagccccacccccgagccccccgccgccctggaggacaaccccgacgcctggggcgacggcagccccagagactaccccccccccgagggcttcggcggctacagagaggccggcggccagggcggcggcgccttcttcagccccagccccggcagcagcagcctgagcagctggagcttcttcagcgacgccagcgacgaggccgccctgtacgccgcctgcgacgaggtggagagcgagctgaacgaggccgccagcagattcggcctgggcagccccctgcccagccccagagccagccccagaccctggacccccgaggacccctggagcctgtacggccccagccccggcggcagaggccccgaggacagctggctgctgctgagcgcccccggccccacccccgccagccccagacccgccagcccctgcggcaagagaagatacagcagcagcggcacccccagcagcgccagccccgccctgagcagaagaggcagcctgggcgaggagggcagcgagccccccccccccccccccctgcccctggccagagaccccggcagccccggccccttcgactacgtgggcgccccccccgccgagagcatcccccagaagaccagaagaaccagcagcgagcaggccgtggccctgcccagaagcgaggagcccgccagctgcaacggcaagctgcccctgggcgccgaggagagcgtggccccccccggcggcagcagaaaggaggtggccggcatggactacctggccgtgcccagccccctggcctggagcaaggccagaatcggcggccacagccccatcttcagaaccagcgccctgccccccctggactggcccctgcccagccagtacgagcagctggagctgagaatcgaggtgcagcccagagcccaccacagagcccactacgagaccgagggcagcagaggcgccgtgaaggccgcccccggcggccaccccgtggtgaagctgctgggctacagcgagaagcccctgaccctgcagatgttcatcggcaccgccgacgagagaaacctgagaccccacgccttctaccaggtgcacagaatcaccggcaagatggtggccaccgccagctacgaggccgtggtgagcggcaccaaggtgctggagatgaccctgctgcccgagaacaacatggccgccaacatcgactgcgccggcatcctgaagctgagaaacagcgacatcgagctgagaaagggcgagaccgacatcggcagaaagaacaccagagtgagactggtgttcagagtgcacgtgccccagggcggcggcaaggtggtgagcgtgcaggccgccagcgtgcccatcgagtgcagccagagaagcgcccaggagctgccccaggtggaggcctacagccccagcgcctgcagcgtgagaggcggcgaggagctggtgctgaccggcagcaacttcctgcccgacagcaaggtggtgttcatcgagagaggccccgacggcaagctgcagtgggaggaggaggccaccgtgaacagactgcagagcaacgaggtgaccctgaccctgaccgtgcccgagtacagcaacaagagagtgagcagacccgtgcaggtgtacttctacgtgagcaacggcagaagaaagagaagccccacccagagcttcagattcctgcccgtgatctgcaaggaggagcccctgcccgacagcagcctgagaggcttccccagcgccagcgccacccccttcggcaccgacatggacttcagcccccccagacccccctaccccagctacccccacgaggaccccgcctgcgagaccccctacctgagcgagggcttcggctacggcatgccccccctgtacccccagaccggccccccccccagctacagacccggcctgagaatgttccccgagaccagaggcaccaccgtgagcgagatcatcggcagagacctgagcggcttccccgccccccccggcgaggagccccccgcctag

SEQ ID NO: 11911 - DNA, 2706 bp, synthetic construct
  misc_feature 1..2706: note = Description of Artificial Sequence: Synthetic coding sequence
  source 1..2706: mol_type = other DNA
atgggcgccgccagctgcgaggacgaggagctggagttcaagctggtgttcggcgaggagaaggaggccccccccctgggcgccggcggcctgggcgaggagctggacagcgaggacgcccccccctgctgcagactggccctgggcgagccccccccctacggcgccgcccccatcggcatccccagaccccccccccccagacccggcatgcacagccccccccccagacccgcccccagccccggcacctgggagagccagcccgccagaagcgtgagactgggcggccccggcggcggcgccggcggcgccggcggcggcagagtgctggagtgccccagcatcagaatcaccagcatcagccccacccccgagccccccgccgccctggaggacaaccccgacgcctggggcgacggcagccccagagactaccccccccccgagggcttcggcggctacagagaggccggcggccagggcggcggcgccttcttcagccccagccccggcagcagcagcctgagcagctggagcttcttcagcgacgccagcgacgaggccgccctgtacgccgcctgcgacgaggtggagagcgagctgaacgaggccgccagcagattcggcctgggcagccccctgcccagccccagagccagccccagaccctggacccccgaggacccctggagcctgtacggccccagccccggcggcagaggccccgaggacagctggctgctgctgagcgcccccggccccacccccgccagccccagacccgccagcccctgcggcaagagaagatacagcagcagcggcacccccagcagcgccagccccgccctgagcagaagaggcagcctgggcgaggagggcagcgagccccccccccccccccccctgcccctggccagagaccccggcagccccggccccttcgactacgtgggcgccccccccgccgagagcatcccccagaagaccagaagaaccagcagcgagcaggccgtggccctgcccagaagcgaggagcccgccagctgcaacggcaagctgcccctgggcgccgaggagagcgtggccccccccggcggcagcagaaaggaggtggccggcatggactacctggccgtgcccagccccctggcctggagcaaggccagaatcggcggccacagccccatcttcagaaccagcgccctgccccccctggactggcccctgcccagccagtacgagcagctggagctgagaatcgaggtgcagcccagagcccaccacagagcccactacgagaccgagggcagcagaggcgccgtgaaggccgcccccggcggccaccccgtggtgaagctgctgggctacagcgagaagcccctgaccctgcagatgttcatcggcaccgccgacgagagaaacctgagaccccacgccttctaccaggtgcacagaatcaccggcaagatggtggccaccgccagctacgaggccgtggtgagcggcaccaaggtgctggagatgaccctgctgcccgagaacaacatggccgccaacatcgactgcgccggcatcctgaagctgagaaacagcgacatcgagctgagaaagggcgagaccgacatcggcagaaagaacaccagagtgagactggtgttcagagtgcacgtgccccagggcggcggcaaggtggtgagcgtgcaggccgccagcgtgcccatcgagtgcagccagagaagcgcccaggagctgccccaggtggaggcctacagccccagcgcctgcagcgtgagaggcggcgaggagctggtgctgaccggcagcaacttcctgcccgacagcaaggtggtgttcatcgagagaggccccgacggcaagctgcagtgggaggaggaggccaccgtgaacagactgcagagcaacgaggtgaccctgaccctgaccgtgcccgagtacagcaacaagagagtgagcagacccgtgcaggtgtacttctacgtgagcaacggcagaagaaagagaagccccacccagagcttcagattcctgcccgtgatctgcaaggaggagcccctgcccgacagcagcctgagaggcttccccagcgccagcgccacccccttcggcaccgacatggacttcagcccccccagacccccctaccccagctacccccacgaggaccccgcctgcgagaccccctacctgagcgagggcttcggctacggcatgccccccctgtacccccagaccggccccccccccagctacagacccggcctgagaatgttccccgagaccagaggcaccaccggctgcgcccagccccccgccgtgagcttcctgcccagacccttccccagcgacccctacggcggcagaggcagcagcttcagcctgggcctgcccttcagcccccccgcccccttcagacccccccccctgcccgccagcccccccctggagggccccttccccagccagagcgacgtgcaccccctgcccgccgagggctacaacaaggtgggccccggctacggccccggcgagggcgcccccgagcaggagaagagcagaggcggctacagcagcggcttcagagacagcgtgcccatccagggcatcaccctggaggagggcggctgcggcaccggcggctgcgagtgcgagtgcgtgcaggagatcgccctgcacgtgtgctag

SEQ ID NO: 11912 - DNA, 2499 bp, synthetic construct
  misc_feature 1..2499: note = Description of Artificial Sequence: Synthetic coding sequence
  source 1..2499: mol_type = other DNA
atgcacagccccccccccagacccgcccccagccccggcacctgggagagccagcccgccagaagcgtgagactgggcggccccggcggcggcgccggcggcgccggcggcggcagagtgctggagtgccccagcatcagaatcaccagcatcagccccacccccgagccccccgccgccctggaggacaaccccgacgcctggggcgacggcagccccagagactaccccccccccgagggcttcggcggctacagagaggccggcggccagggcggcggcgccttcttcagccccagccccggcagcagcagcctgagcagctggagcttcttcagcgacgccagcgacgaggccgccctgtacgccgcctgcgacgaggtggagagcgagctgaacgaggccgccagcagattcggcctgggcagccccctgcccagccccagagccagccccagaccctggacccccgaggacccctggagcctgtacggccccagccccggcggcagaggccccgaggacagctggctgctgctgagcgcccccggccccacccccgccagccccagacccgccagcccctgcggcaagagaagatacagcagcagcggcacccccagcagcgccagccccgccctgagcagaagaggcagcctgggcgaggagggcagcgagccccccccccccccccccctgcccctggccagagaccccggcagccccggccccttcgactacgtgggcgccccccccgccgagagcatcccccagaagaccagaagaaccagcagcgagcaggccgtggccctgcccagaagcgaggagcccgccagctgcaacggcaagctgcccctgggcgccgaggagagcgtggccccccccggcggcagcagaaaggaggtggccggcatggactacctggccgtgcccagccccctggcctggagcaaggccagaatcggcggccacagccccatcttcagaaccagcgccctgccccccctggactggcccctgcccagccagtacgagcagctggagctgagaatcgaggtgcagcccagagcccaccacagagcccactacgagaccgagggcagcagaggcgccgtgaaggccgcccccggcggccaccccgtggtgaagctgctgggctacagcgagaagcccctgaccctgcagatgttcatcggcaccgccgacgagagaaacctgagaccccacgccttctaccaggtgcacagaatcaccggcaagatggtggccaccgccagctacgaggccgtggtgagcggcaccaaggtgctggagatgaccctgctgcccgagaacaacatggccgccaacatcgactgcgccggcatcctgaagctgagaaacagcgacatcgagctgagaaagggcgagaccgacatcggcagaaagaacaccagagtgagactggtgttcagagtgcacgtgccccagggcggcggcaaggtggtgagcgtgcaggccgccagcgtgcccatcgagtgcagccagagaagcgcccaggagctgccccaggtggaggcctacagccccagcgcctgcagcgtgagaggcggcgaggagctggtgctgaccggcagcaacttcctgcccgacagcaaggtggtgttcatcgagagaggccccgacggcaagctgcagtgggaggaggaggccaccgtgaacagactgcagagcaacgaggtgaccctgaccctgaccgtgcccgagtacagcaacaagagagtgagcagacccgtgcaggtgtacttctacgtgagcaacggcagaagaaagagaagccccacccagagcttcagattcctgcccgtgatctgcaaggaggagcccctgcccgacagcagcctgagaggcttccccagcgccagcgccacccccttcggcaccgacatggacttcagcccccccagacccccctaccccagctacccccacgaggaccccgcctgcgagaccccctacctgagcgagggcttcggctacggcatgccccccctgtacccccagaccggccccccccccagctacagacccggcctgagaatgttccccgagaccagaggcaccaccggctgcgcccagccccccgccgtgagcttcctgcccagacccttccccagcgacccctacggcggcagaggcagcagcttcagcctgggcctgcccttcagcccccccgcccccttcagacccccccccctgcccgccagcccccccctggagggccccttccccagccagagcgacgtgcaccccctgcccgccgagggctacaacaaggtgggccccggctacggccccggcgagggcgcccccgagcaggagaagagcagaggcggctacagcagcggcttcagagacagcgtgcccatccagggcatcaccctggaggaggtgagcgagatcatcggcagagacctgagcggcttccccgccccccccggcgaggagccccccgcctag

SEQ ID NO: 11913 - DNA, 2385 bp, synthetic construct
  misc_feature 1..2385: note = Description of Artificial Sequence: Synthetic coding sequence
  source 1..2385: mol_type = other DNA
atgggcgccgccagctgcgaggacgaggagctggagttcaagctggtgttcggcgaggagaaggaggccccccccctgggcgccggcggcctgggcgaggagctggacagcgaggacgcccccccctgctgcagactggccctgggcgagccccccccctacggcgccgcccccatcggcatccccagaccccccccccccagacccggcatgcacagccccccccccagacccgcccccagccccggcacctgggagagccagcccgccagaagcgtgagactgggcggccccggcggcggcgccggcggcgccggcggcggcagagtgctggagtgccccagcatcagaatcaccagcatcagccccacccccgagccccccgccgccctggaggacaaccccgacgcctggggcgacggcagccccagagactaccccccccccgagggcttcggcggctacagagaggccggcggccagggcggcggcgccttcttcagccccagccccggcagcagcagcctgagcagctggagcttcttcagcgacgccagcgacgaggccgccctgtacgccgcctgcgacgaggtggagagcgagctgaacgaggccgccagcagattcggcctgggcagccccctgcccagccccagagccagccccagaccctggacccccgaggacccctggagcctgtacggccccagccccggcggcagaggccccgaggacagctggctgctgctgagcgcccccggccccacccccgccagccccagacccgccagcccctgcggcaagagaagatacagcagcagcggcacccccagcagcgccagccccgccctgagcagaagaggcagcctgggcgaggagggcagcgagccccccccccccccccccctgcccctggccagagaccccggcagccccggccccttcgactacgtgggcgccccccccgccgagagcatcccccagaagaccagaagaaccagcagcgagcaggccgtggccctgcccagaagcgaggagcccgccagctgcaacggcaagctgcccctgggcgccgaggagagcgtggccccccccggcggcagcagaaaggaggtggccggcatggactacctggccgtgcccagccccctggcctggagcaaggccagaatcggcggccacagccccatcttcagaaccagcgccctgccccccctggactggcccctgcccagccagtacgagcagctggagctgagaatcgaggtgcagcccagagcccaccacagagcccactacgagaccgagggcagcagaggcgccgtgaaggccgcccccggcggccaccccgtggtgaagctgctgggctacagcgagaagcccctgaccctgcagatgttcatcggcaccgccgacgagagaaacctgagaccccacgccttctaccaggtgcacagaatcaccggcaagatggtggccaccgccagctacgaggccgtggtgagcggcaccaaggtgctggagatgaccctgctgcccgagaacaacatggccgccaacatcgactgcgccggcatcctgaagctgagaaacagcgacatcgagctgagaaagggcgagaccgacatcggcagaaagaacaccagagtgagactggtgttcagagtgcacgtgccccagggcggcggcaaggtggtgagcgtgcaggccgccagcgtgcccatcgagtgcagccagagaagcgcccaggagctgccccaggtggaggcctacagccccagcgcctgcagcgtgagaggcggcgaggagctggtgctgaccggcagcaacttcctgcccgacagcaaggtggtgttcatcgagagaggccccgacggcaagctgcagtgggaggaggaggccaccgtgaacagactgcagagcaacgaggtgaccctgaccctgaccgtgcccgagtacagcaacaagagagtgagcagacccgtgcaggtgtacttctacgtgagcaacggcagaagaaagagaagccccacccagagcttcagattcctgcccgtgatctgcaaggaggagcccctgcccgacagcagcctgagaggcttccccagcgccagcgccacccccttcggcaccgacatggacttcagcccccccagacccccctaccccagctacccccacgaggaccccgcctgcgagaccccctacctgagcgagggcttcggctacggcatgccccccctgtacccccagaccggccccccccccagctacagacccggcctgagaatgttccccgagaccagaggcaccaccgtgagcgagatcatcggcagagacctgagcggcttccccgccccccccggcgaggagccccccgcctag

SEQ ID NO: 11914 - DNA, 2499 bp, synthetic construct; identical to SEQ ID NO: 11912
  misc_feature 1..2499: note = Description of Artificial Sequence: Synthetic coding sequence
  source 1..2499: mol_type = other DNA

SEQ ID NO: 11915 - DNA, 990 bp, synthetic construct
  misc_feature 1..990: note = Description of Artificial Sequence: Synthetic coding sequence
  source 1..990: mol_type = other DNA
atgttcatcggcaccgccgacgagagaaacctgagaccccacgccttctaccaggtgcacagaatcaccggcaagatggtggccaccgccagctacgaggccgtggtgagcggcaccaaggtgctggagatgaccctgctgcccgagaacaacatggccgccaacatcgactgcgccggcatcctgaagctgagaaacagcgacatcgagctgagaaagggcgagaccgacatcggcagaaagaacaccagagtgagactggtgttcagagtgcacgtgccccagggcggcggcaaggtggtgagcgtgcaggccgccagcgtgcccatcgagtgcagccagagaagcgcccaggagctgccccaggtggaggcctacagccccagcgcctgcagcgtgagaggcggcgaggagctggtgctgaccggcagcaacttcctgcccgacagcaaggtggtgttcatcgagagaggccccgacggcaagctgcagtgggaggaggaggccaccgtgaacagactgcagagcaacgaggtgaccctgaccctgaccgtgcccgagtacagcaacaagagagtgagcagacccgtgcaggtgtacttctacgtgagcaacggcagaagaaagagaagccccacccagagcttcagattcctgcccgtgatctgcaaggaggagcccctgcccgacagcagcctgagaggcttccccagcgccagcgccacccccttcggcaccgacatggacttcagcccccccagacccccctaccccagctacccccacgaggaccccgcctgcgagaccccctacctgagcgagggcttcggctacggcatgccccccctgtacccccagaccggccccccccccagctacagacccggcctgagaatgttccccgagaccagaggcaccaccgtgagcgagatcatcggcagagacctgagcggcttccccgccccccccggcgaggagccccccgcctag

SEQ ID NO: 11916 - DNA, 2574 bp, synthetic construct
  misc_feature 1..2574: note = Description of Artificial Sequence: Synthetic coding sequence
  source 1..2574: mol_type = other DNA
atgatcaccaccctgcccagcctgctgcccgccagcctggccagcatcagccacagagtgaccaacctgcccagcaacagcctgagccacaaccccggcctgagcaagcccgacttccccggcaacagcagccccggcctgcccagcagcagcagccccggcagagacctgggcgcccccgccggcagcatgggcgccgccagctgcgaggacgaggagctggagttcaagctggtgttcggcgaggagaaggaggccccccccctgggcgccggcggcctgggcgaggagctggacagcgaggacgcccccccctgctgcagactggccctgggcgagccccccccctacggcgccgcccccatcggcatccccagaccccccccccccagacccggcatgcacagccccccccccagacccgcccccagccccggcacctgggagagccagcccgccagaagcgtgagactgggcggccccggcggcggcgccggcggcgccggcggcggcagagtgctggagtgccccagcatcagaatcaccagcatcagccccacccccgagccccccgccgccctggaggacaaccccgacgcctggggcgacggcagccccagagactaccccccccccgagggcttcggcggctacagagaggccggcggccagggcggcggcgccttcttcagccccagccccggcagcagcagcctgagcagctggagcttcttcagcgacgccagcgacgaggccgccctgtacgccgcctgcgacgaggtggagagcgagctgaacgaggccgccagcagattcggcctgggcagccccctgcccagccccagagccagccccagaccctggacccccgaggacccctggagcctgtacggccccagccccggcggcagaggccccgaggacagctggctgctgctgagcgcccccggccccacccccgccagccccagacccgccagcccctgcggcaagagaagatacagcagcagcggcacccccagcagcgccagccccgccctgagcagaagaggcagcctgggcgaggagggcagcgagccccccccccccccccccctgcccctggccagagaccccggcagccccggccccttcgactacgtgggcgccccccccgccgagagcatcccccagaagaccagaagaaccagcagcgagcaggccgtggccctgcccagaagcgaggagcccgccagctgcaacggcaagctgcccctgggcgccgaggagagcgtggccccccccggcggcagcagaaaggaggtggccggcatggactacctggccgtgcccagccccctggcctggagcaaggccagaatcggcggccacagccccatcttcagaaccagcgccctgccccccctggactggcccctgcccagccagtacgagcagctggagctgagaatcgaggtgcagcccagagcccaccacagagcccactacgagaccgagggcagcagaggcgccgtgaaggccgcccccggcggccaccccgtggtgaagctgctgggctacagcgagaagcccctgaccctgcagatgttcatcggcaccgccgacgagagaaacctgagaccccacgccttctaccaggtgcacagaatcaccggcaagatggtggccaccgccagctacgaggccgtggtgagcggcaccaaggtgctggagatgaccctgctgcccgagaacaacatggccgccaacatcgactgcgccggcatcctgaagctgagaaacagcgacatcgagctgagaaagggcgagaccgacatcggcagaaagaacaccagagtgagactggtgttcagagtgcacgtgccccagggcggcggcaaggtggtgagcgtgcaggccgccagcgtgcccatcgagtgcagccagagaagcgcccaggagctgccccaggtggaggcctacagccccagcgcctgcagcgtgagaggcggcgaggagctggtgctgaccggcagcaacttcctgcccgacagcaaggtggtgttcatcgagagaggccccgacggcaagctgcagtgggaggaggaggccaccgtgaacagactgcagagcaacgaggtgaccctgaccctgaccgtgcccgagtacagcaacaagagagtgagcagacccgtgcaggtgtacttctacgtgagcaacggcagaagaaagagaagccccacccagagcttcagattcctgcccgtgatctgcaaggaggagcccctgcccgacagcagcctgagaggcttccccagcgccagcgccacccccttcggcaccgacatggacttcagcccccccagacccccctaccccagctacccccacgaggaccccgcctgcgagaccccctacctgagcgagggcttcggctacggcatgccccccctgtacccccagaccggccccccccccagctacagacccggcctgagaatgttccccgagaccagaggcaccaccgtgagcgagatcatcggcagagacctgagcggcttccccgccccccccggcgaggagccccccgcctag

SEQ ID NO: 11917 - DNA, 2175 bp, synthetic construct
  misc_feature 1..2175: note = Description of Artificial Sequence: Synthetic coding sequence
  source 1..2175: mol_type = other DNA
atgcacagccccccccccagacccgcccccagccccggcacctgggagagccagcccgccagaagcgtgagactgggcggccccggcggcggcgccggcggcgccggcggcggcagagtgctggagtgccccagcatcagaatcaccagcatcagccccacccccgagccccccgccgccctggaggacaaccccgacgcctggggcgacggcagccccagagactaccccccccccgagggcttcggcggctacagagaggccggcggccagggcggcggcgccttcttcagccccagccccggcagcagcagcctgagcagctggagcttcttcagcgacgccagcgacgaggccgccctgtacgccgcctgcgacgaggtggagagcgagctgaacgaggccgccagcagattcggcctgggcagccccctgcccagccccagagccagccccagaccctggacccccgaggacccctggagcctgtacggccccagccccggcggcagaggccccgaggacagctggctgctgctgagcgcccccggccccacccccgccagccccagacccgccagcccctgcggcaagagaagatacagcagcagcggcacccccagcagcgccagccccgccctgagcagaagaggcagcctgggcgaggagggcagcgagccccccccccccccccccctgcccctggccagagaccccggcagccccggccccttcgactacgtgggcgccccccccgccgagagcatcccccagaagaccagaagaaccagcagcgagcaggccgtggccctgcccagaagcgaggagcccgccagctgcaacggcaagctgcccctgggcgccgaggagagcgtggccccccccggcggcagcagaaaggaggtggccggcatggactacctggccgtgcccagccccctggcctggagcaaggccagaatcggcggccacagccccatcttcagaaccagcgccctgccccccctggactggcccctgcccagccagtacgagcagctggagctgagaatcgaggtgcagcccagagcccaccacagagcccactacgagaccgagggcagcagaggcgccgtgaaggccgcccccggcggccaccccgtggtgaagctgctgggctacagcgagaagcccctgaccctgcagatgttcatcggcaccgccgacgagagaaacctgagaccccacgccttctaccaggtgcacagaatcaccggcaagatggtggccaccgccagctacgaggccgtggtgagcggcaccaaggtgctggagatgaccctgctgcccgagaacaacatggccgccaacatcgactgcgccggcatcctgaagctgagaaacagcgacatcgagctgagaaagggcgagaccgacatcggcagaaagaacaccagagtgagactggtgttcagagtgcacgtgccccagggcggcggcaaggtggtgagcgtgcaggccgccagcgtgcccatcgagtgcagccagagaagcgcccaggagctgccccaggtggaggcctacagccccagcgcctgcagcgtgagaggcggcgaggagctggtgctgaccggcagcaacttcctgcccgacagcaaggtggtgttcatcgagagaggccccgacggcaagctgcagtgggaggaggaggccaccgtgaacagactgcagagcaacgaggtgaccctgaccctgaccgtgcccgagtacagcaacaagagagtgagcagacccgtgcaggtgtacttctacgtgagcaacggcagaagaaagagaagccccacccagagcttcagattcctgcccgtgatctgcaaggaggagcccctgcccgacagcagcctgagaggcttccccagcgccagcgccacccccttcggcaccgacatggacttcagcccccccagacccccctaccccagctacccccacgaggaccccgcctgcgagaccccctacctgagcgagggcttcggctacggcatgccccccctgtacccccagaccggccccccccccagctacagacccggcctgagaatgttccccgagaccagaggcaccaccgtgagcgagatcatcggcagagacctgagcggcttccccgccccccccggcgaggagccccccgcctag

SEQ ID NO: 11918 - DNA, 432 bp, synthetic construct
  misc_feature 1..432: note = Description of Artificial Sequence: Synthetic coding sequence
  source 1..432: mol_type = other DNA
atgggcgccgccagctgcgaggacgaggagctggagttcaagctggtgttcggcgaggagaaggaggccccccccctgggcgccggcggcctgggcgaggagctggacagcgaggacgcccccccctgctgcagactggccctgggcgagccccccccctacggcgccgcccccatcggcatccccagaccccccccccccagacccggcatgcacagccccccccccagacccgcccccagccccggcacctgggagagccagcccgccagaagcgtgagactgggcggccccggcggcggcgccggcggcgccggcggcggcagagtgctggagtgccccagcatcagaatcaccagcatcagccccacccccgagccccccgccgccctggaggacaaccccgacgcctggggcgacggcagcccctag

SEQ ID NO: 11919 - DNA, 2424 bp, synthetic construct
  misc_feature 1..2424: note = Description of Artificial Sequence: Synthetic coding sequence
  source 1..2424: mol_type = other DNA
atgctgagcggcagagacctgggcgcccccgccggcagcatgggcgccgccagctgcgaggacgaggagctggagttcaagctggtgttcggcgaggagaaggaggccccccccctgggcgccggcggcctgggcgaggagctggacagcgaggacgcccccccctgctgcagactggccctgggcgagccccccccctacggcgccgcccccatcggcatccccagaccccccccccccagacccggcatgcacagccccccccccagacccgcccccagccccggcacctgggagagccagcccgccagaagcgtgagactgggcggccccggcggcggcgccggcggcgccggcggcggcagagtgctggagtgccccagcatcagaatcaccagcatcagccccacccccgagccccccgccgccctggaggacaaccccgacgcctggggcgacggcagccccagagactaccccccccccgagggcttcggcggctacagagaggccggcggccagggcggcggcgccttcttcagccccagccccggcagcagcagcctgagcagctggagcttcttcagcgacgccagcgacgaggccgccctgtacgccgcctgcgacgaggtggagagcgagctgaacgaggccgccagcagattcggcctgggcagccccctgcccagccccagagccagccccagaccctggacccccgaggacccctggagcctgtacggccccagccccggcggcagaggccccgaggacagctggctgctgctgagcgcccccggccccacccccgccagccccagacccgccagcccctgcggcaagagaagatacagcagcagcggcacccccagcagcgccagccccgccctgagcagaagaggcagcctgggcgaggagggcagcgagccccccccccccccccccctgcccctggccagagaccccggcagccccggccccttcgactacgtgggcgccccccccgccgagagcatcccccagaagaccagaagaaccagcagcgagcaggccgtggccctgcccagaagcgaggagcccgccagctgcaacggcaagctgcccctgggcgccgaggagagcgtggccccccccggcggcagcagaaaggaggtggccggcatggactacctggccgtgcccagccccctggcctggagcaaggccagaatcggcggccacagccccatcttcagaaccagcgccctgccccccctggactggcccctgcccagccagtacgagcagctggagctgagaatcgaggtgcagcccagagcccaccacagagcccactacgagaccgagggcagcagaggcgccgtgaaggccgcccccggcggccaccccgtggtgaagctgctgggctacagcgagaagcccctgaccctgcagatgttcatcggcaccgccgacgagagaaacctgagaccccacgccttctaccaggtgcacagaatcaccggcaagatggtggccaccgccagctacgaggccgtggtgagcggcaccaaggtgctggagatgaccctgctgcccgagaacaacatggccgccaacatcgactgcgccggcatcctgaagctgagaaacagcgacatcgagctgagaaagggcgagaccgacatcggcagaaagaacaccagagtgagactggtgttcagagtgcacgtgccccagggcggcggcaaggtggtgagcgtgcaggccgccagcgtgcccatcgagtgcagccagagaagcgcccaggagctgccccaggtggaggcctacagccccagcgcctgcagcgtgagaggcggcgaggagctggtgctgaccggcagcaacttcctgcccgacagcaaggtggtgttcatcgagagaggccccgacggcaagctgcagtgggaggaggaggccaccgtgaacagactgcagagcaacgaggtgaccctgaccctgaccgtgcccgagtacagcaacaagagagtgagcagacccgtgcaggtgtacttctacgtgagcaacggcagaagaaagagaagccccacccagagcttcagattcctgcccgtgatctgcaaggaggagcccctgcccgacagcagcctgagaggcttccccagcgccagcgccacccccttcggcaccgacatggacttcagcccccccagacccccctaccccagctacccccacgaggaccccgcctgcgagaccccctacctgagcgagggcttcggctacggcatgccccccctgtacccccagaccggccccccccccagctacagacccggcctgagaatgttccccgagaccagaggcaccaccgtgagcgagatcatcggcagagacctgagcggcttccccgccccccccggcgaggagccccccgcctag

SEQ ID NO: 11920 - DNA, 1311 bp, synthetic construct
  misc_feature 1..1311: note = Description of Artificial Sequence: Synthetic coding sequence
  source 1..1311: mol_type = other DNA
atgttcatcggcaccgccgacgagagaaacctgagaccccacgccttctaccaggtgcacagaatcaccggcaagatggtggccaccgccagctacgaggccgtggtgagcggcaccaaggtgctggagatgaccctgctgcccgagaacaacatggccgccaacatcgactgcgccggcatcctgaagctgagaaacagcgacatcgagctgagaaagggcgagaccgacatcggcagaaagaacaccagagtgagactggtgttcagagtgcacgtgccccagggcggcggcaaggtggtgagcgtgcaggccgccagcgtgcccatcgagtgcagccagagaagcgcccaggagctgccccaggtggaggcctacagccccagcgcctgcagcgtgagaggcggcgaggagctggtgctgaccggcagcaacttcctgcccgacagcaaggtggtgttcatcgagagaggccccgacggcaagctgcagtgggaggaggaggccaccgtgaacagactgcagagcaacgaggtgaccctgaccctgaccgtgcccgagtacagcaacaagagagtgagcagacccgtgcaggtgtacttctacgtgagcaacggcagaagaaagagaagccccacccagagcttcagattcctgcccgtgatctgcaaggaggagcccctgcccgacagcagcctgagaggcttccccagcgccagcgccacccccttcggcaccgacatggacttcagcccccccagacccccctaccccagctacccccacgaggaccccgcctgcgagaccccctacctgagcgagggcttcggctacggcatgccccccctgtacccccagaccggccccccccccagctacagacccggcctgagaatgttccccgagaccagaggcaccaccggctgcgcccagccccccgccgtgagcttcctgcccagacccttccccagcgacccctacggcggcagaggcagcagcttcagcctgggcctgcccttcagcccccccgcccccttcagacccccccccctgcccgccagcccccccctggagggccccttccccagccagagcgacgtgcaccccctgcccgccgagggctacaacaaggtgggccccggctacggccccggcgagggcgcccccgagcaggagaagagcagaggcggctacagcagcggcttcagagacagcgtgcccatccagggcatcaccctggaggagggcggctgcggcaccggcggctgcgagtgcgagtgcgtgcaggagatcgccctgcacgtgtgctag

SEQ ID NO: 11921 - DNA, 570 bp, synthetic construct
  misc_feature 1..570: note = Description of Artificial Sequence: Synthetic coding sequence
  source 1..570: mol_type = other DNA
atggacttcagcccccccagacccccctaccccagctacccccacgaggaccccgcctgcgagaccccctacctgagcgagggcttcggctacggcatgccccccctgtacccccagaccggccccccccccagctacagacccggcctgagaatgttccccgagaccagaggcaccaccggctgcgcccagccccccgccgtgagcttcctgcccagacccttccccagcgacccctacggcggcagaggcagcagcttcagcctgggcctgcccttcagcccccccgcccccttcagacccccccccctgcccgccagcccccccctggagggccccttccccagccagagcgacgtgcaccccctgcccgccgagggctacaacaaggtgggccccggctacggccccggcgagggcgcccccgagcaggagaagagcagaggcggctacagcagcggcttcagagacagcgtgcccatccagggcatcaccctggaggagggcggctgcggcaccggcggctgcgagtgcgagtgcgtgcaggagatcgccctgcacgtgtgctag

SEQ ID NO: 11922 - DNA, 2673 bp, synthetic construct
  misc_feature 1..2673: note = Description of Artificial Sequence: Synthetic coding sequence
  source 1..2673: mol_type = other DNA
atgcccgccagcatcagcagcatcttccccggccccaccctgctgctgagctgcggcagcgaggagctggacagcgaggacgcccccccctgctgcagactggccctgggcgagccccccccctacggcgccgcccccatcggcatccccagaccccccccccccagacccggcatgcacagccccccccccagacccgcccccagccccggcacctgggagagccagcccgccagaagcgtgagactgggcggccccggcggcggcgccggcggcgccggcggcggcagagtgctggagtgccccagcatcagaatcaccagcatcagccccacccccgagccccccgccgccctggaggacaaccccgacgcctggggcgacggcagccccagagactaccccccccccgagggcttcggcggctacagagaggccggcggccagggcggcggcgccttcttcagccccagccccggcagcagcagcctgagcagctggagcttcttcagcgacgccagcgacgaggccgccctgtacgccgcctgcgacgaggtggagagcgagctgaacgaggccgccagcagattcggcctgggcagccccctgcccagccccagagccagccccagaccctggacccccgaggacccctggagcctgtacggccccagccccggcggcagaggccccgaggacagctggctgctgctgagcgcccccggccccacccccgccagccccagacccgccagcccctgcggcaagagaagatacagcagcagcggcacccccagcagcgccagccccgccctgagcagaagaggcagcctgggcgaggagggcagcgagccccccccccccccccccctgcccctggccagagaccccggcagccccggccccttcgactacgtgggcgccccccccgccgagagcatcccccagaagaccagaagaaccagcagcgagcaggccgtggccctgcccagaagcgaggagcccgccagctgcaacggcaagctgcccctgggcgccgaggagagcgtggccccccccggcggcagcagaaaggaggtggccggcatggactacctggccgtgcccagccccctggcctggagcaaggccagaatcggcggccacagccccatcttcagaaccagcgccctgccccccctggactggcccctgcccagccagtacgagcagctggagctgagaatcgaggtgcagcccagagcccaccacagagcccactacgagaccgagggcagcagaggcgccgtgaaggccgcccccggcggccaccccgtggtgaagctgctgggctacagcgagaagcccctgaccctgcagatgttcatcggcaccgccgacgagagaaacctgagaccccacgccttctaccaggtgcacagaatcaccggcaagatggtggccaccgccagctacgaggccgtggtgagcggcaccaaggtgctggagatgaccctgctgcccgagaacaacatggccgccaacatcgactgcgccggcatcctgaagctgagaaacagcgacatcgagctgagaaagggcgagaccgacatcggcagaaagaacaccagagtgagactggtgttcagagtgcacgtgccccagggcggcggcaaggtggtgagcgtgcaggccgccagcgtgcccatcgagtgcagccagagaagcgcccaggagctgccccaggtggaggcctacagccccagcgcctgcagcgtgagaggcggcgaggagctggtgctgaccggcagcaacttcctgcccgacagcaaggtggtgttcatcgagagaggccccgacggcaagctgcagtgggaggaggaggccaccgtgaacagactgcagagcaacgaggtgaccctgaccctgaccgtgcccgagtacagcaacaagagagtgagcagacccgtgcaggtgtacttctacgtgagcaacggcagaagaaagagaagccccacccagagcttcagattcctgcccgtgatctgcaaggaggagcccctgcccgacagcagcctgagaggcttccccagcgccagcgccacccccttcggcaccgacatggacttcagcccccccagacccccctaccccagctacccccacgaggaccccgcctgcgagaccccctacctgagcgagggcttcggctacggcatgccccccctgtacccccagaccggccccccccccagctacagacccggcctgagaatgttccccgagaccagaggcaccaccggctgcgcccagccccccgccgtgagcttcctgcccagacccttccccagcgacccctacggcggcagaggcagcagcttcagcctgggcctgcccttcagcccccccgcccccttcagacccccccccctgcccgccagcccccccctggagggccccttccccagccagagcgacgtgcaccccctgcccgccgagggctacaacaaggtgggccccggctacggccccggcgagggcgcccccgagcaggagaagagcagaggcggctacagcagcggcttcagagacagcgtgcccatccagggcatcaccctggaggaggtgagcgagatcatcggcagagacctgagcggcttccccgccccccccggcgaggagccccccgcctag

SEQ ID NO: 11923 - DNA, 2748 bp, synthetic construct
  misc_feature 1..2748: note = Description of Artificial Sequence: Synthetic coding sequence
  source 1..2748: mol_type = other DNA
atgctgagcggcagagacctgggcgcccccgccggcagcatgggcgccgccagctgcgaggacgaggagctggagttcaagctggtgttcggcgaggagaaggaggccccccccctgggcgccggcggcctgggcgaggagctggacagcgaggacgcccccccctgctgcagactggccctgggcgagccccccccctacggcgccgcccccatcggcatccccagaccccccccccccagacccggcatgcacagccccccccccagacccgcccccagccccggcacctgggagagccagcccgccagaagcgtgagactgggcggccccggcggcggcgccggcggcgccggcggcggcagagtgctggagtgccccagcatcagaatcaccagcatcagccccacccccgagccccccgccgccctggaggacaaccccgacgcctggggcgacggcagccccagagactaccccccccccgagggcttcggcggctacagagaggccggcggccagggcggcggcgccttcttcagccccagccccggcagcagcagcctgagcagctggagcttcttcagcgacgccagcgacgaggccgccctgtacgccgcctgcgacgaggtggagagcgagctgaacgaggccgccagcagattcggcctgggcagccccctgcccagccccagagccagccccagaccctggacccccgaggacccctggagcctgtacggccccagccccggcggcagaggccccgaggacagctggctgctgctgagcgcccccggccccacccccgccagccccagacccgccagcccctgcggcaagagaagatacagcagcagcggcacccccagcagcgccagccccgccctgagcagaagaggcagcctgggcgaggagggcagcgagccccccccccccccccccctgcccctggccagagaccccggcagccccggccccttcgactacgtgggcgccccccccgccgagagcatcccccagaagaccagaagaaccagcagcgagcaggccgtggccctgcccagaagcgaggagcccgccagctgcaacggcaagctgcccctgggcgccgaggagagcgtggccccccccggcggcagcagaaaggaggtggccggcatggactacctggccgtgcccagccccctggcctggagcaaggccagaatcggcggccacagccccatcttcagaaccagcgccctgccccccctggactggcccctgcccagccagtacgagcagctggagctgagaatcgaggtgcagcccagagcccaccacagagcccactacgagaccgagggcagcagaggcgccgtgaaggccgcccccggcggccaccccgtggtgaagctgctgggctacagcgagaagcccctgaccctgcagatgttcatcggcaccgccgacgagagaaacctgagaccccacgccttctaccaggtgcacagaatcaccggcaagatggtggccaccgccagctacgaggccgtggtgagcggcaccaaggtgctggagatgaccctgctgcccgagaacaacatggccgccaacatcgactgcgccggcatcctgaagctgagaaacagcgacatcgagctgagaaagggcgagaccgacatcggcagaaagaacaccagagtgagactggtgttcagagtgcacgtgccccagggcggcggcaaggtggtgagcgtgcaggccgccagcgtgcccatcgagtgcagccagagaagcgcccaggagctgccccaggtggaggcctacagccccagcgcctgcagcgtgagaggcggcgaggagctggtgctgaccggcagcaacttcctgcccgacagcaaggtggtgttcatcgagagaggccccgacggcaagctgcagtgggaggaggaggccaccgtgaacagactgcagagcaacgaggtgaccctgaccctgaccgtgcccgagtacagcaacaagagagtgagcagacccgtgcaggtgtacttctacgtgagcaacggcagaagaaagagaagccccacccagagcttcagattcctgcccgtgatctgcaaggaggagcccctgcccgacagcagcctgagaggcttccccagcgccagcgccacccccttcggcaccgacatggacttcagcccccccagacccccctaccccagctacccccacgaggaccccgcctgcgagaccccctacctgagcgagggcttcggctacggcatgccccccctgtacccccagaccggccccccccccagctacagacccggcctgagaatgttccccgagaccagaggcaccaccggctgcgcccagccccccgccgtgagcttcctgcccagacccttccccagcgacccctacggcggcagaggcagcagcttcagcctgggcctgcccttcagcccccccgcccccttcagacccccccccctgcccgccagcccccccctggagggccccttccccagccagagcgacgtgcaccccctgcccgccgagggctacaacaaggtgggccccggctacggccccggcgagggcgcccccgagcaggagaagagcagaggcggctacagcagcggcttcagagacagcgtgcccatccagggcatcaccctggaggaggtgagcgagatcatcggcagagacctgagcggcttccccgccccccccggcgaggagccccccgcctag

SEQ ID NO: 11924 - DNA, 573 bp, synthetic construct
  misc_feature 1..573: note = Description of Artificial Sequence: Synthetic coding sequence
  source 1..573: mol_type = other DNA
atggacttcagcccccccagacccccctaccccagctacccccacgaggaccccgcctgcgagaccccctacctgagcgagggcttcggctacggcatgccccccctgtacccccagaccggccccccccccagctacagacccggcctgagaatgttccccgagaccagaggcaccaccggctgcgcccagccccccgccgtgagcttcctgcccagacccttccccagcgacccctacggcggcagaggcagcagcttcagcctgggcctgcccttcagcccccccgcccccttcagacccccccccctgcccgccagcccccccctggagggccccttccccagccagagcgacgtgcaccccctgcccgccgagggctacaacaaggtgggccccggctacggccccggcgagggcgcccccgagcaggagaagagcagaggcggctacagcagcggcttcagagacagcgtgcccatccagggcatcaccctggaggaggtgagcgagatcatcggcagagacctgagcggcttccccgccccccccggcgaggagccccccgcctag

SEQ ID NO: 11925 - DNA, 2349 bp, synthetic construct
  misc_feature 1..2349: note = Description of Artificial Sequence: Synthetic coding sequence
  source 1..2349: mol_type = other DNA
atgcccgccagcatcagcagcatcttccccggccccaccctgctgctgagctgcggcagcgaggagctggacagcgaggacgcccccccctgctgcagactggccctgggcgagccccccccctacggcgccgcccccatcggcatccccagaccccccccccccagacccggcatgcacagccccccccccagacccgcccccagccccggcacctgggagagccagcccgccagaagcgtgagactgggcggccccggcggcggcgccggcggcgccggcggcggcagagtgctggagtgccccagcatcagaatcaccagcatcagccccacccccgagccccccgccgccctggaggacaaccccgacgcctggggcgacggcagccccagagactaccccccccccgagggcttcggcggctacagagaggccggcggccagggcggcggcgccttcttcagccccagccccggcagcagcagcctgagcagctggagcttcttcagcgacgccagcgacgaggccgccctgtacgccgcctgcgacgaggtggagagcgagctgaacgaggccgccagcagattcggcctgggcagccccctgcccagccccagagccagccccagaccctggacccccgaggacccctggagcctgtacggccccagccccggcggcagaggccccgaggacagctggctgctgctgagcgcccccggccccacccccgccagccccagacccgccagcccctgcggcaagagaagatacagcagcagcggcacccccagcagcgccagccccgccctgagcagaagaggcagcctgggcgaggagggcagcgagccccccccccccccccccctgcccctggccagagaccccggcagccccggccccttcgactacgtgggcgccccccccgccgagagcatcccccagaagaccagaagaaccagcagcgagcaggccgtggccctgcccagaagcgaggagcccgccagctgcaacggcaagctgcccctgggcgccgaggagagcgtggccccccccggcggcagcagaaaggaggtggccggcatggactacctggccgtgcccagccccctggcctggagcaaggccagaatcggcggccacagccccatcttcagaaccagcgccctgccccccctggactggcccctgcccagccagtacgagcagctggagctgagaatcgaggtgcagcccagagcccaccacagagcccactacgagaccgagggcagcagaggcgccgtgaaggccgcccccggcggccaccccgtggtgaagctgctgggctacagcgagaagcccctgaccctgcagatgttcatcggcaccgccgacgagagaaacctgagaccccacgccttctaccaggtgcacagaatcaccggcaagatggtggccaccgccagctacgaggccgtggtgagcggcaccaaggtgctggagatgaccctgctgcccgagaacaacatggccgccaacatcgactgcgccggcatcctgaagctgagaaacagcgacatcgagctgagaaagggcgagaccgacatcggcagaaagaacaccagagtgagactggtgttcagagtgcacgtgccccagggcggcggcaaggtggtgagcgtgcaggccgccagcgtgcccatcgagtgcagccagagaagcgcccaggagctgccccaggtggaggcctacagccccagcgcctgcagcgtgagaggcggcgaggagctggtgctgaccggcagcaacttcctgcccgacagcaaggtggtgttcatcgagagaggccccgacggcaagctgcagtgggaggaggaggccaccgtgaacagactgcagagcaacgaggtgaccctgaccctgaccgtgcccgagtacagcaacaagagagtgagcagacccgtgcaggtgtacttctacgtgagcaacggcagaagaaagagaagccccacccagagcttcagattcctgcccgtgatctgcaaggaggagcccctgcccgacagcagcctgagaggcttccccagcgccagcgccacccccttcggcaccgacatggacttcagcccccccagacccccctaccccagctacccccacgaggaccccgcctgcgagaccccctacctgagcgagggcttcggctacggcatgccccccctgtacccccagaccggccccccccccagctacagacccggcctgagaatgttccccgagaccagaggcaccaccgtgagcgagatcatcggcagagacctgagcggcttccccgccccccccggcgaggagccccccgcctag

SEQ ID NO: 11926 - DNA, 2805 bp, synthetic construct
  misc_feature 1..2805: note = Description of Artificial Sequence: Synthetic coding sequence
  source 1..2805: mol_type = other DNA
atggccgacggcggcgccgacagcgccgcccagagactgcccgagggccccggcagagtggcccccggcagagacctgggcgcccccgccggcagcatgggcgccgccagctgcgaggacgaggagctggagttcaagctggtgttcggcgaggagaaggaggccccccccctgggcgccggcggcctgggcgaggagctggacagcgaggacgcccccccctgctgcagactggccctgggcgagccccccccctacggcgccgcccccatcggcatccccagaccccccccccccagacccggcatgcacagccccccccccagacccgcccccagccccggcacctgggagagccagcccgccagaagcgtgagactgggcggccccggcggcggcgccggcggcgccggcggcggcagagtgctggagtgccccagcatcagaatcaccagcatcagccccacccccgagccccccgccgccctggaggacaaccccgacgcctggggcgacggcagccccagagactaccccccccccgagggcttcggcggctacagagaggccggcggccagggcggcggcgccttcttcagccccagccccggcagcagcagcctgagcagctggagcttcttcagcgacgccagcgacgaggccgccctgtacgccgcctgcgacgaggtggagagcgagctgaacgaggccgccagcagattcggcctgggcagccccctgcccagccccagagccagccccagaccctggacccccgaggacccctggagcctgtacggccccagccccggcggcagaggccccgaggacagctggctgctgctgagcgcccccggccccacccccgccagccccagacccgccagcccctgcggcaagagaagatacagcagcagcggcacccccagcagcgccagccccgccctgagcagaagaggcagcctgggcgaggagggcagcgagccccccccccccccccccctgcccctggccagagaccccggcagccccggccccttcgactacgtgggcgccccccccgccgagagcatcccccagaagaccagaagaaccagcagcgagcaggccgtggccctgcccagaagcgaggagcccgccagctgcaacggcaagctgcccctgggcgccgaggagagcgtggccccccccggcggcagcagaaaggaggtggccggcatggactacctggccgtgcccagccccctggcctggagcaaggccagaatcggcggccacagccccatcttcagaaccagcgccctgccccccctggactggcccctgcccagccagtacgagcagctggagctgagaatcgaggtgcagcccagagcccaccacagagcccactacgagaccgagggcagcagaggcgccgtgaaggccgcccccggcggccaccccgtggtgaagctgctgggctacagcgagaagcccctgaccctgcagatgttcatcggcaccgccgacgagagaaacctgagaccccacgccttctaccaggtgcacagaatcaccggcaagatggtggccaccgccagctacgaggccgtggtgagcggcaccaaggtgctggagatgaccctgctgcccgagaacaacatggccgccaacatcgactgcgccggcatcctgaagctgagaaacagcgacatcgagctgagaaagggcgagaccgacatcggcagaaagaacaccagagtgagactggtgttcagagtgcacgtgccccagggcggcggcaaggtggtgagcgtgcaggccgccagcgtgcccatcgagtgcagccagagaagcgcccaggagctgccccaggtggaggcctacagccccagcgcctgcagcgtgagaggcggcgaggagctggtgctgaccggcagcaacttcctgcccgacagcaaggtggtgttcatcgagagaggccccgacggcaagctgcagtgggaggaggaggccaccgtgaacagactgcagagcaacgaggtgaccctgaccctgaccgtgcccgagtacagcaacaagagagtgagcagacccgtgcaggtgtacttctacgtgagcaacggcagaagaaagagaagccccacccagagcttcagattcctgcccgtgatctgcaaggaggagcccctgcccgacagcagcctgagaggcttccccagcgccagcgccacccccttcggcaccgacatggacttcagcccccccagacccccctaccccagctacccccacgaggaccccgcctgcgagaccccctacctgagcgagggcttcggctacggcatgccccccctgtacccccagaccggccccccccccagctacagacccggcctgagaatgttccccgagaccagaggcaccaccggctgcgcccagccccccgccgtgagcttcctgcccagacccttccccagcgacccctacggcggcagaggcagcagcttcagcctgggcctgcccttcagcccccccgcccccttcagacccccccccctgcccgccagcccccccctggagggccccttccccagccagagcgacgtgcaccccctgcccgccgagggctacaacaaggtgggccccggctacggccccggcgagggcgcccccgagcaggagaagagcagaggcggctacagcagcggcttcagagacagcgtgcccatccagggcatcaccctggaggaggtgagcgagatcatcggcagagacctgagcggcttccccgccccccccggcgaggagccccccgcctag

SEQ ID NO: 11927 - DNA, 1314 bp, synthetic construct
  misc_feature 1..1314: note = Description of Artificial Sequence: Synthetic coding sequence
  source 1..1314: mol_type = other DNA
atgttcatcggcaccgccgacgagagaaacctgagaccccacgccttctaccaggtgcacagaatcaccggcaagatggtggccaccgccagctacgaggccgtggtgagcggcaccaaggtgctggagatgaccctgctgcccgagaacaacatggccgccaacatcgactgcgccggcatcctgaagctgagaaacagcgacatcgagctgagaaagggcgagaccgacatcggcagaaagaacaccagagtgagactggtgttcagagtgcacgtgccccagggcggcggcaaggtggtgagcgtgcaggccgccagcgtgcccatcgagtgcagccagagaagcgcccaggagctgccccaggtggaggcctacagccccagcgcctgcagcgtgagaggcggcgaggagctggtgctgaccggcagcaacttcctgcccgacagcaaggtggtgttcatcgagagaggccccgacggcaagctgcagtgggaggaggaggccaccgtgaacagactgcagagcaacgaggtgaccctgaccctgaccgtgcccgagtacagcaacaagagagtgagcagacccgtgcaggtgtacttctacgtgagcaacggcagaagaaagagaagccccacccagagcttcagattcctgcccgtgatctgcaaggaggagcccctgcccgacagcagcctgagaggcttccccagcgccagcgccacccccttcggcaccgacatggacttcagcccccccagacccccctaccccagctacccccacgaggaccccgcctgcgagaccccctacctgagcgagggcttcggctacggcatgccccccctgtacccccagaccggccccccccccagctacagacccggcctgagaatgttccccgagaccagaggcaccaccggctgcgcccagccccccgccgtgagcttcctgcccagacccttccccagcgacccctacggcggcagaggcagcagcttcagcctgggcctgcccttcagcccccccgcccccttcagacccccccccctgcccgccagcccccccctggagggccccttccccagccagagcgacgtgcaccccctgcccgccgagggctacaacaaggtgggccccggctacggccccggcgagggcgcccccgagcaggagaagagcagaggcggctacagcagcggcttcagagacagcgtgcccatccagggcatcaccctggaggaggtgagcgagatcatcggcagagacctgagcggcttccccgccccccccggcgaggagccccccgcctag

SEQ ID NO: 11928 - DNA, 2496 bp, synthetic construct
  misc_feature 1..2496: note = Description of Artificial Sequence: Synthetic coding sequence
  source 1..2496: mol_type = other DNA
atgcacagccccccccccagacccgcccccagccccggcacctgggagagccagcccgccagaagcgtgagactgggcggccccggcggcggcgccggcggcgccggcggcggcagagtgctggagtgccccagcatcagaatcaccagcatcagccccacccccgagccccccgccgccctggaggacaaccccgacgcctggggcgacggcagccccagagactaccccccccccgagggcttcggcggctacagagaggccggcggccagggcggcggcgccttcttcagccccagccccggcagcagcagcctgagcagctggagcttcttcagcgacgccagcgacgaggccgccctgtacgccgcctgcgacgaggtggagagcgagctgaacgaggccgccagcagattcggcctgggcagccccctgcccagccccagagccagccccagaccctggacccccgaggacccctggagcctgtacggccccagccccggcggcagaggccccgaggacagctggctgctgctgagcgcccccggccccacccccgccagccccagacccgccagcccctgcggcaagagaagatacagcagcagcggcacccccagcagcgccagccccgccctgagcagaagaggcagcctgggcgaggagggcagcgagccccccccccccccccccctgcccctggccagagaccccggcagccccggccccttcgactacgtgggcgccccccccgccgagagcatcccccagaagaccagaagaaccagcagcgagcaggccgtggccctgcccagaagcgaggagcccgccagctgcaacggcaagctgcccctgggcgccgaggagagcgtggccccccccggcggcagcagaaaggaggtggccggcatggactacctggccgtgcccagccccctggcctggagcaaggccagaatcggcggccacagccccatcttcagaaccagcgccctgccccccctggactggcccctgcccagccagtacgagcagctggagctgagaatcgaggtgcagcccagagcccaccacagagcccactacgagaccgagggcagcagaggcgccgtgaaggccgcccccggcggccaccccgtggtgaagctgctgggctacagcgagaagcccctgaccctgcagatgttcatcggcaccgccgacgagagaaacctgagaccccacgccttctaccaggtgcacagaatcaccggcaagatggtggccaccgccagctacgaggccgtggtgagcggcaccaaggtgctggagatgaccctgctgcccgagaacaacatggccgccaacatcgactgcgccggcatcctgaagctgagaaacagcgacatcgagctgagaaagggcgagaccgacatcggcagaaagaacaccagagtgagactggtgttcagagtgcacgtgccccagggcggcggcaaggtggtgagcgtgcaggccgccagcgtgcccatcgagtgcagccagagaagcgcccaggagctgccccaggtggaggcctacagccccagcgcctgcagcgtgagaggcggcgaggagctggtgctgaccggcagcaacttcctgcccgacagcaaggtggtgttcatcgagagaggccccgacggcaagctgcagtgggaggaggaggccaccgtgaacagactgcagagcaacgaggtgaccctgaccctgaccgtgcccgagtacagcaacaagagagtgagcagacccgtgcaggtgtacttctacgtgagcaacggcagaagaaagagaagccccacccagagcttcagattcctgcccgtgatctgcaaggaggagcccctgcccgacagcagcctgagaggcttccccagcgccagcgccacccccttcggcaccgacatggacttcagcccccccagacccccctaccccagctacccccacgaggaccccgcctgcgagaccccctacctgagcgagggcttcggctacggcatgccccccctgtacccccagaccggccccccccccagctacagacccggcctgagaatgttccccgagaccagaggcaccaccggctgcgcccagccccccgccgtgagcttcctgcccagacccttccccagcgacccctacggcggcagaggcagcagcttcagcctgggcctgcccttcagcccccccgcccccttcagacccccccccctgcccgccagcccccccctggagggccccttccccagccagagcgacgtgcaccccctgcccgccgagggctacaacaaggtgggccccggctacggccccggcgagggcgcccccgagcaggagaagagcagaggcggctacagcagcggcttcagagacagcgtgcccatccagggcatcaccctggaggagggcggctgcggcaccggcggctgcgagtgcgagtgcgtgcaggagatcgccctgcacgtgtgctag

SEQ ID NO: 11929 - DNA, 249 bp, synthetic construct
  misc_feature 1..249: note = Description of Artificial Sequence: Synthetic coding sequence
  source 1..249: mol_type = other DNA
atggacttcagcccccccagacccccctaccccagctacccccacgaggaccccgcctgcgagaccccctacctgagcgagggcttcggctacggcatgccccccctgtacccccagaccggccccccccccagctacagacccggcctgagaatgttccccgagaccagaggcaccaccgtgagcgagatcatcggcagagacctgagcggcttccccgccccccccggcgaggagccccccgcctag

SEQ ID NO: 11930 - DNA, 315 bp, synthetic construct
  misc_feature 1..315: note = Description of Artificial Sequence: Synthetic coding sequence
  source 1..315: mol_type = other DNA
atgagcagcgccgccagaagcagactgaccagagccaccagacaggagatgctgttcctggccctgctgctgctgcccgtggtggtggccttcgccagagccgaggccgaggaggacggcgacctgcagtgcctgtgcgtgaagaccaccagccaggtgagacccagacacatcaccagcctggaggtgatcaaggccggcccccactgccccaccgcccagctgatcgccaccctgaagaacggcagaaagatctgcctggacctgcaggccctgctgtacaagaagatcatcaaggagcacctggagagctag

SEQ ID NO: 11931 - DNA, 2907 bp, synthetic construct
  misc_feature 1..2907: note = Description of Artificial Sequence: Synthetic coding sequence
  source 1..2907: mol_type = other DNA
atggccgaggacgacccctacctgggcagacccgagcagatgttccacctggaccccagcctgacccacaccatcttcaaccccgaggtgttccagccccagatggccctgcccaccgacggcccctacctgcagatcctggagcagcccaagcagagaggcttcagattcagatacgtgtgcgagggccccagccacggcggcctgcccggcgccagcagcgagaagaacaagaagagctacccccaggtgaagatctgcaactacgtgggccccgccaaggtgatcgtgcagctggtgaccaacggcaagaacatccacctgcacgcccacagcctggtgggcaagcactgcgaggacggcatctgcaccgtgaccgccggccccaaggacatggtggtgggcttcgccaacctgggcatcctgcacgtgaccaagaagaaggtgttcgagaccctggaggccagaatgaccgaggcctgcatcagaggctacaaccccggcctgctggtgcaccccgacctggcctacctgcaggccgagggcggcggcgacagacagctgggcgacagagagaaggagctgatcagacaggccgccctgcagcagaccaaggagatggacctgagcgtggtgagactgatgttcaccgccttcctgcccgacagcaccggcagcttcaccagaagactggagcccgtggtgagcgacgccatctacgacagcaaggcccccaacgccagcaacctgaagatcgtgagaatggacagaaccgccggctgcgtgaccggcggcgaggagatctacctgctgtgcgacaaggtgcagaaggacgacatccagatcagattctacgaggaggaggagaacggcggcgtgtgggagggcttcggcgacttcagccccaccgacgtgcacagacagttcgccatcgtgttcaagacccccaagtacaaggacatcaacatcaccaagcccgccagcgtgttcgtgcagctgagaagaaagagcgacctggagaccagcgagcccaagcccttcctgtactaccccgagatcaaggacaaggaggaggtgcagagaaagagacagaagctgatgcccaacttcagcgacagcttcggcggcggcagcggcgccggcgccggcggcggcggcatgttcggcagcggcggcggcggcggcggcaccggcagcaccggccccggctacagcttcccccactacggcttccccacctacggcggcatcaccttccaccccggcaccaccaagagcaacgccggcatgaagcacggcaccatggacaccgagagcaagaaggaccccgagggctgcgacaagagcgacgacaagaacaccgtgaacctgttcggcaaggtgatcgagaccaccgagcaggaccaggagcccagcgaggccaccgtgggcaacggcgaggtgaccctgacctacgccaccggcaccaaggaggagagcgccggcgtgcaggacaacctgttcctggagaaggccatgcagctggccaagagacacgccaacgccctgttcgactacgccgtgaccggcgacgtgaagatgctgctggccgtgcagagacacctgaccgccgtgcaggacgagaacggcgacagcgtgctgcacctggccatcatccacctgcacagccagctggtgagagacctgctggaggtgaccagcggcctgatcagcgacgacatcatcaacatgagaaacgacctgtaccagacccccctgcacctggccgtgatcaccaagcaggaggacgtggtggaggacctgctgagagccggcgccgacctgagcctgctggacagactgggcaacagcgtgctgcacctggccgccaaggagggccacgacaaggtgctgagcatcctgctgaagcacaagaaggccgccctgctgctggaccaccccaacggcgacggcctgaacgccatccacctggccatgatgagcaacagcctgccctgcctgctgctgctggtggccgccggcgccgacgtgaacgcccaggagcagaagagcggcagaaccgccctgcacctggccgtggagcacgacaacatcagcctggccggctgcctgctgctggagggcgacgcccacgtggacagcaccacctacgacggcaccacccccctgcacatcgccgccggcagaggcagcaccagactggccgccctgctgaaggccgccggcgccgaccccctggtggagaacttcgagcccctgtacgacctggacgacagctgggagaacgccggcgaggacgagggcgtggtgcccggcaccacccccctggacatggccaccagctggcaggtgttcgacatcctgaacggcaagccctacgagcccgagttcaccagcgacgacctgctggcccagggcgacatgaagcagctggccgaggacgtgaagctgcagctgtacaagctgctggagatccccgaccccgacaagaactgggccaccctggcccagaagctgggcctgggcatcctgaacaacgccttcagactgagccccgcccccagcaagaccctgatggacaactacgaggtgagcggcggcaccgtgagagagctggtggaggccctgagacagatgggctacaccgaggccatcgaggtgatccaggccgccagcagccccgtgaagaccaccagccaggcccacagcctgcccctgagccccgccagcaccagacagcagatcgacgagctgagagacagcgacagcgtgtgcgacagcggcgtggagaccagcttcagaaagctgagcttcaccgagagcctgaccagcggcgccagcctgctgaccctgaacaagatgccccacgactacggccaggagggccccctggagggcaagatctag

SEQ ID NO: 11932 - DNA, 2907 bp, synthetic construct; identical to SEQ ID NO: 11931
  misc_feature 1..2907: note = Description of Artificial Sequence: Synthetic coding sequence
  source 1..2907: mol_type = other DNA

SEQ ID NO: 11933 - DNA, 438 bp, synthetic construct
  misc_feature 1..438: note = Description of Artificial Sequence: Synthetic coding sequence
  source 1..438: mol_type = other DNA
atggccgaggacgacccctacctgggcagacccgagcagatgttccacctggaccccagcctgacccacaccatcttcaaccccgaggtgttccagccccagatggccctgcccaccgccgacggcccctacctgcagatcctggagcagcccaagcagagaggcttcagattcagatacgtgtgcgagggccccagccacggcggcctgcccggcgccagcagcgagaagaacaagaagagctacccccaggtgaagatctgcaactacgtgggccccgccaaggtgatcgtgcagctggtgaccaacggcaagaacatccacctgcacgcccacagcctggtgggcaagcactgcgaggacggcatctgcaccgtgaccgccggccccaaggacatggtggtgggcttcgccaacctgggcatcctgcacgtgtag

SEQ ID NO: 11934 - DNA, 225 bp, synthetic construct
  misc_feature 1..225: note = Description of Artificial Sequence: Synthetic coding sequence
  source 1..225: mol_type = other DNA
atgaagagaaccaccagcttcagaatggccgaggacgacccctacctgggcagacccgagcagatgttccacctggaccccagcctgacccacaccatcttcaaccccgaggtgttccagccccagatggccctgcccaccgacggcccctacctgcagatcctggagcagcccaagcagagaggcttcagattcagatacgtgtgcgagggccccagccactag

SEQ ID NO: 11935 - DNA, 1923 bp, synthetic construct
  misc_feature 1..1923: note = Description of Artificial Sequence: Synthetic coding sequence
  source 1..1923: mol_type = other DNA
atggccgccctgtacagacccggcctgagactgaactggcacggcctgagccccctgggctggcccagctgcagaagcatccagaccctgagagtgctgagcggcgacctgggccagctgcccaccggcatcagagacttcgtggagcacagcgccagactgtgccagcccgagggcatccacatctgcgacggcaccgaggccgagaacaccgccaccctgaccctgctggagcagcagggcctgatcagaaagctgcccaagtacaacaactgctggctggccagaaccgaccccaaggacgtggccagagtggagagcaagaccgtgatcgtgacccccagccagagagacaccgtgcagctgccccccggcggcgccagaggccagctgggcaactggatgagccccgccgacttccagagagccgtggacgagagattccccggctgcatgcagggcagaaccatgtacgtgctgcccttcagcatgggccccgtgggcagccccctgagcagaatcggcgtgcagctgaccgacagcgcctacgtggtggccagcatgagaatcatgaccagactgggcacccccgtgctgcaggccctgggcgacggcgacttcgtgaagtgcctgcacagcgtgggccagcccctgaccggccagggcgagcccgtgagccagtggccctgcaaccccgagaagaccctgatcggccacgtgcccgaccagagagagatcatcagcttcggcagcggctacggcggcaacagcctgctgggcaagaagtgcttcgccctgagaatcgccagcagactggccagagacgagggctggctggccgagcacatgctgatcctgggcatcaccagccccgccggcaagaagagatacgtggccgccgccttccccagcgcctgcggcaagaccaacctggccatgatgagacccgccctgcccggctggaaggtggagtgcgtgggcgacgacatcgcctggatgagattcgacagcgagggcagactgagagccatcaaccccgagaacggcttcttcggcgtggcccccggcaccagcgccaccaccaaccccaacgccatggccaccatccagagcaacaccatcttcaccaacgtggccgagaccagcgacggcggcgtgtactgggagggcatcgaccagcccctgccccccggcgtgaccgtgaccagctggctgggcaagccctggaagcccggcgacaaggagccctgcgcccaccccaacagcagattctgcgcccccgccagacagtgccccatcatggaccccgcctgggaggcccccgagggcgtgcccatcgacgccatcatcttcggcggcagaagacccaagggcgtgcccctggtgtacgaggccttcaactggagacacggcgtgttcgtgggcagcgccatgagaagcgagagcaccgccgccgccgagcacaagggcaagatcatcatgcacgaccccttcgccatgagacccttcttcggctacaacttcggccactacctggagcactggctgagcatggagggcagaaagggcgcccagctgcccagaatcttccacgtgaactggttcagaagagacgaggccggccacttcctgtggcccggcttcggcgagaacgccagagtgctggactggatctgcagaagactggagggcgaggacagcgccagagagacccccatcggcctggtgcccaaggagggcgccctggacctgagcggcctgagagccatcgacaccacccagctgttcagcctgcccaaggacttctgggagcaggaggtgagagacatcagaagctacctgaccgagcaggtgaaccaggacctgcccaaggaggtgctggccgagctggaggccctggagagaagagtgcacaagatgtag

SEQ ID NO: 11936 - DNA, 3477 bp, synthetic construct
  misc_feature 1..3477: note = Description of Artificial Sequence: Synthetic coding sequence
  source 1..3477: mol_type = other DNA
atgacccacggcgaggagctgggcagcgacgtgcaccaggacagcatcgtgctgacctacctggagggcctgctgatgcaccaggccgccggcggcagcggcaccgccgtggacaagaagagcgccggccacaacgaggaggaccagaacttcaacatcagcggcagcgccttccccacctgccagagcaacggccccgtgctgaacacccacacctaccagggcagcggcatgctgcacctgaagaaggccagactgctgcagagcagcgaggactggaacgccgccaagagaaagagactgagcgacagcatcatgaacctgaacgtgaagaaggaggccctgctggccggcatggtggacagcgtgcccaagggcaagcaggacagcaccctgctggccagcctgctgcagagcttcagcagcagactgcagaccgtggccctgagccagcagatcagacagagcctgaaggagcagggctacgccctgagccacgacagcctgaaggtggagaaggacctgagatgctacggcgtggccagcagccacctgaagaccctgctgaagaagagcaaggtgaaggaccagaagcccgacaccaacctgcccgacgtgaccaagaacctgatcagagacagattcgccgagagcccccaccacgtgggccagagcggcaccaaggtgatgagcgagcccctgagctgcgccgccagactgcaggccgtggccagcatggtggagaagagagccagccccgccaccagccccaagcccagcgtggcctgcagccagctggccctgctgctgagcagcgaggcccacctgcagcagtacagcagagagcacgccctgaagacccagaacgccaaccaggccgccagcgagagactggccgccatggccagactgcaggagaacggccagaaggacgtgggcagctaccagctgcccaagggcatgagcagccacctgaacggccaggccagaaccagcagcagcaagctgatggccagcaagagcagcgccaccgtgttccagaaccccatgggcatcatccccagcagccccaagaacgccggctacaagaacagcctggagagaaacaacatcaagcaggccgccaacaacagcctgctgctgcacctgctgaagagccagaccatccccaagcccatgaacggccacagccacagcgagagaggcagcatcttcgaggagagcagcacccccaccaccatcgacgagtacagcgacaacaaccccagcttcaccgacgacagcagcggcgacgagagcagctacagcaactgcgtgcccatcgacctgagctgcaagcacagaaccgagaagagcgagagcgaccagcccgtgagcctggacaacttcacccagagcctgctgaacacctgggaccccaaggtgcccgacgtggacatcaaggaggaccaggacaccagcaagaacagcaagctgaacagccaccagaaggtgaccctgctgcagctgctgctgggccacaagaacgaggagaacgtggagaagaacaccagcccccagggcgtgcacaacgacgtgagcaagttcaacacccagaactacgccagaaccagcgtgatcgagagccccagcaccaacagaaccacccccgtgagcaccccccccctgctgaccagcagcaaggccggcagccccatcaacctgagccagcacagcctggtgatcaagtggaacagccccccctacgtgtgcagcacccagagcgagaagctgaccaacaccgccagcaaccacagcatggacctgaccaagagcaaggacccccccggcgagaagcccgcccagaacgagggcgcccagaacagcgccaccttcagcgccagcaagctgctgcagaacctggcccagtgcggcatgcagagcagcatgagcgtggaggagcagagacccagcaagcagctgctgaccggcaacaccgacaagcccatcggcatgatcgacagactgaacagccccctgctgagcaacaagaccaacgccgtggaggagaacaaggccttcagcagccagcccaccggccccgagcccggcctgagcggcagcgagatcgagaacctgctggagagaagaaccgtgctgcagctgctgctgggcaaccccaacaagggcaagagcgagaagaaggagaagacccccctgagagacgagagcacccaggagcacagcgagagagccctgagcgagcagatcctgatggtgaagatcaagagcgagccctgcgacgacctgcagatccccaacaccaacgtgcacctgagccacgacgccaagagcgcccccttcctgggcatggcccccgccgtgcagagaagcgcccccgccctgcccgtgagcgaggacttcaagagcgagcccgtgagcccccaggacttcagcttcagcaagaacggcctgctgagcagactgctgagacagaaccaggacagctacctggccgacgacagcgacagaagccacagaaacaacgagatggccctgctggagagcaagaacctgtgcatggtgcccaagaagagaaagctgtacaccgagcccctggagaaccccttcaagaagatgaagaacaacatcgtggacgccgccaacaaccacagcgcccccgaggtgctgtacggcagcctgctgaaccaggaggagctgaagttcagcagaaacgacctggagttcaagtaccccgccggccacggcagcgccagcgagagcgagcacagaagctgggccagagagagcaagagcttcaacgtgctgaagcagctgctgctgagcgagaactgcgtgagagacctgagcccccacagaagcaacagcgtggccgacagcaagaagaagggccacaagaacaacgtgaccaacagcaagcccgagttcagcatcagcagcctgaacggcctgatgtacagcagcacccagcccagcagctgcatggacaacagaaccttcagctaccccggcgtggtgaagacccccgtgagccccaccttccccgagcacctgggctgcgccggcagcagacccgagagcggcctgctgaacggctgcagcatgcccagcgagaagggccccatcaagtgggtgatcaccgacgccgagaagaacgagtacgagaaggacagccccagactgaccaagaccaaccccatcctgtactacatgctgcagaagggcggcaacagcgtgaccagcagagagacccaggacaaggacatctggagagaggccagcagcgccgagagcgtgagccaggtgaccgccaaggaggagctgctgcccaccgccgagaccaaggccagcttcttcaacctgagaagcccctacaacagccacatgggcaacaacgccagcagaccccacagcgccaacggcgaggtgtacggcctgctgggcagcgtgctgaccatcaagaaggagagcgagtag

SEQ ID NO: 11937 - DNA, 3477 bp, synthetic construct; identical to SEQ ID NO: 11936
  misc_feature 1..3477: note = Description of Artificial Sequence: Synthetic coding sequence
  source 1..3477: mol_type = other DNA

SEQ ID NO: 11938 - DNA, 3477 bp, synthetic construct; identical to SEQ ID NO: 11936
  misc_feature 1..3477: note = Description of Artificial Sequence: Synthetic coding sequence
  source 1..3477: mol_type = other DNA

SEQ ID NO: 11939 - DNA, 201 bp, synthetic construct
  misc_feature 1..201: note = Description of Artificial Sequence: Synthetic coding sequence
  source 1..201: mol_type = other DNA
atgacccacggcgaggagctgggcagcgacgtgcaccaggacagcatcgtgctgacctacctggagggcctgctgatgcaccaggccgccggcggcagcggcaccgccgtggacaagaagagcgccggccacaacgaggaggaccagaacttcaacatcagcggcagcgccttccccacctgccagagcaacggcccctag

SEQ ID NO: 11940 - DNA, 4176 bp, synthetic construct
  misc_feature 1..4176: note = Description of Artificial Sequence: Synthetic coding sequence
  source 1..4176: mol_type = other DNA
atgcccagcagcctgctgggcgccgccatgcccgccagcaccagcgccgccgccctgcaggaggccctggagaacgccggcagactgatcgacagacagctgcaggaggacagaatgtaccccgacctgagcgagctgctgatggtgagcgcccccaacaaccccaccgtgagcggcatgagcgacatggactaccccctgcagggccccggcctgctgagcgtgcccaacctgcccgagatcagcagcatcagaagagtgcccctgccccccgagctggtggagcagttcggccacatgcagtgcaactgcatgatgggcgtgttcccccccatcagcagagcctggctgaccatcgacagcgacatcttcatgtggaactacgaggacggcggcgacctggcctacttcgacggcctgagcgagaccatcctggccgtgggcctggtgaagcccaaggccggcatcttccagccccacgtgagacacctgctggtgctggccacccccgtggacatcgtgatcctgggcctgagctacgccaacctgcagaccggcagcggcgtgctgaacgacagcctgagcggcggcatgcagctgctgcccgaccccctgtacagcctgcccaccgacaacacctacctgctgaccatcaccagcaccgacaacggcagaatcttcctggccggcaaggacggctgcctgtacgaggtggcctaccaggccgaggccggctggttcagccagagatgcagaaagatcaaccacagcaagagcagcctgagcttcctggtgcccagcctgctgcagttcaccttcagcgaggacgaccccatcctgcagatcgccatcgacaacagcagaaacatcctgtacaccagaagcgagaagggcgtgatccaggtgtacgacctgggccaggacggccagggcatgagcagagtggccagcgtgagccagaacgccatcgtgagcgccgccggcaacatcgccagaaccatcgacagaagcgtgttcaagcccatcgtgcagatcgccgtgatcgagaacagcgagagcctggactgccagctgctggccgtgacccacgccggcgtgagactgtacttcagcacctgccccttcagacagcccctggccagacccaacaccctgaccctggtgcacgtgagactgccccccggcttcagcgccagcagcaccgtggagaagcccagcaaggtgcacagagccctgtacagcaagggcatcctgctgatggccgccagcgagaacgaggacaacgacatcctgtggtgcgtgaaccacgacaccttccccttccagaagcccatgatggagacccagatgaccgccggcgtggacggccacagctgggccctgagcgccatcgacgagctgaaggtggacaagatcatcacccccctgaacaaggaccacatccccatcaccgacagccccgtggtggtgcagcagcacatgctgccccccaagaagttcgtgctgctgagcgcccagggcagcctgatgttccacaagctgagacccgtggaccagctgagacacctgctggtgagcaacgtgggcggcgacggcgaggagatcgagagattcttcaagctgcaccaggaggaccaggcctgcgccacctgcctgatcctggcctgcagcaccgccgcctgcgacagagaggtgagcgcctgggccaccagagccttcttcagatacggcggcgaggcccagatgagattccccaccaccctgcccccccccagcaacgtgggccccatcctgggcagccccgtgtacagcagcagccccgtgcccagcggcagcccctaccccaaccccagcttcctgggcacccccagccacggcatccagccccccgccatgagcacccccgtgtgcgccctgggcaaccccgccacccaggccaccaacatgagctgcgtgaccggccccgagatcgtgtacagcggcaagcacaacggcatctgcatctacttcagcagaatcatgggcaacatctgggacgccagcctggtggtggagagaatcttcaagagcggcaacagagagatcaccgccatcgagagcagcgtgccctgccagctgctggagagcgtgctgcaggagctgaagggcctgcaggagttcctggacagaaacagccagttcgccggcggccccctgggcaaccccaacaccaccgccaaggtgcagcagagactgatcggcttcatgagacccgagaacggcaacccccagcagatgcagcaggagctgcagagaaagttccacgaggcccagctgagcgagaagatcagcctgcaggccatccagcagctggtgagaaagagctaccaggccctggccctgtggaagctgctgtgcgagcaccagttcaccatcatcgtggccgagctgcagaaggagctgcaggagcagctgaagatcaccaccttcaaggacctggtgatcagagacaaggagctgaccggcgccctgatcgccagcctgatcaactgctacatcagagacaacgccgccgtggacggcatcagcctgcacctgcaggacatctgccccctgctgtacagcaccgacgacgccatctgcagcaaggccaacgagctgctgcagagaagcagacaggtgcagaacaagaccgagaaggagagaatgctgagagagagcctgaaggagtaccagaagatcagcaaccaggtggacctgagcaacgtgtgcgcccagtacagacaggtgagattctacgagggcgtggtggagctgagcctgaccgccgccgagaagaaggacccccagggcctgggcctgcacttctacaagcacggcgagcccgaggaggacatcgtgggcctgcaggccttccaggagagactgaacagctacaagtgcatcaccgacaccctgcaggagctggtgaaccagagcaaggccgccccccagagccccagcgtgcccaagaagcccggcccccccgtgctgagcagcgaccccaacatgctgagcaacgaggaggccggccaccacttcgagcagatgctgaagctgagccagagaagcaaggacgagctgttcagcatcgccctgtacaactggctgatccaggtggacctggccgacaagctgctgcaggtggccagccccttcctggagccccacctggtgagaatggccaaggtggaccagaacagagtgagatacatggacctgctgtggagatactacgagaagaacagaagcttcagcaacgccgccagagtgctgagcagactggccgacatgcacagcaccgagatcagcctgcagcagagactggagtacatcgccagagccatcctgagcgccaagagcagcaccgccatcagcagcatcgccgccgacggcgagttcctgcacgagctggaggagaagatggaggtggccagaatccagctgcagatccaggagaccctgcagagacagtacagccaccacagcagcgtgcaggacgccgtgagccagctggacagcgagctgatggacatcaccaagctgtacggcgagttcgccgaccccttcaagctggccgagtgcaagctggccatcatccactgcgccggctacagcgaccccatcctggtgcagaccctgtggcaggacatcatcgagaaggagctgagcgacagcgtgaccctgagcagcagcgacagaatgcacgccctgagcctgaagatcgtgctgctgggcaagatctacgccggcacccccagattcttccccctggacttcatcgtgcagttcctggagcagcaggtgtgcaccctgaactgggacgtgggcttcgtgatccagaccatgaacgagatcggcgtgcccctgcccagactgctggaggtgtacgaccagctgttcaagagcagagaccccttctggaacagaatgaagaagcccctgcacctgctggactgcatccacgtgctgctgatcagatacgtggagaaccccagccaggtgctgaactgcgagagaagaagattcaccaacctgtgcctggacgccgtgtgcggctacctggtggagctgcagagcatgagcagcagcgtggccgtgcaggccatcaccggcaacttcaagagcctgcaggccaagctggagagactgcactag

SEQ ID NO: 11941 - DNA, 2334 bp, synthetic construct
  misc_feature 1..2334: note = Description of Artificial Sequence: Synthetic coding sequence
  source 1..2334: mol_type = other DNA
atggacagcaaggagagcctgacccccggcagagaggagaaccccagcagcgtgctggcccaggagagaggcgacgtgatggacttctacaagaccctgagaggcggcgccaccgtgaaggtgagcgccagcagccccagcctggccgtggccagccagagcgacagcaagcagagaagactgctggtggacttccccaagggcagcgtgagcaacgcccagcagcccgacctgagcaaggccgtgagcctgagcatgggcctgtacatgggcgagaccgagaccaaggtgatgggcaacgacctgggcttcccccagcagggccagatcagcctgagcagcggcgagaccgacctgaagctgctggaggagagcatcgccaacctgaacagaagcaccagcgtgcccgagaaccccaagagcagcgccagcaccgccgtgagcgccgcccccaccgagaaggagttccccaagacccacagcgacgtgagcagcgagcagcagcacctgaagggccagaccggcaccaacggcggcaacgtgaagctgtacaccaccgaccagagcaccttcgacatcctgcaggacctggagttcagcagcggcagccccggcaaggagaccaacgagagcccctggagaagcgacctgctgatcgacgagaactgcctgctgagccccctggccggcgaggacgacagcttcctgctggagggcaacagcaacgaggactgcaagcccctgatcctgcccgacaccaagcccaagatcaaggacaacggcgacctggtgctgagcagccccagcaacgtgaccctgccccaggtgaagaccgagaaggaggacttcatcgagctgtgcacccccggcgtgatcaagcaggagaagctgggcaccgtgtactgccaggccagcttccccggcgccaacatcatcggcaacaagatgagcgccatcagcgtgcacggcgtgagcaccagcggcggccagatgtaccactacgacatgaacaccgccagcctgagccagcagcaggaccagaagcccatcttcaacgtgatcccccccatccccgtgggcagcgagaactggaacagatgccagggcagcggcgacgacaacctgaccagcctgggcaccctgaacttccccggcagaaccgtgttcagcaacggctacagcagccccagcatgagacccgacgtgagcagcccccccagcagcagcagcaccgccaccaccggccccccccccaagctgtgcctggtgtgcagcgacgaggccagcggctgccactacggcgtgctgacctgcggcagctgcaaggtgttcttcaagagagccgtggagggccagcacaactacctgtgcgccggcagaaacgactgcatcatcgacaagatcagaagaaagaactgccccgcctgcagatacagaaagtgcctgcaggccggcatgaacctggaggccagaaagaccaagaagaagatcaagggcatccagcaggccaccaccggcgtgagccaggagaccagcgagaaccccggcaacaagaccatcgtgcccgccaccctgccccagctgacccccaccctggtgagcctgctggaggtgatcgagcccgaggtgctgtacgccggctacgacagcagcgtgcccgacagcacctggagaatcatgaccaccctgaacatgctgggcggcagacaggtgatcgccgccgtgaagtgggccaaggccatccccggcttcagaaacctgcacctggacgaccagatgaccctgctgcagtacagctggatgttcctgatggccttcgccctgggctggagaagctacagacagagcagcgccaacctgctgtgcttcgcccccgacctgatcatcaacgagcagagaatgaccctgccctgcatgtacgaccagtgcaagcacatgctgtacgtgagcagcgagctgcacagactgcaggtgagctacgaggagtacctgtgcatgaagaccctgctgctgctgagcagcgtgcccaaggacggcctgaagagccaggagctgttcgacgagatcagaatgacctacatcaaggagctgggcaaggccatcgtgaagagagagggcaacagcagccagaactggcagagattctaccagctgaccaagctgctggacagcatgcacgaggtggtggagaacctgctgaactactgcttccagaccttcctggacaagaccatgagcatcgagttccccgagatgctggccgagatcatcaccaaccagatccccaagtacagcaacggcaacatcaagaagctgctgttccaccagaagtag

SEQ ID NO: 11942 - DNA, 1782 bp, synthetic construct
  misc_feature 1..1782: note = Description of Artificial Sequence: Synthetic coding sequence
  source 1..1782: mol_type = other DNA
atggacagcaaggagagcctgacccccggcagagaggagaaccccagcagcgtgctggcccaggagagaggcgacgtgatggacttctacaagaccctgagaggcggcgccaccgtgaaggtgagcgccagcagccccagcctggccgtggccagccagagcgacagcaagcagagaagactgctggtggacttccccaagggcagcgtgagcaacgcccagcagcccgacctgagcaaggccgtgagcctgagcatgggcctgtacatgggcgagaccgagaccaaggtgatgggcaacgacctgggcttcccccagcagggccagatcagcctgagcagcggcgagaccgacctgaagctgctggaggagagcatcgccaacctgaacagaagcaccagcgtgcccgagaaccccaagagcagcgccagcaccgccgtgagcgccgcccccaccgagaaggagttccccaagacccacagcgacgtgagcagcgagcagcagcacctgaagggccagaccggcaccaacggcggcaacgtgaagctgtacaccaccgaccagagcaccttcgacatcctgcaggacctggagttcagcagcggcagccccggcaaggagaccaacgagagcccctggagaagcgacctgctgatcgacgagaactgcctgctgagccccctggccggcgaggacgacagcttcctgctggagggcaacagcaacgaggactgcaagcccctgatcctgcccgacaccaagcccaagatcaaggacaacggcgacctggtgctgagcagccccagcaacgtgaccctgccccaggtgaagaccgagaaggaggacttcatcgagctgtgcacccccggcgtgatcaagcaggagaagctgggcaccgtgtactgccaggccagcttccccggcgccaacatcatcggcaacaagatgagcgccatcagcgtgcacggcgtgagcaccagcggcggccagatgtaccactacgacatgaacaccgccagcctgagccagcagcaggaccagaagcccatcttcaacgtgatcccccccatccccgtgggcagcgagaactggaacagatgccagggcagcggcgacgacaacctgaccagcctgggcaccctgaacttccccggcagaaccgtgttcagcaacggctacagcagccccagcatgagacccgacgtgagcagcccccccagcagcagcagcaccgccaccaccggccccccccccaagctgtgcctggtgtgcagcgacgaggccagcggctgccactacggcgtgctgacctgcggcagctgcaaggtgttcttcaagagagccgtggagggccagcacaactacctgtgcgccggcagaaacgactgcatcatcgacaagatcagaagaaagaactgccccgcctgcagatacagaaagtgcctgcaggccggcatgaacctggaggtggtgcccaaggacggcctgaagagccaggagctgttcgacgagatcagaatgacctacatcaaggagctgggcaaggccatcgtgaagagagagggcaacagcagccagaactggcagagattctaccagctgaccaagctgctggacagcatgcacgaggtggtggagaacctgctgaactactgcttccagaccttcctggacaagaccatgagcatcgagttccccgagatgctggccgagatcatcaccaaccagatccccaagtacagcaacggcaacatcaagaagctgctgttccaccagaagtag

SEQ ID NO: 11943 - DNA, 2334 bp, synthetic construct; identical to SEQ ID NO: 11941
  misc_feature 1..2334: note = Description of Artificial Sequence: Synthetic coding sequence
  source 1..2334: mol_type = other DNA

SEQ ID NO: 11944 - DNA, 2337 bp, synthetic construct
  misc_feature 1..2337: note = Description of Artificial Sequence: Synthetic coding sequence
  source 1..2337: mol_type = other DNA
atggacagcaaggagagcctgacccccggcagagaggagaaccccagcagcgtgctggcccaggagagaggcgacgtgatggacttctacaagaccctgagaggcggcgccaccgtgaaggtgagcgccagcagccccagcctggccgtggccagccagagcgacagcaagcagagaagactgctggtggacttccccaagggcagcgtgagcaacgcccagcagcccgacctgagcaaggccgtgagcctgagcatgggcctgtacatgggcgagaccgagaccaaggtgatgggcaacgacctgggcttcccccagcagggccagatcagcctgagcagcggcgagaccgacctgaagctgctggaggagagcatcgccaacctgaacagaagcaccagcgtgcccgagaaccccaagagcagcgccagcaccgccgtgagcgccgcccccaccgagaaggagttccccaagacccacagcgacgtgagcagcgagcagcagcacctgaagggccagaccggcaccaacggcggcaacgtgaagctgtacaccaccgaccagagcaccttcgacatcctgcaggacctggagttcagcagcggcagccccggcaaggagaccaacgagagcccctggagaagcgacctgctgatcgacgagaactgcctgctgagccccctggccggcgaggacgacagcttcctgctggagggcaacagcaacgaggactgcaagcccctgatcctgcccgacaccaagcccaagatcaaggacaacggcgacctggtgctgagcagccccagcaacgtgaccctgccccaggtgaagaccgagaaggaggacttcatcgagctgtgcacccccggcgtgatcaagcaggagaagctgggcaccgtgtactgccaggccagcttccccggcgccaacatcatcggcaacaagatgagcgccatcagcgtgcacggcgtgagcaccagcggcggccagatgtaccactacgacatgaacaccgccagcctgagccagcagcaggaccagaagcccatcttcaacgtgatcccccccatccccgtgggcagcgagaactggaacagatgccagggcagcggcgacgacaacctgaccagcctgggcaccctgaacttccccggcagaaccgtgttcagcaacggctacagcagccccagcatgagacccgacgtgagcagcccccccagcagcagcagcaccgccaccaccggccccccccccaagctgtgcctggtgtgcagcgacgaggccagcggctgccactacggcgtgctgacctgcggcagctgcaaggtgttcttcaagagagccgtggagggcagacagcacaactacctgtgcgccggcagaaacgactgcatcatcgacaagatcagaagaaagaactgccccgcctgcagatacagaaagtgcctgcaggccggcatgaacctggaggccagaaagaccaagaagaagatcaagggcatccagcaggccaccaccggcgtgagccaggagaccagcgagaaccccggcaacaagaccatcgtgcccgccaccctgccccagctgacccccaccctggtgagcctgctggaggtgatcgagcccgaggtgctgtacgccggctacgacagcagcgtgcccgacagcacctggagaatcatgaccaccctgaacatgctgggcggcagacaggtgatcgccgccgtgaagtgggccaaggccatccccggcttcagaaacctgcacctggacgaccagatgaccctgctgcagtacagctggatgttcctgatggccttcgccctgggctggagaagctacagacagagcagcgccaacctgctgtgcttcgcccccgacctgatcatcaacgagcagagaatgaccctgccctgcatgtacgaccagtgcaagcacatgctgtacgtgagcagcgagctgcacagactgcaggtgagctacgaggagtacctgtgcatgaagaccctgctgctgctgagcagcgtgcccaaggacggcctgaagagccaggagctgttcgacgagatcagaatgacctacatcaaggagctgggcaaggccatcgtgaagagagagggcaacagcagccagaactggcagagattctaccagctgaccaagctgctggacagcatgcacgaggtggtggagaacctgctgaactactgcttccagaccttcctggacaagaccatgagcatcgagttccccgagatgctggccgagatcatcaccaaccagatccccaagtacagcaacggcaacatcaagaagctgctgttccaccagaagtag

SEQ ID NO: 11945 - DNA, 2229 bp, synthetic construct
  misc_feature 1..2229: note = Description of Artificial Sequence: Synthetic coding sequence
  source 1..2229: mol_type = other DNA
atggacagcaaggagagcctgacccccggcagagaggagaaccccagcagcgtgctggcccaggagagaggcgacgtgatggacttctacaagaccctgagaggcggcgccaccgtgaaggtgagcgccagcagccccagcctggccgtggccagccagagcgacagcaagcagagaagactgctggtggacttccccaagggcagcgtgagcaacgcccagcagcccgacctgagcaaggccgtgagcctgagcatgggcctgtacatgggcgagaccgagaccaaggtgatgggcaacgacctgggcttcccccagcagggccagatcagcctgagcagcggcgagaccgacctgaagctgctggaggagagcatcgccaacctgaacagaagcaccagcgtgcccgagaaccccaagagcagcgccagcaccgccgtgagcgccgcccccaccgagaaggagttccccaagacccacagcgacgtgagcagcgagcagcagcacctgaagggccagaccggcaccaacggcggcaacgtgaagctgtacaccaccgaccagagcaccttcgacatcctgcaggacctggagttcagcagcggcagccccggcaaggagaccaacgagagcccctggagaagcgacctgctgatcgacgagaactgcctgctgagccccctggccggcgaggacgacagcttcctgctggagggcaacagcaacgaggactgcaagcccctgatcctgcccgacaccaagcccaagatcaaggacaacggcgacctggtgctgagcagccccagcaacgtgaccctgccccaggtgaagaccgagaaggaggacttcatcgagctgtgcacccccggcgtgatcaagcaggagaagctgggcaccgtgtactgccaggccagcttccccggcgccaacatcatcggcaacaagatgagcgccatcagcgtgcacggcgtgagcaccagcggcggccagatgtaccactacgacatgaacaccgccagcctgagccagcagcaggaccagaagcccatcttcaacgtgatcccccccatccccgtgggcagcgagaactggaacagatgccagggcagcggcgacgacaacctgaccagcctgggcaccctgaacttccccggcagaaccgtgttcagcaacggctacagcagccccagcatgagacccgacgtgagcagcccccccagcagcagcagcaccgccaccaccggccccccccccaagctgtgcctggtgtgcagcgacgaggccagcggctgccactacggcgtgctgacctgcggcagctgcaaggtgttcttcaagagagccgtggagggccagcacaactacctgtgcgccggcagaaacgactgcatcatcgacaagatcagaagaaagaactgccccgcctgcagatacagaaagtgcctgcaggccggcatgaacctggaggccagaaagaccaagaagaagatcaagggcatccagcaggccaccaccggcgtgagccaggagaccagcgagaaccccggcaacaagaccatcgtgcccgccaccctgccccagctgacccccaccctggtgagcctgctggaggtgatcgagcccgaggtgctgtacgccggctacgacagcagcgtgcccgacagcacctggagaatcatgaccaccctgaacatgctgggcggcagacaggtgatcgccgccgtgaagtgggccaaggccatccccggcttcagaaacctgcacctggacgaccagatgaccctgctgcagtacagctggatgttcctgatggccttcgccctgggctggagaagctacagacagagcagcgccaacctgctgtgcttcgcccccgacctgatcatcaacgagcagagaatgaccctgccctgcatgtacgaccagtgcaagcacatgctgtacgtgagcagcgagctgcacagactgcaggtgagctacgaggagtacctgtgcatgaagaccctgctgctgctgagcagcgtgcccaaggacggcctgaagagccaggagctgttcgacgagatcagaatgacctacatcaaggagctgggcaaggccatcgtgaagagagagggcaacagcagccagaactggcagagattctaccagctgaccaagctgctggacagcatgcacgagaacgtgatgtggctgaagcccgagagcaccagccacaccctgatctag

SEQ ID NO: 11946 - DNA, 1143 bp, synthetic construct
  misc_feature 1..1143: note = Description of Artificial Sequence: Synthetic coding sequence
  source 1..1143: mol_type = other DNA
atgagacccgacgtgagcagcccccccagcagcagcagcaccgccaccaccggccccccccccaagctgtgcctggtgtgcagcgacgaggccagcggctgccactacggcgtgctgacctgcggcagctgcaaggtgttcttcaagagagccgtggagggccagcacaactacctgtgcgccggcagaaacgactgcatcatcgacaagatcagaagaaagaactgccccgcctgcagatacagaaagtgcctgcaggccggcatgaacctggaggccagaaagaccaagaagaagatcaagggcatccagcaggccaccaccggcgtgagccaggagaccagcgagaaccccggcaacaagaccatcgtgcccgccaccctgccccagctgacccccaccctggtgagcctgctggaggtgatcgagcccgaggtgctgtacgccggctacgacagcagcgtgcccgacagcacctggagaatcatgaccaccctgaacatgctgggcggcagacaggtgatcgccgccgtgaagtgggccaaggccatccccggcttcagaaacctgcacctggacgaccagatgaccctgctgcagtacagctggatgttcctgatggccttcgccctgggctggagaagctacagacagagcagcgccaacctgctgtgcttcgcccccgacctgatcatcaacgagcagagaatgaccctgccctgcatgtacgaccagtgcaagcacatgctgtacgtgagcagcgagctgcacagactgcaggtgagctacgaggagtacctgtgcatgaagaccctgctgctgctgagcagcgtgcccaaggacggcctgaagagccaggagctgttcgacgagatcagaatgacctacatcaaggagctgggcaaggccatcgtgaagagagagggcaacagcagccagaactggcagagattctaccagctgaccaagctgctggacagcatgcacgaggtggtggagaacctgctgaactactgcttccagaccttcctggacaagaccatgagcatcgagttccccgagatgctggccgagatcatcaccaaccagatccccaagtacagcaacggcaacatcaagaagctgctgttccaccagaagtag

SEQ ID NO: 11947 - DNA, 2256 bp, synthetic construct
  misc_feature 1..2256: note = Description of Artificial Sequence: Synthetic coding sequence
  source 1..2256: mol_type = other DNA
atggacagcaaggagagcctgacccccggcagagaggagaaccccagcagcgtgctggcccaggagagaggcgacgtgatggacttctacaagaccctgagaggcggcgccaccgtgaaggtgagcgccagcagccccagcctggccgtggccagccagagcgacagcaagcagagaagactgctggtggacttccccaagggcagcgtgagcaacgcccagcagcccgacctgagcaaggccgtgagcctgagcatgggcctgtacatgggcgagaccgagaccaaggtgatgggcaacgacctgggcttcccccagcagggccagatcagcctgagcagcggcgagaccgacctgaagctgctggaggagagcatcgccaacctgaacagaagcaccagcgtgcccgagaaccccaagagcagcgccagcaccgccgtgagcgccgcccccaccgagaaggagttccccaagacccacagcgacgtgagcagcgagcagcagcacctgaagggccagaccggcaccaacggcggcaacgtgaagctgtacaccaccgaccagagcaccttcgacatcctgcaggacctggagttcagcagcggcagccccggcaaggagaccaacgagagcccctggagaagcgacctgctgatcgacgagaactgcctgctgagccccctggccggcgaggacgacagcttcctgctggagggcaacagcaacgaggactgcaagcccctgatcctgcccgacaccaagcccaagatcaaggacaacggcgacctggtgctgagcagccccagcaacgtgaccctgccccaggtgaagaccgagaaggaggacttcatcgagctgtgcacccccggcgtgatcaagcaggagaagctgggcaccgtgtactgccaggccagcttccccggcgccaacatcatcgccagcctgagccagcagcaggaccagaagcccatcttcaacgtgatcccccccatccccgtgggcagcgagaactggaacagatgccagggcagcggcgacgacaacctgaccagcctgggcaccctgaacttccccggcagaaccgtgttcagcaacggctacagcagccccagcatgagacccgacgtgagcagcccccccagcagcagcagcaccgccaccaccggccccccccccaagctgtgcctggtgtgcagcgacgaggccagcggctgccactacggcgtgctgacctgcggcagctgcaaggtgttcttcaagagagccgtggagggccagcacaactacctgtgcgccggcagaaacgactgcatcatcgacaagatcagaagaaagaactgccccgcctgcagatacagaaagtgcctgcaggccggcatgaacctggaggccagaaagaccaagaagaagatcaagggcatccagcaggccaccaccggcgtgagccaggagaccagcgagaaccccggcaacaagaccatcgtgcccgccaccctgccccagctgacccccaccctggtgagcctgctggaggtgatcgagcccgaggtgctgtacgccggctacgacagcagcgtgcccgacagcacctggagaatcatgaccaccctgaacatgctgggcggcagacaggtgatcgccgccgtgaagtgggccaaggccatccccggcttcagaaacctgcacctggacgaccagatgaccctgctgcagtacagctggatgttcctgatggccttcgccctgggctggagaagctacagacagagcagcgccaacctgctgtgcttcgcccccgacctgatcatcaacgagcagagaatgaccctgccctgcatgtacgaccagtgcaagcacatgctgtacgtgagcagcgagctgcacagactgcaggtgagctacgaggagtacctgtgcatgaagaccctgctgctgctgagcagcgtgcccaaggacggcctgaagagccaggagctgttcgacgagatcagaatgacctacatcaaggagctgggcaaggccatcgtgaagagagagggcaacagcagccagaactggcagagattctaccagctgaccaagctgctggacagcatgcacgaggtggtggagaacctgctgaactactgcttccagaccttcctggacaagaccatgagcatcgagttccccgagatgctggccgagatcatcaccaaccagatccccaagtacagcaacggcaacatcaagaagctgctgttccaccagaagtag

SEQ ID NO: 11948 - DNA, 435 bp, synthetic construct
  misc_feature 1..435: note = Description of Artificial Sequence: Synthetic coding sequence
  source 1..435: mol_type = other DNA
atggacagcaaggagagcctgacccccggcagagaggagaaccccagcagcgtgctggcccaggagagaggcgacgtgatggacttctacaagaccctgagaggcggcgccaccgtgaaggtgagcgccagcagccccagcctggccgtggccagccagagcgacagcaagcagagaagactgctggtggacttccccaagggcagcgtgagcaacgcccagcagcccgacctgagcaaggccgtgagcctgagcatgggcctgtacatgggcgagaccgagaccaaggtgatgggcaacgacctgggcttcccccagcagggccagatcagcctgagcagcggcgagaccgacctgaagctgctggaggagagcatcgccaacctgaacagaagcaccagcgtgcccgagaaccccaagagcagcgccagctag

SEQ ID NO: 11949 - DNA, 438 bp, synthetic construct
  misc_feature 1..438: note = Description of Artificial Sequence: Synthetic coding sequence
  source 1..438: mol_type = other DNA
atggacagcaaggagagcctgacccccggcagagaggagaaccccagcagcgtgctggcccaggagagaggcgacgtgatggacttctacaagaccctgagaggcggcgccaccgtgaaggtgagcgccagcagccccagcctggccgtggccagccagagcgacagcaagcagagaagactgctggtggacttccccaagggcagcgtgagcaacgcccagcagcccgacctgagcaaggccgtgagcctgagcatgggcctgtacatgggcgagaccgagaccaaggtgatgggcaacgacctgggcttcccccagcagggccagatcagcctgagcagcggcgagaccgacctgaagctgctggaggagagcatcgccaacctgaacagaagcaccagcgtgcccgagaaccccaagagcagcgccagcacctag

SEQ ID NO: 11950 - DNA, 2334 bp, synthetic construct; identical to SEQ ID NO: 11941
  misc_feature 1..2334: note = Description of Artificial Sequence: Synthetic coding sequence
  source 1..2334: mol_type = other DNA

SEQ ID NO: 11951 - DNA, 2337 bp, synthetic construct; identical to SEQ ID NO: 11944
  misc_feature 1..2337: note = Description of Artificial Sequence: Synthetic coding sequence
  source 1..2337: mol_type = other DNA

SEQ ID NO: 11952 - DNA, 438 bp, synthetic construct; identical to SEQ ID NO: 11949
  misc_feature 1..438: note = Description of Artificial Sequence: Synthetic coding sequence
  source 1..438: mol_type = other DNA

SEQ ID NO: 11953 - DNA, 438 bp, synthetic construct; identical to SEQ ID NO: 11949
  misc_feature 1..438: note = Description of Artificial Sequence: Synthetic coding sequence
  source 1..438: mol_type = other DNA

SEQ ID NO: 11954 - DNA, 438 bp, synthetic construct; identical to SEQ ID NO: 11949
  misc_feature 1..438: note = Description of Artificial Sequence: Synthetic coding sequence
  source 1..438: mol_type = other DNA

SEQ ID NO: 11955 - DNA, 1914 bp, synthetic construct
  misc_feature 1..1914: note = Description of Artificial Sequence: Synthetic coding sequence
  source 1..1914: mol_type = other DNA
atgcacgacagcatcagattcggcaacgtggacatgccctgcgtgcaggcccagtacagccccagcccccccggcagcagctacgccgcccagacctacagcagcgagtacaccaccgagatcatgaaccccgactacaccaagctgaccatggacctgggcagcaccgagatcaccgccaccgccaccaccagcctgcccagcatcagcaccttcgtggagggctacagcagcaactacgagctgaagcccagctgcgtgtaccagatgcagagacccctgatcaaggtggaggagggcagagcccccagctaccaccaccaccaccaccaccaccaccaccaccaccaccaccaccagcagcagcaccagcagcccagcatcccccccgccagcagccccgaggacgaggtgctgcccagcaccagcatgtacttcaagcagagcccccccagcacccccaccacccccgccttccccccccaggccggcgccctgtgggacgaggccctgcccagcgcccccggctgcatcgcccccggccccctgctggacccccccatgaaggccgtgcccaccgtggccggcgccagattccccctgttccacttcaagcccagccccccccacccccccgcccccagccccgccggcggccaccacctgggctacgaccccaccgccgccgccgccctgagcctgcccctgggcgccgccgccgccgccggcagccaggccgccgccctggagagccacccctacggcctgcccctggccaagagagccgcccccctggccttcccccccctgggcctgacccccagccccaccgccagcagcctgctgggcgagagccccagcctgcccagcccccccagcagaagcagcagcagcggcgagggcacctgcgccgtgtgcggcgacaacgccgcctgccagcactacggcgtgagaacctgcgagggctgcaagggcttcttcaagagaaccgtgcagaagaacgccaagtacgtgtgcctggccaacaagaactgccccgtggacaagagaagaagaaacagatgccagtactgcagattccagaagtgcctgagcgtgggcatggtgaaggaggtggtgagaaccgacagcctgaagggcagaagaggcagactgcccagcaagcccaagagccccctgcagcaggagcccagccagcccagcccccccagcccccccatctgcatgatgaacgccctggtgagagccctgaccgacagcacccccagagacctggactacagcagatactgccccaccgaccaggccgccgccggcaccgacgccgagcacgtgcagcagttctacaacctgctgaccgccagcatcgacgtgagcagaagctgggccgagaagatccccggcttcaccgacctgcccaaggaggaccagaccctgctgatcgagagcgccttcctggagctgttcgtgctgagactgagcatcagaagcaacaccgccgaggacaagttcgtgttctgcaacggcctggtgctgcacagactgcagtgcctgagaggcttcggcgagtggctggacagcatcaaggacttcagcctgaacctgcagagcctgaacctggacatccaggccctggcctgcctgagcgccctgagcatgatcaccgagagacacggcctgaaggagcccaagagagtggaggagctgtgcaacaagatcaccagcagcctgaaggaccaccagagcaagggccaggccctggagcccaccgagagcaaggtgctgggcgccctggtggagctgagaaagatctgcaccctgggcctgcagagaatcttctacctgaagctggaggacctggtgagcccccccagcatcatcgacaagctgttcctggacaccctgcccttctag

SEQ ID NO: 11956 - DNA, 1332 bp, synthetic construct
  misc_feature 1..1332: note = Description of Artificial Sequence: Synthetic coding sequence
  source 1..1332: mol_type = other DNA
atgccctgcgtgcaggcccagtacagccccagcccccccggcagcagctacgccgcccagacctacagcagcgagtacaccaccgagatcatgaaccccgactacaccaagctgaccatggacctgggcagcaccgagatcaccgccaccgccaccaccagcctgcccagcatcagcaccttcgtggagggctacagcagcaactacgagctgaagcccagctgcgtgtaccagatgcagagacccctgatcaaggtggaggagggcagagcccccagctaccaccaccaccaccaccaccaccaccaccaccaccaccaccaccagcagcagcaccagcagcccagcatcccccccgccagcagccccgaggacgaggtgctgcccagcaccagcatgtacttcaagcagagcccccccagcacccccaccacccccgccttccccccccaggccggcgccctgtgggacgaggccctgcccagcgcccccggctgcatcgcccccggccccctgctggacccccccatgaaggccgtgcccaccgtggccggcgccagattccccctgttccacttcaagcccagccccccccacccccccgcccccagccccgccggcggccaccacctgggctacgaccccaccgccgccgccgccctgagcctgcccctgggcgccgccgccgccgccggcagccaggccgccgccctggagagccacccctacggcctgcccctggccaagagagccgcccccctggccttcccccccctgggcctgacccccagccccaccgccagcagcctgctgggcgagagccccagcctgcccagcccccccagcagaagcagcagcagcggcgagggcacctgcgccgtgtgcggcgacaacgccgcctgccagcactacggcgtgagaacctgcgagggctgcaagggcttcttcaagagaaccgtgcagaagaacgccaagtacgtgtgcctggccaacaagaactgccccgtggacaagagaagaagaaacagatgccagtactgcagattccagaagtgcctgagcgtgggcatggtgaaggaggtggtgagaaccgacagcctgaagggcagaagaggcagactgcccagcaagcccaagagccccctgcagcaggagcccagccagcccagcccccccagcccccccatctgcatgatgaacgccctggtgagagccctgaccgacagcacccccagagacctggactacagcagagtgagcttcatgatcagctgcttccagatgaacgaccagggcctgtacctgtggctgctggtgatcagagtggactag

SEQ ID NO: 11957 - DNA, 894 bp, synthetic construct
  misc_feature 1..894: note = Description of Artificial Sequence: Synthetic coding sequence
  source 1..894: mol_type = other DNA
atgaaggccgtgcccaccgtggccggcgccagattccccctgttccacttcaagcccagccccccccacccccccgcccccagccccgccggcggccaccacctgggctacgaccccaccgccgccgccgccctgagcctgcccctgggcgccgccgccgccgccggcagccaggccgccgccctggagagccacccctacggcctgcccctggccaagagagccgcccccctggccttcccccccctgggcctgacccccagccccaccgccagcagcctgctgggcgagagccccagcctgcccagcccccccagcagaagcagcagcagcggcgagggcacctgcgccgtgtgcggcgacaacgccgcctgccagcactacggcgtgagaacctgcgagggctgcaagggcttcttcaagagaaccgtgcagaagaacgccaagtacgtgtgcctggccaacaagaactgccccgtggacaagagaagaagaaacagatgccagtactgcagattccagaagtgcctgagcgtgggcatggtgaaggaggtggtgagaaccgacagcctgaagggcagaagaggcagactgcccagcaagcccaagagccccctgcagcaggagcccagccagcccagcccccccagcccccccatctgcatgatgaacgccctggtgagagccctgaccgacagcacccccagagacctggactacagcagagtgagcttcatgatcagctgcttccagatgaacgaccagggcctgtacctgtggctgctggtgatcagagtgctggacagcttccacaccttcagcatcttcctggccagcttcagcaacagcgtgcaccccctgcagcagatcatcttcgccctgctgaacctgtag

SEQ ID NO: 11958 - DNA, 1881 bp, synthetic construct
  misc_feature 1..1881: note = Description of Artificial Sequence: Synthetic coding sequence
  source 1..1881: mol_type = other DNA
atgccctgcgtgcaggcccagtacagccccagcccccccggcagcagctacgccgcccagacctacagcagcgagtacaccaccgagatcatgaaccccgactacaccaagctgaccatggacctgggcagcaccgagatcaccgccaccgccaccaccagcctgcccagcatcagcaccttcgtggagggctacagcagcaactacgagctgaagcccagctgcgtgtaccagatgcagagacccctgatcaaggtggaggagggcagagcccccagctaccaccaccaccaccaccaccaccaccaccaccaccaccaccaccagcagcagcaccagcagcccagcatcccccccgccagcagccccgaggacgaggtgctgcccagcaccagcatgtacttcaagcagagcccccccagcacccccaccacccccgccttccccccccaggccggcgccctgtgggacgaggccctgcccagcgcccccggctgcatcgcccccggccccctgctggacccccccatgaaggccgtgcccaccgtggccggcgccagattccccctgttccacttcaagcccagccccccccacccccccgcccccagccccgccggcggccaccacctgggctacgaccccaccgccgccgccgccctgagcctgcccctgggcgccgccgccgccgccggcagccaggccgccgccctggagagccacccctacggcctgcccctggccaagagagccgcccccctggccttcccccccctgggcctgacccccagccccaccgccagcagcctgctgggcgagagccccagcctgcccagcccccccagcagaagcagcagcagcggcgagggcacctgcgccgtgtgcggcgacaacgccgcctgccagcactacggcgtgagaacctgcgagggctgcaagggcttcttcaagagaaccgtgcagaagaacgccaagtacgtgtgcctggccaacaagaactgccccgtggacaagagaagaagaaacagatgccagtactgcagattccagaagtgcctgagcgtgggcatggtgaaggaggtggtgagaaccgacagcctgaagggcagaagaggcagactgcccagcaagcccaagagccccctgcagcaggagcccagccagcccagcccccccagcccccccatctgcatgatgaacgccctggtgagagccctgaccgacagcacccccagagacctggactacagcagatactgccccaccgaccaggccgccgccggcaccgacgccgagcacgtgcagcagttctacaacctgctgaccgccagcatcgacgtgagcagaagctgggccgagaagatccccggcttcaccgacctgcccaaggaggaccagaccctgctgatcgagagcgccttcctggagctgttcgtgctgagactgagcatcagaagcaacaccgccgaggacaagttcgtgttctgcaacggcctggtgctgcacagactgcagtgcctgagaggcttcggcgagtggctggacagcatcaaggacttcagcctgaacctgcagagcctgaacctggacatccaggccctggcctgcctgagcgccctgagcatgatcaccgagagacacggcctgaaggagcccaagagagtggaggagctgtgcaacaagatcaccagcagcctgaaggaccaccagagcaagggccaggccctggagcccaccgagagcaaggtgctgggcgccctggtggagctgagaaagatctgcaccctgggcctgcagagaatcttctacctgaagctggaggacctggtgagcccccccagcatcatcgacaagctgttcctggacaccctgcccttctag

SEQ ID NO: 11959 - DNA, 627 bp, synthetic construct
  misc_feature 1..627: note = Description of Artificial Sequence: Synthetic coding sequence
  source 1..627: mol_type = other DNA
atgggcaacgcccaggagagacccagcgagaccatcgacagagagagaaagagactggtggagaccctgcaggccgacagcggcctgctgctggacgccctgctggccagaggcgtgctgaccggccccgagtacgaggccctggacgccctgcccgacgccgagagaagagtgagaagactgctgctgctggtgcagggcaagggcgaggccgcctgccaggagctgctgagatgcgcccagagaaccgccggcgcccccgaccccgcctgggactggcagcacgtgggccccggctacagagacagaagctacgaccccccctgccccggccactggacccccgaggcccccggcagcggcaccacctgccccggcctgcccagagccagcgaccccgacgaggccggcggccccgagggcagcgaggccgtgcagagcggcacccccgaggagcccgagcccgagctggaggccgaggccagcaaggaggccgagcccgagcccgagcccgagcccgagctggagcccgaggccgaggccgagcccgagcccgagctggagcccgagcccgaccccgagcccgagcccgacttcgaggagagagacgagagcgaggacagctag

SEQ ID NO: 11960 - DNA, 627 bp, synthetic construct; identical to SEQ ID NO: 11959
  misc_feature 1..627: note = Description of Artificial Sequence: Synthetic coding sequence
  source 1..627: mol_type = other DNA

SEQ ID NO: 11961 - DNA, 2133 bp, synthetic construct
  misc_feature 1..2133: note = Description of Artificial Sequence: Synthetic coding sequence
  source 1..2133: mol_type = other DNA
atggtgaagctggccaaggccggcaagaaccagggcgaccccaagaagatggcccccccccccaaggaggtggaggaggacagcgaggacgaggagatgagcgaggacgaggaggacgacagcagcggcgaggaggtggtgatcccccagaagaagggcaagaaggccgccgccaccagcgccaagaaggtggtggtgagccccaccaagaaggtggccgtggccacccccgccaagaaggccgccgtgacccccggcaagaaggccgccgccacccccgccaagaagaccgtgacccccgccaaggccgtgaccacccccggcaagaagggcgccacccccggcaaggccctggtggccacccccggcaagaagggcgccgccatccccgccaagggcgccaagaacggcaagaacgccaagaaggaggacagcgacgaggaggaggacgacgacagcgaggaggacgaggaggacgacgaggacgaggacgaggacgaggacgagatcgagcccgccgccatgaaggccgccgccgccgcccccgccagcgaggacgaggacgacgaggacgacgaggacgacgaggacgacgacgacgacgaggaggacgacagcgaggaggaggccatggagaccacccccgccaagggcaagaaggccgccaaggtggtgcccgtgaaggccaagaacgtggccgaggacgaggacgaggaggaggacgacgaggacgaggacgacgacgacgacgaggacgacgaggacgacgacgacgaggacgacgaggaggaggaggaggaggaggaggaggagcccgtgaaggaggcccccggcaagagaaagaaggagatggccaagcagaaggccgcccccgaggccaagaagcagaaggtggagggcaccgagcccaccaccgccttcaacctgttcgtgggcaacctgaacttcaacaagagcgcccccgagctgaagaccggcatcagcgacgtgttcgccaagaacgacctggccgtggtggacgtgagaatcggcatgaccagaaagttcggctacgtggacttcgagagcgccgaggacctggagaaggccctggagctgaccggcctgaaggtgttcggcaacgagatcaagctggagaagcccaagggcaaggacagcaagaaggagagagacgccagaaccctgctggccaagaacctgccctacaaggtgacccaggacgagctgaaggaggtgttcgaggacgccgccgagatcagactggtgagcaaggacggcaagagcaagggcatcgcctacatcgagttcaagaccgaggccgacgccgagaagaccttcgaggagaagcagggcaccgagatcgacggcagaagcatcagcctgtactacaccggcgagaagggccagaaccaggactacagaggcggcaagaacagcacctggagcggcgagagcaagaccctggtgctgagcaacctgagctacagcgccaccgaggagaccctgcaggaggtgttcgagaaggccaccttcatcaaggtgccccagaaccagaacggcaagagcaagggctacgccttcatcgagttcgccagcttcgaggacgccaaggaggccctgaacagctgcaacaagagagagatcgagggcagagccatcagactggagctgcagggccccagaggcagccccaacgccagaagccagcccagcaagaccctgttcgtgaagggcctgagcgaggacaccaccgaggagaccctgaaggagagcttcgacggcagcgtgagagccagaatcgtgaccgacagagagaccggcagcagcaagggcttcggcttcgtggacttcaacagcgaggaggacgccaaggccgccaaggaggccatggaggacggcgagatcgacggcaacaaggtgaccctggactgggccaagcccaagggcgagggcggcttcggcggcagaggcggcggcagaggcggcttcggcggcagaggcggcggcagaggcggcagaggcggcttcggcggcagaggcagaggcggcttcggcggcagaggcggcttcagaggcggcagaggcggcggcggcgaccacaagccccagggcaagaagaccaagttcgagtag

SEQ ID NO: 11962 - DNA, 1449 bp, synthetic construct
  misc_feature 1..1449: note = Description of Artificial Sequence: Synthetic coding sequence
  source 1..1449: mol_type = other DNA
atggtgaagctggccaaggccggcaagaaccagggcgaccccaagaagatggcccccccccccaaggaggtggaggaggacagcgaggacgaggagatgagcgaggacgaggaggacgacagcagcggcgaggaggtggtgatcccccagaagaagggcaagaaggccgccgccaccagcgccaagaaggtggtggtgagccccaccaagaaggtggccgtggccacccccgccaagaaggccgccgtgacccccggcaagaaggccgccgccacccccgccaagaagaccgtgacccccgccaaggccgtgaccacccccggcaagaagggcgccacccccggcaaggccctggtggccacccccggcaagaagggcgccgccatccccgccaagggcgccaagaacggcaagaacgccaagaaggaggacagcgacgaggaggaggacgacgacagcgaggaggacgaggaggacgacgaggacgaggacgaggacgaggacgagatcgagcccgccgccatgaaggccgccgccgccgcccccgccagcgaggacgaggacgacgaggacgacgaggacgacgaggacggcaagagcaagggcatcgcctacatcgagttcaagaccgaggccgacgccgagaagaccttcgaggagaagcagggcaccgagatcgacggcagaagcatcagcctgtactacaccggcgagaagggccagaaccaggactacagaggcggcaagaacagcacctggagcggcgagagcaagaccctggtgctgagcaacctgagctacagcgccaccgaggagaccctgcaggaggtgttcgagaaggccaccttcatcaaggtgccccagaaccagaacggcaagagcaagggctacgccttcatcgagttcgccagcttcgaggacgccaaggaggccctgaacagctgcaacaagagagagatcgagggcagagccatcagactggagctgcagggccccagaggcagccccaacgccagaagccagcccagcaagaccctgttcgtgaagggcctgagcgaggacaccaccgaggagaccctgaaggagagcttcgacggcagcgtgagagccagaatcgtgaccgacagagagaccggcagcagcaagggcttcggcttcgtggacttcaacagcgaggaggacgccaaggccgccaaggaggccatggaggacggcgagatcgacggcaacaaggtgaccctggactgggccaagcccaagggcgagggcggcttcggcggcagaggcggcggcagaggcggcttcggcggcagaggcggcggcagaggcggcagaggcggcttcggcggcagaggcagaggcggcttcggcggcagaggcggcttcagaggcggcagaggcggcggcggcgaccacaagccccagggcaagaagaccaagttcgagtag

SEQ ID NO: 11963 - DNA, 1809 bp, synthetic construct
  misc_feature 1..1809: note = Description of Artificial Sequence: Synthetic coding sequence
  source 1..1809: mol_type = other DNA
atggtgaagctggccaaggccggcaagaaccagggcgaccccaagaagatggcccccccccccaaggaggtggaggaggacagcgaggacgaggagatgagcgaggacgaggaggacgacagcagcggcgaggagctgaacgacgacttctaccagaccaccatgcacaccctgtggaagaagggcaagaaggccgccgccaccagcgccatccccgccaagggcgccaagaacggcaagaacgccaagaaggaggacagcgacgaggaggaggacgacgacagcgaggaggacgaggaggacgacgaggacgaggacgaggacgaggacgagatcgagcccgccgccatgaaggccgccgccgccgcccccgccagcgaggacgaggacgacgaggacgacgaggacgacgaggacgacgacgacgacgaggaggacgacgacgacgacgaggacgacgaggaggaggaggaggaggaggaggaggagcccgtgaaggaggcccccggcaagagaaagaaggagatggccaagcagaaggccgcccccgaggccaagaagcagaaggtggagggcaccgagcccaccaccgccttcaacctgttcgtgggcaacctgaacttcaacaagagcgcccccgagctgaagaccggcatcagcgacgtgttcgccaagaacgacctggccgtggtggacgtgagaatcggcatgaccagaaagttcggctacgtggacttcgagagcgccgaggacctggagaaggccctggagctgaccggcctgaaggtgttcggcaacgagatcaagctggagaagcccaagggcaaggacagcaagaaggagagagacgccagaaccctgctggccaagaacctgccctacaaggtgacccaggacgagctgaaggaggtgttcgaggacgccgccgagatcagactggtgagcaaggacggcaagagcaagggcatcgcctacatcgagttcaagaccgaggccgacgccgagaagaccttcgaggagaagcagggcaccgagatcgacggcagaagcatcagcctgtactacaccggcgagaagggccagaaccaggactacagaggcggcaagaacagcacctggagcggcgagagcaagaccctggtgctgagcaacctgagctacagcgccaccgaggagaccctgcaggaggtgttcgagaaggccaccttcatcaaggtgccccagaaccagaacggcaagagcaagggctacgccttcatcgagttcgccagcttcgaggacgccaaggaggccctgaacagctgcaacaagagagagatcgagggcagagccatcagactggagctgcagggccccagaggcagccccaacgccagaagccagcccagcaagaccctgttcgtgaagggcctgagcgaggacaccaccgaggagaccctgaaggagagcttcgacggcagcgtgagagccagaatcgtgaccgacagagagaccggcagcagcaagggcttcggcttcgtggacttcaacagcgaggaggacgccaaggccgccaaggaggccatggaggacggcgagatcgacggcaacaaggtgaccctggactgggccaagcccaagggcgagggcggcttcggcggcagaggcggcggcagaggcggcttcggcggcagaggcggcggcagaggcggcagaggcggcttcggcggcagaggcagaggcggcttcggcggcagaggcggcttcagaggcggcagaggcggcggcggcgaccacaagccccagggcaagaagaccaagttcgagtag

SEQ ID NO: 11964 - DNA, 885 bp, synthetic construct
  misc_feature 1..885: note = Description of Artificial Sequence: Synthetic coding sequence
  source 1..885: mol_type = other DNA
atggaggacagcatggacatggacatgagccccctgagaccccagaactacctgttcggctgcgagctgaaggccgacaaggactaccacttcaaggtggacaacgacgagaacgagcaccagctgagcctgagaaccgtgagcctgggcgccggcgccaaggacgagctgcacatcgtggaggccgaggccatgaactacgagggcagccccatcaaggtgaccctggccaccctgaagatgagcgtgcagcccaccgtgagcctgggcggcttcgagatcaccccccccgtggtgctgagactgaagtgcggcagcggccccgtgcacatcagcggccagcacctggtggccgtggaggaggacgccgagagcgaggacgaggaggaggaggacgtgaagctgctgagcatcagcggcaagagaagcgcccccggcggcggcagcaaggtgccccagaagaaggtgaagctggccgccgacgaggacgacgacgacgacgacgaggaggacgacgacgaggacgacgacgacgacgacttcgacgacgaggaggccgaggagaaggcccccgtgaagaagagcatcagagacacccccgccaagaacgcccagaagagcaaccagaacggcaaggacagcaagcccagcagcacccccagaagcaagggccaggagagcttcaagaagcaggagaagacccccaagacccccaagggccccagcagcgtggaggacatcaaggccaagatgcaggccagcatcgagaagggcggcagcctgcccaaggtggaggccaagttcatcaactacgtgaagaactgcttcagaatgaccgaccaggaggccatccaggacctgtggcagtggagaaagagcctgtag

SEQ ID NO: 11965 - DNA, 798 bp, synthetic construct
  misc_feature 1..798: note = Description of Artificial Sequence: Synthetic coding sequence
  source 1..798: mol_type = other DNA
atggaggacagcatggacatggacatgagccccctgagaccccagaactacctgttcggctgcgagctgaaggccgacaaggactaccacttcaaggtggacaacgacgagaacgagcaccagctgagcctgagaaccgtgagcctgggcgccggcgccaaggacgagctgcacatcgtggaggccgaggccatgaactacgagggcagccccatcaaggtgaccctggccaccctgaagatgagcgtgcagcccaccgtgagcctgggcggcttcgagatcaccccccccgtggtgctgagactgaagtgcggcagcggccccgtgcacatcagcggccagcacctggtggccgtggaggaggacgccgagagcgaggacgaggaggaggaggacgtgaagctgctgagcatcagcggcaagagaagcgcccccggcggcggcagcaaggtgccccagaagaaggtgaagctggccgccgacgaggacgacgacgacgacgacgaggaggacgacgacgaggacgacgacgacgacgacttcgacgacgaggaggccgaggagaaggcccccgtgaagaagggccaggagagcttcaagaagcaggagaagacccccaagacccccaagggccccagcagcgtggaggacatcaaggccaagatgcaggccagcatcgagaagggcggcagcctgcccaaggtggaggccaagttcatcaactacgtgaagaactgcttcagaatgaccgaccaggaggccatccaggacctgtggcagtggagaaagagcctgtag

SEQ ID NO: 11966 - DNA, 780 bp, synthetic construct
  misc_feature 1..780: note = Description of Artificial Sequence: Synthetic coding sequence
  source 1..780: mol_type = other DNA
atggaggacagcatggacatggacatgagccccctgagaccccagaactacctgttcggctgcgagctgaaggccgacaaggactaccacttcaaggtggacaacgacgagaacgagcaccagctgagcctgagaaccgtgagcctgggcgccggcgccaaggacgagctgcacatcgtggaggccgaggccatgaactacgagggcagccccatcaaggtgaccctggccaccctgaagatgagcgtgcagcccaccgtgagcctgggcggcttcgagatcaccccccccgtggtgctgagactgaagtgcggcagcggccccgtgcacatcagcggccagcacctggtggccgtggaggaggacgccgagagcgaggacgaggaggaggaggacgtgaagctgctgagcatcagcggcaagagaagcgcccccggcggcggcagcaaggtgccccagaagaaggtgaagctggccgccgacgaggacgacgacgacgacgacgaggaggacgacgacgaggacgacgacgacgacgacttcgacgacgaggaggccgaggagaaggcccccgtgaagaagagcatcagagacacccccgccaagaacgcccagaagagcaaccagaacggcaaggacagcaagcccagcagcacccccagaagcaagggccaggagagcttcaagaagcaggagaagacccccaagacccccaagggccccagcagcgtggaggacatcaaggccaagatgcaggccagcatcgagaaggcccactag

SEQ ID NO: 11967 - DNA, 885 bp, synthetic construct; identical to SEQ ID NO: 11964
  misc_feature 1..885: note = Description of Artificial Sequence: Synthetic coding sequence
  source 1..885: mol_type = other DNA

SEQ ID NO: 11968 - DNA, 867 bp, synthetic construct
  misc_feature 1..867: note = Description of Artificial Sequence: Synthetic coding sequence
  source 1..867: mol_type = other DNA
atgaaggacagaacccaggagctgagaaccgccaaggacagcgacgacgacgacgacgtggccgtgaccgtggacagagacagattcatggacgagttcttcgagcaggtggaggagatcagaggcttcatcgacaagatcgccgagaacgtggaggaggtgaagagaaagcacagcgccatcctggccagccccaaccccgacgagaagaccaaggaggagctggaggagctgatgagcgacatcaagaagaccgccaacaaggtgagaagcaagctgaagagcatcgagcagagcatcgagcaggaggagggcctgaacagaagcagcgccgacctgagaatcagaaagacccagcacagcaccctgagcagaaagttcgtggaggtgatgagcgagtacaacgccacccagagcgactacagagagagatgcaagggcagaatccagagacagctggagatcaccggcagaaccaccaccagcgaggagctggaggacatgctggagagcggcaaccccgccatcttcgccagcggcatcatcatggacagcagcatcagcaagcaggccctgagcgagatcgagaccagacacagcgagatcatcaagctggagaacagcatcagagagctgcacgacatgttcatggacatggccatgctggtggagagccagggcgagatgatcgacagaatcgagtacaacgtggagcacgccgtggactacgtggagagagccgtgagcgacaccaagaaggccgtgaagtaccagagcaaggccagaagaaagaagatcatgatcatcatctgctgcgtgatcctgggcatcgtgatcgccagcaccgtgggcggcatcttcgcctag

SEQ ID NO: 11969 - DNA, 183 bp, synthetic construct
  misc_feature 1..183: note = Description of Artificial Sequence: Synthetic coding sequence
  source 1..183: mol_type = other DNA
atggaggagcagggccacagcgagatggagatcatccccagcgagagccacccccacatccagctgctgaagagcaacagagagctgctggtgacccacatcagaaacacccagtgcctggtggacaacctgctgaagaacgactacttcagcgccgaggacgccgagatcgtgtgcgcctag

SEQ ID NO: 11970 - DNA, 183 bp, synthetic construct; identical to SEQ ID NO: 11969
  misc_feature 1..183: note = Description of Artificial Sequence: Synthetic coding sequence
  source 1..183: mol_type = other DNA

SEQ ID NO: 11971 - DNA, 138 bp, synthetic construct
  misc_feature 1..138: note = Description of Artificial Sequence: Synthetic coding sequence
  source 1..138: mol_type = other DNA
atggaggagcagggccacagcgagatggagatcatccccagcgagagccacccccacatccagctgctgaagagcaacagagagctgctggtgacccacatcagaaacacccagtgcctggtggacaacctgctgtag

SEQ ID NO: 11972 - DNA, 183 bp, synthetic construct; identical to SEQ ID NO: 11969
  misc_feature 1..183: note = Description of Artificial Sequence: Synthetic coding sequence
  source 1..183: mol_type = other DNA

SEQ ID NO: 11973 - DNA, 750 bp, synthetic construct
  misc_feature 1..750: note = Description of Artificial Sequence: Synthetic coding sequence
  source 1..750: mol_type = other DNA
atggaggagcagggccacagcgagatggagatcatccccagcgagagccacccccacatccagctgctgaagagcaacagagagctgctggtgacccacatcagaaacacccagtgcctggtggacaacctgctgaagaacgactacttcagcgccgaggacgccgagatcgtgtgcgcctgccccacccagcccgacaaggtgagaaagatcctggacctggtgcagagcaagggcgaggaggtgagcgagttcttcctgtacctgctgcagcagctggccgacgcctacgtggacctgagaccctggctgctggagatcggcttcagccccagcctgctgacccagagcaaggtggtggtgaacaccgaccccgtgagcagatacacccagcagctgagacaccacctgggcagagacagcaagttcgtgctgtgctacgcccagaaggaggagctgctgctggaggagatctacatggacaccatcatggagctggtgggcttcagcaacgagagcctgggcagcctgaacagcctggcctgcctgctggaccacaccaccggcatcctgaacgagcaggccgccagcagaaaggtgaccggctgcgtgtgcagaacctgcagcagcagcaccaccgccacccagagcggcacccccagaagatgcctgcccagctgctgcgccagccccacctggcccagcagccccagcatggcctggaccagctgcaccagaacctggacctag

SEQ ID NO: 11974 - DNA, 2340 bp, synthetic construct
  misc_feature 1..2340: note = Description of Artificial Sequence: Synthetic coding sequence
  source 1..2340: mol_type = other DNA
atggaggagcagggccacagcgagatggagatcatccccagcgagagccacccccacatccagctgctgaagagcaacagagagctgctggtgacccacatcagaaacacccagtgcctggtggacaacctgctgaagaacgactacttcagcgccgaggacgccgagatcgtgtgcgcctgccccacccagcccgacaaggtgagaaagatcctggacctggtgcagagcaagggcgaggaggtgagcgagttcttcctgtacctgctgcagcagctggccgacgcctacgtggacctgagaccctggctgctggagatcggcttcagccccagcctgctgacccagagcaaggtggtggtgaacaccgaccccgtgagcagatacacccagcagctgagacaccacctgggcagagacagcaagttcgtgctgtgctacgcccagaaggaggagctgctgctggaggagatctacatggacaccatcatggagctggtgggcttcagcaacgagagcctgggcagcctgaacagcctggcctgcctgctggaccacaccaccggcatcctgaacgagcagggcgagaccatcttcatcctgggcgacgccggcgtgggcaagagcatgctgctgcagagactgcagagcctgtgggccaccggcagactggacgccggcgtgaagttcttcttccacttcagatgcagaatgttcagctgcttcaaggagagcgacagactgtgcctgcaggacctgctgttcaagcactactgctaccccgagagagaccccgaggaggtgttcgccttcctgctgagattcccccacgtggccctgttcaccttcgacggcctggacgagctgcacagcgacctggacctgagcagagtgcccgacagcagctgcccctgggagcccgcccaccccctggtgctgctggccaacctgctgagcggcaagctgctgaagggcgccagcaagctgctgaccgccagaaccggcatcgaggtgcccagacagttcctgagaaagaaggtgctgctgagaggcttcagccccagccacctgagagcctacgccagaagaatgttccccgagagagccctgcaggacagactgctgagccagctggaggccaaccccaacctgtgcagcctgtgcagcgtgcccctgttctgctggatcatcttcagatgcttccagcacttcagagccgccttcgagggcagcccccagctgcccgactgcaccatgaccctgaccgacgtgttcctgctggtgaccgaggtgcacctgaacagaatgcagcccagcagcctggtgcagagaaacaccagaagccccgtggagaccctgcacgccggcagagacaccctgtgcagcctgggccaggtggcccacagaggcatggagaagagcctgttcgtgttcacccaggaggaggtgcaggccagcggcctgcaggagagagacatgcagctgggcttcctgagagccctgcccgagctgggccccggcggcgaccagcagagctacgagttcttccacctgaccctgcaggccttcttcaccgccttcttcctggtgctggacgacagagtgggcacccaggagctgctgagattcttccaggagtggatgccccccgccggcgccgccaccaccagctgctacccccccttcctgcccttccagtgcctgcagggcagcggccccgccagagaggacctgttcaagaacaaggaccacttccagttcaccaacctgttcctgtgcggcctgctgagcaaggccaagcagaagctgctgagacacctggtgcccgccgccgccctgagaagaaagagaaaggccctgtgggcccacctgttcagcagcctgagaggctacctgaagagcctgcccagagtgcaggtggagagcttcaaccaggtgcaggccatgcccaccttcatctggatgctgagatgcatctacgagacccagagccagaaggtgggccagctggccgccagaggcatctgcgccaactacctgaagctgacctactgcaacgcctgcagcgccgactgcagcgccctgagcttcgtgctgcaccacttccccaagagactggccctggacctggacaacaacaacctgaacgactacggcgtgagagagctgcagccctgcttcagcagactgaccgtgctgagactgagcgtgaaccagatcaccgacggcggcgtgaaggtgctgagcgaggagctgaccaagtacaagatcgtgacctacctgggcctgtggaagagcgtggacaccatctgcttcaagaagcagggcctgctgaagtag

SEQ ID NO: 11975 - DNA, 495 bp, synthetic construct
  misc_feature 1..495: note = Description of Artificial Sequence: Synthetic coding sequence
  source 1..495: mol_type = other DNA
atgaagtgcaagcccaaccagaccagaacctacgaccccgagggcttcaagaagagagccgcctgcctgtgcttcagaagcgagagagaggacgaggtgctgctggtgagcagcagcagataccccgacagatggatcgtgcccggcggcggcatggagcccgaggaggagcccggcggcgccgccgtgagagaggtgtacgaggaggccggcgtgaagggcaagctgggcagactgctgggcgtgttcgagcagaaccaggacagaaagcacagaacctacgtgtacgtgctgaccgtgaccgagctgctggaggactgggaggacagcgtgagcatcggcagaaagagagagtggttcaaggtggaggacgccatcaaggtgctgcagtgccacaagcccgtgcacgccgagtacctggagaagctgaagctgggcggcagccccaccaacggcaacagcatggcccccagcagccccgacagcgacccctag

SEQ ID NO: 11976 - DNA, 792 bp, synthetic construct
  misc_feature 1..792: note = Description of Artificial Sequence: Synthetic coding sequence
  source 1..792: mol_type = other DNA
atgagcctgtactgcggcatcgcctgcagaagaaagttcttctggtgctacagactgctgagcacctacgtgaccaagaccagatacctgttcgagctgaaggaggacgacgacgcctgcaagaaggcccagcagaccggcgccttctacctgttccacagcctggcccccctgctgcagaccagcgcccaccagtacctggcccccagacacagcctgctggagctggagagactgctgggcaagttcggccaggacgcccagagaatcgaggacagcgtgctgatcggctgcagcgagcagcaggaggcctggttcgccctggacctgggcctggacagcagcttcagcatcagcgccagcctgcacaagcccgagatggagaccgagctgaagggcagcttcatcgagctgagaaaggccctgttccagctgaacgccagagacgccagcctgctgagcaccgcccaggccctgctgagatggcacgacgcccaccagttctgcagcagaagcggccagcccaccaagaagaacgtggccggcagcaagagagtgtgccccagcaacaacatcatctactacccccagatccaggtgaacctgagagagctggagaccgccgcctggttcagccacgacgaggtggccaccgccctgaagagaaagggcccctacacccagcagcagaacggcaccttccccttctggctgccccccaagctggccatcagccaccagctgatcaaggagtgggtggagaagcagacctgcagcagcctgcccgcctag

SEQ ID NO: 11977 - DNA, 1059 bp, synthetic construct
  misc_feature 1..1059: note = Description of Artificial Sequence: Synthetic coding sequence
  source 1..1059: mol_type = other DNA
atgagcctgtactgcggcatcgcctgcagaagaaagttcttctggtgctacagactgctgagcacctacgtgaccaagaccagatacctgttcgagctgaaggaggacgacgacgcctgcaagaaggcccagcagaccggcgccttctacctgttccacagcctggcccccctgctgcagaccagcgcccaccagtacctggcccccagacacagcctgctggagctggagagactgctgggcaagttcggccaggacgcccagagaatcgaggacagcgtgctgatcggctgcagcgagcagcaggaggcctggttcgccctggacctgggcctggacagcagcttcagcatcagcgccagcctgcacaagcccgagatggagaccgagctgaagggcagcttcatcgagctgagaaaggccctgttccagctgaacgccagagacgccagcctgctgagcaccgcccaggccctgctgagatggcacgacgcccaccagttctgcagcagaagcggccagcccaccaagaagaacgtggccggcagcaagagagtgtgccccagcaacaacatcatctactacccccagatggcccccgtggccatcaccctggtgagcgacggcaccagatgcctgctggccagacagagcagcttccccaagggcatgtacagcgccctggccggcttctgcgacatcggcgagagcgtggaggagaccatcagaagagaggtggccgaggaggtgggcctggaggtggagagcctgcagtactacgccagccagcactggcccttccccagcggcagcctgatgatcgcctgccacgccaccgtgaagcccggccagaccgagatccaggtgaacctgagagagctggagaccgccgcctggttcagccacgacgaggtggccaccgccctgaagagaaagggcccctacacccagcagcagaacggcaccttccccttctggctgccccccaagctggccatcagccaccagctgatcaaggagtgggtggagaagcagacctgcagcagcctgcccgcctag

SEQ ID NO: 11978 - DNA, 708 bp, synthetic construct
  misc_feature 1..708: note = Description of Artificial Sequence: Synthetic coding sequence
  source 1..708: mol_type = other DNA
atgagcctgtactgcggcatcgcctgcagaagaaagttcttctggtgctacagactgctgagcacctacgtgaccaagaccagatacctgttcgagctgaaggaggacgacgacgcctgcaagaaggcccagcagaccggcgccttctacctgttccacagcctggcccccctgctgcagaccagcgcccaccagtacctggcccccagacacagcctgctggagctggagagactgctgggcaagttcggccaggacgcccagagaatcgaggacagcgtgctgatcggctgcagcgagcagcaggaggcctggttcgccctggacctgggcctggacagcagcttcagcatcagcgccagcctgcacaagcccgagatggagaccgagctgaagggcagcttcatcgagctgagaaaggccctgttccagctgaacgccagagacgccagcctgctgagcaccgcccaggccctgctgagatggcacgacgcccaccagttctgcagcagaagcggccagcccaccaagaagaacgtggccggcagcaagagagtgtgccccagcaacaacatcatctactacccccaggtgaaggtgtggaagagacccagcgccgagaagctgcagaagagatgggactggagatggaaggcctgcagcaccatgcaccccagcatcggccccagcctggtggcccacagctag

SEQ ID NO: 11979 - DNA, 468 bp, synthetic construct
  misc_feature 1..468: note = Description of Artificial Sequence: Synthetic coding sequence
  source 1..468: mol_type = other DNA
atggcccccgtggccatcaccctggtgagcgacggcaccagatgcctgctggccagacagagcagcttccccaagggcatgtacagcgccctggccggcttctgcgacatcggcgagagcgtggaggagaccatcagaagagaggtggccgaggaggtgggcctggaggtggagagcctgcagtactacgccagccagcactggcccttccccagcggcagcctgatgatcgcctgccacgccaccgtgaagcccggccagaccgagatccaggtgaacctgagagagctggagaccgccgcctggttcagccacgacgaggtggccaccgccctgaagagaaagggcccctacacccagcagcagaacggcaccttccccttctggctgccccccaagctggccatcagccaccagctgatcaaggagtgggtggagaagcagacctgcagcagcctgcccgcctag

SEQ ID NO: 11980 - DNA, 681 bp, synthetic construct
  misc_feature 1..681: note = Description of Artificial Sequence: Synthetic coding sequence
  source 1..681: mol_type = other DNA
atggagaccgagctgaagggcagcttcatcgagctgagaaaggccctgttccagctgaacgccagagacgccagcctgctgagcaccgcccaggccctgctgagatggcacgacgcccaccagttctgcagcagaagcggccagcccaccaagaagaacgtggccggcagcaagagagtgtgccccagcaacaacatcatctactacccccagatggcccccgtggccatcaccctggtgagcgacggcaccagatgcctgctggccagacagagcagcttccccaagggcatgtacagcgccctggccggcttctgcgacatcggcgagagcgtggaggagaccatcagaagagaggtggccgaggaggtgggcctggaggtggagagcctgcagtactacgccagccagcactggcccttccccagcggcagcctgatgatcgcctgccacgccaccgtgaagcccggccagaccgagatccaggtgaacctgagagagctggagaccgccgcctggttcagccacgacgaggtggccaccgccctgaagagaaagggcccctacacccagcagcagaacggcaccttccccttctggctgccccccaagctggccatcagccaccagctgatcaaggagtgggtggagaagcagacctgcagcagcctgcccgcctag

SEQ ID NO: 11981 - DNA, 717 bp, synthetic construct
  misc_feature 1..717: note = Description of Artificial Sequence: Synthetic coding sequence
  source 1..717: mol_type = other DNA
atgctgggccagcccgcccccctggagagattcgccagcagaagaccccaggtgctggccgtgagaaccgtgtgcgacctggtgctgggcaagatggacaaggactgcgagatgaagagaaccaccctggacagccccctgggcaagctggagctgagcggctgcgagcagggcctgcacgagatcaagctgctgggcaagggcaccagcgccgccgacgccgtggaggtgcccgcccccgccgccgtgctgggcggccccgagcccctgatgcagtgcaccgcctggctgaacgcctacttccaccagcccgaggccatcgaggagttccccgtgcccgccctgcaccaccccgtgttccagcaggagagcttcaccagacaggtgctgtggaagctgctgaaggtggtgaagttcggcgaggtgatcagctaccagcagctggccgccctggccggcaaccccaaggccgccagagccgtgggcggcgccatgagaggcaaccccgtgcccatcctgatcccctgccacagagtggtgtgcagcagcggcgccgtgggcaactacagcggcggcctggccgtgaaggagtggctgctggcccacgagggccacagactgggcaagcccggcctgggcggcagcagcggcctggccggcgcctggctgaagggcgccggcgccaccagcggcagcccccccgccggcagaaactag

SEQ ID NO: 11982 - DNA, 1569 bp, synthetic construct
  misc_feature 1..1569: note = Description of Artificial Sequence: Synthetic coding sequence
  source 1..1569: mol_type = other DNA
atgagcagcagacccctggagagcccccccccctacagacccgacgagttcaagcccaaccactacgcccccagcaacgacatctacggcggcgagatgcacgtgagacccatgctgagccagcccgcctacagcttctaccccgaggacgagatcctgcacttctacaagtggaccagcccccccggcgtgatcagaatcctgagcatgctgatcatcgtgatgtgcatcgccatcttcgcctgcgtggccagcaccctggcctgggacagaggctacggcaccagcctgctgggcggcagcgtgggctacccctacggcggcagcggcttcggcagctacggcagcggctacggctacggctacggctacggctacggctacggcggctacaccgaccccagagccgccaagggcttcatgctggccatggccgccttctgcttcatcgccgccctggtgatcttcgtgaccagcgtgatcagaagcgagatgagcagaaccagaagatactacctgagcgtgatcatcgtgagcgccatcctgggcatcatggtgttcatcgccaccatcgtgtacatcatgggcgtgaaccccaccgcccagagcagcggcagcctgtacggcagccagatctacgccctgtgcaaccagttctacacccccgccgccaccggcctgtacgtggaccagtacctgtaccactactgcgtggtggacccccaggaggccatcgccatcgtgctgggcttcatgatcatcgtggccttcgccctgatcatcttcttcgccgtgaagaccagaagaaagatggacagatacgacaagagcaacatcctgtgggacaaggagcacatctacgacgagcagccccccaacgtggaggagtgggtgaagaacgtgagcgccggcacccaggacgtgcccagcccccccagcgactacgtggagagagtggacagccccatggcctacagcagcaacggcaaggtgaacgacaagagattctaccccgagagcagctacaagagcacccccgtgcccgaggtggtgcaggagctgcccctgaccagccccgtggacgacttcagacagcccagatacagcagcggcggcaacttcgagacccccagcaagagagcccccgccaagggcagagccggcagaagcaagagaaccgagcaggaccactacgagaccgactacaccaccggcggcgagagctgcgacgagctggaggaggactggatcagagagtacccccccatcaccagcgaccagcagagacagctgtacaagagaaacttcgacaccggcctgcaggagtacaagagcctgcagagcgagctggacgagatcaacaaggagctgagcagactggacaaggagctggacgactacagagaggagagcgaggagtacatggccgccgccgacgagtacaacagactgaagcaggtgaagggcagcgccgactacaagagcaagaagaaccactgcaagcagctgaagagcaagctgagccacatcaagaagatggtgggcgactacgacagacagaagacctag

SEQ ID NO: 11983 - DNA, 1407 bp, synthetic construct
  misc_feature 1..1407: note = Description of Artificial Sequence: Synthetic coding sequence
  source 1..1407: mol_type = other DNA
atgagcagcagacccctggagagcccccccccctacagacccgacgagttcaagcccaaccactacgcccccagcaacgacatctacggcggcgagatgcacgtgagacccatgctgagccagcccgcctacagcttctaccccgaggacgagatcctgcacttctacaagtggaccagcccccccggcgtgatcagaatcctgagcatgctgatcatcgtgatgtgcatcgccatcttcgcctgcgtggccagcaccctggcctgggacagaggctacggcaccagcctgctgggcggcagcgtgggctacccctacggcggcagcggcttcggcagctacggcagcggctacggctacggctacggctacggctacggctacggcggctacaccgaccccagagccgccaagggcttcatgctggccatggccgccttctgcttcatcgccgccctggtgatcttcgtgaccagcgtgatcagaagcgagatgagcagaaccagaagatactacctgagcgtgatcatcgtgagcgccatcctgggcatcatggtgttcatcgccaccatcgtgtacatcatgggcgtgaaccccaccgcccagagcagcggcagcctgtacggcagccagatctacgccctgtgcaaccagttctacacccccgccgccaccggcctgtacgtggaccagtacctgtaccactactgcgtggtggacccccaggaggtgaagaacgtgagcgccggcacccaggacgtgcccagcccccccagcgactacgtggagagagtggacagccccatggcctacagcagcaacggcaaggtgaacgacaagagattctaccccgagagcagctacaagagcacccccgtgcccgaggtggtgcaggagctgcccctgaccagccccgtggacgacttcagacagcccagatacagcagcggcggcaacttcgagacccccagcaagagagcccccgccaagggcagagccggcagaagcaagagaaccgagcaggaccactacgagaccgactacaccaccggcggcgagagctgcgacgagctggaggaggactggatcagagagtacccccccatcaccagcgaccagcagagacagctgtacaagagaaacttcgacaccggcctgcaggagtacaagagcctgcagagcgagctggacgagatcaacaaggagctgagcagactggacaaggagctggacgactacagagaggagagcgaggagtacatggccgccgccgacgagtacaacagactgaagcaggtgaagggcagcgccgactacaagagcaagaagaaccactgcaagcagctgaagagcaagctgagccacatcaagaagatggtgggcgactacgacagacagaagacctag

SEQ ID NO: 11984 - DNA, 1569 bp, synthetic construct; identical to SEQ ID NO: 11982
  misc_feature 1..1569: note = Description of Artificial Sequence: Synthetic coding sequence
  source 1..1569: mol_type = other DNA

SEQ ID NO: 11985 - DNA, 816 bp, synthetic construct
  misc_feature 1..816: note = Description of Artificial Sequence: Synthetic coding sequence
  source 1..816: mol_type = other DNA
atgatcatcgtggccttcgccctgatcatcttcttcgccgtgaagaccagaagaaagatggacagatacgacaagagcaacatcctgtgggacaaggagcacatctacgacgagcagccccccaacgtggaggagtgggtgaagaacgtgagcgccggcacccaggacgtgcccagcccccccagcgactacgtggagagagtggacagccccatggcctacagcagcaacggcaaggtgaacgacaagagattctaccccgagagcagctacaagagcacccccgtgcccgaggtggtgcaggagctgcccctgaccagccccgtggacgacttcagacagcccagatacagcagcggcggcaacttcgagacccccagcaagagagcccccgccaagggcagagccggcagaagcaagagaaccgagcaggaccactacgagaccgactacaccaccggcggcgagagctgcgacgagctggaggaggactggatcagagagtacccccccatcaccagcgaccagcagagacagctgtacaagagaaacttcgacaccggcctgcaggagtacaagagcctgcagagcgagctggacgagatcaacaaggagctgagcagactggacaaggagctggacgactacagagaggagagcgaggagtacatggccgccgccgacgagtacaacagactgaagcaggtgaagggcagcgccgactacaagagcaagaagaaccactgcaagcagctgaagagcaagctgagccacatcaagaagatggtgggcgactacgacagacagaagacctag

SEQ ID NO: 11986 - DNA, 603 bp, synthetic construct
  misc_feature 1..603: note = Description of Artificial Sequence: Synthetic coding sequence
  source 1..603: mol_type = other DNA
atggcctacagcagcaacggcaaggtgaacgacaagagattctaccccgagagcagctacaagagcacccccgtgcccgaggtggtgcaggagctgcccctgaccagccccgtggacgacttcagacagcccagatacagcagcggcggcaacttcgagacccccagcaagagagcccccgccaagggcagagccggcagaagcaagagaaccgagcaggaccactacgagaccgactacaccaccggcggcgagagctgcgacgagctggaggaggactggatcagagagtacccccccatcaccagcgaccagcagagacagctgtacaagagaaacttcgacaccggcctgcaggagtacaagagcctgcagagcgagctggacgagatcaacaaggagctgagcagactggacaaggagctggacgactacagagaggagagcgaggagtacatggccgccgccgacgagtacaacagactgaagcaggtgaagggcagcgccgactacaagagcaagaagaaccactgcaagcagctgaagagcaagctgagccacatcaagaagatggtgggcgactacgacagacagaagacctag

SEQ ID NO: 11987 - DNA, 3114 bp, synthetic construct
  misc_feature 1..3114: note = Description of Artificial Sequence: Synthetic coding sequence
  source 1..3114: mol_type = other DNA
atgtggagatgcggcggcagacagggcctgtgcgtgctgagaagactgagcggcggccacgcccaccacagagcctggagatggaacagcaacagagcctgcgagagagccctgcagtacaagctgggcgacaagatccacggcttcaccgtgaaccaggtgaccagcgtgcccgagctgttcctgaccgccgtgaagctgacccacgacgacaccggcgccagatacctgcacctggccagagaggacaccaacaacctgttcagcgtgcagttcagaaccacccccatggacagcaccggcgtgccccacatcctggagcacaccgtgctgtgcggcagccagaagtacccctgcagagaccccttcttcaagatgctgaacagaagcctgagcaccttcatgaacgccttcaccgccagcgactacaccctgtaccccttcagcacccagaaccccaaggacttccagaacctgctgagcgtgtacctggacgccaccttcttcccctgcctgagagagctggacttctggcaggagggctggagactggagcacgagaaccccagcgacccccagacccccctggtgttcaagggcgtggtgttcaacgagatgaagggcgccttcgtgaacaacgagagaatcttcagccagcacctgcagaacagactgctgcccgaccacacctacagcgtggtgagcggcggcgaccccctgtgcatccccgagctgacctgggagcagctgaagcagttccacgccacccactaccaccccagcaacgccagattcttcacctacggcaacttccccctggagcagcacctgaagcagatccacgaggaggccctgagcaagttccagaagatcgagcccagcaccgtggtgcccgcccagaccccctgggacaagcccagagagttccagatcacctgcggccccgacagcttcgccaccgaccccagcaagcagaccaccatcagcgtgagcttcctgctgcccgacatcaccgacaccttcgaggccttcaccctgagcctgctgagcagcctgctgaccagcggccccaacagccccttctacaaggccctgatcgagagcggcctgggcaccgacttcagccccgacgtgggctacaacggctacaccagagaggcctacttcagcgtgggcctgcagggcatcgccgagaaggacatcgagaccgtgagaagcctgatcgacagaaccatcgacgaggtggtggagaagggcttcgaggacgacagaatcgaggccctgctgcacaagatcgagatccagatgaagcaccagagcaccagcttcggcctgatgctgaccagctacatcgccagctgctggaaccacgacggcgaccccgtggagctgctgaagctgggcaaccagctggccaagttcagacagtgcctgcaggagaaccccaagttcctgcaggagaaggtgaagcagtacttcaagaacaaccagcacaagctgaccctgagcatgagacccgacgacaagtaccacgagaagcaggcccaggtggaggccaccaagctgaagcagaaggtggaggccctgagccccggcgacagacagcagatctacgagaagggcctggagctgagaagccagcagagcaagccccaggacgccagctgcctgcccgccctgaaggtgagcgacatcgagcccaccatccccgtgaccgagctggacgtggtgctgaccgccggcgacatccccgtgcagtactgcgcccagcccaccaacggcatggtgtacttcagagccttcagcagcctgaacaccctgcccgaggagctgagaccctacgtgcccctgttctgcagcgtgctgaccaagctgggctgcggcctgctggactacagagagcaggcccagcagatcgagctgaagaccggcggcatgagcgccagcccccacgtgctgcccgacgacagccacatggacacctacgagcagggcgtgctgttcagcagcctgtgcctggacagaaacctgcccgacatgatgcagctgtggagcgagatcttcaacaacccctgcttcgaggaggaggagcacttcaaggtgctggtgaagatgaccgcccaggagctggccaacggcatccccgacagcggccacctgtacgccagcatcagagccggcagaaccctgacccccgccggcgacctgcaggagaccttcagcggcatggaccaggtgagactgatgaagagaatcgccgagatgaccgacatcaagcccatcctgagaaagctgcccagaatcaagaagcacctgctgaacggcgacaacatgagatgcagcgtgaacgccaccccccagcagatgccccagaccgagaaggccgtggaggacttcctgagaagcatcggcagaagcaagaaggagagaagacccgtgagaccccacaccgtggagaagcccgtgcccagcagcagcggcggcgacgcccacgtgccccacggcagccaggtgatcagaaagctggtgatggagcccaccttcaagccctggcagatgaagacccacttcctgatgcccttccccgtgaactacgtgggcgagtgcatcagaaccgtgccctacaccgaccccgaccacgccagcctgaagatcctggccagactgatgaccgccaagttcctgcacaccgagatcagagagaagggcggcgcctacggcggcggcgccaagctgagccacaacggcatcttcaccctgtacagctacagagaccccaacaccatcgagaccctgcagagcttcggcaaggccgtggactgggccaagagcggcaagttcacccagcaggacatcgacgaggccaagctgagcgtgttcagcaccgtggacgcccccgtggcccccagcgacaagggcatggaccacttcctgtacggcctgagcgacgagatgaagcaggcccacagagagcagctgttcgccgtgagccacgacaagctgctggccgtgagcgacagatacctgggcaccggcaagagcacccacggcctggccatcctgggccccgagaaccccaagatcgccaaggaccccagctggatcatccagtag

SEQ ID NO: 11988 - DNA, 1107 bp, synthetic construct
  misc_feature 1..1107: note = Description of Artificial Sequence: Synthetic coding sequence
  source 1..1107: mol_type = other DNA
atgcagcccggcagcagcagatgcgaggaggagacccccagcctgctgtggggcctggaccccgtgttcctggccttcgccaagctgtacatcagagacatcctggacatgaaggagagcagacaggtgcccggcgtgttcctgtacaacggccaccccatcaagcaggtggacgtgctgggcaccgtgatcggcgtgagagagagagacgccttctacagctacggcgtggacgacagcaccggcgtgatcaactgcatctgctggaagaagctgaacaccgagagcgtgagcgccgcccccagcgccgccagagagctgagcctgaccagccagctgaagaagctgcaggagaccatcgagcagaagaccaagatcgagatcggcgacaccatcagagtgagaggcagcatcagaacctacagagaggagagagagatccacgccaccacctactacaaggtggacgaccccgtgtggaacatccagatcgccagaatgctggagctgcccaccatctacagaaaggtgtacgaccagcccttccacagcagcgccctggagaaggaggaggccctgagcaaccccggcgccctggacctgcccagcctgaccagcctgctgagcgagaaggccaaggagttcctgatggagaacagagtgcagagcttctaccagcaggagctggagatggtggagagcctgctgagcctggccaaccagcccgtgatccacagcgccagcagcgaccaggtgaacttcaagaaggacaccaccagcaaggccatccacagcatcttcaagaacgccatccagctgctgcaggagaagggcctggtgttccagaaggacgacggcttcgacaacctgtactacgtgaccagagaggacaaggacctgcacagaaagatccacagaatcatccagcaggactgccagaagcccaaccacatggagaagggctgccacttcctgcacatcctggcctgcgccagactgagcatcagacccggcctgagcgaggccgtgctgcagcaggtgctggagctgctggaggaccagagcgacatcgtgagcaccatggagcactactacaccgccttctag

SEQ ID NO: 11989 - DNA, 1038 bp, synthetic construct
  misc_feature 1..1038: note = Description of Artificial Sequence: Synthetic coding sequence
  source 1..1038: mol_type = other DNA
atgggcgtgtgcggctacctgttcctgccctggaagtgcctggtggtggtgagcctgagactgctgttcctggtgcccaccggcgtgcccgtgagaagcggcgacgccaccttccccaaggccatggacaacgtgaccgtgagacagggcgagagcgccaccctgagatgcaccatcgacgacagagtgaccagagtggcctggctgaacagaagcaccatcctgtacgccggcaacgacaagtggagcatcgaccccagagtgatcatcctggtgaacacccccacccagtacagcatcatgatccagaacgtggacgtgtacgacgagggcccctacacctgcagcgtgcagaccgacaaccaccccaagaccagcagagtgcacctgatcgtgcaggtgcccccccagatcatgaacatcagcagcgacatcaccgtgaacgagggcagcagcgtgaccctgctgtgcctggccatcggcagacccgagcccaccgtgacctggagacacctgagcgtgaaggagggccagggcttcgtgagcgaggacgagtacctggagatcagcgacatcaagagagaccagagcggcgagtacgagtgcagcgccctgaacgacgtggccgcccccgacgtgagaaaggtgaagatcaccgtgaactaccccccctacatcagcaaggccaagaacaccggcgtgagcgtgggccagaagggcatcctgagctgcgaggccagcgccgtgcccatggccgagttccagtggttcaaggaggagaccagactggccaccggcctggacggcatgagaatcgagaacaagggcagaatgagcaccctgaccttcttcaacgtgagcgagaaggactacggcaactacacctgcgtggccaccaacaagctgggcaacaccaacgccagcatcaccctgtacggccccggcgccgtgatcgacggcgtgaacagcgccagcagagccctggcctgcctgtggctgagcggcaccctgctggcccacttcttcatcaagttctag

SEQ ID NO: 11990 - DNA, 939 bp, synthetic construct
  misc_feature 1..939: note = Description of Artificial Sequence: Synthetic coding sequence
  source 1..939: mol_type = other DNA
atgtaccaccccgcctactgggtggtgttcagcgccaccaccgccctgctgttcatccccggcgtgcccgtgagaagcggcgacgccaccttccccaaggccatggacaacgtgaccgtgagacagggcgagagcgccaccctgagatgcaccatcgacgacagagtgaccagagtggcctggctgaacagaagcaccatcatgatccagaacgtggacgtgtacgacgagggcccctacacctgcagcgtgcagaccgacaaccaccccaagaccagcagagtgcacctgatcgtgcaggtgcccccccagatcatgaacatcagcagcgacatcaccgtgaacgagggcagcagcgtgaccctgctgtgcctggccatcggcagacccgagcccaccgtgacctggagacacctgagcgtgaaggagggccagggcttcgtgagcgaggacgagtacctggagatcagcgacatcaagagagaccagagcggcgagtacgagtgcagcgccctgaacgacgtggccgcccccgacgtgagaaaggtgaagatcaccgtgaactaccccccctacatcagcaaggccaagaacaccggcgtgagcgtgggccagaagggcatcctgagctgcgaggccagcgccgtgcccatggccgagttccagtggttcaaggaggagaccagactggccaccggcctggacggcatgagaatcgagaacaagggcagaatgagcaccctgaccttcttcaacgtgagcgagaaggactacggcaactacacctgcgtggccaccaacaagctgggcaacaccaacgccagcatcaccctgtacggccccggcgccgtgatcgacggcgtgaacagcgccagcagagccctggcctgcctgtggctgagcggcaccctgctggcccacttcttcatcaagttctag

SEQ ID NO: 11991 - DNA, 1017 bp, synthetic construct
  misc_feature 1..1017: note = Description of Artificial Sequence: Synthetic coding sequence
  source 1..1017: mol_type = other DNA
atgtaccaccccgcctactgggtggtgttcagcgccaccaccgccctgctgttcatccccggcgtgcccgtgagaagcggcgacgccaccttccccaaggccatggacaacgtgaccgtgagacagggcgagagcgccaccctgagatgcaccatcgacgacagagtgaccagagtggcctggctgaacagaagcaccatcctgtacgccggcaacgacaagtggagcatcgaccccagagtgatcatcctggtgaacacccccacccagtacagcatcatgatccagaacgtggacgtgtacgacgagggcccctacacctgcagcgtgcagaccgacaaccaccccaagaccagcagagtgcacctgatcgtgcaggtgcccccccagatcatgaacatcagcagcgacatcaccgtgaacgagggcagcagcgtgaccctgctgtgcctggccatcggcagacccgagcccaccgtgacctggagacacctgagcgtgaaggagggccagggcttcgtgagcgaggacgagtacctggagatcagcgacatcaagagagaccagagcggcgagtacgagtgcagcgccctgaacgacgtggccgcccccgacgtgagaaaggtgaagatcaccgtgaactaccccccctacatcagcaaggccaagaacaccggcgtgagcgtgggccagaagggcatcctgagctgcgaggccagcgccgtgcccatggccgagttccagtggttcaaggaggagaccagactggccaccggcctggacggcatgagaatcgagaacaagggcagaatgagcaccctgaccttcttcaacgtgagcgagaaggactacggcaactacacctgcgtggccaccaacaagctgggcaacaccaacgccagcatcaccctgtacggccccggcgccgtgatcgacggcgtgaacagcgccagcagagccctggcctgcctgtggctgagcggcaccctgctggcccacttcttcatcaagttctag

SEQ ID NO: 11992 - DNA, 1065 bp, synthetic construct
  misc_feature 1..1065: note = Description of Artificial Sequence: Synthetic coding sequence
  source 1..1065: mol_type = other DNA
atgggcgtgtgcggctacctgttcctgccctggaagtgcctggtggtggtgagcctgagactgctgttcctggtgcccaccggcgtgcccgtgagaagcggcgacgccaccttccccaaggccatggacaacgtgaccgtgagacagggcgagagcgccaccctgagatgcaccatcgacgacagagtgaccagagtggcctggctgaacagaagcaccatcctgtacgccggcaacgacaagtggagcatcgaccccagagtgatcatcctggtgaacacccccacccagtacagcatcatgatccagaacgtggacgtgtacgacgagggcccctacacctgcagcgtgcagaccgacaaccaccccaagaccagcagagtgcacctgatcgtgcaggtgcccccccagatcatgaacatcagcagcgacatcaccgtgaacgagggcagcagcgtgaccctgctgtgcctggccatcggcagacccgagcccaccgtgacctggagacacctgagcgtgaaggagggccagggcttcgtgagcgaggacgagtacctggagatcagcgacatcaagagagaccagagcggcgagtacgagtgcagcgccctgaacgacgtggccgcccccgacgtgagaaaggtgaagatcaccgtgaactaccccccctacatcagcaaggccaagaacaccggcgtgagcgtgggccagaagggcatcctgagctgcgaggccagcgccgtgcccatggccgagttccagtggttcaaggaggagaccagactggccaccggcctggacggcatgagaatcgagaacaagggcagaatgagcaccctgaccttcttcaacgtgagcgagaaggactacggcaactacacctgcgtggccaccaacaagctgggcaacaccaacgccagcatcaccctgtacgagatcagccccagcagcgccgtggccggccccggcgccgtgatcgacggcgtgaacagcgccagcagagccctggcctgcctgtggctgagcggcaccctgctggcccacttcttcatcaagttctag

SEQ ID NO: 11993 - DNA, 1662 bp, synthetic construct
  misc_feature 1..1662: note = Description of Artificial Sequence: Synthetic coding sequence
  source 1..1662: mol_type = other DNA
atgagcaacaacggcctggacatccaggacaagccccccgccccccccatgagaaacaccagcaccatgatcggcgccggcagcaaggacgccggcaccctgaaccacggcagcaagcccctgccccccaaccccgaggagaagaagaagaaggacagattctacagaagcatcctgcccggcgacaagaccaacaagaagaaggagaaggagagacccgagatcagcctgcccagcgacttcgagcacaccatccacgtgggcttcgacgccgtgaccggcgagttcaccggcatgcccgagcagtgggccagactgctgcagaccagcaacatcaccaagagcgagcagaagaagaacccccaggccgtgctggacgtgctggagttctacaacagcaagaagaccagcaacagccagaagtacatgagcttcaccgacaagagcgccgaggactacaacagcagcaacgccctgaacgtgaaggccgtgagcgagacccccgccgtgccccccgtgagcgaggacgaggacgacgacgacgacgacgccacccccccccccgtgatcgcccccagacccgagcacaccaagagcgtgtacaccagaagcgtgatcgagcccctgcccgtgacccccaccagagacgtggccaccagccccatcagccccaccgagaacaacaccaccccccccgacgccctgaccagaaacaccgagaagcagaagaagaagcccaagatgagcgacgaggagatcctggagaagctgagaagcatcgtgagcgtgggcgaccccaagaagaagtacaccagattcgagaagatcggccagggcgccagcggcaccgtgtacaccgccatggacgtggccaccggccaggaggtggccatcaagcagatgaacctgcagcagcagcccaagaaggagctgatcatcaacgagatcctggtgatgagagagaacaagaaccccaacatcgtgaactacctggacagctacctggtgggcgacgagctgtgggtggtgatggagtacctggccggcggcagcctgaccgacgtggtgaccgagacctgcatggacgagggccagatcgccgccgtgtgcagagagtgcctgcaggccctggagttcctgcacagcaaccaggtgatccacagagacatcaagagcgacaacatcctgctgggcatggacggcagcgtgaagctgaccgacttcggcttctgcgcccagatcacccccgagcagagcaagagaagcaccatggtgggcaccccctactggatggcccccgaggtggtgaccagaaaggcctacggccccaaggtggacatctggagcctgggcatcatggccatcgagatgatcgagggcgagcccccctacctgaacgagaaccccctgagagccctgtacctgatcgccaccaacggcacccccgagctgcagaaccccgagaagctgagcgccatcttcagagacttcctgaacagatgcctggagatggacgtggagaagagaggcagcgccaaggagctgctgcaggtgagaaagctgagattccaggtgttcagcaacttcagcatgatcgccgccagcatccccgaggactgccaggcccccctgcagccccacagcaccgactgctgcagctag

SEQ ID NO: 11994 - DNA, 1638 bp, synthetic construct
  misc_feature 1..1638: note = Description of Artificial Sequence: Synthetic coding sequence
  source 1..1638: mol_type = other DNA
atgagcaacaacggcctggacatccaggacaagccccccgccccccccatgagaaacaccagcaccatgatcggcgccggcagcaaggacgccggcaccctgaaccacggcagcaagcccctgccccccaaccccgaggagaagaagaagaaggacagattctacagaagcatcctgcccggcgacaagaccaacaagaagaaggagaaggagagacccgagatcagcctgcccagcgacttcgagcacaccatccacgtgggcttcgacgccgtgaccggcgagttcaccggcatgcccgagcagtgggccagactgctgcagaccagcaacatcaccaagagcgagcagaagaagaacccccaggccgtgctggacgtgctggagttctacaacagcaagaagaccagcaacagccagaagtacatgagcttcaccgacaagagcgccgaggactacaacagcagcaacgccctgaacgtgaaggccgtgagcgagacccccgccgtgccccccgtgagcgaggacgaggacgacgacgacgacgacgccacccccccccccgtgatcgcccccagacccgagcacaccaagagcgtgtacaccagaagcgtgatcgagcccctgcccgtgacccccaccagagacgtggccaccagccccatcagccccaccgagaacaacaccaccccccccgacgccctgaccagaaacaccgagaagcagaagaagaagcccaagatgagcgacgaggagatcctggagaagctgagaagcatcgtgagcgtgggcgaccccaagaagaagtacaccagattcgagaagatcggccagggcgccagcggcaccgtgtacaccgccatggacgtggccaccggccaggaggtggccatcaagcagatgaacctgcagcagcagcccaagaaggagctgatcatcaacgagatcctggtgatgagagagaacaagaaccccaacatcgtgaactacctggacagctacctggtgggcgacgagctgtgggtggtgatggagtacctggccggcggcagcctgaccgacgtggtgaccgagacctgcatggacgagggccagatcgccgccgtgtgcagagagtgcctgcaggccctggagttcctgcacagcaaccaggtgatccacagagacatcaagagcgacaacatcctgctgggcatggacggcagcgtgaagctgaccgacttcggcttctgcgcccagatcacccccgagcagagcaagagaagcaccatggtgggcaccccctactggatggcccccgaggtggtgaccagaaaggcctacggccccaaggtggacatctggagcctgggcatcatggccatcgagatgatcgagggcgagcccccctacctgaacgagaaccccctgagagccctgtacctgatcgccaccaacggcacccccgagctgcagaaccccgagaagctgagcgccatcttcagagacttcctgaacagatgcctggagatggacgtggagaagagaggcagcgccaaggagctgctgcagcaccagttcctgaagatcgccaagcccctgagcagcctgacccccctgatcgccgccgccaaggaggccaccaagaacaaccactag

SEQ ID NO: 11995 - DNA, 300 bp, synthetic construct
  misc_feature 1..300: note = Description of Artificial Sequence: Synthetic coding sequence
  source 1..300: mol_type = other DNA
atgagcaacaacggcctggacatccaggacaagccccccgccccccccatgagaaacaccagcaccatgatcggcgccggcagcaaggacgccggcaccctgaaccacggcagcaagcccctgccccccaaccccgaggagaagaagaagaaggacagattctacagaagcatcctgcccggcgacaagaccaacaagaagaaggagaaggagagacccgagatcagcctgcccagcgacttcgagcacaccatccacgtgggcttcgacgccgtgaccggcgagttcaccggcatgtag

SEQ ID NO: 11996 - DNA, 81 bp, synthetic construct
  misc_feature 1..81: note = Description of Artificial Sequence: Synthetic coding sequence
  source 1..81: mol_type = other DNA
atgagcaacaacggcctggacatccaggacaagccccccgccccccccatgagaaacaccagcaccatgatcggcgcctag

SEQ ID NO: 11997 - DNA, 270 bp, synthetic construct
  misc_feature 1..270: note = Description of Artificial Sequence: Synthetic coding sequence
  source 1..270: mol_type = other DNA
atgagcaacaacggcctggacatccaggacaagccccccgccccccccatgagaaacaccagcaccatgatcggcgccggcagcaaggacgccggcaccctgaaccacggcagcaagcccctgccccccaaccccgaggagaagaagaagaaggacagattctacagaagcatcctgcccggcgacaagaccaacaagaagaaggagaaggagagacccgagatcagcctgcccagcgacttcgagcacaccatccacgtgggcttctag

SEQ ID NO: 11998 - DNA, 192 bp, synthetic construct
  misc_feature 1..192: note = Description of Artificial Sequence: Synthetic coding sequence
  source 1..192: mol_type = other DNA
atgagcaacaacggcctggacatccaggacaagccccccgccccccccatgagaaacaccagcaccatgatcggcgccggcagcaaggacgccggcaccctgaaccacggcagcaagcccctgccccccaaccccgaggagaagaagaagaaggacagattctacagaagcatcctgcccggcgacaagtag

SEQ ID NO: 11999 - DNA, 321 bp, synthetic construct
  misc_feature 1..321: note = Description of Artificial Sequence: Synthetic coding sequence
  source 1..321: mol_type = other DNA
atgagcaacaacggcctggacatccaggacaagccccccgccccccccatgagaaacaccagcaccatgatcggcgccggcagcaaggacgccggcaccctgaaccacggcagcaagcccctgccccccaaccccgaggagaagaagaagaaggacagattctacagaagcatcctgcccggcgacaagaccaacaagaagaaggagaaggagagacccgagatcagcctgcccagcgacttcgagcacaccatccacgtgggcttcgacgccgtgaccggcgagttcaccggcatgcccgagcagtgggccagactgtag

SEQ ID NO: 12000 - DNA, 1569 bp, synthetic construct
  misc_feature 1..1569: note = Description of Artificial Sequence: Synthetic coding sequence
  source 1..1569: mol_type = other DNA
atgagcaacaacggcctggacatccaggacaagccccccgccccccccatgagaaacaccagcaccatgatcggcgccggcagcaaggacgccggcaccctgaaccacggcagcaagcccctgccccccaaccccgaggagaagaagaagaaggacagattctacagaagcatcctgcccggcgacaagaccaacaagaagaaggagaaggagagacccgagatcagcctgcccagcgacttcgagcacaccatccacgtgggcttcgacgccgtgaccggcgagttcaccggcatgcccgagcagtgggccagactgctgcagaccagcaacatcaccaagagcgagcagaagaagaacccccaggccgtgctggacgtgctggagttctacaacagcaagaagaccagcaacagccagaagtacatgagcttcaccgacaagagcgccgaggactacaacagcagcaacgccctgaacgtgaaggccgtgagcgagacccccgccgtgccccccgtgagcgaggacgaggacgacgacgacgacgacgccacccccccccccgtgatcgcccccagacccgagcacaccaagagcgtgtacaccagaagcgtgatcgagcccctgcccgtgacccccaccagagacgtggccaccagccccatcagccccaccgagaacaacaccaccccccccgacgccctgaccagaaacaccgagaagcagaagaagaagcccaagatgagcgacgaggagatcctggagaagctgagaagcatcgtgagcgtgggcgaccccaagaagaagtacaccagattcgagaagatcggccagggcgccagcggcaccgtgtacaccgccatggacgtggccaccggccaggaggtggccatcaagcagatgaacctgcagcagcagcccaagaaggagctgatcatcaacgagatcctggtgatgagagagaacaagaaccccaacatcgtgaactacctggacagctacctggtgggcgacgagctgtgggtggtgatggagtacctggccggcggcagcctgaccgacgtggtgaccgagacctgcatggacgagggccagatcgccgccgtgtgcagagagtgcctgcaggccctggagttcctgcacagcaaccaggtgatccacagagacatcaagagcgacaacatcctgctgggcatggacggcagcgtgaagctgaccgacttcggcttctgcgcccagatcacccccgagcagagcaagagaagcaccatggtgggcaccccctactggatggcccccgaggtggtgaccagaaaggcctacggccccaaggtggacatctggagcctgggcatcatggccatcgagatgatcgagggcgagcccccctacctgaacgagaaccccctgagagccctgtacctgatcgccaccaacggcacccccgagctgcagaaccccgagaagctgagcgccatcttcagagacttcctgaacagatgcctggagatggacgtggagaagagaggcagcgccaaggagctgctgcagcacagcagcagactgtag

SEQ ID NO: 12001 - DNA, 1317 bp, synthetic construct
  misc_feature 1..1317: note = Description of Artificial Sequence: Synthetic coding sequence
  source 1..1317: mol_type = other DNA
atgttcggcaagagaaagaagagagtggagatcagcgcccccagcaacttcgagcacagagtgcacaccggcttcgaccagcacgagcagaagttcaccggcctgcccagacagtggcagagcctgatcgaggagagcgccagaagacccaagcccctggtggaccccgcctgcatcaccagcatccagcccggcgcccccaagggcgagccccacgacgtggcccccaacggccccagcgccggcggcctggccatcccccagagcagcagcagcagcagcagaccccccaccagagccagaggcgcccccagccccggcgtgctgggcccccacgccagcgagccccagctggccccccccgcctgcacccccgccgcccccgccgtgcccggcccccccggccccagaagcccccagagagagccccagagagtgagccacgagcagttcagagccgccctgcagctggtggtggaccccggcgaccccagaagctacctggacaacttcatcaagatcggcgagggcagcaccggcatcgtgtgcatcgccaccgtgagaagcagcggcaagctggtggccgtgaagaagatggacctgagaaagcagcagagaagagagctgctgttcaacgaggtggtgatcatgagagactaccagcacgagaacgtggtggagatgtacaacagctacctggtgggcgacgagctgtgggtggtgatggagttcctggagggcggcgccctgaccgacatcgtgacccacaccagaatgaacgaggagcagatcgccgccgtgtgcctggccgtgctgcaggccctgagcgtgctgcacgcccagggcgtgatccacagagacatcaagagcgacagcatcctgctgacccacgacggcagagtgaagctgagcgacttcggcttctgcgcccaggtgagcaaggaggtgcccagaagaaagagcctggtgggcaccccctactggatggcccccgagctgatcagcagactgccctacggccccgaggtggacatctggagcctgggcatcatggtgatcgagatggtggacggcgagcccccctacttcaacgagccccccctgaaggccatgaagatgatcagagacaacctgccccccagactgaagaacctgcacaaggtgagccccagcctgaagggcttcctggacagactgctggtgagagaccccgcccagagagccaccgccgccgagctgctgaagcaccccttcctggccaaggccggcccccccgccagcatcgtgcccctgatgagacagaacagaaccagatag

SEQ ID NO: 12002 - DNA, 1776 bp, synthetic construct
  misc_feature 1..1776: note = Description of Artificial Sequence: Synthetic coding sequence
  source 1..1776: mol_type = other DNA
atgttcggcaagagaaagaagagagtggagatcagcgcccccagcaacttcgagcacagagtgcacaccggcttcgaccagcacgagcagaagttcaccggcctgcccagacagtggcagagcctgatcgaggagagcgccagaagacccaagcccctggtggaccccgcctgcatcaccagcatccagcccggcgcccccaagaccatcgtgagaggcagcaagggcgccaaggacggcgccctgaccctgctgctggacgagttcgagaacatgagcgtgaccagaagcaacagcctgagaagagacagcccccccccccccgccagagccagacaggagaacggcatgcccgaggagcccgccaccaccgccagaggcggccccggcaaggccggcagcagaggcagattcgccggccacagcgaggccggcggcggcagcggcgacagaagaagagccggccccgagaagagacccaagagcagcagagagggcagcggcggcccccaggagagcagcagagacaagagacccctgagcggccccgacgtgggcaccccccagcccgccggcctggccagcggcgccaagctggccgccggcagacccttcaacacctaccccagagccgacaccgaccaccccagcagaggcgcccagggcgagccccacgacgtggcccccaacggccccagcgccggcggcctggccatcccccagagcagcagcagcagcagcagaccccccaccagagccagaggcgcccccagccccggcgtgctgggcccccacgccagcgagccccagctggccccccccgcctgcacccccgccgcccccgccgtgcccggcccccccggccccagaagcccccagagagagccccagagagtgagccacgagcagttcagagccgccctgcagctggtggtggaccccggcgaccccagaagctacctggacaacttcatcaagatcggcgagggcagcaccggcatcgtgtgcatcgccaccgtgagaagcagcggcaagctggtggccgtgaagaagatggacctgagaaagcagcagagaagagagctgctgttcaacgaggtggtgatcatgagagactaccagcacgagaacgtggtggagatgtacaacagctacctggtgggcgacgagctgtgggtggtgatggagttcctggagggcggcgccctgaccgacatcgtgacccacaccagaatgaacgaggagcagatcgccgccgtgtgcctggccgtgctgcaggccctgagcgtgctgcacgcccagggcgtgatccacagagacatcaagagcgacagcatcctgctgacccacgacggcagagtgaagctgagcgacttcggcttctgcgcccaggtgagcaaggaggtgcccagaagaaagagcctggtgggcaccccctactggatggcccccgagctgatcagcagactgccctacggccccgaggtggacatctggagcctgggcatcatggtgatcgagatggtggacggcgagcccccctacttcaacgagccccccctgaaggccatgaagatgatcagagacaacctgccccccagactgaagaacctgcacaaggtgagccccagcctgaagggcttcctggacagactgctggtgagagaccccgcccagagagccaccgccgccgagctgctgaagcaccccttcctggccaaggccggcccccccgccagcatcgtgcccctgatgagacagaacagaaccagatag

SEQ ID NO: 12003 - DNA, 1188 bp, synthetic construct
  misc_feature 1..1188: note = Description of Artificial Sequence: Synthetic coding sequence
  source 1..1188: mol_type = other DNA
atgggctgccagagaagcagacccttcaacacctaccccagagccgacaccgaccaccccagcagaggcgcccagggcgagccccacgacgtggcccccaacggccccagcgccggcggcctggccatcccccagagcagcagcagcagcagcagaccccccaccagagccagaggcgcccccagccccggcgtgctgggcccccacgccagcgagccccagctggccccccccgcctgcacccccgccgcccccgccgtgcccggcccccccggccccagaagcccccagagagagccccagagagtgagccacgagcagttcagagccgccctgcagctggtggtggaccccggcgaccccagaagctacctggacaacttcatcaagatcggcgagggcagcaccggcatcgtgtgcatcgccaccgtgagaagcagcggcaagctggtggccgtgaagaagatggacctgagaaagcagcagagaagagagctgctgttcaacgaggtggtgatcatgagagactaccagcacgagaacgtggtggagatgtacaacagctacctggtgggcgacgagctgtgggtggtgatggagttcctggagggcggcgccctgaccgacatcgtgacccacaccagaatgaacgaggagcagatcgccgccgtgtgcctggccgtgctgcaggccctgagcgtgctgcacgcccagggcgtgatccacagagacatcaagagcgacagcatcctgctgacccacgacggcagagtgaagctgagcgacttcggcttctgcgcccaggtgagcaaggaggtgcccagaagaaagagcctggtgggcaccccctactggatggcccccgagctgatcagcagactgccctacggccccgaggtggacatctggagcctgggcatcatggtgatcgagatggtggacggcgagcccccctacttcaacgagccccccctgaaggccatgaagatgatcagagacaacctgccccccagactgaagaacctgcacaaggtgagccccagcctgaagggcttcctggacagactgctggtgagagaccccgcccagagagccaccgccgccgagctgctgaagcaccccttcctggccaaggccggcccccccgccagcatcgtgcccctgatgagacagaacagaaccagatag

SEQ ID NO: 12004 - DNA, 1776 bp, synthetic construct; identical to SEQ ID NO: 12002
  misc_feature 1..1776: note = Description of Artificial Sequence: Synthetic coding sequence
  source 1..1776: mol_type = other DNA

SEQ ID NO: 12005 - DNA, 1776 bp, synthetic construct; identical to SEQ ID NO: 12002
  misc_feature 1..1776: note = Description of Artificial Sequence: Synthetic coding sequence
  source 1..1776: mol_type = other DNA

SEQ ID NO: 12006 - DNA, 1044 bp, synthetic construct
  misc_feature 1..1044: note = Description of Artificial Sequence: Synthetic coding sequence
  source 1..1044: mol_type = other DNA
atgacctggcccctgaccggccaccagagaggcgcctggcccagccccagcccccccccccccccccccggcctgccccccgagcccgaggtgccccccgccctggagtgctgggaccccaccccccagagccccagaagcccccagagagagccccagagagtgagccacgagcagttcagagccgccctgcagctggtggtggaccccggcgaccccagaagctacctggacaacttcatcaagatcggcgagggcagcaccggcatcgtgtgcatcgccaccgtgagaagcagcggcaagctggtggccgtgaagaagatggacctgagaaagcagcagagaagagagctgctgttcaacgaggtggtgatcatgagagactaccagcacgagaacgtggtggagatgtacaacagctacctggtgggcgacgagctgtgggtggtgatggagttcctggagggcggcgccctgaccgacatcgtgacccacaccagaatgaacgaggagcagatcgccgccgtgtgcctggccgtgctgcaggccctgagcgtgctgcacgcccagggcgtgatccacagagacatcaagagcgacagcatcctgctgacccacgacggcagagtgaagctgagcgacttcggcttctgcgcccaggtgagcaaggaggtgcccagaagaaagagcctggtgggcaccccctactggatggcccccgagctgatcagcagactgccctacggccccgaggtggacatctggagcctgggcatcatggtgatcgagatggtggacggcgagcccccctacttcaacgagccccccctgaaggccatgaagatgatcagagacaacctgccccccagactgaagaacctgcacaaggtgagccccagcctgaagggcttcctggacagactgctggtgagagaccccgcccagagagccaccgccgccgagctgctgaagcaccccttcctggccaaggccggcccccccgccagcatcgtgcccctgatgagacagaacagaaccagatag

SEQ ID NO: 12007 - DNA, 1776 bp, synthetic construct; identical to SEQ ID NO: 12002
  misc_feature 1..1776: note = Description of Artificial Sequence: Synthetic coding sequence
  source 1..1776: mol_type = other DNA

SEQ ID NO: 12008 - DNA, 1317 bp, synthetic construct; identical to SEQ ID NO: 12001
  misc_feature 1..1317: note = Description of Artificial Sequence: Synthetic coding sequence
  source 1..1317: mol_type = other DNA

SEQ ID NO: 12009 - DNA, 1458 bp, synthetic construct
  misc_feature 1..1458: note = Description of Artificial Sequence: Synthetic coding sequence
  source 1..1458: mol_type = other DNA
atggcccccaccatccagacccaggcccagagagaggacggccacagaagcggcgtggtgtgcagagtgaagtactgcaacagcctgcccgacatccccttcgaccccaagttcatcacctaccccttcgaccagaacagattcgtgcagtacaaggccaccagcctggagaagcagcacaagcacgacctgctgaccgagcccgacctgggcgtgaccatcgacctgatcaaccccgacacctacagaatcgaccccaacgtgctgctggaccccgccgacgagaagctgctggaggaggagatccaggcccccaccagcagcaagagaagccagcagcacgccaaggtggtgccctggatgagaaagaccgagtacatcagcaccgagttcaacagatacggcatcagcaacgagaagcccgaggtgaagatcggcgtgagcgtgaagcagcagttcaccgaggaggagatctacaaggacagagacagccagatcaccgccatcgagaagaccttcgaggacgcccagaagagcatcagccagcactacagcaagcccagagtgacccccgtggaggtgatgcccgtgttccccgacttcaagatgtggatcaacccctgcgcccaggtgatcttcgacagcgaccccgcccccaaggacaccagcggcgccgccgccctggagatgatgagccaggccatgatcagaggcatgatggacgaggagggcaaccagttcgtggcctacttcctgcccgtggaggagaccctgaagaagagaaagagagaccaggaggaggagatggactacgcccccgacgacgtgtacgactacaagatcgccagagagtacaactggaacgtgaagaacaaggccagcaagggctacgaggagaactacttcttcatcttcagagagggcgacggcgtgtactacaacgagctggagaccagagtgagactgagcaagagaagagccaaggccggcgtgcagagcggcaccaacgccctgctggtggtgaagcacagagacatgaacgagaaggagctggaggcccaggaggccagaaaggcccagctggagaaccacgagcccgaggaggaggaggaggaggagatggagaccgaggagaaggaggccggcggcagcgtgatgctgatcctgagaaccatgcccaccctgatgatgagaaccgaggacagacccaaggtggccgtgaccatgatccagaccgccgccgccatgggcgtggccagcggcgccggcgccaccgccgccgcccccgtgcccagccccgtggccgccagcaccagacccagaagaatggccgtgaagctgcagctgctgatccccgtgaagctgatcgtgaccgtgaccgagagccagggcatccagggctggttcagacaccactactgcgagcagcagagcaccttcctggtggtgtgcctgtag

SEQ ID NO: 12010 - DNA, 873 bp, synthetic construct
  misc_feature 1..873: note = Description of Artificial Sequence: Synthetic coding sequence
  source 1..873: mol_type = other DNA
atgggccacccccccctgctgcccctgctgctgctgctgcacacctgcgtgcccgccagctggggcctgagatgcatgcagtgcaagaccaacggcgactgcagagtggaggagtgcgccctgggccaggacctgtgcagaaccaccatcgtgagactgtgggaggagggcgaggagctggagctggtggagaagagctgcacccacagcgagaagaccaacagaaccctgagctacagaaccggcctgaagatcaccagcctgaccgaggtggtgtgcggcctggacctgtgcaaccagggcaacagcggcagagccgtgacctacagcagaagcagatacctggagtgcatcagctgcggcagcagcgacatgagctgcgagagaggcagacaccagagcctgcagtgcagaagccccgaggagcagtgcctggacgtggtgacccactggatccaggagggcgaggaggtgctggagctggagaacctgccccagaacggcagacagtgctacagctgcaagggcaacagcacccacggctgcagcagcgaggagaccttcctgatcgactgcagaggccccatgaaccagtgcctggtggccaccggcacccacgagcccaagaaccagagctacatggtgagaggctgcgccaccgccagcatgtgccagcacgcccacctgggcgacgccttcagcatgaaccacatcgacgtgagctgctgcaccaagagcggctgcaaccaccccgacctggacgtgcagtacagaagcggcgccgccccccagcccggccccgcccacctgagcctgaccatcaccctgctgatgaccgccagactgtggggcggcaccctgctgtggacctag

SEQ ID NO: 12011 - DNA, 1596 bp, synthetic construct
  misc_feature 1..1596: note = Description of Artificial Sequence: Synthetic coding sequence
  source 1..1596: mol_type = other DNA
atggcccccaccatccagacccaggcccagagagaggacggccacagacccaacagccacagaaccctgcccgagagaagcggcgtggtgtgcagagtgaagtactgcaacagcctgcccgacatccccttcgaccccaagttcatcacctaccccttcgaccagaacagattcgtgcagtacaaggccaccagcctggagaagcagcacaagcacgacctgctgaccgagcccgacctgggcgtgaccatcgacctgatcaaccccgacacctacagaatcgaccccaacgtgctgctggaccccgccgacgagaagctgctggaggaggagatccaggcccccaccagcagcaagagaagccagcagcacgccaaggtggtgccctggatgagaaagaccgagtacatcagcaccgagttcaacagatacggcatcagcaacgagaagcccgaggtgaagatcggcgtgagcgtgaagcagcagttcaccgaggaggagatctacaaggacagagacagccagatcaccgccatcgagaagaccttcgaggacgcccagaagagcatcagccagcactacagcaagcccagagtgacccccgtggaggtgatgcccgtgttccccgacttcaagatgtggatcaacccctgcgcccaggtgatcttcgacagcgaccccgcccccaaggacaccagcggcgccgccgccctggagatgatgagccaggccatgatcagaggcatgatggacgaggagggcaaccagttcgtggcctacttcctgcccgtggaggagaccctgaagaagagaaagagagaccaggaggaggagatggactacgcccccgacgacgtgtacgactacaagatcgccagagagtacaactggaacgtgaagaacaaggccagcaagggctacgaggagaactacttcttcatcttcagagagggcgacggcgtgtactacaacgagctggagaccagagtgagactgagcaagagaagagccaaggccggcgtgcagagcggcaccaacgccctgctggtggtgaagcacagagacatgaacgagaaggagctggaggcccaggaggccagaaaggcccagctggagaaccacgagcccgaggaggaggaggaggaggagatggagaccgaggagaaggaggccggcggcagcgacgaggagcaggagaagggcagcagcagcgagaaggagggcagcgaggacgagcacagcggcagcgagagcgagagagaggagggcgacagagacgaggccagcgacaagagcggcagcggcgaggacgagagcagcgaggacgaggccagagccgccagagacaaggaggagatcttcggcagcgacgccgacagcgaggacgacgccgacagcgacgacgaggacagaggccaggcccagggcggcagcgacaacgacagcgacagcggcagcaacggcggcggccagagaagcagaagccacagcagaagcgccagccccttccccagcggcagcgagcacagcgcccaggaggacggcagcgaggccgccgccagcgacagcagcgaggccgacagcgacagcgactag

SEQ ID NO: 12012 - DNA, 867 bp, synthetic construct
  misc_feature 1..867: note = Description of Artificial Sequence: Synthetic coding sequence
  source 1..867: mol_type = other DNA
atggccaccggccccatccccaccggcctgtgcctgagaggcctggagtggagcgccgagagcagcaccgccatcgccagcctgatcagccccagcacccccagcagcagccccacccccagcaccagaaccgtgctgctggaccccgccgacgagaagctgctggaggaggagatccaggcccccaccagcagcaagagaagccagcagcacgccaaggtggtgccctggatgagaaagaccgagtacatcagcaccgagttcaacagatacggcatcagcaacgagaagcccgaggtgaagatcggcgtgagcgtgaagcagcagttcaccgaggaggagatctacaaggacagagacagccagatcaccgccatcgagaagaccttcgaggacgcccagaagagcatcagccagcactacagcaagcccagagtgacccccgtggaggtgatgcccgtgttccccgacttcaagatgtggatcaacccctgcgcccaggtgatcttcgacagcgaccccgcccccaaggacaccagcggcgccgccgccctggagatgatgagccaggccatgatcagaggcatgatggacgaggagggcaaccagttcgtggcctacttcctgcccgtggaggagaccctgaagaagagaaagagagaccaggaggaggagatggactacgcccccgacgacgtgtacgactacaagatcgccagagagtacaactggaacgtgaagaacaaggccagcaagggctacgaggagaactacttcttcatcttcagagagggcgacggcgtgtactacaacgagctggagaccagcatccagtacagccacatgctgtacaacctggtggcctag

SEQ ID NO: 12013 - DNA, 1176 bp, synthetic construct
  misc_feature 1..1176: note = Description of Artificial Sequence: Synthetic coding sequence
  source 1..1176: mol_type = other DNA
atggacctggagaagaactaccccacccccagaaccagcagaaccggccacggcggcgtgaaccagctgggcggcgtgttcgtgaacggcagacccctgcccgacgtggtgagacagagaatcgtggagctggcccaccagggcgtgagaccctgcgacatcagcagacagctgagagtgagccacggctgcgtgagcaagatcctgggcagatactacgagaccggcagcatcaagcccggcgtgatcggcggcagcaagcccaaggtggccacccccaaggtggtggagaagatcgccgagtacaagagacagaaccccaccatgttcgcctgggagatcagagacagactgctggccgagagagtgtgcgacaacgacaccgtgcccagcgtgagcagcatcaacagaatcatcagaaccaaggtgcagcagccccccaaccagcccgtgcccgccagcagccacagcatcgtgagcaccggcagcgtgacccaggtgagcagcgtgagcaccgacagcgccggcagcagctacagcatcagcggcatcctgggcatcaccagccccagcgccgacaccaacaagagaaagagagacgagggcatccaggagagccccgtgcccaacggccacagcctgcccggcagagacttcctgagaaagcagatgagaggcgacctgttcacccagcagcagctggaggtgctggacagagtgttcgagagacagcactacagcgacatcttcaccaccaccgagcccatcaagcccgagcagaccaccgagtacagcgccatggccagcctggccggcggcctggacgacatgaaggccaacctggccagccccacccccgccgacatcggcagcagcgtgcccggcccccagagctaccccatcgtgaccggcagagacctggccagcaccaccctgcccggctaccccccccacgtgccccccgccggccagggcagctacagcgcccccaccctgaccggcatggtgcccggcagcgagttcagcggcagcccctacagccacccccagtacagcagctacaacgacagctggagattccccaaccccggcctgctgggcagcccctactactacagcgccgccgccagaggcgccgccccccccgccgccgccaccgcctacgacagacactag

SEQ ID NO: 12014 - DNA, 867 bp, synthetic construct
  misc_feature 1..867: note = Description of Artificial Sequence: Synthetic coding sequence
  source 1..867: mol_type = other DNA
atggacctggagaagaactaccccacccccagaaccagcagaaccggccacggcggcgtgaaccagctgggcggcgtgttcgtgaacggcagacccctgcccgacgtggtgagacagagaatcgtggagctggcccaccagggcgtgagaccctgcgacatcagcagacagctgagagtgagccacggctgcgtgagcaagatcctgggcagatactacgagaccggcagcatcaagcccggcgtgatcggcggcagcaagcccaaggtggccacccccaaggtggtggagaagatcgccgagtacaagagacagaaccccaccatgttcgcctgggagatcagagacagactgctggccgagagagtgtgcgacaacgacaccgtgcccagcgtgagcagcatcaacagaatcatcagaaccaaggtgcagcagccccccaaccagcccgtgcccgccagcagccacagcatcgtgagcaccggcagcgtgacccaggtgagcagcgtgagcaccgacagcgccggcagcagctacagcatcagcggcatcctgggcatcaccagccccagcgccgacaccaacaagagaaagagagacgagggcatccaggagagccccgtgcccaacggccacagcctgcccggcagagacttcctgagaaagcagatgagaggcgacctgttcacccagcagcagctggaggtgctggacagagtgttcgagagacagcactacagcgacatcttcaccaccaccgagcccatcaagcccgagcaggccgtgacctggagagccagacccagccccggcaccctgcacaccagcccccccctggacagagccgccacccagcacagaagatag

SEQ ID NO: 12015 - DNA, 987 bp, synthetic construct
  misc_feature 1..987: note = Description of Artificial Sequence: Synthetic coding sequence
  source 1..987: mol_type = other DNA
atggacctggagaagaactaccccacccccagaaccagcagaaccggccacggcggcgtgaaccagctgggcggcgtgttcgtgaacggcagacccctgcccgacgtggtgagacagagaatcgtggagctggcccaccagggcgtgagaccctgcgacatcagcagacagctgagagtgagccacggctgcgtgagcaagatcctgggcagatactacgagaccggcagcatcaagcccggcgtgatcggcggcagcaagcccaaggtggccacccccaaggtggtggagaagatcgccgagtacaagagacagaaccccaccatgttcgcctgggagatcagagacagactgctggccgagagagtgtgcgacaacgacaccgtgcccagcgtgagcagcatcaacagaatcatcagaaccaaggtgcagcagccccccaaccagcccgtgcccgccagcagccacagcatcgtgagcaccggcagcgtgacccaggtgagcagcgtgagcaccgacagcgccggcagcagctacagcatcagcggcatcctgggcatcaccagccccagcgccgacaccaacaagagaaagagagacgagggcatccaggagagccccgtgcccaacggccacagcctgcccggcagagacttcctgagaaagcagatgagaggcgacctgttcacccagcagcagctggaggtgctggacagagtgttcgagagacagcactacagcgacatcttcaccaccaccgagcccatcaagcccgagcagaccaccgagtacagcgccatggccagcctggccggcggcctggacgacatgaaggccaacctggccagccccacccccgccgacatcggcagcagcgtgcccggcccccagagctaccccatcgtgaccggcagcccctactactacagcgccgccgccagaggcgccgccccccccgccgccgccaccgcctacgacagacactag

SEQ ID NO: 12016 - DNA, 909 bp, synthetic construct
  misc_feature 1..909: note = Description of Artificial Sequence: Synthetic coding sequence
  source 1..909: mol_type = other DNA
atgttcgcctgggagatcagagacagactgctggccgagagagtgtgcgacaacgacaccgtgcccagcgtgagcagcatcaacagaatcatcagaaccaaggtgcagcagccccccaaccagcccgtgcccgccagcagccacagcatcgtgagcaccggcagcgtgacccaggtgagcagcgtgagcaccgacagcgccggcagcagctacagcatcagcggcatcctgggcatcaccagccccagcgccgacaccaacaagagaaagagagacgagggcatccaggagagccccgtgcccaacggccacagcctgcccggcagagacttcctgagaaagcagatgagaggcgacctgttcacccagcagcagctggaggtgctggacagagtgttcgagagacagcactacagcgacatcttcaccaccaccgagcccatcaagcccgagcagtggtgccccgtgctgatgagacagtacctggtgcagccccaggccgtgctgttccagaccaccgagtacagcgccatggccagcctggccggcggcctggacgacatgaaggccaacctggccagccccacccccgccgacatcggcagcagcgtgcccggcccccagagctaccccatcgtgaccggcagagacctggccagcaccaccctgcccggctaccccccccacgtgccccccgccggccagggcagctacagcgcccccaccctgaccggcatggtgcccggcagcgagttcagcggcagcccctacagccacccccagtacagcagctacaacgacagctggagattccccaaccccggcctgctgggcagcccctactactacagcgccgccgccagaggcgccgccccccccgccgccgccaccgcctacgacagacactag

SEQ ID NO: 12017 - DNA, 1074 bp, synthetic construct
  misc_feature 1..1074: note = Description of Artificial Sequence: Synthetic coding sequence
  source 1..1074: mol_type = other DNA
atggacctggagaagaactaccccacccccagaaccagcagaaccggccacggcggcgtgaaccagctgggcggcgtgttcgtgaacggcagacccctgcccgacgtggtgagacagagaatcgtggagctggcccaccagggcgtgagaccctgcgacatcagcagacagctgagagtgagccacggctgcgtgagcaagatcctgggcagatactacgagaccggcagcatcaagcccggcgtgatcggcggcagcaagcccaaggtggccacccccaaggtggtggagaagatcgccgagtacaagagacagaaccccaccatgttcgcctgggagatcagagacagactgctggccgagagagtgtgcgacaacgacaccgtgcccagcgtgagcagcatcaacagaatcatcagaaccaaggtgcagcagccccccaaccagcccgtgcccgccagcagccacagcatcgtgagcaccggcagcgtgacccaggtgagcagcgtgagcaccgacagcgccggcagcagctacagcatcagcggcatcctgggcatcaccagccccagcgccgacaccaacaagagaaagagagacgagggcatccaggagagccccgtgcccaacggccacagcctgcccggcagagacttcctgagaaagcagatgagaggcgacctgttcacccagcagcagctggaggtgctggacagagtgttcgagagacagcactacagcgacatcttcaccaccaccgagcccatcaagcccgagcagaccaccgagtacagcgccatggccagcctggccggcggcctggacgacatgaaggccaacctggccagccccacccccgccgacatcggcagcagcgtgcccggcccccagagctaccccatcgtgaccggcagcgagttcagcggcagcccctacagccacccccagtacagcagctacaacgacagctggagattccccaaccccggcctgctgggcagcccctactactacagcgccgccgccagaggcgccgccccccccgccgccgccaccgcctacgacagacactag

SEQ ID NO: 12018 - DNA, 1089 bp, synthetic construct
  misc_feature 1..1089: note = Description of Artificial Sequence: Synthetic coding sequence
  source 1..1089: mol_type = other DNA
atggacctggagaagaactaccccacccccagaaccagcagaaccggccacggcggcgtgaaccagctgggcggcgtgttcgtgaacggcagacccctgcccgacgtggtgagacagagaatcgtggagctggcccaccagggcgtgagaccctgcgacatcagcagacagctgagagtgagccacggctgcgtgagcaagatcctgggcagatactacgagaccggcagcatcaagcccggcgtgatcggcggcagcaagcccaaggtggccacccccaaggtggtggagaagatcgccgagtacaagagacagaaccccaccatgttcgcctgggagatcagagacagactgctggccgagagagtgtgcgacaacgacaccgtgcccagcgtgagcagcatcaacagaatcatcagaaccaaggtgcagcagccccccaaccagcccgtgcccgccagcagccacagcatcgtgagcaccggcagcgtgacccaggtgagcagcgtgagcaccgacagcgccggcagcagctacagcatcagcggcatcctgggcatcaccagccccagcgccgacaccaacaagagaaagagagacgagggcatccaggagagccccgtgcccaacggccacagcctgcccggcagagacttcctgagaaagcagatgagaggcgacctgttcacccagcagcagctggaggtgctggacagagtgttcgagagacagcactacagcgacatcttcaccaccaccgagcccatcaagcccgagcagaccaccgagtacagcgccatggccagcctggccggcggcctggacgacatgaaggccaacctggccagccccacccccgccgacatcggcagcagcgtgcccggcccccagagctaccccatcgtgaccggcagagacctggccagcaccaccctgcccggctaccccccccacgtgccccccgccggccagggcagctacagcgcccccaccctgaccggcatggtgcccggcagcccctactactacagcgccgccgccagaggcgccgccccccccgccgccgccaccgcctacgacagacactag

SEQ ID NO: 12019 - DNA, 1047 bp, synthetic construct
  misc_feature 1..1047: note = Description of Artificial Sequence: Synthetic coding sequence
  source 1..1047: mol_type = other DNA
atggacctggagaagaactaccccacccccagaaccagcagaaccggccacggcggcgtgaaccagctgggcggcgtgttcgtgaacggcagacccctgcccgacgtggtgagacagagaatcgtggagctggcccaccagggcgtgagaccctgcgacatcagcagacagctgagagtgagccacggctgcgtgagcaagatcctgggcagatactacgagaccggcagcatcaagcccggcgtgatcggcggcagcaagcccaaggtggccacccccaaggtggtggagaagatcgccgagtacaagagacagaaccccaccatgttcgcctgggagatcagagacagactgctggccgagagagtgtgcgacaacgacaccgtgcccagcgtgagcagcatcaacagaatcatcagaaccaaggtgcagcagccccccaaccagcccgtgcccgccagcagccacagcatcggcatccaggagagccccgtgcccaacggccacagcctgcccggcagagacttcctgagaaagcagatgagaggcgacctgttcacccagcagcagctggaggtgctggacagagtgttcgagagacagcactacagcgacatcttcaccaccaccgagcccatcaagcccgagcagaccaccgagtacagcgccatggccagcctggccggcggcctggacgacatgaaggccaacctggccagccccacccccgccgacatcggcagcagcgtgcccggcccccagagctaccccatcgtgaccggcagagacctggccagcaccaccctgcccggctaccccccccacgtgccccccgccggccagggcagctacagcgcccccaccctgaccggcatggtgcccggcagcgagttcagcggcagcccctacagccacccccagtacagcagctacaacgacagctggagattccccaaccccggcctgctgggcagcccctactactacagcgccgccgccagaggcgccgccccccccgccgccgccaccgcctacgacagacactag

SEQ ID NO: 12020 - DNA, 876 bp, synthetic construct
  misc_feature 1..876: note = Description of Artificial Sequence: Synthetic coding sequence
  source 1..876: mol_type = other DNA
atggacctggagaagaactaccccacccccagaaccagcagaaccggccacggcggcgtgaaccagctgggcggcgtgttcgtgaacggcagacccctgcccgacgtggtgagacagagaatcgtggagctggcccaccagggcgtgagaccctgcgacatcagcagacagctgagagtgagccacggctgcgtgagcaagatcctgggcagaatcatcagaaccaaggtgcagcagccccccaaccagcccgtgcccgccagcagccacagcatcgtgagcaccggcagcgtgacccaggtgagcagcgtgagcaccgacagcgccggcagcagctacagcatcagcggcatcctgggcatcaccagccccagcgccgacaccaacaagagaaagagagacgagggcatccaggagagccccgtgcccaacggccacagcctgcccggcagagacttcctgagaaagcagatgagaggcgacctgttcacccagcagcagctggaggtgctggacagagtgttcgagagacagcactacagcgacatcttcaccaccaccgagcccatcaagcccgagcagaccaccgagtacagcgccatggccagcctggccggcggcctggacgacatgaaggccaacctggccagccccacccccgccgacatcggcagcagcgtgcccggcccccagagctaccccatcgtgaccggcagcgagttcagcggcagcccctacagccacccccagtacagcagctacaacgacagctggagattccccaaccccggcctgctgggcagcccctactactacagcgccgccgccagaggcgccgccccccccgccgccgccaccgcctacgacagacactag

SEQ ID NO: 12021 - DNA, 960 bp, synthetic construct
  misc_feature 1..960: note = Description of Artificial Sequence: Synthetic coding sequence
  source 1..960: mol_type = other DNA
atggacctggagaagaactaccccacccccagaaccagcagaaccggccacggcggcgtgaaccagctgggcggcgtgttcgtgaacggcagacccctgcccgacgtggtgagacagagaatcgtggagctggcccaccagggcgtgagaccctgcgacatcagcagacagctgagagtgagccacggctgcgtgagcaagatcctgggcagatactacgagaccggcagcatcaagcccggcgtgatcggcggcagcaagcccaaggtggccacccccaaggtggtggagaagatcgccgagtacaagagacagaaccccaccatgttcgcctgggagatcagagacagactgctggccgagagagtgtgcgacaacgacaccgtgcccagcgtgagcagcatcaacagaatcatcagaaccaaggtgcagcagccccccaaccagcccgtgcccgccagcagccacagcatcggcatccaggagagccccgtgcccaacggccacagcctgcccggcagagacttcctgagaaagcagatgagaggcgacctgttcacccagcagcagctggaggtgctggacagagtgttcgagagacagcactacagcgacatcttcaccaccaccgagcccatcaagcccgagcagaccaccgagtacagcgccatggccagcctggccggcggcctggacgacatgaaggccaacctggccagccccacccccgccgacatcggcagcagcgtgcccggcccccagagctaccccatcgtgaccggcagagacctggccagcaccaccctgcccggctaccccccccacgtgccccccgccggccagggcagctacagcgcccccaccctgaccggcatggtgcccggcagcccctactactacagcgccgccgccagaggcgccgccccccccgccgccgccaccgcctacgacagacactag

SEQ ID NO: 12022 - DNA, 852 bp, synthetic construct
  misc_feature 1..852: note = Description of Artificial Sequence: Synthetic coding sequence
  source 1..852: mol_type = other DNA
atgttcgcctgggagatcagagacagactgctggccgagagagtgtgcgacaacgacaccgtgcccagcgtgagcagcatcaacagaatcatcagaaccaaggtgcagcagccccccaaccagcccgtgcccgccagcagccacagcatcgtgagcaccggcagcgtgacccaggtgagcagcgtgagcaccgacagcgccggcagcagctacagcatcagcggcatcctgggcatcaccagccccagcgccgacaccaacaagagaaagagagacgagggcatccaggagagccccgtgcccaacggccacagcctgcccggcagagacttcctgagaaagcagatgagaggcgacctgttcacccagcagcagctggaggtgctggacagagtgttcgagagacagcactacagcgacatcttcaccaccaccgagcccatcaagcccgagcagaccaccgagtacagcgccatggccagcctggccggcggcctggacgacatgaaggccaacctggccagccccacccccgccgacatcggcagcagcgtgcccggcccccagagctaccccatcgtgaccggcagagacctggccagcaccaccctgcccggctaccccccccacgtgccccccgccggccagggcagctacagcgcccccaccctgaccggcatggtgcccggcagcgagttcagcggcagcccctacagccacccccagtacagcagctacaacgacagctggagattccccaaccccggcctgctgggcagcccctactactacagcgccgccgccagaggcgccgccccccccgccgccgccaccgcctacgacagacactag

SEQ ID NO: 12023 - DNA, 924 bp, synthetic construct
  misc_feature 1..924: note = Description of Artificial Sequence: Synthetic coding sequence
  source 1..924: mol_type = other DNA
atggacctggagaagaactaccccacccccagaaccagcagaaccggccacggcggcgtgaaccagctgggcggcgtgttcgtgaacggcagacccctgcccgacgtggtgagacagagaatcgtggagctggcccaccagggcgtgagaccctgcgacatcagcagacagctgagagtgagccacggctgcgtgagcaagatcctgggcagatactacgagaccggcagcatcaagcccggcgtgatcggcggcagcaagcccaaggtggccacccccaaggtggtggagaagatcgccgagtacaagagacagaaccccaccatgttcgcctgggagatcagagacagactgctggccgagagagtgtgcgacaacgacaccgtgcccagcgtgagcagcatcaacagaatcatcagaaccaaggtgcagcagccccccaaccagcccgtgcccgccagcagccacagcatcgtgagcaccggcagcgtgacccaggtgagcagcgtgagcaccgacagcgccggcagcagctacagcatcagcggcatcctgggcatcaccagccccagcgccgacaccaacaagagaaagagagacgagggcatccaggagagccccgtgcccaacggccacagcctgcccggcagagacttcctgagaaagcagatgagaggcgacctgttcacccagcagcagctggaggtgctggacagagtgttcgagagacagcactacagcgacatcttcaccaccaccgagcccatcaagcccgagcagtggtgccccgtgctgatgagacagtacctggtgcagccccaggccgtgctgttccaggccgtgacctggagagccagacccagccccggcaccctgcacaccagcccccccctggacagagccgccacccagcacagaagatag

SEQ ID NO: 12024 - DNA, 1197 bp, synthetic construct
  misc_feature 1..1197: note = Description of Artificial Sequence: Synthetic coding sequence
  source 1..1197: mol_type = other DNA
atgccccacaacagcatcagaagcggccacggcggcctgaaccagctgggcggcgccttcgtgaacggcagacccctgcccgaggtggtgagacagagaatcgtggacctggcccaccagggcgtgagaccctgcgacatcagcagacagctgagagtgagccacggctgcgtgagcaagatcctgggcagatactacgagaccggcagcatcagacccggcgtgatcggcggcagcaagcccaaggtggccacccccaaggtggtggagaagatcggcgactacaagagacagaaccccaccatgttcgcctgggagatcagagacagactgctggccgagggcgtgtgcgacaacgacaccgtgcccagcgtgagcagcatcaacagaatcatcagaaccaaggtgcagcagcccttcaacctgcccatggacagctgcgtggccaccaagagcctgagccccggccacaccctgatccccagcagcgccgtgaccccccccgagagcccccagagcgacagcctgggcagcacctacagcatcaacggcctgctgggcatcgcccagcccggcagcgacaagagaaagatggacgacagcgaccaggacagctgcagactgagcatcgacagccagagcagcagcagcggccccagaaagcacctgagaaccgacgccttcagccagcaccacctggagcccctggagtgccccttcgagagacagcactaccccgaggcctacgccagccccagccacaccaagggcgagcagggcctgtaccccctgcccctgctgaacagcaccctggacgacggcaaggccaccctgacccccagcaacacccccctgggcagaaacctgagcacccaccagacctaccccgtggtggccgccccccccttctggatctgcagcaagagcgcccccggcagcagacccagcatgcccttccccatgctgcccccctgcaccggcagcagcagagccagacccagcagccagggcgagagatggtggggccccagatgccccgacacccaccccaccagcccccccgccgacagagccgccatgccccccctgcccagccaggcctggtggcaggaggtgaacaccctggccatgcccatggccaccccccccaccccccccaccgccagacccggcgccagccccacccccgcctgctag

SEQ ID NO: 12025 - DNA, 966 bp, synthetic construct
  misc_feature 1..966: note = Description of Artificial Sequence: Synthetic coding sequence
  source 1..966: mol_type = other DNA
atgccccacaacagcatcagaagcggccacggcggcctgaaccagctgggcggcgccttcgtgaacggcagacccctgcccgaggtggtgagacagagaatcgtggacctggcccaccagggcgtgagaccctgcgacatcagcagacagctgagagtgagccacggctgcgtgagcaagatcctgggcagatactacgagaccggcagcatcagacccggcgtgatcggcggcagcaagcccaaggtggccacccccaaggtggtggagaagatcggcgactacaagagacagaaccccaccatgttcgcctgggagatcagagacagactgctggccgagggcgtgtgcgacaacgacaccgtgcccagcgtgagcagcatcaacagaatcatcagaaccaaggtgcagcagcccttcaacctgcccatggacagctgcgtggccaccaagagcctgagccccggccacaccctgatccccagcagcgccgtgaccccccccgagagcccccagagcgacagcctgggcagcacctacagcatcaacggcctgctgggcatcgcccagcccggcagcgacaagagaaagatggacgacagcgaccaggacagctgcagactgagcatcgacagccagagcagcagcagcggccccagaaagcacctgagaaccgacgccttcagccagcaccacctggagcccctggagtgccccttcgagagacagcactaccccgaggcctacgccagccccagccacaccaagggcgagcagggcgagagatggtggggccccagatgccccgacacccaccccaccagcccccccgccgacagagccgccatgccccccctgcccagccaggcctggtggcaggaggtgaacaccctggccatgcccatggccaccccccccaccccccccaccgccagacccggcgccagccccacccccgcctgctag

SEQ ID NO: 12026 - DNA, 1197 bp, synthetic construct; identical to SEQ ID NO: 12024
  misc_feature 1..1197: note = Description of Artificial Sequence: Synthetic coding sequence
  source 1..1197: mol_type = other DNA

SEQ ID NO: 12027 - DNA, 864 bp, synthetic construct
  misc_feature 1..864: note = Description of Artificial Sequence: Synthetic coding sequence
  source 1..864: mol_type = other DNA
atgccccacaacagcatcagaagcggccacggcggcctgaaccagctgggcggcgccttcgtgaacggcagacccctgcccgaggtggtgagacagagaatcgtggacctggcccaccagggcgtgagaccctgcgacatcagcagacagctgagagtgagccacggctgcgtgagcaagatcctgggcagatactacgagaccggcagcatcagacccggcgtgatcggcggcagcaagcccaaggtggccacccccaaggtggtggagaagatcggcgactacaagagacagaaccccaccatgttcgcctgggagatcagagacagactgctggccgagggcgtgtgcgacaacgacaccgtgcccagcgtgagcagcatcaacagaatcatcagaaccaaggtgcagcagcccttcaacctgcccatggacagctgcgtggccaccaagagcctgagccccggccacaccctgatccccagcagcgccgtgaccccccccgagagcccccagagcgacagcctgggcagcacctacagcatcaacggcctgctgggcatcgcccagcccggcagcgacaagagaaagatggacgacagcgaccaggacagctgcagactgagcatcgacagccagagcagcagcagcggccccagaaagcacctgagaaccgacgccttcagccagcaccacctggagcccctggagtgccccttcgagagacagcactaccccgaggcctacgccagccccagccacaccaagggcgagcaggaggtgaacaccctggccatgcccatggccaccccccccaccccccccaccgccagacccggcgccagccccacccccgcctgctag

SEQ ID NO: 12028 - DNA, 1353 bp, synthetic construct
  misc_feature 1..1353: note = Description of Artificial Sequence: Synthetic coding sequence
  source 1..1353: mol_type = other DNA
atgccccacaacagcatcagaagcggccacggcggcctgaaccagctgggcggcgccttcgtgaacggcagacccctgcccgaggtggtgagacagagaatcgtggacctggcccaccagggcgtgagaccctgcgacatcagcagacagctgagagtgagccacggctgcgtgagcaagatcctgggcagatactacgagaccggcagcatcagacccggcgtgatcggcggcagcaagcccaaggtggccacccccaaggtggtggagaagatcggcgactacaagagacagaaccccaccatgttcgcctgggagatcagagacagactgctggccgagggcgtgtgcgacaacgacaccgtgcccagcgtgagcagcatcaacagaatcatcagaaccaaggtgcagcagcccttcaacctgcccatggacagctgcgtggccaccaagagcctgagccccggccacaccctgatccccagcagcgccgtgaccccccccgagagcccccagagcgacagcctgggcagcacctacagcatcaacggcctgctgggcatcgcccagcccggcagcgacaagagaaagatggacgacagcgaccaggacagctgcagactgagcatcgacagccagagcagcagcagcggccccagaaagcacctgagaaccgacgccttcagccagcaccacctggagcccctggagtgccccttcgagagacagcactaccccgaggcctacgccagccccagccacaccaagggcgagcagggcctgtaccccctgcccctgctgaacagcaccctggacgacggcaaggccaccctgacccccagcaacacccccctgggcagaaacctgagcacccaccagacctaccccgtggtggccgacccccacagccccttcgccatcaagcaggagacccccgaggtgagcagcagcagcagcacccccagcagcctgagcagcagcgccttcctggacctgcagcaggtgggcagcggcgtgccccccttcaacgccttcccccacgccgccagcgtgtacggccagttcaccggccaggccctgctgagcggcagagagatggtgggccccaccctgcccggctaccccccccacatccccaccagcggccagggcagctacgccagcagcgccatcgccggcatggtggccggcagcgagtacagcggcaacgcctacggccacaccccctacagcagctacagcgaggcctggagattccccaacagcagcctgctgagcagcccctactactacagcagcaccagcagacccagcgccccccccaccaccgccaccgccttcgaccacctgtag

SEQ ID NO: 12029 - DNA, 570 bp, synthetic construct
  misc_feature 1..570: note = Description of Artificial Sequence: Synthetic coding sequence
  source 1..570: mol_type = other DNA
atggccagcaagagagccctggtgatcctggccaagggcgccgaggagatggagaccgtgatccccgtggacgtgatgagaagagccggcatcaaggtgaccgtggccggcctggccggcaaggaccccgtgcagtgcagcagagacgtggtgatctgccccgacgccagcctggaggacgccaagaaggagggcccctacgacgtggtggtgctgcccggcggcaacctgggcgcccagaacctgagcgagagcgccgccgtgaaggagatcctgaaggagcaggagaacagaaagggcctgatcgccgccatctgcgccggccccaccgccctgctggcccacgagatcggcttcggcagcaaggtgaccacccaccccctggccaaggacaagatgatgaacggcggccactacacctacagcgagaacagagtggagaaggacggcctgatcctgaccagcagaggccccggcaccagcttcgagttcgccctggccatcgtggaggccctgaacggcaaggaggtggccgcccaggtgaaggcccccctggtgctgaaggactag

SEQ ID NO: 12030 - DNA, 570 bp, synthetic construct; identical to SEQ ID NO: 12029
  misc_feature 1..570: note = Description of Artificial Sequence: Synthetic coding sequence
  source 1..570: mol_type = other DNA

SEQ ID NO: 12031 - DNA, 570 bp, synthetic construct; identical to SEQ ID NO: 12029
  misc_feature 1..570: note = Description of Artificial Sequence: Synthetic coding sequence
  source 1..570: mol_type = other DNA

SEQ ID NO: 12032 - DNA, 570 bp, synthetic construct; identical to SEQ ID NO: 12029
  misc_feature 1..570: note = Description of Artificial Sequence: Synthetic coding sequence
  source 1..570: mol_type = other DNA

SEQ ID NO: 12033 - DNA, 3561 bp, synthetic construct
  misc_feature 1..3561: note = Description of Artificial Sequence: Synthetic coding sequence
  source 1..3561: mol_type = other DNA
atggacgagccccccggcaagcccctgagctgcgaggagaaggagaagctgaaggagaagctggccttcctgaagagagagtacagcaagaccctggccagactgcagagagcccagagagccgagaagatcaagcacagcatcaagaagaccgtggaggagcaggactgcctgagccagcaggacctgagcccccagctgaagcacagcgagcccaagaacaagatctgcgtgtacgacaagctgcacatcaagacccacctggacgaggagaccggcgagaagaccagcatcaccctggacgtgggccccgagagcttcaaccccggcgacggccccggcggcctgcccatccagagaaccgacgacacccaggagcacttcccccacagagtgagcgaccccagcggcgagcagaagcagaagctgcccagcagaagaaagaagcagcagaagagaaccttcatcagccaggagagagactgcgtgttcggcaccgacagcctgagactgagcggcaagagactgaaggagcaggaggagatcagcagcaagaaccccgccagaagccccgtgaccgagatcagaacccacctgctgagcctgaagagcgagctgcccgacagccccgagcccgtgaccgagatcaacgaggacagcgtgctgatcccccccaccgcccagcccgagaagggcgtggacaccttcctgagaagacccaacttcaccagagccaccaccgtgcccctgcagaccctgagcgacagcggcagcagccagcacctggagcacatcccccccaagggcagcagcgagctgaccacccacgacctgaagaacatcagattcaccagccccgtgagcctggaggcccagggcaagaagatgaccgtgagcaccgacaacctgctggtgaacaaggccatcagcaagagcggccagctgcccaccagcagcaacctggaggccaacatcagctgcagcctgaacgagctgacctacaacaacctgcccgccaacgagaaccagaacctgaaggagcagaaccagaccgagaagagcctgaagagccccagcgacaccctggacggcagaaacgagaacctgcaggagagcgagatcctgagccagcccaagagcctgagcctggaggccaccagccccctgagcgccgagaagcacagctgcaccgtgcccgagggcctgctgttccccgccgagtactacgtgagaaccaccagaagcatgagcaactgccagagaaaggtggccgtggaggccgtgatccagagccacctggacgtgaagaagaagggcttcaagaacaagaacaaggacgccagcaagaacctgaacctgagcaacgaggagaccgaccagagcgagatcagaatgagcggcacctgcaccggccagcccagcagcagaaccagccagaagctgctgagcctgaccaaggtgagcagccccgccggccccaccgaggacaacgacctgagcagaaaggccgtggcccaggcccccggcagaagatacaccggcaagagaaagagcgcctgcacccccgccagcgaccactgcgagcccctgctgcccaccagcagcctgagcatcgtgaacagaagcaaggaggaggtgaccagccacaagtaccagcacgagaagctgttcatccaggtgaagggcaagaagagcagacaccagaaggaggacagcctgagctggagcaacagcgcctacctgagcctggacgacgacgccttcaccgcccccttccacagagacggcatgctgagcctgaagcagctgctgagcttcctgagcatcaccgacttccagctgcccgacgaggacttcggccccctgaagctggagaaggtgaagagctgcagcgagaagcccgtggagcccttcgagagcaagatgttcggcgagagacacctgaaggagggcagctgcatcttccccgaggagctgagccccaagagaatggacaccgagatggaggacctggaggaggacctgatcgtgctgcccggcaagagccaccccaagagacccaacagccagagccagcacaccaagaccggcctgagcagcagcatcctgctgtacacccccctgaacaccgtggcccccgacgacaacgacagacccaccaccgacatgtgcagccccgccttccccatcctgggcaccacccccgccttcggcccccagggcagctacgagaaggccagcaccgaggtggccggcagaacctgctgcaccccccagctggcccacctgaaggacagcgtgtgcctggccagcgacaccaagcagttcgacagcagcggcagccccgccaagccccacaccaccctgcaggtgagcggcagacagggccagcccacctgcgactgcgacagcgtgccccccggcacccccccccccatcgagagcttcaccttcaaggagaaccagctgtgcagaaacacctgccaggagctgcacaagcacagcgtggagcagaccgagaccgccgagctgcccgccagcgacagcatcaaccccggcaacctgcagctggtgagcgagctgaagaaccccagcggcagctgcagcgtggacgtgagcgccatgttctgggagagagccggctgcaaggagccctgcatcatcaccgcctgcgaggacgtggtgagcctgtggaaggccctggacgcctggcagtgggagaagctgtacacctggcacttcgccgaggtgcccgtgctgcagatcgtgcccgtgcccgacgtgtacaacctggtgtgcgtggccctgggcaacctggagatcagagagatcagagccctgttctgcagcagcgacgacgagagcgagaagcaggtgctgctgaagagcggcaacatcaaggccgtgctgggcctgaccaagagaagactggtgagcagcagcggcaccctgagcgaccagcaggtggaggtgatgaccttcgccgaggacggcggcggcaaggagaaccagttcctgatgccccccgaggagaccatcctgaccttcgccgaggtgcagggcatgcaggaggccctgctgggcaccaccatcatgaacaacatcgtgatctggaacctgaagaccggccagctgctgaagaagatgcacatcgacgacagctaccaggccagcgtgtgccacaaggcctacagcgagatgggcctgctgttcatcgtgctgagccacccctgcgccaaggagagcgagagcctgagaagccccgtgttccagctgatcgtgatcaaccccaagaccaccctgagcgtgggcgtgatgctgtactgcctgccccccggccaggccggcagattcctggagggcgacgtgaaggaccactgcgccgccgccatcctgaccagcggcaccatcgccatctgggacctgctgctgggccagtgcaccgccctgctgccccccgtgagcgaccagcactggagcttcgtgaagtggagcggcaccgacagccacctgctggccggccagaaggacggcaacatcttcgtgtaccactacagctag

SEQ ID NO: 12034 - DNA, 4344 bp, synthetic construct
  misc_feature 1..4344: note = Description of Artificial Sequence: Synthetic coding sequence
  source 1..4344: mol_type = other DNA
atggccagcgccggcaacgccgccgagccccaggacagaggcggcggcggcagcggctgcatcggcgcccccggcagacccgccggcggcggcagaagaagaagaaccggcggcctgagaagagccgccgcccccgacagagactacctgcacagacccagctactgcgacgccgccttcgccctggagcagatcagcaagggcaaggccaccggcagaaaggcccccctgtggctgagagccaagttccagagactgctgttcaagctgggctgctacatccagaagaactgcggcaagttcctggtggtgggcctgctgatcttcggcgccttcgccgtgggcctgaaggccgccaacctggagaccaacgtggaggagctgtgggtggaggtgggcggcagagtgagcagagagctgaactacaccagacagaagatcggcgaggaggccatgttcaacccccagctgatgatccagacccccaaggaggagggcgccaacgtgctgaccaccgaggccctgctgcagcacctggacagcgccctgcaggccagcagagtgcacgtgtacatgtacaacagacagtggaagctggagcacctgtgctacaagagcggcgagctgatcaccgagaccggctacatggaccagatcatcgagtacctgtacccctgcctgatcatcacccccctggactgcttctgggagggcgccaagctgcagagcggcaccgcctacctgctgggcaagccccccctgagatggaccaacttcgaccccctggagttcctggaggagctgaagaagatcaactaccaggtggacagctgggaggagatgctgaacaaggccgaggtgggccacggctacatggacagaccctgcctgaaccccgccgaccccgactgccccgccaccgcccccaacaagaacagcaccaagcccctggacatggccctggtgctgaacggcggctgccacggcctgagcagaaagtacatgcactggcaggaggagctgatcgtgggcggcaccgtgaagaacagcaccggcaagctggtgagcgcccacgccctgcagaccatgttccagctgatgacccccaagcagatgtacgagcacttcaagggctacgagtacgtgagccacatcaactggaacgaggacaaggccgccgccatcctggaggcctggcagagaacctacgtggaggtggtgcaccagagcgtggcccagaacagcacccagaaggtgctgagcttcaccaccaccaccctggacgacatcctgaagagcttcagcgacgtgagcgtgatcagagtggccagcggctacctgctgatgctggcctacgcctgcctgaccatgctgagatgggactgcagcaagagccagggcgccgtgggcctggccggcgtgctgctggtggccctgagcgtggccgccggcctgggcctgtgcagcctgatcggcatcagcttcaacgccgccaccacccaggtgctgcccttcctggccctgggcgtgggcgtggacgacgtgttcctgctggcccacgccttcagcgagaccggccagaacaagagaatccccttcgaggacagaaccggcgagtgcctgaagagaaccggcgccagcgtggccctgaccagcatcagcaacgtgaccgccttcttcatggccgccctgatccccatccccgccctgagagccttcagcctgcaggccgccgtggtggtggtgttcaacttcgccatggtgctgctgatcttccccgccatcctgagcatggacctgtacagaagagaggacagaagactggacatcttctgctgcttcaccagcccctgcgtgagcagagtgatccaggtggagccccaggcctacaccgacacccacgacaacaccagatacagccccccccccccctacagcagccacagcttcgcccacgagacccagatcaccatgcagagcaccgtgcagctgagaaccgagtacgacccccacacccacgtgtactacaccaccgccgagcccagaagcgagatcagcgtgcagcccgtgaccgtgacccaggacaccctgagctgccagagccccgagagcaccagcagcaccagagacctgctgagccagttcagcgacagcagcctgcactgcctggagcccccctgcaccaagtggaccctgagcagcttcgccgagaagcactacgcccccttcctgctgaagcccaaggccaaggtggtggtgatcttcctgttcctgggcctgctgggcgtgagcctgtacggcaccaccagagtgagagacggcctggacctgaccgacatcgtgcccagagagaccagagagtacgacttcatcgccgcccagttcaagtacttcagcttctacaacatgtacatcgtgacccagaaggccgactaccccaacatccagcacctgctgtacgacctgcacagaagcttcagcaacgtgaagtacgtgatgctggaggagaacaagcagctgcccaagatgtggctgcactacttcagagactggctgcagggcctgcaggacgccttcgacagcgactgggagaccggcaagatcatgcccaacaactacaagaacggcagcgacgacggcgtgctggcctacaagctgctggtgcagaccggcagcagagacaagcccatcgacatcagccagctgaccaagcagagactggtggacgccgacggcatcatcaaccccagcgccttctacatctacctgaccgcctgggtgagcaacgaccccgtggcctacgccgccagccaggccaacatcagaccccacagacccgagtgggtgcacgacaaggccgactacatgcccgagaccagactgagaatccccgccgccgagcccatcgagtacgcccagttccccttctacctgaacggcctgagagacaccagcgacttcgtggaggccatcgagaaggtgagaaccatctgcagcaactacaccagcctgggcctgagcagctaccccaacggctaccccttcctgttctgggagcagtacatcggcctgagacactggctgctgctgttcatcagcgtggtgctggcctgcaccttcctggtgtgcgccgtgttcctgctgaacccctggaccgccggcatcatcgtgatggtgctggccctgatgaccgtggagctgttcggcatgatgggcctgatcggcatcaagctgagcgccgtgcccgtggtgatcctgatcgccagcgtgggcatcggcgtggagttcaccgtgcacgtggccctggccttcctgaccgccatcggcgacaagaacagaagagccgtgctggccctggagcacatgttcgcccccgtgctggacggcgccgtgagcaccctgctgggcgtgctgatgctggccggcagcgagttcgacttcatcgtgagatacttcttcgccgtgctggccatcctgaccatcctgggcgtgctgaacggcctggtgctgctgcccgtgctgctgagcttcttcggcccctaccccgaggtgagccccgccaacggcctgaacagactgcccacccccagccccgagcccccccccagcgtggtgagattcgccatgccccccggccacacccacagcggcagcgacagcagcgacagcgagtacagcagccagaccaccgtgagcggcctgagcgaggagctgagacactacgaggcccagcagggcgccggcggccccgcccaccaggtgatcgtggaggccaccgagaaccccgtgttcgcccacagcaccgtggtgcaccccgagagcagacaccacccccccagcaaccccagacagcagccccacctggacagcggcagcctgccccccggcagacagggccagcagcccagaagagacccccccagagagggcctgtggccccccccctacagacccagaagagacgccttcgagatcagcaccgagggccacagcggccccagcaacagagccagatggggccccagaggcgccagaagccacaaccccagaaaccccgccagcaccgccatgggcagcagcgtgcccggctactgccagcccatcaccaccgtgaccgccagcgccagcgtgaccgtggccgtgcaccccccccccgtgcccggccccggcagaaaccccagaggcggcctgtgccccggctaccccgagaccgaccacggcctgttcgaggacccccacgtgcccttccacgtgagatgcgagagaagagacagcaaggtggaggtgatcgagctgcaggacgtggagtgcgaggagagacccagaggcagcagcagcaactag

SEQ ID NO: 12035 - DNA, 1059 bp, synthetic construct
  misc_feature 1..1059: note = Description of Artificial Sequence: Synthetic coding sequence
  source 1..1059: mol_type = other DNA
aaggccgaggtgggccacggctacatggacagaccctgcctgaaccccgccgaccccgactgccccgccaccgcccccaacaagaacagcaccaagcccctggacatggccctggtgctgaacggcggctgccacggcctgagcagaaagtacatgcactggcaggaggagctgatcgtgggcggcaccgtgaagaacagcaccggcaagctggtgagcgcccacgccctgcagaccatgttccagctgatgacccccaagcagatgtacgagcacttcaagggctacgagtacgtgagccacatcaactggaacgaggacaaggccgccgccatcctggaggcctggcagagaacctacgtggaggtggtgcaccagagcgtggcccagaacagcacccagaaggtgctgagcttcaccaccaccaccctggacgacatcctgaagagcttcagcgacgtgagcgtgatcagagtggccagcggctacctgctgatggtgctgcccttcctggccctgggcgtgggcgtggacgacgtgttcctgctggcccacgccttcagcgagaccggccagaacaagagaatccccttcgaggacagaaccggcgagtgcctgaagagaaccggcgccagcgtggccctgaccagcatcagcaacgtgaccgccttcttcatggccgccctgatccccatccccgccctgagagccttcagcctgcaggccgccgtggtggtggtgttcaacttcgccatggtgctgctgatcttccccgccatcctgagcatggacctgtacagaagagaggacagaagactggacatcttctgctgcttcaccagcccctgcgtgagcagagtgatccaggtggagccccaggcctacaccgacacccacgacaacaccagatacagccccccccccccctacagcagccacagcttcgcccacgagacccagatcaccatgcagagcaccgtgcagctgagaaccgagtacgacccccacacccacgtgtactacaccaccgccgagcccagaagcgagatcagcgtgtag

SEQ ID NO: 12036 - DNA, 4341 bp, synthetic construct
  misc_feature 1..4341: note = Description of Artificial Sequence: Synthetic coding sequence
  source 1..4341: mol_type = other DNA
atggagctgctgaacagaaacagactggtgatcgtgagccccagatgcaccccccccaaggccagcggcggccccgccagaagaggcttctacaccttcagaagcttctgcaaggacggcggcggcggcgaggaggaggaggagaacggcggcgaggagaaggacgacagaggcgacaaggagaccagaagcgacaagggcaaggccaccggcagaaaggcccccctgtggctgagagccaagttccagagactgctgttcaagctgggctgctacatccagaagaactgcggcaagttcctggtggtgggcctgctgatcttcggcgccttcgccgtgggcctgaaggccgccaacctggagaccaacgtggaggagctgtgggtggaggtgggcggcagagtgagcagagagctgaactacaccagacagaagatcggcgaggaggccatgttcaacccccagctgatgatccagacccccaaggaggagggcgccaacgtgctgaccaccgaggccctgctgcagcacctggacagcgccctgcaggccagcagagtgcacgtgtacatgtacaacagacagtggaagctggagcacctgtgctacaagagcggcgagctgatcaccgagaccggctacatggaccagatcatcgagtacctgtacccctgcctgatcatcacccccctggactgcttctgggagggcgccaagctgcagagcggcaccgcctacctgctgggcaagccccccctgagatggaccaacttcgaccccctggagttcctggaggagctgaagaagatcaactaccaggtggacagctgggaggagatgctgaacaaggccgaggtgggccacggctacatggacagaccctgcctgaaccccgccgaccccgactgccccgccaccgcccccaacaagaacagcaccaagcccctggacatggccctggtgctgaacggcggctgccacggcctgagcagaaagtacatgcactggcaggaggagctgatcgtgggcggcaccgtgaagaacagcaccggcaagctggtgagcgcccacgccctgcagaccatgttccagctgatgacccccaagcagatgtacgagcacttcaagggctacgagtacgtgagccacatcaactggaacgaggacaaggccgccgccatcctggaggcctggcagagaacctacgtggaggtggtgcaccagagcgtggcccagaacagcacccagaaggtgctgagcttcaccaccaccaccctggacgacatcctgaagagcttcagcgacgtgagcgtgatcagagtggccagcggctacctgctgatgctggcctacgcctgcctgaccatgctgagatgggactgcagcaagagccagggcgccgtgggcctggccggcgtgctgctggtggccctgagcgtggccgccggcctgggcctgtgcagcctgatcggcatcagcttcaacgccgccaccacccaggtgctgcccttcctggccctgggcgtgggcgtggacgacgtgttcctgctggcccacgccttcagcgagaccggccagaacaagagaatccccttcgaggacagaaccggcgagtgcctgaagagaaccggcgccagcgtggccctgaccagcatcagcaacgtgaccgccttcttcatggccgccctgatccccatccccgccctgagagccttcagcctgcaggccgccgtggtggtggtgttcaacttcgccatggtgctgctgatcttccccgccatcctgagcatggacctgtacagaagagaggacagaagactggacatcttctgctgcttcaccagcccctgcgtgagcagagtgatccaggtggagccccaggcctacaccgacacccacgacaacaccagatacagccccccccccccctacagcagccacagcttcgcccacgagacccagatcaccatgcagagcaccgtgcagctgagaaccgagtacgacccccacacccacgtgtactacaccaccgccgagcccagaagcgagatcagcgtgcagcccgtgaccgtgacccaggacaccctgagctgccagagccccgagagcaccagcagcaccagagacctgctgagccagttcagcgacagcagcctgcactgcctggagcccccctgcaccaagtggaccctgagcagcttcgccgagaagcactacgcccccttcctgctgaagcccaaggccaaggtggtggtgatcttcctgttcctgggcctgctgggcgtgagcctgtacggcaccaccagagtgagagacggcctggacctgaccgacatcgtgcccagagagaccagagagtacgacttcatcgccgcccagttcaagtacttcagcttctacaacatgtacatcgtgacccagaaggccgactaccccaacatccagcacctgctgtacgacctgcacagaagcttcagcaacgtgaagtacgtgatgctggaggagaacaagcagctgcccaagatgtggctgcactacttcagagactggctgcagggcctgcaggacgccttcgacagcgactgggagaccggcaagatcatgcccaacaactacaagaacggcagcgacgacggcgtgctggcctacaagctgctggtgcagaccggcagcagagacaagcccatcgacatcagccagctgaccaagcagagactggtggacgccgacggcatcatcaaccccagcgccttctacatctacctgaccgcctgggtgagcaacgaccccgtggcctacgccgccagccaggccaacatcagaccccacagacccgagtgggtgcacgacaaggccgactacatgcccgagaccagactgagaatccccgccgccgagcccatcgagtacgcccagttccccttctacctgaacggcctgagagacaccagcgacttcgtggaggccatcgagaaggtgagaaccatctgcagcaactacaccagcctgggcctgagcagctaccccaacggctaccccttcctgttctgggagcagtacatcggcctgagacactggctgctgctgttcatcagcgtggtgctggcctgcaccttcctggtgtgcgccgtgttcctgctgaacccctggaccgccggcatcatcgtgatggtgctggccctgatgaccgtggagctgttcggcatgatgggcctgatcggcatcaagctgagcgccgtgcccgtggtgatcctgatcgccagcgtgggcatcggcgtggagttcaccgtgcacgtggccctggccttcctgaccgccatcggcgacaagaacagaagagccgtgctggccctggagcacatgttcgcccccgtgctggacggcgccgtgagcaccctgctgggcgtgctgatgctggccggcagcgagttcgacttcatcgtgagatacttcttcgccgtgctggccatcctgaccatcctgggcgtgctgaacggcctggtgctgctgcccgtgctgctgagcttcttcggcccctaccccgaggtgagccccgccaacggcctgaacagactgcccacccccagccccgagcccccccccagcgtggtgagattcgccatgccccccggccacacccacagcggcagcgacagcagcgacagcgagtacagcagccagaccaccgtgagcggcctgagcgaggagctgagacactacgaggcccagcagggcgccggcggccccgcccaccaggtgatcgtggaggccaccgagaaccccgtgttcgcccacagcaccgtggtgcaccccgagagcagacaccacccccccagcaaccccagacagcagccccacctggacagcggcagcctgccccccggcagacagggccagcagcccagaagagacccccccagagagggcctgtggccccccccctacagacccagaagagacgccttcgagatcagcaccgagggccacagcggccccagcaacagagccagatggggccccagaggcgccagaagccacaaccccagaaaccccgccagcaccgccatgggcagcagcgtgcccggctactgccagcccatcaccaccgtgaccgccagcgccagcgtgaccgtggccgtgcaccccccccccgtgcccggccccggcagaaaccccagaggcggcctgtgccccggctaccccgagaccgaccacggcctgttcgaggacccccacgtgcccttccacgtgagatgcgagagaagagacagcaaggtggaggtgatcgagctgcaggacgtggagtgcgaggagagacccagaggcagcagcagcaactag

SEQ ID NO: 12037 - DNA, 1758 bp, synthetic construct
  misc_feature 1..1758: note = Description of Artificial Sequence: Synthetic coding sequence
  source 1..1758: mol_type = other DNA
ccctgcagaaagagcagcgccctgaacagccccaaggccgccgtggtggtggtgttcaacttcgccatggtgctgctgatcttccccgccatcctgagcatggacctgtacagaagagaggacagaagactggacatcttctgctgcttcaccagcccctgcgtgagcagagtgatccaggtggagccccaggcctacaccgacacccacgacaacaccagatacagccccccccccccctacagcagccacagcttcgcccacgagacccagatcaccatgcagagcaccgtgcagctgagaaccgagtacgacccccacacccacgtgtactacaccaccgccgagcccagaagcgagatcagcgtgcagcccgtgaccgtgacccaggacaccctgagctgccagagccccgagagcaccagcagcaccagagacctgctgagccagttcagcgacagcagcctgcactgcctggagcccccctgcaccaagtggaccctgagcagcttcgccgagaagcactacgcccccttcctgctgaagcccaaggccaaggtggtggtgatcttcctgttcctgggcctgctgggcgtgagcctgtacggcaccaccagagtgagagacggcctggacctgaccgacatcgtgcccagagagaccagagagtacgacttcatcgccgcccagttcaagtacttcagcttctacaacatgtacatcgtgacccagaaggccgactaccccaacatccagcacctgctgtacgacctgcacagaagcttcagcaacgtgaagtacgtgatgctggaggagaacaagcagctgcccaagatgtggctgcactacttcagagactggctgcagggcctgcaggacgccttcgacagcgactgggagaccggcaagatcatgcccaacaactacaagaacggcagcgacgacggcgtgctggcctacaagctgctggtgcagaccggcagcagagacaagcccatcgacatcagccagctgaccaagcagagactggtggacgccgacggcatcatcaaccccagcgccttctacatctacctgaccgcctgggtgagcaacgaccccgtggcctacgccgccagccaggccaacatcagaccccacagacccgagtgggtgcacgacaaggccgactacatgcccgagaccagactgagaatccccgccgccgagcccatcgagtacgcccagttccccttctacctgaacggcctgagagacaccagcgacttcgtggaggccatcgagaaggtgagaaccatctgcagcaactacaccagcctgggcctgagcagctaccccaacggctaccccttcctgttctgggagcagtacatcggcctgagacactggctgctgctgttcatcagcgtggtgctggcctgcaccttcctggtgtgcgccgtgttcctgctgaacccctggaccgccggcatcatcgtgatggtgctggccctgatgaccgtggagctgttcggcatgatgggcctgatcggcatcaagctgagcgccgtgcccgtggtgatcctgatcgccagcgtgggcatcggcgtggagttcaccgtgcacgtggccctggccttcctgaccgccatcggcgacaagaacagaagagccgtgctggccctggagcacatgttcgcccccgtgctggacggcgccgtgagcaccctgctgggcgtgctgatgctggccggcagcgagttcgacttcatcgtgtag

SEQ ID NO: 12038 - DNA, 729 bp, synthetic construct
  misc_feature 1..729: note = Description of Artificial Sequence: Synthetic coding sequence
  source 1..729: mol_type = other DNA
atgccccccggccacacccacagcggcagcgacagcagcgacagcgagtacagcagccagaccaccgtgagcggcctgagcgaggagctgagacactacgaggcccagcagggcgccggcggccccgcccaccaggtgatcgtggaggccaccgagaaccccgtgttcgcccacagcaccgtggtgcaccccgagagcagacaccacccccccagcaaccccagacagcagccccacctggacagcggcagcctgccccccggcagacagggccagcagcccagaagagacccccccagagagggcctgtggccccccccctacagacccagaagagacgccttcgagatcagcaccgagggccacagcggccccagcaacagagccagatggggccccagaggcgccagaagccacaaccccagaaaccccgccagcaccgccatgggcagcagcgtgcccggctactgccagcccatcaccaccgtgaccgccagcgccagcgtgaccgtggccgtgcaccccccccccgtgcccggccccggcagaaaccccagaggcggcctgtgccccggctaccccgagaccgaccacggcctgttcgaggaccccacctgcctgagcaccagcggcgtgagaggcggcatcagaagatggaagagcctgagctgcagaacctggaacgccagaagaggccccggcgaggccgcccccaccgagggcgactag

SEQ ID NO: 12039 - DNA, 1461 bp, synthetic construct
  misc_feature 1..1461: note = Description of Artificial Sequence: Synthetic coding sequence
  source 1..1461: mol_type = other DNA
ggcaaggccaccggcagaaaggcccccctgtggctgagagccaagttccagagactgctgttcaagctgggctgctacatccagaagaactgcggcaagttcctggtggtgggcctgctgatcttcggcgccttcgccgtgggcctgaaggccgccaacctggagaccaacgtggaggagctgtgggtggaggtgggcggcagagtgagcagagagctgaactacaccagacagaagatcggcgaggaggccatgttcaacccccagctgatgatccagacccccaaggaggagggcgccaacgtgctgaccaccgaggccctgctgcagcacctggacagcgccctgcaggccagcagagtgcacgtgtacatgtacaacagaggcaagccccccctgagatggaccaacttcgaccccctggagttcctggaggagctgaagaagatcaactaccaggtggacagctgggaggagatgctgaacaaggccgaggtgggccacggctacatggacagaccctgcctgaaccccgccgaccccgactgccccgccaccgcccccaacaagaacagcaccaagcccctggacatggccctggtgctgaacggcggctgccacggcctgagcagaaagtacatgcactggcaggaggagctgatcgtgggcggcaccgtgaagaacagcaccggcaagctggtgagcgcccacgccctgcagaccatgttccagctgatgacccccaagcagatgtacgagcacttcaagggctacgagtacgtgagccacatcaactggaacgaggacaaggccgccgccatcctggaggcctggcagagaacctacgtggaggtggtgcaccagagcgtggcccagaacagcacccagaaggtgctgagcttcaccaccaccaccctggacgacatcctgaagagcttcagcgacgtgagcgtgatcagagtggccagcggctacctgctgatgctggcctacgcctgcctgaccatgctgagatgggactgcagcaagagccagggcgccgtgggcctggccggcgtgctgctggtggccctgagcgtggccgccggcctgggcctgtgcagcctgatcggcatcagcttcaacgccgccaccacccaggtgctgcccttcctggccctgggcgtgggcgtggacgacgtgttcctgctggcccacgccttcagcgagaccggccagaacaagagaatccccttcgaggacagaaccggcgagtgcctgaagagaaccggcgccagcgtggccctgaccagcatcagcaacgtgaccgccttcttcatggccgccctgatccccatccccgccctgagagccttcagcctgcagtacatcctgatggcccacagaggcagactgagcttcaacgacaccctgtggtgcggcggcctgaagagctacatgagattcccctacgaggagtag

SEQ ID NO: 12040 - DNA, 3891 bp, synthetic construct
  misc_feature 1..3891: note = Description of Artificial Sequence: Synthetic coding sequence
  source 1..3891: mol_type = other DNA
atgttcaacccccagctgatgatccagacccccaaggaggagggcgccaacgtgctgaccaccgaggccctgctgcagcacctggacagcgccctgcaggccagcagagtgcacgtgtacatgtacaacagacagtggaagctggagcacctgtgctacaagagcggcgagctgatcaccgagaccggctacatggaccagatcatcgagtacctgtacccctgcctgatcatcacccccctggactgcttctgggagggcgccaagctgcagagcggcaccgcctacctgctgggcaagccccccctgagatggaccaacttcgaccccctggagttcctggaggagctgaagaagatcaactaccaggtggacagctgggaggagatgctgaacaaggccgaggtgggccacggctacatggacagaccctgcctgaaccccgccgaccccgactgccccgccaccgcccccaacaagaacagcaccaagcccctggacatggccctggtgctgaacggcggctgccacggcctgagcagaaagtacatgcactggcaggaggagctgatcgtgggcggcaccgtgaagaacagcaccggcaagctggtgagcgcccacgccctgcagaccatgttccagctgatgacccccaagcagatgtacgagcacttcaagggctacgagtacgtgagccacatcaactggaacgaggacaaggccgccgccatcctggaggcctggcagagaacctacgtggaggtggtgcaccagagcgtggcccagaacagcacccagaaggtgctgagcttcaccaccaccaccctggacgacatcctgaagagcttcagcgacgtgagcgtgatcagagtggccagcggctacctgctgatgctggcctacgcctgcctgaccatgctgagatgggactgcagcaagagccagggcgccgtgggcctggccggcgtgctgctggtggccctgagcgtggccgccggcctgggcctgtgcagcctgatcggcatcagcttcaacgccgccaccacccaggtgctgcccttcctggccctgggcgtgggcgtggacgacgtgttcctgctggcccacgccttcagcgagaccggccagaacaagagaatccccttcgaggacagaaccggcgagtgcctgaagagaaccggcgccagcgtggccctgaccagcatcagcaacgtgaccgccttcttcatggccgccctgatccccatccccgccctgagagccttcagcctgcaggccgccgtggtggtggtgttcaacttcgccatggtgctgctgatcttccccgccatcctgagcatggacctgtacagaagagaggacagaagactggacatcttctgctgcttcaccagcccctgcgtgagcagagtgatccaggtggagccccaggcctacaccgacacccacgacaacaccagatacagccccccccccccctacagcagccacagcttcgcccacgagacccagatcaccatgcagagcaccgtgcagctgagaaccgagtacgacccccacacccacgtgtactacaccaccgccgagcccagaagcgagatcagcgtgcagcccgtgaccgtgacccaggacaccctgagctgccagagccccgagagcaccagcagcaccagagacctgctgagccagttcagcgacagcagcctgcactgcctggagcccccctgcaccaagtggaccctgagcagcttcgccgagaagcactacgcccccttcctgctgaagcccaaggccaaggtggtggtgatcttcctgttcctgggcctgctgggcgtgagcctgtacggcaccaccagagtgagagacggcctggacctgaccgacatcgtgcccagagagaccagagagtacgacttcatcgccgcccagttcaagtacttcagcttctacaacatgtacatcgtgacccagaaggccgactaccccaacatccagcacctgctgtacgacctgcacagaagcttcagcaacgtgaagtacgtgatgctggaggagaacaagcagctgcccaagatgtggctgcactacttcagagactggctgcagggcctgcaggacgccttcgacagcgactgggagaccggcaagatcatgcccaacaactacaagaacggcagcgacgacggcgtgctggcctacaagctgctggtgcagaccggcagcagagacaagcccatcgacatcagccagctgaccaagcagagactggtggacgccgacggcatcatcaaccccagcgccttctacatctacctgaccgcctgggtgagcaacgaccccgtggcctacgccgccagccaggccaacatcagaccccacagacccgagtgggtgcacgacaaggccgactacatgcccgagaccagactgagaatccccgccgccgagcccatcgagtacgcccagttccccttctacctgaacggcctgagagacaccagcgacttcgtggaggccatcgagaaggtgagaaccatctgcagcaactacaccagcctgggcctgagcagctaccccaacggctaccccttcctgttctgggagcagtacatcggcctgagacactggctgctgctgttcatcagcgtggtgctggcctgcaccttcctggtgtgcgccgtgttcctgctgaacccctggaccgccggcatcatcgtgatggtgctggccctgatgaccgtggagctgttcggcatgatgggcctgatcggcatcaagctgagcgccgtgcccgtggtgatcctgatcgccagcgtgggcatcggcgtggagttcaccgtgcacgtggccctggccttcctgaccgccatcggcgacaagaacagaagagccgtgctggccctggagcacatgttcgcccccgtgctggacggcgccgtgagcaccctgctgggcgtgctgatgctggccggcagcgagttcgacttcatcgtgagatacttcttcgccgtgctggccatcctgaccatcctgggcgtgctgaacggcctggtgctgctgcccgtgctgctgagcttcttcggcccctaccccgaggtgagccccgccaacggcctgaacagactgcccacccccagccccgagcccccccccagcgtggtgagattcgccatgccccccggccacacccacagcggcagcgacagcagcgacagcgagtacagcagccagaccaccgtgagcggcctgagcgaggagctgagacactacgaggcccagcagggcgccggcggccccgcccaccaggtgatcgtggaggccaccgagaaccccgtgttcgcccacagcaccgtggtgcaccccgagagcagacaccacccccccagcaaccccagacagcagccccacctggacagcggcagcctgccccccggcagacagggccagcagcccagaagagacccccccagagagggcctgtggccccccccctacagacccagaagagacgccttcgagatcagcaccgagggccacagcggccccagcaacagagccagatggggccccagaggcgccagaagccacaaccccagaaaccccgccagcaccgccatgggcagcagcgtgcccggctactgccagcccatcaccaccgtgaccgccagcgccagcgtgaccgtggccgtgcaccccccccccgtgcccggccccggcagaaaccccagaggcggcctgtgccccggctaccccgagaccgaccacggcctgttcgaggacccccacgtgcccttccacgtgagatgcgagagaagagacagcaaggtggaggtgatcgagctgcaggacgtggagtgcgaggagagacccagaggcagcagcagcaactag

SEQ ID NO: 12041 - DNA, 3891 bp, synthetic construct; identical to SEQ ID NO: 12040
  misc_feature 1..3891: note = Description of Artificial Sequence: Synthetic coding sequence
  source 1..3891: mol_type = other DNA

SEQ ID NO: 12042 - DNA, 3891 bp, synthetic construct; identical to SEQ ID NO: 12040
  misc_feature 1..3891: note = Description of Artificial Sequence: Synthetic coding sequence
  source 1..3891: mol_type = other DNA

SEQ ID NO: 12043 - DNA, 4146 bp, synthetic construct
  misc_feature 1..4146: note = Description of Artificial Sequence: Synthetic coding sequence
  source 1..4146: mol_type = other DNA
atgggcaaggccaccggcagaaaggcccccctgtggctgagagccaagttccagagactgctgttcaagctgggctgctacatccagaagaactgcggcaagttcctggtggtgggcctgctgatcttcggcgccttcgccgtgggcctgaaggccgccaacctggagaccaacgtggaggagctgtgggtggaggtgggcggcagagtgagcagagagctgaactacaccagacagaagatcggcgaggaggccatgttcaacccccagctgatgatccagacccccaaggaggagggcgccaacgtgctgaccaccgaggccctgctgcagcacctggacagcgccctgcaggccagcagagtgcacgtgtacatgtacaacagacagtggaagctggagcacctgtgctacaagagcggcgagctgatcaccgagaccggctacatggaccagatcatcgagtacctgtacccctgcctgatcatcacccccctggactgcttctgggagggcgccaagctgcagagcggcaccgcctacctgctgggcaagccccccctgagatggaccaacttcgaccccctggagttcctggaggagctgaagaagatcaactaccaggtggacagctgggaggagatgctgaacaaggccgaggtgggccacggctacatggacagaccctgcctgaaccccgccgaccccgactgccccgccaccgcccccaacaagaacagcaccaagcccctggacatggccctggtgctgaacggcggctgccacggcctgagcagaaagtacatgcactggcaggaggagctgatcgtgggcggcaccgtgaagaacagcaccggcaagctggtgagcgcccacgccctgcagaccatgttccagctgatgacccccaagcagatgtacgagcacttcaagggctacgagtacgtgagccacatcaactggaacgaggacaaggccgccgccatcctggaggcctggcagagaacctacgtggaggtggtgcaccagagcgtggcccagaacagcacccagaaggtgctgagcttcaccaccaccaccctggacgacatcctgaagagcttcagcgacgtgagcgtgatcagagtggccagcggctacctgctgatgctggcctacgcctgcctgaccatgctgagatgggactgcagcaagagccagggcgccgtgggcctggccggcgtgctgctggtggccctgagcgtggccgccggcctgggcctgtgcagcctgatcggcatcagcttcaacgccgccaccacccaggtgctgcccttcctggccctgggcgtgggcgtggacgacgtgttcctgctggcccacgccttcagcgagaccggccagaacaagagaatccccttcgaggacagaaccggcgagtgcctgaagagaaccggcgccagcgtggccctgaccagcatcagcaacgtgaccgccttcttcatggccgccctgatccccatccccgccctgagagccttcagcctgcaggccgccgtggtggtggtgttcaacttcgccatggtgctgctgatcttccccgccatcctgagcatggacctgtacagaagagaggacagaagactggacatcttctgctgcttcaccagcccctgcgtgagcagagtgatccaggtggagccccaggcctacaccgacacccacgacaacaccagatacagccccccccccccctacagcagccacagcttcgcccacgagacccagatcaccatgcagagcaccgtgcagctgagaaccgagtacgacccccacacccacgtgtactacaccaccgccgagcccagaagcgagatcagcgtgcagcccgtgaccgtgacccaggacaccctgagctgccagagccccgagagcaccagcagcaccagagacctgctgagccagttcagcgacagcagcctgcactgcctggagcccccctgcaccaagtggaccctgagcagcttcgccgagaagcactacgcccccttcctgctgaagcccaaggccaaggtggtggtgatcttcctgttcctgggcctgctgggcgtgagcctgtacggcaccaccagagtgagagacggcctggacctgaccgacatcgtgcccagagagaccagagagtacgacttcatcgccgcccagttcaagtacttcagcttctacaacatgtacatcgtgacccagaaggccgactaccccaacatccagcacctgctgtacgacctgcacagaagcttcagcaacgtgaagtacgtgatgctggaggagaacaagcagctgcccaagatgtggctgcactacttcagagactggctgcagggcctgcaggacgccttcgacagcgactgggagaccggcaagatcatgcccaacaactacaagaacggcagcgacgacggcgtgctggcctacaagctgctggtgcagaccggcagcagagacaagcccatcgacatcagccagctgaccaagcagagactggtggacgccgacggcatcatcaaccccagcgccttctacatctacctgaccgcctgggtgagcaacgaccccgtggcctacgccgccagccaggccaacatcagaccccacagacccgagtgggtgcacgacaaggccgactacatgcccgagaccagactgagaatccccgccgccgagcccatcgagtacgcccagttccccttctacctgaacggcctgagagacaccagcgacttcgtggaggccatcgagaaggtgagaaccatctgcagcaactacaccagcctgggcctgagcagctaccccaacggctaccccttcctgttctgggagcagtacatcggcctgagacactggctgctgctgttcatcagcgtggtgctggcctgcaccttcctggtgtgcgccgtgttcctgctgaacccctggaccgccggcatcatcgtgatggtgctggccctgatgaccgtggagctgttcggcatgatgggcctgatcggcatcaagctgagcgccgtgcccgtggtgatcctgatcgccagcgtgggcatcggcgtggagttcaccgtgcacgtggccctggccttcctgaccgccatcggcgacaagaacagaagagccgtgctggccctggagcacatgttcgcccccgtgctggacggcgccgtgagcaccctgctgggcgtgctgatgctggccggcagcgagttcgacttcatcgtgagatacttcttcgccgtgctggccatcctgaccatcctgggcgtgctgaacggcctggtgctgctgcccgtgctgctgagcttcttcggcccctaccccgaggtgagccccgccaacggcctgaacagactgcccacccccagccccgagcccccccccagcgtggtgagattcgccatgccccccggccacacccacagcggcagcgacagcagcgacagcgagtacagcagccagaccaccgtgagcggcctgagcgaggagctgagacactacgaggcccagcagggcgccggcggccccgcccaccaggtgatcgtggaggccaccgagaaccccgtgttcgcccacagcaccgtggtgcaccccgagagcagacaccacccccccagcaaccccagacagcagccccacctggacagcggcagcctgccccccggcagacagggccagcagcccagaagagacccccccagagagggcctgtggccccccccctacagacccagaagagacgccttcgagatcagcaccgagggccacagcggccccagcaacagagccagatggggccccagaggcgccagaagccacaaccccagaaaccccgccagcaccgccatgggcagcagcgtgcccggctactgccagcccatcaccaccgtgaccgccagcgccagcgtgaccgtggccgtgcaccccccccccgtgcccggccccggcagaaaccccagaggcggcctgtgccccggctaccccgagaccgaccacggcctgttcgaggacccccacgtgcccttccacgtgagatgcgagagaagagacagcaaggtggaggtgatcgagctgcaggacgtggagtgcgaggagagacccagaggcagcagcagcaactag

SEQ ID NO: 12044 - DNA, 4146 bp, synthetic construct; identical to SEQ ID NO: 12043
  misc_feature 1..4146: note = Description of Artificial Sequence: Synthetic coding sequence
  source 1..4146: mol_type = other DNA

SEQ ID NO: 12045 - DNA, 255 bp, synthetic construct
  misc_feature 1..255: note = Description of Artificial Sequence: Synthetic coding sequence
  source 1..255: mol_type = other DNA
atgggcaaggccaccggcagaaaggcccccctgtggctgagagccaagttccagagactgctgttcaagctgggctgctacatccagaagaactgcggcaagttcctggtggtgggcctgctgatcttcggcgccttcgccgtgggcctgaaggccgccaacctggagaccaacgtggaggagctgtgggtggaggaggtgaacctgctgtgcggcggccagaccagcaccctgtggaacagctggaagagctag

SEQ ID NO: 12046 - DNA, 525 bp, synthetic construct
  misc_feature 1..525: note = Description of Artificial Sequence: Synthetic coding sequence
  source 1..525: mol_type = other DNA
atgttcaacccccagctgatgatccagacccccaaggaggagggcgccaacgtgctgaccaccgaggccctgctgcagcacctggacagcgccctgcaggccagcagagtgcacgtgtacatgtacaacagacagtggaagctggagcacctgtgctacaagagcggcgagctgatcaccgagaccggctacatggaccagatcatcgagtacctgtacccctgcctgatcatcacccccctggactgcttctgggagggcgccaagctgcagagcggcaccgcctacctgctgggcaagccccccctgagatggaccaacttcgaccccctggagttcctggaggagctgaagaagatcaactaccaggtggacagctgggaggagatgctgaacaaggccgaggtgggccacggctacatggacagaccctgcctgaaccccgccgaccccgactgccccgccaccgcccccaacaagaacagcaccaagcccctggacatggccctggtgctgaacggctag

SEQ ID NO: 12047 - DNA, 525 bp, synthetic construct; identical to SEQ ID NO: 12046
  misc_feature 1..525: note = Description of Artificial Sequence: Synthetic coding sequence
  source 1..525: mol_type = other DNA

SEQ ID NO: 12048 - DNA, 279 bp, synthetic construct
  misc_feature 1..279: note = Description of Artificial Sequence: Synthetic coding sequence
  source 1..279: mol_type = other DNA
atgttcaacccccagctgatgatccagacccccaaggaggagggcgccaacgtgctgaccaccgaggccctgctgcagcacctggacagcgccctgcaggccagcagagtgcacgtgtacatgtacaacagacagtggaagctggagcacctgtgctacaagagcggcgagctgatcaccgagaccggctacatggaccagatcatcgagtacctgtacccctgcctgatcatcacccccctggactgcttctgggagggcgccaagctgcagagctag

SEQ ID NO: 12049 - DNA, 525 bp, synthetic construct; identical to SEQ ID NO: 12046
  misc_feature 1..525: note = Description of Artificial Sequence: Synthetic coding sequence
  source 1..525: mol_type = other DNA

SEQ ID NO: 12050 - DNA, 525 bp, synthetic construct; identical to SEQ ID NO: 12046
  misc_feature 1..525: note = Description of Artificial Sequence: Synthetic coding sequence
  source 1..525: mol_type = other DNA

SEQ ID NO: 12051 - DNA, 954 bp, synthetic construct
  misc_feature 1..954: note = Description of Artificial Sequence: Synthetic coding sequence
  source 1..954: mol_type = other DNA
atgcccagagaggacagagccacctggaagagcaactacttcctgaagatcatccagctgctggacgactaccccaagtgcttcatcgtgggcgccgacaacgtgggcagcaagcagatgcagcagatcagaatgagcctgagaggcaaggccgtggtgctgatgggcaagaacaccatgatgagaaaggccatcagaggccacctggagaacaaccccgccctggagaagctgctgccccacatcagaggcaacgtgggcttcgtgttcaccaaggaggacctgaccgagatcagagacatgctgctggccaacaaggtgcccgccgccgccagagccggcgccatcgccccctgcgaggtgaccgtgcccgcccagaacaccggcctgggccccgagaagaccagcttcttccaggccctgggcatcaccaccaagatcagcagaggcaccatcgagatcctgagcgacgtgcagctgatcaagaccggcgacaaggtgggcgccagcgaggccaccctgctgaacatgctgaacatcagccccttcagcttcggcctggtgatccagcaggtgttcgacaacggcagcatctacaaccccgaggtgctggacatcaccgaggagaccctgcacagcagattcctggagggcgtgagaaacgtggccagcgtgtgcctgcagatcggctaccccaccgtggccagcgtgccccacagcatcatcaacggctacaagagagtgctggccctgagcgtggagaccgactacaccttccccctggccgagaaggtgaaggccttcctggccgaccccagcgccttcgtggccgccgcccccgtggccgccgccaccaccgccgcccccgccgccgccgccgcccccgccaaggtggaggccaaggaggagagcgaggagagcgacgaggacatgggcttcggcctgttcgactag

SEQ ID NO: 12052 - DNA, 1818 bp, synthetic construct
  misc_feature 1..1818: note = Description of Artificial Sequence: Synthetic coding sequence
  source 1..1818: mol_type = other DNA
atggacgacctggacgccctgctggccgacctggagagcaccaccagccacatcagcaagagacccgtgttcctgagcgaggagaccccctacagctaccccaccggcaaccacacctaccaggagatcgccgtgcccccccccgtgccccccccccccagcagcgaggccctgaacggcaccatcctggaccccctggaccagtggcagcccagcagcagcagattcatccaccagcagccccagagcagcagccccgtgtacggcagcagcgccaagaccagcagcgtgagcaacccccaggacagcgtgggcagcccctgcagcagagtgggcgaggaggagcacgtgtacagcttccccaacaagcagaagagcgccgagcccagccccaccgtgatgagcaccagcctgggcagcaacctgagcgagctggacagactgctgctggagctgaacgccgtgcagcacaacccccccggcttccccgccgacgaggccaacagcagcccccccctgcccggcgccctgagccccctgtacggcgtgcccgagaccaacagccccctgggcggcaaggccggccccctgaccaaggagaagcccaagagaaacggcggcagaggcctggaggacgtgagacccagcgtggagagcctgctggacgagctggagagcagcgtgcccagccccgtgcccgccatcaccgtgaaccagggcgagatgagcagcccccagagagtgaccagcacccagcagcagaccagaatcagcgccagcagcgccaccagagagctggacgagctgatggccagcctgagcgacttcaagggcagctggcccctggaggaggtggtgctgctggtgagcatcagcagcagcgtgcaggagggcgagaagtacccccacccctgcgccgccagacacagaacccccagcctgagaagccccgaccagccccccccctgcccccagttcatggcccagggcaagaccggcagcagcagcccccccggcggcccccccaagcccggcagccagctggacagcatgctgggcagcctgcagagcgacctgaacaagctgggcgtggccaccgtggccaagggcgtgtgcggcgcctgcaagaagcccatcgccggccaggtggtgaccgccatgggcaagacctggcaccccgagcacttcgtgtgcacccactgccaggaggagatcggcagcagaaacttcttcgagagagacggccagccctactgcgagaaggactaccacaacctgttcagccccagatgctactactgcaacggccccatcctggacaaggtggtgaccgccctggacagaacctggcaccccgagcacttcttctgcgcccagtgcggcgccttcttcggccccgagggcttccacgagaaggacggcaaggcctactgcagaaaggactacttcgacatgttcgcccccaagtgcggcggctgcgccagagccatcctggagaactacatcagcgccctgaacaccctgtggcaccccgagtgcttcgtgtgcagagagtgcttcacccccttcgtgaacggcagcttcttcgagcacgacggccagccctactgcgaggtgcactaccacgagagaagaggcagcctgtgcagcggctgccagaagcccatcaccggcagatgcatcaccgccatggccaagaagttccaccccgagcacttcgtgtgcgccttctgcctgaagcagctgaacaagggcaccttcaaggagcagaacgacaagccctactgccagaactgcttcctgaagctgttctgctag

SEQ ID NO: 12053 - DNA, 702 bp, synthetic construct
  misc_feature 1..702: note = Description of Artificial Sequence: Synthetic coding sequence
  source 1..702: mol_type = other DNA
atgggcaagacctggcaccccgagcacttcgtgtgcacccactgccaggaggagatcggcagcagaaacttcttcgagagagacggccagccctactgcgagaaggactaccacaacctgttcagccccagatgctactactgcaacggccccatcctggacaaggtggtgaccgccctggacagaacctggcaccccgagcacttcttctgcgcccagtgcggcgccttcttcggccccgagggcttccacgagaaggacggcaaggcctactgcagaaaggactacttcgacatgttcgcccccaagtgcggcggctgcgccagagccatcctggagaactacatcagcgccctgaacaccctgtggcaccccgagtgcttcgtgtgcagagagtgcttcacccccttcgtgaacggcagcttcttcgagcacgacggccagccctactgcgaggtgcactaccacgagagaagaggcagcctgtgcagcggctgccagaagcccatcaccggcagatgcatcaccgccatggccaagaagttccaccccgacccctgcaccagccccagaaccggcctggccagcaccccccactggagccacctgttcctgatcttccagcagtgcagcagaggcgccggcaagggcagacagggcctgctgggcagcctgttcatcctgatccccccccccacctag

SEQ ID NO: 12054 - DNA, 1212 bp, synthetic construct
  misc_feature 1..1212: note = Description of Artificial Sequence: Synthetic coding sequence
  source 1..1212: mol_type = other DNA
atgagcgcccccagcagcaccggcccccagtactgccccggcctgcccagcagaaaggaggccacccccgagggcagacccgagacctgcctgctgcccagcagcccccaggcccagagacccatccagggcctggagcagagagccgacggcgagagatgctgggccgccggctggcccagagacggcggcagaagcagccccggcggccaggacgagggcggcggcagctggcccctggaggaggtggtgctgctggtgagcatcagcagcagcgtgcaggagggcgagaagtacccccacccctgcgccgccagacacagaacccccagcctgagaagccccgaccagccccccccctgcccccagttcatggcccagggcaagaccggcagcagcagcccccccggcggcccccccaagcccggcagccagctggacagcatgctgggcagcctgcagagcgacctgaacaagctgggcgtggccaccgtggccaagggcgtgtgcggcgcctgcaagaagcccatcgccggccaggtggtgaccgccatgggcaagacctggcaccccgagcacttcgtgtgcacccactgccaggaggagatcggcagcagaaacttcttcgagagagacggccagccctactgcgagaaggactaccacaacctgttcagccccagatgctactactgcaacggccccatcctggacaaggtggtgaccgccctggacagaacctggcaccccgagcacttcttctgcgcccagtgcggcgccttcttcggccccgagggcttccacgagaaggacggcaaggcctactgcagaaaggactacttcgacatgttcgcccccaagtgcggcggctgcgccagagccatcctggagaactacatcagcgccctgaacaccctgtggcaccccgagtgcttcgtgtgcagagagtgcttcacccccttcgtgaacggcagcttcttcgagcacgacggccagccctactgcgaggtgcactaccacgagagaagaggcagcctgtgcagcggctgccagaagcccatcaccggcagatgcatcaccgccatggccaagaagttccaccccgagcacttcgtgtgcgccttctgcctgaagcagctgaacaagggcaccttcaaggagcagaacgacaagccctactgccagaactgcttcctgaagctgttctgctag

SEQ ID NO: 12055 - DNA, 1674 bp, synthetic construct
  misc_feature 1..1674: note = Description of Artificial Sequence: Synthetic coding sequence
  source 1..1674: mol_type = other DNA
atggacgacctggacgccctgctggccgacctggagagcaccaccagccacatcagcaagagacccgtgttcctgagcgaggagaccccctacagctaccccaccggcaaccacacctaccaggagatcgccgtgcccccccccgtgccccccccccccagcagcgaggccctgaacggcaccatcctggaccccctggaccagtggcagcccagcagcagcagattcatccaccagcagccccagagcagcagccccgtgtacggcagcagcgccaagaccagcagcgtgagcaacccccaggacagcgtgggcagcccctgcagcagagtgggcgaggaggagcacgtgtacagcttccccaacaagcagaagagcgccgagcccagccccaccgtgatgagcaccagcctgggcagcaacctgagcgagctggacagactgctgctggagctgaacgccgtgcagcacaacccccccggcttccccgccgacgaggccaacagcagcccccccctgcccggcgccctgagccccctgtacggcgtgcccgagaccaacagccccctgggcggcaaggccggccccctgaccaaggagaagcccaagagaaacggcggcagaggcctggaggacgtgagacccagcgtggagagcctgctggacgagctggagagcagcgtgcccagccccgtgcccgccatcaccgtgaaccagggcgagatgagcagcccccagagagtgaccagcacccagcagcagaccagaatcagcgccagcagcgccaccagagagctggacgagctgatggccagcctgagcgacttcaagttcatggcccagggcaagaccggcagcagcagcccccccggcggcccccccaagcccggcagccagctggacagcatgctgggcagcctgcagagcgacctgaacaagctgggcgtggccaccgtggccaagggcgtgtgcggcgcctgcaagaagcccatcgccggccaggtggtgaccgccatgggcaagacctggcaccccgagcacttcgtgtgcacccactgccaggaggagatcggcagcagaaacttcttcgagagagacggccagccctactgcgagaaggactaccacaacctgttcagccccagatgctactactgcaacggccccatcctggacaaggtggtgaccgccctggacagaacctggcaccccgagcacttcttctgcgcccagtgcggcgccttcttcggccccgagggcttccacgagaaggacggcaaggcctactgcagaaaggactacttcgacatgttcgcccccaagtgcggcggctgcgccagagccatcctggagaactacatcagcgccctgaacaccctgtggcaccccgagtgcttcgtgtgcagagagtgcttcacccccttcgtgaacggcagcttcttcgagcacgacggccagccctactgcgaggtgcactaccacgagagaagaggcagcctgtgcagcggctgccagaagcccatcaccggcagatgcatcaccgccatggccaagaagttccaccccgagcacttcgtgtgcgccttctgcctgaagcagctgaacaagggcaccttcaaggagcagaacgacaagccctactgccagaactgcttcctgaagctgttctgctag

SEQ ID NO: 12056 - DNA, 1275 bp, synthetic construct
  misc_feature 1..1275: note = Description of Artificial Sequence: Synthetic coding sequence
  source 1..1275: mol_type = other DNA
atgagcaccagcctgggcagcaacctgagcgagctggacagactgctgctggagctgaacgccgtgcagcacaacccccccggcttccccgccgacgaggccaacagcagcccccccctgcccggcgccctgagccccctgtacggcgtgcccgagaccaacagccccctgggcggcaaggccggccccctgaccaaggagaagcccaagagaaacggcggcagaggcctggaggacgtgagacccagcgtggagagcctgctggacgagctggagagcagcgtgcccagccccgtgcccgccatcaccgtgaaccagggcgagatgagcagcccccagagagtgaccagcacccagcagcagaccagaatcagcgccagcagcgccaccagagagctggacgagctgatggccagcctgagcgacttcaagttcatggcccagggcaagaccggcagcagcagcccccccggcggcccccccaagcccggcagccagctggacagcatgctgggcagcctgcagagcgacctgaacaagctgggcgtggccaccgtggccaagggcgtgtgcggcgcctgcaagaagcccatcgccggccaggtggtgaccgccatgggcaagacctggcaccccgagcacttcgtgtgcacccactgccaggaggagatcggcagcagaaacttcttcgagagagacggccagccctactgcgagaaggactaccacaacctgttcagccccagatgctactactgcaacggccccatcctggacaaggtggtgaccgccctggacagaacctggcaccccgagcacttcttctgcgcccagtgcggcgccttcttcggccccgagggcttccacgagaaggacggcaaggcctactgcagaaaggactacttcgacatgttcgcccccaagtgcggcggctgcgccagagccatcctggagaactacatcagcgccctgaacaccctgtggcaccccgagtgcttcgtgtgcagagagtgcttcacccccttcgtgaacggcagcttcttcgagcacgacggccagccctactgcgaggtgcactaccacgagagaagaggcagcctgtgcagcggctgccagaagcccatcaccggcagatgcatcaccgccatggccaagaagttccaccccgagcacttcgtgtgcgccttctgcctgaagcagctgaacaagggcaccttcaaggagcagaacgacaagccctactgccagaactgcttcctgaagctgttctgctag

SEQ ID NO: 12057 - DNA, 951 bp, synthetic construct
  misc_feature 1..951: note = Description of Artificial Sequence: Synthetic coding sequence
  source 1..951: mol_type = other DNA
atgagcagcccccagagagtgaccagcacccagcagcagaccagaatcagcgccagcagcgccaccagagagctggacgagctgatggccagcctgagcgacttcaagttcatggcccagggcaagaccggcagcagcagcccccccggcggcccccccaagcccggcagccagctggacagcatgctgggcagcctgcagagcgacctgaacaagctgggcgtggccaccgtggccaagggcgtgtgcggcgcctgcaagaagcccatcgccggccaggtggtgaccgccatgggcaagacctggcaccccgagcacttcgtgtgcacccactgccaggaggagatcggcagcagaaacttcttcgagagagacggccagccctactgcgagaaggactaccacaacctgttcagccccagatgctactactgcaacggccccatcctggacaaggtggtgaccgccctggacagaacctggcaccccgagcacttcttctgcgcccagtgcggcgccttcttcggccccgagggcttccacgagaaggacggcaaggcctactgcagaaaggactacttcgacatgttcgcccccaagtgcggcggctgcgccagagccatcctggagaactacatcagcgccctgaacaccctgtggcaccccgagtgcttcgtgtgcagagagtgcttcacccccttcgtgaacggcagcttcttcgagcacgacggccagccctactgcgaggtgcactaccacgagagaagaggcagcctgtgcagcggctgccagaagcccatcaccggcagatgcatcaccgccatggccaagaagttccaccccgagcacttcgtgtgcgccttctgcctgaagcagctgaacaagggcaccttcaaggagcagaacgacaagccctactgccagaactgcttcctgaagctgttctgctag

SEQ ID NO: 12058 - DNA, 993 bp, synthetic construct
  misc_feature 1..993: note = Description of Artificial Sequence: Synthetic coding sequence
  source 1..993: mol_type = other DNA
atgccccacagcgtgaccctgagaggccccagcccctggggcttcagactggtgggcggcagagacttcagcgcccccctgaccatcagcagagtgcacgccggcagcaaggccgccctggccgccctgtgccccggcgacctgatccaggccatcaacggcgagagcaccgagctgatgacccacctggaggcccagaacagaatcaagggctgccacgaccacctgaccctgagcgtgagcagacccgagggcagaagctggcccagcgcccccgacgacagcaaggcccaggcccacagaatccacatcgaccccgagatccaggacggcagccccaccaccagcagaagacccagcggcaccggcaccggccccgaggacggcagacccagcctgggcagcccctacggccagccccccagattccccgtgccccacaacggcagcagcgaggccaccctgcccgcccagatgagcaccctgcacgtgagccccccccccagcgccgaccccgccagaggcctgcccagaagcagagactgcagagtggacctgggcagcgaggtgtacagaatgctgagagagcccgccgagcccgtggccgccgagcccaagcagagcggcagcttcagatacctgcagggcatgctggaggccggcgagggcggcgactggcccggccccggcggccccagaaacctgaagcccaccgccagcaagctgggcgcccccctgagcggcctgcagggcctgcccgagtgcaccagatgcggccacggcatcgtgggcaccatcgtgaaggccagagacaagctgtaccaccccgagtgcttcatgtgcagcgactgcggcctgaacctgaagcagagaggctacttcttcctggacgagagactgtactgcgagagccacgccaaggccagagtgaagccccccgagggctacgacgtggtggccgtgtaccccaacgccaaggtggagctggtgtag

SEQ ID NO: 12059 - DNA, 741 bp, synthetic construct
  misc_feature 1..741: note = Description of Artificial Sequence: Synthetic coding sequence
  source 1..741: mol_type = other DNA
atgccccacagcgtgaccctgagaggccccagcccctggggcttcagactggtgggcggcagagacttcagcgcccccctgaccatcagcagagtgcacgccggcagcaaggccgccctggccgccctgtgccccggcgacctgatccaggccatcaacggcgagagcaccgagctgatgacccacctggaggcccagaacagaatcaagggctgccacgaccacctgaccctgagcgtgagcagacccgagggcagaagctggcccagcgcccccgacgacagcaaggcccaggcccacagaatccacatcgaccccgagatccaggacggcagccccaccaccagcagaagacccagcggcaccggcaccggccccgaggacggcagacccagcctgggcagcccctacggccagccccccagattccccgtgccccacaacggcagcagcgaggccaccctgcccgcccagatgagcaccctgcacgtgagccccccccccagcgccgaccccgccagaggcctgcccagaagcagagactgcagagtggacctgggcagcgaggtgtacagaatgctgagagagcccgccgagcccgtggccgccgagcccaagcagagcggcagcttcagatacctgcagggcatgctggaggccggcgagggcggcgcccccagcagcagacacggcaccagcagcaccatccccagcgccagctgcgccgtgaccgccgcctag

SEQ ID NO: 12060 - DNA, 1791 bp, synthetic construct
  misc_feature 1..1791: note = Description of Artificial Sequence: Synthetic coding sequence
  source 1..1791: mol_type = other DNA
atgagcaactacagcgtgagcctggtgggccccgccccctggggcttcagactgcagggcggcaaggacttcaacatgcccctgaccatcagcagcctgaaggacggcggcaaggccgcccaggccaacgtgagaatcggcgacgtggtgctgagcatcgacggcatcaacgcccagggcatgacccacctggaggcccagaacaagatcaagggctgcaccggcagcctgaacatgaccctgcagagagccagcgccgcccccaagcccgagcccgtgcccgtgcagaagggcgagcccaaggaggtggtgaagcccgtgcccatcaccagccccgccgtgagcaaggtgaccagcaccaacaacatggcctacaacaaggcccccagacccttcggcagcgtgagcagccccaaggtgaccagcatccccagccccagcagcgccttcacccccgcccacgccaccaccagcagccacgccagccccagccccgtggccgccgtgaccccccccctgttcgccgccagcggcctgcacgccaacgccaacctgagcgccgaccagagccccagcgccctgagcgccggcaagaccgccgtgaacgtgcccagacagcccaccgtgaccagcgtgtgcagcgagaccagccaggagctggccgagggccagagaagaggcagccagggcgacagcaagcagcagaacggcccccccagaaagcacatcgtggagagatacaccgagttctaccacgtgcccacccacagcgacgccagcaagaagagactgatcgaggacaccgaggactggagacccagaaccggcaccacccagagcagaagcttcagaatcctggcccagatcaccggcaccgagcacctgaaggagagcgaggccgacaacaccaagaaggccaacaacagccaggagcccagcccccagctggccagcagcgtggccagcaccagaagcatgcccgagagcctggacagccccaccagcggcagacccggcgtgaccagcctgaccgccgccgccgccttcaagcccgtgggcagcaccggcgtgatcaagagccccagctggcagagacccaaccagggcgtgcccagcaccggcagaatcagcaacagcgccacctacagcggcagcgtggcccccgccaacagcgccctgggccagacccagcccagcgaccaggacaccctggtgcagagagccgagcacatccccgccggcaagagaacccccatgtgcgcccactgcaaccaggtgatcagaggccccttcctggtggccctgggcaagagctggcaccccgaggagttcaactgcgcccactgcaagaacaccatggcctacatcggcttcgtggaggagaagggcgccctgtactgcgagctgtgctacgagaagttcttcgcccccgagtgcggcagatgccagagaaagatcctgggcgaggtgatcagcgccctgaagcagacctggcacgtgagctgcttcgtgtgcgtggcctgcggcaagcccatcagaaacaacgtgttccacctggaggacggcgagccctactgcgagaccgactactacgccctgttcggcaccatctgccacggctgcgagttccccatcgaggccggcgacatgttcctggaggccctgggctacacctggcacgacacctgcttcgtgtgcagcgtgtgctgcgagagcctggagggccagaccttcttcagcaagaaggacaagcccctgtgcaagaagcacgcccacagcgtgaacttctag

SEQ ID NO: 12061 - DNA, 645 bp, synthetic construct
  misc_feature 1..645: note = Description of Artificial Sequence: Synthetic coding sequence
  source 1..645: mol_type = other DNA
atgagcaactacagcgtgagcctggtgggccccgccccctggggcttcagactgcagggcggcaaggacttcaacatgcccctgaccatcagcagcctgaaggacggcggcaaggccgcccaggccaacgtgagaatcggcgacgtggtgctgagcatcgacggcatcaacgcccagggcatgacccacctggaggcccagaacaagatcaagggctgcaccggcagcctgaacatgaccctgcagagagccagcgccgcccccaagcccgagcccgtgcccgtgcagaagaagacccaggtgaccaacaaccccggcaccgtgaagatcccccccaagagaccccccagaaagcacatcgtggagagatacaccgagttctaccacgtgcccacccacagcgacgccagcaagaagagactgatcgaggacaccgaggactggagacccagaaccggcaccacccagagcagaagcttcagaatcctggcccagatcaccggcaccgagcacctgaaggagagcgaggccgacaacaccaagaaggccaaggagaagatccccctgcacgtgttcagccccaagtacaccaagctgagagactggcaccacgaggtgagcgccagagccctgaacgtgcagtag

SEQ ID NO: 12062 - DNA, 705 bp, synthetic construct
  misc_feature 1..705: note = Description of Artificial Sequence: Synthetic coding sequence
  source 1..705: mol_type = other DNA
atgagcaactacagcgtgagcctggtgggccccgccccctggggcttcagactgcagggcggcaaggacttcaacatgcccctgaccatcagcagcctgaaggacggcggcaaggccgcccaggccaacgtgagaatcggcgacgtggtgctgagcatcgacggcatcaacgcccagggcatgacccacctggaggcccagaacaagatcaagggctgcaccggcagcctgaacatgaccctgcagagagccagcgccgcccccaagcccgagcccgtgcccgtgcagaagcccaccgtgaccagcgtgtgcagcgagaccagccaggagctggccgagggccagagaagaggcagccagggcgacagcaagcagcagaacggcaagatcccccccaagagaccccccagaaagcacatcgtggagagatacaccgagttctaccacgtgcccacccacagcgacgccagcaagaagagactgatcgaggacaccgaggactggagacccagaaccggcaccacccagagcagaagcttcagaatcctggcccagatcaccggcaccgagcacctgaaggagagcgaggccgacaacaccaagaaggccaaggagaagatccccctgcacgtgttcagccccaagtacaccaagctgagagactggcaccacgaggtgagcgccagagccctgaacgtgcagtag

SEQ ID NO: 12063 - DNA, 1464 bp, synthetic construct
  misc_feature 1..1464: note = Description of Artificial Sequence: Synthetic coding sequence
  source 1..1464: mol_type = other DNA
atgagcaactacagcgtgagcctggtgggccccgccccctggggcttcagactgcagggcggcaaggacttcaacatgcccctgaccatcagcagcctgaaggacggcggcaaggccgcccaggccaacgtgagaatcggcgacgtggtgctgagcatcgacggcatcaacgcccagggcatgacccacctggaggcccagaacaagatcaagggctgcaccggcagcctgaacatgaccctgcagagagccagcgccgcccccaagcccgagcccgtgcccgtgcagaagcccaccgtgaccagcgtgtgcagcgagaccagccaggagctggccgagggccagagaagaggcagccagggcgacagcaagcagcagaacggcccccccagaaagcacatcgtggagagatacaccgagttctaccacgtgcccacccacagcgacgccagcaagaagagactgatcgaggacaccgaggactggagacccagaaccggcaccacccagagcagaagcttcagaatcctggcccagatcaccggcaccgagcacctgaaggagagcgaggccgacaacaccaagaaggccaacaacagccaggagcccagcccccagctggccagcagcgtggccagcaccagaagcatgcccgagagcctggacagccccaccagcggcagacccggcgtgaccagcctgaccgccgccgccgccttcaagcccgtgggcagcaccggcgtgatcaagagccccagctggcagagacccaaccagggcgtgcccagcaccggcagaatcagcaacagcgccacctacagcggcagcgtggcccccgccaacagcgccctgggccagacccagcccagcgaccaggacaccctggtgcagagagccgagcacatccccgccggcaagagaacccccatgtgcgcccactgcaaccaggtgatcagaggccccttcctggtggccctgggcaagagctggcaccccgaggagttcaactgcgcccactgcaagaacaccatggcctacatcggcttcgtggaggagaagggcgccctgtactgcgagctgtgctacgagaagttcttcgcccccgagtgcggcagatgccagagaaagatcctgggcgaggtgatcagcgccctgaagcagacctggcacgtgagctgcttcgtgtgcgtggcctgcggcaagcccatcagaaacaacgtgttccacctggaggacggcgagccctactgcgagaccgactactacgccctgttcggcaccatctgccacggctgcgagttccccatcgaggccggcgacatgttcctggaggccctgggctacacctggcacgacacctgcttcgtgtgcagcgtgtgctgcgagagcctggagggccagaccttcttcagcaagaaggacaagcccctgtgcaagaagcacgcccacagcgtgaacttctag

SEQ ID NO: 12064 - DNA, 705 bp, synthetic construct
  misc_feature 1..705: note = Description of Artificial Sequence: Synthetic coding sequence
  source 1..705: mol_type = other DNA
atgagcaactacagcgtgagcctggtgggccccgccccctggggcttcagactgcagggcggcaaggacttcaacatgcccctgaccatcagcagcctgaaggacggcggcaaggccgcccaggccaacgtgagaatcggcgacgtggtgctgagcatcgacggcatcaacgcccagggcatgacccacctggaggcccagaacaagatcaagggctgcaccggcagcctgaacatgaccctgcagagagccagcgccgcccccaagcccgagcccgtgcccgtgcagaagcccaccgtgaccagcgtgtgcagcgagaccagccaggagctggccgagggccagagaagaggcagccagggcgacagcaagcagcagaacggccccgtgcccagaaagatcccccccagaaagcacatcgtggagagatacaccgagttctaccacgtgcccacccacagcgacgccagcaagaagagactgatcgaggacaccgaggactggagacccagaaccggcaccacccagagcagaagcttcagaatcctggcccagatcaccggcaccgagcacctgaaggagagcgaggccgacaacaccaagaaggccaaggagaagatccccctgcacgtgttcagccccaagtacaccaagctgagagactggcaccacgaggtgagcgccagagccctgaacgtgcagtag

SEQ ID NO: 12065 - DNA, 645 bp, synthetic construct
  misc_feature 1..645: note = Description of Artificial Sequence: Synthetic coding sequence
  source 1..645: mol_type = other DNA
atgagcaactacagcgtgagcctggtgggccccgccccctggggcttcagactgcagggcggcaaggacttcaacatgcccctgaccatcagcagcctgaaggacggcggcaaggccgcccaggccaacgtgagaatcggcgacgtggtgctgagcatcgacggcatcaacgcccagggcatgacccacctggaggcccagaacaagatcaagggctgcaccggcagcctgaacatgaccctgcagagagccagcgccgcccccaagcccgagcccgtgcccgtgcagaaggtgacccagaagagagagagcagaagcagcagaagaaccgcccccggcctgccccccagaaagcacatcgtggagagatacaccgagttctaccacgtgcccacccacagcgacgccagcaagaagagactgatcgaggacaccgaggactggagacccagaaccggcaccacccagagcagaagcttcagaatcctggcccagatcaccggcaccgagcacctgaaggagagcgaggccgacaacaccaagaaggccaaggagaagatccccctgcacgtgttcagccccaagtacaccaagctgagagactggcaccacgaggtgagcgccagagccctgaacgtgcagtag

SEQ ID NO: 12066 - DNA, 1425 bp, synthetic construct
  misc_feature 1..1425: note = Description of Artificial Sequence: Synthetic coding sequence
  source 1..1425: mol_type = other DNA
atggcctacaacaaggcccccagacccttcggcagcgtgagcagccccaaggtgaccagcatccccagccccagcagcgccttcacccccgcccacgccaccaccagcagccacgccagccccagccccgtggccgccgtgaccccccccctgttcgccgccagcggcctgcacgccaacgccaacctgagcgccgaccagagccccagcgccctgagcgccggcaagaccgccgtgaacgtgcccagacagcccaccgtgaccagcgtgtgcagcgagaccagccaggagctggccgagggccagagaagaggcagccagggcgacagcaagcagcagaacggcccccccagaaagcacatcgtggagagatacaccgagttctaccacgtgcccacccacagcgacgccagcaagaagagactgatcgaggacaccgaggactggagacccagaaccggcaccacccagagcagaagcttcagaatcctggcccagatcaccggcaccgagcacctgaaggagagcgaggccgacaacaccaagaaggccaacaacagccaggagcccagcccccagctggccagcagcgtggccagcaccagaagcatgcccgagagcctggacagccccaccagcggcagacccggcgtgaccagcctgaccgccgccgccgccttcaagcccgtgggcagcaccggcgtgatcaagagccccagctggcagagacccaaccagggcgtgcccagcaccggcagaatcagcaacagcgccacctacagcggcagcgtggcccccgccaacagcgccctgggccagacccagcccagcgaccaggacaccctggtgcagagagccgagcacatccccgccggcaagagaacccccatgtgcgcccactgcaaccaggtgatcagaggccccttcctggtggccctgggcaagagctggcaccccgaggagttcaactgcgcccactgcaagaacaccatggcctacatcggcttcgtggaggagaagggcgccctgtactgcgagctgtgctacgagaagttcttcgcccccgagtgcggcagatgccagagaaagatcctgggcgaggtgatcagcgccctgaagcagacctggcacgtgagctgcttcgtgtgcgtggcctgcggcaagcccatcagaaacaacgtgttccacctggaggacggcgagccctactgcgagaccgactactacgccctgttcggcaccatctgccacggctgcgagttccccatcgaggccggcgacatgttcctggaggccctgggctacacctggcacgacacctgcttcgtgtgcagcgtgtgctgcgagagcctggagggccagaccttcttcagcaagaaggacaagcccctgtgcaagaagcacgcccacagcgtgaacttctag

SEQ ID NO: 12067 - DNA, 411 bp, synthetic construct
  misc_feature 1..411: note = Description of Artificial Sequence: Synthetic coding sequence
  source 1..411: mol_type = other DNA
atgagcaactacagcgtgagcctggtgggccccgccccctggggcttcagactgcagggcggcaaggacttcaacatgcccctgaccatcagcagcgccggcgtgcagtggagaaacctgggcagcccccagccccccagccccgagttcaagagattcagctgcctgagcctgcccagcagctgggactacagacacgtgccccccagactggccaacttcgtgttcctggtggagaccaagttcccctacgtgggccaggccggcctggagctgcccaccagcggcgacctgcccaccagcgccagccagagcgccaagatcaccggcgtgagccacagagcctggcccaccctgttctacaccctgctgttcttcgccaccatctaccccgagatcatcctgtactag

SEQ ID NO: 12068 - DNA, 669 bp, synthetic construct
  misc_feature 1..669: note = Description of Artificial Sequence: Synthetic coding sequence
  source 1..669: mol_type = other DNA
atggacagcttcaaggtggtgctggagggccccgccccctggggcttcagactgcagggcggcaaggacttcaacgtgcccctgagcatcagcagactgacccccggcggcaaggccgcccaggccggcgtggccgtgggcgactgggtgctgagcatcgacggcgagaacgccggcagcctgacccacatcgaggcccagaacaagatcagagcctgcggcgagagactgagcctgggcctgagcagagcccagcccgtgcagagcaagccccagaaggccagcgcccccgccgccgacccccccagatacaccttcgcccccagcgtgagcctgaacaagaccgccagacccttcggcgcccccccccccgccgacagcgccccccagcagaacggccagcccctgagacccctggtgcccgacgccagcaagcagagactgatggagaacaccgaggactggagacccagacccggcaccggccagagcagaagcttcagaatcctggcccacctgaccggcaccgagttcatgcaggaccccgacgaggagcacctgaagaagagcagagagaagtacgtgctggagctgcagagccccagatacaccagactgagagactggcaccaccagagaagcgcccacgtgctgaacgtgcagagctag

SEQ ID NO: 12069 - DNA, 1374 bp, synthetic construct
  misc_feature 1..1374: note = Description of Artificial Sequence: Synthetic coding sequence
  source 1..1374: mol_type = other DNA
atggacagcttcaaggtggtgctggagggccccgccccctggggcttcagactgcagggcggcaaggacttcaacgtgcccctgagcatcagcagactgacccccggcggcaaggccgcccaggccggcgtggccgtgggcgactgggtgctgagcatcgacggcgagaacgccggcagcctgacccacatcgaggcccagaacaagatcagagcctgcggcgagagactgagcctgggcctgagcagagcccagcccgtgcagagcaagccccagaaggccagcgcccccgccgccgacccccccagatacaccttcgcccccagcgtgagcctgaacaagaccgccagacccttcggcgcccccccccccgccgacagcgccccccagcagaacggccagcccctgagacccctggtgcccgacgccagcaagcagagactgatggagaacaccgaggactggagacccagacccggcaccggccagagcagaagcttcagaatcctggcccacctgaccggcaccgagttcatgcaggaccccgacgaggagcacctgaagaagagcagccaggtgcccagaaccgaggcccccgcccccgccagcagcaccccccaggagccctggcccggccccaccgcccccagccccaccagcagacccccctgggccgtggaccccgccttcgccgagagatacgcccccgacaagaccagcaccgtgctgaccagacacagccagcccgccacccccacccccctgcagagcagaaccagcatcgtgcaggccgccgccggcggcgtgcccggcggcggcagcaacaacggcaagacccccgtgtgccaccagtgccacaaggtgatcagaggcagatacctggtggccctgggccacgcctaccaccccgaggagttcgtgtgcagccagtgcggcaaggtgctggaggagggcggcttcttcgaggagaagggcgccatcttctgccccccctgctacgacgtgagatacgcccccagctgcgccaagtgcaagaagaagatcaccggcgagatcatgcacgccctgaagatgacctggcacgtgcactgcttcacctgcgccgcctgcaagacccccatcagaaacagagccttctacatggaggagggcgtgccctactgcgagagagactacgagaagatgttcggcaccaagtgccacggctgcgacttcaagatcgacgccggcgacagattcctggaggccctgggcttcagctggcacgacacctgcttcgtgtgcgccatctgccagatcaacctggagggcaagaccttctacagcaagaaggacagacccctgtgcaagagccacgccttcagccacgtgtag

SEQ ID NO: 12070 - DNA, 864 bp, synthetic construct
  misc_feature 1..864: note = Description of Artificial Sequence: Synthetic coding sequence
  source 1..864: mol_type = other DNA
atggacagcttcaaggtggtgctggagggccccgccccctggggcttcagactgcagggcggcaaggacttcaacgtgcccctgagcatcagcagactgacccccggcggcaaggccgcccaggccggcgtggccgtgggcgactgggtgctgagcatcgacggcgagaacgccggcagcctgacccacatcgaggcccagaacaagatcagagcctgcggcgagagactgagcctgggcctgagcagagcccagcccgtgcagagcaagccccagaaggccagcgcccccgccgccgacccccccagatacaccttcgcccccagcgtgagcctgaacaagaccgccagacccttcggcgcccccccccccgccgacagcgccccccagcagaacggccagcccctgagacccctggtgcccgacgccagcaagcagagactgatggagaacaccgaggactggagacccagacccggcaccggccagagcagaagcttcagaatcctggcccacctgaccggcaccgagttcatgcaggaccccgacgaggagcacctgaagaagagcagaccctacagaccccagccctaccagccccccgccctgggctgcggcccctgcgtgtgcagagccctgtgccccggccagaacgagcacagcgccgaccccgcccagcccgccggccacgcccacgccgccgccgagccccacctgcactgcgccggcagctgcagaagaggcgccagaagaggccagcagcagagacaggacagcagagtgagccccgtgccccagggccaccccggccccctgcccggcggcgccggccccagagtgccccccggcggcgtgtgcgtgtag

SEQ ID NO: 12071 - DNA, 1272 bp, synthetic construct
  misc_feature 1..1272: note = Description of Artificial Sequence: Synthetic coding sequence
  source 1..1272: mol_type = other DNA
atggacagcttcaaggtggtgctggagggccccgccccctggggcttcagactgcagggcggcaaggacttcaacgtgcccctgagcatcagcagactgacccccggcggcaaggccgcccaggccggcgtggccgtgggcgactgggtgctgagcatcgacggcgagaacgccggcagcctgacccacatcgaggcccagaacaagatcagagcctgcggcgagagactgagcctgggcctgagcagagcccagcccgtgcagagcaagccccagaaggtgcagacccccgacaagcagcccctgagacccctggtgcccgacgccagcaagcagagactgatggagaacaccgaggactggagacccagacccggcaccggccagagcagaagcttcagaatcctggcccacctgaccggcaccgagttcatgcaggaccccgacgaggagcacctgaagaagagcagccaggtgcccagaaccgaggcccccgcccccgccagcagcaccccccaggagccctggcccggccccaccgcccccagccccaccagcagacccccctgggccgtggaccccgccttcgccgagagatacgcccccgacaagaccagcaccgtgctgaccagacacagccagcccgccacccccacccccctgcagagcagaaccagcatcgtgcaggccgccgccggcggcgtgcccggcggcggcagcaacaacggcaagacccccgtgtgccaccagtgccacaaggtgatcagaggcagatacctggtggccctgggccacgcctaccaccccgaggagttcgtgtgcagccagtgcggcaaggtgctggaggagggcggcttcttcgaggagaagggcgccatcttctgccccccctgctacgacgtgagatacgcccccagctgcgccaagtgcaagaagaagatcaccggcgagatcatgcacgccctgaagatgacctggcacgtgcactgcttcacctgcgccgcctgcaagacccccatcagaaacagagccttctacatggaggagggcgtgccctactgcgagagagactacgagaagatgttcggcaccaagtgccacggctgcgacttcaagatcgacgccggcgacagattcctggaggccctgggcttcagctggcacgacacctgcttcgtgtgcgccatctgccagatcaacctggagggcaagaccttctacagcaagaaggacagacccctgtgcaagagccacgccttcagccacgtgtag

SEQ ID NO: 12072 - DNA, 522 bp, synthetic construct
  misc_feature 1..522: note = Description of Artificial Sequence: Synthetic coding sequence
  source 1..522: mol_type = other DNA
atggacagcttcaaggtggtgctggagggccccgccccctggggcttcagactgcagggcggcaaggacttcaacgtgcccctgagcatcagcagactgacccccggcggcaaggccgcccaggccggcgtggccgtgggcgactgggtgctgagcatcgacggcgagaacgccggcagcctgacccacatcgaggcccagaacaagatcagagcctgcggcgagagactgagcctgggcctgagcagagcccagcccgtgcagagcaagccccagaaggccagcgcccccgccgccgacccccccagatacaccttcgcccccagcgtgagcctgaacaagaccgccagacccttcggcgcccccccccccgccgacagcgccccccagcagaacggccagcccctgagacccctggtgcccgacgccagcaagcagagactgatggagaacaccgaggactggagacccagacccggcaccggccagagcagaagcttcagaatcctggcccacctgtag

SEQ ID NO: 12073 - DNA, 273 bp, synthetic construct
  misc_feature 1..273: note = Description of Artificial Sequence: Synthetic coding sequence
  source 1..273: mol_type = other DNA
atggacagcttcaaggtggtgctggagggccccgccccctggggcttcagactgcagggcggcaaggacttcaacgtgcccctgagcatcagcagactgacccccggcggcaaggccgcccaggccggcgtggccgtgggcgactgggtgctgagcatcgacggcgagaacgccggcagcctgacccacatcgaggcccagaacaagatcagagcctgcggcgagagactgagcctgggcctgagcagagcccagcccgtgcagagcaagtag

SEQ ID NO: 12074 - DNA, 492 bp, synthetic construct
  misc_feature 1..492: note = Description of Artificial Sequence: Synthetic coding sequence
  source 1..492: mol_type = other DNA
atggccgacgaggagaagctgccccccggctgggagaagagaatgagcagaagcagcggcagagtgtactacttcaaccacatcaccaacgccagccagtgggagagacccagcggcaacagcagcagcggcggcaagaacggccagggcgagcccgccagagtgagatgcagccacctgctggtgaagcacagccagagcagaagacccagcagctggagacaggagaagatcaccagaaccaaggaggaggccctggagctgatcaacggctacatccagaagatcaagagcggcgaggaggacttcgagagcctggccagccagttcagcgactgcagcagcgccaaggccagaggcgacctgggcgccttcagcagaggccagatgcagaagcccttcgaggacgccagcttcgccctgagaaccggcgagatgagcggccccgtgttcaccgacagcggcatccacatcatcctgagaaccgagtag

SEQ ID NO: 12075 - DNA, 138 bp, synthetic construct
  misc_feature 1..138: note = Description of Artificial Sequence: Synthetic coding sequence
  source 1..138: mol_type = other DNA
atgcagaagcccttcgaggacgccagcttcgccctgagaaccggcgagatgagcggccccgtgttcaccgacagcggcatccacatcatcctgagaaccgagtgctggagacagaccagaggccccaactgcttctag

SEQ ID NO: 12076 - DNA, 438 bp, synthetic construct
  misc_feature 1..438: note = Description of Artificial Sequence: Synthetic coding sequence
  source 1..438: mol_type = other DNA
atggccgacgaggagaagctgccccccggctgggagaagagaatgagcagaagcagcggcagagtgtactacttcaaccacatcaccaacgccagccagtgggagagacccagcggcaacagcagcagcggcggcaagaacggccagggcgagcccgccagagtgagatgcagccacctgctggtgaagcacagccagagcagaagacccagcagctggagacaggagaagatcaccagaaccaaggaggaggccctggagctgatcaacggctacatccagaagatcaagagcggcgaggaggacttcgagagcctggccagccagttcagcgactgcagcagcgccaaggccagaggcgacctgggcgccttcagcagaggcgcccagggcatgggcctgaccagactgggcgacccctaccaccccgagggctag

SEQ ID NO: 12077 - DNA, 561 bp, synthetic construct
  misc_feature 1..561: note = Description of Artificial Sequence: Synthetic coding sequence
  source 1..561: mol_type = other DNA
atgaccatggtggacaccgagatgcccttctggcccaccaacttcggcatcagcagcgtggacctgagcgtgatggaggaccacagccacagcttcgacatcaagcccttcaccaccgtggacttcagcagcatcagcaccccccactacgaggacatccccttcaccagaaccgaccccgtggtggccgactacaagtacgacctgaagctgcaggagtaccagagcgccatcaaggtggagcccgccagccccccctactacagcgagaagacccagctgtacaacaagccccacgaggagcccagcaacagcctgatggccatcgagtgcagagtgtgcggcgacaaggccagcggcttccactacggcgtgcacgcctgcgagggctgcaagggcttcttcagaagaaccatcagactgaagctgatctacgacagatgcgacctgaactgcagaatccacaagaagagcagaaacaagtgccagtactgcagattccagaagtgcctggccgtgggcatgagccacaacgaggagctgcagaaggacagctactag

SEQ ID NO: 12078 - DNA, 1752 bp, synthetic construct
  misc_feature 1..1752: note = Description of Artificial Sequence: Synthetic coding sequence
  source 1..1752: mol_type = other DNA
atgggcggcctggagaagaagaagtacgagagaggcagcgccaccaactacatcaccagaaacaaggccagaaagaagctgcagctgagcctggccgacttcagaagactgtgcatcctgaagggcatctacccccacgagcccaagcacaagaagaaggtgaacaagggcagcaccgccgccagaaccttctacctgatcaaggacatcagattcctgctgcacgagcccatcgtgaacaagttcagagagtacaaggtgttcgtgagaaagctgagaaaggcctacggcaagagcgagtggaacaccgtggagagactgaaggacaacaagcccaactacaagctggaccacatcatcaaggagagataccccaccttcatcgacgccctgagagacctggacgacgccctgagcatgtgcttcctgttcagcaccttccccagaaccggcaagtgccacgtgcagaccatccagctgtgcagaagactgaccgtggagttcatgcactacatcatcgccgccagagccctgagaaaggtgttcctgagcatcaagggcatctactaccaggccgaggtgctgggccagcccatcgtgtggatcaccccctacgccttcagccacgaccaccccaccgacgtggactacagagtgatggccaccttcaccgagttctacaccaccctgctgggcttcgtgaacttcagactgtaccagctgctgaacctgcactacccccccaagctggagggccaggcccaggccgaggccaaggccggcgagggcacctacgccctggacagcgagagctgcatggagaagctggccgccctgagcgccagcctggccagagtggtggtgcccgccaccgaggaggaggccgaggtggacgagttccccaccgacggcgaggaggacagaagaaaggagctggaggcccaggagaagcacaagaagctgttcgagggcctgaagttcttcctgaacagagaggtgcccagagaggccctggccttcatcatcagaagcttcggcggcgaggtgagctgggacaagagcctgtgcatcggcgccacctacgacgtgaccgacagcagaatcacccaccagatcgtggacagacccggccagcagaccagcgtgatcggcagatgctacgtgcagccccagtgggtgttcgacagcgtgaacgccagactgctgctgcccgtggccgagtacttcagcggcgtgcagctgcccccccacctgagccccttcgtgaccgagaaggagggcgactacgtgccccccgagaagctgaagctgctggccctgcagagaggcgaggaccccggcaacctgaacgagagcgaggaggaggaggaggaggacgacaacaacgagggcgacggcgacgaggagggcgagaacgaggaggaggaggaggacgccgaggccggcagcgagaaggaggaggaggccagactggccgccctggaggagcagagaatggagggcaagaagcccagagtgatggccggcaccctgaagctggaggacaagcagagactggcccaggaggaggagagcgaggccaagagactggccatcatgatgatgaagaagagagagaagtacctgtaccagaagatcatgttcggcaagagaagaaagatcagagaggccaacaagctggccgagaagagaaaggcccacgacgaggccgtgagaagcgagaagaaggccaagaaggccagacccgagtag

SEQ ID NO: 12079 - DNA, 1767 bp, synthetic construct
  misc_feature 1..1767: note = Description of Artificial Sequence: Synthetic coding sequence
  source 1..1767: mol_type = other DNA
atgggcggcctggagaagaagaagtacgagagaggcagcgccaccaactacatcaccagaaacaaggccagaaagaagctgcagctgagcctggccgacttcagaagactgtgcatcctgaagggcatctacccccacgagcccaagcacaagaagaaggtgaacaagggcagcaccgccgccagaaccttctacctgatcaaggacatcagattcctgctgcacgagcccatcgtgaacaagttcagagagtacaaggtgttcgtgagaaagctgagaaaggcctacggcaagagcgagtggaacaccgtggagagactgaaggacaacaagcccaactacaagctggaccacatcatcaaggagagataccccaccttcatcgacgccctgagagacctggacgacgccctgagcatgtgcttcctgttcagcaccttccccagaaccggcaagtgccacgtgcagaccatccagctgtgcagaagactgaccgtggagttcatgcactacatcatcgccgccagagccctgagaaaggtgttcctgagcatcaagggcatctactaccaggccgaggtgctgggccagcccatcgtgtggatcaccccctacgccttcagccacgaccaccccaccgacgtggactacagagtgatggccaccttcaccgagttctacaccaccctgctgggcttcgtgaacttcagactgtaccagctgctgaacctgcactacccccccaagctggagggccaggcccaggccgaggccaaggccggcgagggcacctacgccctggacagcgagagctgcatggagaagctggccgccctgagcgccagcctggccagagtggtggtgcccgccaccgaggaggaggccgaggtggacgagttccccaccgacggcgagatgagcgcccaggaggaggacagaagaaaggagctggaggcccaggagaagcacaagaagctgttcgagggcctgaagttcttcctgaacagagaggtgcccagagaggccctggccttcatcatcagaagcttcggcggcgaggtgagctgggacaagagcctgtgcatcggcgccacctacgacgtgaccgacagcagaatcacccaccagatcgtggacagacccggccagcagaccagcgtgatcggcagatgctacgtgcagccccagtgggtgttcgacagcgtgaacgccagactgctgctgcccgtggccgagtacttcagcggcgtgcagctgcccccccacctgagccccttcgtgaccgagaaggagggcgactacgtgccccccgagaagctgaagctgctggccctgcagagaggcgaggaccccggcaacctgaacgagagcgaggaggaggaggaggaggacgacaacaacgagggcgacggcgacgaggagggcgagaacgaggaggaggaggaggacgccgaggccggcagcgagaaggaggaggaggccagactggccgccctggaggagcagagaatggagggcaagaagcccagagtgatggccggcaccctgaagctggaggacaagcagagactggcccaggaggaggagagcgaggccaagagactggccatcatgatgatgaagaagagagagaagtacctgtaccagaagatcatgttcggcaagagaagaaagatcagagaggccaacaagctggccgagaagagaaaggcccacgacgaggccgtgagaagcgagaagaaggccaagaaggccagacccgagtag

SEQ ID NO: 12080 - DNA, 1350 bp, synthetic construct
  misc_feature 1..1350: note = Description of Artificial Sequence: Synthetic coding sequence
  source 1..1350: mol_type = other DNA
atgtgcttcctgttcagcaccttccccagaaccggcaagtgccacgtgcagaccatccagctgtgcagaagactgaccgtggagttcatgcactacatcatcgccgccagagccctgagaaaggtgttcctgagcatcaagggcatctactaccaggccgaggtgctgggccagcccatcgtgtggatcaccccctacgccttcagccacgaccaccccaccgacgtggactacagagtgatggccaccttcaccgagttctacaccaccctgctgggcttcgtgaacttcagactgtaccagctgctgaacctgcactacccccccaagctggagggccaggcccaggccgaggccaaggccggcgagggcacctacgccctggacagcgagagctgcatggagaagctggccgccctgagcgccagcctggccagagtggtggtgcccgccaccgaggaggaggccgaggtggacgagttccccaccgacggcgagatgagcgcccaggaggaggacagaagaaaggagctggaggcccaggagaagcacaagaagctgttcgagggcctgaagttcttcctgaacagagaggtgcccagagaggccctggccttcatcatcagaagcttcggcggcgaggtgagctgggacaagagcctgtgcatcggcgccacctacgacgtgaccgacagcagaatcacccaccagatcgtggacagacccggccagcagaccagcgtgatcggcagatgctacgtgcagccccagtgggtgttcgacagcgtgaacgccagactgctgctgcccgtggccgagtacttcagcggcgtgcagctgcccccccacctgagccccttcgtgaccgagaaggagggcgactacgtgccccccgagaagctgaagctgctggccctgcagagaggcgaggaccccggcaacctgaacgagagcgaggaggaggaggaggaggacgacaacaacgagggcgacggcgacgaggagggcgagaacgaggaggaggaggaggacgccgaggccggcagcgagaaggaggaggaggccagactggccgccctggaggagcagagaatggagggcaagaagcccagagtgatggccggcaccctgaagctggaggacaagcagagactggcccaggaggaggagagcgaggccaagagactggccatcatgatgatgaagaagagagagaagtacctgtaccagaagatcatgttcggcaagagaagaaagatcagagaggccaacaagctggccgagaagagaaaggcccacgacgaggccgtgagaagcgagaagaaggccaagaaggccagacccgagtag

SEQ ID NO: 12081 - DNA, 1350 bp, synthetic construct; identical to SEQ ID NO: 12080
  misc_feature 1..1350: note = Description of Artificial Sequence: Synthetic coding sequence
  source 1..1350: mol_type = other DNA

SEQ ID NO: 12082 - DNA, 5154 bp, synthetic construct
  misc_feature 1..5154: note = Description of Artificial Sequence: Synthetic coding sequence
  source 1..5154: mol_type = other DNA
atggagcccgccgccgccgccaccgtgcagagactgcccgagctgggcagagaggacagagccagcgcccccgccgccgccgccgccgccgccgccgccgccgccgccgccgccgccgccctggccgccgccgccggcggcggcagaagccccgagcccgccctgacccccgccgcccccagcggcggcaacggcagcggcagcggcgccagagaggaggcccccggcgaggccccccccggccccctgcccggcagagccggcggcgccggcagaagaagaagaagaggcgccccccagcccatcgccggcggcgccgcccccgtgcccggcgccggcggcggcgccaacagcctgctgctgagaagaggcagactgaagagaaacctgagcgccgccgccgccgccgccagcagcagcagcagcagcagcgccgccgccgccagccacagccccggcgccgccggcctgcccgccagctgcagcgccagcgccagcctgtgcaccagaagcctggacagaaagaccctgctgctgaagcacagacagaccctgcagctgcagcccagcgacagagactgggtgagacaccagctgcagagaggctgcgtgcacgtgttcgacagacacatggccagcacctacctgagacccgtgctgtgcaccctggacaccaccgccggcgaggtggccgccagactgctgcagctgggccacaagggcggcggcgtggtgaaggtgctgggccagggccccggcgccgccgccgccagagagcccgccgagcccccccccgaggccggccccagactggccccccccgagcccagagacagcgaggtgccccccgccagaagcgcccccggcgccttcggcggcccccccagagccccccccgccgacctgcccctgcccgtgggcggccccggcggctggagcagaagagccagccccgcccccagcgacagcagccccggcgagcccttcgtgggcggccccgtgagcagccccagagcccccagacccgtggtgagcgacaccgagagcttcagcctgagccccagcgccgagagcgtgagcgacagactggacccctacagcagcggcggcggcagcagcagcagcagcgaggagctggaggccgacgccgccagcgcccccaccggcgtgcccggccagcccagaagacccggccaccccgcccagcccctgcccctgccccagaccgccagcagcccccagccccagcagaaggcccccagagccatcgacagccccggcggcgccgtgagagagggcagctgcgaggagaaggccgccgccgccgtggcccccggcggcctgcagagcacccccggcagaagcggcgtgaccgccgagaaggcccccccccccccccccccccccaccctgtacgtgcagctgcacggcgagaccaccagaagactggaggccgaggagaagcccctgcagatccagaacgactacctgttccagctgggcttcggcgagctgtggagagtgcaggaggagggcatggacagcgagatcggctgcctgatcagattctacgccggcaagccccacagcaccggcagcagcgagagaatccagctgagcggcatgtacaacgtgagaaagggcaagatgcagctgcccgtgaacagatggaccagaagacaggtgatcctgtgcggcacctgcctgatcgtgagcagcgtgaaggacagcctgaccggcaagatgcacgtgctgcccctgatcggcggcaaggtggaggaggtgaagaagcaccagcactgcctggccttcagcagcagcggcccccagagccagacctactacatctgcttcgacaccttcaccgagtacctgagatggctgagacaggtgagcaaggtggccagccagagaatcagcagcgtggacctgagctgctgcagcctggagcacctgcccgccaacctgttctacagccaggacctgacccacctgaacctgaagcagaacttcctgagacagaaccccagcctgcccgccgccagaggcctgaacgagctgcagagattcaccaagctgaagagcctgaacctgagcaacaaccacctgggcgacttccccctggccgtgtgcagcatccccaccctggccgagctgaacgtgagctgcaacgccctgagaagcgtgcccgccgccgtgggcgtgatgcacaacctgcagaccttcctgctggacggcaacttcctgcagagcctgcccgccgagctggagaacatgaagcagctgagctacctgggcctgagcttcaacgagttcaccgacatccccgaggtgctggagaagctgaccgccgtggacaagctgtgcatgagcggcaactgcgtggagaccctgagactgcaggccctgagaaagatgccccacatcaagcacgtggacctgagactgaacgtgatcagaaagctgatcgccgacgaggtggacttcctgcagcacgtgacccagctggacctgagagacaacaagctgggcgacctggacgccatgatcttcaacaacatcgaggtgctgcactgcgagagaaaccagctggtgaccctggacatctgcggctacttcctgaaggccctgtacgccagcagcaacgagctggtgcagctggacgtgtaccccgtgcccaactacctgagctacatggacgtgagcagaaacagactggagaacgtgcccgagtgggtgtgcgagagcagaaagctggaggtgctggacatcggccacaaccagatctgcgagctgcccgccagactgttctgcaacagcagcctgagaaagctgctggccggccacaaccagctggccagactgcccgagagactggagagaaccagcgtggaggtgctggacgtgcagcacaaccagctgctggagctgccccccaacctgctgatgaaggccgacagcctgagattcctgaacgccagcgccaacaagctggagagcctgccccccgccaccctgagcgaggagaccaacagcatcctgcaggagctgtacctgaccaacaacagcctgaccgacaagtgcgtgcccctgctgaccggccacccccacctgaagatcctgcacatggcctacaacagactgcagagcttccccgccagcaagatggccaagctggaggagctggaggagatcgacctgagcggcaacaagctgaaggccatccccaccaccatcatgaactgcagaagaatgcacaccgtgatcgcccacagcaactgcatcgaggtgttccccgaggtgatgcagctgcccgagatcaagtgcgtggacctgagctgcaacgagctgagcgaggtgaccctgcccgagaacctgccccccaagctgcaggagctggacctgaccggcaaccccagactggtgctggaccacaagaccctggagctgctgaacaacatcagatgcttcaagatcgaccagcccagcaccggcgacgccagcggcgcccccgccgtgtggagccacggctacaccgaggccagcggcgtgaagaacaagctgtgcgtggccgccctgagcgtgaacaacttctgcgacaacagagaggccctgtacggcgtgttcgacggcgacagaaacgtggaggtgccctacctgctgcagtgcaccatgagcgacatcctggccgaggagctgcagaagaccaagaacgaggaggagtacatggtgaacaccttcatcgtgatgcagagaaagctgggcaccgccggccagaagctgggcggcgccgccgtgctgtgccacatcaagcacgaccccgtggaccccggcggcagcttcaccctgaccagcgccaacgtgggcaagtgccagaccgtgctgtgcagaaacggcaagcccctgcccctgagcagaagctacatcatgagctgcgaggaggagctgaagagaatcaagcagcacaaggccatcatcaccgaggacggcaaggtgaacggcgtgaccgagagcaccagaatcctgggctacaccttcctgcaccccagcgtggtgcccagaccccacgtgcagagcgtgctgctgaccccccaggacgagttcttcatcctgggcagcaagggcctgtgggacagcctgagcgtggaggaggccgtggaggccgtgagaaacgtgcccgacgccctggccgccgccaagaagctgtgcaccctggcccagagctacggctgccacgacagcatcagcgccgtggtggtgcagctgagcgtgaccgaggacagcttctgctgctgcgagctgagcgccggcggcgccgtgcccccccccagccccggcatcttcccccccagcgtgaacatggtgatcaaggacagacccagcgacggcctgggcgtgcccagcagcagcagcggcatggccagcgagatcagcagcgagctgagcaccagcgagatgagcagcgaggtgggcagcaccgccagcgacgagcccccccccggcgccctgagcgagaacagccccgcctaccccagcgagcagagatgcatgctgcaccccatctgcctgagcaacagcttccagagacagctgagcagcgccaccttcagcagcgccttcagcgacaacggcctggacagcgacgacgaggagcccatcgagggcgtgttcaccaacggcagcagagtggaggtggaggtggacatccactgcagcagagccaaggagaaggagaagcagcagcacctgctgcaggtgcccgccgaggccagcgacgagggcatcgtgatcagcgccaacgaggacgagcccggcctgcccagaaaggccgacttcagcgccgtgggcaccatcggcagaagaagagccaacggcagcgtggccccccaggagagaagccacaacgtgatcgaggtggccaccgacgcccccctgagaaagcccggcggctacttcgccgcccccgcccagcccgaccccgacgaccagttcatcatcccccccgagctggaggaggaggtgaaggagatcatgaagcaccaccaggagcagcagcagcagcagcagccccccccccccccccagctgcagccccagctgcccagacactaccagctggaccagctgcccgactactacgacacccccctgtag

SEQ ID NO: 12083 - DNA, 3618 bp, synthetic construct
  misc_feature 1..3618: note = Description of Artificial Sequence: Synthetic coding sequence
  source 1..3618: mol_type = other DNA
atggacagcgagatcggctgcctgatcagattctacgccggcaagccccacagcaccggcagcagcgagagaatccagctgagcggcatgtacaacgtgagaaagggcaagatgcagctgcccgtgaacagatggaccagaagacaggtgatcctgtgcggcacctgcctgatcgtgagcagcgtgaaggacagcctgaccggcaagatgcacgtgctgcccctgatcggcggcaaggtggaggaggtgaagaagcaccagcactgcctggccttcagcagcagcggcccccagagccagacctactacatctgcttcgacaccttcaccgagtacctgagatggctgagacaggtgagcaaggtggccagccagagaatcagcagcgtggacctgagctgctgcagcctggagcacctgcccgccaacctgttctacagccaggacctgacccacctgaacctgaagcagaacttcctgagacagaaccccagcctgcccgccgccagaggcctgaacgagctgcagagattcaccaagctgaagagcctgaacctgagcaacaaccacctgggcgacttccccctggccgtgtgcagcatccccaccctggccgagctgaacgtgagctgcaacgccctgagaagcgtgcccgccgccgtgggcgtgatgcacaacctgcagaccttcctgctggacggcaacttcctgcagagcctgcccgccgagctggagaacatgaagcagctgagctacctgggcctgagcttcaacgagttcaccgacatccccgaggtgctggagaagctgaccgccgtggacaagctgtgcatgagcggcaactgcgtggagaccctgagactgcaggccctgagaaagatgccccacatcaagcacgtggacctgagactgaacgtgatcagaaagctgatcgccgacgaggtggacttcctgcagcacgtgacccagctggacctgagagacaacaagctgggcgacctggacgccatgatcttcaacaacatcgaggtgctgcactgcgagagaaaccagctggtgaccctggacatctgcggctacttcctgaaggccctgtacgccagcagcaacgagctggtgcagctggacgtgtaccccgtgcccaactacctgagctacatggacgtgagcagaaacagactggagaacgtgcccgagtgggtgtgcgagagcagaaagctggaggtgctggacatcggccacaaccagatctgcgagctgcccgccagactgttctgcaacagcagcctgagaaagctgctggccggccacaaccagctggccagactgcccgagagactggagagaaccagcgtggaggtgctggacgtgcagcacaaccagctgctggagctgccccccaacctgctgatgaaggccgacagcctgagattcctgaacgccagcgccaacaagctggagagcctgccccccgccaccctgagcgaggagaccaacagcatcctgcaggagctgtacctgaccaacaacagcctgaccgacaagtgcgtgcccctgctgaccggccacccccacctgaagatcctgcacatggcctacaacagactgcagagcttccccgccagcaagatggccaagctggaggagctggaggagatcgacctgagcggcaacaagctgaaggccatccccaccaccatcatgaactgcagaagaatgcacaccgtgatcgcccacagcaactgcatcgaggtgttccccgaggtgatgcagctgcccgagatcaagtgcgtggacctgagctgcaacgagctgagcgaggtgaccctgcccgagaacctgccccccaagctgcaggagctggacctgaccggcaaccccagactggtgctggaccacaagaccctggagctgctgaacaacatcagatgcttcaagatcgaccagcccagcaccggcgacgccagcggcgcccccgccgtgtggagccacggctacaccgaggccagcggcgtgaagaacaagctgtgcgtggccgccctgagcgtgaacaacttctgcgacaacagagaggccctgtacggcgtgttcgacggcgacagaaacgtggaggtgccctacctgctgcagtgcaccatgagcgacatcctggccgaggagctgcagaagaccaagaacgaggaggagtacatggtgaacaccttcatcgtgatgcagagaaagctgggcaccgccggccagaagctgggcggcgccgccgtgctgtgccacatcaagcacgaccccgtggaccccggcggcagcttcaccctgaccagcgccaacgtgggcaagtgccagaccgtgctgtgcagaaacggcaagcccctgcccctgagcagaagctacatcatgagctgcgaggaggagctgaagagaatcaagcagcacaaggccatcatcaccgaggacggcaaggtgaacggcgtgaccgagagcaccagaatcctgggctacaccttcctgcaccccagcgtggtgcccagaccccacgtgcagagcgtgctgctgaccccccaggacgagttcttcatcctgggcagcaagggcctgtgggacagcctgagcgtggaggaggccgtggaggccgtgagaaacgtgcccgacgccctggccgccgccaagaagctgtgcaccctggcccagagctacggctgccacgacagcatcagcgccgtggtggtgcagctgagcgtgaccgaggacagcttctgctgctgcgagctgagcgccggcggcgccgtgcccccccccagccccggcatcttcccccccagcgtgaacatggtgatcaaggacagacccagcgacggcctgggcgtgcccagcagcagcagcggcatggccagcgagatcagcagcgagctgagcaccagcgagatgagcagcgaggtgggcagcaccgccagcgacgagcccccccccggcgccctgagcgagaacagccccgcctaccccagcgagcagagatgcatgctgcaccccatctgcctgagcaacagcttccagagacagctgagcagcgccaccttcagcagcgccttcagcgacaacggcctggacagcgacgacgaggagcccatcgagggcgtgttcaccaacggcagcagagtggaggtggaggtggacatccactgcagcagagccaaggagaaggagaagcagcagcacctgctgcaggtgcccgccgaggccagcgacgagggcatcgtgatcagcgccaacgaggacgagcccggcctgcccagaaaggccgacttcagcgccgtgggcaccatcggcagaagaagagccaacggcagcgtggccccccaggagagaagccacaacgtgatcgaggtggccaccgacgcccccctgagaaagcccggcggctacttcgccgcccccgcccagcccgaccccgacgaccagttcatcatcccccccgagctggaggaggaggtgaaggagatcatgaagcaccaccaggagcagcagcagcagcagcagccccccccccccccccagctgcagccccagctgcccagacactaccagctggaccagctgcccgactactacgacacccccctgtag

SEQ ID NO: 12084 - DNA, 2379 bp, synthetic construct
  misc_feature 1..2379: note = Description of Artificial Sequence: Synthetic coding sequence
  source 1..2379: mol_type = other DNA
atgcacatcctgcccctggtgggcggcaagatcgaggaggtgaagagaagacagtacagcctggccttcagcagcgccggcgcccaggcccagacctaccacgtgagcttcgagaccctggccgagtaccagagatggcagagacaggccagcaaggtggtgagccagagaatcagcaccgtggacctgagctgctacagcctggaggaggtgcccgagcacctgttctacagccaggacatcacctacctgaacctgagacacaacttcatgcagctggagagacccggcggcctggacaccctgtacaagttcagccagctgaagggcctgaacctgagccacaacaagctgggcctgttccccatcctgctgtgcgagatcagcaccctgaccgagctgaacctgagctgcaacggcttccacgacctgcccagccagatcggcaacctgctgaacctgcagaccctgtgcctggacggcaacttcctgaccaccctgcccgaggagctgggcaacctgcagcagctgagcagcctgggcatcagcttcaacaacttcagccagatccccgaggtgtacgagaagctgaccatgctggacagagtggtgatggccggcaactgcctggaggtgctgaacctgggcgtgctgaacagaatgaaccacatcaagcacgtggacctgagaatgaaccacctgaagaccatggtgatcgagaacctggagggcaacaagcacatcacccacgtggacctgagagacaacagactgaccgacctggacctgagcagcctgtgcagcctggagcagctgcactgcggcagaaaccagctgagagagctgaccctgagcggcttcagcctgagaaccctgtacgccagcagcaacagactgaccgccgtgaacgtgtaccccgtgcccagcctgctgaccttcctggacctgagcagaaacctgctggagtgcgtgcccgactgggcctgcgaggccaagaagatcgaggtgctggacgtgagctacaacctgctgaccgaggtgcccgtgagaatcctgagcagcctgagcctgagaaagctgatgctgggccacaaccacgtgcagaacctgcccaccctggtggagcacatccccctggaggtgctggacctgcagcacaacgccctgaccagactgcccgacaccctgttcagcaaggccctgaacctgagatacctgaacgccagcgccaacagcctggagagcctgcccagcgcctgcaccggcgaggagagcctgagcatgctgcagctgctgtacctgaccaacaacctgctgaccgaccagtgcatccccgtgctggtgggccacctgcacctgagaatcctgcacctggccaacaaccagctgcagaccttccccgccagcaagctgaacaagctggagcagctggaggagctgaacctgagcggcaacaagctgaagaccatccccaccaccatcgccaactgcaagagactgcacaccctggtggcccacagcaacaacatcagcatcttccccgagatcctgcagctgccccagatccagttcgtggacctgagctgcaacgacctgaccgagatcctgatccccgaggccctgcccgccaccctgcaggacctggacctgaccggcaacaccaacctggtgctggagcacaagaccctggacatcttcagccacatcaccaccctgaagatcgaccagaagcccctgcccaccaccgacagcaccgtgaccagcaccttctggagccacggcctggccgagatggccggccagagaaacaagctgtgcgtgagcgccctggccatggacagcttcgccgagggcgtgggcgccgtgtacggcatgttcgacggcgacagaaacgaggagctgcccagactgctgcagtgcaccatggccgacgtgctgctggaggaggtgcagcagagcaccaacgacaccgtgttcatggccaacaccttcctggtgagccacagaaagctgggcatggccggccagaagctgggcagcagcgccctgctgtgctacatcagacccgacaccgccgaccccgccagcagcttcagcctgaccgtggccaacgtgggcacctgccaggccgtgctgtgcagaggcggcaagcccgtgcccctgagcaaggtgttcagcctggagcaggaccccgaggaggcccagagagtgaaggaccagaaggccatcatcaccgaggtgcccgaggacctgaaggagttccagaccaccgacatccccgtgcaccactgcaacttcagagccgtgctgggctgcctgtgcagcgccagcgtgctgggcagctacgccggccccgcccccagatggagaagaacctag

SEQ ID NO: 12085 - DNA, 3972 bp, synthetic construct
  misc_feature 1..3972: note = Description of Artificial Sequence: Synthetic coding sequence
  source 1..3972: mol_type = other DNA
atgaagagaaacggcagcagaaactgcctgaacagaagaagcagattcggcagcagagagagagactggctgagagaggacgtgaagagaggctgcgtgtacctgtacggcgccgacaccaccaccgccaccaccaccaccaccaccagcagcagcagcagcagcagcagcagcagcagcgacctgcacctggtgctgtgcaccgtggagacccccgccagcgagatctgcgccggcgagggcagagagagcctgtacctgcagctgcacggcgacctggtgagaagactggagcccaccgagagacccctgcagatcgtgtacgactacctgagcagactgggcttcgacgaccccgtgagaatccaggaggaggccaccaaccccgacctgggctgcatgatcagattctacggcgagaagccctgccacatggacagactggacagaatcctgctgagcggcatctacaacgtgagaaagggcaagacccagctgcacaagtgggccgagagactggtggtgctgtgcggcacctgcctgatcgtgagcagcgtgaaggactgccagaccggcaagatgcacatcctgcccctggtgggcggcaagatcgaggaggtgaagagaagacagtacagcctggccttcagcagcgccggcgcccaggcccagacctaccacgtgagcttcgagaccctggccgagtaccagagatggcagagacaggccagcaaggtggtgagccagagaatcagcaccgtggacctgagctgctacagcctggaggaggtgcccgagcacctgttctacagccaggacatcacctacctgaacctgagacacaacttcatgcagctggagagacccggcggcctggacaccctgtacaagttcagccagctgaagggcctgaacctgagccacaacaagctgggcctgttccccatcctgctgtgcgagatcagcaccctgaccgagctgaacctgagctgcaacggcttccacgacctgcccagccagatcggcaacctgctgaacctgcagaccctgtgcctggacggcaacttcctgaccaccctgcccgaggagctgggcaacctgcagcagctgagcagcctgggcatcagcttcaacaacttcagccagatccccgaggtgtacgagaagctgaccatgctggacagagtggtgatggccggcaactgcctggaggtgctgaacctgggcgtgctgaacagaatgaaccacatcaagcacgtggacctgagaatgaaccacctgaagaccatggtgatcgagaacctggagggcaacaagcacatcacccacgtggacctgagagacaacagactgaccgacctggacctgagcagcctgtgcagcctggagcagctgcactgcggcagaaaccagctgagagagctgaccctgagcggcttcagcctgagaaccctgtacgccagcagcaacagactgaccgccgtgaacgtgtaccccgtgcccagcctgctgaccttcctggacctgagcagaaacctgctggagtgcgtgcccgactgggcctgcgaggccaagaagatcgaggtgctggacgtgagctacaacctgctgaccgaggtgcccgtgagaatcctgagcagcctgagcctgagaaagctgatgctgggccacaaccacgtgcagaacctgcccaccctggtggagcacatccccctggaggtgctggacctgcagcacaacgccctgaccagactgcccgacaccctgttcagcaaggccctgaacctgagatacctgaacgccagcgccaacagcctggagagcctgcccagcgcctgcaccggcgaggagagcctgagcatgctgcagctgctgtacctgaccaacaacctgctgaccgaccagtgcatccccgtgctggtgggccacctgcacctgagaatcctgcacctggccaacaaccagctgcagaccttccccgccagcaagctgaacaagctggagcagctggaggagctgaacctgagcggcaacaagctgaagaccatccccaccaccatcgccaactgcaagagactgcacaccctggtggcccacagcaacaacatcagcatcttccccgagatcctgcagctgccccagatccagttcgtggacctgagctgcaacgacctgaccgagatcctgatccccgaggccctgcccgccaccctgcaggacctggacctgaccggcaacaccaacctggtgctggagcacaagaccctggacatcttcagccacatcaccaccctgaagatcgaccagaagcccctgcccaccaccgacagcaccgtgaccagcaccttctggagccacggcctggccgagatggccggccagagaaacaagctgtgcgtgagcgccctggccatggacagcttcgccgagggcgtgggcgccgtgtacggcatgttcgacggcgacagaaacgaggagctgcccagactgctgcagtgcaccatggccgacgtgctgctggaggaggtgcagcagagcaccaacgacaccgtgttcatggccaacaccttcctggtgagccacagaaagctgggcatggccggccagaagctgggcagcagcgccctgctgtgctacatcagacccgacaccgccgaccccgccagcagcttcagcctgaccgtggccaacgtgggcacctgccaggccgtgctgtgcagaggcggcaagcccgtgcccctgagcaaggtgttcagcctggagcaggaccccgaggaggcccagagagtgaaggaccagaaggccatcatcaccgaggacaacaaggtgaacggcgtgacctgctgcaccagaatgctgggctgcacctacctgtacccctggatcctgcccaagccccacatcagcagcacccccctgaccatccaggacgagctgctgatcctgggcaacaaggccctgtgggagcacctgagctacaccgaggccgtgaacgccgtgagacacgtgcaggaccccctggccgccgccaagaagctgtgcaccctggcccagagctacggctgccaggacaacgtgggcgccatggtggtgtacctgaacatcggcgaggagggctgcacctgcgagatgaacggcctgaccctgcccggccccgtgggcttcgccagcaccaccaccatcaaggacgcccccaagcccgccacccccagcagcagcagcggcatcgccagcgagttcagcagcgagatgagcaccagcgaggtgagcagcgaggtgggcagcaccgccagcgacgagcacaacgccggcggcctggacaccgccctgctgcccagacccgagagaagatgcagcctgcaccccacccccaccagcggcctgttccagagacagcccagcagcgccaccttcagcagcaaccagagcgacaacggcctggacagcgacgacgaccagcccgtggagggcgtgatcaccaacggcagcaaggtggaggtggaggtggacatccactgctgcagaggcagagacctggagaacagcccccccctgatcgagagcagccccaccctgtgcagcgaggagcacgccagaggcagctgcttcggcatcagaagacagaacagcgtgaacagcggcatgctgctgcccatgagcaaggacagaatggagctgcagaagagccccagcaccagctgcctgtacggcaagaagctgagcaacggcagcatcgtgcccctggaggacagcctgaacctgatcgaggtggccaccgaggtgcccaagagaaagaccggctacttcgccgcccccacccagatggagcccgaggaccagttcgtggtgccccacgacctggaggaggaggtgaaggagcagatgaagcagcaccaggacagcagactggagcccgagccccacgaggaggacagaaccgagccccccgaggagttcgacaccgccctgtag

SEQ ID NO: 12086 - DNA, 2871 bp, synthetic construct
  misc_feature 1..2871: note = Description of Artificial Sequence: Synthetic coding sequence
  source 1..2871: mol_type = other DNA
atgaagagaaacggcagcagaaactgcctgaacagaagaagcagattcggcagcagagagagagactggctgagagaggacgtgaagagaggctgcgtgtacctgtacggcgccgacaccaccaccgccaccaccaccaccaccaccagcagcagcagcagcagcagcagcagcagcagcgacctgcacctggtgctgtgcaccgtggagacccccgccagcgagatctgcgccggcgagggcagagagagcctgtacctgcagctgcacggcgacctggtgagaagactggagcccaccgagagacccctgcagatcgtgtacgactacctgagcagactgggcttcgacgaccccgtgagaatccaggaggaggccaccaaccccgacctgggctgcatgatcagattctacggcgagaagccctgccacatggacagactggacagaatcctgctgagcggcatctacaacgtgagaaagggcaagacccagctgcacaagtgggccgagagactggtggtgctgtgcggcacctgcctgatcgtgagcagcgtgaaggactgccagaccggcaagatgcacatcctgcccctggtgggcggcaagatcgaggaggtgaagagaagacagtacagcctggccttcagcagcgccggcgcccaggcccagacctaccacgtgagcttcgagaccctggccgagtaccagagatggcagagacaggccagcaaggtggtgagccagagaatcagcaccgtggacctgagctgctacagcctggaggaggtgcccgagcacctgttctacagccaggacatcacctacctgaacctgagacacaacttcatgcagctggagagacccggcggcctggacaccctgtacaagttcagccagctgaagggcctgaacctgagccacaacaagctgggcctgttccccatcctgctgtgcgagatcagcaccctgaccgagctgaacctgagctgcaacggcttccacgacctgcccagccagatcggcaacctgctgaacctgcagaccctgtgcctggacggcaacttcctgaccaccctgcccgaggagctgggcaacctgcagcagctgagcagcctgggcatcagcttcaacaacttcagccagatccccgaggtgtacgagaagctgaccatgctggacagagtggtgatggccggcaactgcctggaggtgctgaacctgggcgtgctgaacagaatgaaccacatcaagcacgtggacctgagaatgaaccacctgaagaccatggtgatcgagaacctggagggcaacaagcacatcacccacgtggacctgagagacaacagactgaccgacctggacctgagcagcctgtgcagcctggagcagctgcactgcggcagaaaccagctgagagagctgaccctgagcggcttcagcctgagaaccctgtacgccagcagcaacagactgaccgccgtgaacgtgtaccccgtgcccagcctgctgaccttcctggacctgagcagaaacctgctggagtgcgtgcccgactgggcctgcgaggccaagaagatcgaggtgctggacgtgagctacaacctgctgaccgaggtgcccgtgagaatcctgagcagcctgagcctgagaaagctgatgctgggccacaaccacgtgcagaacctgcccaccctggtggagcacatccccctggaggtgctggacctgcagcacaacgccctgaccagactgcccgacaccctgttcagcaaggccctgaacctgagatacctgaacgccagcgccaacagcctggagagcctgcccagcgcctgcaccggcgaggagagcctgagcatgctgcagctgctgtacctgaccaacaacctgctgaccgaccagtgcatccccgtgctggtgggccacctgcacctgagaatcctgcacctggccaacaaccagctgcagaccttccccgccagcaagctgaacaagctggagcagctggaggagctgaacctgagcggcaacaagctgaagaccatccccaccaccatcgccaactgcaagagactgcacaccctggtggcccacagcaacaacatcagcatcttccccgagatcctgcagctgccccagatccagttcgtggacctgagctgcaacgacctgaccgagatcctgatccccgaggccctgcccgccaccctgcaggacctggacctgaccggcaacaccaacctggtgctggagcacaagaccctggacatcttcagccacatcaccaccctgaagatcgaccagaagcccctgcccaccaccgacagcaccgtgaccagcaccttctggagccacggcctggccgagatggccggccagagaaacaagctgtgcgtgagcgccctggccatggacagcttcgccgagggcgtgggcgccgtgtacggcatgttcgacggcgacagaaacgaggagctgcccagactgctgcagtgcaccatggccgacgtgctgctggaggaggtgcagcagagcaccaacgacaccgtgttcatggccaacaccttcctggtgagccacagaaagctgggcatggccggccagaagctgggcagcagcgccctgctgtgctacatcagacccgacaccgccgaccccgccagcagcttcagcctgaccgtggccaacgtgggcacctgccaggccgtgctgtgcagaggcggcaagcccgtgcccctgagcaaggtgttcagcctggagcaggaccccgaggaggcccagagagtgaaggaccagaaggccatcatcaccgagaactgggtgctgaaccagaagcacctgcaggacttccccggcgaggacaagtag

SEQ ID NO: 12087 - DNA, 3771 bp, synthetic construct
  misc_feature 1..3771: note = Description of Artificial Sequence: Synthetic coding sequence
  source 1..3771: mol_type = other DNA
atgaagagaaacggcagcagaaactgcctgaacagaagaagcagattcggcagcagagagagagactggctgagagaggacgtgaagagaggctgcgtgtacctgtacggcgccgacaccaccaccgccaccaccaccaccaccaccagcagcagcagcagcagcagcagcagcagcagcgacctgcacctggtgctgtgcaccgtggagacccccgccagcgagatctgcgccggcgagggcagagagagcctgtacctgcagctgcacggcgacctggtgagaagactggagcccaccgagagacccctgcagatcgtgtacgactacctgagcagactgggcttcgacgaccccgtgagaatccaggaggaggccaccaaccccgacctgggctgcatgatcagattctacggcgagaagccctgccacatggacagactggacagaatcctgctgagcggcatctacaacgtgagaaagggcaagacccagctgcacaagtgggccgagagactggtggtgctgtgcggcacctgcctgatcgtgagcagcgtgaaggactgccagaccggcaagatgcacatcctgcccctggtgggcggcaagatcgaggaggtgaagagaagacagtacagcctggccttcagcagcgccggcgcccaggcccagacctaccacgtgagcttcgagaccctggccgagtaccagagatggcagagacaggccagcaaggtggtgagccagagaatcagcaccgtggacctgagctgctacagcctggaggaggtgcccgagcacctgttctacagccaggacatcacctacctgaacctgagacacaacttcatgcagctggagagacccggcggcctggacaccctgtacaagttcagccagctgaagggcctgaacctgagccacaacaagctgggcctgttccccatcctgctgtgcgagatcagcaccctgaccgagctgaacctgagctgcaacggcttccacgacctgcccagccagatcggcaacctgctgaacctgcagaccctgtgcctggacggcaacttcctgaccaccctgcccgaggagctgggcaacctgcagcagctgagcagcctgggcatcagcttcaacaacttcagccagatccccgaggtgtacgagaagctgaccatgctggacagagtggtgatggccggcaactgcctggaggtgctgaacctgggcgtgctgaacagaatgaaccacatcaagcacgtggacctgagaatgaaccacctgaagaccatggtgatcgagaacctggagggcaacaagcacatcacccacgtggacctgagagacaacagactgaccgacctggacctgagcagcctgtgcagcctggagcagctgcactgcggcagaaaccagctgagagagctgaccctgagcggcttcagcctgagaaccctgtacgccagcagcaacagactgaccgccgtgaacgtgtaccccgtgcccagcctgctgaccttcctggacctgagcagaaacctgctggagtgcgtgcccgactgggcctgcgaggccaagaagatcgaggtgctggacgtgagctacaacctgctgaccgaggtgcccgtgagaatcctgagcagcctgagcctgagaaagctgatgctgggccacaaccacgtgcagaacctgcccaccctggtggagcacatccccctggaggtgctggacctgcagcacaacgccctgaccagactgcccgacaccctgttcagcaaggccctgaacaagctgaacaagctggagcagctggaggagctgaacctgagcggcaacaagctgaagaccatccccaccaccatcgccaactgcaagagactgcacaccctggtggcccacagcaacaacatcagcatcttccccgagatcctgcagctgccccagatccagttcgtggacctgagctgcaacgacctgaccgagatcctgatccccgaggccctgcccgccaccctgcaggacctggacctgaccggcaacaccaacctggtgctggagcacaagaccctggacatcttcagccacatcaccaccctgaagatcgaccagaagcccctgcccaccaccgacagcaccgtgaccagcaccttctggagccacggcctggccgagatggccggccagagaaacaagctgtgcgtgagcgccctggccatggacagcttcgccgagggcgtgggcgccgtgtacggcatgttcgacggcgacagaaacgaggagctgcccagactgctgcagtgcaccatggccgacgtgctgctggaggaggtgcagcagagcaccaacgacaccgtgttcatggccaacaccttcctggtgagccacagaaagctgggcatggccggccagaagctgggcagcagcgccctgctgtgctacatcagacccgacaccgccgaccccgccagcagcttcagcctgaccgtggccaacgtgggcacctgccaggccgtgctgtgcagaggcggcaagcccgtgcccctgagcaaggtgttcagcctggagcaggaccccgaggaggcccagagagtgaaggaccagaaggccatcatcaccgaggacaacaaggtgaacggcgtgacctgctgcaccagaatgctgggctgcacctacctgtacccctggatcctgcccaagccccacatcagcagcacccccctgaccatccaggacgagctgctgatcctgggcaacaaggccctgtgggagcacctgagctacaccgaggccgtgaacgccgtgagacacgtgcaggaccccctggccgccgccaagaagctgtgcaccctggcccagagctacggctgccaggacaacgtgggcgccatggtggtgtacctgaacatcggcgaggagggctgcacctgcgagatgaacggcctgaccctgcccggccccgtgggcttcgccagcaccaccaccatcaaggacgcccccaagcccgccacccccagcagcagcagcggcatcgccagcgagttcagcagcgagatgagcaccagcgaggtgagcagcgaggtgggcagcaccgccagcgacgagcacaacgccggcggcctggacaccgccctgctgcccagacccgagagaagatgcagcctgcaccccacccccaccagcggcctgttccagagacagcccagcagcgccaccttcagcagcaaccagagcgacaacggcctggacagcgacgacgaccagcccgtggagggcgtgatcaccaacggcagcaaggtggaggtggaggtggacatccactgctgcagaggcagagacctggagaacagcccccccctgatcgagagcagccccaccctgtgcagcgaggagcacgccagaggcagctgcttcggcatcagaagacagaacagcgtgaacagcggcatgctgctgcccatgagcaaggacagaatggagctgcagaagagccccagcaccagctgcctgtacggcaagaagctgagcaacggcagcatcgtgcccctggaggacagcctgaacctgatcgaggtggccaccgaggtgcccaagagaaagaccggctacttcgccgcccccacccagatggagcccgaggaccagttcgtggtgccccacgacctggaggaggaggtgaaggagcagatgaagcagcaccaggacagcagactggagcccgagccccacgaggaggacagaaccgagccccccgaggagttcgacaccgccctgtag

SEQ ID NO: 12088 - DNA, 1272 bp, synthetic construct
  misc_feature 1..1272: note = Description of Artificial Sequence: Synthetic coding sequence
  source 1..1272: mol_type = other DNA
atgaagagaaacggcagcagaaactgcctgaacagaagaagcagattcggcagcagagagagagactggctgagagaggacgtgaagagaggctgcgtgtacctgtacggcgccgacaccaccaccgccaccaccaccaccaccaccagcagcagcagcagcagcagcagcagcagcagcgacctgcacctggtgctgtgcaccgtggagacccccgccagcgagatctgcgccggcgagggcagagagagcctgtacctgcagctgcacggcgacctggtgagaagactggagcccaccgagagacccctgcagatcgtgtacgactacctgagcagactgggcttcgacgaccccgtgagaatccaggaggaggccaccaaccccgacctgggctgcatgatcagattctacggcgagaagccctgccacatggacagactggacagaatcctgctgagcggcatctacaacgtgagaaagggcaagacccagctgcacaagtgggccgagagactggtggtgctgtgcggcacctgcctgatcgtgagcagcgtgaaggactgccagaccggcaagatgcacatcctgcccctggtgggcggcaagatcgaggaggtgaagagaagacagtacagcctggccttcagcagcgccggcgcccaggcccagacctaccacgtgagcttcgagaccctggccgagtaccagagatggcagagacaggccagcaaggtggtgagccagagaatcagcaccgtggacctgagctgctacagcctggaggaggtgcccgagcacctgttctacagccaggacatcacctacctgaacctgagacacaacttcatgcagctggagagacccggcggcctggacaccctgtacaagttcagccagctgaagggcctgaacctgagccacaacaagctgggcctgttccccatcctgctgtgcgagatcagcaccctgaccgagctgaacctgagctgcaacggcttccacgacctgcccagccagatcggcaacctgctgaacctgcagaccctgtgcctggacggcaacttcctgaccaccctgcccgaggagctgggcaacctgcagcagctgagcagcctgggcatcagcttcaacaacttcagccagatccccgaggtgtacgagaagctgaccatgctggacagagtggtgatggccggcaactgcctggaggtgctgaacctgggcgtgctgaacagaatgaaccacatcaagcacgtggacctgagatag

SEQ ID NO: 12089 - DNA, 501 bp, synthetic construct
  misc_feature 1..501: note = Description of Artificial Sequence: Synthetic coding sequence
  source 1..501: mol_type = other DNA
atggccggccagagaaacaagctgtgcgtgagcgccctggccatggacagcttcgccgagggcgtgggcgccgtgtacggcatgttcgacggcgacagaaacgaggagctgcccagactgctgcagtgcaccatggccgacgtgctgctggaggaggtgcagcagagcaccaacgacaccgtgttcatggccaacaccttcctggtgagccacagaaagctgggcatggccggccagaagctgggcagcagcgccctgctgtgctacatcagacccgacaccgccgaccccgccagcagcttcagcctgaccgtggccaacgtgggcacctgccaggccgtgctgtgcagaggcggcaagcccgtgcccctgagcaaggtgttcagcctggagcaggaccccgaggaggcccagagagtgaaggaccagaaggccatcatcaccgagaactgggtgctgaaccagaagcacctgcaggacttccccggcgaggacaagtag

SEQ ID NO: 12090 - DNA, 3972 bp, synthetic construct; identical to SEQ ID NO: 12085
  misc_feature 1..3972: note = Description of Artificial Sequence: Synthetic coding sequence
  source 1..3972: mol_type = other DNA

SEQ ID NO: 12091 - DNA, 1212 bp, synthetic construct
  misc_feature 1..1212: note = Description of Artificial Sequence: Synthetic coding sequence
  source 1..1212: mol_type = other DNA
atgaccgccatcatcaaggagatcgtgagcagaaacaagagaagataccaggaggacggcttcgacctggacctgacctacatctaccccaacatcatcgccatgggcttccccgccgagagactggagggcgtgtacagaaacaacatcgacgacgtggtgagattcctggacagcaagcacaagaaccactacaagatctacaacctgtgcgccgagagacactacgacaccgccaagttcaactgcagagtggcccagtaccccttcgaggaccacaaccccccccagctggagctgatcaagcccttctgcgaggacctggaccagtggctgagcgaggacgacaaccacgtggccgccatccactgcaaggccggcaagggcagaaccggcgtgatgatctgcgcctacctgctgcacagaggcaagttcctgaaggcccaggaggccctggacttctacggcgaggtgagaaccagagacaagaagggcgtgaccatccccagccagagaagatacgtgtactactacagctacctgctgaagaaccacctggactacagacccgtggccctgctgttccacaagatgatgttcgagaccatccccatgttcagcggcggcacctgcaacccccagttcgtggtgtgccagctgaaggtgaagatctacagcagcaacagcggccccaccagaagagaggacaagttcatgtacttcgagttcccccagcccctgcccgtgtgcggcgacatcaaggtggagttcttccacaagcagaacaagatgctgaagaaggacaagatgttccacttctgggtgaacaccttcttcatccccggccccgaggagaccagcgagaaggtggagaacggcagcctgtgcgaccaggagatcgacagcatctgcagcatcgagagagccgacaacgacaaggagtacctggtgctgaccctgaccaagaacgacctggacaaggccaacaaggacaaggccaacagatacttcagccccaacttcaaggtgaagctgtacttcaccaagaccgtggaggagcccagcaaccccgaggccagcagcagcaccagcgtgacccccgacgtgagcgacaacgagcccgaccactacagatacagcgacaccaccgacagcgaccccgagaacgagcccttcgacgaggaccagcacacccagatcaccaaggtgtag

SEQ ID NO: 12092 - DNA, 531 bp, synthetic construct
  misc_feature 1..531: note = Description of Artificial Sequence: Synthetic coding sequence
  source 1..531: mol_type = other DNA
atgggcaaggccgccgccgccgtggccttcggcgccgaggtgggcgtgagactggccctgttcgccgccttcctggtgaccgagctgctgccccccttccagagactgatccagcccgaggagatgtggctgtacagaaacccctacgtggaggccgagtacttccccaccaagcccatgttcgtgatcgccttcctgagccccctgagcctgatcttcctggccaagttcctgaagaaggccgacaccagagacagcagacaggcctgcctggccgccagcctggccctggccctgaacggcgtgttcaccaacaccatcaagctgatcgtgggcagacccagacccgacttcttctacagatgcttccccgacggcctggcccacagcgacctgatgtgcaccggcgacaaggacgtggtgaacgagggcagaaagagcttccccagcggccacagcagctgcatgaacatcatctggaccctgccctacgcctgcttccacatcatcgagttcaacctggagagctag

SEQ ID NO: 12093 - DNA, 651 bp, synthetic construct
  misc_feature 1..651: note = Description of Artificial Sequence: Synthetic coding sequence
  source 1..651: mol_type = other DNA
atgggcaaggccgccgccgccgtggccttcggcgccgaggtgggcgtgagactggccctgttcgccgccttcctggtgaccgagctgctgccccccttccagagactgatccagcccgaggagatgtggctgtacagaaacccctacgtggaggccgagtacttccccaccaagcccatgttcgtgatcgccttcctgagccccctgagcctgatcttcctggccaagttcctgaagaaggccgacaccagagacagcagacaggcctgcctggccgccagcctggccctggccctgaacggcgtgttcaccaacaccatcaagctgatcgtgggcagacccagacccgacttcttctacagatgcttccccgacggcctggcccacagcgacctgatgtgcaccggcgacaaggacgtggtgaacgagggcagaaagagcttccccagcggccacagcagcttcgccttcgccggcctggccttcgccagcttctacctggccggcaagctgcactgcttcaccccccagggcagaggcaagagctggagattctgcgccttcctgagccccctgctgttcgccgccgtgatcgccctgagcagaacctgcgactacaagcaccactggcagggccccttcaagtggtag

SEQ ID NO: 12094 - DNA, 795 bp, synthetic construct
  misc_feature 1..795: note = Description of Artificial Sequence: Synthetic coding sequence
  source 1..795: mol_type = other DNA
atgggcaaggccgccgccgccgtggccttcggcgccgaggtgggcgtgagactggccctgttcgccgccttcctggtgaccgagctgctgccccccttccagagactgatccagcccgaggagatgtggctgtacagaaacccctacgtggaggccgagtacttccccaccaagcccatgttcgtgatcgccttcctgagccccctgagcctgatcttcctggccaagttcctgaagaaggccgacaccagagacagcagacaggcctgcctggccgccagcctggccctggccctgaacggcgtgttcaccaacaccatcaagctgatcgtgggcagacccagacccgacttcttctacagatgcttccccgacggcctggcccacagcgacctgatgtgcaccggcgacaaggacgtggtgaacgagggcagaaagagcttccccagcggccacagcagcttcgccttcgccggcctggccttcgccagcttctacctggccggcaagctgcactgcttcaccccccagggcagaggcaagagctggagattctgcgccttcctgagccccctgctgttcgccgccgtgatcgccctgagcagaacctgcgactacaagcaccactggcaggacgtgctggtgggcagcatgatcggcatgaccttcgcctacgtgtgctacagacagtactacccccccctgaccgacgccgagtgccacaagcccttccaggacaagctggtgctgagcaccgcccagaagcccggcgacagctactgcttcgacatctag

SEQ ID NO: 12095 - DNA, 1086 bp, synthetic construct
  misc_feature 1..1086: note = Description of Artificial Sequence: Synthetic coding sequence
  source 1..1086: mol_type = other DNA
atgcacggcgactacaccctgaccctgagaaagggcggcaacaacaagctgatcaagatcttccacagagacggcaagtacggcttcagcgaccccctgaccttcagcagcgtggtggagctgatcaaccactacagaaacgagagcctggcccagtacaaccccaagctggacgtgaagctgctgtaccccgtgagcaagtaccagcaggaccaggtggtgaaggaggacaacatcgaggccgtgggcaagaagctgcacgagtacaacacccagttccaggagaagagcagagagtacgacagactgtacgaggagtacaccagaaccagccaggagatccagatgaagagaaccgccatcgaggccttcaacgagaccatcaagatcttcgaggagcagtgccagacccaggagagatacagcaaggagtacatcgagaagttcaagagagagggcaacgagaaggagatccagagaatcatgcacaactacgacaagctgaagagcagaatcagcgagatcatcgacagcagaagaagactggaggaggacctgaagaagcaggccgccgagtacagagagatcgacaagagaatgaacagcatcaagcccgacctgatccagctgagaaagaccagagaccagtacctgatgtggctgacccagaagggcgtgagacagaagaagctgaacgagtggctgggcaacgagaacaccgaggaccagtacagcctggtggaggacgacgaggacctgccccaccacgacgagaagacctggaacgtgggcagcagcaacagaaacaaggccgagaacctgctgagaggcaagagagacggcaccttcctggtgagagagagcagcaagcagggctgctacgcctgcagcgtggtggtggacggcgaggtgaagcactgcgtgatcaacaagaccgccaccggctacggcttcgccgagccctacaacctgtacagcagcctgaaggagctggtgctgcactaccagcacaccagcctggtgcagcacaacgacagcctgaacgtgaccctggcctaccccgtgtacgcccagcagagaagatag

SEQ ID NO: 12096 - DNA, 3207 bp, synthetic construct
  misc_feature 1..3207: note = Description of Artificial Sequence: Synthetic coding sequence
  source 1..3207: mol_type = other DNA
atgccccccagacccagcagcggcgagctgtggggcatccacctgatgccccccagaatcctggtggagtgcctgctgcccaacggcatgatcgtgaccctggagtgcctgagagaggccaccctgatcaccatcaagcacgagctgttcaaggaggccagaaagtaccccctgcaccagctgctgcaggacgagagcagctacatcttcgtgagcgtgacccaggaggccgagagagaggagttcttcgacgagaccagaagactgtgcgacctgagactgttccagcccttcctgaaggtgatcgagcccgtgggcaacagagaggagaagatcctgaacagagagatcggcttcgccatcggcatgcccgtgtgcgagttcgacatggtgaaggaccccgaggtgcaggacttcagaagaaacatcctgaacgtgtgcaaggaggccgtggacctgagagacctgaacagcccccacagcagagccatgtacgtgtacccccccaacgtggagagcagccccgagctgcccaagcacatctacaacaagctggacaagggccagatcatcgtggtgatctgggtgatcgtgagccccaacaacgacaagcagaagtacaccctgaagatcaaccacgactgcgtgcccgagcaggtgatcgccgaggccatcagaaagaagaccagaagcatgctgctgagcagcgagcagctgaagctgtgcgtgctggagtaccagggcaagtacatcctgaaggtgtgcggctgcgacgagtacttcctggagaagtaccccctgagccagtacaagtacatcagaagctgcatcatgctgggcagaatgcccaacctgatgctgatggccaaggagagcctgtacagccagctgcccatggactgcttcaccatgcccagctacagcagaagaatcagcaccgccaccccctacatgaacggcgagaccagcaccaagagcctgtgggtgatcaacagcgccctgagaatcaagatcctgtgcgccacctacgtgaacgtgaacatcagagacatcgacaagatctacgtgagaaccggcatctaccacggcggcgagcccctgtgcgacaacgtgaacacccagagagtgccctgcagcaaccccagatggaacgagtggctgaactacgacatctacatccccgacctgcccagagccgccagactgtgcctgagcatctgcagcgtgaagggcagaaagggcgccaaggaggagcactgccccctggcctggggcaacatcaacctgttcgactacaccgacaccctggtgagcggcaagatggccctgaacctgtggcccgtgccccacggcctggaggacctgctgaaccccatcggcgtgaccggcagcaaccccaacaaggagaccccctgcctggagctggagttcgactggttcagcagcgtggtgaagttccccgacatgagcgtgatcgaggagcacgccaactggagcgtgagcagagaggccggcttcagctacagccacgccggcctgagcaacagactggccagagacaacgagctgagagagaacgacaaggagcagctgaaggccatcagcaccagagaccccctgagcgagatcaccgagcaggagaaggacttcctgtggagccacagacactactgcgtgaccatccccgagatcctgcccaagctgctgctgagcgtgaagtggaacagcagagacgaggtggcccagatgtactgcctggtgaaggactggccccccatcaagcccgagcaggccatggagctgctggactgcaactaccccgaccccatggtgagaggcttcgccgtgagatgcctggagaagtacctgaccgacgacaagctgagccagtacctgatccagctggtgcaggtgctgaagtacgagcagtacctggacaacctgctggtgagattcctgctgaagaaggccctgaccaaccagagaatcggccacttcttcttctggcacctgaagagcgagatgcacaacaagaccgtgagccagagattcggcctgctgctggagagctactgcagagcctgcggcatgtacctgaagcacctgaacagacaggtggaggccatggagaagctgatcaacctgaccgacatcctgaagcaggagaagaaggacgagacccagaaggtgcagatgaagttcctggtggagcagatgagaagacccgacttcatggacgccctgcagggcttcctgagccccctgaaccccgcccaccagctgggcaacctgagactggaggagtgcagaatcatgagcagcgccaagagacccctgtggctgaactgggagaaccccgacatcatgagcgagctgctgttccagaacaacgagatcatcttcaagaacggcgacgacctgagacaggacatgctgaccctgcagatcatcagaatcatggagaacatctggcagaaccagggcctggacctgagaatgctgccctacggctgcctgagcatcggcgactgcgtgggcctgatcgaggtggtgagaaacagccacaccatcatgcagatccagtgcaagggcggcctgaagggcgccctgcagttcaacagccacaccctgcaccagtggctgaaggacaagaacaagggcgagatctacgacgccgccatcgacctgttcaccagaagctgcgccggctactgcgtggccaccttcatcctgggcatcggcgacagacacaacagcaacatcatggtgaaggacgacggccagctgttccacatcgacttcggccacttcctggaccacaagaagaagaagttcggctacaagagagagagagtgcccttcgtgctgacccaggacttcctgatcgtgatcagcaagggcgcccaggagtgcaccaagaccagagagttcgagagattccaggagatgtgctacaaggcctacctggccatcagacagcacgccaacctgttcatcaacctgttcagcatgatgctgggcagcggcatgcccgagctgcagagcttcgacgacatcgcctacatcagaaagaccctggccctggacaagaccgagcaggaggccctggagtacttcatgaagcagatgaacgacgcccaccacggcggctggaccaccaagatggactggatcttccacaccatcaagcagcacgccctgaactag

SEQ ID NO: 12097 - DNA, 357 bp, synthetic construct
  misc_feature 1..357: note = Description of Artificial Sequence: Synthetic coding sequence
  source 1..357: mol_type = other DNA
atgccccccagacccagcagcggcgagctgtggggcatccacctgatgccccccagaatcctggtggagtgcctgctgcccaacggcatgatcgtgaccctggagtgcctgagagaggccaccctgatcaccatcaagcacgagctgttcaaggaggccagaaagtaccccctgcaccagctgctgcaggacgagagcagctacatcttcgtgagcgtgacccaggaggccgagagagaggagttcttcgacgagaccagaagactgtgcgacctgagactgttccagcccttcctgaaggtgatcgagcccgtgggcaacagagaggagaagatcctgaacagagagatcggctag

SEQ ID NO: 12098 - DNA, 66 bp, synthetic construct
  misc_feature 1..66: note = Description of Artificial Sequence: Synthetic coding sequence
  source 1..66: mol_type = other DNA
atgccccccagacccagcagcggcgagctgtggggcatccacctgatgccccccagaatcctgtag

SEQ ID NO: 12099 - DNA, 3213 bp, synthetic construct
  misc_feature 1..3213: note = Description of Artificial Sequence: Synthetic coding sequence
  source 1..3213: mol_type = other DNA
atgtgcttcagcttcatcatgccccccgccatggccgacatcctggacatctgggccgtggacagccagatcgccagcgacggcagcatccccgtggacttcctgctgcccaccggcatctacatccagctggaggtgcccagagaggccaccatcagctacatcaagcagatgctgtggaagcaggtgcacaactaccccatgttcaacctgctgatggacatcgacagctacatgttcgcctgcgtgaaccagaccgccgtgtacgaggagctggaggacgagaccagaagactgtgcgacgtgagacccttcctgcccgtgctgaagctggtgaccagaagctgcgaccccggcgagaagctggacagcaagatcggcgtgctgatcggcaagggcctgcacgagttcgacagcctgaaggaccccgaggtgaacgagttcagaagaaagatgagaaagttcagcgaggagaagatcctgagcctggtgggcctgagctggatggactggctgaagcagacctacccccccgagcacgagcccagcatccccgagaacctggaggacaagctgtacggcggcaagctgatcgtggccgtgcacttcgagaactgccaggacgtgttcagcttccaggtgagccccaacatgaaccccatcaaggtgaacgagctggccatccagaagagactgaccatccacggcaaggaggacgaggtgagcccctacgactacgtgctgcaggtgagcggcagagtggagtacgtgttcggcgaccaccccctgatccagttccagtacatcagaaactgcgtgatgaacagagccctgccccacttcatcctggtggagtgctgcaagatcaagaagatgtacgagcaggagatgatcgccatcgaggccgccatcaacagaaacagcagcaacctgcccctgcccctgccccccaagaagaccagaatcatcagccacgtgtgggagaacaacaaccccttccagatcgtgctggtgaagggcaacaagctgaacaccgaggagaccgtgaaggtgcacgtgagagccggcctgttccacggcaccgagctgctgtgcaagaccatcgtgagcagcgaggtgagcggcaagaacgaccacatctggaacgagcccctggagttcgacatcaacatctgcgacctgcccagaatggccagactgtgcttcgccgtgtacgccgtgctggacaaggtgaagaccaagaagagcaccaagaccatcaaccccagcaagtaccagaccatcagaaaggccggcaaggtgcactaccccgtggcctgggtgaacaccatggtgttcgacttcaagggccagctgagaaccggcgacatcatcctgcacagctggagcagcttccccgacgagctggaggagatgctgaaccccatgggcaccgtgcagaccaacccctacaccgagaacgccaccgccctgcacgtgaagttccccgagaacaagaagcagccctactactacccccccttcgacaagatcatcgagaaggccgccgagatcgccagcagcgacagcgccaacgtgagcagcagaggcggcaagaagttcctgcccgtgctgaaggagatcctggacagagaccccctgagccagctgtgcgagaacgagatggacctgatctggaccctgagacaggactgcagagagatcttcccccagagcctgcccaagctgctgctgagcatcaagtggaacaagctggaggacgtggcccagctgcaggccctgctgcagatctggcccaagctgccccccagagaggccctggagctgctggacttcaactaccccgaccagtacgtgagagagtacgccgtgggctgcctgagacagatgagcgacgaggagctgagccagtacctgctgcagctggtgcaggtgctgaagtacgagcccttcctggactgcgccctgagcagattcctgctggagagagccctgggcaacagaagaatcggccagttcctgttctggcacctgagaagcgaggtgcacatccccgccgtgagcgtgcagttcggcgtgatcctggaggcctactgcagaggcagcgtgggccacatgaaggtgctgagcaagcaggtggaggccctgaacaagctgaagaccctgaacagcctgatcaagctgaacgccgtgaagctgaacagagccaagggcaaggaggccatgcacacctgcctgaagcagagcgcctacagagaggccctgagcgacctgcagagccccctgaacccctgcgtgatcctgagcgagctgtacgtggagaagtgcaagtacatggacagcaagatgaagcccctgtggctggtgtacaacaacaaggtgttcggcgaggacagcgtgggcgtgatcttcaagaacggcgacgacctgagacaggacatgctgaccctgcagatgctgagactgatggacctgctgtggaaggaggccggcctggacctgagaatgctgccctacggctgcctggccaccggcgacagaagcggcctgatcgaggtggtgagcaccagcgagaccatcgccgacatccagctgaacagcagcaacgtggccgccgccgccgccttcaacaaggacgccctgctgaactggctgaaggagtacaacagcggcgacgacctggacagagccatcgaggagttcaccctgagctgcgccggctactgcgtggccagctacgtgctgggcatcggcgacagacacagcgacaacatcatggtgaagaagaccggccagctgttccacatcgacttcggccacatcctgggcaacttcaagagcaagttcggcatcaagagagagagagtgcccttcatcctgacctacgacttcatccacgtgatccagcagggcaagaccggcaacaccgagaagttcggcagattcagacagtgctgcgaggacgcctacctgatcctgagaagacacggcaacctgttcatcaccctgttcgccctgatgctgaccgccggcctgcccgagctgaccagcgtgaaggacatccagtacctgaaggacagcctggccctgggcaagagcgaggaggaggccctgaagcagttcaagcagaagttcgacgaggccctgagagagagctggaccaccaaggtgaactggatggcccacaccgtgagaaaggactacagaagctag

SEQ ID NO: 12100 - DNA, 303 bp, synthetic construct
  misc_feature 1..303: note = Description of Artificial Sequence: Synthetic coding sequence
  source 1..303: mol_type = other DNA
atgtgcttcagcttcatcatgccccccgccatggccgacatcctggacatctgggccgtggacagccagatcgccagcgacggcagcatccccgtggacttcctgctgcccaccggcatctacatccagctggaggtgcccagagaggccaccatcagctacatcaagcagatgctgtggaagcaggtgcacaactaccccatgttcaacctgctgatggacatcgacagctacatgttcgcctgcgtgaaccagaccgccgtgtacgaggagctggaggacgagaccagaagactgtgctag

SEQ ID NO: 12101 - DNA, 171 bp, synthetic construct
  misc_feature 1..171: note = Description of Artificial Sequence: Synthetic coding sequence
  source 1..171: mol_type = other DNA
atgtgcttcagcttcatcatgccccccgccatggccgacatcctggacatctgggccgtggacagccagatcgccagcgacggcagcatccccgtggacttcctgctgcccaccggcatctacatccagctggaggtgcccagagaggccaccatcagctacatcaagtag

SEQ ID NO: 12102 - DNA, 3213 bp, synthetic construct; identical to SEQ ID NO: 12099
  misc_feature 1..3213: note = Description of Artificial Sequence: Synthetic coding sequence
  source 1..3213: mol_type = other DNA

SEQ ID NO: 12103 - DNA, 396 bp, synthetic construct
  misc_feature 1..396: note = Description of Artificial Sequence: Synthetic coding sequence
  source 1..396: mol_type = other DNA
atgtgcttcagcttcatcatgccccccgccatggccgacatcctggacatctgggccgtggacagccagatcgccagcgacggcagcatccccgtggacttcctgctgcccaccggcatctacatccagctggaggtgcccagagaggccaccatcagctacatcaagcagatgctgtggaagcaggtgcacaactaccccatgttcaacctgctgatggacatcgacagctacatgttcgcctgcgtgaaccagaccgccgtgtacgaggagctggaggacgagaccagaagactgtgcgacgtgagacccttcctgcccgtgctgaagctggtgaccagaagctgcgaccccggcgagaagctggacagcaagatcggcgtgctgatcggctag

SEQ ID NO: 12104 - DNA, 2109 bp, synthetic construct
  misc_feature 1..2109: note = Description of Artificial Sequence: Synthetic coding sequence
  source 1..2109: mol_type = other DNA
tgagtgagagccggcctgttccacggcaccgagctgctgtgcaagaccatcgtgagcagcgaggtgagcggcaagaacgaccacatctggaacgagcccctggagttcgacatcaacatctgcgacctgcccagaatggccagactgtgcttcgccgtgtacgccgtgctggacaaggtgaagaccaagaagagcaccaagaccatcaaccccagcaagtaccagaccatcagaaaggccggcaaggtgcactaccccgtggcctgggtgaacaccatggtgttcgacttcaagggccagctgagaaccggcgacatcatcctgcacagctggagcagcttccccgacgagctggaggagatgctgaaccccatgggcaccgtgcagaccaacccctacaccgagaacgccaccgccctgcacgtgaagttccccgagaacaagaagcagccctactactacccccccttcgacaagagcagaggcggcaagaagttcctgcccgtgctgaaggagatcctggacagagaccccctgagccagctgtgcgagaacgagatggacctgatctggaccctgagacaggactgcagagagatcttcccccagagcctgcccaagctgctgctgagcatcaagtggaacaagctggaggacgtggcccagctgcaggccctgctgcagatctggcccaagctgccccccagagaggccctggagctgctggacttcaactaccccgaccagtacgtgagagagtacgccgtgggctgcctgagacagatgagcgacgaggagctgagccagtacctgctgcagctggtgcaggtgctgaagtacgagcccttcctggactgcgccctgagcagattcctgctggagagagccctgggcaacagaagaatcggccagttcctgttctggcacctgagaagcgaggtgcacatccccgccgtgagcgtgcagttcggcgtgatcctggaggcctactgcagaggcagcgtgggccacatgaaggtgctgagcaagcaggtggaggccctgaacaagctgaagaccctgaacagcctgatcaagctgaacgccgtgaagctgaacagagccaagggcaaggaggccatgcacacctgcctgaagcagagcgcctacagagaggccctgagcgacctgcagagccccctgaacccctgcgtgatcctgagcgagctgtacgtggagaagtgcaagtacatggacagcaagatgaagcccctgtggctggtgtacaacaacaaggtgttcggcgaggacagcgtgggcgtgatcttcaagaacggcgacgacctgagacaggacatgctgaccctgcagatgctgagactgatggacctgctgtggaaggaggccggcctggacctgagaatgctgccctacggctgcctggccaccggcgacagaagcggcctgatcgaggtggtgagcaccagcgagaccatcgccgacatccagctgaacagcagcaacgtggccgccgccgccgccttcaacaaggacgccctgctgaactggctgaaggagtacaacagcggcgacgacctggacagagccatcgaggagttcaccctgagctgcgccggctactgcgtggccagctacgtgctgggcatcggcgacagacacagcgacaacatcatggtgaagaagaccggccagctgttccacatcgacttcggccacatcctgggcaacttcaagagcaagttcggcatcaagagagagagagtgcccttcatcctgacctacgacttcatccacgtgatccagcagggcaagaccggcaacaccgagaagttcggcagattcagacagtgctgcgaggacgcctacctgatcctgagaagacacggcaacctgttcatcaccctgttcgccctgatgctgaccgccggcctgcccgagctgaccagcgtgaaggacatccagtacctgaaggacagcctggccctgggcaagagcgaggaggaggccctgaagcagttcaagcagaagttcgacgaggccctgagagagagctggaccaccaaggtgaactggatggcccacaccgtgagaaaggactacagaagctag

SEQ ID NO: 12105 - DNA, 1566 bp, synthetic construct
  misc_feature 1..1566: note = Description of Artificial Sequence: Synthetic coding sequence
  source 1..1566: mol_type = other DNA
atggacctgatctggaccctgagacaggactgcagagagatcttcccccagagcctgcccaagctgctgctgagcatcaagtggaacaagctggaggacgtggcccagctgcaggccctgctgcagatctggcccaagctgccccccagagaggccctggagctgctggacttcaactaccccgaccagtacgtgagagagtacgccgtgggctgcctgagacagatgagcgacgaggagctgagccagtacctgctgcagctggtgcaggtgctgaagtacgagcccttcctggactgcgccctgagcagattcctgctggagagagccctgggcaacagaagaatcggccagttcctgttctggcacctgagaagcgaggtgcacatccccgccgtgagcgtgcagttcggcgtgatcctggaggcctactgcagaggcagcgtgggccacatgaaggtgctgagcaagcaggtggaggccctgaacaagctgaagaccctgaacagcctgatcaagctgaacgccgtgaagctgaacagagccaagggcaaggaggccatgcacacctgcctgaagcagagcgcctacagagaggccctgagcgacctgcagagccccctgaacccctgcgtgatcctgagcgagctgtacgtggagaagtgcaagtacatggacagcaagatgaagcccctgtggctggtgtacaacaacaaggtgttcggcgaggacagcgtgggcgtgatcttcaagaacggcgacgtgtgcttccccctggacctgagacaggacatgctgaccctgcagatgctgagactgatggacctgctgtggaaggaggccggcctggacctgagaatgctgccctacggctgcctggccaccggcgacagaagcggcctgatcgaggtggtgagcaccagcgagaccatcgccgacatccagctgaacagcagcaacgtggccgccgccgccgccttcaacaaggacgccctgctgaactggctgaaggagtacaacagcggcgacgacctggacagagccatcgaggagttcaccctgagctgcgccggctactgcgtggccagctacgtgctgggcatcggcgacagacacagcgacaacatcatggtgaagaagaccggccagctgttccacatcgacttcggccacatcctgggcaacttcaagagcaagttcggcatcaagagagagagagtgcccttcatcctgacctacgacttcatccacgtgatccagcagggcaagaccggcaacaccgagaagttcggcagattcagacagtgctgcgaggacgcctacctgatcctgagaagacacggcaacctgttcatcaccctgttcgccctgatgctgaccgccggcctgcccgagctgaccagcgtgaaggacatccagtacctgaaggacagcctggccctgggcaagagcgaggaggaggccctgaagcagttcaagcagaagttcgacgaggccctgagagagagctggaccaccaaggtgaactggatggcccacaccgtgagaaaggactacagaagctag

SEQ ID NO: 12106 - DNA, 3207 bp, synthetic construct
  misc_feature 1..3207: note = Description of Artificial Sequence: Synthetic coding sequence
  source 1..3207: mol_type = other DNA
atgccccccggcgtggactgccccatggagttctggaccaaggaggagaaccagagcgtggtggtggacttcctgctgcccaccggcgtgtacctgaacttccccgtgagcagaaacgccaacctgagcaccatcaagcagctgctgtggcacagagcccagtacgagcccctgttccacatgctgagcggccccgaggcctacgtgttcacctgcatcaaccagaccgccgagcagcaggagctggaggacgagcagagaagactgtgcgacgtgcagcccttcctgcccgtgctgagactggtggccagagagggcgacagagtgaagaagctgatcaacagccagatcagcctgctgatcggcaagggcctgcacgagttcgacagcctgtgcgaccccgaggtgaacgacttcagagccaagatgtgccagttctgcgaggaggccgccgccagaagacagcagctgggctgggaggcctggctgcagtacagcttccccctgcagctggagcccagcgcccagacctggggccccggcaccctgagactgcccaacagagccctgctggtgaacgtgaagttcgagggcagcgaggagagcttcaccttccaggtgagcaccaaggacgtgcccctggccctgatggcctgcgccctgagaaagaaggccaccgtgttcagacagcccctggtggagcagcccgaggactacaccctgcaggtgaacggcagacacgagtacctgtacggcagctaccccctgtgccagttccaggtgcagaagcccagagccaagcccccccccatccccgccaagaagcccagcagcgtgagcctgtggagcctggagcagcccttcagaatcgagctgatccagggcagcaaggtgaacgccgacgagagaatgaagctggtggtgcaggccggcctgttccacggcaacgagatgctgtgcaagaccgtgagcagcagcgaggtgagcgtgtgcagcgagcccgtgtggaagcagagactggagttcgacatcaacatctgcgacctgcccagaatggccagactgtgcttcgccctgtacgccgtgatcgagaaggccaagaaggccagaagcaccaagaagaagagcaagaaggccgactgccccatcgcctgggccaacctgatgctgttcgactacaaggaccagctgaagaccggcgagagatgcctgtacatgtggcccagcgtgcccgacgagaagggcgagctgctgaaccccaccggcaccgtgagaagcaaccccaacaccgacagcgccgccgccctgctgatctgcctgcccgaggtggccccccaccccgtgtactaccccgccctggagaagctgcccggcggcatgctgctggccagcagagagtggagacccgagctgctgtggatgagactgcacgccgaggacagcgcccccagcagaatgatcggcgtggccatgcccggcctgggcgtgctgcccggcctggtgcaggcccccggcgacgccgagtgcagcagactgctgcagatcctggagctgggcagacacagcgagtgcgtgcacgtgaccgaggaggagcagctgcagctgagagagatcctggagagaagaggcagcggcgagctgtacgagcacgagaaggacctggtgtggaagctgagacacgaggtgcaggagcacttccccgaggccctggccagactgctgctggtgaccaagtggaacaagcacgaggacgtggcccaggacgccctgcccgccgtgagctggcccgagctgcccgtgctgagcgccctggagctgctggacttcagcttccccgactgccacgtgggcagcttcgccatcaagagcctgagaaagctgaccgacgacgagctgttccagtacctgctgcagctggtgcaggtgctgaagtacgagagctacctggactgcgagctgaccaagttcctgctggacagagccctggccaacagaaagatcggccacttcctgttctggcacctgagaagcgagatgcacgtgcccagcgtggccctgagattcggcctgatcctggaggcctactgcagaggcagcacccaccacatgaaggtgctgatgaagcagggcgaggccctgagcaagctgaaggccctgaacgacttcgtgaagctgagcagccagaagacccccaagccccagaccaaggagctgatgcacctgtgcatgagacaggaggcctacctggaggccctgagccacctgcagagccccctggaccccagcaccctgctggccgaggtgtgcgtggagcagtgcaccttcatggacagcaagatgaagcccctgtggatcatgtacagcaacgaggaggccggcagcggcggcagcgtgggcatcatcttcaagaacggcgacgacctgagacaggacatgctgaccctgcagatgatccagctgatggacgtgctgtggaagcaggagggcctggacctgagaatgaccccctacggctgcctgcccaccggcgacagaaccggcctgatcgaggtggtgctgagaagcgacaccatcgccaacatccagctgaacaagagcaacatggccgccaccgccgccttcaacaaggacgccctgctgaactggctgaagagcaagaaccccggcgaggccctggacagagccatcgaggagttcaccctgagctgcgccggctactgcgtggccacctacgtgctgggcatcggcgacagacacagcgacaacatcatgatcagagagagcggccagctgttccacatcgacttcggccacttcctgggcaacttcaagaccaagttcggcatcaacagagagagagtgcccttcatcctgacctacgacttcgtgcacgtgatccagcagggcaagaccaacaacagcgagaagttcgagagattcagaggctactgcgagagagcctacaccatcctgagaagacacggcctgctgttcctgcacctgttcgccctgatgagagccgccggcctgcccgagctgagctgcagcaaggacatccagtacctgaaggacagcctggccctgggcaagaccgaggaggaggccctgaagcacttcagagtgaagttcaacgaggccctgagagagagctggaagaccaaggtgaactggctggcccacaacgtgagcaaggacaacagacagtag

SEQ ID NO: 12107 - DNA, 3207 bp, synthetic construct
  misc_feature 1..3207: note = Description of Artificial Sequence: Synthetic coding sequence
  source 1..3207: mol_type = other DNA
atgccccccggcgtggactgccccatggagttctggaccaaggaggagaaccagagcgtggtggtggacttcctgctgcccaccggcgtgtacctgaacttccccgtgagcagaaacgccaacctgagcaccatcaagcagctgctgtggcacagagcccagtacgagcccctgttccacatgctgagcggccccgaggcctacgtgttcacctgcatcaaccagaccgccgagcagcaggagctggaggacgagcagagaagactgtgcgacgtgcagcccttcctgcccgtgctgagactggtggccagagagggcgacagagtgaagaagctgatcaacagccagatcagcctgctgatcggcaagggcctgcacgagttcgacagcctgtgcgaccccgaggtgaacgacttcagagccaagatgtgccagttctgcgaggaggccgccgccagaagacagcagctgggctgggaggcctggctgcagtacagcttccccctgcagctggagcccagcgcccagacctggggccccggcaccctgagactgcccaacagagccctgctggtgaacgtgaagttcgagggcagcgaggagagcttcaccttccaggtgagcaccaaggacgtgcccctggccctgatggcctgcgccctgagaaagaaggccaccgtgttcagacagcccctggtggagcagcccgaggactacaccctgcaggtgaacggcagacacgagtacctgtacggcagctaccccctgtgccagttccaggtgcagaagcccagagccaagcccccccccatccccgccaagaagcccagcagcgtgagcctgtggagcctggagcagcccttcagaatcgagctgatccagggcagcaaggtgaacgccgacgagagaatgaagctggtggtgcaggccggcctgttccacggcaacgagatgctgtgcaagaccgtgagcagcagcgaggtgagcgtgtgcagcgagcccgtgtggaagcagagactggagttcgacatcaacatctgcgacctgcccagaatggccagactgtgcttcgccctgtacgccgtgatcgagaaggccaagaaggccagaagcaccaagaagaagagcaagaaggccgactgccccatcgcctgggccaacctgatgctgttcgactacaaggaccagctgaagaccggcgagagatgcctgtacatgtggcccagcgtgcccgacgagaagggcgagctgctgaaccccaccggcaccgtgagaagcaaccccaacaccgacagcgccgccgccctgctgatctgcctgcccgaggtggccccccaccccgtgtactaccccgccctggagaagctgcccggcggcatgctgctggccagcagagagtggagacccgagctgctgtggatgagactgcacgccgaggacagcgcccccagcagaatgatcggcgtggccatgcccggcctgggcgtgctgcccggcctggtgcaggcccccggcgacgccgagtgcagcagactgctgcagatcctggagctgggcagacacagcgagtgcgtgcacgtgaccgaggaggagcagctgcagctgagagagatcctggagagaagaggcagcggcgagctgtacgagcacgagaaggacctggtgtggaagctgagacacgaggtgcaggagcacttccccgaggccctggccagactgctgctggtgaccaagtggaacaagcacgaggacgtggcccagatgctgtacctgctgtgcagctggcccgagctgcccgtgctgagcgccctggagctgctggacttcagcttccccgactgccacgtgggcagcttcgccatcaagagcctgagaaagctgaccgacgacgagctgttccagtacctgctgcagctggtgcaggtgctgaagtacgagagctacctggactgcgagctgaccaagttcctgctggacagagccctggccaacagaaagatcggccacttcctgttctggcacctgagaagcgagatgcacgtgcccagcgtggccctgagattcggcctgatcctggaggcctactgcagaggcagcacccaccacatgaaggtgctgatgaagcagggcgaggccctgagcaagctgaaggccctgaacgacttcgtgaagctgagcagccagaagacccccaagccccagaccaaggagctgatgcacctgtgcatgagacaggaggcctacctggaggccctgagccacctgcagagccccctggaccccagcaccctgctggccgaggtgtgcgtggagcagtgcaccttcatggacagcaagatgaagcccctgtggatcatgtacagcaacgaggaggccggcagcggcggcagcgtgggcatcatcttcaagaacggcgacgacctgagacaggacatgctgaccctgcagatgatccagctgatggacgtgctgtggaagcaggagggcctggacctgagaatgaccccctacggctgcctgcccaccggcgacagaaccggcctgatcgaggtggtgctgagaagcgacaccatcgccaacatccagctgaacaagagcaacatggccgccaccgccgccttcaacaaggacgccctgctgaactggctgaagagcaagaaccccggcgaggccctggacagagccatcgaggagttcaccctgagctgcgccggctactgcgtggccacctacgtgctgggcatcggcgacagacacagcgacaacatcatgatcagagagagcggccagctgttccacatcgacttcggccacttcctgggcaacttcaagaccaagttcggcatcaacagagagagagtgcccttcatcctgacctacgacttcgtgcacgtgatccagcagggcaagaccaacaacagcgagaagttcgagagattcagaggctactgcgagagagcctacaccatcctgagaagacacggcctgctgttcctgcacctgttcgccctgatgagagccgccggcctgcccgagctgagctgcagcaaggacatccagtacctgaaggacagcctggccctgggcaagaccgaggaggaggccctgaagcacttcagagtgaagttcaacgaggccctgagagagagctggaagaccaaggtgaactggctggcccacaacgtgagcaaggacaacagacagtag

SEQ ID NO: 12108 - DNA, 3135 bp, synthetic construct
  misc_feature 1..3135: note = Description of Artificial Sequence: Synthetic coding sequence
  source 1..3135: mol_type = other DNA
atgccccccggcgtggactgccccatggagttctggaccaaggaggagaaccagagcgtggtggtggacttcctgctgcccaccggcgtgtacctgaacttccccgtgagcagaaacgccaacctgagcaccatcaagcagctgctgtggcacagagcccagtacgagcccctgttccacatgctgagcggccccgaggcctacgtgttcacctgcatcaaccagaccgccgagcagcaggagctggaggacgagcagagaagactgtgcgacgtgcagcccttcctgcccgtgctgagactggtggccagagagggcgacagagtgaagaagctgatcaacagccagatcagcctgctgatcggcaagggcctgcacgagttcgacagcctgtgcgaccccgaggtgaacgacttcagagccaagatgtgccagttctgcgaggaggccgccgccagaagacagcagctgggctgggaggcctggctgcagtacagcttccccctgcagctggagcccagcgcccagacctggggccccggcaccctgagactgcccaacagagccctgctggtgaacgtgaagttcgagggcagcgaggagagcttcaccttccaggtgagcaccaaggacgtgcccctggccctgatggcctgcgccctgagaaagaaggccaccgtgttcagacagcccctggtggagcagcccgaggactacaccctgcaggtgaacggcagacacgagtacctgtacggcagctaccccctgtgccagttccagtacatctgcagctgcctgcacagcggcctgaccccccacctgaccatggtgcacagcagcagcatcctggccatgagagacgagcagagcaaccccgccccccaggtgcagaagcccagagccaagcccccccccatccccgccaagaagcccagcagcgtgagcctgtggagcctggagcagcccttcagaatcgagctgatccagggcagcaaggtgaacgccgacgagagaatgaagctggtggtgcaggccggcctgttccacggcaacgagatgctgtgcaagaccgtgagcagcagcgaggtgagcgtgtgcagcgagcccgtgtggaagcagagactggagttcgacatcaacatctgcgacctgcccagaatggccagactgtgcttcgccctgtacgccgtgatcgagaaggccaagaaggccagaagcaccaagaagaagagcaagaaggccgactgccccatcgcctgggccaacctgatgctgttcgactacaaggaccagctgaagaccggcgagagatgcctgtacatgtggcccagcgtgcccgacgagaagggcgagctgctgaaccccaccggcaccgtgagaagcaaccccaacaccgacagcgccgccgccctgctgatctgcctgcccgaggtggccccccaccccgtgtactaccccgccctggagaagatcctggagctgggcagacacagcgagtgcgtgcacgtgaccgaggaggagcagctgcagctgagagagatcctggagagaagaggcagcggcgagctgtacgagcacgagaaggacctggtgtggaagctgagacacgaggtgcaggagcacttccccgaggccctggccagactgctgctggtgaccaagtggaacaagcacgaggacgtggcccagatgctgtacctgctgtgcagctggcccgagctgcccgtgctgagcgccctggagctgctggacttcagcttccccgactgccacgtgggcagcttcgccatcaagagcctgagaaagctgaccgacgacgagctgttccagtacctgctgcagctggtgcaggtgctgaagtacgagagctacctggactgcgagctgaccaagttcctgctggacagagccctggccaacagaaagatcggccacttcctgttctggcacctgagaagcgagatgcacgtgcccagcgtggccctgagattcggcctgatcctggaggcctactgcagaggcagcacccaccacatgaaggtgctgatgaagcagggcgaggccctgagcaagctgaaggccctgaacgacttcgtgaagctgagcagccagaagacccccaagccccagaccaaggagctgatgcacctgtgcatgagacaggaggcctacctggaggccctgagccacctgcagagccccctggaccccagcaccctgctggccgaggtgtgcgtggagcagtgcaccttcatggacagcaagatgaagcccctgtggatcatgtacagcaacgaggaggccggcagcggcggcagcgtgggcatcatcttcaagaacggcgacgacctgagacaggacatgctgaccctgcagatgatccagctgatggacgtgctgtggaagcaggagggcctggacctgagaatgaccccctacggctgcctgcccaccggcgacagaaccggcctgatcgaggtggtgctgagaagcgacaccatcgccaacatccagctgaacaagagcaacatggccgccaccgccgccttcaacaaggacgccctgctgaactggctgaagagcaagaaccccggcgaggccctggacagagccatcgaggagttcaccctgagctgcgccggctactgcgtggccacctacgtgctgggcatcggcgacagacacagcgacaacatcatgatcagagagagcggccagctgttccacatcgacttcggccacttcctgggcaacttcaagaccaagttcggcatcaacagagagagagtgcccttcatcctgacctacgacttcgtgcacgtgatccagcagggcaagaccaacaacagcgagaagttcgagagattcagaggctactgcgagagagcctacaccatcctgagaagacacggcctgctgttcctgcacctgttcgccctgatgagagccgccggcctgcccgagctgagctgcagcaaggacatccagtacctgaaggacagcctggccctgggcaagaccgaggaggaggccctgaagcacttcagagtgaagttcaacgaggccctgagagagagctggaagaccaaggtgaactggctggcccacaacgtgagcaaggacaacagacagtag

SEQ ID NO: 12109 - DNA, 3207 bp, synthetic construct; identical to SEQ ID NO: 12107
  misc_feature 1..3207: note = Description of Artificial Sequence: Synthetic coding sequence
  source 1..3207: mol_type = other DNA

SEQ ID NO: 12110 - DNA, 960 bp, synthetic construct
  misc_feature 1..960: note = Description of Artificial Sequence: Synthetic coding sequence
  source 1..960: mol_type = other DNA
atgatccccgagagcagcgagctggtggtgcaggccggcctgttccacggcaacgagatgctgtgcaagaccgtgagcagcagcgaggtgagcgtgtgcagcgagcccgtgtggaagcagagactggagttcgacatcaacatctgcgacctgcccagaatggccagactgtgcttcgccctgtacgccgtgatcgagaaggccaagaaggccagaagcaccaagaagaagagcaagaaggccgactgccccatcgcctgggccaacctgatgctgttcgactacaaggaccagctgaagaccggcgagagatgcctgtacatgtggcccagcgtgcccgacgagaagggcgagctgctgaaccccaccggcaccgtgagaagcaaccccaacaccgacagcgccgccgccctgctgatctgcctgcccgaggtggccccccaccccgtgtactaccccgccctggagaagatcctggagctgggcagacacagcgagtgcgtgcacgtgaccgaggaggagcagctgcagctgagagagatcctggagagaagaggcagcggcgagctgtacgagcacgagaaggacctggtgtggaagctgagacacgaggtgcaggagcacttccccgaggccctggccagactgctgctggtgaccaagtggaacaagcacgaggacgtggcccagatgctgtacctgctgtgcagctggcccgagctgcccgtgctgagcgccctggagctgctggacttcagcttccccgactgccacgtgggcagcttcgccatcaagagcctgagaaagctgaccgacgacgagctgttccagtacctgctgcagctggtgcaggtgctgaagtacgagagctacctggactgcgagctgaccaagttcctgctggacagagccctggccaacagaaagatcggccacttcctgttctggcacctgagatag

SEQ ID NO: 12111 - DNA, 3309 bp, synthetic construct
  misc_feature 1..3309: note = Description of Artificial Sequence: Synthetic coding sequence
  source 1..3309: mol_type = other DNA
atggagctggagaactacaagcagcccgtggtgctgagagaggacaactgcagaagaagaagaagaatgaagcccagaagcgccgccgccagcctgagcagcatggagctgatccccatcgagttcgtgctgcccaccagccagagaaagtgcaagagccccgagaccgccctgctgcacgtggccggccacggcaacgtggagcagatgaaggcccaggtgtggctgagagccctggagaccagcgtggccgccgacttctaccacagactgggcccccaccacttcctgctgctgtaccagaagaagggccagtggtacgagatctacgacaagtaccaggtggtgcagaccctggactgcctgagatactggaaggccacccacagaagccccggccagatccacctggtgcagagacacccccccagcgaggagagccaggccttccagagacagctgaccgccctgatcggctacgacgtgaccgacgtgagcaacgtgcacgacgacgagctggagttcaccagaagaggcctggtgacccccagaatggccgaggtggccagcagagaccccaagctgtacgccatgcacccctgggtgaccagcaagcccctgcccgagtacctgtggaagaagatcgccaacaactgcatcttcatcgtgatccacagaagcaccaccagccagaccatcaaggtgagccccgacgacacccccggcgccatcctgcagagcttcttcaccaagatggccaagaagaagagcctgatggacatccccgagagccagagcgagcaggacttcgtgctgagagtgtgcggcagagacgagtacctggtgggcgagacccccatcaagaacttccagtgggtgagacactgcctgaagaacggcgaggagatccacgtggtgctggacaccccccccgaccccgccctggacgaggtgagaaaggaggagtggcccctggtggacgactgcaccggcgtgaccggctaccacgagcagctgaccatccacggcaaggaccacgagagcgtgttcaccgtgagcctgtgggactgcgacagaaagttcagagtgaagatcagaggcatcgacatccccgtgctgcccagaaacaccgacctgaccgtgttcgtggaggccaacatccagcacggccagcaggtgctgtgccagagaagaaccagccccaagcccttcaccgaggaggtgctgtggaacgtgtggctggagttcagcatcaagatcaaggacctgcccaagggcgccctgctgaacctgcagatctactgcggcaaggcccccgccctgagcagcaaggccagcgccgagagccccagcagcgagagcaagggcaaggtgcagctgctgtactacgtgaacctgctgctgatcgaccacagattcctgctgagaagaggcgagtacgtgctgcacatgtggcagatcagcggcaagggcgaggaccagggcagcttcaacgccgacaagctgaccagcgccaccaaccccgacaaggagaacagcatgagcatcagcatcctgctggacaactactgccaccccatcgccctgcccaagcaccagcccacccccgaccccgagggcgacagagtgagagccgagatgcccaaccagctgagaaagcagctggaggccatcatcgccaccgaccccctgaaccccctgaccgccgaggacaaggagctgctgtggcacttcagatacgagagcctgaagcaccccaaggcctaccccaagctgttcagcagcgtgaagtggggccagcaggagatcgtggccaagacctaccagctgctggccagaagagaggtgtgggaccagagcgccctggacgtgggcctgaccatgcagctgctggactgcaacttcagcgacgagaacgtgagagccatcgccgtgcagaagctggagagcctggaggacgacgacgtgctgcactacctgctgcagctggtgcaggccgtgaagttcgagccctaccacgacagcgccctggccagattcctgctgaagagaggcctgagaaacaagagaatcggccacttcctgttctggttcctgagaagcgagatcgcccagagcagacactaccagcagagattcgccgtgatcctggaggcctacctgagaggctgcggcaccgccatgctgcacgacttcacccagcaggtgcaggtgatcgagatgctgcagaaggtgaccctggacatcaagagcctgagcgccgagaagtacgacgtgagcagccaggtgatcagccagctgaagcagaagctggagaacctgcagaacagccagctgcccgagagcttcagagtgccctacgaccccggcctgaaggccggcgccctggccatcgagaagtgcaaggtgatggccagcaagaagaagcccctgtggctggagttcaagtgcgccgaccccaccgccctgagcaacgagaccatcggcatcatcttcaagcacggcgacgacctgagacaggacatgctgatcctgcagatcctgagaatcatggagagcatctgggagaccgagagcctggacctgtgcctgctgccctacggctgcatcagcaccggcgacaagatcggcatgatcgagatcgtgaaggacgccaccaccatcgccaagatccagcagagcaccgtgggcaacaccggcgccttcaaggacgaggtgctgaaccactggctgaaggagaagagccccaccgaggagaagttccaggccgccgtggagagattcgtgtacagctgcgccggctactgcgtggccaccttcgtgctgggcatcggcgacagacacaacgacaacatcatgatcaccgagaccggcaacctgttccacatcgacttcggccacatcctgggcaactacaagagcttcctgggcatcaacaaggagagagtgcccttcgtgctgacccccgacttcctgttcgtgatgggcaccagcggcaagaagaccagcccccacttccagaagttccaggacatctgcgtgaaggcctacctggccctgagacaccacaccaacctgctgatcatcctgttcagcatgatgctgatgaccggcatgccccagctgaccagcaaggaggacatcgagtacatcagagacgccctgaccgtgggcaagaacgaggaggacgccaagaagtacttcctggaccagatcgaggtgtgcagagacaagggctggaccgtgcagttcaactggttcctgcacctggtgctgggcatcaagcagggcgagaagcacagcgcctag

SEQ ID NO: 12112 - DNA, 3309 bp, synthetic construct; identical to SEQ ID NO: 12111
  misc_feature 1..3309: note = Description of Artificial Sequence: Synthetic coding sequence
  source 1..3309: mol_type = other DNA

SEQ ID NO: 12113 - DNA, 3309 bp, synthetic construct; identical to SEQ ID NO: 12111
  misc_feature 1..3309: note = Description of Artificial Sequence: Synthetic coding sequence
  source 1..3309: mol_type = other DNA

SEQ ID NO: 12114 - DNA, 5061 bp, synthetic construct
  misc_feature 1..5061: note = Description of Artificial Sequence: Synthetic coding sequence
  source 1..5061: mol_type = other DNA
atggcccagatcagcagcaacagcggcttcaaggagtgccccagcagccaccccgagcccaccagagccaaggacgtggacaaggaggaggccctgcagatggaggccgaggccctggccaagctgcagaaggacagacaggtgaccgacaaccagagaggcttcgagctgagcagcagcaccagaaagaaggcccaggtgtacaacaagcaggactacgacctgatggtgttccccgagagcgacagccagaagagagccctggacatcgacgtggagaagctgacccaggccgagctggagaagctgctgctggacgacagcttcgagaccaagaagacccccgtgctgcccgtgacccccatcctgagccccagcttcagcgcccagctgtacttcagacccaccatccagagaggccagtggccccccggcctgcccggccccagcacctacgccctgcccagcatctaccccagcacctacagcaagcaggccgccttccagaacggcttcaaccccagaatgcccaccttccccagcaccgagcccatctacctgagcctgcccggccagagcccctacttcagctaccccctgacccccgccacccccttccacccccagggcagcctgcccatctacagacccgtggtgagcaccgacatggccaagctgttcgacaagatcgccagcaccagcgagttcctgaagaacggcaaggccagaaccgacctggagatcaccgacagcaaggtgagcaacctgcaggtgagccccaagagcgaggacatcagcaagttcgactggctggacctggaccccctgagcaagcccaaggtggacaacgtggaggtgctggaccacgaggaggagaagaacgtgagcagcctgctggccaaggacccctgggacgccgtgctgctggaggagagaagcaccgccaactgccacctggagagaaaggtgaacggcaagagcctgagcgtggccaccgtgaccagaagccagagcctgaacatcagaaccacccagctggccaaggcccagggccacatcagccagaaggaccccaacggcaccagcagcctgcccaccggcagcagcctgctgcaggaggtggaggtgcagaacgaggagatggccgccttctgcagaagcatcaccaagctgaagaccaagttcccctacaccaaccacagaaccaaccccggctacctgctgagccccgtgaccgcccagagaaacatctgcggcgagaacgccagcgtgaaggtgagcatcgacatcgagggcttccagctgcccgtgaccttcacctgcgacgtgagcagcaccgtggagatcatcatcatgcaggccctgtgctgggtgcacgacgacctgaaccaggtggacgtgggcagctacgtgctgaaggtgtgcggccaggaggaggtgctgcagaacaaccactgcctgggcagccacgagcacatccagaactgcagaaagtgggacaccgagatcagactgcagctgctgaccttcagcgccatgtgccagaacctggccagaaccgccgaggacgacgagacccccgtggacctgaacaagcacctgtaccagatcgagaagccctgcaaggaggccatgaccagacaccccgtggaggagctgctggacagctaccacaaccaggtggagctggccctgcagatcgagaaccagcacagagccgtggaccaggtgatcaaggccgtgagaaagatctgcagcgccctggacggcgtggagaccctggccatcaccgagagcgtgaagaagctgaagagagccgtgaacctgcccagaagcaagaccgccgacgtgaccagcctgttcggcggcgaggacaccagcagaagcagcaccagaggcagcctgaaccccgagaaccccgtgcaggtgagcatcaaccagctgaccgccgccatctacgacctgctgagactgcacgccaacagcggcagaagccccaccgactgcgcccagagcagcaagagcgtgaaggaggcctggaccaccaccgagcagctgcagttcaccatcttcgccgcccacggcatcagcagcaactgggtgagcaactacgagaagtactacctgatctgcagcctgagccacaacggcaaggacctgttcaagcccatccagagcaagaaggtgggcacctacaagaacttcttctacctgatcaagtgggacgagctgatcatcttccccatccagatcagccagctgcccctggagagcgtgctgcacctgaccctgttcggcatcctgaaccagagcagcggcagcagccccgacagcaacaagcagagaaagggccccgaggccctgggcaaggtgagcctgcccctgttcgacttcaagagattcctgacctgcggcaccaagctgctgtacctgtggaccagcagccacaccaacagcgtgcccggcaccgtgaccaagaagggctacgtgatggagagaatcgtgctgcaggtggacttccccagccccgccttcgacatcatctacaccaccccccaggtggacagaagcatcatccagcagcacaacctggagaccctggagaacgacatcaagggcaagctgctggacatcctgcacaaggacagcagcctgggcctgagcaaggaggacaaggccttcctgtgggagaagagatactactgcttcaagcaccccaactgcctgcccaagatcctggccagcgcccccaactggaagtgggtgaacctggccaagacctacagcctgctgcaccagtggcccgccctgtaccccctgatcgccctggagctgctggacagcaagttcgccgaccaggaggtgagaagcctggccgtgacctggatcgaggccatcagcgacgacgagctgaccgacctgctgccccagttcgtgcaggccctgaagtacgagatctacctgaacagcagcctggtgcagttcctgctgagcagagccctgggcaacatccagatcgcccacaacctgtactggctgctgaaggacgccctgcacgacgtgcagttcagcaccagatacgagcacgtgctgggcgccctgctgagcgtgggcggcaagagactgagagaggagctgctgaagcagaccaagctggtgcagctgctgggcggcgtggccgagaaggtgagacaggccagcggcagcgccagacaggtggtgctgcagagaagcatggagagagtgcagagcttcttccagaagaacaagtgcagactgcccctgaagcccagcctggtggccaaggagctgaacatcaagagctgcagcttcttcagcagcaacgccgtgcccctgaaggtgaccatggtgaacgccgaccccatgggcgaggagatcaacgtgatgttcaaggtgggcgaggacctgagacaggacatgctggccctgcagatgatcaagatcatggacaagatctggctgaaggagggcctggacctgagaatggtgatcttcaagtgcctgagcaccggcagagacagaggcatggtggagctggtgcccgccagcgacaccctgagaaagatccaggtggagtacggcgtgaccggcagcttcaaggacaagcccctggccgagtggctgagaaagtacaaccccagcgaggaggagtacgagaaggccagcgagaacttcatctacagctgcgccggctgctgcgtggccacctacgtgctgggcatctgcgacagacacaacgacaacatcatgctgagaagcaccggccacatgttccacatcgacttcggcaagttcctgggccacgcccagatgttcggcagcttcaagagagacagagcccccttcgtgctgaccagcgacatggcctacgtgatcaacggcggcgagaagcccaccatcagattccagctgttcgtggacctgtgctgccaggcctacaacctgatcagaaagcagaccaacctgttcctgaacctgctgagcctgatgatccccagcggcctgcccgagctgaccagcatccaggacctgaagtacgtgagagacgccctgcagccccagaccaccgacgccgaggccaccatcttcttcaccagactgatcgagagcagcctgggcagcatcgccaccaagttcaacttcttcatccacaacctggcccagctgagattcagcggcctgcccagcaacgacgagcccatcctgagcttcagccccaagacctacagcttcagacaggacggcagaatcaaggaggtgagcgtgttcacctaccacaagaagtacaaccccgacaagcactacatctacgtggtgagaatcctgagagagggccagatcgagcccagcttcgtgttcagaaccttcgacgagttccaggagctgcacaacaagctgagcatcatcttccccctgtggaagctgcccggcttccccaacagaatggtgctgggcagaacccacatcaaggacgtggccgccaagagaaagatcgagctgaacagctacctgcagagcctgatgaacgccagcaccgacgtggccgagtgcgacctggtgtgcaccttcttccaccccctgctgagagacgagaaggccgagggcatcgccagaagcgccgacgccggcagcttcagccccacccccggccagatcggcggcgccgtgaagctgagcatcagctacagaaacggcaccctgttcatcatggtgatgcacatcaaggacctggtgaccgaggacggcgccgaccccaacccctacgtgaagacctacctgctgcccgacaaccacaagaccagcaagagaaagaccaagatcagcagaaagaccagaaaccccaccttcaacgagatgctggtgtacagcggctacagcaaggagaccctgagacagagagagctgcagctgagcgtgctgagcgccgagagcctgagagagaacttcttcctgggcggcgtgaccctgcccctgaaggacttcaacctgagcaaggagaccgtgaagtggtaccagctgaccgccgccacctacctgtag

SEQ ID NO: 12115 - DNA, 393 bp, synthetic construct
  misc_feature 1..393: note = Description of Artificial Sequence: Synthetic coding sequence
  source 1..393: mol_type = other DNA
atggcccagatcagcagcaacagcggcttcaaggagtgccccagcagccaccccgagcccaccagagccaaggacgtggacaaggaggaggccctgcagatggaggccgaggccctggccaagctgcagaaggacagacaggtgaccgacaaccagagaggcttcgagctgagcagcagcaccagaaagaaggcccaggtgtacaacaagcaggactacgacctgatggtgttccccgagagcgacagccagaagagagccctggacatcgacgtggagaagctgacccaggccgagctggagaagctgctgctggacgacagcttcgagaccaagaagacccccgtgctgcccgtgacccccatcctgagccccagcttcagcgcccagtag

SEQ ID NO: 12116 - DNA, 1452 bp, synthetic construct
  misc_feature 1..1452: note = Description of Artificial Sequence: Synthetic coding sequence
  source 1..1452: mol_type = other DNA
atggcccagatcagcagcaacagcggcttcaaggagtgccccagcagccaccccgagcccaccagagccaaggacgtggacaaggaggaggccctgcagatggaggccgaggccctggccaagctgcagaaggacagacaggtgaccgacaaccagagaggcttcgagctgagcagcagcaccagaaagaaggcccaggtgtacaacaagcaggactacgacctgatggtgttccccgagagcgacagccagaagagagccctggacatcgacgtggagaagctgacccaggccgagctggagaagctgctgctggacgacagcttcgagaccaagaagacccccgtgctgcccgtgacccccatcctgagccccagcttcagcgcccagctgtacttcagacccaccatccagagaggccagtggccccccggcctgcccggccccagcacctacgccctgcccagcatctaccccagcacctacagcaagcaggccgccttccagaacggcttcaaccccagaatgcccaccttccccagcaccgagcccatctacctgagcctgcccggccagagcccctacttcagctaccccctgacccccgccacccccttccacccccagggcagcctgcccatctacagacccgtggtgagcaccgacatggccaagctgttcgacaagatcgccagcaccagcgagttcctgaagaacggcaaggccagaaccgacctggagatcaccgacagcaaggtgagcaacctgcaggtgagccccaagagcgaggacatcagcaagttcgactggctggacctggaccccctgagcaagcccaaggtggacaacgtggaggtgctggaccacgaggaggagaagaacgtgagcagcctgctggccaaggacccctgggacgccgtgctgctggaggagagaagcaccgccaactgccacctggagagaaaggtgaacggcaagagcctgagcgtggccaccgtgaccagaagccagagcctgaacatcagaaccacccagctggccaaggcccagggccacatcagccagaaggaccccaacggcaccagcagcctgcccaccggcagcagcctgctgcaggaggtggaggtgcagaacgaggagatggccgccttctgcagaagcatcaccaagctgaagaccaagttcccctacaccaaccacagaaccaaccccggctacctgctgagccccgtgaccgcccagagaaacatctgcggcgagaacgccagcgtgaaggtgagcatcgacatcgagggcttccagctgcccgtgaccttcacctgcgacgtgagcagcaccgtggagatcatcatcatgcaggccctgtgctgggtgcacgacgacctgaaccaggtggacgtgggcagctacgtgctgaaggtgtgcggccaggaggaggtgctgcagaagtag

SEQ ID NO: 12117 - DNA, 3921 bp, synthetic construct
  misc_feature 1..3921: note = Description of Artificial Sequence: Synthetic coding sequence
  source 1..3921: mol_type = other DNA
atggccgccttctgcagaagcatcaccaagctgaagaccaagttcccctacaccaaccacagaaccaaccccggctacctgctgagccccgtgaccgcccagagaaacatctgcggcgagaacgccagcgtgaaggtgagcatcgacatcgagggcttccagctgcccgtgaccttcacctgcgacgtgagcagcaccgtggagatcatcatcatgcaggccctgtgctgggtgcacgacgacctgaaccaggtggacgtgggcagctacgtgctgaaggtgtgcggccaggaggaggtgctgcagaacaaccactgcctgggcagccacgagcacatccagaactgcagaaagtgggacaccgagatcagactgcagctgctgaccttcagcgccatgtgccagaacctggccagaaccgccgaggacgacgagacccccgtggacctgaacaagcacctgtaccagatcgagaagccctgcaaggaggccatgaccagacaccccgtggaggagctgctggacagctaccacaaccaggtggagctggccctgcagatcgagaaccagcacagagccgtggaccaggtgatcaaggccgtgagaaagatctgcagcgccctggacggcgtggagaccctggccatcaccgagagcgtgaagaagctgaagagagccgtgaacctgcccagaagcaagaccgccgacgtgaccagcctgttcggcggcgaggacaccagcagaagcagcaccagaggcagcctgaaccccgagaaccccgtgcaggtgagcatcaaccagctgaccgccgccatctacgacctgctgagactgcacgccaacagcggcagaagccccaccgactgcgcccagagcagcaagagcgtgaaggaggcctggaccaccaccgagcagctgcagttcaccatcttcgccgcccacggcatcagcagcaactgggtgagcaactacgagaagtactacctgatctgcagcctgagccacaacggcaaggacctgttcaagcccatccagagcaagaaggtgggcacctacaagaacttcttctacctgatcaagtgggacgagctgatcatcttccccatccagatcagccagctgcccctggagagcgtgctgcacctgaccctgttcggcatcctgaaccagagcagcggcagcagccccgacagcaacaagcagagaaagggccccgaggccctgggcaaggtgagcctgcccctgttcgacttcaagagattcctgacctgcggcaccaagctgctgtacctgtggaccagcagccacaccaacagcgtgcccggcaccgtgaccaagaagggctacgtgatggagagaatcgtgctgcaggtggacttccccagccccgccttcgacatcatctacaccaccccccaggtggacagaagcatcatccagcagcacaacctggagaccctggagaacgacatcaagggcaagctgctggacatcctgcacaaggacagcagcctgggcctgagcaaggaggacaaggccttcctgtgggagaagagatactactgcttcaagcaccccaactgcctgcccaagatcctggccagcgcccccaactggaagtgggtgaacctggccaagacctacagcctgctgcaccagtggcccgccctgtaccccctgatcgccctggagctgctggacagcaagttcgccgaccaggaggtgagaagcctggccgtgacctggatcgaggccatcagcgacgacgagctgaccgacctgctgccccagttcgtgcaggccctgaagtacgagatctacctgaacagcagcctggtgcagttcctgctgagcagagccctgggcaacatccagatcgcccacaacctgtactggctgctgaaggacgccctgcacgacgtgcagttcagcaccagatacgagcacgtgctgggcgccctgctgagcgtgggcggcaagagactgagagaggagctgctgaagcagaccaagctggtgcagctgctgggcggcgtggccgagaaggtgagacaggccagcggcagcgccagacaggtggtgctgcagagaagcatggagagagtgcagagcttcttccagaagaacaagtgcagactgcccctgaagcccagcctggtggccaaggagctgaacatcaagagctgcagcttcttcagcagcaacgccgtgcccctgaaggtgaccatggtgaacgccgaccccatgggcgaggagatcaacgtgatgttcaaggtgggcgaggacctgagacaggacatgctggccctgcagatgatcaagatcatggacaagatctggctgaaggagggcctggacctgagaatggtgatcttcaagtgcctgagcaccggcagagacagaggcatggtggagctggtgcccgccagcgacaccctgagaaagatccaggtggagtacggcgtgaccggcagcttcaaggacaagcccctggccgagtggctgagaaagtacaaccccagcgaggaggagtacgagaaggccagcgagaacttcatctacagctgcgccggctgctgcgtggccacctacgtgctgggcatctgcgacagacacaacgacaacatcatgctgagaagcaccggccacatgttccacatcgacttcggcaagttcctgggccacgcccagatgttcggcagcttcaagagagacagagcccccttcgtgctgaccagcgacatggcctacgtgatcaacggcggcgagaagcccaccatcagattccagctgttcgtggacctgtgctgccaggcctacaacctgatcagaaagcagaccaacctgttcctgaacctgctgagcctgatgatccccagcggcctgcccgagctgaccagcatccaggacctgaagtacgtgagagacgccctgcagccccagaccaccgacgccgaggccaccatcttcttcaccagactgatcgagagcagcctgggcagcatcgccaccaagttcaacttcttcatccacaacctggcccagctgagattcagcggcctgcccagcaacgacgagcccatcctgagcttcagccccaagacctacagcttcagacaggacggcagaatcaaggaggtgagcgtgttcacctaccacaagaagtacaaccccgacaagcactacatctacgtggtgagaatcctgagagagggccagatcgagcccagcttcgtgttcagaaccttcgacgagttccaggagctgcacaacaagctgagcatcatcttccccctgtggaagctgcccggcttccccaacagaatggtgctgggcagaacccacatcaaggacgtggccgccaagagaaagatcgagctgaacagctacctgcagagcctgatgaacgccagcaccgacgtggccgagtgcgacctggtgtgcaccttcttccaccccctgctgagagacgagaaggccgagggcatcgccagaagcgccgacgccggcagcttcagccccacccccggccagatcggcggcgccgtgaagctgagcatcagctacagaaacggcaccctgttcatcatggtgatgcacatcaaggacctggtgaccgaggacggcgccgaccccaacccctacgtgaagacctacctgctgcccgacaaccacaagaccagcaagagaaagaccaagatcagcagaaagaccagaaaccccaccttcaacgagatgctggtgtacagcggctacagcaaggagaccctgagacagagagagctgcagctgagcgtgctgagcgccgagagcctgagagagaacttcttcctgggcggcgtgaccctgcccctgaaggacttcaacctgagcaaggagaccgtgaagtggtaccagctgaccgccgccacctacctgtag

SEQ ID NO: 12118 - DNA, 1947 bp, synthetic construct
  misc_feature 1..1947: note = Description of Artificial Sequence: Synthetic coding sequence
  source 1..1947: mol_type = other DNA
atggcccagatcagcagcaacagcggcttcaaggagtgccccagcagccaccccgagcccaccagagccaaggacgtggacaaggaggaggccctgcagatggaggccgaggccctggccaagctgcagaaggacagacaggtgaccgacaaccagagaggcttcgagctgagcagcagcaccagaaagaaggcccaggtgtacaacaagcaggactacgacctgatggtgttccccgagagcgacagccagaagagagccctggacatcgacgtggagaagctgacccaggccgagctggagaagctgctgctggacgacagcttcgagaccaagaagacccccgtgctgcccgtgacccccatcctgagccccagcttcagcgcccagctgtacttcagacccaccatccagagaggccagtggccccccggcctgcccggccccagcacctacgccctgcccagcatctaccccagcacctacagcaagcaggccgccttccagaacggcttcaaccccagaatgcccaccttccccagcaccgagcccatctacctgagcctgcccggccagagcccctacttcagctaccccctgacccccgccacccccttccacccccagggcagcctgcccatctacagacccgtggtgagcaccgacatggccaagctgttcgacaagatcgccagcaccagcgagttcctgaagaacggcaaggccagaaccgacctggagatcaccgacagcaaggtgagcaacctgcaggtgagccccaagagcgaggacatcagcaagttcgactggctggacctggaccccctgagcaagcccaaggtggacaacgtggaggtgctggaccacgaggaggagaagaacgtgagcagcctgctggccaaggacccctgggacgccgtgctgctggaggagagaagcaccgccaactgccacctggagagaaaggtgaacggcaagagcctgagcgtggccaccgtgaccagaagccagagcctgaacatcagaaccacccagctggccaaggcccagggccacatcagccagaaggaccccaacggcaccagcagcctgcccaccggcagcagcctgctgcaggaggtggaggtgcagaacgaggagatggccgccttctgcagaagcatcaccaagctgaagaccaagttcccctacaccaaccacagaaccaaccccggctacctgctgagccccgtgaccgcccagagaaacatctgcggcgagaacgccagcgtgaaggtgagcatcgacatcgagggcttccagctgcccgtgaccttcacctgcgacgtgagcagcaccgtggagatcatcatcatgcaggccctgtgctgggtgcacgacgacctgaaccaggtggacgtgggcagctacgtgctgaaggtgtgcggccaggaggaggtgctgcagaacaaccactgcctgggcagccacgagcacatccagaactgcagaaagtgggacaccgagatcagactgcagctgctgaccttcagcgccatgtgccagaacctggccagaaccgccgaggacgacgagacccccgtggacctgaacaagcacctgtaccagatcgagaagccctgcaaggaggccatgaccagacaccccgtggaggagctgctggacagctaccacaaccaggtggagctggccctgcagatcgagaaccagcacagagccgtggaccaggtgatcaaggccgtgagaaagatctgcagcgccctggacggcgtggagaccctggccatcaccgagagcgtgaagaagctgaagagagccgtgaacctgcccagaagcaagaccgccgacgtgaccagcctgttcggcggcgaggacaccagcagaagcagcaccagaggcagcctgaaccccgagaaccccgtgcaggtgagcatcaaccagctgtag

SEQ ID NO: 12119 - DNA, 2664 bp, synthetic construct
  misc_feature 1..2664: note = Description of Artificial Sequence: Synthetic coding sequence
  source 1..2664: mol_type = other DNA
atgggcgaggccgagaagttccactacatctacagctgcgacctggacatcaacgtgcagctgaagatcggcagcctggagggcaagagagagcagaagagctacaaggccgtgctggaggaccccatgctgaagttcagcggcctgtaccaggagacctgcagcgacctgtacgtgacctgccaggtgttcgccgagggcaagcccctggccctgcccgtgagaaccagctacaaggccttcagcaccagatggaactggaacgagtggctgaagctgcccgtgaagtaccccgacctgcccagaaacgcccaggtggccctgaccatctgggacgtgtacggccccggcaaggccgtgcccgtgggcggcaccaccgtgagcctgttcggcaagtacggcatgttcagacagggcatgcacgacctgaaggtgtggcccaacgtggaggccgacggcagcgagcccaccaagacccccggcagaaccagcagcaccctgagcgaggaccagatgagcagactggccaagctgaccaaggcccacagacagggccacatggtgaaggtggactggctggacagactgaccttcagagagatcgagatgatcaacgagagcgagaagagaagcagcaacttcatgtacctgatggtggagttcagatgcgtgaagtgcgacgacaaggagtacggcatcgtgtactacgagaaggacggcgacgagagcagccccatcctgaccagcttcgagctggtgaaggtgcccgacccccagatgagcatggagaacctggtggagagcaagcaccacaagctggccagaagcctgagaagcggccccagcgaccacgacctgaagcccaacgccgccaccagagaccagctgaacatcatcgtgagctacccccccaccaagcagctgacctacgaggagcaggacctggtgtggaagttcagatactacctgaccaaccaggagaaggccctgaccaagttcctgaagtgcgtgaactgggacctgccccaggaggccaagcaggccctggagctgctgggcaagtggaagcccatggacgtggaggacagcctggagctgctgagcagccactacaccaaccccaccgtgagaagatacgccgtggccagactgagacaggccgacgacgaggacctgctgatgtacctgctgcagctggtgcaggccctgaagtacgagaacttcgacgacatcaagaacggcctggagcccaccaagaaggacagccagagcagcgtgagcgagaacgtgagcaacagcggcatcaacagcgccgagatcgacagcagccagatcatcaccagccccctgcccagcgtgagcagccccccccccgccagcaagaccaaggaggtgcccgacggcgagaacctggagcaggacctgtgcaccttcctgatcagcagagcctgcaagaacagcaccctggccaactacctgtactggtacgtgatcgtggagtgcgaggaccaggacacccagcagagagaccccaagacccacgagatgtacctgaacgtgatgagaagattcagccaggccctgctgaagggcgacaagagcgtgagagtgatgagaagcctgctggccgcccagcagaccttcgtggacagactggtgcacctgatgaaggccgtgcagagagagagcggcaacagaaagaagaagaacgagagactgcaggccctgctgggcgacaacgagaagatgaacctgagcgacgtggagctgatccccctgcccctggagccccaggtgaagatcagaggcatcatccccgagaccgccaccctgttcaagagcgccctgatgcccgcccagctgttcttcaagaccgaggacggcggcaagtaccccgtgatcttcaagcacggcgacgacctgagacaggaccagctgatcctgcagatcatcagcctgatggacaagctgctgagaaaggagaacctggacctgaagctgaccccctacaaggtgctggccaccagcaccaagcacggcttcatgcagttcatccagagcgtgcccgtggccgaggtgctggacaccgagggcagcatccagaacttcttcagaaagtacgcccccagcgagaacggccccaacggcatcagcgccgaggtgatggacacctacgtgaagagctgcgccggctactgcgtgatcacctacatcctgggcgtgggcgacagacacctggacaacctgctgctgaccaagaccggcaagctgttccacatcgacttcggctacatcctgggcagagaccccaagcccctgcccccccccatgaagctgaacaaggagatggtggagggcatgggcggcacccagagcgagcagtaccaggagttcagaaagcagtgctacaccgccttcctgcacctgagaagatacagcaacctgatcctgaacctgttcagcctgatggtggacgccaacatccccgacatcgccctggagcccgacaagaccgtgaagaaggtgcaggacaagttcagactggacctgagcgacgaggaggccgtgcactacatgcagagcctgatcgacgagagcgtgcacgccctgttcgccgccgtggtggagcagatccacaagttcgcccagtactggagaaagtag

SEQ ID NO: 12120 - DNA, 2475 bp, synthetic construct
  misc_feature 1..2475: note = Description of Artificial Sequence: Synthetic coding sequence
  source 1..2475: mol_type = other DNA
atgggcgaggccgagaagttccactacatctacagctgcgacctggacatcaacgtgcagctgaagatctggaacgagtggctgaagctgcccgtgaagtaccccgacctgcccagaaacgcccaggtggccctgaccatctgggacgtgtacggccccggcaaggccgtgcccgtgggcggcaccaccgtgagcctgttcggcaagtacggcatgttcagacagggcatgcacgacctgaaggtgtggcccaacgtggaggccgacggcagcgagcccaccaagacccccggcagaaccagcagcaccctgagcgaggaccagatgagcagactggccaagctgaccaaggcccacagacagggccacatggtgaaggtggactggctggacagactgaccttcagagagatcgagatgatcaacgagagcgagaagagaagcagcaacttcatgtacctgatggtggagttcagatgcgtgaagtgcgacgacaaggagtacggcatcgtgtactacgagaaggacggcgacgagagcagccccatcctgaccagcttcgagctggtgaaggtgcccgacccccagatgagcatggagaacctggtggagagcaagcaccacaagctggccagaagcctgagaagcggccccagcgaccacgacctgaagcccaacgccgccaccagagaccagctgaacatcatcgtgagctacccccccaccaagcagctgacctacgaggagcaggacctggtgtggaagttcagatactacctgaccaaccaggagaaggccctgaccaagttcctgaagtgcgtgaactgggacctgccccaggaggccaagcaggccctggagctgctgggcaagtggaagcccatggacgtggaggacagcctggagctgctgagcagccactacaccaaccccaccgtgagaagatacgccgtggccagactgagacaggccgacgacgaggacctgctgatgtacctgctgcagctggtgcaggccctgaagtacgagaacttcgacgacatcaagaacggcctggagcccaccaagaaggacagccagagcagcgtgagcgagaacgtgagcaacagcggcatcaacagcgccgagatcgacagcagccagatcatcaccagccccctgcccagcgtgagcagccccccccccgccagcaagaccaaggaggtgcccgacggcgagaacctggagcaggacctgtgcaccttcctgatcagcagagcctgcaagaacagcaccctggccaactacctgtactggtacgtgatcgtggagtgcgaggaccaggacacccagcagagagaccccaagacccacgagatgtacctgaacgtgatgagaagattcagccaggccctgctgaagggcgacaagagcgtgagagtgatgagaagcctgctggccgcccagcagaccttcgtggacagactggtgcacctgatgaaggccgtgcagagagagagcggcaacagaaagaagaagaacgagagactgcaggccctgctgggcgacaacgagaagatgaacctgagcgacgtggagctgatccccctgcccctggagccccaggtgaagatcagaggcatcatccccgagaccgccaccctgttcaagagcgccctgatgcccgcccagctgttcttcaagaccgaggacggcggcaagtaccccgtgatcttcaagcacggcgacgacctgagacaggaccagctgatcctgcagatcatcagcctgatggacaagctgctgagaaaggagaacctggacctgaagctgaccccctacaaggtgctggccaccagcaccaagcacggcttcatgcagttcatccagagcgtgcccgtggccgaggtgctggacaccgagggcagcatccagaacttcttcagaaagtacgcccccagcgagaacggccccaacggcatcagcgccgaggtgatggacacctacgtgaagagctgcgccggctactgcgtgatcacctacatcctgggcgtgggcgacagacacctggacaacctgctgctgaccaagaccggcaagctgttccacatcgacttcggctacatcctgggcagagaccccaagcccctgcccccccccatgaagctgaacaaggagatggtggagggcatgggcggcacccagagcgagcagtaccaggagttcagaaagcagtgctacaccgccttcctgcacctgagaagatacagcaacctgatcctgaacctgttcagcctgatggtggacgccaacatccccgacatcgccctggagcccgacaagaccgtgaagaaggtgcaggacaagttcagactggacctgagcgacgaggaggccgtgcactacatgcagagcctgatcgacgagagcgtgcacgccctgttcgccgccgtggtggagcagatccacaagttcgcccagtactggagaaagtag

SEQ ID NO: 12121 - DNA, 2175 bp, synthetic construct
  misc_feature 1..2175: note = Description of Artificial Sequence: Synthetic coding sequence
  source 1..2175: mol_type = other DNA
atgagcgccgagggctaccagtacagagccctgtacgactacaagaaggagagagaggaggacatcgacctgcacctgggcgacatcctgaccgtgaacaagggcagcctggtggccctgggcttcagcgacggccaggaggccagacccgaggagatcggctggctgaacggctacaacgagaccaccggcgagagaggcgacttccccggcacctacgtggagtacatcggcagaaagaagatcagcccccccacccccaagcccagaccccccagacccctgcccgtggcccccggcagcagcaagaccgaggccgacgtggagcagcaggccctgaccctgcccgacctggccgagcagttcgccccccccgacatcgccccccccctgctgatcaagctggtggaggccatcgagaagaagggcctggagtgcagcaccctgtacagaacccagagcagcagcaacctggccgagctgagacagctgctggactgcgacacccccagcgtggacctggagatgatcgacgtgcacgtgctggccgacgccttcaagagatacctgctggacctgcccaaccccgtgatccccgccgccgtgtacagcgagatgatcagcctggcccccgaggtgcagagcagcgaggagtacatccagctgctgaagaagctgatcagaagccccagcatcccccaccagtactggctgaccctgcagtacctgctgaagcacttcttcaagctgagccagaccagcagcaagaacctgctgaacgccagagtgctgagcgagatcttcagccccatgctgttcagattcagcgccgccagcagcgacaacaccgagaacctgatcaaggtgatcgagatcctgatcagcaccgagtggaacgagagacagcccgcccccgccctgccccccaagccccccaagcccaccaccgtggccaacaacggcatgaacaacaacatgagcctgcaggacgccgagtggtactggggcgacatcagcagagaggaggtgaacgagaagctgagagacaccgccgacggcaccttcctggtgagagacgccagcaccaagatgcacggcgactacaccctgaccctgagaaagggcggcaacaacaagctgatcaagatcttccacagagacggcaagtacggcttcagcgaccccctgaccttcagcagcgtggtggagctgatcaaccactacagaaacgagagcctggcccagtacaaccccaagctggacgtgaagctgctgtaccccgtgagcaagtaccagcaggaccaggtggtgaaggaggacaacatcgaggccgtgggcaagaagctgcacgagtacaacacccagttccaggagaagagcagagagtacgacagactgtacgaggagtacaccagaaccagccaggagatccagatgaagagaaccgccatcgaggccttcaacgagaccatcaagatcttcgaggagcagtgccagacccaggagagatacagcaaggagtacatcgagaagttcaagagagagggcaacgagaaggagatccagagaatcatgcacaactacgacaagctgaagagcagaatcagcgagatcatcgacagcagaagaagactggaggaggacctgaagaagcaggccgccgagtacagagagatcgacaagagaatgaacagcatcaagcccgacctgatccagctgagaaagaccagagaccagtacctgatgtggctgacccagaagggcgtgagacagaagaagctgaacgagtggctgggcaacgagaacaccgaggaccagtacagcctggtggaggacgacgaggacctgccccaccacgacgagaagacctggaacgtgggcagcagcaacagaaacaaggccgagaacctgctgagaggcaagagagacggcaccttcctggtgagagagagcagcaagcagggctgctacgcctgcagcgtggtggtggacggcgaggtgaagcactgcgtgatcaacaagaccgccaccggctacggcttcgccgagccctacaacctgtacagcagcctgaaggagctggtgctgcactaccagcacaccagcctggtgcagcacaacgacagcctgaacgtgaccctggcctaccccgtgtacgcccagcagagaagatag

SEQ ID NO: 12122 - DNA, 1275 bp, synthetic construct
  misc_feature 1..1275: note = Description of Artificial Sequence: Synthetic coding sequence
  source 1..1275: mol_type = other DNA
atgcacaacctgcagaccctgccccccaagccccccaagcccaccaccgtggccaacaacggcatgaacaacaacatgagcctgcaggacgccgagtggtactggggcgacatcagcagagaggaggtgaacgagaagctgagagacaccgccgacggcaccttcctggtgagagacgccagcaccaagatgcacggcgactacaccctgaccctgagaaagggcggcaacaacaagctgatcaagatcttccacagagacggcaagtacggcttcagcgaccccctgaccttcagcagcgtggtggagctgatcaaccactacagaaacgagagcctggcccagtacaaccccaagctggacgtgaagctgctgtaccccgtgagcaagtaccagcaggaccaggtggtgaaggaggacaacatcgaggccgtgggcaagaagctgcacgagtacaacacccagttccaggagaagagcagagagtacgacagactgtacgaggagtacaccagaaccagccaggagatccagatgaagagaaccgccatcgaggccttcaacgagaccatcaagatcttcgaggagcagtgccagacccaggagagatacagcaaggagtacatcgagaagttcaagagagagggcaacgagaaggagatccagagaatcatgcacaactacgacaagctgaagagcagaatcagcgagatcatcgacagcagaagaagactggaggaggacctgaagaagcaggccgccgagtacagagagatcgacaagagaatgaacagcatcaagcccgacctgatccagctgagaaagaccagagaccagtacctgatgtggctgacccagaagggcgtgagacagaagaagctgaacgagtggctgggcaacgagaacaccgaggaccagtacagcctggtggaggacgacgaggacctgccccaccacgacgagaagacctggaacgtgggcagcagcaacagaaacaaggccgagaacctgctgagaggcaagagagacggcaccttcctggtgagagagagcagcaagcagggctgctacgcctgcagcgtggtggtggacggcgaggtgaagcactgcgtgatcaacaagaccgccaccggctacggcttcgccgagccctacaacctgtacagcagcctgaaggagctggtgctgcactaccagcacaccagcctggtgcagcacaacgacagcctgaacgtgaccctggcctaccccgtgtacgcccagcagagaagatag

SEQ ID NO: 12123 - DNA, 1365 bp, synthetic construct
  misc_feature 1..1365: note = Description of Artificial Sequence: Synthetic coding sequence
  source 1..1365: mol_type = other DNA
atgtacaacaccgtgtggaacatggaggacctggacctggagtacgccaagaccgacatcaactgcggcaccgacctgatgttctacatcgagatggacccccccgccctgccccccaagccccccaagcccaccaccgtggccaacaacggcatgaacaacaacatgagcctgcaggacgccgagtggtactggggcgacatcagcagagaggaggtgaacgagaagctgagagacaccgccgacggcaccttcctggtgagagacgccagcaccaagatgcacggcgactacaccctgaccctgagaaagggcggcaacaacaagctgatcaagatcttccacagagacggcaagtacggcttcagcgaccccctgaccttcagcagcgtggtggagctgatcaaccactacagaaacgagagcctggcccagtacaaccccaagctggacgtgaagctgctgtaccccgtgagcaagtaccagcaggaccaggtggtgaaggaggacaacatcgaggccgtgggcaagaagctgcacgagtacaacacccagttccaggagaagagcagagagtacgacagactgtacgaggagtacaccagaaccagccaggagatccagatgaagagaaccgccatcgaggccttcaacgagaccatcaagatcttcgaggagcagtgccagacccaggagagatacagcaaggagtacatcgagaagttcaagagagagggcaacgagaaggagatccagagaatcatgcacaactacgacaagctgaagagcagaatcagcgagatcatcgacagcagaagaagactggaggaggacctgaagaagcaggccgccgagtacagagagatcgacaagagaatgaacagcatcaagcccgacctgatccagctgagaaagaccagagaccagtacctgatgtggctgacccagaagggcgtgagacagaagaagctgaacgagtggctgggcaacgagaacaccgaggaccagtacagcctggtggaggacgacgaggacctgccccaccacgacgagaagacctggaacgtgggcagcagcaacagaaacaaggccgagaacctgctgagaggcaagagagacggcaccttcctggtgagagagagcagcaagcagggctgctacgcctgcagcgtggtggtggacggcgaggtgaagcactgcgtgatcaacaagaccgccaccggctacggcttcgccgagccctacaacctgtacagcagcctgaaggagctggtgctgcactaccagcacaccagcctggtgcagcacaacgacagcctgaacgtgaccctggcctaccccgtgtacgcccagcagagaagatag

SEQ ID NO: 12124 - DNA, 2199 bp, synthetic construct
  misc_feature 1..2199: note = Description of Artificial Sequence: Synthetic coding sequence
  source 1..2199: mol_type = other DNA
atgagcgccgagggctaccagtacagagccctgtacgactacaagaaggagagagaggaggacatcgacctgcacctgggcgacatcctgaccgtgaacaagggcagcctggtggccctgggcttcagcgacggccaggaggccagacccgaggagatcggctggctgaacggctacaacgagaccaccggcgagagaggcgacttccccggcacctacgtggagtacatcggcagaaagaagatcagcccccccacccccaagcccagaccccccagacccctgcccgtggcccccggcagcagcaagaccgaggccgacgtggagcagcaggccctgaccctgcccgacctggccgagcagttcgccccccccgacatcgccccccccctgctgatcaagctggtggaggccatcgagaagaagggcctggagtgcagcaccctgtacagaacccagagcagcagcaacctggccgagctgagacagctgctggactgcgacacccccagcgtggacctggagatgatcgacgtgcacgtgctggccgacgccttcaagagatacctgctggacctgcccaaccccgtgatccccgccgccgtgtacagcgagatgatcagcctggcccccgaggtgcagagcagcgaggagtacatccagctgctgaagaagctgatcagaagccccagcatcccccaccagtactggctgaccctgcagtacctgctgaagcacttcttcaagctgagccagaccagcagcaagaacctgctgaacgccagagtgctgagcgagatcttcagccccatgctgttcagattcagcgccgccagcagcgacaacaccgagaacctgatcaaggtgatcgagatcctgatcagcaccgagtggaacgagagacagcccgcccccgccctgccccccaagccccccaagcccaccaccgtggccaacaacggcatgaacaacaacatgagcctgcaggacgccgagtggtactggggcgacatcagcagagaggaggtgaacgagaagctgagagacaccgccgacggcaccttcctggtgagagacgccagcaccaagatgcacggcgactacaccctgaccctgagaaagggcggcaacaacaagctgatcaagatcttccacagagacggcaagtacggcttcagcgaccccctgaccttcagcagcgtggtggagctgatcaaccactacagaaacgagagcctggcccagtacaaccccaagctggacgtgaagctgctgtaccccgtgagcaagtaccagcaggaccaggtggtgaaggaggacaacatcgaggccgtgggcaagaagctgcacgagtacaacacccagttccaggagaagagcagagagtacgacagactgtacgaggagtacaccagaaccagccaggagatccagatgaagagaaccgccatcgaggccttcaacgagaccatcaagatcttcgaggagcagtgccagacccaggagagatacagcaaggagtacatcgagaagttcaagagagagggcaacgagaaggagatccagagaatcatgcacaactacgacaagctgaagagcagaatcagcgagatcatcgacagcagaagaagactggaggaggacctgaagaagcaggccgccgagtacagagagatcgacaagagaatgaacagcatcaagcccgacctgatccagctgagaaagaccagagaccagtacctgatgtggctgacccagaagggcgtgagacagaagaagctgaacgagtggctgggcaacgagaacaccgaggagaacttcctgagctgcctgcccagccagtacagcctggtggaggacgacgaggacctgccccaccacgacgagaagacctggaacgtgggcagcagcaacagaaacaaggccgagaacctgctgagaggcaagagagacggcaccttcctggtgagagagagcagcaagcagggctgctacgcctgcagcgtggtggtggacggcgaggtgaagcactgcgtgatcaacaagaccgccaccggctacggcttcgccgagccctacaacctgtacagcagcctgaaggagctggtgctgcactaccagcacaccagcctggtgcagcacaacgacagcctgaacgtgaccctggcctaccccgtgtacgcccagcagagaagatag

SEQ ID NO: 12125 - DNA, 2175 bp, synthetic construct; identical to SEQ ID NO: 12121
  misc_feature 1..2175: note = Description of Artificial Sequence: Synthetic coding sequence
  source 1..2175: mol_type = other DNA

SEQ ID NO: 12126 - DNA, 414 bp, synthetic construct
  misc_feature 1..414: note = Description of Artificial Sequence: Synthetic coding sequence
  source 1..414: mol_type = other DNA
atgcacggcgactacaccctgaccctgagaaagggcggcaacaacaagctgatcaagatcttccacagagacggcaagtacggcttcagcgaccccctgaccttcagcagcgtggtggagctgatcaaccactacagaaacgagagcctggcccagtacaaccccaagctggacgtgaagctgctgtaccccgtgagcaagtaccagcaggaccaggtggtgaaggaggacaacatcgaggccgtgggcaagaagctgcacgagtacaacacccagttccaggagaagagcagagagtacgacagactgtacgaggagtacaccagaaccagccaggagatccagatgaagagaaccgccatcgaggccttcaacgagaccatcaagatcttcgaggagcagtgccagacctag

SEQ ID NO: 12127 - DNA, 2175 bp, synthetic construct; identical to SEQ ID NO: 12121
  misc_feature 1..2175: note = Description of Artificial Sequence: Synthetic coding sequence
  source 1..2175: mol_type = other DNA

SEQ ID NO: 12128 - DNA, 1224 bp, synthetic construct
  misc_feature 1..1224: note = Description of Artificial Sequence: Synthetic coding sequence
  source 1..1224: mol_type = other DNA
atgctgttcgacaaggtgaaggccttcagcgtgcagctggacggcgccaccgccggcgtggagcccgtgttcagcggcggccaggccgtggccggcagagtgctgctggagctgagcagcgccgccagagtgggcgccctgagactgagagccagaggcagagcccacgtgcactggaccgagagcagaagcgccggcagcagcaccgcctacacccagagctacagcgagagagtggaggtggtgagccacagagccaccctgctggcccccgacaccggcgagaccaccaccctgccccccggcagacacgagttcctgttcagcttccagctgccccccaccctggtgaccagcttcgagggcaagcacggcagcgtgagatactgcatcaaggccaccctgcacagaccctgggtgcccgccagaagagccagaaaggtgttcaccgtgatcgagcccgtggacatcaacacccccgccctgctggccccccaggccggcgccagagagaaggtggccagaagctggtactgcaacagaggcctggtgagcctgagcgccaagatcgacagaaagggctacacccccggcgaggtgatccccgtgttcgccgagatcgacaacggcagcaccagacccgtgctgcccagagccgccgtggtgcagacccagaccttcatggccagaggcgccagaaagcagaagagagccgtggtggccagcctggccggcgagcccgtgggccccggccagagagccctgtggcagggcagagccctgagaatcccccccgtgggccccagcatcctgcactgcagagtgctgcacgtggactacgccctgaaggtgtgcgtggacatccccggcaccagcaagctgctgctggagctgcccctggtgatcggcaccatccccctgcaccccttcggcagcagaagcagcagcgtgggcagccacgccagcttcctgctggactggagactgggcgccctgcccgagagacccgaggccccccccgagtacagcgaggtggtggccgacaccgaggaggccgccctgggccagagccccttccccctgccccaggaccccgacatgagcctggagggccccttcttcgcctacatccaggagttcagatacagacccccccccctgtacagcgaggaggaccccaaccccctgctgggcgacatgagacccagatgcatgacctgctag

SEQ ID NO: 12129 - DNA, 1386 bp, synthetic construct
  misc_feature 1..1386: note = Description of Artificial Sequence: Synthetic coding sequence
  source 1..1386: mol_type = other DNA
atgtacaacaccgtgtggagcatggacagagacgacgccgactggagagaggtgatgatgccctacagcaccgagctgatcttctacatcgagatggacccccccgccctgccccccaagccccccaagcccatgaccagcgccgtgcccaacggcatgaaggacagcagcgtgagcctgcaggacgccgagtggtactggggcgacatcagcagagaggaggtgaacgacaagctgagagacatgcccgacggcaccttcctggtgagagacgccagcaccaagatgcagggcgactacaccctgaccctgagaaagggcggcaacaacaagctgatcaagatctaccacagagacggcaagtacggcttcagcgaccccctgaccttcaacagcgtggtggagctgatcaaccactaccaccacgagagcctggcccagtacaaccccaagctggacgtgaagctgatgtaccccgtgagcagataccagcaggaccagctggtgaaggaggacaacatcgacgccgtgggcaagaagctgcaggagtaccacagccagtaccaggagaagagcaaggagtacgacagactgtacgaggagtacaccagaaccagccaggagatccagatgaagagaaccgccatcgaggccttcaacgagaccatcaagatcttcgaggagcagtgccacacccaggagcagcacagcaaggagtacatcgagagattcagaagagagggcaacgagaaggagatcgagagaatcatgatgaactacgacaagctgaagagcagactgggcgagatccacgacagcaagatgagactggagcaggacctgaagaaccaggccctggacaacagagagatcgacaagaagatgaacagcatcaagcccgacctgatccagctgagaaagatcagagaccagcacctggtgtggctgaaccacaagggcgtgagacagaagagactgaacgtgtggctgggcatcaagaacgaggacgccgacgagaactacttcatcaacgaggaggacgagaacctgccccactacgacgagaagacctggttcgtggaggacatcaacagagtgcaggccgaggacctgctgtacggcaagcccgacggcgccttcctgatcagagagagcagcaagaagggctgctacgcctgcagcgtggtggccgacggcgaggtgaagcactgcgtgatctacagcaccgccagaggctacggcttcgccgagccctacaacctgtacagcagcctgaaggagctggtgctgcactaccagcagaccagcctggtgcagcacaacgacagcctgaacgtgagactggcctaccccgtgcacgcccagatgcccagcctgtgcagatag

SEQ ID NO: 12130 - DNA, 1101 bp, synthetic construct
  misc_feature 1..1101: note = Description of Artificial Sequence: Synthetic coding sequence
  source 1..1101: mol_type = other DNA
atgtacaacaccgtgtggagcatggacagagacgacgccgactggagagaggtgatgatgccctacagcaccgagctgatcttctacatcgagatggacccccccgccgccgaggtgaacgacaagctgagagacatgcccgacggcaccttcctggtgagagacgccagcaccaagatgcagggcgactacaccctgaccctgagaaagggcggcaacaacaagctgatcaagatctaccacagagacggcaagtacggcttcagcgaccccctgaccttcaacagcgtggtggagctgatcaaccactaccaccacgagagcctggcccagtacaaccccaagctggacgtgaagctgatgtaccccgtgagcagataccagcaggaccagctggtgaaggaggacaacatcgacgccgtgggcaagaagctgcaggagtaccacagccagtaccaggagaagagcaaggagtacgacagactgtacgaggagtacaccagaaccagccaggagatccagatgaagagaaccgccatcgaggccttcaacgagaccatcaagatcttcgaggagcagtgccacacccaggagcagcacagcaaggagtacatcgagagattcagaagagagggcaacgagaaggagatcgagagatggctgaaccacaagggcgtgagacagaagagactgaacgtgtggctgggcatcaagaacgaggacgccgacgagaactacttcatcaacgaggaggacgagaacctgccccactacgacgagaagacctggttcgtggaggacatcaacagagtgcaggccgaggacctgctgtacggcaagcccgacggcgccttcctgatcagagagagcagcaagaagggctgctacgcctgcagcgtggtggccgacggcgaggtgaagcactgcgtgatctacagcaccgccagaggctacggcttcgccgagccctacaacctgtacagcagcctgaaggagctggtgctgcactaccagcagaccagcctggtgcagcacaacgacagcctgaacgtgagactggcctaccccgtgcacgcccagatgcccagcctgtgcagatag

SEQ ID NO: 12131 - DNA, 1209 bp, synthetic construct
  misc_feature 1..1209: note = Description of Artificial Sequence: Synthetic coding sequence
  source 1..1209: mol_type = other DNA
atgtacaacaccgtgtggagcatggacagagacgacgccgactggagagaggtgatgatgccctacagcaccgagctgatcttctacatcgagatggacccccccgccctgccccccaagccccccaagcccatgaccagcgccgtgcccaacggcatgaaggacagcagcgtgagcctgcaggacgccgagtggtactggggcgacatcagcagagaggaggtgaacgacaagctgagagacatgcccgacggcaccttcctggtgagagacgccagcaccaagatgcagggcgactacaccctgaccctgagaaagggcggcaacaacaagctgatcaagatctaccacagagacggcaagtacggcttcagcgaccccctgaccttcaacagcgtggtggagctgatcaaccactaccaccacgagagcctggcccagtacaaccccaagctggacgtgaagctgatgtaccccgtgagcagataccagcaggaccagctggtgaaggaggacaacatcgacgccgtgggcaagaagctgcaggagtaccacagccagtaccaggagaagagcaaggagtacgacagactgtacgaggagtacaccagaaccagccaggagatccagatgaagagaaccgccatcgaggccttcaacgagaccatcaagatcttcgaggagcagtgccacacccaggagcagcacagcaaggagtacatcgagagattcagaagagagggcaacgagaaggagatcgagagatggctgaaccacaagggcgtgagacagaagagactgaacgtgtggctgggcatcaagaacgaggacgccgacgagaactacttcatcaacgaggaggacgagaacctgccccactacgacgagaagacctggttcgtggaggacatcaacagagtgcaggccgaggacctgctgtacggcaagcccgacggcgccttcctgatcagagagagcagcaagaagggctgctacgcctgcagcgtggtggccgacggcgaggtgaagcactgcgtgatctacagcaccgccagaggctacggcttcgccgagccctacaacctgtacagcagcctgaaggagctggtgctgcactaccagcagaccagcctggtgcagcacaacgacagcctgaacgtgagactggcctaccccgtgcacgcccagatgcccagcctgtgcagatag

SEQ ID NO: 12132 - DNA, 1386 bp, synthetic construct; identical to SEQ ID NO: 12129
  misc_feature 1..1386: note = Description of Artificial Sequence: Synthetic coding sequence
  source 1..1386: mol_type = other DNA

SEQ ID NO: 12133 - DNA, 1386 bp, synthetic construct; identical to SEQ ID NO: 12129
  misc_feature 1..1386: note = Description of Artificial Sequence: Synthetic coding sequence
  source 1..1386: mol_type = other DNA

SEQ ID NO: 12134 - DNA, 1209 bp, synthetic construct; identical to SEQ ID NO: 12131
  misc_feature 1..1209: note = Description of Artificial Sequence: Synthetic coding sequence
  source 1..1209: mol_type = other DNA

SEQ ID NO: 12135 - DNA, 621 bp, synthetic construct
  misc_feature 1..621: note = Description of Artificial Sequence: Synthetic coding sequence
  source 1..621: mol_type = other DNA
atgtacaacaccgtgtggagcatggacagagacgacgccgactggagagaggtgatgatgccctacagcaccgagctgatcttctacatcgagatggacccccccgccctgccccccaagccccccaagcccatgaccagcgccgtgcccaacggcatgaaggacagcagcgtgagcctgcaggacgccgagtggtactggggcgacatcagcagagaggaggtgaacgacaagctgagagacatgcccgacggcaccttcctggtgagagacgccagcaccaagatgcagggcgactacaccctgaccctgagaaagggcggcaacaacaagctgatcaagatctaccacagagacggcaagtacggcttcagcgaccccctgaccttcaacagcgtggtggagctgatcaaccactaccaccacgagagcctggcccagtacaaccccaagctggacgtgaagctgatgtaccccgtgagcagataccagcaggaccagctggtgaaggaggacaacatcgacgccgtgggcaagaagctgcaggagtaccacagccagtaccaggagaagagcaaggagtacgacagactgtacgaggagtacaccagaaccagctag

SEQ ID NO: 12136 - DNA, 1524 bp, synthetic construct
  misc_feature 1..1524: note = Description of Artificial Sequence: Synthetic coding sequence
  source 1..1524: mol_type = other DNA
atgggccccagcagactggtgagaggccccagaccccagggcatgagaagcccctacagaagacccggcatgggctggcccagacccagattccccagaatgttcaagtgcagcagaagaagataccagcagggcctgagaggcagaaccgccagcagcgccgccatcaaccccgccaccagagccatgggcatcaacaacacccacaccgacaccaccatcgtgtggatcttccccccccaggccctgccccccaagccccccaagcccatgaccagcgccgtgcccaacggcatgaaggacagcagcgtgagcctgcaggacgccgagtggtactggggcgacatcagcagagaggaggtgaacgacaagctgagagacatgcccgacggcaccttcctggtgagagacgccagcaccaagatgcagggcgactacaccctgaccctgagaaagggcggcaacaacaagctgatcaagatctaccacagagacggcaagtacggcttcagcgaccccctgaccttcaacagcgtggtggagctgatcaaccactaccaccacgagagcctggcccagtacaaccccaagctggacgtgaagctgatgtaccccgtgagcagataccagcaggaccagctggtgaaggaggacaacatcgacgccgtgggcaagaagctgcaggagtaccacagccagtaccaggagaagagcaaggagtacgacagactgtacgaggagtacaccagaaccagccaggagatccagatgaagagaaccgccatcgaggccttcaacgagaccatcaagatcttcgaggagcagtgccacacccaggagcagcacagcaaggagtacatcgagagattcagaagagagggcaacgagaaggagatcgagagaatcatgatgaactacgacaagctgaagagcagactgggcgagatccacgacagcaagatgagactggagcaggacctgaagaaccaggccctggacaacagagagatcgacaagaagatgaacagcatcaagcccgacctgatccagctgagaaagatcagagaccagcacctggtgtggctgaaccacaagggcgtgagacagaagagactgaacgtgtggctgggcatcaagaacgaggacgccgacgagaactacttcatcaacgaggaggacgagaacctgccccactacgacgagaagacctggttcgtggaggacatcaacagagtgcaggccgaggacctgctgtacggcaagcccgacggcgccttcctgatcagagagagcagcaagaagggctgctacgcctgcagcgtggtggccgacggcgaggtgaagcactgcgtgatctacagcaccgccagaggctacggcttcgccgagccctacaacctgtacagcagcctgaaggagctggtgctgcactaccagcagaccagcctggtgcagcacaacgacagcctgaacgtgagactggcctaccccgtgcacgcccagatgcccagcctgtgcagatag

SEQ ID NO: 12137 - DNA, 2643 bp, synthetic construct
  misc_feature 1..2643: note = Description of Artificial Sequence: Synthetic coding sequence
  source 1..2643: mol_type = other DNA
atgcagcccggcgccaccacctgcaccgaggacagaatccagcacgccctggagagatgcctgcacggcctgagcctgagcagaagaagcaccagctggagcgccggcctgtgcctgaactgctggagcctgcaggagctggtgagcagagaccccggccacttcctgatcctgctggagcagatcctgcagaagaccagagaggtgcaggagaagggcacctacgacctgctgacccccctggccctgctgttctacagcaccgtgctgtgcaccccccacttcccccccgacagcgacctgctgctgaaggccgccagcacctaccacagattcctgacctggcccgtgccctactgcagcatctgccaggagctgctgaccttcatcgacgccgagctgaaggcccccggcatcagctaccagagactggtgagagccgagcagggcctgcccatcagaagccacagaagcagcaccgtgaccgtgctgctgctgaaccccgtggaggtgcaggccgagttcctggccgtggccaacaagctgagcacccccggccacagcccccacagcgcctacaccaccctgctgctgcacgccttccaggccaccttcggcgcccactgcgacgtgcccggcctgcactgcagactgcaggccaagaccctggccgagctggaggacatcttcaccgagaccgccgaggcccaggagctggccagcggcatcggcgacgccgccgaggccagaagatggctgagaaccaagctgcaggccgtgggcgagaaggccggcttccccggcgtgctggacaccgccaagcccggcaagctgcacaccatccccatccccgtggccagatgctacacctacagctggagccaggacagcttcgacatcctgcaggagatcctgctgaaggagcaggagctgctgcagcccggcatcctgggcgacgacgaggaggaggaggaggaggaggaggaggtggaggaggacctggagaccgacggccactgcgccgagagagacagcctgctgagcaccagcagcctggccagccacgacagcaccctgagcctggccagcagccaggccagcggccccgccctgagcagacacctgctgaccagcttcgtgagcggcctgagcgacggcatggacagcggctacgtggaggacagcgaggagagcagcagcgagtggccctggagaagaggcagccaggagagaagaggccacagaagacccggccagaagttcatcagaatctacaagctgttcaagagcaccagccagctggtgctgagaagagacagcagaagcctggagggcagcagcgacaccgccctgcccctgagaagagccggcagcctgtgcagccccctggacgagcccgtgagcccccccagcagagcccagagaagcagaagcctgccccagcccaagctgggcacccagctgcccagctggctgctggcccccgccagcagaccccagagaagaagacccttcctgagcggcgacgaggaccccaaggccagcaccctgagagtggtggtgttcggcagcgacagaatcagcggcaaggtggccagagcctacagcaacctgagaagactggagaacaacagacccctgctgaccagattcttcaagctgcagttcttctacgtgcccgtgaagagaagccacggcaccagccccggcgcctgccccccccccagaagccagacccccagcccccccaccgacagccccagacacgccagccccggcgagctgggcaccaccccctgggaggagagcaccaacgacatcagccactacctgggcatgctggacccctggtacgagagaaacgtgctgggcctgatgcacctgccccccgaggtgctgtgccagcagagcctgaaggccgaggcccaggccctggagggcagccccacccagctgcccatcctggccgacatgctgctgtactactgcagattcgccgccagacccgtgctgctgcaggtgtaccagaccgagctgaccttcatcaccggcgagaagaccaccgagatcttcatccacagcctggagctgggccacagcgccgccaccagagccatcaaggccagcggccccggcagcaagagactgggcatcgacggcgacagagaggccgtgcccctgaccctgcagatcatctacagcaagggcgccatcagcggcagaagcagatggagcaacctggagaaggtgtgcaccagcgtgaacctgaacaaggcctgcagaaagcaggaggagctggacagcagcatggaggccctgaccctgaacctgaccgaggtggtgaagagacagaacagcaagagcaagaagggcttcaaccagatcagcaccagccagatcaaggtggacaaggtgcagatcatcggcagcaacagctgccccttcgccgtgtgcctggaccaggacgagagaaagatcctgcagagcgtggtgagatgcgaggtgagcccctgctacaagcccgagaagagcgacctgagcagccccccccagaccccccccgacctgcccgcccaggccgcccccgacctgtgcagcctgctgtgcctgcccatcatgaccttcagcggcgccctgccctag

SEQ ID NO: 12138 - DNA, 2643 bp, synthetic construct; identical to SEQ ID NO: 12137
  misc_feature 1..2643: note = Description of Artificial Sequence: Synthetic coding sequence
  source 1..2643: mol_type = other DNA

SEQ ID NO: 12139 - DNA, 447 bp, synthetic construct
  misc_feature 1..447: note = Description of Artificial Sequence: Synthetic coding sequence
  source 1..447: mol_type = other DNA
atgaagctgctggtgctggccgtgctgctgaccgtggccgccgccgacagcggcatcagccccagagccgtgtggcagttcagaaagatgatcaagtgcgtgatccccggcagcgaccccttcctggagtacaacaactacggctgctactgcggcctgggcggcagcggcacccccgtggacgagctggacaagtgctgccagacccacgacaactgctacgaccaggccaagaagctggacagctgcaagttcctgctggacaacccctacacccacacctacagctacagctgcagcggcagcgccatcacctgcagcagcaagaacaaggagtgcgaggccttcatctgcaactgcgacagaaacgccgccatctgcttcagcaaggccccctacaacaaggcccacaagaacctggacaccaagaagtactgccagagctag

SEQ ID NO: 12140 - DNA, 435 bp, synthetic construct
  misc_feature 1..435: note = Description of Artificial Sequence: Synthetic coding sequence
  source 1..435: mol_type = other DNA
atgaagaccctgctgctgctggccgtgatcatgatcttcggcctgctgcaggcccacggcaacctggtgaacttccacagaatgatcaagctgaccaccggcaaggaggccgccctgagctacggcttctacggctgccactgcggcgtgggcggcagaggcagccccaaggacgccaccgacagatgctgcgtgacccacgactgctgctacaagagactggagaagagaggctgcggcaccaagttcctgagctacaagttcagcaacagcggcagcagaatcacctgcgccaagcaggacagctgcagaagccagctgtgcgagtgcgacaaggccgccgccacctgcttcgccagaaacaagaccacctacaacaagaagtaccagtactacagcaacaagcactgcagaggcagcacccccagatgctag

SEQ ID NO: 12141 - DNA, 435 bp, synthetic construct; identical to SEQ ID NO: 12140
  misc_feature 1..435: note = Description of Artificial Sequence: Synthetic coding sequence
  source 1..435: mol_type = other DNA

SEQ ID NO: 12142 - DNA, 438 bp, synthetic construct
  misc_feature 1..438: note = Description of Artificial Sequence: Synthetic coding sequence
  source 1..438: mol_type = other DNA
atggagctggccctgctgtgcggcctggtggtgatggccggcgtgatccccatccagggcggcatcctgaacctgaacaagatggtgaagcaggtgaccggcaagatgcccatcctgagctactggccctacggctgccactgcggcctgggcggcagaggccagcccaaggacgccaccgactggtgctgccagacccacgactgctgctacgaccacctgaagacccagggctgcagcatctacaaggactactacagatacaacttcagccagggcaacatccactgcagcgacaagggcagctggtgcgagcagcagctgtgcgcctgcgacaaggaggtggccttctgcctgaagagaaacctggacacctaccagaagagactgagattctactggagaccccactgcagaggccagacccccggctgctag

SEQ ID NO: 12143 - DNA, 429 bp, synthetic construct
  misc_feature 1..429: note = Description of Artificial Sequence: Synthetic coding sequence
  source 1..429: mol_type = other DNA
atgaagagcccccacgtgctggtgttcctgtgcctgctggtggccctggtgaccggcaacctggtgcagttcggcgtgatgatcgagaagatgaccggcaagagcgccctgcagtacaacgactacggctgctactgcggcatcggcggcagccactggcccgtggaccagaccgactggtgctgccacgcccacgactgctgctacggcagactggagaagctgggctgcgagcccaagctggagaagtacctgttcagcgtgagcgagagaggcatcttctgcgccggcagaaccacctgccagagactgacctgcgagtgcgacaagagagccgccctgtgcttcagaagaaacctgggcacctacaacagaaagtacgcccactaccccaacaagctgtgcaccggccccacccccccctgctag

SEQ ID NO: 12144 - DNA, 636 bp, synthetic construct
  misc_feature 1..636: note = Description of Artificial Sequence: Synthetic coding sequence
  source 1..636: mol_type = other DNA
atggccgacggcgccaaggccaaccccaagggcttcaagaagaaggtgctggacagatgcttcagcggctggagaggccccagattcggcgccagctgccccagcagaaccagcagaagcagcctgggcatgaagaagttcttcaccgtggccatcctggccggcagcgtgctgagcaccgcccacggcagcctgctgaacctgaaggccatggtggaggccgtgaccggcagaagcgccatcctgagcttcgtgggctacggctgctactgcggcctgggcggcagaggccagcccaaggacgaggtggactggtgctgccacgcccacgactgctgctaccaggagctgttcgaccagggctgccacccctacgtggaccactacgaccacaccatcgagaacaacaccgagatcgtgtgcagcgacctgaacaagaccgagtgcgacaagcagacctgcatgtgcgacaagaacatggtgctgtgcctgatgaaccagacctacagagaggagtacagaggcttcctgaacgtgtactgccagggccccacccccaactgcagcatctacgagcccccccccgaggaggtgacctgcagccaccagagccccgccccccccgcccccccctag

SEQ ID NO: 12145 - DNA, 936 bp, synthetic construct
  misc_feature 1..936: note = Description of Artificial Sequence: Synthetic coding sequence
  source 1..936: mol_type = other DNA
atgcccgcccccagagcccccagagccctggccgccgccgcccccgccagcggcaaggccaagctgacccaccccggcaaggccatcctggccggcggcctggccggcggcatcgagatctgcatcaccttccccaccgagtacgtgaagacccagctgcagctggacgagagaagccacccccccagatacagaggcatcggcgactgcgtgagacagaccgtgagaagccacggcgtgctgggcctgtacagaggcctgagcagcctgctgtacggcagcatccccaaggccgccgtgagattcggcatgttcgagttcctgagcaaccacatgagagacgcccagggcagactggacagcaccagaggcctgctgtgcggcctgggcgccggcgtggccgaggccgtggtggtggtgtgccccatggagaccatcaaggtgaagttcatccacgaccagaccagccccaaccccaagtacagaggcttcttccacggcgtgagagagatcgtgagagagcagggcctgaagggcacctaccagggcctgaccgccaccgtgctgaagcagggcagcaaccaggccatcagattcttcgtgatgaccagcctgagaaactggtacagaggcgacaaccccaacaagcccatgaaccccctgatcaccggcgtgttcggcgccatcgccggcgccgccagcgtgttcggcaacacccccctggacgtgatcaagaccagaatgcagggcctggaggcccacaagtacagaaacacctgggactgcggcctgcagatcctgaagaaggagggcctgaaggccttctacaagggcaccgtgcccagactgggcagagtgtgcctggacgtggccatcgtgttcgtgatctacgacgaggtggtgaagctgctgaacaaggtgtggaagaccgactag

SEQ ID NO: 12146 - DNA, 2250 bp, synthetic construct
  misc_feature 1..2250: note = Description of Artificial Sequence: Synthetic coding sequence
  source 1..2250: mol_type = other DNA
atgagcttcatcgacccctaccagcacatcatcgtggagcaccagtacagccacaagttcaccgtggtggtgctgagagccaccaaggtgaccaagggcgccttcggcgacatgctggacacccccgacccctacgtggagctgttcatcagcaccacccccgacagcagaaagagaaccagacacttcaacaacgacatcaaccccgtgtggaacgagaccttcgagttcatcctggaccccaaccaggagaacgtgctggagatcaccctgatggacgccaactacgtgatggacgagaccctgggcaccgccaccttcaccgtgagcagcatgaaggtgggcgagaagaaggaggtgcccttcatcttcaaccaggtgaccgagatggtgctggagatgagcctggaggtgtgcagctgccccgacctgagattcagcatggccctgtgcgaccaggagaagaccttcagacagcagagaaaggagcacatcagagagagcatgaagaagctgctgggccccaagaacagcgagggcctgcacagcgccagagacgtgcccgtggtggccatcctgggcagcggcggcggcttcagagccatggtgggcttcagcggcgtgatgaaggccctgtacgagagcggcatcctggactgcgccacctacgtggccggcctgagcggcagcacctggtacatgagcaccctgtacagccaccccgacttccccgagaagggccccgaggagatcaacgaggagctgatgaagaacgtgagccacaaccccctgctgctgctgaccccccagaaggtgaagagatacgtggagagcctgtggaagaagaagagcagcggccagcccgtgaccttcaccgacatcttcggcatgctgatcggcgagaccctgatccacaacagaatgaacaccaccctgagcagcctgaaggagaaggtgaacaccgcccagtgccccctgcccctgttcacctgcctgcacgtgaagcccgacgtgagcgagctgatgttcgccgactgggtggagttcagcccctacgagatcggcatggccaagtacggcaccttcatggcccccgacctgttcggcagcaagttcttcatgggcaccgtggtgaagaagtacgaggagaaccccctgcacttcctgatgggcgtgtggggcagcgccttcagcatcctgttcaacagagtgctgggcgtgagcggcagccagagcagaggcagcaccatggaggaggagctggagaacatcaccaccaagcacatcgtgagcaacgacagcagcgacagcgacgacgagagccacgagcccaagggcaccgagaacgaggacgccggcagcgactaccagagcgacaaccaggccagctggatccacagaatgatcatggccctggtgagcgacagcgccctgttcaacaccagagagggcagagccggcaaggtgcacaacttcatgctgggcctgaacctgaacaccagctaccccctgagccccctgagcgacttcgccacccaggacagcttcgacgacgacgagctggacgccgccgtggccgaccccgacgagttcgagagaatctacgagcccctggacgtgaagagcaagaagatccacgtggtggacagcggcctgaccttcaacctgccctaccccctgatcctgagaccccagagaggcgtggacctgatcatcagcttcgacttcagcgccagacccagcgacagcagcccccccttcaaggagctgctgctggccgagaagtgggccaagatgaacaagctgcccttccccaagatcgacccctacgtgttcgacagagagggcctgaaggagtgctacgtgttcaagcccaagaaccccgacatggagaaggactgccccaccatcatccacttcgtgctggccaacatcaacttcagaaagtacagagcccccggcgtgcccagagagaccgaggaggagaaggagatcgccgacttcgacatcttcgacgaccccgagagccccttcagcaccttcaacttccagtaccccaaccaggccttcaagagactgcacgacctgatgcacttcaacaccctgaacaacatcgacgtgatcaaggaggccatggtggagagcatcgagtacagaagacagaaccccagcagatgcagcgtgagcctgagcaacgtggaggccagaagattcttcaacaaggagttcctgagcaagcccaaggcctag

SEQ ID NO: 12147 - DNA, 150 bp, synthetic construct
  misc_feature 1..150: note = Description of Artificial Sequence: Synthetic coding sequence
  source 1..150: mol_type = other DNA
atgagcttcatcgacccctaccagcacatcatcgtggagcaccagtacagccacaagttcaccgtggtggtgctgagagccaccaaggtgaccaagggcgccttcggcgacatgcccaaggtgaccaagggcgccttcggcgacatgtag

SEQ ID NO: 12148 - DNA, 2070 bp, synthetic construct
  misc_feature 1..2070: note = Description of Artificial Sequence: Synthetic coding sequence
  source 1..2070: mol_type = other DNA
atgagcttcatcgacccctaccagcacatcatcgtggagcaccagtacagccacaagttcaccgtggtggtgctgagagccaccaaggtgaccaagggcgccttcggcgacatgctggacacccccgacccctacgtggagctgttcatcagcaccacccccgacagcagaaagagaaccagacacttcaacaacgacatcaaccccgtgtggaacgagaccttcgagttcatcctggaccccaaccaggagaacgtgctggagatcaccctgatggacgccaactacgtgatggacgagaccctgggcaccgccaccttcaccgtgagcagcatgaaggtgggcgagaagaaggaggtgcccttcatcttcaaccaggtgcccgtggtggccatcctgggcagcggcggcggcttcagagccatggtgggcttcagcggcgtgatgaaggccctgtacgagagcggcatcctggactgcgccacctacgtggccggcctgagcggcagcacctggtacatgagcaccctgtacagccaccccgacttccccgagaagggccccgaggagatcaacgaggagctgatgaagaacgtgagccacaaccccctgctgctgctgaccccccagaaggtgaagagatacgtggagagcctgtggaagaagaagagcagcggccagcccgtgaccttcaccgacatcttcggcatgctgatcggcgagaccctgatccacaacagaatgaacaccaccctgagcagcctgaaggagaaggtgaacaccgcccagtgccccctgcccctgttcacctgcctgcacgtgaagcccgacgtgagcgagctgatgttcgccgactgggtggagttcagcccctacgagatcggcatggccaagtacggcaccttcatggcccccgacctgttcggcagcaagttcttcatgggcaccgtggtgaagaagtacgaggagaaccccctgcacttcctgatgggcgtgtggggcagcgccttcagcatcctgttcaacagagtgctgggcgtgagcggcagccagagcagaggcagcaccatggaggaggagctggagaacatcaccaccaagcacatcgtgagcaacgacagcagcgacagcgacgacgagagccacgagcccaagggcaccgagaacgaggacgccggcagcgactaccagagcgacaaccaggccagctggatccacagaatgatcatggccctggtgagcgacagcgccctgttcaacaccagagagggcagagccggcaaggtgcacaacttcatgctgggcctgaacctgaacaccagctaccccctgagccccctgagcgacttcgccacccaggacagcttcgacgacgacgagctggacgccgccgtggccgaccccgacgagttcgagagaatctacgagcccctggacgtgaagagcaagaagatccacgtggtggacagcggcctgaccttcaacctgccctaccccctgatcctgagaccccagagaggcgtggacctgatcatcagcttcgacttcagcgccagacccagcgacagcagcccccccttcaaggagctgctgctggccgagaagtgggccaagatgaacaagctgcccttccccaagatcgacccctacgtgttcgacagagagggcctgaaggagtgctacgtgttcaagcccaagaaccccgacatggagaaggactgccccaccatcatccacttcgtgctggccaacatcaacttcagaaagtacagagcccccggcgtgcccagagagaccgaggaggagaaggagatcgccgacttcgacatcttcgacgaccccgagagccccttcagcaccttcaacttccagtaccccaaccaggccttcaagagactgcacgacctgatgcacttcaacaccctgaacaacatcgacgtgatcaaggaggccatggtggagagcatcgagtacagaagacagaaccccagcagatgcagcgtgagcctgagcaacgtggaggccagaagattcttcaacaaggagttcctgagcaagcccaaggcctag

SEQ ID NO: 12149 - DNA, 2346 bp, synthetic construct
  misc_feature 1..2346: note = Description of Artificial Sequence: Synthetic coding sequence
  source 1..2346: mol_type = other DNA
atggccgtggccgaggtgagcagaacctgcctgctgaccgtgagagtgctgcaggcccacagactgcccagcaaggacctggtgacccccagcgactgctacgtgaccctgtggctgcccaccgcctgcagccacagactgcagaccagaaccgtgaagaacagcagcagccccgtgtggaaccagagcttccacttcagaatccacagacagctgaagaacgtgatggagctgaaggtgttcgaccaggacctggtgaccggcgacgaccccgtgctgagcgtgctgttcgacgccggcaccctgagagccggcgagttcagaagagagagcttcagcctgagcccccagggcgagggcagactggaggtggagttcagactgcagagcctggccgacagaggcgagtggctggtgagcaacggcgtgctggtggccagagagctgagctgcctgcacgtgcagctggaggagaccggcgaccagaagagcagcgagcacagagtgcagctggtggtgcccggcagctgcgagggcccccaggaggccagcgtgggcaccggcaccttcagattccactgccccgcctgctgggagcaggagctgagcatcagactgcaggacgcccccgaggagcagctgaaggcccccctgagcgccctgcccagcggccaggtggtgagactggtgttccccaccagccaggagcccctgatgagagtggagctgaagaaggaggccggcctgagagagctggccgtgagactgggcttcggcccctgcgccgaggagcaggccttcctgagcagaagaaagcaggtggtggccgccgccctgagacaggccctgcagctggacggcgacctgcaggaggacgagatccccgtggtggccatcatggccaccggcggcggcatcagagccatgaccagcctgtacggccagctggccggcctgaaggagctgggcctgctggactgcgtgagctacatcaccggcgccagcggcagcacctgggccctggccaacctgtacgaggaccccgagtggagccagaaggacctggccggccccaccgagctgctgaagacccaggtgaccaagaacaagctgggcgtgctggcccccagccagctgcagagatacagacaggagctggccgagagagccagactgggctaccccagctgcttcaccaacctgtgggccctgatcaacgaggccctgctgcacgacgagccccacgaccacaagctgagcgaccagagagaggccctgagccacggccagaaccccctgcccatctactgcgccctgaacaccaagggccagagcctgaccaccttcgagttcggcgagtggtgcgagttcagcccctacgaggtgggcttccccaagtacggcgccttcatccccagcgagctgttcggcagcgagttcttcatgggccagctgatgaagagactgcccgagagcagaatctgcttcctggagggcatctggagcaacctgtacgccgccaacctgcaggacagcctgtactgggccagcgagcccagccagttctgggacagatgggtgagaaaccaggccaacctggacaaggagcaggtgcccctgctgaagatcgaggagccccccagcaccgccggcagaatcgccgagttcttcaccgacctgctgacctggagacccctggcccaggccacccacaacttcctgagaggcctgcacttccacaaggactacttccagcacccccacttcagcacctggaaggccaccaccctggacggcctgcccaaccagctgacccccagcgagccccacctgtgcctgctggacgtgggctacctgatcaacaccagctgcctgcccctgctgcagcccaccagagacgtggacctgatcctgagcctggactacaacctgcacggcgccttccagcagctgcagctgctgggcagattctgccaggagcagggcatccccttcccccccatcagccccagccccgaggagcagctgcagcccagagagtgccacaccttcagcgaccccacctgccccggcgcccccgccgtgctgcacttccccctggtgagcgacagcttcagagagtacagcgcccccggcgtgagaagaacccccgaggaggccgccgccggcgaggtgaacctgagcagcagcgacagcccctaccactacaccaaggtgacctacagccaggaggacgtggacaagctgctgcacctgacccactacaacgtgtgcaacaaccaggagcagctgctggaggccctgagacaggccgtgcagagaagaagacagagaagaccccactag

SEQ ID NO: 12150 - DNA, 417 bp, synthetic construct
  misc_feature 1..417: note = Description of Artificial Sequence: Synthetic coding sequence
  source 1..417: mol_type = other DNA
atgaagggcctgctgcccctggcctggttcctggcctgcagcgtgcccgccgtgcagggcggcctgctggacctgaagagcatgatcgagaaggtgaccggcaagaacgccctgaccaactacggcttctacggctgctactgcggctggggcggcagaggcacccccaaggacggcaccgactggtgctgctgggcccacgaccactgctacggcagactggaggagaagggctgcaacatcagaacccagagctacaagtacagattcgcctggggcgtggtgacctgcgagcccggccccttctgccacgtgaacctgtgcgcctgcgacagaaagctggtgtactgcctgaagagaaacctgagaagctacaacccccagtaccagtacttccccaacatcctgtgcagctag

SEQ ID NO: 12151 - DNA, 2421 bp, synthetic construct
  misc_feature 1..2421: note = Description of Artificial Sequence: Synthetic coding sequence
  source 1..2421: mol_type = other DNA
atgcagttcttcggcagactggtgaacaccttcagcggcgtgaccaacctgttcagcaaccccttcagagtgaaggaggtggccgtggccgactacaccagcagcgacagagtgagagaggagggccagctgatcctgttccagaacacccccaacagaacctgggactgcgtgctggtgaaccccagaaacagccagagcggcttcagactgttccagctggagctggaggccgacgccctggtgaacttccaccagtacagcagccagctgctgcccttctacgagagcagcccccaggtgctgcacaccgaggtgctgcagcacctgaccgacctgatcagaaaccaccccagctggagcgtggcccacctggccgtggagctgggcatcagagagtgcttccaccacagcagaatcatcagctgcgccaactgcgccgagaacgaggagggctgcacccccctgcacctggcctgcagaaagggcgacggcgagatcctggtggagctggtgcagtactgccacacccagatggacgtgaccgactacaagggcgagaccgtgttccactacgccgtgcagggcgacaacagccaggtgctgcagctgctgggcagaaacgccgtggccggcctgaaccaggtgaacaaccagggcctgacccccctgcacctggcctgccagctgggcaagcaggagatggtgagagtgctgctgctgtgcaacgccagatgcaacatcatgggccccaacggctaccccatccacagcgccatgaagttcagccagaagggctgcgccgagatgatcatcagcatggacagcagccagatccacagcaaggaccccagatacggcgccagccccctgcactgggccaagaacgccgagatggccagaatgctgctgaagagaggctgcaacgtgaacagcaccagcagcgccggcaacaccgccctgcacgtggccgtgatgagaaacagattcgactgcgccatcgtgctgctgacccacggcgccaacgccgacgccagaggcgagcacggcaacacccccctgcacctggccatgagcaaggacaacgtggagatgatcaaggccctgatcgtgttcggcgccgaggtggacacccccaacgacttcggcgagacccccaccttcctggccagcaagatcggcagactggtgaccagaaaggccatcctgaccctgctgagaaccgtgggcgccgagtactgcttcccccccatccacggcgtgcccgccgagcagggcagcgccgccccccaccaccccttcagcctggagagagcccagcccccccccatcagcctgaacaacctggagctgcaggacctgatgcacatcagcagagccagaaagcccgccttcatcctgggcagcatgagagacgagaagagaacccacgaccacctgctgtgcctggacggcggcggcgtgaagggcctgatcatcatccagctgctgatcgccatcgagaaggccagcggcgtggccaccaaggacctgttcgactgggtggccggcaccagcaccggcggcatcctggccctggccatcctgcacagcaagagcatggcctacatgagaggcatgtacttcagaatgaaggacgaggtgttcagaggcagcagaccctacgagagcggccccctggaggagttcctgaagagagagttcggcgagcacaccaagatgaccgacgtgagaaagcccaaggtgatgctgaccggcaccctgagcgacagacagcccgccgagctgcacctgttcagaaactacgacgcccccgagaccgtgagagagcccagattcaaccagaacgtgaacctgagaccccccgcccagcccagcgaccagctggtgtggagagccgccagaagcagcggcgccgcccccacctacttcagacccaacggcagattcctggacggcggcctgctggccaacaaccccaccctggacgccatgaccgagatccacgagtacaaccaggacctgatcagaaagggccaggccaacaaggtgaagaagctgagcatcgtggtgagcctgggcaccggcagaagcccccaggtgcccgtgacctgcgtggacgtgttcagacccagcaacccctgggagctggccaagaccgtgttcggcgccaaggagctgggcaagatggtggtggactgctgcaccgaccccgacggcagagccgtggacagagccagagcctggtgcgagatggtgggcatccagtacttcagactgaacccccagctgggcaccgacatcatgctggacgaggtgagcgacaccgtgctggtgaacgccctgtgggagaccgaggtgtacatctacgagcacagagaggagttccagaagctgatccagctgctgctgagcccctag

SEQ ID NO: 12152 - DNA, 1284 bp, synthetic construct
  misc_feature 1..1284: note = Description of Artificial Sequence: Synthetic coding sequence
  source 1..1284: mol_type = other DNA
atgcagttcttcggcagactggtgaacaccttcagcggcgtgaccaacctgttcagcaaccccttcagagtgaaggaggtggccgtggccgactacaccagcagcgacagagtgagagaggagggccagctgatcctgttccagaacacccccaacagaacctgggactgcgtgctggtgaaccccagaaacagccagagcggcttcagatgcgccaactgcgccgagaacgaggagggctgcacccccctgcacctggcctgcagaaagggcgacggcgagatcctggtggagctggtgcagtactgccacacccagatggacgtgaccgactacaagggcgagaccgtgttccactacgccgtgcagggcgacaacagccaggtgctgcagctgctgggcagaaacgccgtggccggcctgaaccaggtgaacaaccagggcctgacccccctgcacctggcctgccagctgggcaagcaggagatggtgagagtgctgctgctgtgcaacgccagatgcaacatcatgggccccaacggctaccccatccacagcgccatgaagttcagccagaagggctgcgccgagatgatcatcagcatggacagcagccagatccacagcaaggaccccagatacggcgccagccccctgcactgggccaagaacgccgagatggccagaatgctgctgaagagaggctgcaacgtgaacagcaccagcagcgccggcaacaccgccctgcacgtggccgtgatgagaaacagattcgactgcgccatcgtgctgctgacccacggcgccaacgccgacgccagaggcgagcacggcaacacccccctgcacctggccatgagcaaggacaacgtggagatgatcaaggccctgatcgtgttcggcgccgaggtggacacccccaacgacttcggcgagacccccaccttcctggccagcaagatcggcagactggtgaccagaaaggccatcctgaccctgctgagaaccgtgggcgccgagtactgcttcccccccatccacggcgtgcccgccgagcagggcagcgccgccccccaccaccccttcagcctggagagagcccagcccccccccatcagcctgaacaacctgggcagccaccccagccaggccggctggtgggcctggggcgccgccagcgacggcaccaccggcagccacgcccacctgaccggccccgaggccagcgtgcaccccggcctgcacgagggcagagaggccgacagacagaacatggagagctag

SEQ ID NO: 12153 - DNA, 2259 bp, synthetic construct
  misc_feature 1..2259: note = Description of Artificial Sequence: Synthetic coding sequence
  source 1..2259: mol_type = other DNA
atgcagttcttcggcagactggtgaacaccttcagcggcgtgaccaacctgttcagcaaccccttcagagtgaaggaggtggccgtggccgactacaccagcagcgacagagtgagagaggagggccagctgatcctgttccagaacacccccaacagaacctgggactgcgtgctggtgaaccccagaaacagccagagcggcttcagactgttccagctggagctggaggccgacgccctggtgaacttccaccagtacagcagccagctgctgcccttctacgagagcagcccccaggtgctgcacaccgaggtgctgcagcacctgaccgacctgatcagaaaccaccccagctggagcgtggcccacctggccgtggagctgggcatcagagagtgcttccaccacagcagaatcatcagctgcgccaactgcgccgagaacgaggagggctgcacccccctgcacctggcctgcagaaagggcgacggcgagatcctggtggagctggtgcagtactgccacacccagatggacgtgaccgactacaagggcgagaccgtgttccactacgccgtgcagggcgacaacagccaggtgctgcagctgctgggcagaaacgccgtggccggcctgaaccaggtgaacaaccagggcctgacccccctgcacctggcctgccagctgggcaagcaggagatggtgagagtgctgctgctgtgcaacgccagatgcaacatcatgggccccaacggctaccccatccacagcgccatgaagttcagccagaagggctgcgccgagatgatcatcagcatggacagcagccagatccacagcaaggaccccagatacggcgccagccccctgcactgggccaagaacgccgagatggccagaatgctgctgaagagaggctgcaacgtgaacagcaccagcagcgccggcaacaccgccctgcacgtggccgtgatgagaaacagattcgactgcgccatcgtgctgctgacccacggcgccaacgccgacgccagaggcgagcacggcaacacccccctgcacctggccatgagcaaggacaacgtggagatgatcaaggccctgatcgtgttcggcgccgaggtggacacccccaacgacttcggcgagacccccaccttcctggccagcaagatcggcagacagctgcaggacctgatgcacatcagcagagccagaaagcccgccttcatcctgggcagcatgagagacgagaagagaacccacgaccacctgctgtgcctggacggcggcggcgtgaagggcctgatcatcatccagctgctgatcgccatcgagaaggccagcggcgtggccaccaaggacctgttcgactgggtggccggcaccagcaccggcggcatcctggccctggccatcctgcacagcaagagcatggcctacatgagaggcatgtacttcagaatgaaggacgaggtgttcagaggcagcagaccctacgagagcggccccctggaggagttcctgaagagagagttcggcgagcacaccaagatgaccgacgtgagaaagcccaaggtgatgctgaccggcaccctgagcgacagacagcccgccgagctgcacctgttcagaaactacgacgcccccgagaccgtgagagagcccagattcaaccagaacgtgaacctgagaccccccgcccagcccagcgaccagctggtgtggagagccgccagaagcagcggcgccgcccccacctacttcagacccaacggcagattcctggacggcggcctgctggccaacaaccccaccctggacgccatgaccgagatccacgagtacaaccaggacctgatcagaaagggccaggccaacaaggtgaagaagctgagcatcgtggtgagcctgggcaccggcagaagcccccaggtgcccgtgacctgcgtggacgtgttcagacccagcaacccctgggagctggccaagaccgtgttcggcgccaaggagctgggcaagatggtggtggactgctgcaccgaccccgacggcagagccgtggacagagccagagcctggtgcgagatggtgggcatccagtacttcagactgaacccccagctgggcaccgacatcatgctggacgaggtgagcgacaccgtgctggtgaacgccctgtgggagaccgaggtgtacatctacgagcacagagaggagttccagaagctgatccagctgctgctgagcccctag

SEQ ID NO: 12154 - DNA, 1440 bp, synthetic construct
  misc_feature 1..1440: note = Description of Artificial Sequence: Synthetic coding sequence
  source 1..1440: mol_type = other DNA
atgcagttcttcggcagactggtgaacaccttcagcggcgtgaccaacctgttcagcaaccccttcagagtgaaggaggtggccgtggccgactacaccagcagcgacagagtgagagaggagggccagctgatcctgttccagaacacccccaacagaacctgggactgcgtgctggtgaaccccagaaacagccagagcggcttcagactgttccagctggagctggaggccgacgccctggtgaacttccaccagtacagcagccagctgctgcccttctacgagagcagcccccaggtgctgcacaccgaggtgctgcagcacctgaccgacctgatcagaaaccaccccagctggagcgtggcccacctggccgtggagctgggcatcagagagtgcttccaccacagcagaatcatcagctgcgccaactgcgccgagaacgaggagggctgcacccccctgcacctggcctgcagaaagggcgacggcgagatcctggtggagctggtgcagtactgccacacccagatggacgtgaccgactacaagggcgagaccgtgttccactacgccgtgcagggcgacaacagccaggtgctgcagctgctgggcagaaacgccgtggccggcctgaaccaggtgaacaaccagggcctgacccccctgcacctggcctgccagctgggcaagcaggagatggtgagagtgctgctgctgtgcaacgccagatgcaacatcatgggccccaacggctaccccatccacagcgccatgaagttcagccagaagggctgcgccgagatgatcatcagcatggacagcagccagatccacagcaaggaccccagatacggcgccagccccctgcactgggccaagaacgccgagatggccagaatgctgctgaagagaggctgcaacgtgaacagcaccagcagcgccggcaacaccgccctgcacgtggccgtgatgagaaacagattcgactgcgccatcgtgctgctgacccacggcgccaacgccgacgccagaggcgagcacggcaacacccccctgcacctggccatgagcaaggacaacgtggagatgatcaaggccctgatcgtgttcggcgccgaggtggacacccccaacgacttcggcgagacccccaccttcctggccagcaagatcggcagactggtgaccagaaaggccatcctgaccctgctgagaaccgtgggcgccgagtactgcttcccccccatccacggcgtgcccgccgagcagggcagcgccgccccccaccaccccttcagcctggagagagcccagcccccccccatcagcctgaacaacctggagctgcaggacctgatgcacatcagcagagccagaaagcccgccttcatcctgggcagcatgagagacgagaagagaaccgacagaacctag

SEQ ID NO: 12155 - DNA, 2259 bp, synthetic construct; identical to SEQ ID NO: 12153
  misc_feature 1..2259: note = Description of Artificial Sequence: Synthetic coding sequence
  source 1..2259: mol_type = other DNA

SEQ ID NO: 12156 - DNA, 2004 bp, synthetic construct
  misc_feature 1..2004: note = Description of Artificial Sequence: Synthetic coding sequence
  source 1..2004: mol_type = other DNA
atgcagttcttcggcagactggtgaacaccttcagcggcgtgaccaacctgttcagcaaccccttcagagtgaaggaggtggccgtggccgactacaccagcagcgacagagtgagagaggagggccagctgatcctgttccagaacacccccaacagaacctgggactgcgtgctggtgaaccccagaaacagccagagcggcttcagactgttccagctggagctggaggccgacgccctggtgaacttccaccagtacagcagccagctgggcaagcaggagatggtgagagtgctgctgctgtgcaacgccagatgcaacatcatgggccccaacggctaccccatccacagcgccatgaagttcagccagaagggctgcgccgagatgatcatcagcatggacagcagccagatccacagcaaggaccccagatacggcgccagccccctgcactgggccaagaacgccgagatggccagaatgctgctgaagagaggctgcaacgtgaacagcaccagcagcgccggcaacaccgccctgcacgtggccgtgatgagaaacagattcgactgcgccatcgtgctgctgacccacggcgccaacgccgacgccagaggcgagcacggcaacacccccctgcacctggccatgagcaaggacaacgtggagatgatcaaggccctgatcgtgttcggcgccgaggtggacacccccaacgacttcggcgagacccccaccttcctggccagcaagatcggcagactggtgaccagaaaggccatcctgaccctgctgagaaccgtgggcgccgagtactgcttcccccccatccacggcgtgcccgccgagcagggcagcgccgccccccaccaccccttcagcctggagagagcccagcccccccccatcagcctgaacaacctggagctgcaggacctgatgcacatcagcagagccagaaagcccgccttcatcctgggcagcatgagagacgagaagagaacccacgaccacctgctgtgcctggacggcggcggcgtgaagggcctgatcatcatccagctgctgatcgccatcgagaaggccagcggcgtggccaccaaggacctgttcgactgggtggccggcaccagcaccggcggcatcctggccctggccatcctgcacagcaagagcatggcctacatgagaggcatgtacttcagaatgaaggacgaggtgttcagaggcagcagaccctacgagagcggccccctggaggagttcctgaagagagagttcggcgagcacaccaagatgaccgacgtgagaaagcccaaggtgatgctgaccggcaccctgagcgacagacagcccgccgagctgcacctgttcagaaactacgacgcccccgagaccgtgagagagcccagattcaaccagaacgtgaacctgagaccccccgcccagcccagcgaccagctggtgtggagagccgccagaagcagcggcgccgcccccacctacttcagacccaacggcagattcctggacggcggcctgctggccaacaaccccaccctggacgccatgaccgagatccacgagtacaaccaggacctgatcagaaagggccaggccaacaaggtgaagaagctgagcatcgtggtgagcctgggcaccggcagaagcccccaggtgcccgtgacctgcgtggacgtgttcagacccagcaacccctgggagctggccaagaccgtgttcggcgccaaggagctgggcaagatggtggtggactgctgcaccgaccccgacggcagagccgtggacagagccagagcctggtgcgagatggtgggcatccagtacttcagactgaacccccagctgggcaccgacatcatgctggacgaggtgagcgacaccgtgctggtgaacgccctgtgggagaccgaggtgtacatctacgagcacagagaggagttccagaagctgatccagctgctgctgagcccctag

SEQ ID NO: 12157 - DNA, 501 bp, synthetic construct
  misc_feature 1..501: note = Description of Artificial Sequence: Synthetic coding sequence
  source 1..501: mol_type = other DNA
atgcagttcttcggcagactggtgaacaccttcagcggcgtgaccaacctgttcagcaaccccttcagagtgaaggaggtggccgtggccgactacaccagcagcgacagagtgagagaggagggccagctgatcctgttccagaacacccccaacagaacctgggactgcgtgctggtgaaccccagaaacagccagagcggcttcagatgcgccaactgcgccgagaacgaggagggctgcacccccctgcacctggcctgcagaaagggcgacggcgagatcctggtggagctggtgcagtactgccacacccagatggacgtgaccgactacaagggcgagaccgtgttccactacgccgtgcagggcgacaacagccaggtgctgcagctgctgggcagaaacgccgtggccggcctgaaccaggtgaacaaccagggcctgacccccctgcacctggcctgccagctgggcaagcaggagatggtgagagtgtag

SEQ ID NO: 12158 - DNA, 1299 bp, synthetic construct
  misc_feature 1..1299: note = Description of Artificial Sequence: Synthetic coding sequence
  source 1..1299: mol_type = other DNA
atgcagttcttcggcagactggtgaacaccttcagcggcgtgaccaacctgttcagcaaccccttcagagtgaaggaggtggccgtggccgactacaccagcagcgacagagtgagagaggagggccagctgatcctgttccagaacacccccaacagaacctgggactgcgtgctggtgaaccccagaaacagccagagcggcttcagactgttccagctggagctggaggccgacgccctggtgaacttccaccagtacagcagccagctgctgcccttctacgagagcagcccccaggtgctgcacaccgaggtgctgcagcacctgaccgacctgatcagaaaccaccccagctggagcgtggcccacctggccgtggagctgggcatcagagagtgcttccaccacagcagaatcatcagagtgagaagcgcccaccaggtgcccggcctgtgggagctgatcagcacccaccacgagatcgagttcagccagcccccccaggccgtgcccatcgccagaagaaccagaagagccgcccacccctgcacctggcccgccgccagagtgatgggcagaagctggtggagctggtgcagcaccgccaccctgagatggatgagccccaccaccagagagagacccagcagcatcatgctgagcagagtgaccatcctgagatgctgcagatgcgccgagatgatcatcagcatggacagcagccagatccacagcaaggaccccagatacggcgccagccccctgcactgggccaagaacgccgagatggccagaatgctgctgaagagaggctgcaacgtgaacagcaccagcagcgccggcaacaccgccctgcacgtggccgtgatgagaaacagattcgactgcgccatcgtgctgctgacccacggcgccaacgccgacgccagaggcgagcacggcaacacccccctgcacctggccatgagcaaggacaacgtggagatgatcaaggccctgatcgtgttcggcgccgaggtggacacccccaacgacttcggcgagacccccaccttcctggccagcaagatcggcagactggtgaccagaaaggccatcctgaccctgctgagaaccgtgggcgccgagtactgcttcccccccatccacggcgtgcccgccgagcagggcagcgccgccccccaccaccccttcagcctggagagagcccagcccccccccatcagcctgaacaacctgggcagccaccccagccaggccggctggtgggcctggggcgccgccagcgacggctag

SEQ ID NO: 12159 - DNA, 243 bp, synthetic construct
  misc_feature 1..243: note = Description of Artificial Sequence: Synthetic coding sequence
  source 1..243: mol_type = other DNA
atgcagttcttcggcagactggtgaacaccttcagcggcgtgaccaacctgttcagcaaccccttcagagtgaaggaggtggccgtggccgactacaccagcagcgacagagtgagagaggagggccagctgatcctgttccagaacacccccaacagaacctgggactgcgtgctggtgaaccccagaaacagccagagcggcttcagactgttccagctggagctggaggccgacgcctag

SEQ ID NO: 12160 - DNA, 498 bp, synthetic construct
  misc_feature 1..498: note = Description of Artificial Sequence: Synthetic coding sequence
  source 1..498: mol_type = other DNA
atgggccccctgcccgtgtgcctgcccatcatgctgctgctgctgctgcccagcctgctgctgctgctgctgctgcccggccccggcagcggcgaggccagcagaatcctgagagtgcacagaagaggcatcctggagctggccggcaccgtgggctgcgtgggccccagaacccccatcgcctacatgaagtacggctgcttctgcggcctgggcggccacggccagcccagagacgccatcgactggtgctgccacggccacgactgctgctacaccagagccgaggaggccggctgcagccccaagaccgagagatacagctggcagtgcgtgaaccagagcgtgctgtgcggccccgccgagaacaagtgccaggagctgctgtgcaagtgcgaccaggagatcgccaactgcctggcccagaccgagtacaacctgaagtacctgttctacccccagttcctgtgcgagcccgacagccccaagtgcgactag

SEQ ID NO: 12161 - DNA, 498 bp, synthetic construct; identical to SEQ ID NO: 12160
  misc_feature 1..498: note = Description of Artificial Sequence: Synthetic coding sequence
  source 1..498: mol_type = other DNA

SEQ ID NO: 12162 - DNA, 570 bp, synthetic construct
  misc_feature 1..570: note = Description of Artificial Sequence: Synthetic coding sequence
  source 1..570: mol_type = other DNA
atggccctgctgagcagacccgccctgaccctgctgctgctgctgatggccgccgtggtgagatgccaggagcaggcccagaccaccgactggagagccaccctgaagaccatcagaaacggcgtgcacaagatcgacacctacctgaacgccgccctggacctgctgggcggcgaggacggcctgtgccagtacaagtgcagcgacggcagcaagcccttccccagatacggctacaagcccagcccccccaacggctgcggcagccccctgttcggcgtgcacctgaacatcggcatccccagcctgaccaagtgctgcaaccagcacgacagatgctacgagacctgcggcaagagcaagaacgactgcgacgaggagttccagtactgcctgagcaagatctgcagagacgtgcagaagaccctgggcctgacccagcacgtgcaggcctgcgagaccaccgtggagctgctgttcgacagcgtgatccacctgggctgcaagccctacctggacagccagagagccgcctgcagatgccactacgaggagaagaccgacctgtag

SEQ ID NO: 12163 - DNA, 213 bp, synthetic construct
  misc_feature 1..213: note = Description of Artificial Sequence: Synthetic coding sequence
  source 1..213: mol_type = other DNA
atggccctgctgagcagacccgccctgaccctgctgctgctgctgatggccgccgtggtgagatgccaggagcaggcccagaccaccgactggagagccaccctgaagaccatcagaaacggcgtgcacaagatcgacacctacctgaacgccgccctggacctgctgggcggcgaggacggcctgtgccagtacaagtgcagcgacgcctag

SEQ ID NO: 12164 - DNA, 588 bp, synthetic construct
  misc_feature 1..588: note = Description of Artificial Sequence: Synthetic coding sequence
  source 1..588: mol_type = other DNA
atgaagctggccagcggcttcctggtgctgtggctgagcctgggcggcggcctggcccagagcgacaccagccccgacaccgaggagagctacagcgactggggcctgagacacctgagaggcagcttcgagagcgtgaacagctacttcgacagcttcctggagctgctgggcggcaagaacggcgtgtgccagtacagatgcagatacggcaaggcccccatgcccagacccggctacaagccccaggagcccaacggctgcggcagctacttcctgggcctgaaggtgcccgagagcatggacctgggcatccccgccatgaccaagtgctgcaaccagctggacgtgtgctacgacacctgcggcgccaacaagtacagatgcgacgccaagttcagatggtgcctgcacagcatctgcagcgacctgaagagaagcctgggcttcgtgagcaaggtggaggccgcctgcgacagcctggtggacaccgtgttcaacaccgtgtggaccctgggctgcagacccttcatgaacagccagagagccgcctgcatctgcgccgaggaggagaaggaggagctgtag

SEQ ID NO: 12165 - DNA, 3876 bp, synthetic construct
  misc_feature 1..3876: note = Description of Artificial Sequence: Synthetic coding sequence
  source 1..3876: mol_type = other DNA
atggccggcgccgccagcccctgcgccaacggctgcggccccggcgcccccagcgacgccgaggtgctgcacctgtgcagaagcctggaggtgggcaccgtgatgaccctgttctacagcaagaagagccagagacccgagagaaagaccttccaggtgaagctggagaccagacagatcacctggagcagaggcgccgacaagatcgagggcgccatcgacatcagagagatcaaggagatcagacccggcaagaccagcagagacttcgacagataccaggaggaccccgccttcagacccgaccagagccactgcttcgtgatcctgtacggcatggagttcagactgaagaccctgagcctgcaggccaccagcgaggacgaggtgaacatgtggatcaagggcctgacctggctgatggaggacaccctgcaggcccccacccccctgcagatcgagagatggctgagaaagcagttctacagcgtggacagaaacagagaggacagaatcagcgccaaggacctgaagaacatgctgagccaggtgaactacagagtgcccaacatgagattcctgagagagagactgaccgacctggagcagagaagcggcgacatcacctacggccagttcgcccagctgtacagaagcctgatgtacagcgcccagaagaccatggacctgcccttcctggaggccagcaccctgagagccggcgagagacccgagctgtgcagagtgagcctgcccgagttccagcagttcctgctggactaccagggcgagctgtgggccgtggacagactgcaggtgcaggagttcatgctgagcttcctgagagaccccctgagagagatcgaggagccctacttcttcctggacgagttcgtgaccttcctgttcagcaaggagaacagcgtgtggaacagccagctggacgccgtgtgccccgacaccatgaacaaccccctgagccactactggatcagcagcagccacaacacctacctgaccggcgaccagttcagcagcgagagcagcctggaggcctacgccagatgcctgagaatgggctgcagatgcatcgagctggactgctgggacggccccgacggcatgcccgtgatctaccacggccacaccctgaccaccaagatcaagttcagcgacgtgctgcacaccatcaaggagcacgccttcgtggccagcgagtaccccgtgatcctgagcatcgaggaccactgcagcatcgcccagcagagaaacatggcccagtacttcaagaaggtgctgggcgacaccctgctgaccaagcccgtggagatcagcgccgacggcctgcccagccccaaccagctgaagagaaagatcctgatcaagcacaagaagctggccgagggcagcgcctacgaggaggtgcccaccagcatgatgtacagcgagaacgacatcagcaacagcatcaagaacggcatcctgtacctggaggaccccgtgaaccacgagtggtacccccactacttcgtgctgaccagcagcaagatctactacagcgaggagaccagcagcgaccagggcaacgaggacgaggaggagcccaaggaggtgagcagcagcaccgagctgcacagcaacgagaagtggttccacggcaagctgggcgccggcagagacggcagacacatcgccgagagactgctgaccgagtactgcatcgagaccggcgcccccgacggcagcttcctggtgagagagagcgagaccttcgtgggcgactacaccctgagcttctggagaaacggcaaggtgcagcactgcagaatccacagcagacaggacgccggcacccccaagttcttcctgaccgacaacctggtgttcgacagcctgtacgacctgatcacccactaccagcaggtgcccctgagatgcaacgagttcgagatgagactgagcgagcccgtgccccagaccaacgcccacgagagcaaggagtggtaccacgccagcctgaccagagcccaggccgagcacatgctgatgagagtgcccagagacggcgccttcctggtgagaaagagaaacgagcccaacagctacgccatcagcttcagagccgagggcaagatcaagcactgcagagtgcagcaggagggccagaccgtgatgctgggcaacagcgagttcgacagcctggtggacctgatcagctactacgagaagcaccccctgtacagaaagatgaagctgagataccccatcaacgaggaggccctggagaagatcggcaccgccgagcccgactacggcgccctgtacgagggcagaaaccccggcttctacgtggaggccaaccccatgcccaccttcaagtgcgccgtgaaggccctgttcgactacaaggcccagagagaggacgagctgaccttcatcaagagcgccatcatccagaacgtggagaagcaggagggcggctggtggagaggcgactacggcggcaagaagcagctgtggttccccagcaactacgtggaggagatggtgaaccccgtggccctggagcccgagagagagcacctggacgagaacagccccctgggcgacctgctgagaggcgtgctggacgtgcccgcctgccagatcgccatcagacccgagggcaagaacaacagactgttcgtgttcagcatcagcatggccagcgtggcccactggagcctggacgtggccgccgacagccaggaggagctgcaggactgggtgaagaagatcagagaggtggcccagaccgccgacgccagactgaccgagggcaagatcatggagagaagaaagaagatcgccctggagctgagcgagctggtggtgtactgcagacccgtgcccttcgacgaggagaagatcggcaccgagagagcctgctacagagacatgagcagcttccccgagaccaaggccgagaagtacgtgaacaaggccaagggcaagaagttcctgcagtacaacagactgcagctgagcagaatctaccccaagggccagagactggacagcagcaactacgaccccctgcccatgtggatctgcggcagccagctggtggccctgaacttccagacccccgacaagcccatgcagatgaaccaggccctgttcatgaccggcagacactgcggctacgtgctgcagcccagcaccatgagagacgaggccttcgaccccttcgacaagagcagcctgagaggcctggagccctgcgccatcagcatcgaggtgctgggcgccagacacctgcccaagaacggcagaggcatcgtgtgccccttcgtggagatcgaggtggccggcgccgagtacgacagcaccaagcagaagaccgagttcgtggtggacaacggcctgaaccccgtgtggcccgccaagcccttccacttccagatcagcaaccccgagttcgccttcctgagattcgtggtgtacgaggaggacatgttcagcgaccagaacttcctggcccaggccaccttccccgtgaagggcctgaagaccggctacagagccgtgcccctgaagaacaactacagcgaggacctggagctggccagcctgctgatcaagatcgacatcttccccgccaagcaggagaacggcgacctgagccccttcagcggcaccagcctgagagagagaggcagcgacgccagcggccagctgttccacggcagagccagagagggcagcttcgagagcagataccagcagcccttcgaggacttcagaatcagccaggagcacctggccgaccacttcgacagcagagagagaagagcccccagaagaaccagagtgaacggcgacaacagactgtag

SEQ ID NO: 12166 - DNA, 3873 bp, synthetic construct
  misc_feature 1..3873: note = Description of Artificial Sequence: Synthetic coding sequence
  source 1..3873: mol_type = other DNA
atggccggcgccgccagcccctgcgccaacggctgcggccccggcgcccccagcgacgccgaggtgctgcacctgtgcagaagcctggaggtgggcaccgtgatgaccctgttctacagcaagaagagccagagacccgagagaaagaccttccaggtgaagctggagaccagacagatcacctggagcagaggcgccgacaagatcgagggcgccatcgacatcagagagatcaaggagatcagacccggcaagaccagcagagacttcgacagataccaggaggaccccgccttcagacccgaccagagccactgcttcgtgatcctgtacggcatggagttcagactgaagaccctgagcctgcaggccaccagcgaggacgaggtgaacatgtggatcaagggcctgacctggctgatggaggacaccctgcaggcccccacccccctgcagatcgagagatggctgagaaagcagttctacagcgtggacagaaacagagaggacagaatcagcgccaaggacctgaagaacatgctgagccaggtgaactacagagtgcccaacatgagattcctgagagagagactgaccgacctggagcagagaagcggcgacatcacctacggccagttcgcccagctgtacagaagcctgatgtacagcgcccagaagaccatggacctgcccttcctggaggccagcaccctgagagccggcgagagacccgagctgtgcagagtgagcctgcccgagttccagcagttcctgctggactaccagggcgagctgtgggccgtggacagactgcaggtgcaggagttcatgctgagcttcctgagagaccccctgagagagatcgaggagccctacttcttcctggacgagttcgtgaccttcctgttcagcaaggagaacagcgtgtggaacagccagctggacgccgtgtgccccgacaccatgaacaaccccctgagccactactggatcagcagcagccacaacacctacctgaccggcgaccagttcagcagcgagagcagcctggaggcctacgccagatgcctgagaatgggctgcagatgcatcgagctggactgctgggacggccccgacggcatgcccgtgatctaccacggccacaccctgaccaccaagatcaagttcagcgacgtgctgcacaccatcaaggagcacgccttcgtggccagcgagtaccccgtgatcctgagcatcgaggaccactgcagcatcgcccagcagagaaacatggcccagtacttcaagaaggtgctgggcgacaccctgctgaccaagcccgtggagatcagcgccgacggcctgcccagccccaaccagctgaagagaaagatcctgatcaagcacaagaagctggccgagggcagcgcctacgaggaggtgcccaccagcatgatgtacagcgagaacgacatcagcaacagcatcaagaacggcatcctgtacctggaggaccccgtgaaccacgagtggtacccccactacttcgtgctgaccagcagcaagatctactacagcgaggagaccagcagcgaccagggcaacgaggacgaggaggagcccaaggaggtgagcagcagcaccgagctgcacagcaacgagaagtggttccacggcaagctgggcgccggcagagacggcagacacatcgccgagagactgctgaccgagtactgcatcgagaccggcgcccccgacggcagcttcctggtgagagagagcgagaccttcgtgggcgactacaccctgagcttctggagaaacggcaaggtgcagcactgcagaatccacagcagacaggacgccggcacccccaagttcttcctgaccgacaacctggtgttcgacagcctgtacgacctgatcacccactaccagcaggtgcccctgagatgcaacgagttcgagatgagactgagcgagcccgtgccccagaccaacgcccacgagagcaaggagtggtaccacgccagcctgaccagagcccaggccgagcacatgctgatgagagtgcccagagacggcgccttcctggtgagaaagagaaacgagcccaacagctacgccatcagcttcagagccgagggcaagatcaagcactgcagagtgcagcaggagggccagaccgtgatgctgggcaacagcgagttcgacagcctggtggacctgatcagctactacgagaagcaccccctgtacagaaagatgaagctgagataccccatcaacgaggaggccctggagaagatcggcaccgccgagcccgactacggcgccctgtacgagggcagaaaccccggcttctacgtggaggccaaccccatgcccaccttcaagtgcgccgtgaaggccctgttcgactacaaggcccagagagaggacgagctgaccttcatcaagagcgccatcatccagaacgtggagaagcaggagggcggctggtggagaggcgactacggcggcaagaagcagctgtggttccccagcaactacgtggaggagatggtgaaccccgtggccctggagcccgagagagagcacctggacgagaacagccccctgggcgacctgctgagaggcgtgctggacgtgcccgcctgccagatcgccatcagacccgagggcaagaacaacagactgttcgtgttcagcatcagcatggccagcgtggcccactggagcctggacgtggccgccgacagccaggaggagctgcaggactgggtgaagaagatcagagaggtggcccagaccgccgacgccagactgaccgagggcaagatcatggagagaagaaagaagatcgccctggagctgagcgagctggtggtgtactgcagacccgtgcccttcgacgaggagaagatcggcaccgagagagcctgctacagagacatgagcagcttccccgagaccaaggccgagaagtacgtgaacaaggccaagggcaagaagttcctgcagtacaacagactgcagctgagcagaatctaccccaagggccagagactggacagcagcaactacgaccccctgcccatgtggatctgcggcagccagctggtggccctgaacttccagacccccgacaagcccatgcagatgaaccaggccctgttcatgaccggcagacactgcggctacgtgctgcagcccagcaccatgagagacgaggccttcgaccccttcgacaagagcagcctgagaggcctggagccctgcgccatcagcatcgaggtgctgggcgccagacacctgcccaagaacggcagaggcatcgtgtgccccttcgtggagatcgaggtggccggcgccgagtacgacagcaccaagcagaagaccgagttcgtggtggacaacggcctgaaccccgtgtggcccgccaagcccttccacttccagatcagcaaccccgagttcgccttcctgagattcgtggtgtacgaggaggacatgttcagcgaccagaacttcctggcccaggccaccttccccgtgaagggcctgaagaccggctacagagccgtgcccctgaagaacaactacagcgaggacctggagctggccagcctgctgatcaagatcgacatcttccccgccaaggagaacggcgacctgagccccttcagcggcaccagcctgagagagagaggcagcgacgccagcggccagctgttccacggcagagccagagagggcagcttcgagagcagataccagcagcccttcgaggacttcagaatcagccaggagcacctggccgaccacttcgacagcagagagagaagagcccccagaagaaccagagtgaacggcgacaacagactgtag

SEQ ID NO: 12167 - DNA, 3876 bp, synthetic construct; identical to SEQ ID NO: 12165
  misc_feature 1..3876: note = Description of Artificial Sequence: Synthetic coding sequence
  source 1..3876: mol_type = other DNA

SEQ ID NO: 12168 - DNA, 3798 bp, synthetic construct
  misc_feature 1..3798: note = Description of Artificial Sequence: Synthetic coding sequence
  source 1..3798: mol_type = other DNA
atgagcaccaccgtgaacgtggacagcctggccgagtacgagaagagccagatcaagagagccctggagctgggcaccgtgatgaccgtgttcagcttcagaaagagcacccccgagagaagaaccgtgcaggtgatcatggagaccagacaggtggcctggagcaagaccgccgacaagatcgagggcttcctggacatcatggagatcaaggagatcagacccggcaagaacagcaaggacttcgagagagccaaggccgtgagacagaaggaggactgctgcttcaccatcctgtacggcacccagttcgtgctgagcaccctgagcctggccgccgacagcaaggaggacgccgtgaactggctgagcggcctgaagatcctgcaccaggaggccatgaacgccagcacccccaccatcatcgagagctggctgagaaagcagatctacagcgtggaccagaccagaagaaacagcatcagcctgagagagctgaagaccatcctgcccctgatcaacttcaaggtgagcagcgccaagttcctgaaggacaagttcgtggagatcggcgcccacaaggacgagctgagcttcgagcagttccacctgttctacaagaagctgatgttcgagcagcagaagagcatcctggacgagttcaagaaggacagcagcgtgttcatcctgggcaacaccgacagacccgacgccagcgccgtgtacctgcacgacttccagagattcctgatccacgagcagcaggagcactgggcccaggacctgaacaaggtgagagagagaatgaccaagttcatcgacgacaccatgagagagaccgccgagcccttcctgttcgtggacgagttcctgacctacctgttcagcagagagaacagcatctgggacgagaagtacgacgccgtggacatgcaggacatgaacaaccccctgagccactactggatcagcagcagccacaacacctacctgaccggcgaccagctgagaagcgagagcagccccgaggcctacatcagatgcctgagaatgggctgcagatgcatcgagctggactgctgggacggccccgacggcaagcccgtgatctaccacggctggaccagaaccaccaagatcaagttcgacgacgtggtgcaggccatcaaggaccacgccttcgtgaccagcagcttccccgtgatcctgagcatcgaggagcactgcagcgtggagcagcagagacacatggccaaggccttcaaggaggtgttcggcgacctgctgctgaccaagcccaccgaggccagcgccgaccagctgcccagccccagccagctgagagagaagatcatcatcaagcacaagaagctgggccccagaggcgacgtggacgtgaacatggaggacaagaaggacgagcacaagcagcagggcgagctgtacatgtgggacagcatcgaccagaagtggaccagacactactgcgccatcgccgacgccaagctgagcttcagcgacgacatcgagcagaccatggaggaggaggtgccccaggacatcccccccaccgagctgcacttcggcgagaagtggttccacaagaaggtggagaagagaaccagcgccgagaagctgctgcaggagtactgcatggagaccggcggcaaggacggcaccttcctggtgagagagagcgagaccttccccaacgactacaccctgagcttctggagaagcggcagagtgcagcactgcagaatcagaagcaccatggagggcggcaccctgaagtactacctgaccgacaacctgaccttcagcagcatctacgccctgatccagcactacagagagacccacctgagatgcgccgagttcgagctgagactgaccgaccccgtgcccaaccccaacccccacgagagcaagccctggtactacgacagcctgagcagaggcgaggccgaggacatgctgatgagaatccccagagacggcgccttcctgatcagaaagagagagggcagcgacagctacgccatcaccttcagagccagaggcaaggtgaagcactgcagaatcaacagagacggcagacacttcgtgctgggcaccagcgcctacttcgagagcctggtggagctggtgagctactacgagaagcacagcctgtacagaaagatgagactgagataccccgtgacccccgagctgctggagagatacaacatggagagagacatcaacagcctgtacgacgtgagcagaatgtacgtggaccccagcgagatcaaccccagcatgccccagagaaccgtgaaggccctgtacgactacaaggccaagagaagcgacgagctgagcttctgcagaggcgccctgatccacaacgtgagcaaggagcccggcggctggtggaagggcgactacggcaccagaatccagcagtacttccccagcaactacgtggaggacatcagcaccgccgacttcgaggagctggagaagcagatcatcgaggacaaccccctgggcagcctgtgcagaggcatcctggacctgaacacctacaacgtggtgaaggccccccagggcaagaaccagaagagcttcgtgttcatcctggagcccaagcagcagggcgacccccccgtggagttcgccaccgacagagtggaggagctgttcgagtggttccagagcatcagagagatcacctggaagatcgacaccaaggagaacaacatgaagtactgggagaagaaccagagcatcgccatcgagctgagcgacctggtggtgtactgcaagcccaccagcaagaccaaggacaacctggagaaccccgacttcagagagatcagaagcttcgtggagaccaaggccgacagcatcatcagacagaagcccgtggacctgctgaagtacaaccagaagggcctgaccagagtgtaccccaagggccagagagtggacagcagcaactacgaccccttcagactgtggctgtgcggcagccagatggtggccctgaacttccagaccgccgacaagtacatgcagatgaaccacgccctgttcagcctgaacggcagaaccggctacgtgctgcagcccgagagcatgagaaccgagaagtacgaccccatgccccccgagagccagagaaagatcctgatgaccctgaccgtgaaggtgctgggcgccagacacctgcccaagctgggcagaagcatcgcctgccccttcgtggaggtggagatctgcggcgccgagtacgacaacaacaagttcaagaccaccgtggtgaacgacaacggcctgagccccatctgggcccccacccaggagaaggtgaccttcgagatctacgaccccaacctggccttcctgagattcgtggtgtacgaggaggacatgttcagcgaccccaacttcctggcccacgccacctaccccatcaaggccgtgaagagcggcttcagaagcgtgcccctgaagaacggctacagcgaggacatcgagctggccagcctgctggtgttctgcgagatgagacccgtgctggagagcgaggaggagctgtacagcagctgcagacagctgagaagaagacaggaggagctgaacaaccagctgttcctgtacgacacccaccagaacctgagaaacgccaacagagacgccctggtgaaggagttcagcgtgaacgagaaccagctgcagctgtaccaggagaagtgcaacaagagactgagagagaagagagtgagcaacagcaagttctacagctag

SEQ ID NO: 12169 - DNA, 2916 bp, synthetic construct
  misc_feature 1..2916: note = Description of Artificial Sequence: Synthetic coding sequence
  source 1..2916: mol_type = other DNA
atgagcctgaagaacgagcccagagtgaacaccagcgccctgcagaagatcgccgccgacatgagcaacatcatcgagaacctggacaccagagagctgcacttcgagggcgaggaggtggactacgacgtgagccccagcgaccccaagatccaggaggtgtacatccccttcagcgccatctacaacacccagggcttcaaggagcccaacatccagacctacctgagcggctgccccatcaaggcccaggtgctggaggtggagagattcaccagcaccaccagagtgcccagcatcaacctgtacaccatcgagctgacccacggcgagttcaagtggcaggtgaagagaaagttcaagcacttccaggagttccacagagagctgctgaagtacaaggccttcatcagaatccccatccccaccagaagacacaccttcagaagacagaacgtgagagaggagcccagagagatgcccagcctgcccagaagcagcgagaacatgatcagagaggagcagttcctgggcagaagaaagcagctggaggactacctgaccaagatcctgaagatgcccatgtacagaaactaccacgccaccaccgagttcctggacatcagccagctgagcttcatccacgacctgggccccaagggcatcgagggcatgatcatgaagagaagcggcggccacagaatccccggcctgaactgctgcggccagggcagagcctgctacagatggagcaagagatggctgatcgtgaaggacagcttcctgctgtacatgaagcccgacagcggcgccatcgccttcgtgctgctggtggacaaggagttcaagatcaaggtgggcaagaaggagaccgagaccaagtacggcatcagaatcgacaacctgagcagaaccctgatcctgaagtgcaacagctacagacacgccagatggtggggcggcgccatcgaggagttcatccagaagcacggcaccaacttcctgaaggaccacagattcggcagctacgccgccatccaggagaacgccctggccaagtggtacgtgaacgccaagggctacttcgaggacgtggccaacgccatggaggaggccaacgaggagatcttcatcaccgactggtggctgagccccgagatcttcctgaagagacccgtggtggagggcaacagatggagactggactgcatcctgaagagaaaggcccagcagggcgtgagaatcttcatcatgctgtacaaggaggtggagctggccctgggcatcaacagcgagtacaccaagagaaccctgatgagactgcaccccaacatcaaggtgatgagacaccccgaccacgtgagcagcaccgtgtacctgtgggcccaccacgagaagctggtgatcatcgaccagagcgtggccttcgtgggcggcatcgacctggcctacggcagatgggacgacaacgagcacagactgaccgacgtgggcagcgtgaagagagtgaccagcggccccagcctgggcagcctgccccccgccgccatggagagcatggagagcctgagactgaaggacaagaacgagcccgtgcagaacctgcccatccagaagagcatcgacgacgtggacagcaagctgaagggcatcggcaagcccagaaagttcagcaagttcagcctgtacaagcagctgcacagacaccacctgcacgacgccgacagcatcagcagcatcgacagcaccagcagctacttcaaccactacagaagccaccacaacctgatccacggcctgaagccccacttcaagctgttccaccccagcagcgagagcgagcagggcctgaccagaccccacgccgacaccggcagcatcagaagcctgcagaccggcgtgggcgagctgcacggcgagaccagattctggcacggcaaggactactgcaacttcgtgttcaaggactgggtgcagctggacaagcccttcgccgacttcatcgacagatacagcacccccagaatgccctggcacgacatcgccagcgccgtgcacggcaaggccgccagagacgtggccagacacttcatccagagatggaacttcaccaagatcatgaagagcaagtacagaagcctgagctaccccttcctgctgcccaagagccagaccaccgcccacgagctgagataccaggtgcccggcagcgtgcacgccaacgtgcagctgctgagaagcgccgccgactggagcgccggcatcaagtaccacgaggagagcatccacgccgcctacgtgcacgtgatcgagaacagcagacactacatctacatcgagaaccagttcttcatcagctgcgccgacgacaaggtggtgttcaacaagatcggcgacgccatcgcccagagaatcctgaaggcccacagagagaaccagaagtacagagtgtacgtggtgatccccctgctgcccggcttcgagggcgacatcagcaccggcggcggcaacgccctgcaggccatcatgcacttcaactacagaaccatgtgcagaggcgagaacagcatcctgggccagctgaaggccgagctgggcaaccagtggatcaactacatcagcttctgcggcctgagaacccacgccgagctggagggcaacctggtgaccgagctgatctacgtgcacagcaagctgctgatcgccgacgacaacaccgtgatcatcggcagcgccaacatcaacgacagaagcatgctgggcaagagagacagcgagatggccgtgatcgtgcaggacaccgagaccgtgcccagcgtgatggacggcaaggagtaccaggccggcagattcgccagaggcctgagactgcagtgcttcagaagcaagatgacccccggcgtggaggacccctag

SEQ ID NO: 12170 - DNA, 1794 bp, synthetic construct
  misc_feature 1..1794: note = Description of Artificial Sequence: Synthetic coding sequence
  source 1..1794: mol_type = other DNA
atgagcctgaagaacgagcccagagtgaacaccagcgccctgcagaagatcgccgccgacatgagcaacatcatcgagaacctggacaccagagagctgcacttcgagggcgaggaggtggactacgacgtgagccccagcgaccccaagatccaggaggtgtacatccccttcagcgccatctacaacacccagggcttcaaggagcccaacatccagacctacctgagcggctgccccatcaaggcccaggtgctggaggtggagagattcaccagcaccaccagagtgcccagcatcaacctgtacaccatcgagctgacccacggcgagttcaagtggcaggtgaagagaaagttcaagcacttccaggagttccacagagagctgctgaagtacaaggccttcatcagaatccccatccccaccagaagacacaccttcagaagacagaacgtgagagaggagcccagagagatgcccagcctgcccagaagcagcgagaacatgatcagagaggagcagttcctgggcagaagaaagcagctggaggactacctgaccaagatcctgaagatgcccatgtacagaaactaccacgccaccaccgagttcctggacatcagccagctgagcttcatccacgacctgggccccaagggcatcgagggcatgatcatgaagagaagcggcggccacagaatccccggcctgaactgctgcggccagggcagagcctgctacagatggagcaagagatggctgatcgtgaaggacagcttcctgctgtacatgaagcccgacagcggcgccatcgccttcgtgctgctggtggacaaggagttcaagatcaaggtgggcaagaaggagaccgagaccaagtacggcatcagaatcgacaacctgagcagaaccctgatcctgaagtgcaacagctacagacacgccagatggtggggcggcgccatcgaggagttcatccagaagcacggcaccaacttcctgaaggaccacagattcggcagctacgccgccatccaggagaacgccctggccaagtggtacgtgaacgccaagggctacttcgaggacgtggccaacgccatggaggaggccaacgaggagatcttcatcaccgactggtggctgagccccgagatcttcctgaagagacccgtggtggagggcaacagatggagactggactgcatcctgaagagaaaggcccagcagggcgtgagaatcttcatcatgctgtacaaggaggtggagctggccctgggcatcaacagcgagtacaccaagagaaccctgatgagactgcaccccaacatcaaggtgatgagacaccccgaccacgtgagcagcaccgtgtacctgtgggcccaccacgagaagctggtgatcatcgaccagagcgtggccttcgtgggcggcatcgacctggcctacggcagatgggacgacaacgagcacagactgaccgacgtgggcagcgtgaagagagtgaccagcggccccagcctgggcagcctgcccatccccggccccagcgtggtgtacagacaggtgtgggagagctgcatgggcaagcccgacagcggcatggagagaaccaccgccatcagcagcagcaagaccggcttcaacctgatcaacctgctgctgatcagcctgaccggcacccccagacccggctgccccggcatgaccctgcccctgcagagcaccggcagaagactggtgatgtggcacgtgaccagcagcagcgccggcaccagccagaagctgtag

SEQ ID NO: 12171 - DNA, 3225 bp, synthetic construct
  misc_feature 1..3225: note = Description of Artificial Sequence: Synthetic coding sequence
  source 1..3225: mol_type = other DNA
atgagcctgaagaacgagcccagagtgaacaccagcgccctgcagaagatcgccgccgacatgagcaacatcatcgagaacctggacaccagagagctgcacttcgagggcgaggaggtggactacgacgtgagccccagcgaccccaagatccaggaggtgtacatccccttcagcgccatctacaacacccagggcttcaaggagcccaacatccagacctacctgagcggctgccccatcaaggcccaggtgctggaggtggagagattcaccagcaccaccagagtgcccagcatcaacctgtacaccatcgagctgacccacggcgagttcaagtggcaggtgaagagaaagttcaagcacttccaggagttccacagagagctgctgaagtacaaggccttcatcagaatccccatccccaccagaagacacaccttcagaagacagaacgtgagagaggagcccagagagatgcccagcctgcccagaagcagcgagaacatgatcagagaggagcagttcctgggcagaagaaagcagctggaggactacctgaccaagatcctgaagatgcccatgtacagaaactaccacgccaccaccgagttcctggacatcagccagctgagcttcatccacgacctgggccccaagggcatcgagggcatgatcatgaagagaagcggcggccacagaatccccggcctgaactgctgcggccagggcagagcctgctacagatggagcaagagatggctgatcgtgaaggacagcttcctgctgtacatgaagcccgacagcggcgccatcgccttcgtgctgctggtggacaaggagttcaagatcaaggtgggcaagaaggagaccgagaccaagtacggcatcagaatcgacaacctgagcagaaccctgatcctgaagtgcaacagctacagacacgccagatggtggggcggcgccatcgaggagttcatccagaagcacggcaccaacttcctgaaggaccacagattcggcagctacgccgccatccaggagaacgccctggccaagtggtacgtgaacgccaagggctacttcgaggacgtggccaacgccatggaggaggccaacgaggagatcttcatcaccgactggtggctgagccccgagatcttcctgaagagacccgtggtggagggcaacagatggagactggactgcatcctgaagagaaaggcccagcagggcgtgagaatcttcatcatgctgtacaaggaggtggagctggccctgggcatcaacagcgagtacaccaagagaaccctgatgagactgcaccccaacatcaaggtgatgagacaccccgaccacgtgagcagcaccgtgtacctgtgggcccaccacgagaagctggtgatcatcgaccagagcgtggccttcgtgggcggcatcgacctggcctacggcagatgggacgacaacgagcacagactgaccgacgtgggcagcgtgaagagagtgaccagcggccccagcctgggcagcctgccccccgccgccatggagagcatggagagcctgagactgaaggacaagaacgagcccgtgcagaacctgcccatccagaagagcatcgacgacgtggacagcaagctgaagggcatcggcaagcccagaaagttcagcaagttcagcctgtacaagcagctgcacagacaccacctgcacgacgccgacagcatcagcagcatcgacagcaccagcagctacttcaaccactacagaagccaccacaacctgatccacggcctgaagccccacttcaagctgttccaccccagcagcgagagcgagcagggcctgaccagaccccacgccgacaccggcagcatcagaagcctgcagaccggcgtgggcgagctgcacggcgagaccagattctggcacggcaaggactactgcaacttcgtgttcaaggactgggtgcagctggacaagcccttcgccgacttcatcgacagatacagcacccccagaatgccctggcacgacatcgccagcgccgtgcacggcaaggccgccagagacgtggccagacacttcatccagagatggaacttcaccaagatcatgaagagcaagtacagaagcctgagctaccccttcctgctgcccaagagccagaccaccgcccacgagctgagataccaggtgcccggcagcgtgcacgccaacgtgcagctgctgagaagcgccgccgactggagcgccggcatcaagtaccacgaggagagcatccacgccgcctacgtgcacgtgatcgagaacagcagacactacatctacatcgagaaccagttcttcatcagctgcgccgacgacaaggtggtgttcaacaagatcggcgacgccatcgcccagagaatcctgaaggcccacagagagaaccagaagtacagagtgtacgtggtgatccccctgctgcccggcttcgagggcgacatcagcaccggcggcggcaacgccctgcaggccatcatgcacttcaactacagaaccatgtgcagaggcgagaacagcatcctgggccagctgaaggccgagctgggcaaccagtggatcaactacatcagcttctgcggcctgagaacccacgccgagctggagggcaacctggtgaccgagctgatctacgtgcacagcaagctgctgatcgccgacgacaacaccgtgatcatcggcagcgccaacatcaacgacagaagcatgctgggcaagagagacagcgagatggccgtgatcgtgcaggacaccgagaccgtgcccagcgtgatggacggcaaggagtaccaggccggcagattcgccagaggcctgagactgcagtgcttcagagtggtgctgggctacctggacgaccccagcgaggacatccaggaccccgtgagcgacaagttcttcaaggaggtgtgggtgagcaccgccgccagaaacgccaccatctacgacaaggtgttcagatgcctgcccaacgacgaggtgcacaacctgatccagctgagagacttcatcaacaagcccgtgctggccaaggaggaccccatcagagccgaggaggagctgaagaagatcagaggcttcctggtgcagttccccttctacttcctgagcgaggagagcctgctgcccagcgtgggcaccaaggaggccatcgtgcccatggaggtgtggacctag

SEQ ID NO: 12172 - DNA, 3111 bp, synthetic construct
  misc_feature 1..3111: note = Description of Artificial Sequence: Synthetic coding sequence
  source 1..3111: mol_type = other DNA
atgagcctgaagaacgagcccagagtgaacaccagcgccctgcagaagatcgccgccgacatgagcaacatcatcgagaacctggacaccagagagctgcacttcgagggcgaggaggtggactacgacgtgagccccagcgaccccaagatccaggaggtgtacatccccttcagcgccatctacaacacccagggcttcaaggagcccaacatccagacctacctgagcggctgccccatcaaggcccaggtgctggaggtggagagattcaccagcaccaccagagtgcccagcatcaacctgtacaccatcgagctgacccacggcgagttcaagtggcaggtgaagagaaagttcaagcacttccaggagttccacagagagctgctgaagtacaaggccttcatcagaatccccatccccaccagaagacacaccttcagaagacagaacgtgagagaggagcccagagagatgcccagcctgcccagaagcagcgagaacatgatcagagaggagcagttcctgggcagaagaaagcagctggaggactacctgaccaagatcctgaagatgcccatgtacagaaactaccacgccaccaccgagttcctggacatcagccagctgagcttcatccacgacctgggccccaagggcatcgagggcatgatcatgaagagaagcggcggccacagaatccccggcctgaactgctgcggccagggcagagcctgctacagatggagcaagagatggctgatcgtgaaggacagcttcctgctgtacatgaagcccgacagcggcgccatcgccttcgtgctgctggtggacaaggagttcaagatcaaggtgggcaagaaggagaccgagaccaagtacggcatcagaatcgacaacctgagcagaaccctgatcctgaagtgcaacagctacagacacgccagatggtggggcggcgccatcgaggagttcatccagaagcacggcaccaacttcctgaaggaccacagattcggcagctacgccgccatccaggagaacgccctggccaagtggtacgtgaacgccaagggctacttcgaggacgtggccaacgccatggaggaggccaacgaggagatcttcatcaccgactggtggctgagccccgagatcttcctgaagagacccgtggtggagggcaacagatggagactggactgcatcctgaagagaaaggcccagcagggcgtgagaatcttcatcatgctgtacaaggaggtggagctggccctgggcatcaacagcgagtacaccaagagaaccctgatgagactgcaccccaacatcaaggtgatgagacaccccgaccacgtgagcagcaccgtgtacctgtgggcccaccacgagaagctggtgatcatcgaccagagcgtggccttcgtgggcggcatcgacctggcctacggcagatgggacgacaacgagcacagactgaccgacgtgggcagcgtgaagagagtgaccagcggccccagcctgggcagcctgccccccgccgccatggagagcatggagagcctgagactgaaggacaagaacgagcccgtgcagaacctgcccatccagaagagcatcgacgacgtggacagcaagctgaagggcatcggcaagcccagaaagttcagcaagttcagcctgtacaagcagctgcacagacaccacctgcacgacgccgacagcatcagcagcatcgacagcaccagcaacaccggcagcatcagaagcctgcagaccggcgtgggcgagctgcacggcgagaccagattctggcacggcaaggactactgcaacttcgtgttcaaggactgggtgcagctggacaagcccttcgccgacttcatcgacagatacagcacccccagaatgccctggcacgacatcgccagcgccgtgcacggcaaggccgccagagacgtggccagacacttcatccagagatggaacttcaccaagatcatgaagagcaagtacagaagcctgagctaccccttcctgctgcccaagagccagaccaccgcccacgagctgagataccaggtgcccggcagcgtgcacgccaacgtgcagctgctgagaagcgccgccgactggagcgccggcatcaagtaccacgaggagagcatccacgccgcctacgtgcacgtgatcgagaacagcagacactacatctacatcgagaaccagttcttcatcagctgcgccgacgacaaggtggtgttcaacaagatcggcgacgccatcgcccagagaatcctgaaggcccacagagagaaccagaagtacagagtgtacgtggtgatccccctgctgcccggcttcgagggcgacatcagcaccggcggcggcaacgccctgcaggccatcatgcacttcaactacagaaccatgtgcagaggcgagaacagcatcctgggccagctgaaggccgagctgggcaaccagtggatcaactacatcagcttctgcggcctgagaacccacgccgagctggagggcaacctggtgaccgagctgatctacgtgcacagcaagctgctgatcgccgacgacaacaccgtgatcatcggcagcgccaacatcaacgacagaagcatgctgggcaagagagacagcgagatggccgtgatcgtgcaggacaccgagaccgtgcccagcgtgatggacggcaaggagtaccaggccggcagattcgccagaggcctgagactgcagtgcttcagagtggtgctgggctacctggacgaccccagcgaggacatccaggaccccgtgagcgacaagttcttcaaggaggtgtgggtgagcaccgccgccagaaacgccaccatctacgacaaggtgttcagatgcctgcccaacgacgaggtgcacaacctgatccagctgagagacttcatcaacaagcccgtgctggccaaggaggaccccatcagagccgaggaggagctgaagaagatcagaggcttcctggtgcagttccccttctacttcctgagcgaggagagcctgctgcccagcgtgggcaccaaggaggccatcgtgcccatggaggtgtggacctag

SEQ ID NO: 12173 - DNA, 429 bp, synthetic construct
  misc_feature 1..429: note = Description of Artificial Sequence: Synthetic coding sequence
  source 1..429: mol_type = other DNA
atgagcctgaagaacgagcccagagtgaacaccagcgccctgcagaagatcgccgccgacatgagcaacatcatcgagaacctggacaccagagagctgcacttcgagggcgaggaggtggactacgacgtgagccccagcgaccccaagatccaggaggtgtacatccccttcagcgccatctacaacacccagggcttcaaggagcccaacatccagacctacctgagcggctgccccatcaaggcccaggtgctggaggtggagagattcaccagcaccaccagagtgcccagcatcaacctgtacaccatcgagctgacccacggcgagttcaagtggcaggtgaagagaaagttcaagcacttccaggagttccacagagagctgctgaagtacaaggccttcatcagaatccccatcccctag

SEQ ID NO: 12174 - DNA, 2580 bp, synthetic construct
  misc_feature 1..2580: note = Description of Artificial Sequence: Synthetic coding sequence
  source 1..2580: mol_type = other DNA
atgtacagcggcgccggccccgccctggccccccccgccccccccccccccatccagggctacgccttcaagcccccccccagacccgacttcggcaccagcggcagaaccatcaagctgcaggccaacttcttcgagatggacatccccaagatcgacatctaccactacgagctggacatcaagcccgagaagtgccccagaagagtgaacagagagatcgtggagcacatggtgcagcacttcaagacccagatcttcggcgacagaaagcccgtgttcgacggcagaaagaacctgtacaccgccatgcccctgcccatcggcagagacaaggtggagctggaggtgaccctgcccggcgagggcaaggacagaatcttcaaggtgagcatcaagtgggtgagctgcgtgagcctgcaggccctgcacgacgccctgagcggcagactgcccagcgtgcccttcgagaccatccaggccctggacgtggtgatgagacacctgcccagcatgagatacacccccgtgggcagaagcttcttcaccgccagcgagggctgcagcaaccccctgggcggcggcagagaggtgtggttcggcttccaccagagcgtgagacccagcctgtggaagatgatgctgaacatcgacgtgagcgccaccgccttctacaaggcccagcccgtgatcgagttcgtgtgcgaggtgctggacttcaagagcatcgaggagcagcagaagcccctgaccgacagccagagagtgaagttcaccaaggagatcaagggcctgaaggtggagatcacccactgcggccagatgaagagaaagtacagagtgtgcaacgtgaccagaagacccgccagccaccagaccttccccctgcagcaggagagcggccagaccgtggagtgcaccgtggcccagtacttcaaggacagacacaagctggtgctgagatacccccacctgccctgcctgcaggtgggccaggagcagaagcacacctacctgcccctggaggtgtgcaacatcgtggccggccagagatgcatcaagaagctgaccgacaaccagaccagcaccatgatcagagccaccgccagaagcgcccccgacagacaggaggagatcagcaagctgatgagaagcgccagcttcaacaccgacccctacgtgagagagttcggcatcatggtgaaggacgagatgaccgacgtgaccggcagagtgctgcagccccccagcatcctgtacggcggcagaaacaaggccatcgccacccccgtgcagggcgtgtgggacatgagaaacaagcagttccacaccggcatcgagatcaaggtgtgggccatcgcctgcttcgccccccagagacagtgcaccgaggtgcacctgaagagcttcaccgagcagctgagaaagatcagcagagacgccggcatgcccatccagggccagccctgcttctgcaagtacgcccagggcgccgacagcgtggagcccatgttcagacacctgaagaacacctacgccggcctgcagctggtggtggtgatcctgcccggcaagacccccgtgtacgccgaggtgaagagagtgggcgacaccgtgctgggcatggccacccagtgcgtgcagatgaagaacgtgcagagaaccaccccccagaccctgagcaacctgtgcctgaagatcaacgtgaagctgggcggcgtgaacaacatcctgctgccccagggcagaccccccgtgttccagcagcccgtgatcttcctgggcgccgacgtgacccacccccccgccggcgacggcaagaagcccagcatcgccgccgtggtgggcagcatggacgcccaccccaacagatactgcgccaccgtgagagtgcagcagcacagacaggagatcatccaggacctggccgccatggtgagagagctgctgatccagttctacaagagcaccagattcaagcccaccagaatcatcttctacagagacggcgtgagcgagggccagttccagcaggtgctgcaccacgagctgctggccatcagagaggcctgcatcaagctggagaaggactaccagcccggcatcaccttcatcgtggtgcagaagagacaccacaccagactgttctgcaccgacaagaacgagagagtgggcaagagcggcaacatccccgccggcaccaccgtggacaccaagatcacccaccccaccgagttcgacttctacctgtgcagccacgccggcatccagggcaccagcagacccagccactaccacgtgctgtgggacgacaacagattcagcagcgacgagctgcagatcctgacctaccagctgtgccacacctacgtgagatgcaccagaagcgtgagcatccccgcccccgcctactacgcccacctggtggccttcagagccagataccacctggtggacaaggagcacgacagcgccgagggcagccacaccagcggccagagcaacggcagagaccaccaggccctggccaaggccgtgcaggtgcaccaggacaccctgagaaccatgtacttcgcctag

SEQ ID NO: 12175 - DNA, 1926 bp, synthetic construct
  misc_feature 1..1926: note = Description of Artificial Sequence: Synthetic coding sequence
  source 1..1926: mol_type = other DNA
atgctgagcggcatcgaggccgccgccggcgagtacgaggacagcgagctgagatgcagagtggccgtggaggagctgagccccggcggccagcccagaagaagacaggccctgagaaccgccgagctgagcctgggcagaaacgagagaagagagctgatgctgagactgcaggcccccggccccgccggcagacccagatgcttccccctgagagccgccagactgttcaccagattcgccgaggccggcagaagcaccctgagactgcccgcccacgacacccccggcgccggcgccgtgcagctgctgctgagcgactgcccccccgacagactgagaagattcctgagaaccctgagactgaagctggccgccgcccccggccccggccccgccagcgccagagcccagctgctgggccccagacccagagacttcgtgaccatcagccccgtgcagcccgaggagagaagactgagagccgccaccagagtgcccgacaccaccctggtgaagagacccgtggagccccaggccggcgccgagcccagcaccgaggcccccagatggcccctgcccgtgaagagactgagcctgcccagcaccaagccccagctgagcgaggagcaggccgccgtgctgagagccgtgctgaagggccagagcatcttcttcaccggcagcgccggcaccggcaagagctacctgctgaagagaatcctgggcagcctgccccccaccggcaccgtggccaccgccagcaccggcgtggccgcctgccacatcggcggcaccaccctgcacgccttcgccggcatcggcagcggccaggcccccctggcccagtgcgtggccctggcccagagacccggcgtgagacagggctggctgaactgccagagactggtgatcgacgagatcagcatggtggaggccgacctgttcgacaagctggaggccgtggccagagccgtgagacagcagaacaagcccttcggcggcatccagctgatcatctgcggcgacttcctgcagctgccccccgtgaccaagggcagccagccccccagattctgcttccagagcaagagctggaagagatgcgtgcccgtgaccctggagctgaccaaggtgtggagacaggccgaccagaccttcatcagcctgctgcaggccgtgagactgggcagatgcagcgacgaggtgaccagacagctgcaggccaccgccagccacaaggtgggcagagacggcatcgtggccaccagactgtgcacccaccaggacgacgtggccctgaccaacgagagaagactgcaggagctgcccggcaaggtgcacagattcgaggccatggacagcaaccccgagctggccagcaccctggacgcccagtgccccgtgagccagctgctgcagctgaagctgggcgcccaggtgatgctggtgaagaacctgagcgtgagcagaggcctggtgaacggcgccagaggcgtggtggtgggcttcgaggccgagggcagaggcctgccccaggtgagattcctgtgcggcgtgaccgaggtgatccacgccgacagatggaccgtgcaggccaccggcggccagctgctgagcagacagcagctgcccctgcagctggcctgggccatgagcatccacaagagccagggcatgaccctggactgcgtggagatcagcctgggcagagtgttcgccagcggccaggcctacgtggccctgagcagagccagaagcctgcagggcctgagagtgctggacttcgaccccatggccgtgagatgcgaccccagagtgctgcacttctacgccaccctgagaagaggcagaagcctgagcctggagagccccgacgacgacgaggccgccagcgaccaggagaacatggaccccatcctgtag

SEQ ID NO: 12176 - DNA, 2124 bp, synthetic construct
  misc_feature 1..2124: note = Description of Artificial Sequence: Synthetic coding sequence
  source 1..2124: mol_type = other DNA
atgctgagcggcatcgaggccgccgccggcgagtacgaggacagcgagctgagatgcagagtggccgtggaggagctgagccccggcggccagcccagaagaagacaggccctgagaaccgccgagctgagcctgggcagaaacgagagaagagagctgatgctgagactgcaggcccccggccccgccggcagacccagatgcttccccctgagagccgccagactgttcaccagattcgccgaggccggcagaagcaccctgagactgcccgcccacgacacccccggcgccggcgccgtgcagctgctgctgagcgactgcccccccgacagactgagaagattcctgagaaccctgagactgaagctggccgccgcccccggccccggccccgccagcgccagagcccagctgctgggccccagacccagagacttcgtgaccatcagccccgtgcagcccgaggagagaagactgagagccgccaccagagtgcccgacaccaccctggtgaagagacccgtggagccccaggccggcgccgagcccagcaccgaggcccccagatggcccctgcccgtgaagagactgagcctgcccagcaccaagccccagctgagcgaggagcaggccgccgtgctgagagccgtgctgaagggccagagcatcttcttcaccggcagcgccggcaccggcaagagctacctgctgaagagaatcctgggcagcctgccccccaccggcaccgtggccaccgccagcaccggcgtggccgcctgccacatcggcggcaccaccctgcacgccttcgccggcatcggcagcggccaggcccccctggcccagtgcgtggccctggcccagagacccggcgtgagacagggctggctgaactgccagagactggtgatcgacgagatcagcatggtggaggccgacctgttcgacaagctggaggccgtggccagagccgtgagacagcagaacaagcccttcggcggcatccagctgatcatctgcggcgacttcctgcagctgccccccgtgaccaagggcagccagccccccagattctgcttccagagcaagagctggaagagatgcgtgcccgtgaccctggagctgaccaaggtgtggagacaggccgaccagaccttcatcagcctgctgcaggccgtgagactgggcagatgcagcgacgaggtgaccagacagctgcaggccaccgccagccacaaggtgggcagagacggcatcgtggccaccagactgtgcacccaccaggacgacgtggccctgaccaacgagagaagactgcaggagctgcccggcaaggtgcacagattcgaggccatggacagcaaccccgagctggccagcaccctggacgcccagtgccccgtgagccagctgctgcagctgaagctgggcgcccaggtgatgctggtgaagaacctgagcgtgagcagaggcctggtgaacggcgccagaggcgtggtggtgggcttcgaggccgagggcagaggcctgccccaggtgagattcctgtgcggcgtgaccgaggtgatccacgccgacagatggaccgtgcaggccaccggcggccagctgctgagcagacagcagctgcccctgcagctggcctgggccatgagcatccacaagagccagggcatgaccctggactgcgtggagatcagcctgggcagagtgttcgccagcggccaggcctacgtggccctgagcagagccagaagcctgcagggcctgagagtgctggacttcgaccccatggccgtgagatgcgaccccagagtgctgcacttctacgccaccctgagaagaggcagaagcctgagcctggccgccgagggcagaggcaacgaggacagatgcagcggcagcagcatcagagccctgggcggcgactggtggggcctgagactgggcgccgccagcaagcagagaaccgagctgagatgcgtgagcaccgccagacccagcctggcccagcccagaaccaacaccctgcagagcctgaccaaggagcacaagctgcagaacgtgcacccctacttcaagctgctgttccagggcatcaacagcgtgtggggccactag

SEQ ID NO: 12177 - DNA, 1926 bp, synthetic construct; identical to SEQ ID NO: 12175
  misc_feature 1..1926: note = Description of Artificial Sequence: Synthetic coding sequence
  source 1..1926: mol_type = other DNA

SEQ ID NO: 12178 - DNA, 801 bp, synthetic construct
  misc_feature 1..801: note = Description of Artificial Sequence: Synthetic coding sequence
  source 1..801: mol_type = other DNA
atgctgagcggcatcgaggccgccgccggcgagtacgaggacagcgagctgagatgcagagtggccgtggaggagctgagccccggcggccagcccagaagaagacaggccctgagaaccgccgagctgagcctgggcagaaacgagagaagagagctgatgctgagactgcaggcccccggccccgccggcagacccagatgcttccccctgagagccgccagactgttcaccagattcgccgaggccggcagaagcaccctgagactgcccgcccacgacacccccggcgccggcgccgtgcagctgctgctgagcgactgcccccccgacagactgagaagattcctgagaaccctgagactgaagctggccgccgcccccggccccggccccgccagcgccagagcccagctgctgggccccagacccagagacttcgtgaccatcagccccgtgcagcccgaggagagaagactgagagccgccaccagagtgcccgacaccaccctggtgaagagacccgtggagccccaggccggcgccgagcccagcaccgaggcccccagatggcccctgcccgtgaagagactgagcctgcccagcaccaagccccagctgagcgaggagcaggccgccgtgctgagagccgtgctgaagggccagagcatcttcttcaccggcagcgccggcagcggcggcagagaggaggtgggcggccagtggtggggcggcatcgaggagcagggcgacctgagcaacttcgcccccgtgcaggagcagggcagccacatctgctag

SEQ ID NO: 12179 - DNA, 987 bp, synthetic construct
  misc_feature 1..987: note = Description of Artificial Sequence: Synthetic coding sequence
  source 1..987: mol_type = other DNA
atgagcatgctggccgagagaagaagaaagcagaagtgggccgtggacccccagaacaccgcctggagcaacgacgacagcaagttcggccagagaatgctggagaagatgggctggagcaagggcaagggcctgggcgcccaggagcagggcgccaccgaccacatcaaggtgcaggtgaagaacaaccacctgggcctgggcgccaccatcaacaacgaggacaactggatcgcccaccaggacgacttcaaccagctgctggccgagctgaacacctgccacggccaggagaccaccgacagcagcgacaagaaggagaagaagagcttcagcctggaggagaagagcaagatcagcaagaacagagtgcactacatgaagttcaccaagggcaaggacctgagcagcagaagcaagaccgacctggactgcatcttcggcaagagacagagcaagaagacccccgagggcgacgccagccccagcacccccgaggagaacgagaccaccaccaccagcgccttcaccatccaggagtacttcgccaagagaatggccgccctgaagaacaagccccaggtgcccgtgcccggcagcgacatcagcgagacccaggtggagagaaagagaggcaagaagagaaacaaggaggccaccggcaaggacgtggagagctacctgcagcccaaggccaagagacacaccgagggcaagcccgagagagccgaggcccaggagagagtggccaagaagaagagcgcccccgccgaggagcagctgagaggcccctgctgggaccagagcagcaaggccagcgcccaggacgccggcgaccacgtgcagccccccgagggcagagacttcaccctgaagcccaagaagagaagaggcaagaagaagctgcagaagcccgtggagatcgccgaggacgccaccctggaggagaccctggtgaagaagaagaagaagaaggacagcaagtag

SEQ ID NO: 12180 - DNA, 519 bp, synthetic construct
  misc_feature 1..519: note = Description of Artificial Sequence: Synthetic coding sequence
  source 1..519: mol_type = other DNA
atgctggccgagagaagaagaaagcagaagtgggccgtggacccccagaacaccgcctggagcaacgacgacagcaagttcggccagagaatgctggagaagatgggctggagcaagggcaagggcctgggcgcccaggagcagggcgccaccgaccacatcaaggtgcaggtgaagaacaaccacctgggcctgggcgccaccatcaacaacgaggacaactggatcgcccaccaggacgacttcaaccagctgctggccgagctgaacacctgccacggccaggagaccaccgacagcagcgacaagaaggagaagaagagcttcagcctggaggagaagagcaagatcagcaagaacagagtgcactacatgaagttcaccaagggcagatgccagagcctgcacagcagaggcgagagaaaccacgacaaccagagactgcaccaccccggcgtgctgtgccaggccgacggcagcaccgaggagcaggcccccggcagcagcagcagagtgtag

SEQ ID NO: 12181 - DNA, 525 bp, synthetic construct
  misc_feature 1..525: note = Description of Artificial Sequence: Synthetic coding sequence
  source 1..525: mol_type = other DNA
atgagcatgctggccgagagaagaagaaagcagaagtgggccgtggacccccagaacaccgcctggagcaacgacgacagcaagttcggccagagaatgctggagaagatgggctggagcaagggcaagggcctgggcgcccaggagcagggcgccaccgaccacatcaaggtgcaggtgaagaacaaccacctgggcctgggcgccaccatcaacaacgaggacaactggatcgcccaccaggacgacttcaaccagctgctggccgagctgaacacctgccacggccaggagaccaccgacagcagcgacaagaaggagaagaagagcttcagcctggaggagaagagcaagatcagcaagaacagagtgcactacatgaagttcaccaagggcagatgccagagcctgcacagcagaggcgagagaaaccacgacaaccagagactgcaccaccccggcgtgctgtgccaggccgacggcagcaccgaggagcaggcccccggcagcagcagcagagtgtag

SEQ ID NO: 12182 - DNA, 972 bp, synthetic construct
  misc_feature 1..972: note = Description of Artificial Sequence: Synthetic coding sequence
  source 1..972: mol_type = other DNA
atgcccgtgcacagcagaggcgacaagaaggagaccaaccaccacgacgagatggaggtggactacgccgagaacgagggcagcagcagcgaggacgaggacaccgagagcagcagcgtgagcgaggacggcgacagcagcgagatggacgacgaggactgcgagagaagaagaatggagtgcctggacgagatgagcaacctggagaagcagttcaccgacctgaaggaccagctgtacaaggagagactgagccaggtggacgccaagctgcaggaggtgatcgccggcaaggcccccgagtacctggagcccctggccaccctgcaggagaacatgcagatcagaaccaaggtggccggcatctacagagagctgtgcctggagagcgtgaagaacaagtacgagtgcgagatccaggccagcagacagcactgcgagagcgagaagctgctgctgtacgacaccgtgcagagcgagctggaggagaagatcagaagactggaggaggacagacacagcatcgacatcaccagcgagctgtggaacgacgagctgcagagcagaaagaagagaaaggaccccttcagccccgacaagaagaagcccgtggtggtgagcggcccctacatcgtgtacatgctgcaggacctggacatcctggaggactggaccaccatcagaaaggccatggccaccctgggcccccacagagtgaagaccgagccccccgtgaagctggagaagcacctgcacagcgccagaagcgaggagggcagactgtactacgacggcgagtggtacatcagaggccagaccatctgcatcgacaagaaggacgagtgccccaccagcgccgtgatcaccaccatcaaccacgacgaggtgtggttcaagagacccgacggcagcaagagcaagctgtacatcagccagctgcagaagggcaagtacagcatcaagcacagctag

SEQ ID NO: 12183 - DNA, 666 bp, synthetic construct
  misc_feature 1..666: note = Description of Artificial Sequence: Synthetic coding sequence
  source 1..666: mol_type = other DNA
atgcccgtgatgagactgttcccctgcttcctgcagctgctggccggcctggccctgcccgccgtgcccccccagcagtgggccctgagcgccggcaacggcagcagcgaggtggaggtggtgcccttccaggaggtgtggggcagaagctactgcagagccctggagagactggtggacgtggtgagcgagtaccccagcgaggtggagcacatgttcagccccagctgcgtgagcctgctgagatgcaccggctgctgcggcgacgagaacctgcactgcgtgcccgtggagaccgccaacgtgaccatgcagctgctgaagatcagaagcggcgacagacccagctacgtggagctgaccttcagccagcacgtgagatgcgagtgcagacacagccccggcagacagagccccgacatgcccggcgacttcagagccgacgcccccagcttcctgccccccagaagaagcctgcccatgctgttcagaatggagtggggctgcgccctgaccggcagccagagcgccgtgtggcccagcagccccgtgcccgaggagatccccagaatgcaccccggcagaaacggcaagaagcagcagagaaagcccctgagagagaagatgaagcccgagagatgcggcgacgccgtgcccagaagatag

SEQ ID NO: 12184 - DNA, 450 bp, synthetic construct
  misc_feature 1..450: note = Description of Artificial Sequence: Synthetic coding sequence
  source 1..450: mol_type = other DNA
atgcccgtgatgagactgttcccctgcttcctgcagctgctggccggcctggccctgcccgccgtgcccccccagcagtgggccctgagcgccggcaacggcagcagcgaggtggaggtggtgcccttccaggaggtgtggggcagaagctactgcagagccctggagagactggtggacgtggtgagcgagtaccccagcgaggtggagcacatgttcagccccagctgcgtgagcctgctgagatgcaccggctgctgcggcgacgagaacctgcactgcgtgcccgtggagaccgccaacgtgaccatgcagctgctgaagatcagaagcggcgacagacccagctacgtggagctgaccttcagccagcacgtgagatgcgagtgcagacccctgagagagaagatgaagcccgagagatgcggcgacgccgtgcccagaagatag

SEQ ID NO: 12185 - DNA, 513 bp, synthetic construct
  misc_feature 1..513: note = Description of Artificial Sequence: Synthetic coding sequence
  source 1..513: mol_type = other DNA
atgcccgtgatgagactgttcccctgcttcctgcagctgctggccggcctggccctgcccgccgtgcccccccagcagtgggccctgagcgccggcaacggcagcagcgaggtggaggtggtgcccttccaggaggtgtggggcagaagctactgcagagccctggagagactggtggacgtggtgagcgagtaccccagcgaggtggagcacatgttcagccccagctgcgtgagcctgctgagatgcaccggctgctgcggcgacgagaacctgcactgcgtgcccgtggagaccgccaacgtgaccatgcagctgctgaagatcagaagcggcgacagacccagctacgtggagctgaccttcagccagcacgtgagatgcgagtgcagacccctgagagagaagatgaagcccgagagaagaagacccaagggcagaggcaagagaagaagagagaagcagagacccaccgactgccacctgtgcggcgacgccgtgcccagaagatag

SEQ ID NO: 12186 - DNA, 477 bp, synthetic construct
  misc_feature 1..477: note = Description of Artificial Sequence: Synthetic coding sequence
  source 1..477: mol_type = other DNA
atggccctggaggtgctgatgctgctggccgtgctgatctggaccggcgccgagaacctgcacgtgaagatcagctgcagcctggactggctgatggtgagcgtgatccccgtggccgagagcagaaacctgtacatcttcgccgacgagctgcacctgggcatgggctgccccgccaacagaatccacacctacgtgtacgagttcatctacctggtgagagactgcggcatcagaaccagagtggtgagcgaggagaccctgctgttccagaccgagctgtacttcacccccagaaacatcgaccacgacccccaggagatccacctggagtgcagcaccagcagaaagagcgtgtggctgacccccgtgagcaccgagaacgagatcaagctggaccccagccccttcatcgccgacttccagaccaccgccgaggagctgggcctgctgagcagcagccccaacctgctgtag

SEQ ID NO: 12187 - DNA, 1188 bp, synthetic construct
  misc_feature 1..1188: note = Description of Artificial Sequence: Synthetic coding sequence
  source 1..1188: mol_type = other DNA
atgagagccctgctggccagactgctgctgtgcgtgctggtggtgagcgacagcaagggcagcaacgagctgcaccaggtgccctacaagagcaagacctgctacgagggcaacggccacttctacagaggcaaggccagcaccgacaccatgggcagaccctgcctgccctggaacagcgccaccgtgctgcagcagacctaccacgcccacagaagcgacgccctgcagctgggcctgggcaagcacaactactgcagaaaccccgacaacagaagaagaccctggtgctacgtgcaggtgggcctgaagctgctggtgcaggagtgcatggtgcacgactgcgccgacggcaagaagcccagcagcccccccgaggagctgaagttccagtgcggccagaagaccctgagacccagattcaagatcatcggcggcgagttcaccaccatcgagaaccagccctggttcgccgccatctacagaagacacagaggcggcagcgtgacctacgtgtgcggcggcagcctgatcagcccctgctgggtgatcagcgccacccactgcttcatcgactaccccaagaaggaggactacatcgtgtacctgggcagaagcagactgaacagcaacacccagggcgagatgaagttcgaggtggagaacctgatcctgcacaaggactacagcgccgacaccctggcccaccacaacgacatcgccctgctgaagatcagaagcaaggagggcagatgcgcccagcccagcagaaccatccagaccatctgcctgcccagcatgtacaacgacccccagttcggcaccagctgcgagatcaccggcttcggcaaggagaacagcaccgactacctgtaccccgagcagctgaagatgaccgtggtgaagctgatcagccacagagagtgccagcagccccactactacggcagcgaggtgaccaccaagatgctgtgcgccgccgacccccagtggaagaccgacagctgccagggcgacagcggcggccccctggtgtgcagcctgcagggcagaatgaccctgaccggcatcgtgagctggggcagaggctgcgccctgaaggacaagcccggcgtgtacaccagagtgagccacttcctgccctggatcagaagccacaccaaggaggagaacggcctggccctgtag

SEQ ID NO: 12188 - DNA, 1188 bp, synthetic construct; identical to SEQ ID NO: 12187
  misc_feature 1..1188: note = Description of Artificial Sequence: Synthetic coding sequence
  source 1..1188: mol_type = other DNA

SEQ ID NO: 12189 - DNA, 1296 bp, synthetic construct
  misc_feature 1..1296: note = Description of Artificial Sequence: Synthetic coding sequence
  source 1..1296: mol_type = other DNA
atgagagccctgctggccagactgctgctgtgcgtgctggtggtgagcgacagcaagggcagcaacgagctgcaccaggtgcccagcaactgcgactgcctgaacggcggcacctgcgtgagcaacaagtacttcagcaacatccactggtgcaactgccccaagaagttcggcggccagcactgcgagatcgacaagagcaagacctgctacgagggcaacggccacttctacagaggcaaggccagcaccgacaccatgggcagaccctgcctgccctggaacagcgccaccgtgctgcagcagacctaccacgcccacagaagcgacgccctgcagctgggcctgggcaagcacaactactgcagaaaccccgacaacagaagaagaccctggtgctacgtgcaggtgggcctgaagctgctggtgcaggagtgcatggtgcacgactgcgccgacggcaagaagcccagcagcccccccgaggagctgaagttccagtgcggccagaagaccctgagacccagattcaagatcatcggcggcgagttcaccaccatcgagaaccagccctggttcgccgccatctacagaagacacagaggcggcagcgtgacctacgtgtgcggcggcagcctgatcagcccctgctgggtgatcagcgccacccactgcttcatcgactaccccaagaaggaggactacatcgtgtacctgggcagaagcagactgaacagcaacacccagggcgagatgaagttcgaggtggagaacctgatcctgcacaaggactacagcgccgacaccctggcccaccacaacgacatcgccctgctgaagatcagaagcaaggagggcagatgcgcccagcccagcagaaccatccagaccatctgcctgcccagcatgtacaacgacccccagttcggcaccagctgcgagatcaccggcttcggcaaggagaacagcaccgactacctgtaccccgagcagctgaagatgaccgtggtgaagctgatcagccacagagagtgccagcagccccactactacggcagcgaggtgaccaccaagatgctgtgcgccgccgacccccagtggaagaccgacagctgccagggcgacagcggcggccccctggtgtgcagcctgcagggcagaatgaccctgaccggcatcgtgagctggggcagaggctgcgccctgaaggacaagcccggcgtgtacaccagagtgagccacttcctgccctggatcagaagccacaccaaggaggagaacggcctggccctgtag

SEQ ID NO: 12190 - DNA, 1245 bp, synthetic construct
  misc_feature 1..1245: note = Description of Artificial Sequence: Synthetic coding sequence
  source 1..1245: mol_type = other DNA
atggtgttccacctgagaaccagatacgagcaggccaactgcgactgcctgaacggcggcacctgcgtgagcaacaagtacttcagcaacatccactggtgcaactgccccaagaagttcggcggccagcactgcgagatcgacaagagcaagacctgctacgagggcaacggccacttctacagaggcaaggccagcaccgacaccatgggcagaccctgcctgccctggaacagcgccaccgtgctgcagcagacctaccacgcccacagaagcgacgccctgcagctgggcctgggcaagcacaactactgcagaaaccccgacaacagaagaagaccctggtgctacgtgcaggtgggcctgaagctgctggtgcaggagtgcatggtgcacgactgcgccgacggcaagaagcccagcagcccccccgaggagctgaagttccagtgcggccagaagaccctgagacccagattcaagatcatcggcggcgagttcaccaccatcgagaaccagccctggttcgccgccatctacagaagacacagaggcggcagcgtgacctacgtgtgcggcggcagcctgatcagcccctgctgggtgatcagcgccacccactgcttcatcgactaccccaagaaggaggactacatcgtgtacctgggcagaagcagactgaacagcaacacccagggcgagatgaagttcgaggtggagaacctgatcctgcacaaggactacagcgccgacaccctggcccaccacaacgacatcgccctgctgaagatcagaagcaaggagggcagatgcgcccagcccagcagaaccatccagaccatctgcctgcccagcatgtacaacgacccccagttcggcaccagctgcgagatcaccggcttcggcaaggagaacagcaccgactacctgtaccccgagcagctgaagatgaccgtggtgaagctgatcagccacagagagtgccagcagccccactactacggcagcgaggtgaccaccaagatgctgtgcgccgccgacccccagtggaagaccgacagctgccagggcgacagcggcggccccctggtgtgcagcctgcagggcagaatgaccctgaccggcatcgtgagctggggcagaggctgcgccctgaaggacaagcccggcgtgtacaccagagtgagccacttcctgccctggatcagaagccacaccaaggaggagaacggcctggccctgtag

SEQ ID NO: 12191 - DNA, 3984 bp, synthetic construct
  misc_feature 1..3984: note = Description of Artificial Sequence: Synthetic coding sequence
  source 1..3984: mol_type = other DNA
atggaggcccccctgcagaccggcatggtgctgggcgtgatgatcggcgccggcgtggccgtggtggtgaccgccgtgctgatcctgctggtggtgagaagactgagagtgcccaagacccccgcccccgacggccccagatacagattcagaaagagagacaaggtgctgttctacggcagaaagatcatgagaaaggtgagccagagcaccagcagcctggtggacaccagcgtgagcgccaccagcagacccagaatgagaaagaagctgaagatgctgaacatcgccaagaagatcctgagaatccagaaggagacccccaccctgcagagaaaggagcccccccccgccgtgctggaggccgacctgaccgagggcgacctggccaacagccacctgcccagcgaggtgctgtacatgctgaagaacgtgagagtgctgggccacttcgagaagcccctgttcctggagctgtgcagacacatggtgttccagagactgggccagggcgactacgtgttcagacccggccagcccgacgccagcatctacgtggtgcaggacggcctgctggagctgtgcctgcccggccccgacggcaaggagtgcgtggtgaaggaggtggtgcccggcgacagcgtgaacagcctgctgagcatcctggacgtgatcaccggccaccagcacccccagagaaccgtgagcgccagagccgccagagacagcaccgtgctgagactgcccgtggaggccttcagcgccgtgttcaccaagtaccccgagagcctggtgagagtggtgcagatcatcatggtgagactgcagagagtgaccttcctggccctgcacaactacctgggcctgaccaacgagctgttcagccacgagatccagcccctgagactgttccccagccccggcctgcccaccagaaccagccccgtgagaggcagcaagagaatggtgagcaccagcgccaccgacgagcccagagagacccccggcagaccccccgaccccaccggcgcccccctgcccggccccaccggcgaccccgtgaagcccaccagcctggagacccccagcgcccccctgctgagcagatgcgtgagcatgcccggcgacatcagcggcctgcagggcggccccagaagcgacttcgacatggcctacgagagaggcagaatcagcgtgagcctgcaggaggaggccagcggcggcagcctggccgcccccgccagaacccccacccaggagcccagagagcagcccgccggcgcctgcgagtacagctactgcgaggacgagagcgccaccggcggctgccccttcggcccctaccagggcagacagaccagcagcatcttcgaggccgccaagcaggagctggccaagctgatgagaatcgaggaccccagcctgctgaacagcagagtgctgctgcaccacgccaaggccggcaccatcatcgccagacagggcgaccaggacgtgagcctgcacttcgtgctgtggggctgcctgcacgtgtaccagagaatgatcgacaaggccgaggacgtgtgcctgttcgtggcccagcccggcgagctggtgggccagctggccgtgctgaccggcgagcccctgatcttcaccctgagagcccagagagactgcaccttcctgagaatcagcaagagcgacttctacgagatcatgagagcccagcccagcgtggtgctgagcgccgcccacaccgtggccgccagaatgagccccttcgtgagacagatggacttcgccatcgactggaccgccgtggaggccggcagagccctgtacagacagggcgacagaagcgactgcacctacatcgtgctgaacggcagactgagaagcgtgatccagagaggcagcggcaagaaggagctggtgggcgagtacggcagaggcgacctgatcggcgtggtggaggccctgaccagacagcccagagccaccaccgtgcacgccgtgagagacaccgagctggccaagctgcccgagggcaccctgggccacatcaagagaagatacccccaggtggtgaccagactgatccacctgctgagccagaagatcctgggcaacctgcagcagctgcagggccccttccccgccggcagcggcctgggcgtgcccccccacagcgagctgaccaaccccgccagcaacctggccaccgtggccatcctgcccgtgtgcgccgaggtgcccatggtggccttcaccctggagctgcagcacgccctgcaggccatcggccccaccctgctgctgaacagcgacatcatcagagccagactgggcgccagcgccctggacagcatccaggagttcagactgagcggctggctggcccagcaggaggacgcccacagaatcgtgctgtaccagaccgacgccagcctgaccccctggaccgtgagatgcctgagacaggccgactgcatcctgatcgtgggcctgggcgaccaggagcccaccctgggccagctggagcagatgctggagaacaccgccgtgagagccctgaagcagctggtgctgctgcacagagaggagggcgccggccccaccagaaccgtggagtggctgaacatgagaagctggtgcagcggccacctgcacctgagatgccccagaagactgttcagcagaagaagccccgccaagctgcacgagctgtacgagaaggtgttcagcagaagagccgacagacacagcgacttcagcagactggccagagtgctgaccggcaacaccatcgccctggtgctgggcggcggcggcgccagaggctgcagccacatcggcgtgctgaaggccctggaggaggccggcgtgcccgtggacctggtgggcggcaccagcatcggcagcttcatcggcgccctgtacgccgaggagagaagcgccagcagaaccaagcagagagccagagagtgggccaagagcatgaccagcgtgctggagcccgtgctggacctgacctaccccgtgaccagcatgttcaccggcagcgccttcaacagaagcatccacagagtgttccaggacaagcagatcgaggacctgtggctgccctacttcaacgtgaccaccgacatcaccgccagcgccatgagagtgcacaaggacggcagcctgtggagatacgtgagagccagcatgaccctgagcggctacctgccccccctgtgcgaccccaaggacggccacctgctgatggacggcggctacatcaacaacctgcccgccgacatcgccagaagcatgggcgccaagaccgtgatcgccatcgacgtgggcagccaggacgagaccgacctgagcacctacggcgacagcctgagcggctggtggctgctgtggaagagactgaacccctgggccgacaaggtgaaggtgcccgacatggccgagatccagagcagactggcctacgtgagctgcgtgagacagctggaggtggtgaagagcagcagctactgcgagtacctgagaccccccatcgactgcttcaagaccatggacttcggcaagttcgaccagatctacgacgtgggctaccagtacggcaaggccgtgttcggcggctggagcagaggcaacgtgatcgagaagatgctgaccgacagaagaagcaccgacctgaacgagagcagaagagccgacgtgctggccttccccagcagcggcttcaccgacctggccgagatcgtgagcagaatcgagccccccaccagctacgtgagcgacggctgcgccgacggcgaggagagcgactgcctgaccgagtacgaggaggacgccggccccgactgcagcagagacgagggcggcagccccgagggcgccagccccagcaccgccagcgagatggaggaggagaagagcatcctgagacagagaagatgcctgccccaggagccccccggcagcgccaccgacgcctag

SEQ ID NO: 12192 - DNA, 846 bp, synthetic construct
  misc_feature 1..846: note = Description of Artificial Sequence: Synthetic coding sequence
  source 1..846: mol_type = other DNA
atgggccacccccccctgctgcccctgctgctgctgctgcacacctgcgtgcccgccagctggggcctgagatgcatgcagtgcaagaccaacggcgactgcagagtggaggagtgcgccctgggccaggacctgtgcagaaccaccatcgtgagactgtgggaggagggcgaggagctggagctggtggagaagagctgcacccacagcgagaagaccaacagaaccctgagctacagaaccggcctgaagatcaccagcctgaccgaggtggtgtgcggcctggacctgtgcaaccagggcaacagcggcagagccgtgacctacagcagaagcagatacctggagtgcatcagctgcggcagcagcgacatgagctgcgagagaggcagacaccagagcctgcagtgcagaagccccgaggagcagtgcctggacgtggtgacccactggatccaggagggcgaggagggcagacccaaggacgacagacacctgagaggctgcggctacctgcccggctgccccggcagcaacggcttccacaacaacgacaccttccacttcctgaagtgctgcaacaccaccaagtgcaacgagggccccatcctggagctggagaacctgccccagaacggcagacagtgctacagctgcaagggcaacagcacccacggctgcagcagcgaggagaccttcctgatcgactgcagaggccccatgaaccagtgcctggtggccaccggcacccacgagagaagcctgtggggcagctggctgccctgcaagagcaccaccgccctgagacccccctgctgcgaggaggcccaggccacccacgtgtag

SEQ ID NO: 12193 - DNA, 1008 bp, synthetic construct
  misc_feature 1..1008: note = Description of Artificial Sequence: Synthetic coding sequence
  source 1..1008: mol_type = other DNA
atgggccacccccccctgctgcccctgctgctgctgctgcacacctgcgtgcccgccagctggggcctgagatgcatgcagtgcaagaccaacggcgactgcagagtggaggagtgcgccctgggccaggacctgtgcagaaccaccatcgtgagactgtgggaggagggcgaggagctggagctggtggagaagagctgcacccacagcgagaagaccaacagaaccctgagctacagaaccggcctgaagatcaccagcctgaccgaggtggtgtgcggcctggacctgtgcaaccagggcaacagcggcagagccgtgacctacagcagaagcagatacctggagtgcatcagctgcggcagcagcgacatgagctgcgagagaggcagacaccagagcctgcagtgcagaagccccgaggagcagtgcctggacgtggtgacccactggatccaggagggcgaggagggcagacccaaggacgacagacacctgagaggctgcggctacctgcccggctgccccggcagcaacggcttccacaacaacgacaccttccacttcctgaagtgctgcaacaccaccaagtgcaacgagggccccatcctggagctggagaacctgccccagaacggcagacagtgctacagctgcaagggcaacagcacccacggctgcagcagcgaggagaccttcctgatcgactgcagaggccccatgaaccagtgcctggtggccaccggcacccacgagcccaagaaccagagctacatggtgagaggctgcgccaccgccagcatgtgccagcacgcccacctgggcgacgccttcagcatgaaccacatcgacgtgagctgctgcaccaagagcggctgcaaccaccccgacctggacgtgcagtacagaagcggcgccgccccccagcccggccccgcccacctgagcctgaccatcaccctgctgatgaccgccagactgtggggcggcaccctgctgtggacctag

SEQ ID NO: 12194 - DNA, 1038 bp, synthetic construct
  misc_feature 1..1038: note = Description of Artificial Sequence: Synthetic coding sequence
  source 1..1038: mol_type = other DNA
atgagcctgttcggcctgctgctgctgaccagcgccctggccggccagagacagggcacccaggccgagagcaacctgagcagcaagttccagttcagcagcaacaaggagcagaacggcgtgcaggacccccagcacgagagaatcatcaccgtgagcaccaacggcagcatccacagccccagattcccccacacctaccccagaaacaccgtgctggtgtggagactggtggccgtggaggagaacgtgtggatccagctgaccttcgacgagagattcggcctggaggaccccgaggacgacatctgcaagtacgacttcgtggaggtggaggagcccagcgacggcaccatcctgggcagatggtgcggcagcggcaccgtgcccggcaagcagatcagcaagggcaaccagatcagaatcagattcgtgagcgacgagtacttccccagcgagcccggcttctgcatccactacaacatcgtgatgccccagttcaccgaggccgtgagccccagcgtgctgccccccagcgccctgcccctggacctgctgaacaacgccatcaccgccttcagcaccctggaggacctgatcagatacctggagcccgagagatggcagctggacctggaggacctgtacagacccacctggcagctgctgggcaaggccttcgtgttcggcagaaagagcagagtggtggacctgaacctgctgaccgaggaggtgagactgtacagctgcacccccagaaacttcagcgtgagcatcagagaggagctgaagagaaccgacaccatcttctggcccggctgcctgctggtgaagagatgcggcggcaactgcgcctgctgcctgcacaactgcaacgagtgccagtgcgtgcccagcaaggtgaccaagaagtaccacgaggtgctgcagctgagacccaagaccggcgtgagaggcctgcacaagagcctgaccgacgtggccctggagcaccacgaggagtgcgactgcgtgtgcagaggcagcaccggcggctag

SEQ ID NO: 12195 - DNA, 549 bp, synthetic construct
  misc_feature 1..549: note = Description of Artificial Sequence: Synthetic coding sequence
  source 1..549: mol_type = other DNA
atgccccagttcaccgaggccgtgagccccagcgtgctgccccccagcgccctgcccctggacctgctgaacaacgccatcaccgccttcagcaccctggaggacctgatcagatacctggagcccgagagatggcagctggacctggaggacctgtacagacccacctggcagctgctgggcaaggccttcgtgttcggcagaaagagcagagtggtggacctgaacctgctgaccgaggaggtgagactgtacagctgcacccccagaaacttcagcgtgagcatcagagaggagctgaagagaaccgacaccatcttctggcccggctgcctgctggtgaagagatgcggcggcaactgcgcctgctgcctgcacaactgcaacgagtgccagtgcgtgcccagcaaggtgaccaagaagtaccacgaggtgctgcagctgagacccaagaccggcgtgagaggcctgcacaagagcctgaccgacgtggccctggagcaccacgaggagtgcgactgcgtgtgcagaggcagcaccggcggctag

SEQ ID NO: 12196 - DNA, 573 bp, synthetic construct
  misc_feature 1..573: note = Description of Artificial Sequence: Synthetic coding sequence
  source 1..573: mol_type = other DNA
atgatgcagtacacctggctgctgaccaagcagttcaccgaggccgtgagccccagcgtgctgccccccagcgccctgcccctggacctgctgaacaacgccatcaccgccttcagcaccctggaggacctgatcagatacctggagcccgagagatggcagctggacctggaggacctgtacagacccacctggcagctgctgggcaaggccttcgtgttcggcagaaagagcagagtggtggacctgaacctgctgaccgaggaggtgagactgtacagctgcacccccagaaacttcagcgtgagcatcagagaggagctgaagagaaccgacaccatcttctggcccggctgcctgctggtgaagagatgcggcggcaactgcgcctgctgcctgcacaactgcaacgagtgccagtgcgtgcccagcaaggtgaccaagaagtaccacgaggtgctgcagctgagacccaagaccggcgtgagaggcctgcacaagagcctgaccgacgtggccctggagcaccacgaggagtgcgactgcgtgtgcagaggcagcaccggcggctag

SEQ ID NO: 12197 - DNA, 504 bp, synthetic construct
  misc_feature 1..504: note = Description of Artificial Sequence: Synthetic coding sequence
  source 1..504: mol_type = other DNA
atgagcctgttcggcctgctgctgctgaccagcgccctggccggccagagacagggcacccaggccgagagcaacctgagcagcaagttccagttcagcagcaacaaggagcagaacggcgtgcaggacccccagcacgagagaatcatcaccgtgagcaccaacggcagcatccacagccccagattcccccacacctaccccagaaacaccgtgctggtgtggagactggtggccgtggaggagaacgtgtggatccagctgaccttcgacgagagattcggcctggaggaccccgaggacgacatctgcaagtacgacttcgtggaggtggaggagcccagcgacggcaccatcctgggcagatggtgcggcagcggcaccgtgcccggcaagcagatcagcaagggcaaccagatcagaatcagattcgtgagcgacgagtacttccccagcgagcccagcaacagaggcggcaagatcatccagctgcacaccagctag

SEQ ID NO: 12198 - DNA, 2217 bp, synthetic construct
  misc_feature 1..2217: note = Description of Artificial Sequence: Synthetic coding sequence
  source 1..2217: mol_type = other DNA
atgcagcccagatgggcccagggcgccaccatgtggctgggcgtgctgctgaccctgctgctgtgcagcagcctggagggccaggagaacagcttcaccatcaacagcgtggacatgaagagcctgcccgactggaccgtgcagaacggcaagaacctgaccctgcagtgcttcgccgacgtgagcaccaccagccacgtgaagccccagcaccagatgctgttctacaaggacgacgtgctgttctacaacatcagcagcatgaagagcaccgagagctacttcatccccgaggtgagaatctacgacagcggcacctacaagtgcaccgtgatcgtgaacaacaaggagaagaccaccgccgagtaccaggtgctggtggagggcgtgcccagccccagagtgaccctggacaagaaggaggccatccagggcggcatcgtgagagtgaactgcagcgtgcccgaggagaaggcccccatccacttcaccatcgagaagctggagctgaacgagaagatggtgaagctgaagagagagaagaacagcagagaccagaacttcgtgatcctggagttccccgtggaggagcaggacagagtgctgagcttcagatgccaggccagaatcatcagcggcatccacatgcagaccagcgagagcaccaagagcgagctggtgaccgtgaccgagagcttcagcacccccaagttccacatcagccccaccggcatgatcatggagggcgcccagctgcacatcaagtgcaccatccaggtgacccacctggcccaggagttccccgagatcatcatccagaaggacaaggccatcgtggcccacaacagacacggcaacaaggccgtgtacagcgtgatggccatggtggagcacagcggcaactacacctgcaaggtggagagcagcagaatcagcaaggtgagcagcatcgtggtgaacatcaccgagctgttcagcaagcccgagctggagagcagcttcacccacctggaccagggcgagagactgaacctgagctgcagcatccccggcgccccccccgccaacttcaccatccagaaggaggacaccatcgtgagccagacccaggacttcaccaagatcgccagcaagagcgacagcggcacctacatctgcaccgccggcatcgacaaggtggtgaagaagagcaacaccgtgcagatcgtggtgtgcgagatgctgagccagcccagaatcagctacgacgcccagttcgaggtgatcaagggccagaccatcgaggtgagatgcgagagcatcagcggcaccctgcccatcagctaccagctgctgaagaccagcaaggtgctggagaacagcaccaagaacagcaacgaccccgccgtgttcaaggacaaccccaccgaggacgtggagtaccagtgcgtggccgacaactgccacagccacgccaagatgctgagcgaggtgctgagagtgaaggtgatcgcccccgtggacgaggtgcagatcagcatcctgagcagcaaggtggtggagagcggcgaggacatcgtgctgcagtgcgccgtgaacgagggcagcggccccatcacctacaagttctacagagagaaggagggcaagcccttctaccagatgaccagcaacgccacccaggccttctggaccaagcagaaggccagcaaggagcaggagggcgagtactactgcaccgccttcaacagagccaaccacgccagcagcgtgcccagaagcaagatcctgaccgtgagagtgatcctggccccctggaagaagggcctgatcgccgtggtgatcatcggcgtgatcatcgccctgctgatcatcgccgccaagtgctacttcctgagaaaggccaaggccaagcagatgcccgtggagatgagcagacccgccgtgcccctgctgaacagcaacaacgagaagatgagcgaccccaacatggaggccaacagccactacggccacaacgacgacgtgagaaaccacgccatgaagcccatcaacgacaacaaggagcccctgaacagcgacgtgcagtacaccgaggtgcaggtgagcagcgccgagagccacaaggacctgggcaagaaggacaccgagaccgtgtacagcgaggtgagaaaggccgtgcccgacgccgtggagagcagatacagcagaaccgagggcagcctggacggcacctag

SEQ ID NO: 12199 - DNA, 636 bp, synthetic construct
  misc_feature 1..636: note = Description of Artificial Sequence: Synthetic coding sequence
  source 1..636: mol_type = other DNA
atgagaaccctggcctgcctgctgctgctgggctgcggctacctggcccacgtgctggccgaggaggccgagatccccagagaggtgatcgagagactggccagaagccagatccacagcatcagagacctgcagagactgctggagatcgacagcgtgggcagcgaggacagcctggacaccagcctgagagcccacggcgtgcacgccaccaagcacgtgcccgagaagagacccctgcccatcagaagaaagagaagcatcgaggaggccgtgcccgccgtgtgcaagaccagaaccgtgatctacgagatccccagaagccaggtggaccccaccagcgccaacttcctgatctggcccccctgcgtggaggtgaagagatgcaccggctgctgcaacaccagcagcgtgaagtgccagcccagcagagtgcaccacagaagcgtgaaggtggccaaggtggagtacgtgagaaagaagcccaagctgaaggaggtgcaggtgagactggaggagcacctggagtgcgcctgcgccaccaccagcctgaaccccgactacagagaggaggacaccggcagacccagagagagcggcaagaagagaaagagaaagagactgaagcccacctag

SEQ ID NO: 12200 - DNA, 591 bp, synthetic construct
  misc_feature 1..591: note = Description of Artificial Sequence: Synthetic coding sequence
  source 1..591: mol_type = other DNA
atgagaaccctggcctgcctgctgctgctgggctgcggctacctggcccacgtgctggccgaggaggccgagatccccagagaggtgatcgagagactggccagaagccagatccacagcatcagagacctgcagagactgctggagatcgacagcgtgggcagcgaggacagcctggacaccagcctgagagcccacggcgtgcacgccaccaagcacgtgcccgagaagagacccctgcccatcagaagaaagagaagcatcgaggaggccgtgcccgccgtgtgcaagaccagaaccgtgatctacgagatccccagaagccaggtggaccccaccagcgccaacttcctgatctggcccccctgcgtggaggtgaagagatgcaccggctgctgcaacaccagcagcgtgaagtgccagcccagcagagtgcaccacagaagcgtgaaggtggccaaggtggagtacgtgagaaagaagcccaagctgaaggaggtgcaggtgagactggaggagcacctggagtgcgcctgcgccaccaccagcctgaaccccgactacagagaggaggacaccgacgtgagatag

SEQ ID NO: 12201 - DNA, 162 bp, synthetic construct
  misc_feature 1..162: note = Description of Artificial Sequence: Synthetic coding sequence
  source 1..162: mol_type = other DNA
atgagaaccctggcctgcctgctgctgctgggctgcggctacctggcccacgtgctggccgaggaggccgagatccccagagaggtgatcgagagactggccagaagccagatccacagcatcagagacctgcagagactgctggagatcgacagcgtgtag

SEQ ID NO: 12202 - DNA, 3270 bp, synthetic construct
  misc_feature 1..3270: note = Description of Artificial Sequence: Synthetic coding sequence
  source 1..3270: mol_type = other DNA
atgggcaccagccaccccgccttcctggtgctgggctgcctgctgaccggcctgagcctgatcctgtgccagctgagcctgcccagcatcctgcccaacgagaacgagaaggtggtgcagctgaacagcagcttcagcctgagatgcttcggcgagagcgaggtgagctggcagtaccccatgagcgaggaggagagcagcgacgtggagatcagaaacgaggagaacaacagcggcctgttcgtgaccgtgctggaggtgagcagcgccagcgccgcccacaccggcctgtacacctgctactacaaccacacccagaccgaggagaacgagctggagggcagacacatctacatctacgtgcccgaccccgacgtggccttcgtgcccctgggcatgaccgactacctggtgatcgtggaggacgacgacagcgccatcatcccctgcagaaccaccgaccccgagacccccgtgaccctgcacaacagcgagggcgtggtgcccgccagctacgacagcagacagggcttcaacggcaccttcaccgtgggcccctacatctgcgaggccaccgtgaagggcaagaagttccagaccatccccttcaacgtgtacgccctgaaggccaccagcgagctggacctggagatggaggccctgaagaccgtgtacaagagcggcgagaccatcgtggtgacctgcgccgtgttcaacaacgaggtggtggacctgcagtggacctaccccggcgaggtgaagggcaagggcatcaccatgctggaggagatcaaggtgcccagcatcaagctggtgtacaccctgaccgtgcccgaggccaccgtgaaggacagcggcgactacgagtgcgccgccagacaggccaccagagaggtgaaggagatgaagaaggtgaccatcagcgtgcacgagaagggcttcatcgagatcaagcccaccttcagccagctggaggccgtgaacctgcacgaggtgaagcacttcgtggtggaggtgagagcctaccccccccccagaatcagctggctgaagaacaacctgaccctgatcgagaacctgaccgagatcaccaccgacgtggagaagatccaggagatcagatacagaagcaagctgaagctgatcagagccaaggaggaggacagcggccactacaccatcgtggcccagaacgaggacgccgtgaagagctacaccttcgagctgctgacccaggtgcccagcagcatcctggacctggtggacgaccaccacggcagcaccggcggccagaccgtgagatgcaccgccgagggcacccccctgcccgacatcgagtggatgatctgcaaggacatcaagaagtgcaacaacgagaccagctggaccatcctggccaacaacgtgagcaacatcatcaccgagatccacagcagagacagaagcaccgtggagggcagagtgaccttcgccaaggtggaggagaccatcgccgtgagatgcctggccaagaacctgctgggcgccgagaacagagagctgaagctggtggcccccaccctgagaagcgagctgaccgtggccgccgccgtgctggtgctgctggtgatcgtgatcatcagcctgatcgtgctggtggtgatctggaagcagaagcccagatacgagatcagatggagagtgatcgagagcatcagccccgacggccacgagtacatctacgtggaccccatgcagctgccctacgacagcagatgggagttccccagagacggcctggtgctgggcagagtgctgggcagcggcgccttcggcaaggtggtggagggcaccgcctacggcctgagcagaagccagcccgtgatgaaggtggccgtgaagatgctgaagcccaccgccagaagcagcgagaagcaggccctgatgagcgagctgaagatcatgacccacctgggcccccacctgaacatcgtgaacctgctgggcgcctgcaccaagagcggccccatctacatcatcaccgagtactgcttctacggcgacctggtgaactacctgcacaagaacagagacagcttcctgagccaccaccccgagaagcccaagaaggagctggacatcttcggcctgaaccccgccgacgagagcaccagaagctacgtgatcctgagcttcgagaacaacggcgactacatggacatgaagcaggccgacaccacccagtacgtgcccatgctggagagaaaggaggtgagcaagtacagcgacatccagagaagcctgtacgacagacccgccagctacaagaagaagagcatgctggacagcgaggtgaagaacctgctgagcgacgacaacagcgagggcctgaccctgctggacctgctgagcttcacctaccaggtggccagaggcatggagttcctggccagcaagaactgcgtgcacagagacctggccgccagaaacgtgctgctggcccagggcaagatcgtgaagatctgcgacttcggcctggccagagacatcatgcacgacagcaactacgtgagcaagggcagcaccttcctgcccgtgaagtggatggcccccgagagcatcttcgacaacctgtacaccaccctgagcgacgtgtggagctacggcatcctgctgtgggagatcttcagcctgggcggcaccccctaccccggcatgatggtggacagcaccttctacaacaagatcaagagcggctacagaatggccaagcccgaccacgccaccagcgaggtgtacgagatcatggtgaagtgctggaacagcgagcccgagaagagacccagcttctaccacctgagcgagatcgtggagaacctgctgcccggccagtacaagaagagctacgagaagatccacctggacttcctgaagagcgaccaccccgccgtggccagaatgagagtggacagcgacaacgcctacatcggcgtgacctacaagaacgaggaggacaagctgaaggactgggagggcggcctggacgagcagagactgagcgccgacagcggctacatcatccccctgcccgacatcgaccccgtgcccgaggaggaggacctgggcaagagaaacagacacagcagccagaccagcgaggagagcgccatcgagaccggcagcagcagcagcaccttcatcaagagagaggacgagaccatcgaggacatcgacatgatggacgacatcggcatcgacagcagcgacctggtggaggacagcttcctgtag

SEQ ID NO: 12203 - DNA, 480 bp, synthetic construct
  misc_feature 1..480: note = Description of Artificial Sequence: Synthetic coding sequence
  source 1..480: mol_type = other DNA
atgggcaccagccaccccgccttcctggtgctgggctgcctgctgaccggcctgagcctgatcctgtgccagctgagcctgcccagcatcctgcccaacgagaacgagaaggtggtgcagctgaacagcagcttcagcctgagatgcttcggcgagagcgaggtgagctggcagtaccccatgagcgaggaggagagcagcgacgtggagatcagaaacgaggagaacaacagcggcctgttcgtgaccgtgctggaggtgagcagcgccagcgccgcccacaccggcctgtacacctgctactacaaccacacccagaccgaggagaacgagctggagggcagacacatctacatctacgtgcccgaccccgacgtggccttcgtgcccctgggcatgaccgactacctggtgatcgtggaggacgacgacagcgccatcatcccctgcagaaccaccgaccccgagacccccgtgtag

SEQ ID NO: 12204 - DNA, 477 bp, synthetic construct
  misc_feature 1..477: note = Description of Artificial Sequence: Synthetic coding sequence
  source 1..477: mol_type = other DNA
atgggcaccagccaccccgccttcctggtgctgggctgcctgctgaccggcctgagcctgatcctgtgccagctgagcctgcccagcatcctgcccaacgagaacgagaaggtggtgcagctgaacagcagcttcagcctgagatgcttcggcgagagcgaggtgagctggcagtaccccatgagcgaggaggagagcagcgacgtggagatcagaaacgaggagaacaacagcggcctgttcgtgaccgtgctggaggtgagcagcgccagcgccgcccacaccggcctgtacacctgctactacaaccacacccagaccgaggagaacgagctggagggcagacacatctacatctacgtgcccgaccccgacgtggccttcgtgcccctgggcatgaccgactacctggtgatcgtggaggacgacgacagcgccatcatcccctgcagaaccaccgaccccgagaccccctag

SEQ ID NO: 12205 - DNA, 657 bp, synthetic construct
  misc_feature 1..657: note = Description of Artificial Sequence: Synthetic coding sequence
  source 1..657: mol_type = other DNA
atgggcaccagccaccccgccttcctggtgctgggctgcctgctgaccggcctgagcctgatcctgtgccagctgagcctgcccagcatcctgcccaacgagaacgagaaggtggtgcagctgaacagcagcttcagcctgagatgcttcggcgagagcgaggtgagctggcagtaccccatgagcgaggaggagagcagcgacgtggagatcagaaacgaggagaacaacagcggcctgttcgtgaccgtgctggaggtgagcagcgccagcgccgcccacaccggcctgtacacctgctactacaaccacacccagaccgaggagaacgagctggagggcagacacatctacatctacgtgcccgaccccgacgtggccttcgtgcccctgggcatgaccgactacctggtgatcgtggaggacgacgacagcgccatcatcccctgcagaaccaccgaccccgagacccccgtgaccctgcacaacagcgagggcgtggtgcccgccagctacgacagcagacagggcttcaacggcaccttcaccgtgggcccctacatctgcgaggccaccgtgaagggcaagaagttccagaccatccccttcaacgtgtacgccctgaagggcacctgcatcatcagcttcctgctgtag

SEQ ID NO: 12206 - DNA, 465 bp, synthetic construct
  misc_feature 1..465: note = Description of Artificial Sequence: Synthetic coding sequence
  source 1..465: mol_type = other DNA
atgggcaccagccaccccgccttcctggtgctgggctgcctgctgaccggcctgagcctgatcctgtgccagctgagcctgcccagcatcctgcccaacgagaacgagaaggtggtgcagctgaacagcagcttcagcctgagatgcttcggcgagagcgaggtgagctggcagtaccccatgagcgaggaggagagcagcgacgtggagatcagaaacgaggagaacaacagcggcctgttcgtgaccgtgctggaggtgagcagcgccagcgccgcccacaccggcctgtacacctgctactacaaccacacccagaccgaggagaacgagctggagggcagacacatctacatctacgtgcccgaccccgacgtggccttcgtgcccctgggcatgaccgactacctggtgatcgtggaggacgacgacagcgccatcatcccctgcagaaccaccgactag

SEQ ID NO: 12207 - DNA, 3321 bp, synthetic construct
  misc_feature 1..3321: note = Description of Artificial Sequence: Synthetic coding sequence
  source 1..3321: mol_type = other DNA
atgagactgcccggcgccatgcccgccctggccctgaagggcgagctgctgctgctgagcctgctgctgctgctggagccccagatcagccagggcctggtggtgaccccccccggccccgagctggtgctgaacgtgagcagcaccttcgtgctgacctgcagcggcagcgcccccgtggtgtgggagagaatgagccaggagcccccccaggagatggccaaggcccaggacggcaccttcagcagcgtgctgaccctgaccaacctgaccggcctggacaccggcgagtacttctgcacccacaacgacagcagaggcctggagaccgacgagagaaagagactgtacatcttcgtgcccgaccccaccgtgggcttcctgcccaacgacgccgaggagctgttcatcttcctgaccgagatcaccgagatcaccatcccctgcagagtgaccgacccccagctggtggtgaccctgcacgagaagaagggcgacgtggccctgcccgtgccctacgaccaccagagaggcttcagcggcatcttcgaggacagaagctacatctgcaagaccaccatcggcgacagagaggtggacagcgacgcctactacgtgtacagactgcaggtgagcagcatcaacgtgagcgtgaacgccgtgcagaccgtggtgagacagggcgagaacatcaccctgatgtgcatcgtgatcggcaacgaggtggtgaacttcgagtggacctaccccagaaaggagagcggcagactggtggagcccgtgaccgacttcctgctggacatgccctaccacatcagaagcatcctgcacatccccagcgccgagctggaggacagcggcacctacacctgcaacgtgaccgagagcgtgaacgaccaccaggacgagaaggccatcaacatcaccgtggtggagagcggctacgtgagactgctgggcgaggtgggcaccctgcagttcgccgagctgcacagaagcagaaccctgcaggtggtgttcgaggcctaccccccccccaccgtgctgtggttcaaggacaacagaaccctgggcgacagcagcgccggcgagatcgccctgagcaccagaaacgtgagcgagaccagatacgtgagcgagctgaccctggtgagagtgaaggtggccgaggccggccactacaccatgagagccttccacgaggacgccgaggtgcagctgagcttccagctgcagatcaacgtgcccgtgagagtgctggagctgagcgagagccaccccgacagcggcgagcagaccgtgagatgcagaggcagaggcatgccccagcccaacatcatctggagcgcctgcagagacctgaagagatgccccagagagctgccccccaccctgctgggcaacagcagcgaggaggagagccagctggagaccaacgtgacctactgggaggaggagcaggagttcgaggtggtgagcaccctgagactgcagcacgtggacagacccctgagcgtgagatgcaccctgagaaacgccgtgggccaggacacccaggaggtgatcgtggtgccccacagcctgcccttcaaggtggtggtgatcagcgccatcctggccctggtggtgctgaccatcatcagcctgatcatcctgatcatgctgtggcagaagaagcccagatacgagatcagatggaaggtgatcgagagcgtgagcagcgacggccacgagtacatctacgtggaccccatgcagctgccctacgacagcacctgggagctgcccagagaccagctggtgctgggcagaaccctgggcagcggcgccttcggccaggtggtggaggccaccgcccacggcctgagccacagccaggccaccatgaaggtggccgtgaagatgctgaagagcaccgccagaagcagcgagaagcaggccctgatgagcgagctgaagatcatgagccacctgggcccccacctgaacgtggtgaacctgctgggcgcctgcaccaagggcggccccatctacatcatcaccgagtactgcagatacggcgacctggtggactacctgcacagaaacaagcacaccttcctgcagcaccacagcgacaagagaagaccccccagcgccgagctgtacagcaacgccctgcccgtgggcctgcccctgcccagccacgtgagcctgaccggcgagagcgacggcggctacatggacatgagcaaggacgagagcgtggactacgtgcccatgctggacatgaagggcgacgtgaagtacgccgacatcgagagcagcaactacatggccccctacgacaactacgtgcccagcgcccccgagagaacctgcagagccaccctgatcaacgagagccccgtgctgagctacatggacctggtgggcttcagctaccaggtggccaacggcatggagttcctggccagcaagaactgcgtgcacagagacctggccgccagaaacgtgctgatctgcgagggcaagctggtgaagatctgcgacttcggcctggccagagacatcatgagagacagcaactacatcagcaagggcagcaccttcctgcccctgaagtggatggcccccgagagcatcttcaacagcctgtacaccaccctgagcgacgtgtggagcttcggcatcctgctgtgggagatcttcaccctgggcggcaccccctaccccgagctgcccatgaacgagcagttctacaacgccatcaagagaggctacagaatggcccagcccgcccacgccagcgacgagatctacgagatcatgcagaagtgctgggaggagaagttcgagatcagaccccccttcagccagctggtgctgctgctggagagactgctgggcgagggctacaagaagaagtaccagcaggtggacgaggagttcctgagaagcgaccaccccgccatcctgagaagccaggccagactgcccggcttccacggcctgagaagccccctggacaccagcagcgtgctgtacaccgccgtgcagcccaacgagggcgacaacgactacatcatccccctgcccgaccccaagcccgaggtggccgacgagggccccctggagggcagccccagcctggccagcagcaccctgaacgaggtgaacaccagcagcaccatcagctgcgacagccccctggagccccaggacgagcccgagcccgagccccagctggagctgcaggtggagcccgagcccgagctggagcagctgcccgacagcggctgccccgcccccagagccgaggccgaggacagcttcctgtag

SEQ ID NO: 12208 - DNA, 525 bp, synthetic construct
  misc_feature 1..525: note = Description of Artificial Sequence: Synthetic coding sequence
  source 1..525: mol_type = other DNA
atgagactgcccggcgccatgcccgccctggccctgaagggcgagctgctgctgctgagcctgctgctgctgctggagccccagatcagccagggcctggtggtgaccccccccggccccgagctggtgctgaacgtgagcagcaccttcgtgctgacctgcagcggcagcgcccccgtggtgtgggagagaatgagccaggagcccccccaggagatggccaaggcccaggacggcaccttcagcagcgtgctgaccctgaccaacctgaccggcctggacaccggcgagtacttctgcacccacaacgacagcagaggcctggagaccgacgagagaaagagactgtacatcttcgtgcccgaccccaccgtgggcttcctgcccaacgacgccgaggagctgttcatcttcctgaccgagatcaccgagatcaccatcccctgcagagtgaccgacccccagctggtggtgaccctgcacgagaagaagggcgacgtggccctgcccgtgccctacgactag

SEQ ID NO: 12209 - DNA, 2331 bp, synthetic construct
  misc_feature 1..2331: note = Description of Artificial Sequence: Synthetic coding sequence
  source 1..2331: mol_type = other DNA
gccgccagcgagcccgacaccgccggcagcgtgagaggcctgcccaccgcccactgccccgtggtggacaacagaaccctgggcgacagcagcgccggcgagatcgccctgagcaccagaaacgtgagcgagaccagatacgtgagcgagctgaccctggtgagagtgaaggtggccgaggccggccactacaccatgagagccttccacgaggacgccgaggtgcagctgagcttccagctgcagatcaacgtgcccgtgagagtgctggagctgagcgagagccaccccgacagcggcgagcagaccgtgagatgcagaggcagaggcatgccccagcccaacatcatctggagcgcctgcagagacctgaagagatgccccagagagctgccccccaccctgctgggcaacagcagcgaggaggagagccagctggagaccaacgtgacctactgggaggaggagcaggagttcgaggtggtgagcaccctgagactgcagcacgtggacagacccctgagcgtgagatgcaccctgagaaacgccgtgggccaggacacccaggaggtgatcgtggtgccccacagcctgcccttcaaggtggtggtgatcagcgccatcctggccctggtggtgctgaccatcatcagcctgatcatcctgatcatgctgtggcagaagaagcccagatacgagatcagatggaaggtgatcgagagcgtgagcagcgacggccacgagtacatctacgtggaccccatgcagctgccctacgacagcacctgggagctgcccagagaccagctggtgctgggcagaaccctgggcagcggcgccttcggccaggtggtggaggccaccgcccacggcctgagccacagccaggccaccatgaaggtggccgtgaagatgctgaagagcaccgccagaagcagcgagaagcaggccctgatgagcgagctgaagatcatgagccacctgggcccccacctgaacgtggtgaacctgctgggcgcctgcaccaagggcggccccatctacatcatcaccgagtactgcagatacggcgacctggtggactacctgcacagaaacaagcacaccttcctgcagcaccacagcgacaagagaagaccccccagcgccgagctgtacagcaacgccctgcccgtgggcctgcccctgcccagccacgtgagcctgaccggcgagagcgacggcggctacatggacatgagcaaggacgagagcgtggactacgtgcccatgctggacatgaagggcgacgtgaagtacgccgacatcgagagcagcaactacatggccccctacgacaactacgtgcccagcgcccccgagagaacctgcagagccaccctgatcaacgagagccccgtgctgagctacatggacctggtgggcttcagctaccaggtggccaacggcatggagttcctggccagcaagaactgcgtgcacagagacctggccgccagaaacgtgctgatctgcgagggcaagctggtgaagatctgcgacttcggcctggccagagacatcatgagagacagcaactacatcagcaagggcagcaccttcctgcccctgaagtggatggcccccgagagcatcttcaacagcctgtacaccaccctgagcgacgtgtggagcttcggcatcctgctgtgggagatcttcaccctgggcggcaccccctaccccgagctgcccatgaacgagcagttctacaacgccatcaagagaggctacagaatggcccagcccgcccacgccagcgacgagatctacgagatcatgcagaagtgctgggaggagaagttcgagatcagaccccccttcagccagctggtgctgctgctggagagactgctgggcgagggctacaagaagaagtaccagcaggtggacgaggagttcctgagaagcgaccaccccgccatcctgagaagccaggccagactgcccggcttccacggcctgagaagccccctggacaccagcagcgtgctgtacaccgccgtgcagcccaacgagggcgacaacgactacatcatccccctgcccgaccccaagcccgaggtggccgacgagggccccctggagggcagccccagcctggccagcagcaccctgaacgaggtgaacaccagcagcaccatcagctgcgacagccccctggagccccaggacgagcccgagcccgagccccagctggagctgcaggtggagcccgagcccgagctggagcagctgcccgacagcggctgccccgcccccagagccgaggccgaggacagcttcctgtag

SEQ ID NO: 12210 - DNA, 891 bp, synthetic construct
  misc_feature 1..891: note = Description of Artificial Sequence: Synthetic coding sequence
  source 1..891: mol_type = other DNA
atgggcctgagccacagcaagacccacctgagagtgatcaaggtggcccccctgcagaacaaggaggtggagacccccagcgccggcagagtggacttcgccttcaaccagaacctggaggagaagaccagctacagcctggccagactgcaggaccagaacaaggccctggagggccagctgccccccctgcaggagaactggtacggcagatacagcaccgccagcagagacatgtacttcgacatccccctggagcacagagagaccagcatcatcaagagacaccccccccagagactgcagaagctggagcccatcgacctgcccagagtgatcaccagcggcagactgctgagccagagagaggccagaaccatgcacaaggccaagcaggtgctggagaagaagatgcagacccccatgtacaccagcgagaacagacagtacctgcacaagatgcaggtgctggagatgatcagaaagagacaggaggcccagatggagctgaagaagagcctgcacggcgaggccagaatcaacaagcagagccccagagaccacaaggccaagaagaccctgcagagcacccccagaaacgacgaccacgacctgctgaccatgctgcccgacgagatcctgaacagaggccccggcaacagcaagaacaccgagttcctgaagcaccaggccgtgaacaactactgcccctggaagatcggcaagatggagacctggctgcacgagcaggaggcccagggccagctgctgtgggacagcagcagcagcgacagcgacgagcagggcaaggacgagaagaagcccagagccctggtgagaaccagaaccgagagaatccccctgttcgacgagttcttcgaccaggagtag

SEQ ID NO: 12211 - DNA, 1734 bp, synthetic construct
  misc_feature 1..1734: note = Description of Artificial Sequence: Synthetic coding sequence
  source 1..1734: mol_type = other DNA
atgcccgagggcgcccagggcctgagcctgagcaagcccagccccagcctgggctgcggcagaagaggcgaggtgtgcgactgcggcaccgtgtgcgagaccagaaccgcccccgccgcccccaccatggccagccccagaggcagcggcagcagcaccagcctgagcaccgtgggcagcgagggcgaccccgcccccggccccacccccgcctgcagcgccagcagacccgagcccctgcccggcccccccatcagactgcacctgagccccgtgggcatccccggcagcgccagacccagcagactggagagagtggccagagagatcgtggagaccgagagagcctacgtgagagacctgagaagcatcgtggaggactacctgggccccctgctggacggcggcgtgctgggcctgagcgtggagcaggtgggcaccctgttcgccaacatcgaggacatctacgagttcagcagcgagctgctggaggacctggagaacagcagcagcgccggcggcatcgccgagtgcttcgtgcagagaagcgaggacttcgacatctacaccctgtactgcatgaactaccccagcagcctggccctgctgagagagctgagcctgagcccccccgccgccctgtggctgcaggagagacaggcccagctgagacacagcctgcccctgcagagcttcctgctgaagcccgtgcagagaatcctgaagtaccacctgctgctgcaggagctgggcaagcactgggccgagggccccggcaccggcggcagagagatggtggaggaggccatcgtgagcatgaccgccgtggcctggtacatcaacgacatgaagagaaagcaggagcacgccgccagactgcaggaggtgcagagaagactgggcggctggaccggccccgagctgagcgccttcggcgagctggtgctggagggcgccttcagaggcggcggcggcggcggccccagactgagaggcggcgagagactgctgttcctgttcagcagaatgctgctggtggccaagagaagaggcctggagtacacctacaagggccacatcttctgctgcaacctgagcgtgagcgagagccccagagaccccctgggcttcaaggtgagcgacctgaccatccccaagcacagacacctgctgcaggccaagaaccaggaggagaagagactgtggatccactgcctgcagagactgttcttcgagaaccaccccgccagcatccccgccaaggccaagcaggtgctgctggagaacagcctgcactgcgcccccaagagcaagcccgtgctggagcccctgaccccccccctgggcagccccagacccagagacgccagaagcttcacccccggcagaagaaacaccgcccccagccccggccccagcgtgatcagaagaggcagaagacagagcgagcccgtgaaggacccctacgtgatgttcccccagaacgccaagcccggcttcaagcacgccggcagcgagggcgagctgtacccccccgagagccagccccccgtgagcggcagcgccccccccgaggacctggaggacgccggcccccccaccctggaccccagcggcaccagcatcaccgaggagatcctggagctgctgaaccagagaggcctgagagaccccggcgagagcatgggcctgcacagagcccagggcgcccccgacgcccccttccacatgtag

SEQ ID NO: 12212 - DNA, 4161 bp, synthetic construct
  misc_feature 1..4161: note = Description of Artificial Sequence: Synthetic coding sequence
  source 1..4161: mol_type = other DNA
atgcccgagggcgcccagggcctgagcctgagcaagcccagccccagcctgggctgcggcagaagaggcgaggtgtgcgactgcggcaccgtgtgcgagaccagaaccgcccccgccgcccccaccatggccagccccagaggcagcggcagcagcaccagcctgagcaccgtgggcagcgagggcgaccccgcccccggccccacccccgcctgcagcgccagcagacccgagcccctgcccggcccccccatcagactgcacctgagccccgtgggcatccccggcagcgccagacccagcagactggagagagtggccagagagatcgtggagaccgagagagcctacgtgagagacctgagaagcatcgtggaggactacctgggccccctgctggacggcggcgtgctgggcctgagcgtggagcaggtgggcaccctgttcgccaacatcgaggacatctacgagttcagcagcgagctgctggaggacctggagaacagcagcagcgccggcggcatcgccgagtgcttcgtgcagagaagcgaggacttcgacatctacaccctgtactgcatgaactaccccagcagcctggccctgctgagagagctgagcctgagcccccccgccgccctgtggctgcaggagagacaggcccagctgagacacagcctgcccctgcagagcttcctgctgaagcccgtgcagagaatcctgaagtaccacctgctgctgcaggagctgggcaagcactgggccgagggccccggcaccggcggcagagagatggtggaggaggccatcgtgagcatgaccgccgtggcctggtacatcaacgacatgaagagaaagcaggagcacgccgccagactgcaggaggtgcagagaagactgggcggctggaccggccccgagctgagcgccttcggcgagctggtgctggagggcgccttcagaggcggcggcggcggcggccccagactgagaggcggcgagagactgctgttcctgttcagcagaatgctgctggtggccaagagaagaggcctggagtacacctacaagggccacatcttctgctgcaacctgagcgtgagcgagagccccagagaccccctgggcttcaaggtgagcgacctgaccatccccaagcacagacacctgctgcaggccaagaaccaggaggagaagagactgtggatccactgcctgcagagactgttcttcgagaaccaccccgccagcatccccgccaaggccaagcaggtgctgctggagaacagcctgcactgcgcccccaagagcaagcccgtgctggagcccctgaccccccccctgggcagccccagacccagagacgccagaagcttcacccccggcagaagaaacaccgcccccagccccggccccagcgtgatcagaagaggcagaagacagagcgagcccgtgaaggacccctacgtgatgttcccccagaacgccaagcccggcttcaagcacgccggcagcgagggcgagctgtacccccccgagagccagccccccgtgagcggcagcgccccccccgaggacctggaggacgccggcccccccaccctggaccccagcggcaccagcatcaccgaggagatcctggagctgctgaaccagagaggcctgagagaccccggccccagcacccacgacatccccaagttccccggcgacagccaggtgcccggcgacagcgagaccctgaccttccaggccctgcccagcagagacagcagcgaggaggaggaggaggaggaggagggcctggagatggacgagagaggccccagccccctgcacgtgctggagggcctggagagcagcatcgccgccgagatgcccagcatcccctgcctgaccaagatccccgacgtgcccaacctgcccgagatccccagcagatgcgagatccccgagggcagcagactgcccagcctgagcgacatcagcgacgtgttcgagatgccctgcctgcccgccatccccagcgtgcccaacacccccagcctgagcagcacccccaccctgagctgcgacagctggctgcagggccccctgcaggagcccgccgaggcccccgccaccagaagagagctgttcagcggcagcaaccccggcaagctgggcgagccccccagcggcggcaaggccggccccgaggaggacgaggagggcgtgagcttcaccgacttccagccccaggacgtgacccagcaccagggcttccccgacgagctggccttcagaagctgcagcgagatcagaagcgcctggcaggccctggagcagggccagctggccagacccggcttccccgagcccctgctgatcctggaggacagcgacctgggcggcgacagcggcagcggcaaggccggcgcccccagcagcgagagaaccgccagcagagtgagagagctggccagactgtacagcgagagaatccagcagatgcagagagccgagaccagagccagcgccaacgcccccagaagaagacccagagtgctggcccagccccagcccagcccctgcctgccccaggagcaggccgagcccggcctgctgcccgccttcggccacgtgctggtgtgcgagctggccttccccctgacctgcgcccaggagagcgtgcccctgggccccgccgtgtgggtgcaggccgccatccccctgagcaagcagggcggcagccccgacggccagggcctgcacgtgagcaacctgcccaagcaggacctgcccggcatccacgtgagcgccgccaccctgctgcccgagcagggcggcagcagacacgtgcaggcccccgccgccacccccctgcccaagcaggagggccccctgcacctgcaggtgcccgccctgaccaccttcagcgaccagggccaccccgagatccaggtgcccgccaccacccccctgcccgagcacagaagccacatggtgatccccgcccccagcaccgccttctgccccgagcagggccactgcgccgacatccacgtgcccaccacccccgccctgcccaaggagatctgcagcgacttcaccgtgagcgtgaccacccccgtgcccaagcaggagggccacctggacagcgagagccccaccaacatccccctgaccaagcagggcggcagcagagacgtgcagggccccgaccccgtgtgcagccagcccatccagcccctgagctggcacggcagcagcctggacccccagggccccggcgacaccctgccccccctgccctgccacctgcccgacctgcagatccccggcaccagccccctgcccgcccacggcagccacctggaccacagaatccccgccaacgcccccctgagcctgagccaggagctgcccgacacccaggtgcccgccaccacccccctgcccctgccccaggtgctgaccgacatctgggtgcaggccctgcccaccagccccaagcagggcagcctgcccgacatccagggccccgccgccgccccccccctgcccgagcccagcctgaccgacacccaggtgcagaagctgacccccagcctggagcagaagagcctgatcgacgcccacgtgcccgccgccacccccctgcccgagagaggcggcagcctggacatccagggcctgagccccacccccgtgcagaccaccatggtgctgagcaagcccggcggcagcctggccagccacgtggccagactggagagcagcgacctgacccccccccacagccccccccccagcagcagacagctgctgggccccaacgccgccgccctgagcagatacctggccgccagctacatcagccagagcctggccagaagacagggccccggcggcggcgcccccgccgccagcagaggcagctggagcagcgcccccaccagcagagccagcagcccccccccccagccccagcccccccccccccccgccagaagactgagctacgccaccaccgtgaacatccacgtgggcggcggcggcagactgagacccgccaaggcccaggtgagactgaaccaccccgccctgctggccagcacccaggagagcatgggcctgcacagagcccagggcgcccccgacgcccccttccacatgtag

SEQ ID NO: 12213 - DNA, 1734 bp, synthetic construct; identical to SEQ ID NO: 12211
  misc_feature 1..1734: note = Description of Artificial Sequence: Synthetic coding sequence
  source 1..1734: mol_type = other DNA

SEQ ID NO: 12214 - DNA, 4074 bp, synthetic construct
  misc_feature 1..4074: note = Description of Artificial Sequence: Synthetic coding sequence
  source 1..4074: mol_type = other DNA
atgcccgagggcgcccagggcctgagcctgagcaagcccagccccagcctgggctgcggcagaagaggcgaggtgtgcgactgcggcaccgtgtgcgagaccagaaccgcccccgccgcccccaccatggccagccccagaggcagcggcagcagcaccagcctgagcaccgtgggcagcgagggcgaccccgcccccggccccacccccgcctgcagcgccagcagacccgagcccctgcccggcccccccatcagactgcacctgagccccgtgggcatccccggcagcgccagacccagcagactggagagagtggccagagagatcgtggagaccgagagagcctacgtgagagacctgagaagcatcgtggaggactacctgggccccctgctggacggcggcgtgctgggcctgagcgtggagcaggtgggcaccctgttcgccaacatcgaggacatctacgagttcagcagcgagctgctggaggacctggagaacagcagcagcgccggcggcatcgccgagtgcttcgtgcagagaagcgaggacttcgacatctacaccctgtactgcatgaactaccccagcagcctggccctgctgagagagctgagcctgagcccccccgccgccctgtggctgcaggagagacaggcccagctgagacacagcctgcccctgcagagcttcctgctgaagcccgtgcagagaatcctgaagtaccacctgctgctgcaggagctgggcaagcactgggccgagggccccggcaccggcggcagagagatggtggaggaggccatcgtgagcatgaccgccgtggcctggtacatcaacgacatgaagagaaagcaggagcacgccgccagactgcaggaggtgcagagaagactgggcggctggaccggccccgagctgagcgccttcggcgagctggtgctggagggcgccttcagaggcggcggcggcggcggccccagactgagaggcggcgagagactgctgttcctgttcagcagaatgctgctggtggccaagagaagaggcctggagtacacctacaagggccacatcttctgctgcaacctgagcgtgagcgagagccccagagaccccctgggcttcaaggtgagcgacctgaccatccccaagcacagacacctgctgcaggccaagaaccaggaggagaagagactgtggatccactgcctgcagagactgttcttcgagaaccaccccgccagcatccccgccaaggccaagcaggtgctgctggagaacagcctgcactgcgcccccaagagcaagcccgtgctggagcccctgaccccccccctgggcagccccagacccagagacgccagaagcttcacccccggcagaagaaacaccgccaagcccggcttcaagcacgccggcagcgagggcgagctgtacccccccgagagccagccccccgtgagcggcagcgccccccccgaggacctggaggacgccggcccccccaccctggaccccagcggcaccagcatcaccgaggagatcctggagctgctgaaccagagaggcctgagagaccccggccccagcacccacgacatccccaagttccccggcgacagccaggtgcccggcgacagcgagaccctgaccttccaggccctgcccagcagagacagcagcgaggaggaggaggaggaggaggagggcctggagatggacgagagaggccccagccccctgcacgtgctggagggcctggagagcagcatcgccgccgagatgcccagcatcccctgcctgaccaagatccccgacgtgcccaacctgcccgagatccccagcagatgcgagatccccgagggcagcagactgcccagcctgagcgacatcagcgacgtgttcgagatgccctgcctgcccgccatccccagcgtgcccaacacccccagcctgagcagcacccccaccctgagctgcgacagctggctgcagggccccctgcaggagcccgccgaggcccccgccaccagaagagagctgttcagcggcagcaaccccggcaagctgggcgagccccccagcggcggcaaggccggccccgaggaggacgaggagggcgtgagcttcaccgacttccagccccaggacgtgacccagcaccagggcttccccgacgagctggccttcagaagctgcagcgagatcagaagcgcctggcaggccctggagcagggccagctggccagacccggcttccccgagcccctgctgatcctggaggacagcgacctgggcggcgacagcggcagcggcaaggccggcgcccccagcagcgagagaaccgccagcagagtgagagagctggccagactgtacagcgagagaatccagcagatgcagagagccgagaccagagccagcgccaacgcccccagaagaagacccagagtgctggcccagccccagcccagcccctgcctgccccaggagcaggccgagcccggcctgctgcccgccttcggccacgtgctggtgtgcgagctggccttccccctgacctgcgcccaggagagcgtgcccctgggccccgccgtgtgggtgcaggccgccatccccctgagcaagcagggcggcagccccgacggccagggcctgcacgtgagcaacctgcccaagcaggacctgcccggcatccacgtgagcgccgccaccctgctgcccgagcagggcggcagcagacacgtgcaggcccccgccgccacccccctgcccaagcaggagggccccctgcacctgcaggtgcccgccctgaccaccttcagcgaccagggccaccccgagatccaggtgcccgccaccacccccctgcccgagcacagaagccacatggtgatccccgcccccagcaccgccttctgccccgagcagggccactgcgccgacatccacgtgcccaccacccccgccctgcccaaggagatctgcagcgacttcaccgtgagcgtgaccacccccgtgcccaagcaggagggccacctggacagcgagagccccaccaacatccccctgaccaagcagggcggcagcagagacgtgcagggccccgaccccgtgtgcagccagcccatccagcccctgagctggcacggcagcagcctggacccccagggccccggcgacaccctgccccccctgccctgccacctgcccgacctgcagatccccggcaccagccccctgcccgcccacggcagccacctggaccacagaatccccgccaacgcccccctgagcctgagccaggagctgcccgacacccaggtgcccgccaccacccccctgcccctgccccaggtgctgaccgacatctgggtgcaggccctgcccaccagccccaagcagggcagcctgcccgacatccagggccccgccgccgccccccccctgcccgagcccagcctgaccgacacccaggtgcagaagctgacccccagcctggagcagaagagcctgatcgacgcccacgtgcccgccgccacccccctgcccgagagaggcggcagcctggacatccagggcctgagccccacccccgtgcagaccaccatggtgctgagcaagcccggcggcagcctggccagccacgtggccagactggagagcagcgacctgacccccccccacagccccccccccagcagcagacagctgctgggccccaacgccgccgccctgagcagatacctggccgccagctacatcagccagagcctggccagaagacagggccccggcggcggcgcccccgccgccagcagaggcagctggagcagcgcccccaccagcagagccagcagcccccccccccagccccagcccccccccccccccgccagaagactgagctacgccaccaccgtgaacatccacgtgggcggcggcggcagactgagacccgccaaggcccaggtgagactgaaccaccccgccctgctggccagcacccaggagagcatgggcctgcacagagcccagggcgcccccgacgcccccttccacatgtag

SEQ ID NO: 12215 - DNA, 597 bp, synthetic construct
  misc_feature 1..597: note = Description of Artificial Sequence: Synthetic coding sequence
  source 1..597: mol_type = other DNA
atgcccgagggcgcccagggcctgagcctgagcaagcccagccccagcctgggctgcggcagaagaggcgaggtgtgcgactgcggcaccgtgtgcgagaccagaaccgccgcccccgccgcccccaccatggccagccccagaggcagcggcagcagcaccagcctgagcaccgtgggcagcgagggcgaccccgcccccggccccacccccgcctgcagcgccagcagacccgagcccctgcccggcccccccatcagactgcacctgagccccgtgggcatccccggcagcgccagacccagcagactggagagagtggccagagagatcgtggagaccgagagagcctacgtgagagacctgagaagcatcgtggaggactacctgggccccctgctggacggcggcgtgctgggcctgagcgtggagcaggtgggcaccctgttcgccaacatcgaggacatctacgagttcagcagcgagctgctggaggacctggagaacagcagcagcgccggcggcatcgccgagtgcttcgtgcagagaagcgaggacttcgacatctacaccctgtactgcatgaactacccctag

SEQ ID NO: 12216 - DNA, 3714 bp, synthetic construct
  misc_feature 1..3714: note = Description of Artificial Sequence: Synthetic coding sequence
  source 1..3714: mol_type = other DNA
atgcccgagggcgcccagggcctgagcctgagcaagcccagccccagcctgggctgcggcagaagaggcgaggtgtgcgactgcggcaccgtgtgcgagaccagaaccggcagcgccagacccagcagactggagagagtggccagagagatcgtggagaccgagagagcctacgtgagagacctgagaagcatcgtggaggactacctgggccccctgctggacggcggcgtgctgggcctgagcgtggagcaggtgggcaccctgttcgccaacatcgaggacatctacgagttcagcagcgagctgctggaggacctggagaacagcagcagcgccggcggcatcgccgagtgcttcgtgcagagaagcgaggacttcgacatctacaccctgtactgcatgaactaccccagcagcctggccctgctgagagagctgagcctgagcccccccgccgccctgtggctgcaggagagacaggcccagctgagacacagcctgcccctgcagagcttcctgctgaagcccgtgcagagaatcctgaagtaccacctgctgctgcaggagctgggcaagcactgggccgagggccccggcaccggcggcagagagatggtggaggaggccatcgtgagcatgaccgccgtggcctggtacatcaacgacatgaagagaaagcaggagcacgccgccagactgcaggaggtgcagagaagactgggcggctggaccggccccgagctgagcgccttcggcgagctggtgctggagggcgccttcagaggcggcggcggcggcggccccagactgagaggcggcgagagactgctgttcctgttcagcagaatgctgctggtggccaagagaagaggcctggagtacacctacaagggccacatcttctgctgcaacctgagcgtgagcgagagccccagagaccccctgggcttcaaggtgagcgacctgaccatccccaagcacagacacctgctgcaggccaagaaccaggaggagaagagactgtggatccactgcctgcagagactgttcttcgagaaccaccccgccagcatccccgccaaggccaagcaggtgctgctggagaacagcctgcactgcgcccccaagagcaagcccgtgctggagcccctgaccccccccctgggcagccccagacccagagacgccagaagcttcacccccggcagaagaaacaccgcccccagccccggccccagcgtgatcagaagaggcagaagacagagcgagcccgtgaaggacccctacgtgatgttcccccagaacgccaagcccggcttcaagcacgccggcagcgagggcgagctgtacccccccgagagccagccccccgtgagcggcagcgccccccccgaggacctggaggacgccggcccccccaccctggaccccagcggcaccagcatcaccgaggagatcctggagctgctgaaccagagaggcctgagagaccccggccccagcacccacgacatccccaagttccccggcgacagccaggtgcccggcgacagcgagaccctgaccttccaggccctgcccagcagagacagcagcgaggaggaggaggaggaggaggagggcctggagatggacgagagaggccccagccccctgcacgtgctggagggcctggagagcagcatcgccgccgagatgcccagcatcccctgcctgaccaagatccccgacgtgcccaacctgcccgagatccccagcagatgcgagatccccgagggcagcagactgcccagcctgagcgacatcagcgacgtgttcgagatgccctgcctgcccgccatccccagcgtgcccaacacccccagcctgagcagcacccccaccctgagctgcgacagctggctgcagggccccctgcaggagcccgccgaggcccccgccaccagaagagagctgttcagcggcagcaaccccggcaagctgggcgagccccccagcggcggcaaggccggccccgaggaggacgaggagggcgtgagcttcaccgacttccagccccaggacgtgacccagcaccagggcttccccgacgagctggccttcagaagctgcagcgagatcagaagcgcctggcaggccctggagcagggccagctggccagacccggcttccccgagcccctgctgatcctggaggacagcgacctgggcggcgacagcggcagcggcaaggccggcgcccccagcagcgagagaaccgccagcagagtgagagagctggccagactgtacagcgagagaatccagcagatgcagagagccgagaccagagccagcgccaacgcccccagaagaagacccagagtgctggcccagccccagcccagcccctgcctgccccaggagcaggccgagcccggcctgctgcccgccttcggccacgtgctggtgtgcgagctggccttccccctgacctgcgcccaggagagcgtgcccctgggccccgccgtgtgggtgcaggccgccatccccctgagcaagcagggcggcagccccgacggccagggcctgcacgtgagcaacctgcccaagcaggacctgcccggcatccacgtgagcgccgccaccctgctgcccgagcagggcggcagcagacacgtgcaggcccccgccgccacccccctgcccaagcaggagggccccctgcacctgcaggtgcccgccctgaccaccttcagcgaccagggccaccccgagatccaggtgcccgccaccacccccctgcccgagcacagaagccacatggtgatccccgcccccagcaccgccttctgccccgagcagggccactgcgccgacatccacgtgcccaccacccccgccctgcccaaggagatctgcagcgacttcaccgtgagcgtgaccacccccgtgcccaagcaggagggccacctggacagcgagagccccaccaacatccccctgaccaagcagggcggcagcagagacgtgcagggccccgaccccgtgtgcagccagcccatccagcccctgagctggcacggcagcagcctggacccccagggccccggcgacaccctgccccccctgccctgccacctgcccgacctgcagatccccggcaccagccccctgcccgcccacggcagccacctggaccacagaatccccgccaacgcccccctgagcctgagccaggagctgcccgacacccaggtgcccgccaccacccccctgcccctgccccaggtgctgaccgacatctgggtgcaggccctgcccaccagccccaagcagggcagcctgcccgacatccagggccccgccgccgccccccccctgcccgagcccagcctgaccgacacccaggtgcagaagctgacccccagcctggagcagaagagcctgatcgacgcccacgtgcccgccgccacccccctgcccgagagaggcggcagcctggacatccagggcctgagccccacccccgtgcagaccaccatggtgctgagcaagcccggcggcagcctggccagccacgtggccagaaacctgtgggccttcaccggccccagaggcctgctgatgccccccagcacctgcgagcccggccacgaggccagcctgaagcagggcttccagcccgacgccatcgacccccagaacctgacctggaagagcagacactag

SEQ ID NO: 12217 - DNA, 1128 bp, synthetic construct
  misc_feature 1..1128: note = Description of Artificial Sequence: Synthetic coding sequence
  source 1..1128: mol_type = other DNA
atgatgaagaagaacaacagcgccaagagaggcccccaggacggcaaccagcagcccgccccccccgagaaggtgggctgggtgagaaagttctgcggcaagggcatcttcagagagatctggaagaacagatacgtggtgctgaagggcgaccagctgtacatcagcgagaaggaggtgaaggacgagaagaacatccaggaggtgttcgacctgagcgactacgagaagtgcgaggagctgagaaagagcaagagcagaagcaagaagaaccacagcaagttcaccctggcccacagcaagcagcccggcaacaccgcccccaacctgatcttcctggccgtgagccccgaggagaaggagagctggatcaacgccctgaacagcgccatcaccagagccaagaacagaatcctggacgaggccagcaccagcaccagcgacggcatgctgaccctggacctgatccaggaggaggaccccagccccgaggagcccaccagctgcgccgagagcttcagagtggacctggacaagagcgtggcccagctggccggcagcagaagaagagccgacagcgacagaatccagcccagcgccgacagagccagcagcctgagcagaccctgggagaagaccgacaagggcgccacctacaccccccaggcccccaagaagctgacccccaccgagaagggcagatgcgccagcctggaggagatcctgagccagagagacgccgccagcgccagaaccctgcagctgagagccgaggagccccccacccccgccctgcccaaccccggccagctgagcagaatccaggacctggtggccagaaagctggaggagacccaggagctgctggccgaggtgcagggcctgggcgacggcaagagaaaggccaaggacccccccagaagcccccccgacagcgagagcgagcagctgctgctggagaccgagagactgctgggcgaggccagcagcaactggagccaggccaagagagtgctgcaggaggtgagagagctgagagacctgtacagacagatggacctgcagacccccgacagccacctgagacagaccaccccccacagccagtacagaaagagcctgatgtag

SEQ ID NO: 12218 - DNA, 1230 bp, synthetic construct
  misc_feature 1..1230: note = Description of Artificial Sequence: Synthetic coding sequence
  source 1..1230: mol_type = other DNA
atgatgaagaagaacaacagcgccaagagaggcccccaggacggcaaccagcagcccgccccccccgagaaggtgggctgggtgagaaagttctgcggcaagggcatcttcagagagatctggaagaacagatacgtggtgctgaagggcgaccagctgtacatcagcgagaaggaggtgaaggacgagaagaacatccaggaggtgttcgacctgagcgactacgagaagtgcgaggagctgagaaagagcaagagcagaagcaagaagaaccacagcaagttcaccctggcccacagcaagcagcccggcaacaccgcccccaacctgatcttcctggccgtgagccccgaggagaaggagagctggatcaacgccctgaacagcgccatcaccagagccaagaacagaatcctggacgaggtgaccgtggaggaggacagctacctggcccaccccaccagagacagagccaagatccagcacagcagaagaccccccaccagaggccacctgatggccgtggccagcaccagcaccagcgacggcatgctgaccctggacctgatccaggaggaggaccccagccccgaggagcccaccagctgcgccgagagcttcagagtggacctggacaagagcgtggcccagctggccggcagcagaagaagagccgacagcgacagaatccagcccagcgccgacagagccagcagcctgagcagaccctgggagaagaccgacaagggcgccacctacaccccccaggcccccaagaagctgacccccaccgagaagggcagatgcgccagcctggaggagatcctgagccagagagacgccgccagcgccagaaccctgcagctgagagccgaggagccccccacccccgccctgcccaaccccggccagctgagcagaatccaggacctggtggccagaaagctggaggagacccaggagctgctggccgaggtgcagggcctgggcgacggcaagagaaaggccaaggacccccccagaagcccccccgacagcgagagcgagcagctgctgctggagaccgagagactgctgggcgaggccagcagcaactggagccaggccaagagagtgctgcaggaggtgagagagctgagagacctgtacagacagatggacctgcagacccccgacagccacctgagacagaccaccccccacagccagtacagaaagagcctgatgtag

SEQ ID NO: 12219 - DNA, 681 bp, synthetic construct
  misc_feature 1..681: note = Description of Artificial Sequence: Synthetic coding sequence
  source 1..681: mol_type = other DNA
atgctgaccctggacctgatccaggaggaggaccccagccccgaggagcccaccagctgcgccgagagcttcagagtggacctggacaagagcgtggcccagctggccggcagcagaagaagagccgacagcgacagaatccagcccagcgccgacagagccagcagcctgagcagaccctgggagaagaccgacaagggcgccacctacaccccccaggcccccaagaagctgacccccaccgagaagggcagatgcgccagcctggaggagatcctgagccagagagacgccgccagcgccagaaccctgcagctgagagccgaggagccccccacccccgccctgcccaaccccggccagctgagcagaatccaggacctggtggccagaaagctggaggagacccaggagctgctggccgaggtgcagggcctgggcgacggcaagagaaaggccaaggacccccccagaagcccccccgacagcgagagcgagcagctgctgctggagaccgagagactgctgggcgaggccagcagcaactggagccaggccaagagagtgctgcaggaggtgagagagctgagagacctgtacagacagatggacctgcagacccccgacagccacctgagacagaccaccccccacagccagtacagaaagagcctgatgtag

SEQ ID NO: 12220 - DNA, 675 bp, synthetic construct
  misc_feature 1..675: note = Description of Artificial Sequence: Synthetic coding sequence
  source 1..675: mol_type = other DNA
atgcccagcaccctgcccagccccgagcccagaaccgtgagctggatgagcaccagcctgcaggtgaccgtggaggaggacagctacctggcccaccccaccagagacagagccaagatccagcacagcagaagaccccccaccagaggccacctgatggccgtggccagcaccagcaccagcgacggcatgctgaccctggacctgatccaggaggaggaccccagccccgaggagcccaccagctgcgccgagagcttcagagtggacctggacaagagcgtggcccagctggccggcagcagaagaagagccgacagcgacagaatccagcccagcgccgacagagccagcagcctgagcagaccctgggagaagaccgacaagggcgccacctacaccccccaggcccccaagaagctgacccccaccgagaagggcagatgcgccagcctggaggagatcctgagccagagagacgccgccagcgccagaaccctgcagctgagagccgaggagccccccacccccgccctgcccaaccccggccagctgagcagaatccaggacctggtggccagaaagctggaggagacccaggagctgctggccgaggtgcagggcctgggcgacggcaagagaaaggccaaggacccccccagaagccccccctag

SEQ ID NO: 12221 - DNA, 384 bp, synthetic construct
  misc_feature 1..384: note = Description of Artificial Sequence: Synthetic coding sequence
  source 1..384: mol_type = other DNA
atgaccgccgccgccaccgccaccgtgctgaaggagggcgtgctggagaagagaagcggcggcctgctgcagctgtggaagagaaagagatgcgtgctgaccgagagaggcctgcagctgttcgaggccaagggcaccggcggcagacccaaggagctgagcttcgccagaatcaaggccgtggagtgcgtggagagcaccggcagacacatctacttcaccctggtgaccgagggcggcggcgagatcgacttcagatgccccctggaggaccccggctggaacgcccagatcaccctgggcctggtgaagttcaagaaccagcaggccatccagaccgtgagagccagacagagcctgggcaccggcaccctggtgagctag

SEQ ID NO: 12222 - DNA, 384 bp, synthetic construct; identical to SEQ ID NO: 12221
  misc_feature 1..384: note = Description of Artificial Sequence: Synthetic coding sequence
  source 1..384: mol_type = other DNA

SEQ ID NO: 12223 - DNA, 1710 bp, synthetic construct
  misc_feature 1..1710: note = Description of Artificial Sequence: Synthetic coding sequence
  source 1..1710: mol_type = other DNA
atgagcttcggcatcctgaagcccgacctgagaatcgtgttcgtgcacaacaaggccgtgatctggcagaagagcagagtgagcgaccacaagatggccctgatgagcgtgctgggcaccgccgtgatgaacaacatggagagcttccagtaccacagcgaggagagccagatctacctgagcggcttcctgcccaagtgcgacgccgaccacagcttcaccagcctgagcacccccgagagaagcttcatcttcatcaacagcagacccgtgcaccagaaggacatcctgaagctgatcagacaccactacaacctgaagtgcctgaaggagagcaccagactgtaccccgtgttcttcctgaagatcgacgtgcccaccgccgacgtggacgtgaacctgacccccgacaagagccaggtgctgctgcagaacaaggagagcgtgctgatcgccctggagaacctgatgaccacctgctacggccccctgcccagcaccaacagctacgagaacaacaagaccgacgtgagcgccgccgacatcgtgctgagcaagaccgccgagaccgacgtgctgttcaacaaggtggagagcagcggcaagaactacagcaacgtggacaccagcgtgatccccttccagaacgacatgcacaacgacgagagcggcaagaacaccgacgactgcctgaaccaccagatcagcatcggcgacttcggctacggccactgcagcagcgagatcagcaacatcgacaagaacaccaagaacgccttccaggacatcagcatgagcaacgtgagctgggagaacagccagaccgagtacagcaagacctgcttcatcagcagcgtgaagcacacccagagcgagaacggcaacaaggaccacatcgacgagagcggcgagaacgaggaggaggccggcctggagaacagcagcgagatcagcgccgacgagtggagcagaggcaacatcctgaagaacagcgtgggcgagaacatcgagcccgtgaagatcctggtgcccgagaagagcctgccctgcaaggtgagcaacaacaactaccccatccccgagcagatgaacctgaacgaggacagctgcaacaagaagagcaacgtgatcgacaacaagagcggcaaggtgaccgcctacgacctgctgagcaacagagtgatcaagaagcccatgagcgccagcgccctgttcgtgcaggaccacagaccccagttcctgatcgagaaccccaagaccagcctggaggacgccaccctgcagatcgaggagctgtggaagaccctgagcgaggaggagaagctgaagtacgaggagaaggccaccaaggacctggagagatacaacagccagatgaagagagccatcgagcaggagagccagatgagcctgaaggacggcagaaagaagatcaagcccaccagcgcctggaacctggcccagaagcacaagctgaagaccagcctgagcaaccagcccaagctggacgagctgctgcagagccagatcgagaagagaagaagccagaacatcaagatggtgcagatccccttcagcatgaagaacctgaagatcaacttcaagaagcagaacaaggtggacctggaggagaaggacgagccctgcctgatccacaacctgagattccccgacgcctggctgatgaccagcaagaccgagagcttctag

SEQ ID NO: 12224 - DNA, 2271 bp, synthetic construct
  misc_feature 1..2271: note = Description of Artificial Sequence: Synthetic coding sequence
  source 1..2271: mol_type = other DNA
atgagcttcggcatcctgaagcccgacctgagaatcgtgttcgtgcacaacaaggccgtgatctggcagaagagcagagtgagcgaccacaagatggccctgatgagcgtgctgggcaccgccgtgatgaacaacatggagagcttccagtaccacagcgaggagagccagatctacctgagcggcttcctgcccaagtgcgacgccgaccacagcttcaccagcctgagcacccccgagagaagcttcatcttcatcaacagcagacccgtgcaccagaaggacatcctgaagctgatcagacaccactacaacctgaagtgcctgaaggagagcaccagactgtaccccgtgttcttcctgaagatcgacgtgcccaccgccgacgtggacgtgaacctgacccccgacaagagccaggtgctgctgcagaacaaggagagcgtgctgatcgccctggagaacctgatgaccacctgctacggccccctgcccagcaccaacagctacgagaacaacaagaccgacgtgagcgccgccgacatcgtgctgagcaagaccgccgagaccgacgtgctgttcaacaaggtggagagcagcggcaagaactacagcaacgtggacaccagcgtgatccccttccagaacgacatgcacaacgacgagagcggcaagaacaccgacgactgcctgaaccaccagatcagcatcggcgacttcggctacggccactgcagcagcgagatcagcaacatcgacaagaacaccaagaacgccttccaggacatcagcatgagcaacgtgagctgggagaacagccagaccgagtacagcaagacctgcttcatcagcagcgtgaagcacacccagagcgagaacggcaacaaggaccacatcgacgagagcggcgagaacgaggaggaggccggcctggagaacagcagcgagatcagcgccgacgagtggagcagaggcaacatcctgaagaacagcgtgggcgagaacatcgagcccgtgaagatcctggtgcccgagaagagcctgccctgcaaggtgagcaacaacaactaccccatccccgagcagatgaacctgaacgaggacagctgcaacaagaagagcaacgtgatcgacaacaagagcggcaaggtgaccgcctacgacctgctgagcaacagagtgatcaagaagcccatgagcgccagcgccctgttcgtgcaggaccacagaccccagttcctgatcgagaaccccaagaccagcctggaggacgccaccctgcagatcgaggagctgtggaagaccctgagcgaggaggagaagctgaagtacgaggagaaggccaccaaggacctggagagatacaacagccagatgaagagagccatcgagcaggagagccagatgagcctgaaggacggcagaaagaagatcaagcccaccagcgcctggaacctggcccagaagcacaagctgaagaccagcctgagcaaccagcccaagctggacgagctgctgcagagccagatcgagaagagaagaagccagaacatcaagatggtgcagatccccttcagcatgaagaacctgaagatcaacttcaagaagcagaacaaggtggacctggaggagaaggacgagccctgcctgatccacaacctgagattccccgacgcctggctgatgaccagcaagaccgaggtgatgctgctgaacccctacagagtggaggaggccctgctgttcaagagactgctggagaaccacaagctgcccgccgagcccctggagaagcccatcatgctgaccgagagcctgttcaacggcagccactacctggacgtgctgtacaagatgaccgccgacgaccagagatacagcggcagcacctacctgagcgaccccagactgaccgccaacggcttcaagatcaagctgatccccggcgtgagcatcaccgagaactacctggagatcgagggcatggccaactgcctgcccttctacggcgtggccgacctgaaggagatcctgaacgccatcctgaacagaaacgccaaggaggtgtacgagtgcagacccagaaaggtgatcagctacctggagggcgaggccgtgagactgagcagacagctgcccatgtacctgagcaaggaggacatccaggacatcatctacagaatgaagcaccagttcggcaacgagatcaaggagtgcgtgcacggcagacccttcttccaccacctgacctacctgcccgagaccacctag

SEQ ID NO: 12225 - DNA, 222 bp, synthetic construct
  misc_feature 1..222: note = Description of Artificial Sequence: Synthetic coding sequence
  source 1..222: mol_type = other DNA
atgaagcagctgcccgccgccaccgtgagactgctgagcagcagccagatcatcaccagcgtggtgagcgtggtgaaggagctgatcgagaacagcctggacgccggcgccaccagcgtggacgtgaagctggagaactacggcttcgacaagatcgaggtgagagacaacggcgagggcatcaaggccgtggacgcccccgtgatggccatgaagtactag

SEQ ID NO: 12226 - DNA, 585 bp, synthetic construct
  misc_feature 1..585: note = Description of Artificial Sequence: Synthetic coding sequence
  source 1..585: mol_type = other DNA
atgaagcagctgcccgccgccaccgtgagactgctgagcagcagccagatcatcaccagcgtggtgagcgtggtgaaggagctgatcgagaacagcctggacgccggcgccaccagcgtggacgtgaagctggagaactacggcttcgacaagatcgaggtgagagacaacggcgagggcatcaaggccgtggacgcccccgtgatggccatgaagtactacaccagcaagatcaacagccacgaggacctggagaacctgaccacctacggcttcagaggcgaggccctgggcagcatctgctgcatcgccgaggtgctgatcaccaccagaaccgccgccgacaacttcagcacccagtacgtgctggacggcagcggccacatcctgagccagaagcccagccacctgggccagggcaccaccgtgaccgccctgagactgttcaagaacctgcccgtgagaaagcagttctacagcaccgccaagaagtgcaaggacgagatcaagaagatccaggacctgctgatgagcttcggcatcctgaagcccgacctgagaatcgtgttcgtgcacaacaagtag

SEQ ID NO: 12227 - DNA, 2271 bp, synthetic construct; identical to SEQ ID NO: 12224
  misc_feature 1..2271: note = Description of Artificial Sequence: Synthetic coding sequence
  source 1..2271: mol_type = other DNA

SEQ ID NO: 12228 - DNA, 2799 bp, synthetic construct
  misc_feature 1..2799: note = Description of Artificial Sequence: Synthetic coding sequence
  source 1..2799: mol_type = other DNA
atgaagcagctgcccgccgccaccgtgagactgctgagcagcagccagatcatcaccagcgtggtgagcgtggtgaaggagctgatcgagaacagcctggacgccggcgccaccagcgtggacgtgaagctggagaactacggcttcgacaagatcgaggtgagagacaacggcgagggcatcaaggccgtggacgcccccgtgatggccatgaagtactacaccagcaagatcaacagccacgaggacctggagaacctgaccacctacggcttcagaggcgaggccctgggcagcatctgctgcatcgccgaggtgctgatcaccaccagaaccgccgccgacaacttcagcacccagtacgtgctggacggcagcggccacatcctgagccagaagcccagccacctgggccagggcaccaccgtgaccgccctgagactgttcaagaacctgcccgtgagaaagcagttctacagcaccgccaagaagtgcaaggacgagatcaagaagatccaggacctgctgatgagcttcggcatcctgaagcccgacctgagaatcgtgttcgtgcacaacaaggccgtgatctggcagaagagcagagtgagcgaccacaagatggccctgatgagcgtgctgggcaccgccgtgatgaacaacatggagagcttccagtaccacagcgaggagagccagatctacctgagcggcttcctgcccaagtgcgacgccgaccacagcttcaccagcctgagcacccccgagagaagcttcatcttcatcaacagcagacccgtgcaccagaaggacatcctgaagctgatcagacaccactacaacctgaagtgcctgaaggagagcaccagactgtaccccgtgttcttcctgaagatcgacgtgcccaccgccgacgtggacgtgaacctgacccccgacaagagccaggtgctgctgcagaacaaggagagcgtgctgatcgccctggagaacctgatgaccacctgctacggccccctgcccagcaccaacagctacgagaacaacaagaccgacgtgagcgccgccgacatcgtgctgagcaagaccgccgagaccgacgtgctgttcaacaaggtggagagcagcggcaagaactacagcaacgtggacaccagcgtgatccccttccagaacgacatgcacaacgacgagagcggcaagaacaccgacgactgcctgaaccaccagatcagcatcggcgacttcggctacggccactgcagcagcgagatcagcaacatcgacaagaacaccaagaacgccttccaggacatcagcatgagcaacgtgagctgggagaacagccagaccgagtacagcaagacctgcttcatcagcagcgtgaagcacacccagagcgagaacggcaacaaggaccacatcgacgagagcggcgagaacgaggaggaggccggcctggagaacagcagcgagatcagcgccgacgagtggagcagaggcaacatcctgaagaacagcgtgggcgagaacatcgagcccgtgaagatcctggtgcccgagaagagcctgccctgcaaggtgagcaacaacaactaccccatccccgagcagatgaacctgaacgaggacagctgcaacaagaagagcaacgtgatcgacaacaagagcggcaaggtgaccgcctacgacctgctgagcaacagagtgatcaagaagcccatgagcgccagcgccctgttcgtgcaggaccacagaccccagttcctgatcgagaaccccaagaccagcctggaggacgccaccctgcagatcgaggagctgtggaagaccctgagcgaggaggagaagctgaagtacgaggagaaggccaccaaggacctggagagatacaacagccagatgaagagagccatcgagcaggagagccagatgagcctgaaggacggcagaaagaagatcaagcccaccagcgcctggaacctggcccagaagcacaagctgaagaccagcctgagcaaccagcccaagctggacgagctgctgcagagccagatcgagaagagaagaagccagaacatcaagatggtgcagatccccttcagcatgaagaacctgaagatcaacttcaagaagcagaacaaggtggacctggaggagaaggacgagccctgcctgatccacaacctgagattccccgacgcctggctgatgaccagcaagaccgaggtgatgctgctgaacccctacagagtggaggaggccctgctgttcaagagactgctggagaaccacaagctgcccgccgagcccctggagaagcccatcatgctgaccgagagcctgttcaacggcagccactacctggacgtgctgtacaagatgaccgccgacgaccagagatacagcggcagcacctacctgagcgaccccagactgaccgccaacggcttcaagatcaagctgatccccggcgtgagcatcaccgagaactacctggagatcgagggcatggccaactgcctgcccttctacggcgtggccgacctgaaggagatcctgaacgccatcctgaacagaaacgccaaggaggtgtacgagtgcagacccagaaaggtgatcagctacctggagggcgaggccgtgagactgagcagacagctgcccatgtacctgagcaaggaggacatccaggacatcatctacagaatgaagcaccagttcggcaacgagatcaaggagtgcgtgcacggcagacccttcttccaccacctgacctacctgcccgagaccacctag

SEQ ID NO: 12229 - DNA, 135 bp, synthetic construct
  misc_feature 1..135: note = Description of Artificial Sequence: Synthetic coding sequence
  source 1..135: mol_type = other DNA
atgaagcagctgcccgccgccaccgtgagactgctgagcagcagccagatcatcaccagcgtggtgagcgtggtgaaggagctgatcgagaacagcctggacgccggcgccaccagcgtggacgtgaagctgtag

SEQ ID NO: 12230 - DNA, 2313 bp, synthetic construct
  misc_feature 1..2313: note = Description of Artificial Sequence: Synthetic coding sequence
  source 1..2313: mol_type = other DNA
atgaagcagctgcccgccgccaccgtgagactgctgagcagcagccagatcatcaccagcgtggtgagcgtggtgaaggagctgatcgagaacagcctggacgccggcgccaccagcgtggacgtgaagctggagaactacggcttcgacaagatcgaggtgagagacaacggcgagggcatcaaggccgtggacgcccccgtgatggccatgaagtactacaccagcaagatcaacagccacgaggacctggagaacctgaccacctacggcttcagaggcgaggccctgggcagcatctgctgcatcgccgaggtgctgatcaccaccagaaccgccgccgacaacttcagcacccagtacgtgctggacggcagcggccacatcctgagccagaagcccagccacctgggccagggcaccaccgtgaccgccctgagactgttcaagaacctgcccgtgagaaagcagttctacagcaccgccaagaagtgcaaggacgagatcaagaagatccaggacctgctgatgagcttcggcatcctgaagcccgacctgagaatcgtgttcgtgcacaacaaggccgtgatctggcagaagagcagagtgagcgaccacaagatggccctgatgagcgtgctgggcaccgccgtgatgaacaacatggagagcttccagtaccacagcgaggagagccagatctacctgagcggcttcctgcccaagtgcgacgccgaccacagcttcaccagcctgagcacccccgagagaagcttcatcttcatcaacagcagacccgtgcaccagaaggacatcctgaagctgatcagacaccactacaacctgaagtgcctgaaggagagcaccagactgtaccccgtgttcttcctgaagatcgacgtgcccaccgccgacgtggacgtgaacctgacccccgacaagagccaggtgctgctgcagaacaaggagagcgtgctgatcgccctggagaacctgatgaccacctgctacggccccctgcccagcaccaacagctacgagaacaacaagaccgacgtgagcgccgccgacatcgtgctgagcaagaccgccgagaccgacgtgctgttcaacaaggtggagagcagcggcaagaactacagcaacgtggacaccagcgtgatccccttccagaacgacatgcacaacgacgagagcggcaagaacaccgacgactgcctgaaccaccagatcagcatcggcgacttcggctacggccactgcagcagcgagatcagcaacatcgacaagaacaccaagaacgccttccaggacatcagcatgagcaacgtgagctgggagaacagccagaccgagtacagcaagacctgcttcatcagcagcgtgaagcacacccagagcgagaacggcaacaaggaccacatcgacgagagcggcgagaacgaggaggaggccggcctggagaacagcagcgagatcagcgccgacgagtggagcagaggcaacatcctgaagaacagcgtgggcgagaacatcgagcccgtgaagatcctggtgcccgagaagagcctgccctgcaaggtgagcaacaacaactaccccatccccgagcagatgaacctgaacgaggacagctgcaacaagaagagcaacgtgatcgacaacaagagcggcaaggtgaccgcctacgacctgctgagcaacagagtgatcaagaagcccatgagcgccagcgccctgttcgtgcaggaccacagaccccagttcctgatcgagaaccccaagaccagcctggaggacgccaccctgcagatcgaggagctgtggaagaccctgagcgaggaggagaagctgaacctgttcaacggcagccactacctggacgtgctgtacaagatgaccgccgacgaccagagatacagcggcagcacctacctgagcgaccccagactgaccgccaacggcttcaagatcaagctgatccccggcgtgagcatcaccgagaactacctggagatcgagggcatggccaactgcctgcccttctacggcgtggccgacctgaaggagatcctgaacgccatcctgaacagaaacgccaaggaggtgtacgagtgcagacccagaaaggtgatcagctacctggagggcgaggccgtgagactgagcagacagctgcccatgtacctgagcaaggaggacatccaggacatcatctacagaatgaagcaccagttcggcaacgagatcaaggagtgcgtgcacggcagacccttcttccaccacctgacctacctgcccgagaccacctag

SEQ ID NO: 12231 - DNA, 2682 bp, synthetic construct
  misc_feature 1..2682: note = Description of Artificial Sequence: Synthetic coding sequence
  source 1..2682: mol_type = other DNA
atgaagcagctgcccgccgccaccgtgagactgctgagcagcagccagatcatcaccagcgtggtgagcgtggtgaaggagctgatcgagaacagcctggacgccggcgccaccagcgtggacgtgaagctggagaactacggcttcgacaagatcgaggtgagagacaacggcgagggcatcaaggccgtggacgcccccgtgatggccatgaagtactacaccagcaagatcaacagccacgaggacctggagaacctgaccacctacggcttcagaggcgaggccctgggcagcatctgctgcatcgccgaggtgctgatcaccaccagaaccgccgccgacaacttcagcacccagtacgtgctggacggcagcggccacatcctgagccagaagcccagccacctgggccagggcaccaccgtgaccgccctgagactgttcaagaacctgcccgtgagaaagcagttctacagcaccgccaagaagtgcaaggacgagatcaagaagatccaggacctgctgatgagcttcggcatcctgaagcccgacctgagaatcgtgttcgtgcacaacaagatctacctgagcggcttcctgcccaagtgcgacgccgaccacagcttcaccagcctgagcacccccgagagaagcttcatcttcatcaacagcagacccgtgcaccagaaggacatcctgaagctgatcagacaccactacaacctgaagtgcctgaaggagagcaccagactgtaccccgtgttcttcctgaagatcgacgtgcccaccgccgacgtggacgtgaacctgacccccgacaagagccaggtgctgctgcagaacaaggagagcgtgctgatcgccctggagaacctgatgaccacctgctacggccccctgcccagcaccaacagctacgagaacaacaagaccgacgtgagcgccgccgacatcgtgctgagcaagaccgccgagaccgacgtgctgttcaacaaggtggagagcagcggcaagaactacagcaacgtggacaccagcgtgatccccttccagaacgacatgcacaacgacgagagcggcaagaacaccgacgactgcctgaaccaccagatcagcatcggcgacttcggctacggccactgcagcagcgagatcagcaacatcgacaagaacaccaagaacgccttccaggacatcagcatgagcaacgtgagctgggagaacagccagaccgagtacagcaagacctgcttcatcagcagcgtgaagcacacccagagcgagaacggcaacaaggaccacatcgacgagagcggcgagaacgaggaggaggccggcctggagaacagcagcgagatcagcgccgacgagtggagcagaggcaacatcctgaagaacagcgtgggcgagaacatcgagcccgtgaagatcctggtgcccgagaagagcctgccctgcaaggtgagcaacaacaactaccccatccccgagcagatgaacctgaacgaggacagctgcaacaagaagagcaacgtgatcgacaacaagagcggcaaggtgaccgcctacgacctgctgagcaacagagtgatcaagaagcccatgagcgccagcgccctgttcgtgcaggaccacagaccccagttcctgatcgagaaccccaagaccagcctggaggacgccaccctgcagatcgaggagctgtggaagaccctgagcgaggaggagaagctgaagtacgaggagaaggccaccaaggacctggagagatacaacagccagatgaagagagccatcgagcaggagagccagatgagcctgaaggacggcagaaagaagatcaagcccaccagcgcctggaacctggcccagaagcacaagctgaagaccagcctgagcaaccagcccaagctggacgagctgctgcagagccagatcgagaagagaagaagccagaacatcaagatggtgcagatccccttcagcatgaagaacctgaagatcaacttcaagaagcagaacaaggtggacctggaggagaaggacgagccctgcctgatccacaacctgagattccccgacgcctggctgatgaccagcaagaccgaggtgatgctgctgaacccctacagagtggaggaggccctgctgttcaagagactgctggagaaccacaagctgcccgccgagcccctggagaagcccatcatgctgaccgagagcctgttcaacggcagccactacctggacgtgctgtacaagatgaccgccgacgaccagagatacagcggcagcacctacctgagcgaccccagactgaccgccaacggcttcaagatcaagctgatccccggcgtgagcatcaccgagaactacctggagatcgagggcatggccaactgcctgcccttctacggcgtggccgacctgaaggagatcctgaacgccatcctgaacagaaacgccaaggaggtgtacgagtgcagacccagaaaggtgatcagctacctggagggcgaggccgtgagactgagcagacagctgcccatgtacctgagcaaggaggacatccaggacatcatctacagaatgaagcaccagttcggcaacgagatcaaggagtgcgtgcacggcagacccttcttccaccacctgacctacctgcccgagaccacctag

SEQ ID NO: 12232 - DNA, 2589 bp, synthetic construct
  misc_feature 1..2589: note = Description of Artificial Sequence: Synthetic coding sequence
  source 1..2589: mol_type = other DNA
atggagagagccgagagcagcagcaccgagcccgccaaggccatcaagcccatcgacagaaagagcgtgcaccagatctgcagcggccaggtggtgctgagcctgagcaccgccgtgaaggagctggtggagaacagcctggacgccggcgccaccaacatcgacctgaagctgaaggactacggcgtggacctgatcgaggtgagcgacaacggctgcggcgtggaggaggagaacttcgagggcctgaccctgaagcaccacaccagcaagatccaggagttcgccgacctgacccaggtggagaccttcggcttcagaggcgaggccctgagcagcctgtgcgccctgagcgacgtgaccatcagcacctgccacgccagcgccaaggtgggcaccagactgatgttcgaccacaacggcaagatcatccagaagaccccctaccccagacccagaggcaccaccgtgagcgtgcagcagctgttcagcaccctgcccgtgagacacaaggagttccagagaaacatcaagaaggagtacgccaagatggtgcaggtgctgcacgcctactgcatcatcagcgccggcatcagagtgagctgcaccaaccagctgggccagggcaagagacagcccgtggtgtgcaccggcggcagccccagcatcaaggagaacatcggcagcgtgttcggccagaagcagctgcagagcctgatccccttcgtgcagctgccccccagcgacagcgtgtgcgaggagtacggcctgagctgcagcgacgccctgcacaacctgttctacatcagcggcttcatcagccagtgcacccacggcgtgggcagaagcagcaccgacagacagttcttcttcatcaacagaagaccctgcgaccccgccaaggtgtgcagactggtgaacgaggtgtaccacatgtacaacagacaccagtaccccttcgtggtgctgaacatcagcgtggacagcgagtgcgtggacatcaacgtgacccccgacaagagacagatcctgctgcaggaggagaagctgctgctggccgtgctgaagaccagcctgatcggcatgttcgacagcgacgtgaacaagctgaacgtgagccagcagcccctgctggacgtggagggcaacctgatcaagatgcacgccgccgacctggagaagcccatggtggagaagcaggaccagagccccagcctgagaaccggcgaggagaagaaggacgtgagcatcagcagactgagagaggccttcagcctgagacacaccaccgagaacaagccccacagccccaagacccccgagcccagaagaagccccctgggccagaagagaggcatgctgagcagcagcaccagcggcgccatcagcgacaagggcgtgctgagaccccagaaggaggccgtgagcagcagccacggccccagcgaccccaccgacagagccgaggtggagaaggacagcggccacggcagcaccagcgtggacagcgagggcttcagcatccccgacaccggcagccactgcagcagcgagtacgccgccagcagccccggcgacagaggcagccaggagcacgtggacagccaggagaaggcccccaagaccgacgacagcttcagcgacgtggactgccacagcaaccaggaggacaccggctgcaagttcagagtgctgccccagcccaccaacctggccacccccaacaccaagagattcaagaaggaggagatcctgagcagcagcgacatctgccagaagctggtgaacacccaggacatgagcgccagccaggtggacgtggccgtgaagatcaacaagaaggtggtgcccctggacttcagcatgagcagcctggccaagagaatcaagcagctgcaccacgaggcccagcagagcgagggcgagcagaactacagaaagttcagagccaagatctgccccggcgagaaccaggccgccgaggacgagctgagaaaggagatcagcaagaccatgttcgccgagatggagatcatcggccagttcaacctgggcttcatcatcaccaagctgaacgaggacatcttcatcgtggaccagcacgccaccgacgagaagtacaacttcgagatgctgcagcagcacaccgtgctgcagggccagagactgatcgccccccagaccctgaacctgaccgccgtgaacgaggccgtgctgatcgagaacctggagatcttcagaaagaacggcttcgacttcgtgatcgacgagaacgcccccgtgaccgagagagccaagctgatcagcctgcccaccagcaagaactggaccttcggcccccaggacgtggacgagctgatcttcatgctgagcgacagccccggcgtgatgtgcagacccagcagagtgaagcagatgttcgccagcagagcctgcagaaagagcgtgatgatcggcaccgccctgaacaccagcgagatgaagaagctgatcacccacatgggcgagatggaccacccctggaactgcccccacggcagacccaccatgagacacatcgccaacctgggcgtgatcagccagaactag

SEQ ID NO: 12233 - DNA, 1386 bp, synthetic construct
  misc_feature 1..1386: note = Description of Artificial Sequence: Synthetic coding sequence
  source 1..1386: mol_type = other DNA
atggagagagccgagagcagcagcaccgagcccgccaaggccatcaagcccatcgacagaaagagcgtgcaccagatctgcagcggccaggtggtgctgagcctgagcaccgccgtgaaggagctggtggagaacagcctggacgccggcgccaccaacatcgacctgaagctgaaggactacggcgtggacctgatcgaggtgagcgacaacggctgcggcgtggaggaggagaacttcgagggcctgaccctgaagcaccacaccagcaagatccaggagttcgccgacctgacccaggtggagaccttcggcttcagaggcgaggccctgagcagcctgtgcgccctgagcgacgtgaccatcagcacctgccacgccagcgccaaggtgggcaccagactgatgttcgaccacaacggcaagatcatccagaagaccccctaccccagacccagaggcaccaccgtgagcgtgcagcagctgttcagcaccctgcccgtgagacacaaggagttccagagaaacatcaagaaggagtacgccaagatggtgcaggtgctgcacgcctactgcatcatcagcgccggcatcagagtgagctgcaccaaccagctgggccagggcaagagacagcccgtggtgtgcaccggcggcagccccagcatcaaggagaacatcggcagcgtgttcggccagaagcagctgcagagcctgatccccttcgtgcagctgccccccagcgacagcgtgtgcgaggagtacggcctgagctgcagcgacgccctgcacaacctgttctacaagaccatgttcgccgagatggagatcatcggccagttcaacctgggcttcatcatcaccaagctgaacgaggacatcttcatcgtggaccagcacgccaccgacgagaagtacaacttcgagatgctgcagcagcacaccgtgctgcagggccagagactgatcgccccccagaccctgaacctgaccgccgtgaacgaggccgtgctgatcgagaacctggagatcttcagaaagaacggcttcgacttcgtgatcgacgagaacgcccccgtgaccgagagagccaagctgatcagcctgcccaccagcaagaactggaccttcggcccccaggacgtggacgagctgatcttcatgctgagcgacagccccggcgtgatgtgcagacccagcagagtgaagcagatgttcgccagcagagcctgcagaaagagcgtgatgatcggcaccgccctgaacaccagcgagatgaagaagctgatcacccacatgggcgagatggaccacccctggaactgcccccacggcagacccaccatgagacacatcgccaacctgggcgtgatcagccagaactag

SEQ ID NO: 12234 - DNA, 2448 bp, synthetic construct
  misc_feature 1..2448: note = Description of Artificial Sequence: Synthetic coding sequence
  source 1..2448: mol_type = other DNA
atggagagagccgagagcagcagaagcaagctgaaggactacggcgtggacctgatcgaggtgagcgacaacggctgcggcgtggaggaggagaacttcgagggcctgaccctgaagcaccacaccagcaagatccaggagttcgccgacctgacccaggtggagaccttcggcttcagaggcgaggccctgagcagcctgtgcgccctgagcgacgtgaccatcagcacctgccacgccagcgccaaggtgggcaccagactgatgttcgaccacaacggcaagatcatccagaagaccccctaccccagacccagaggcaccaccgtgagcgtgcagcagctgttcagcaccctgcccgtgagacacaaggagttccagagaaacatcaagaaggagtacgccaagatggtgcaggtgctgcacgcctactgcatcatcagcgccggcatcagagtgagctgcaccaaccagctgggccagggcaagagacagcccgtggtgtgcaccggcggcagccccagcatcaaggagaacatcggcagcgtgttcggccagaagcagctgcagagcctgatccccttcgtgcagctgccccccagcgacagcgtgtgcgaggagtacggcctgagctgcagcgacgccctgcacaacctgttctacatcagcggcttcatcagccagtgcacccacggcgtgggcagaagcagcaccgacagacagttcttcttcatcaacagaagaccctgcgaccccgccaaggtgtgcagactggtgaacgaggtgtaccacatgtacaacagacaccagtaccccttcgtggtgctgaacatcagcgtggacagcgagtgcgtggacatcaacgtgacccccgacaagagacagatcctgctgcaggaggagaagctgctgctggccgtgctgaagaccagcctgatcggcatgttcgacagcgacgtgaacaagctgaacgtgagccagcagcccctgctggacgtggagggcaacctgatcaagatgcacgccgccgacctggagaagcccatggtggagaagcaggaccagagccccagcctgagaaccggcgaggagaagaaggacgtgagcatcagcagactgagagaggccttcagcctgagacacaccaccgagaacaagccccacagccccaagacccccgagcccagaagaagccccctgggccagaagagaggcatgctgagcagcagcaccagcggcgccatcagcgacaagggcgtgctgagaccccagaaggaggccgtgagcagcagccacggccccagcgaccccaccgacagagccgaggtggagaaggacagcggccacggcagcaccagcgtggacagcgagggcttcagcatccccgacaccggcagccactgcagcagcgagtacgccgccagcagccccggcgacagaggcagccaggagcacgtggacagccaggagaaggcccccaagaccgacgacagcttcagcgacgtggactgccacagcaaccaggaggacaccggctgcaagttcagagtgctgccccagcccaccaacctggccacccccaacaccaagagattcaagaaggaggagatcctgagcagcagcgacatctgccagaagctggtgaacacccaggacatgagcgccagccaggtggacgtggccgtgaagatcaacaagaaggtggtgcccctggacttcagcatgagcagcctggccaagagaatcaagcagctgcaccacgaggcccagcagagcgagggcgagcagaactacagaaagttcagagccaagatctgccccggcgagaaccaggccgccgaggacgagctgagaaaggagatcagcaagaccatgttcgccgagatggagatcatcggccagttcaacctgggcttcatcatcaccaagctgaacgaggacatcttcatcgtggaccagcacgccaccgacgagaagtacaacttcgagatgctgcagcagcacaccgtgctgcagggccagagactgatcgccccccagaccctgaacctgaccgccgtgaacgaggccgtgctgatcgagaacctggagatcttcagaaagaacggcttcgacttcgtgatcgacgagaacgcccccgtgaccgagagagccaagctgatcagcctgcccaccagcaagaactggaccttcggcccccaggacgtggacgagctgatcttcatgctgagcgacagccccggcgtgatgtgcagacccagcagagtgaagcagatgttcgccagcagagcctgcagaaagagcgtgatgatcggcaccgccctgaacaccagcgagatgaagaagctgatcacccacatgggcgagatggaccacccctggaactgcccccacggcagacccaccatgagacacatcgccaacctgggcgtgatcagccagaactag

SEQ ID NO: 12235 - DNA, 1719 bp, synthetic construct
  misc_feature 1..1719: note = Description of Artificial Sequence: Synthetic coding sequence
  source 1..1719: mol_type = other DNA
atggagagagccgagagcagcagcaccgagcccgccaaggccatcaagcccatcgacagaaagagcgtgcaccagatctgcagcggccaggtggtgctgagcctgagcaccgccgtgaaggagctggtggagaacagcctggacgccggcgccaccaacatcgacctgaagctgaaggactacggcgtggacctgatcgaggtgagcgacaacggctgcggcgtggaggaggagaacttcgagggcctgaccctgaagcaccacaccagcaagatccaggagttcgccgacctgacccaggtggagaccttcggcttcagaggcgaggccctgagcagcctgtgcgccctgagcgacgtgaccatcagcacctgccacgccagcgccaaggtgggcaccagactgatgttcgaccacaacggcaagatcatccagaagaccccctaccccagacccagaggcaccaccgtgagcgtgcagcagctgttcagcaccctgcccgtgagacacaaggagttccagagaaacatcaagaaggagtacgccaagatggtgcaggtgctgcacgcctactgcatcatcagcgccggcatcagagtgagctgcaccaaccagctgggccagggcaagagacagcccgtggtgtgcaccggcggcagccccagcatcaaggagaacatcggcagcgtgttcggccagaagcagctgcagagcctgatccccttcgtgcagctgccccccagcgacagcgtgtgcgaggagtacggcctgagctgcagcgacgccctgcacaacctgttctacatcagcggcttcatcagccagtgcacccacggcgtgggcagaagcagcaccgacagacagttcttcttcatcaacagaagaccctgcgaccccgccaaggtgtgcagactggtgaacgaggtgtaccacatgtacaacagacaccagtaccccttcgtggtgctgaacatcagcgtggacagcgagtgcgtggacatcaacgtgacccccgacaagagacagatcctgctgcaggaggagaagctgctgctggccgtgctgaagaccagcctgatcggcatgttcgacagcgacgtgaacaagctgaacgtgagccagcagcccctgctggacgtggagggcaacctgatcaagatgcacgccgccgacctggagaagcccatggtggagaagcaggaccagagccccagcctgagaaccggcgaggagaagaaggacgtgagcatcagcagactgagagaggccttcagcctgagacacaccaccgagaacaagccccacagccccaagacccccgagcccagaagaagccccctgggccagaagagaggcatgctgagcagcagcaccagcggcgccatcagcgacaagggcgtgctgagaccccagaaggaggccgtgagcagcagccacggccccagcgaccccaccgacagagccgaggtggagaaggacagcggccacggcagcaccagcgtggacagcgagggcttcagcatccccgacaccggcagccactgcagcagcgagtacgccgccagcagccccggcgacagaggcagccaggagcacgtggacagccaggagaaggcccccaagaccgacgacagcttcagcgacgtggactgccacagcaaccaggaggacaccggcctgaagaccggccccagcgaccccagaaccagcatgaactag

SEQ ID NO: 12236 - DNA, 2271 bp, synthetic construct
  misc_feature 1..2271: note = Description of Artificial Sequence: Synthetic coding sequence
  source 1..2271: mol_type = other DNA
atgtggggcagaagaagaaagctgagaagactgaacgacgtgaccatcagcacctgccacgccagcgccaaggtgggcaccagactgatgttcgaccacaacggcaagatcatccagaagaccccctaccccagacccagaggcaccaccgtgagcgtgcagcagctgttcagcaccctgcccgtgagacacaaggagttccagagaaacatcaagaaggagtacgccaagatggtgcaggtgctgcacgcctactgcatcatcagcgccggcatcagagtgagctgcaccaaccagctgggccagggcaagagacagcccgtggtgtgcaccggcggcagccccagcatcaaggagaacatcggcagcgtgttcggccagaagcagctgcagagcctgatccccttcgtgcagctgccccccagcgacagcgtgtgcgaggagtacggcctgagctgcagcgacgccctgcacaacctgttctacatcagcggcttcatcagccagtgcacccacggcgtgggcagaagcagcaccgacagacagttcttcttcatcaacagaagaccctgcgaccccgccaaggtgtgcagactggtgaacgaggtgtaccacatgtacaacagacaccagtaccccttcgtggtgctgaacatcagcgtggacagcgagtgcgtggacatcaacgtgacccccgacaagagacagatcctgctgcaggaggagaagctgctgctggccgtgctgaagaccagcctgatcggcatgttcgacagcgacgtgaacaagctgaacgtgagccagcagcccctgctggacgtggagggcaacctgatcaagatgcacgccgccgacctggagaagcccatggtggagaagcaggaccagagccccagcctgagaaccggcgaggagaagaaggacgtgagcatcagcagactgagagaggccttcagcctgagacacaccaccgagaacaagccccacagccccaagacccccgagcccagaagaagccccctgggccagaagagaggcatgctgagcagcagcaccagcggcgccatcagcgacaagggcgtgctgagaccccagaaggaggccgtgagcagcagccacggccccagcgaccccaccgacagagccgaggtggagaaggacagcggccacggcagcaccagcgtggacagcgagggcttcagcatccccgacaccggcagccactgcagcagcgagtacgccgccagcagccccggcgacagaggcagccaggagcacgtggacagccaggagaaggcccccaagaccgacgacagcttcagcgacgtggactgccacagcaaccaggaggacaccggctgcaagttcagagtgctgccccagcccaccaacctggccacccccaacaccaagagattcaagaaggaggagatcctgagcagcagcgacatctgccagaagctggtgaacacccaggacatgagcgccagccaggtggacgtggccgtgaagatcaacaagaaggtggtgcccctggacttcagcatgagcagcctggccaagagaatcaagcagctgcaccacgaggcccagcagagcgagggcgagcagaactacagaaagttcagagccaagatctgccccggcgagaaccaggccgccgaggacgagctgagaaaggagatcagcaagaccatgttcgccgagatggagatcatcggccagttcaacctgggcttcatcatcaccaagctgaacgaggacatcttcatcgtggaccagcacgccaccgacgagaagtacaacttcgagatgctgcagcagcacaccgtgctgcagggccagagactgatcgccccccagaccctgaacctgaccgccgtgaacgaggccgtgctgatcgagaacctggagatcttcagaaagaacggcttcgacttcgtgatcgacgagaacgcccccgtgaccgagagagccaagctgatcagcctgcccaccagcaagaactggaccttcggcccccaggacgtggacgagctgatcttcatgctgagcgacagccccggcgtgatgtgcagacccagcagagtgaagcagatgttcgccagcagagcctgcagaaagagcgtgatgatcggcaccgccctgaacaccagcgagatgaagaagctgatcacccacatgggcgagatggaccacccctggaactgcccccacggcagacccaccatgagacacatcgccaacctgggcgtgatcagccagaactag

SEQ ID NO: 12237 - DNA, 1812 bp, synthetic construct
  misc_feature 1..1812: note = Description of Artificial Sequence: Synthetic coding sequence
  source 1..1812: mol_type = other DNA
atgagcgccgccgtgaccgccggcaagctggccagagcccccgccgaccccggcaaggccggcgtgcccggcgtggccgcccccggcgcccccgccgccgccccccccgccaaggagatccccgaggtgctggtggaccccagaagcagaagaagatacgtgagaggcagattcctgggcaagggcggcttcgccaagtgcttcgagatcagcgacgccgacaccaaggaggtgttcgccggcaagatcgtgcccaagagcctgctgctgaagccccaccagagagagaagatgagcatggagatcagcatccacagaagcctggcccaccagcacgtggtgggcttccacggcttcttcgaggacaacgacttcgtgttcgtggtgctggagctgtgcagaagaagaagcctgctggagctgcacaagagaagaaaggccctgaccgagcccgaggccagatactacctgagacagatcgtgctgggctgccagtacctgcacagaaacagagtgatccacagagacctgaagctgggcaacctgttcctgaacgaggacctggaggtgaagatcggcgacttcggcctggccaccaaggtggagtacgacggcgagagaaagaagaccctgtgcggcacccccaactacatcgcccccgaggtgctgagcaagaagggccacagcttcgaggtggacgtgtggagcatcggctgcatcatgtacaccctgctggtgggcaagccccccttcgagaccagctgcctgaaggagacctacctgagaatcaagaagaacgagtacagcatccccaagcacatcaaccccgtggccgccagcctgatccagaagatgctgcagaccgaccccaccgccagacccaccatcaacgagctgctgaacgacgagttcttcaccagcggctacatccccgccagactgcccatcacctgcctgaccatcccccccagattcagcatcgcccccagcagcctggaccccagcaacagaaagcccctgaccgtgctgaacaagggcctggagaaccccctgcccgagagacccagagagaaggaggagcccgtggtgagagagaccggcgaggtggtggactgccacctgagcgacatgctgcagcagctgcacagcgtgaacgccagcaagcccagcgagagaggcctggtgagacaggaggaggccgaggaccccgcctgcatccccatcttctgggtgagcaagtgggtggactacagcgacaagtacggcctgggctaccagctgtgcgacaacagcgtgggcgtgctgttcaacgacagcaccagactgatcctgtacaacgacggcgacagcctgcagtacatcgagagagacggcaccgagagctacctgaccgtgagcagccaccccaacagcctgatgaagaagatcaccctgctgaagtacttcagaaactacatgagcgagcacctgctgaaggccggcgccaacatcacccccagagagggcgacgagctggccagactgccctacctgagaacctggttcagaaccagaagcgccatcatcctgcacctgagcaacggcagcgtgcagatcaacttcttccaggaccacaccaagctgatcctgtgccccctgatggccgccgtgacctacatcgacgagaagagagacttcagaacctacagactgagcctgctggaggagtacggctgctgcaaggagctggccagcagactgagatacgccagaaccatggtggacaagctgctgagcagcagaagcgccagcaacagactgaaggccagctag

SEQ ID NO: 12238 - DNA, 744 bp, synthetic construct
  misc_feature 1..744: note = Description of Artificial Sequence: Synthetic coding sequence
  source 1..744: mol_type = other DNA
atgagcgccgccgtgaccgccggcaagctggccagagcccccgccgaccccggcaaggccggcgtgcccggcgtggccgcccccggcgcccccgccgccgccccccccgccaaggagatccccgaggtgctggtggaccccagaagcagaagaagatacgtgagaggcagattcctgggcaagggcggcttcgccaagtgcttcgagatcagcgacgccgacaccaaggaggtgttcgccggcaagatcgtgcccaagagcctgctgctgaagccccaccagagagagaagatgagcatggagatcagcatccacagaagcctggcccaccagcacgtggtgggcttccacggcttcttcgaggacaacgacttcgtgttcgtggtgctggagctgtgcagaagaagaagcctgctggagctgcacaagagaagaaaggccctgaccgagcccgaggccagatactacctgagacagatcgtgctgggctgccagtacctgcacagaaacagagtgatccacagagacctgaagctgggcaacctgttcctgaacgaggacctggaggtgaagatcggcgacttcggcctggccaccaaggtggagtacgacggcgagagaaagaagaccctgtgcggcacccccaactacatcgcccccgccgtgccctgcctgcagtgcgccccccagcccagatggctgggcagagccgccagcagcctgcaggtgggcgtggccgtgtag

SEQ ID NO: 12239 - DNA, 1521 bp, synthetic construct
  misc_feature 1..1521: note = Description of Artificial Sequence: Synthetic coding sequence
  source 1..1521: mol_type = other DNA
atgagcatggagatcagcatccacagaagcctggcccaccagcacgtggtgggcttccacggcttcttcgaggacaacgacttcgtgttcgtggtgctggagctgtgcagaagaagaagcctgctggagctgcacaagagaagaaaggccctgaccgagcccgaggccagatactacctgagacagatcgtgctgggctgccagtacctgcacagaaacagagtgatccacagagacctgaagctgggcaacctgttcctgaacgaggacctggaggtgaagatcggcgacttcggcctggccaccaaggtggagtacgacggcgagagaaagaagaccctgtgcggcacccccaactacatcgcccccgaggtgctgagcaagaagggccacagcttcgaggtggacgtgtggagcatcggctgcatcatgtacaccctgctggtgggcaagccccccttcgagaccagctgcctgaaggagacctacctgagaatcaagaagaacgagtacagcatccccaagcacatcaaccccgtggccgccagcctgatccagaagatgctgcagaccgaccccaccgccagacccaccatcaacgagctgctgaacgacgagttcttcaccagcggctacatccccgccagactgcccatcacctgcctgaccatcccccccagattcagcatcgcccccagcagcctggaccccagcaacagaaagcccctgaccgtgctgaacaagggcctggagaaccccctgcccgagagacccagagagaaggaggagcccgtggtgagagagaccggcgaggtggtggactgccacctgagcgacatgctgcagcagctgcacagcgtgaacgccagcaagcccagcgagagaggcctggtgagacaggaggaggccgaggaccccgcctgcatccccatcttctgggtgagcaagtgggtggactacagcgacaagtacggcctgggctaccagctgtgcgacaacagcgtgggcgtgctgttcaacgacagcaccagactgatcctgtacaacgacggcgacagcctgcagtacatcgagagagacggcaccgagagctacctgaccgtgagcagccaccccaacagcctgatgaagaagatcaccctgctgaagtacttcagaaactacatgagcgagcacctgctgaaggccggcgccaacatcacccccagagagggcgacgagctggccagactgccctacctgagaacctggttcagaaccagaagcgccatcatcctgcacctgagcaacggcagcgtgcagatcaacttcttccaggaccacaccaagctgatcctgtgccccctgatggccgccgtgacctacatcgacgagaagagagacttcagaacctacagactgagcctgctggaggagtacggctgctgcaaggagctggccagcagactgagatacgccagaaccatggtggacaagctgctgagcagcagaagcgccagcaacagactgaaggccagctag

SEQ ID NO: 12240 - DNA, 1941 bp, synthetic construct
  misc_feature 1..1941: note = Description of Artificial Sequence: Synthetic coding sequence
  source 1..1941: mol_type = other DNA
atggagcccgccgccggcttcctgagccccagacccttccagagagccgccgccgcccccgccccccccgccggccccggccccccccccagcgccctgagaggccccgagctggagatgctggccggcctgcccaccagcgaccccggcagactgatcaccgaccccagaagcggcagaacctacctgaagggcagactgctgggcaagggcggcttcgccagatgctacgaggccaccgacaccgagaccggcagcgcctacgccgtgaaggtgatcccccagagcagagtggccaagccccaccagagagagaagatcctgaacgagatcgagctgcacagagacctgcagcacagacacatcgtgagattcagccaccacttcgaggacgccgacaacatctacatcttcctggagctgtgcagcagaaagagcctggcccacatctggaaggccagacacaccctgctggagcccgaggtgagatactacctgagacagatcctgagcggcctgaagtacctgcaccagagaggcatcctgcacagagacctgaagctgggcaacttcttcatcaccgagaacatggagctgaaggtgggcgacttcggcctggccgccagactggagccccccgagcagagaaagaagaccatctgcggcacccccaactacgtggcccccgaggtgctgctgagacagggccacggccccgaggccgacgtgtggagcctgggctgcgtgatgtacaccctgctgtgcggcagcccccccttcgagaccgccgacctgaaggagacctacagatgcatcaagcaggtgcactacaccctgcccgccagcctgagcctgcccgccagacagctgctggccgccatcctgagagccagccccagagacagacccagcatcgaccagatcctgagacacgacttcttcaccaagggctacacccccgacagactgcccatcagcagctgcgtgaccgtgcccgacctgaccccccccaaccccgccagaagcctgttcgccaaggtgaccaagagcctgttcggcagaaagaagaagagcaagaaccacgcccaggagagagacgaggtgagcggcctggtgagcggcctgatgagaaccagcgtgggccaccaggacgccagacccgaggcccccgccgccagcggccccgcccccgtgagcctggtggagaccgcccccgaggacagcagccccagaggcaccctggccagcagcggcgacggcttcgaggagggcctgaccgtggccaccgtggtggagagcgccctgtgcgccctgagaaactgcatcgccttcatgccccccgccgagcagaaccccgcccccctggcccagcccgagcccctggtgtgggtgagcaagtgggtggactacagcaacaagttcggcttcggctaccagctgagcagcagaagagtggccgtgctgttcaacgacggcacccacatggccctgagcgccaacagaaagaccgtgcactacaaccccaccagcaccaagcacttcagcttcagcgtgggcgccgtgcccagagccctgcagccccagctgggcatcctgagatacttcgccagctacatggagcagcacctgatgaagggcggcgacctgcccagcgtggaggaggtggaggtgcccgccccccccctgctgctgcagtgggtgaagaccgaccaggccctgctgatgctgttcagcgacggcaccgtgcaggtgaacttctacggcgaccacaccaagctgatcctgagcggctgggagcccctgctggtgaccttcgtggccagaaacagaagcgcctgcacctacctggccagccacctgagacagctgggctgcagccccgacctgagacagagactgagatacgccctgagactgctgagagacagaagccccgcctag

SEQ ID NO: 12241 - DNA, 1866 bp, synthetic construct
  misc_feature 1..1866: note = Description of Artificial Sequence: Synthetic coding sequence
  source 1..1866: mol_type = other DNA
agcagacagagacacgccagacccggccccggcggcaccgagaagcccggccccagatgcgacgcccccgccgcctggagcctgccccccgtgagctgcctgagaacctacctgaagggcagactgctgggcaagggcggcttcgccagatgctacgaggccaccgacaccgagaccggcagcgcctacgccgtgaaggtgatcccccagagcagagtggccaagccccaccagagagagaagatcctgaacgagatcgagctgcacagagacctgcagcacagacacatcgtgagattcagccaccacttcgaggacgccgacaacatctacatcttcctggagctgtgcagcagaaagagcctggcccacatctggaaggccagacacaccctgctggagcccgaggtgagatactacctgagacagatcctgagcggcctgaagtacctgcaccagagaggcatcctgcacagagacctgaagctgggcaacttcttcatcaccgagaacatggagctgaaggtgggcgacttcggcctggccgccagactggagccccccgagcagagaaagaagaccatctgcggcacccccaactacgtggcccccgaggtgctgctgagacagggccacggccccgaggccgacgtgtggagcctgggctgcgtgatgtacaccctgctgtgcggcagcccccccttcgagaccgccgacctgaaggagacctacagatgcatcaagcaggtgcactacaccctgcccgccagcctgagcctgcccgccagacagctgctggccgccatcctgagagccagccccagagacagacccagcatcgaccagatcctgagacacgacttcttcaccaagggctacacccccgacagactgcccatcagcagctgcgtgaccgtgcccgacctgaccccccccaaccccgccagaagcctgttcgccaaggtgaccaagagcctgttcggcagaaagaagaagagcaagaaccacgcccaggagagagacgaggtgagcggcctggtgagcggcctgatgagaaccagcgtgggccaccaggacgccagacccgaggcccccgccgccagcggccccgcccccgtgagcctggtggagaccgcccccgaggacagcagccccagaggcaccctggccagcagcggcgacggcttcgaggagggcctgaccgtggccaccgtggtggagagcgccctgtgcgccctgagaaactgcatcgccttcatgccccccgccgagcagaaccccgcccccctggcccagcccgagcccctggtgtgggtgagcaagtgggtggactacagcaacaagttcggcttcggctaccagctgagcagcagaagagtggccgtgctgttcaacgacggcacccacatggccctgagcgccaacagaaagaccgtgcactacaaccccaccagcaccaagcacttcagcttcagcgtgggcgccgtgcccagagccctgcagccccagctgggcatcctgagatacttcgccagctacatggagcagcacctgatgaagggcggcgacctgcccagcgtggaggaggtggaggtgcccgccccccccctgctgctgcagtgggtgaagaccgaccaggccctgctgatgctgttcagcgacggcaccgtgcaggtgaacttctacggcgaccacaccaagctgatcctgagcggctgggagcccctgctggtgaccttcgtggccagaaacagaagcgcctgcacctacctggccagccacctgagacagctgggctgcagccccgacctgagacagagactgagatacgccctgagactgctgagagacagaagccccgcctag

SEQ ID NO: 12242 - DNA, 2913 bp, synthetic construct
  misc_feature 1..2913: note = Description of Artificial Sequence: Synthetic coding sequence
  source 1..2913: mol_type = other DNA
atggccacctgcatcggcgagaagatcgaggacttcaaggtgggcaacctgctgggcaagggcagcttcgccggcgtgtacagagccgagagcatccacaccggcctggaggtggccatcaagatgatcgacaagaaggccatgtacaaggccggcatggtgcagagagtgcagaacgaggtgaagatccactgccagctgaagcaccccagcatcctggagctgtacaactacttcgaggacagcaactacgtgtacctggtgctggagatgtgccacaacggcgagatgaacagatacctgaagaacagagtgaagcccttcagcgagaacgaggccagacacttcatgcaccagatcatcaccggcatgctgtacctgcacagccacggcatcctgcacagagacctgaccctgagcaacctgctgctgaccagaaacatgaacatcaagatcgccgacttcggcctggccacccagctgaagatgccccacgagaagcactacaccctgtgcggcacccccaactacatcagccccgagatcgccaccagaagcgcccacggcctggagagcgacgtgtggagcctgggctgcatgttctacaccctgctgatcggcagaccccccttcgacaccgacaccgtgaagaacaccctgaacaaggtggtgctggccgactacgagatgcccagcttcctgagcatcgaggccaaggacctgatccaccagctgctgagaagaaaccccgccgacagactgagcctgagcagcgtgctggaccaccccttcatgagcagaaacagcagcaccaagagcaaggacctgggcaccgtggaggacagcatcgacagcggccacgccaccatcagcaccgccatcaccgccagcagcagcaccagcatcagcggcagcctgttcgacaagagaagactgctgatcggccagcccctgcccaacaagatgaccgtgttccccaagaacaagagcagcaccgacttcagcagcagcggcgacggcaacagcttctacacccagtggggcaaccaggagaccagcaacagcggcagaggcagagtgatccaggacgccgaggagagaccccacagcagatacctgagaagagcctacagcagcgacagaagcggcaccagcaacagccagagccaggccaagacctacaccatggagagatgccacagcgccgagatgctgagcgtgagcaagagaagcggcggcggcgagaacgaggagagatacagccccaccgacaacaacgccaacatcttcaacttcttcaaggagaagaccagcagcagcagcggcagcttcgagagacccgacaacaaccaggccctgagcaaccacctgtgccccggcaagacccccttccccttcgccgaccccaccccccagaccgagaccgtgcagcagtggttcggcaacctgcagatcaacgcccacctgagaaagaccaccgagtacgacagcatcagccccaacagagacttccagggccaccccgacctgcagaaggacaccagcaagaacgcctggaccgacaccaaggtgaagaagaacagcgacgccagcgacaacgcccacagcgtgaagcagcagaacaccatgaagtacatgaccgccctgcacagcaagcccgagatcatccagcaggagtgcgtgttcggcagcgaccccctgagcgagcagagcaagaccagaggcatggagcccccctggggctaccagaacagaaccctgagaagcatcaccagccccctggtggcccacagactgaagcccatcagacagaagaccaagaaggccgtggtgagcatcctggacagcgaggaggtgtgcgtggagctggtgaaggagtacgccagccaggagtacgtgaaggaggtgctgcagatcagcagcgacggcaacaccatcaccatctactaccccaacggcggcagaggcttccccctggccgacagaccccccagccccaccgacaacatcagcagatacagcttcgacaacctgcccgagaagtactggagaaagtaccagtacgccagcagattcgtgcagctggtgagaagcaagagccccaagatcacctacttcaccagatacgccaagtgcatcctgatggagaacagccccggcgccgacttcgaggtgtggttctacgacggcgtgaagatccacaagaccgaggacttcatccaggtgatcgagaagaccggcaagagctacaccctgaagagcgagagcgaggtgaacagcctgaaggaggagatcaagatgtacatggaccacgccaacgagggccacagaatctgcctggccctggagagcatcatcagcgaggaggagagaaagaccagaagcgcccccttcttccccatcatcatcggcagaaagcccggcagcaccagcagccccaaggccctgagccccccccccagcgtggacagcaactaccccaccagagagagagccagcttcaacagaatggtgatgcacagcgccgccagccccacccaggcccccatcctgaaccccagcatggtgaccaacgagggcctgggcctgaccaccaccgccagcggcaccgacatcagcagcaacagcctgaaggactgcctgcccaagagcgcccagctgctgaagagcgtgttcgtgaagaacgtgggctgggccacccagctgaccagcggcgccgtgtgggtgcagttcaacgacggcagccagctggtggtgcaggccggcgtgagcagcatcagctacaccagccccaacggccagaccaccagatacggcgagaacgagaagctgcccgactacatcaagcagaagctgcagtgcctgagcagcatcctgctgatgttcagcaaccccacccccaacttccactag

SEQ ID NO: 12243 - DNA, 2817 bp, synthetic construct
  misc_feature 1..2817: note = Description of Artificial Sequence: Synthetic coding sequence
  source 1..2817: mol_type = other DNA
atggccacctgcatcggcgagaagatcgaggacttcaaggtgggcaacctgctgggcaagggcagcttcgccggcgtgtacagagccgagagcatccacaccggcctggaggtggccatcaagatgctgtacaactacttcgaggacagcaactacgtgtacctggtgctggagatgtgccacaacggcgagatgaacagatacctgaagaacagagtgaagcccttcagcgagaacgaggccagacacttcatgcaccagatcatcaccggcatgctgtacctgcacagccacggcatcctgcacagagacctgaccctgagcaacctgctgctgaccagaaacatgaacatcaagatcgccgacttcggcctggccacccagctgaagatgccccacgagaagcactacaccctgtgcggcacccccaactacatcagccccgagatcgccaccagaagcgcccacggcctggagagcgacgtgtggagcctgggctgcatgttctacaccctgctgatcggcagaccccccttcgacaccgacaccgtgaagaacaccctgaacaaggtggtgctggccgactacgagatgcccagcttcctgagcatcgaggccaaggacctgatccaccagctgctgagaagaaaccccgccgacagactgagcctgagcagcgtgctggaccaccccttcatgagcagaaacagcagcaccaagagcaaggacctgggcaccgtggaggacagcatcgacagcggccacgccaccatcagcaccgccatcaccgccagcagcagcaccagcatcagcggcagcctgttcgacaagagaagactgctgatcggccagcccctgcccaacaagatgaccgtgttccccaagaacaagagcagcaccgacttcagcagcagcggcgacggcaacagcttctacacccagtggggcaaccaggagaccagcaacagcggcagaggcagagtgatccaggacgccgaggagagaccccacagcagatacctgagaagagcctacagcagcgacagaagcggcaccagcaacagccagagccaggccaagacctacaccatggagagatgccacagcgccgagatgctgagcgtgagcaagagaagcggcggcggcgagaacgaggagagatacagccccaccgacaacaacgccaacatcttcaacttcttcaaggagaagaccagcagcagcagcggcagcttcgagagacccgacaacaaccaggccctgagcaaccacctgtgccccggcaagacccccttccccttcgccgaccccaccccccagaccgagaccgtgcagcagtggttcggcaacctgcagatcaacgcccacctgagaaagaccaccgagtacgacagcatcagccccaacagagacttccagggccaccccgacctgcagaaggacaccagcaagaacgcctggaccgacaccaaggtgaagaagaacagcgacgccagcgacaacgcccacagcgtgaagcagcagaacaccatgaagtacatgaccgccctgcacagcaagcccgagatcatccagcaggagtgcgtgttcggcagcgaccccctgagcgagcagagcaagaccagaggcatggagcccccctggggctaccagaacagaaccctgagaagcatcaccagccccctggtggcccacagactgaagcccatcagacagaagaccaagaaggccgtggtgagcatcctggacagcgaggaggtgtgcgtggagctggtgaaggagtacgccagccaggagtacgtgaaggaggtgctgcagatcagcagcgacggcaacaccatcaccatctactaccccaacggcggcagaggcttccccctggccgacagaccccccagccccaccgacaacatcagcagatacagcttcgacaacctgcccgagaagtactggagaaagtaccagtacgccagcagattcgtgcagctggtgagaagcaagagccccaagatcacctacttcaccagatacgccaagtgcatcctgatggagaacagccccggcgccgacttcgaggtgtggttctacgacggcgtgaagatccacaagaccgaggacttcatccaggtgatcgagaagaccggcaagagctacaccctgaagagcgagagcgaggtgaacagcctgaaggaggagatcaagatgtacatggaccacgccaacgagggccacagaatctgcctggccctggagagcatcatcagcgaggaggagagaaagaccagaagcgcccccttcttccccatcatcatcggcagaaagcccggcagcaccagcagccccaaggccctgagccccccccccagcgtggacagcaactaccccaccagagagagagccagcttcaacagaatggtgatgcacagcgccgccagccccacccaggcccccatcctgaaccccagcatggtgaccaacgagggcctgggcctgaccaccaccgccagcggcaccgacatcagcagcaacagcctgaaggactgcctgcccaagagcgcccagctgctgaagagcgtgttcgtgaagaacgtgggctgggccacccagctgaccagcggcgccgtgtgggtgcagttcaacgacggcagccagctggtggtgcaggccggcgtgagcagcatcagctacaccagccccaacggccagaccaccagatacggcgagaacgagaagctgcccgactacatcaagcagaagctgcagtgcctgagcagcatcctgctgatgttcagcaaccccacccccaacttccactag

SEQ ID NO: 12244 - DNA, 2790 bp, synthetic construct
  misc_feature 1..2790: note = Description of Artificial Sequence: Synthetic coding sequence
  source 1..2790: mol_type = other DNA
atgatcgacaagaaggccatgtacaaggccggcatggtgcagagagtgcagaacgaggtgaagatccactgccagctgaagcaccccagcatcctggagctgtacaactacttcgaggacagcaactacgtgtacctggtgctggagatgtgccacaacggcgagatgaacagatacctgaagaacagagtgaagcccttcagcgagaacgaggccagacacttcatgcaccagatcatcaccggcatgctgtacctgcacagccacggcatcctgcacagagacctgaccctgagcaacctgctgctgaccagaaacatgaacatcaagatcgccgacttcggcctggccacccagctgaagatgccccacgagaagcactacaccctgtgcggcacccccaactacatcagccccgagatcgccaccagaagcgcccacggcctggagagcgacgtgtggagcctgggctgcatgttctacaccctgctgatcggcagaccccccttcgacaccgacaccgtgaagaacaccctgaacaaggtggtgctggccgactacgagatgcccagcttcctgagcatcgaggccaaggacctgatccaccagctgctgagaagaaaccccgccgacagactgagcctgagcagcgtgctggaccaccccttcatgagcagaaacagcagcaccaagagcaaggacctgggcaccgtggaggacagcatcgacagcggccacgccaccatcagcaccgccatcaccgccagcagcagcaccagcatcagcggcagcctgttcgacaagagaagactgctgatcggccagcccctgcccaacaagatgaccgtgttccccaagaacaagagcagcaccgacttcagcagcagcggcgacggcaacagcttctacacccagtggggcaaccaggagaccagcaacagcggcagaggcagagtgatccaggacgccgaggagagaccccacagcagatacctgagaagagcctacagcagcgacagaagcggcaccagcaacagccagagccaggccaagacctacaccatggagagatgccacagcgccgagatgctgagcgtgagcaagagaagcggcggcggcgagaacgaggagagatacagccccaccgacaacaacgccaacatcttcaacttcttcaaggagaagaccagcagcagcagcggcagcttcgagagacccgacaacaaccaggccctgagcaaccacctgtgccccggcaagacccccttccccttcgccgaccccaccccccagaccgagaccgtgcagcagtggttcggcaacctgcagatcaacgcccacctgagaaagaccaccgagtacgacagcatcagccccaacagagacttccagggccaccccgacctgcagaaggacaccagcaagaacgcctggaccgacaccaaggtgaagaagaacagcgacgccagcgacaacgcccacagcgtgaagcagcagaacaccatgaagtacatgaccgccctgcacagcaagcccgagatcatccagcaggagtgcgtgttcggcagcgaccccctgagcgagcagagcaagaccagaggcatggagcccccctggggctaccagaacagaaccctgagaagcatcaccagccccctggtggcccacagactgaagcccatcagacagaagaccaagaaggccgtggtgagcatcctggacagcgaggaggtgtgcgtggagctggtgaaggagtacgccagccaggagtacgtgaaggaggtgctgcagatcagcagcgacggcaacaccatcaccatctactaccccaacggcggcagaggcttccccctggccgacagaccccccagccccaccgacaacatcagcagatacagcttcgacaacctgcccgagaagtactggagaaagtaccagtacgccagcagattcgtgcagctggtgagaagcaagagccccaagatcacctacttcaccagatacgccaagtgcatcctgatggagaacagccccggcgccgacttcgaggtgtggttctacgacggcgtgaagatccacaagaccgaggacttcatccaggtgatcgagaagaccggcaagagctacaccctgaagagcgagagcgaggtgaacagcctgaaggaggagatcaagatgtacatggaccacgccaacgagggccacagaatctgcctggccctggagagcatcatcagcgaggaggagagaaagaccagaagcgcccccttcttccccatcatcatcggcagaaagcccggcagcaccagcagccccaaggccctgagccccccccccagcgtggacagcaactaccccaccagagagagagccagcttcaacagaatggtgatgcacagcgccgccagccccacccaggcccccatcctgaaccccagcatggtgaccaacgagggcctgggcctgaccaccaccgccagcggcaccgacatcagcagcaacagcctgaaggactgcctgcccaagagcgcccagctgctgaagagcgtgttcgtgaagaacgtgggctgggccacccagctgaccagcggcgccgtgtgggtgcagttcaacgacggcagccagctggtggtgcaggccggcgtgagcagcatcagctacaccagccccaacggccagaccaccagatacggcgagaacgagaagctgcccgactacatcaagcagaagctgcagtgcctgagcagcatcctgctgatgttcagcaaccccacccccaacttccactag

SEQ ID NO: 12245 - DNA, 1752 bp, synthetic construct
  misc_feature 1..1752: note = Description of Artificial Sequence: Synthetic coding sequence
  source 1..1752: mol_type = other DNA
atggccgccagaagaagaagaagcaccggcggcggcagagccagagccctgaacgagagcaagagagtgaacaacggcaacaccgcccccgaggacagcagccccgccaagaagaccagaagatgccagagacaggagagcaagaagatgcccgtggccggcggcaaggccaacaaggacagaaccgaggacaagcaggacggcatgcccggcagaagctgggccagcaagagagtgagcgagagcgtgaaggccctgctgctgaagggcaaggcccccgtggaccccgagtgcaccgccaaggtgggcaaggcccacgtgtactgcgagggcaacgacgtgtacgacgtgatgctgaaccagaccaacctgcagttcaacaacaacaagtactacctgatccagctgctggaggacgacgcccagagaaacttcagcgtgtggatgagatggggcagagtgggcaagatgggccagcacagcctggtggcctgcagcggcaacctgaacaaggccaaggagatcttccagaagaagttcctggacaagaccaagaacaactgggaggacagagagaagttcgagaaggtgcccggcaagtacgacatgctgcagatggactacgccaccaacacccaggacgaggaggagaccaagaaggaggagagcctgaagagccccctgaagcccgagagccagctggacctgagagtgcaggagctgatcaagctgatctgcaacgtgcaggccatggaggagatgatgatggagatgaagtacaacaccaagaaggcccccctgggcaagctgaccgtggcccagatcaaggccggctaccagagcctgaagaagatcgaggactgcatcagagccggccagcacggcagagccctgatggaggcctgcaacgagttctacaccagaatcccccacgacttcggcctgagaaccccccccctgatcagaacccagaaggagctgagcgagaagatccagctgctggaggccctgggcgacatcgagatcgccatcaagctggtgaagaccgagctgcagagccccgagcaccccctggaccagcactacagaaacctgcactgcgccctgagacccctggaccacgagagctacgagttcaaggtgatcagccagtacctgcagagcacccacgcccccacccacagcgactacaccatgaccctgctggacctgttcgaggtggagaaggacggcgagaaggaggccttcagagaggacctgcacaacagaatgctgctgtggcacggcagcagaatgagcaactgggtgggcatcctgagccacggcctgagaatcgccccccccgaggcccccatcaccggctacatgttcggcaagggcatctacttcgccgacatgagcagcaagagcgccaactactgcttcgccagcagactgaagaacaccggcctgctgctgctgagcgaggtggccctgggccagtgcaacgagctgctggaggccaaccccaaggccgagggcctgctgcagggcaagcacagcaccaagggcctgggcaagatggcccccagcagcgcccacttcgtgaccctgaacggcagcaccgtgcccctgggccccgccagcgacaccggcatcctgaaccccgacggctacaccctgaactacaacgagtacatcgtgtacaaccccaaccaggtgagaatgagatacctgctgaaggtgcagttcaacttcctgcagctgtggtag

SEQ ID NO: 12246 - DNA, 1713 bp, synthetic construct
  misc_feature 1..1713: note = Description of Artificial Sequence: Synthetic coding sequence
  source 1..1713: mol_type = other DNA
atggccgccagaagaagaagaagcaccggcggcggcagagccagagccctgaacgagagcaagagagtgaacaacggcaacaccgcccccgaggacagcagccccgccaagaagaccagaagatgccagagacaggagagcaagaagatgcccgtggccggcggcaaggccaacaaggacagaaccgaggacaagcaggacgagagcgtgaaggccctgctgctgaagggcaaggcccccgtggaccccgagtgcaccgccaaggtgggcaaggcccacgtgtactgcgagggcaacgacgtgtacgacgtgatgctgaaccagaccaacctgcagttcaacaacaacaagtactacctgatccagctgctggaggacgacgcccagagaaacttcagcgtgtggatgagatggggcagagtgggcaagatgggccagcacagcctggtggcctgcagcggcaacctgaacaaggccaaggagatcttccagaagaagttcctggacaagaccaagaacaactgggaggacagagagaagttcgagaaggtgcccggcaagtacgacatgctgcagatggactacgccaccaacacccaggacgaggaggagaccaagaaggaggagagcctgaagagccccctgaagcccgagagccagctggacctgagagtgcaggagctgatcaagctgatctgcaacgtgcaggccatggaggagatgatgatggagatgaagtacaacaccaagaaggcccccctgggcaagctgaccgtggcccagatcaaggccggctaccagagcctgaagaagatcgaggactgcatcagagccggccagcacggcagagccctgatggaggcctgcaacgagttctacaccagaatcccccacgacttcggcctgagaaccccccccctgatcagaacccagaaggagctgagcgagaagatccagctgctggaggccctgggcgacatcgagatcgccatcaagctggtgaagaccgagctgcagagccccgagcaccccctggaccagcactacagaaacctgcactgcgccctgagacccctggaccacgagagctacgagttcaaggtgatcagccagtacctgcagagcacccacgcccccacccacagcgactacaccatgaccctgctggacctgttcgaggtggagaaggacggcgagaaggaggccttcagagaggacctgcacaacagaatgctgctgtggcacggcagcagaatgagcaactgggtgggcatcctgagccacggcctgagaatcgccccccccgaggcccccatcaccggctacatgttcggcaagggcatctacttcgccgacatgagcagcaagagcgccaactactgcttcgccagcagactgaagaacaccggcctgctgctgctgagcgaggtggccctgggccagtgcaacgagctgctggaggccaaccccaaggccgagggcctgctgcagggcaagcacagcaccaagggcctgggcaagatggcccccagcagcgcccacttcgtgaccctgaacggcagcaccgtgcccctgggccccgccagcgacaccggcatcctgaaccccgacggctacaccctgaactacaacgagtacatcgtgtacaaccccaaccaggtgagaatgagatacctgctgaaggtgcagttcaacttcctgcagctgtggtag

SEQ ID NO: 12247 - DNA, 1623 bp, synthetic construct
  misc_feature 1..1623: note = Description of Artificial Sequence: Synthetic coding sequence
  source 1..1623: mol_type = other DNA
atgagcctgctgttcctggccatggcccccaagcccaagccctgggtgcagaccgagggccccgagaagaagaagggcagacaggccggcagagaggaggaccccttcagaagcaccgccgaggccctgaaggccatccccgccgagaagagaatcatcagagtggaccccacctgccccctgagcagcaaccccggcacccaggtgtacgaggactacaactgcaccctgaaccagaccaacatcgagaacaacaacaacaagttctacatcatccagctgctgcaggacagcaacagattcttcacctgctggaaccactggggcagagtgggcgaggtgggccagagcaagatcaaccacttcaccagactggaggacgccaagaaggacttcgagaagaagttcagagagaagaccaagaacaactgggccgagagagaccacttcgtgagccaccccggcaagtacaccctgatcgaggtgcaggccgaggacgaggcccaggaggccgtggtgaaggtggacagaggccccgtgagaaccgtgaccaagagagtgcagccctgcagcctggaccccgccacccagaagctgatcaccaacatcttcagcaaggagatgttcaagaacaccatggccctgatggacctggacgtgaagaagatgcccctgggcaagctgagcaagcagcagatcgccagaggcttcgaggccctggaggccctggaggaggccctgaagggccccaccgacggcggccagagcctggaggagctgagcagccacttctacaccgtgatcccccacaacttcggccacagccagcccccccccatcaacagccccgagctgctgcaggccaagaaggacatgctgctggtgctggccgacatcgagctggcccaggccctgcaggccgtgagcgagcaggagaagaccgtggaggaggtgccccaccccctggacagagactaccagctgctgaagtgccagctgcagctgctggacagcggcgcccccgagtacaaggtgatccagacctacctggagcagaccggcagcaaccacagatgccccaccctgcagcacatctggaaggtgaaccaggagggcgaggaggacagattccaggcccacagcaagctgggcaacagaaagctgctgtggcacggcaccaacatggccgtggtggccgccatcctgaccagcggcctgagaatcatgccccacagcggcggcagagtgggcaagggcatctacttcgccagcgagaacagcaagagcgccggctacgtgatcggcatgaagtgcggcgcccaccacgtgggctacatgttcctgggcgaggtggccctgggcagagagcaccacatcaacaccgacaaccccagcctgaagagccccccccccggcttcgacagcgtgatcgccagaggccacaccgagcccgaccccacccaggacaccgagctggagctggacggccagcaggtggtggtgccccagggccagcccgtgccctgccccgagttcagcagcagcaccttcagccagagcgagtacctgatctaccaggagagccagtgcagactgagatacctgctggaggtgcacctgtag

SEQ ID NO: 12248 - DNA, 1602 bp, synthetic construct
  misc_feature 1..1602: note = Description of Artificial Sequence: Synthetic coding sequence
  source 1..1602: mol_type = other DNA
atggcccccaagcccaagccctgggtgcagaccgagggccccgagaagaagaagggcagacaggccggcagagaggaggaccccttcagaagcaccgccgaggccctgaaggccatccccgccgagaagagaatcatcagagtggaccccacctgccccctgagcagcaaccccggcacccaggtgtacgaggactacaactgcaccctgaaccagaccaacatcgagaacaacaacaacaagttctacatcatccagctgctgcaggacagcaacagattcttcacctgctggaaccactggggcagagtgggcgaggtgggccagagcaagatcaaccacttcaccagactggaggacgccaagaaggacttcgagaagaagttcagagagaagaccaagaacaactgggccgagagagaccacttcgtgagccaccccggcaagtacaccctgatcgaggtgcaggccgaggacgaggcccaggaggccgtggtgaaggtggacagaggccccgtgagaaccgtgaccaagagagtgcagccctgcagcctggaccccgccacccagaagctgatcaccaacatcttcagcaaggagatgttcaagaacaccatggccctgatggacctggacgtgaagaagatgcccctgggcaagctgagcaagcagcagatcgccagaggcttcgaggccctggaggccctggaggaggccctgaagggccccaccgacggcggccagagcctggaggagctgagcagccacttctacaccgtgatcccccacaacttcggccacagccagcccccccccatcaacagccccgagctgctgcaggccaagaaggacatgctgctggtgctggccgacatcgagctggcccaggccctgcaggccgtgagcgagcaggagaagaccgtggaggaggtgccccaccccctggacagagactaccagctgctgaagtgccagctgcagctgctggacagcggcgcccccgagtacaaggtgatccagacctacctggagcagaccggcagcaaccacagatgccccaccctgcagcacatctggaaggtgaaccaggagggcgaggaggacagattccaggcccacagcaagctgggcaacagaaagctgctgtggcacggcaccaacatggccgtggtggccgccatcctgaccagcggcctgagaatcatgccccacagcggcggcagagtgggcaagggcatctacttcgccagcgagaacagcaagagcgccggctacgtgatcggcatgaagtgcggcgcccaccacgtgggctacatgttcctgggcgaggtggccctgggcagagagcaccacatcaacaccgacaaccccagcctgaagagccccccccccggcttcgacagcgtgatcgccagaggccacaccgagcccgaccccacccaggacaccgagctggagctggacggccagcaggtggtggtgccccagggccagcccgtgccctgccccgagttcagcagcagcaccttcagccagagcgagtacctgatctaccaggagagccagtgcagactgagatacctgctggaggtgcacctgtag

SEQ ID NO: 12249 - DNA, 1602 bp, synthetic construct; identical to SEQ ID NO: 12248
  misc_feature 1..1602: note = Description of Artificial Sequence: Synthetic coding sequence
  source 1..1602: mol_type = other DNA

SEQ ID NO: 12250 - DNA, 999 bp, synthetic construct
  misc_feature 1..999: note = Description of Artificial Sequence: Synthetic coding sequence
  source 1..999: mol_type = other DNA
atggcccccaagcccaagccctgggtgcagaccgagggccccgagaagaagaagggcagacaggccggcagagaggaggaccccttcagaagcaccgccgaggccctgaaggccatccccgccgagaagagaatcatcagagtggaccccacctgccccctgagcagcaaccccggcacccaggtgtacgaggactacaactgcaccctgaaccagaccaacatcgagaacaacaacaacaagttctacatcatccagctgctgcaggacagcaacagattcttcacctgctggaaccactggggcagagtgggcgaggtgggccagagcaagatcaaccacttcaccagactggaggacgccaagaaggacttcgagaagaagttcagagagaagaccaagaacaactgggccgagagagaccacttcgtgagccaccccggcaagtacaccctgatcgaggtgcaggccgaggacgaggcccaggaggccgtggtgaaggtggacagaggccccgtgagaaccgtgaccaagagagtgcagccctgcagcctggaccccgccacccagaagctgatcaccaacatcttcagcaaggagatgttcaagaacaccatggccctgatggacctggacgtgaagaagatgcccctgggcaagctgagcaagcagcagatcgccagaggcttcgaggccctggaggccctggaggaggccctgaagggccccaccgacggcggccagagcctggaggagctgagcagccacttctacaccgtgatcccccacaacttcggccacagccagcccccccccatcaacagccccgagctgctgcaggccaagaaggacatgctgctggtgctggccgacatcgagctggcccaggccctgcaggccgtgagcgagcaggagaagaccgtggaggaggtgccccaccccctggacagagactaccagctgctgaagtgccagctgcagctgctggacagcggctag

SEQ ID NO: 12251 - DNA, 5175 bp, synthetic construct
  misc_feature 1..5175: note = Description of Artificial Sequence: Synthetic coding sequence
  source 1..5175: mol_type = other DNA
atggtgatgggcatcttcgccaactgcatcttctgcctgaaggtgaagtacctgccccagcagcagaagaagaagctgcagaccgacatcaaggagaacggcggcaagttcagcttcagcctgaacccccagtgcacccacatcatcctggacaacgccgacgtgctgagccagtaccagctgaacagcatccagaagaaccacgtgcacatcgccaaccccgacttcatctggaagagcatcagagagaagagactgctggacgtgaagaactacgacccctacaagcccctggacatcacccccccccccgaccagaaggccagcagcagcgaggtgaagaccgagggcctgtgccccgacagcgccaccgaggaggaggacaccgtggagctgaccgagttcggcatgcagaacgtggagatcccccacctgccccaggacttcgaggtggccaagtacaacaccctggagaaggtgggcatggagggcggccaggaggccgtggtggtggagctgcagtgcagcagagacagcagagactgccccttcctgatcagcagccacttcctgctggacgacggcatggagaccagaagacagttcgccatcaagaagaccagcgaggacgccagcgagtacttcgagaactacatcgaggagctgaagaagcagggcttcctgctgagagagcacttcacccccgaggccacccagctggccagcgagcagctgcaggccctgctgctggaggaggtgatgaacagcagcaccctgagccaggaggtgagcgacctggtggagatgatctgggccgaggccctgggccacctggagcacatgctgctgaagcccgtgaacagaatcagcctgaacgacgtgagcaaggccgagggcatcctgctgctggtgaaggccgccctgaagaacggcgagaccgccgagcagctgcagaagatgatgaccgagttctacagactgatcccccacaagggcaccatgcccaaggaggtgaacctgggcctgctggccaagaaggccgacctgtgccagctgatcagagacatggtgaacgtgtgcgagaccaacctgagcaagcccaacccccccagcctggccaagtacagagccctgagatgcaagatcgagcacgtggagcagaacaccgaggagttcctgagagtgagaaaggaggtgctgcagaaccaccacagcaagagccccgtggacgtgctgcagatcttcagagtgggcagagtgaacgagaccaccgagttcctgagcaagctgggcaacgtgagacccctgctgcacggcagccccgtgcagaacatcgtgggcatcctgtgcagaggcctgctgctgcccaaggtggtggaggacagaggcgtgcagagaaccgacgtgggcaacctgggcagcggcatctacttcagcgacagcctgagcaccagcatcaagtacagccaccccggcgagaccgacggcaccagactgctgctgatctgcgacgtggccctgggcaagtgcatggacctgcacgagaaggacttcagcctgaccgaggccccccccggctacgacagcgtgcacggcgtgagccagaccgccagcgtgaccaccgacttcgaggacgacgagttcgtggtgtacaagaccaaccaggtgaagatgaagtacatcatcaagttcagcatgcccggcgaccagatcaaggacttccaccccagcgaccacaccgagctggaggagtacagacccgagttcagcaacttcagcaaggtggaggactaccagctgcccgacgccaagaccagcagcagcaccaaggccggcctgcaggacgccagcggcaacctggtgcccctggaggacgtgcacatcaagggcagaatcatcgacaccgtggcccaggtgatcgtgttccagacctacaccaacaagagccacgtgcccatcgaggccaagtacatcttccccctggacgacaaggccgccgtgtgcggcttcgaggccttcatcaacggcaagcacatcgtgggcgagatcaaggagaaggaggaggcccagcaggagtacctggaggccgtgacccagggccacggcgcctacctgatgagccaggacgcccccgacgtgttcaccgtgagcgtgggcaacctgccccccaaggccaaggtgctgatcaagatcacctacatcaccgagctgagcatcctgggcaccgtgggcgtgttcttcatgcccgccaccgtggccccctggcagcaggacaaggccctgaacgagaacctgcaggacaccgtggagaagatctgcatcaaggagatcggcaccaagcagagcttcagcctgaccatgagcatcgagatgccctacgtgatcgagttcatcttcagcgacacccacgagctgaagcagaagagaaccgactgcaaggccgtgatcagcaccatggagggcagcagcctggacagcagcggcttcagcctgcacatcggcctgagcgccgcctacctgcccagaatgtgggtggagaagcaccccgagaaggagagcgaggcctgcatgctggtgttccagcccgacctggacgtggacctgcccgacctggccagcgagagcgaggtgatcatctgcctggactgcagcagcagcatggagggcgtgaccttcctgcaggccaagcagatcgccctgcacgccctgagcctggtgggcgagaagcagaaggtgaacatcatccagttcggcaccggctacaaggagctgttcagctaccccaagcacatcaccagcaacaccatggccgccgagttcatcatgagcgccacccccaccatgggcaacaccgacttctggaagaccctgagatacctgagcctgctgtaccccgccagaggcagcagaaacatcctgctggtgagcgacggccacctgcaggacgagagcctgaccctgcagctggtgaagagaagcagaccccacaccagactgttcgcctgcggcatcggcagcaccgccaacagacacgtgctgagaatcctgagccagtgcggcgccggcgtgttcgagtacttcaacgccaagagcaagcacagctggagaaagcagatcgaggaccagatgaccagactgtgcagccccagctgccacagcgtgagcgtgaagtggcagcagctgaaccccgacgtgcccgaggccctgcaggcccccgcccaggtgcccagcctgttcctgaacgacagactgctggtgtacggcttcatcccccactgcacccaggccaccctgtgcgccctgatccaggagaaggagttcagaaccatggtgagcaccaccgagctgcagaagaccaccggcaccatgatccacaagctggccgccagagccctgatcagagactacgaggacggcatcctgcacgagaacgagaccagccacgagatgaagaagcagaccctgaagagcctgatcatcaagctgagcaaggagaacagcctgatcacccagttcaccagcttcgtggccgtggagaagagagacgagaacgagagccccttccccgacatccccaaggtgagcgagctgatcgccaaggaggacgtggacttcctgccctacatgagctggcagggcgagccccaggaggccgtgagaaaccagagcctgctggccagcagcgagtggcccgagctgagactgagcaagagaaagcacagaaagatccccttcagcaagagaaagatggagctgagccagcccgaggtgagcgaggacttcgaggaggacggcctgggcgtgctgcccgccttcaccagcaacctggagagaggcggcgtggagaagctgctggacctgagctggaccgagagctgcaagcccaccgccaccgagcccctgttcaagaaggtgagcccctgggagaccagcaccagcagcttcttccccatcctggcccccgccgtgggcagctacctgccccccaccgccagagcccacagccccgccagcctgagcttcgccagctacagacaggtggccagcttcggcagcgccgccccccccagacagttcgacgccagccagttcagccagggccccgtgcccggcacctgcgccgactggatcccccagagcgccagctgccccaccggccccccccagaacccccccagcagcccctactgcggcatcgtgttcagcggcagcagcctgagcagcgcccagagcgcccccctgcagcaccccggcggcttcaccaccagacccagcgccggcaccttccccgagctggacagcccccagctgcacttcagcctgcccaccgaccccgaccccatcagaggcttcggcagctaccaccccagcgccagcagccccttccacttccagcccagcgccgccagcctgaccgccaacctgagactgcccatggccagcgccctgcccgaggccctgtgcagccagagcagaaccacccccgtggacctgtgcctgctggaggagagcgtgggcagcctggagggcagcagatgccccgtgttcgccttccagagcagcgacaccgagagcgacgagctgagcgaggtgctgcaggacagctgcttcctgcagatcaagtgcgacaccaaggacgacagcatcctgtgcttcctggaggtgaaggaggaggacgagatcgtgtgcatccagcactggcaggacgccgtgccctggaccgagctgctgagcctgcagaccgaggacggcttctggaagctgacccccgagctgggcctgatcctgaacctgaacaccaacggcctgcacagcttcctgaagcagaagggcatccagagcctgggcgtgaagggcagagagtgcctgctggacctgatcgccaccatgctggtgctgcagttcatcagaaccagactggagaaggagggcatcgtgttcaagagcctgatgaagatggacgacgccagcatcagcagaaacatcccctgggccttcgaggccatcaagcaggccagcgagtgggtgagaagaaccgagggccagtaccccagcatctgccccagactggagctgggcaacgactgggacagcgccaccaagcagctgctgggcctgcagcccatcagcaccgtgagccccctgcacagagtgctgcactacagccagggctag

SEQ ID NO: 12252 - DNA, 1911 bp, synthetic construct
  misc_feature 1..1911: note = Description of Artificial Sequence: Synthetic coding sequence
  source 1..1911: mol_type = other DNA
atgaaccccagcgcccccagctaccccatggccagcctgtacgtgggcgacctgcaccccgacgtgaccgaggccatgctgtacgagaagttcagccccgccggccccatcctgagcatcagagtgtgcagagacatgatcaccagaagaagcctgggctacgcctacgtgaacttccagcagcccgccgacgccgagagagccctggacaccatgaacttcgacgtgatcaagggcaagcccgtgagaatcatgtggagccagagagaccccagcctgagaaagagcggcgtgggcaacatcttcatcaagaacctggacaagagcatcgacaacaaggccctgtacgacaccttcagcgccttcggcaacatcctgagctgcaaggtggtgtgcgacgagaacggcagcaagggctacggcttcgtgcacttcgagacccaggaggccgccgagagagccatcgagaagatgaacggcatgctgctgaacgacagaaaggtgttcgtgggcagattcaagagcagaaaggagagagaggccgagctgggcgccagagccaaggagttcaccaacgtgtacatcaagaacttcggcgaggacatggacgacgagagactgaaggacctgttcggcaagttcggccccgccctgagcgtgaaggtgatgaccgacgagagcggcaagagcaagggcttcggcttcgtgagcttcgagagacacgaggacgcccagaaggccgtggacgagatgaacggcaaggagctgaacggcaagcagatctacgtgggcagagcccagaagaaggtggagagacagaccgagctgaagagaaagttcgagcagatgaagcaggacagaatcaccagataccagggcgtgaacctgtacgtgaagaacctggacgacggcatcgacgacgagagactgagaaaggagttcagccccttcggcaccatcaccagcgccaaggtgatgatggagggcggcagaagcaagggcttcggcttcgtgtgcttcagcagccccgaggaggccaccaaggccgtgaccgagatgaacggcagaatcgtggccaccaagcccctgtacgtggccctggcccagagaaaggaggagagacaggcccacctgaccaaccagtacatgcagagaatggccagcgtgagagccgtgcccaaccccgtgatcaacccctaccagcccgccccccccagcggctacttcatggccgccatcccccagacccagaacagagccgcctactacccccccagccagatcgcccagctgagacccagccccagatggaccgcccagggcgccagaccccaccccttccagaacatgcccggcgccatcagacccgccgcccccagaccccccttcagcaccatgagacccgccagcagccaggtgcccagagtgatgagcacccagagagtggccaacaccagcacccagaccatgggccccagacccgccgccgccgccgccgccgccacccccgccgtgagaaccgtgccccagtacaagtacgccgccggcgtgagaaacccccagcagcacctgaacgcccagccccaggtgaccatgcagcagcccgccgtgcacgtgcagggccaggagcccctgaccgccagcatgctggccagcgcccccccccaggagcagaagcagatgctgggcgagagactgttccccctgatccaggccatgcaccccaccctggccggcaagatcaccggcatgctgctggagatcgacaacagcgagctgctgcacatgctggagagccccgagagcctgagaagcaaggtggacgaggccgtggccgtgctgcaggcccaccaggccaaggaggccgcccagaaggccgtgaacagcgccaccggcgtgcccaccgtgtag

SEQ ID NO: 12253 - DNA, 1644 bp, synthetic construct
  misc_feature 1..1644: note = Description of Artificial Sequence: Synthetic coding sequence
  source 1..1644: mol_type = other DNA
atgaaccccagcgcccccagctaccccatggccagcctgtacgtgggcgacctgcaccccgacgtgaccgaggccatgctgtacgagaagttcagccccgccggccccatcctgagcatcagagtgtgcagagacatgatcaccagaagaagcctgggctacgcctacgtgaacttccagcagcccgccgacgccgagagagccctggacaccatgaacttcgacgtgatcaagggcaagcccgtgagaatcatgtggagccagagagaccccagcctgagaaagagcggcgtgggcaacatcttcatcaagaacctggacaagagcatcgacaacaaggccctgtacgacaccttcagcgccttcggcaacatcctgagctgcaaggtggtgtgcgacgagaacggcagcaagggctacggcttcgtgcacttcgagacccaggaggccgccgagagagccatcgagaagatgaacggcatgctgctgaacgacagaaaggtgttcgtgggcagattcaagagcagaaaggagagagaggccgagctgggcgccagagccaaggagttcaccaacgtgtacatcaagaacttcggcgaggacatggacgacgagagactgaaggacctgttcggcaagttcggccccgccctgagcgtgaaggtgatgaccgacgagagcggcaagagcaagggcttcggcttcgtgagcttcgagagacacgaggacgcccagaaggccgtggacgagatgaacggcaaggagctgaacggcaagcagatctacgtgggcagagcccagaagaaggtggagagacagaccgagctgaagagaaagttcgagcagatgaagcaggacagaatcaccagataccagggcgtgaacctgtacgtgaagaacctggacgacggcatcgacgacgagagactgagaaaggagttcagccccttcggcaccatcaccagcgccaaggtgatgatggagggcggcagaagcaagggcttcggcttcgtgtgcttcagcagccccgaggaggccaccaaggccgtgaccgagatgaacggcagaatcgtggccaccaagcccctgtacgtggccctggcccagagaaaggaggagagacaggcccacctgaccaaccagtacatgcagagaatggccagcgtgagagccgtgcccaaccccgtgatcaacccctaccagcccgccccccccagcggctacttcatggccgccatcccccagacccagaacagagccgcctactacccccccagccagatcgcccagctgagacccagccccagatggaccgcccagggcgccagaccccaccccgccgtgcacgtgcagggccaggagcccctgaccgccagcatgctggccagcgcccccccccaggagcagaagcagatgctgggcgagagactgttccccctgatccaggccatgcaccccaccctggccggcaagatcaccggcatgctgctggagatcgacaacagcgagctgctgcacatgctggagagccccgagagcctgagaagcaaggtggacgaggccgtggccgtgctgcaggcccaccaggccaaggaggccgcccagaaggccgtgaacagcgccaccggcgtgcccaccgtgtag

SEQ ID NO: 12254 - DNA, 129 bp, synthetic construct
  misc_feature 1..129: note = Description of Artificial Sequence: Synthetic coding sequence
  source 1..129: mol_type = other DNA
tgaatgctggagagccccgagagcctgagaagcaaggtggacgaggccgtggccgtgctgcaggcccaccaggccaaggaggccgcccagaaggccgtgaacagcgccaccggcgtgcccaccgtgtag

SEQ ID NO: 12255 - DNA, 117 bp, synthetic construct
  misc_feature 1..117: note = Description of Artificial Sequence: Synthetic coding sequence
  source 1..117: mol_type = other DNA
atgaaccccagcgcccccagctaccccatggccagcctgtacgtgggcgacctgcaccccgacgtgaccgaggccatgctgtacgagaagttcagccccgccggccccatcctgtag

SEQ ID NO: 12256 - DNA, 357 bp, synthetic construct
  misc_feature 1..357: note = Description of Artificial Sequence: Synthetic coding sequence
  source 1..357: mol_type = other DNA
atgaaccccagcgcccccagctaccccatggccagcctgtacgtgggcgacctgcaccccgacgtgaccgaggccatgctgtacgagaagttcagccccgccggccccatcctgagcatcagagtgtgcagagacatgatcaccagaagaagcctgggctacgcctacgtgaacttccagcagcccgccgacgccgagagagccctggacaccatgaacttcgacgtgatcaagggcaagcccgtgagaatcatgtggagccagagagaccccagcctgagaaagagcggcgtgggcaacatcttcatcaagaacctggacaagagcatcgacaacaaggccctgtacgacacctag

SEQ ID NO: 12257 - DNA, 132 bp, synthetic construct
  misc_feature 1..132: note = Description of Artificial Sequence: Synthetic coding sequence
  source 1..132: mol_type = other DNA
atgaaccccagcgcccccagctaccccatggccagcctgtacgtgggcgacctgcaccccgacgtgaccgaggccatgctgtacgagaagttcagccccgccggccccatcctgagcatcagagtgtgctag

SEQ ID NO: 12258 - DNA, 510 bp, synthetic construct
  misc_feature 1..510: note = Description of Artificial Sequence: Synthetic coding sequence
  source 1..510: mol_type = other DNA
tgagccagcagccaggtgcccagagtgatgagcacccagagagtggccaacaccagcacccagaccatgggccccagacccgccgccgccgccgccgccgccacccccgccgtgagaaccgtgccccagtacaagtacgccgccggcgtgagaaacccccagcagcacctgaacgcccagccccaggtgaccatgcagcagcccgccgtgcacgtgcagggccaggagcccctgaccgccagcatgctggccagcgcccccccccaggagcagaagcagatgctgggcgagagactgttccccctgatccaggccatgcaccccaccctggccggcaagatcaccggcatgctgctggagatcgacaacagcgagctgctgcacatgctggagagccccgagagcctgagaagcaaggtggacgaggccgtggccgtgctgcaggcccaccaggccaaggaggccgcccagaaggccgtgaacagcgccaccggcgtgcccaccgtgtag

SEQ ID NO: 12259 - DNA, 186 bp, synthetic construct
  misc_feature 1..186: note = Description of Artificial Sequence: Synthetic coding sequence
  source 1..186: mol_type = other DNA
atgaaccccagcgcccccagctaccccatggccagcctgtacgtgggcgacctgcaccccgacgtgaccgaggccatgctgtacgagaagttcagccccgccggccccatcctgagcatcagagtgtgcagagacatgatcaccagaagaagcctgggctacgcctacgtgaacttccagcagtag

SEQ ID NO: 12260 - DNA, 390 bp, synthetic construct
  misc_feature 1..390: note = Description of Artificial Sequence: Synthetic coding sequence
  source 1..390: mol_type = other DNA
atgaaccccagcgcccccagctaccccatggccagcctgtacgtgggcgacctgcaccccgacgtgaccgaggccatgctgtacgagaagttcagccccgccggccccatcctgagcatcagagtgtgcagagacatgatcaccagaagaagcctgggctacgcctacgtgaacttccagcagcccgccgacgccgagagagccctggacaccatgaacttcgacgtgatcaagggcaagcccgtgagaatcatgtggagccagagagaccccagcctgagaaagagcggcgtgggcaacatcttcatcaagaacctggacaagagcatcgacaacaaggccctgtacgacaccttcagcgccttcggcaacatcctgagctgcaagtag

SEQ ID NO: 12261 - DNA, 552 bp, synthetic construct
  misc_feature 1..552: note = Description of Artificial Sequence: Synthetic coding sequence
  source 1..552: mol_type = other DNA
atcagacccgccgcccccagaccccccttcagcaccatgagacccgccagcagccaggtgcccagagtgatgagcacccagagagtggccaacaccagcacccagaccatgggccccagacccgccgccgccgccgccgccgccacccccgccgtgagaaccgtgccccagtacaagtacgccgccggcgtgagaaacccccagcagcacctgaacgcccagccccaggtgaccatgcagcagcccgccgtgcacgtgcagggccaggagcccctgaccgccagcatgctggccagcgcccccccccaggagcagaagcagatgctgggcgagagactgttccccctgatccaggccatgcaccccaccctggccggcaagatcaccggcatgctgctggagatcgacaacagcgagctgctgcacatgctggagagccccgagagcctgagaagcaaggtggacgaggccgtggccgtgctgcaggcccaccaggccaaggaggccgcccagaaggccgtgaacagcgccaccggcgtgcccaccgtgtag

SEQ ID NO: 12262 - DNA, 228 bp, synthetic construct
  misc_feature 1..228: note = Description of Artificial Sequence: Synthetic coding sequence
  source 1..228: mol_type = other DNA
atgaaccccagcgcccccagctaccccatggccagcctgtacgtgggcgacctgcaccccgacgtgaccgaggccatgctgtacgagaagttcagccccgccggccccatcctgagcatcagagtgtgcagagacatgatcaccagaagaagcctgggctacgcctacgtgaacttccagcagcccgccgacgccgagagagccctggacaccatgaacttcgactag

SEQ ID NO: 12263 - DNA, 1008 bp, synthetic construct
  misc_feature 1..1008: note = Description of Artificial Sequence: Synthetic coding sequence
  source 1..1008: mol_type = other DNA
atgagcaagagaaaggccccccaggagaccctgaacggcggcatcaccgacatgctgaccgagctggccaacttcgagaagaacgtgagccaggccatccacaagtacaacgcctacagaaaggccgccagcgtgatcgccaagtacccccacaagatcaagagcggcgccgaggccaagaagctgcccggcgtgggcaccaagatcgccgagaagatcgacgagttcctggccaccggcaagctgagaaagctggagaagatcagacaggacgacaccagcagcagcatcaacttcctgaccagagtgagcggcatcggccccagcgccgccagaaagttcgtggacgagggcatcaagaccctggaggacctgagaaagaacgaggacaagctgaaccaccaccagagaatcggcctgaagtacttcggcgacttcgagaagagaatccccagagaggagatgctgcagatgcaggacatcgtgctgaacgaggtgaagaaggtggacagcgagtacatcgccaccgtgtgcggcagcttcagaagaggcgccgagagcagcggcgacatggacgtgctgctgacccaccccagcttcaccagcgagagcaccaagcagcccaagctgctgcaccaggtggtggagcagctgcagaaggtgcacttcatcaccgacaccctgagcaagggcgagaccaagttcatgggcgtgtgccagctgcccagcaagaacgacgagaaggagtacccccacagaagaatcgacatcagactgatccccaaggaccagtactactgcggcgtgctgtacttcaccggcagcgacatcttcaacaagaacatgagagcccacgccctggagaagggcttcaccatcaacgagtacaccatcagacccctgggcgtgaccggcgtggccggcgagcccctgcccgtggacagcgagaaggacatcttcgactacatccagtggaagtacagagagcccaaggacagaagcgagtag

SEQ ID NO: 12264 - DNA, 720 bp, synthetic construct
  misc_feature 1..720: note = Description of Artificial Sequence: Synthetic coding sequence
  source 1..720: mol_type = other DNA
tgaggcgacttcgagaagagaatccccagagaggagatgctgcagatgcaggacatcgtgctgaacgaggtgaagaaggtggacagcgagtacatcgccaccgtgtgcggcagcttcagaagaggcgccgagagcagcggcgacatggacgtgctgctgacccaccccagcttcaccagcgagagcaccaagcagcccaagctgctgcaccaggtggtggagcagctgcagaaggtgcacttcatcaccgacaccctgagcaagggcgagaccaagttcatgggcgtgtgccagctgcccagcaagaacgacgagaaggagtacccccacagaagaatcgacatcagactgatccccaaggaccagtactactgcggcgtgctgtacttcaccggcagcgacatcttcaacaagaacatgagagcccacgccctggagaagggcttcaccatcaacgagtacaccatcagacccctgggcgtgaccgtgctgcaggccaccagagaggacctgatgcacaacatgctgctgggcccccagctgaaggccatcaaggagctgcaggagaacccctgccagtggatcgtgaagaagaccagcctgatcaccagcagcggcaacaccggcaaccccagaaccggcgccaacgaggcctgcatcctgcccggcagacacaaccccatcggcgtgctgatctacttcctgaccttcgccatgtag

SEQ ID NO: 12265 - DNA, 843 bp, synthetic construct
  misc_feature 1..843: note = Description of Artificial Sequence: Synthetic coding sequence
  source 1..843: mol_type = other DNA
atgagcaagagaaaggccccccaggagaccctgaacggcggcatcaccgacatgctgaccgagctggccaacttcgagaagaacgtgagccaggccatccacaagtacaacgcctacagaaaggccgccagcgtgatcgccaagtacccccacaagatcaagagcggcgccgaggccaagaagctgcccggcgtgggcaccaagatcgccgagaagatcgacgagttcctggccaccggcaagctgagaaagctggagaagatcagacaggacgacaccagcagcagcatcaacttcctgaccagagtgagcggcatcggccccagcgccgccagaaagttcgtggacgagggcatcaagaccctggagggcagccagctggacagctgccccgtgaagggccacctgaacggcaccgagagcctgctggacctgatctgggacgtgatgaccatcctgaagctgaagaacgccgacctgagaaagaacgaggacaagctgaaccaccaccagagaatcggcctgaagtacttcggcgacttcgagaagagaatccccagagaggagatgctgcagatgcaggacatcgtgctgaacgaggtgaagaaggtggacagcgagtacatcgccaccgtgtgcggcagcttcagaagaggcgccgagagcagcggcgacatggacgtgctgctgacccaccccagcttcaccagcgagagcaccaagcagcccaagctgctgcaccaggtggtggagcagctgcagaaggtgcacttcatcaccgacaccctgagcaagggcgagaccaagttcatgggcgtgtgccagctgcccagcaagaactag

SEQ ID NO: 12266 - DNA, 714 bp, synthetic construct
  misc_feature 1..714: note = Description of Artificial Sequence: Synthetic coding sequence
  source 1..714: mol_type = other DNA
tgagagaagatcgacgagttcctggccaccggcaagctgagaaagctggagaagatcagacaggacgacaccagcagcagcatcaacttcctgaccagagtgagcggcatcggccccagcgccgccagaaagttcgtggacgagggcatcaagaccctggaggacctgagaaagaacgaggacaagctgaaccaccaccagagaatcggcctgaagtacttcggcgacttcgagaagagaatccccagagaggagatgctgcagatgcaggacatcgtgctgaacgaggtgaagaaggtggacagcgagtacatcgccaccgtgtgcggcagcttcagaagaggcgccgagagcagcggcgacatggacgtgctgctgacccaccccagcttcaccagcgagagcaccaagcagggcgtgtgccagctgcccagcaagaacgacgagaaggagtacccccacagaagaatcgacatcagactgatccccaaggaccagtactactgcggcgtgctgtacttcaccggcagcgacatcttcaacaagaacatgagagcccacgccctggagaagggcttcaccatcaacgagtacaccatcagacccctgggcgtgaccggcgtggccggcgagcccctgcccgtggacagcgagaaggacatcttcgactacatccagtggaagtacagagagcccaaggacagaagcgagtag

SEQ ID NO: 12267 - DNA, 546 bp, synthetic construct
  misc_feature 1..546: note = Description of Artificial Sequence: Synthetic coding sequence
  source 1..546: mol_type = other DNA
atgctgcagatgcaggacatcgtgctgaacgaggtgaagaaggtggacagcgagtacatcgccaccgtgtgcggcagcttcagaagaggcgccgagagcagcggcgacatggacgtgctgctgacccaccccagcttcaccagcgagagcaccaagcagcccaagctgctgcaccaggtggtggagcagctgcagaaggtgcacttcatcaccgacaccctgagcaagggcgagaccaagttcatgggcgtgtgccagctgcccagcaagaacgacgagaaggagtacccccacagaagaatcgacatcagactgatccccaaggaccagtactactgcggcgtgctgtacttcaccggcagcgacatcttcaacaagaacatgagagcccacgccctggagaagggcttcaccatcaacgagtacaccatcagacccctgggcgtgaccggcgtggccggcgagcccctgcccgtggacagcgagaaggacatcttcgactacatccagtggaagtacagagagcccaaggacagaagcgagtag

SEQ ID NO: 12268 - DNA, 1728 bp, synthetic construct
  misc_feature 1..1728: note = Description of Artificial Sequence: Synthetic coding sequence
  source 1..1728: mol_type = other DNA
atggaccccagaggcatcctgaaggccttccccaagagacagaagatccacgccgacgccagcagcaaggtgctggccaagatccccagaagagaggagggcgaggaggccgaggagtggctgagcagcctgagagcccacgtggtgagaaccggcatcggcagagccagagccgagctgttcgagaagcagatcgtgcagcacggcggccagctgtgccccgcccagggccccggcgtgacccacatcgtggtggacgagggcatggactacgagagagccctgagactgctgagactgccccagctgccccccggcgcccagctggtgaagagcgcctggctgagcctgtgcctgcaggagagaagactggtggacgtggccggcttcagcatcttcatccccagcagatacctggaccacccccagcccagcaaggccgagcaggacgccagcatcccccccggcacccacgaggccctgctgcagaccgccctgagccccccccccccccccaccagacccgtgagccccccccagaaggccaaggaggcccccaacacccaggcccagcccatcagcgacgacgaggccagcgacggcgaggagacccaggtgagcgccgccgacctggaggccctgatcagcggccactaccccaccagcctggagggcgactgcgagcccagccccgcccccgccgtgctggacaagtgggtgtgcgcccagcccagcagccagaaggccaccaaccacaacctgcacatcaccgagaagctggaggtgctggccaaggcctacagcgtgcagggcgacaagtggagagccctgggctacgccaaggccatcaacgccctgaagagcttccacaagcccgtgaccagctaccaggaggcctgcagcatccccggcatcggcaagagaatggccgagaagatcatcgagatcctggagagcggccacctgagaaagctggaccacatcagcgagagcgtgcccgtgctggagctgttcagcaacatctggggcgccggcaccaagaccgcccagatgtggtaccagcagggcttcagaagcctggaggacatcagaagccaggccagcctgaccacccagcaggccatcggcctgaagcactacagcgacttcctggagagaatgcccagagaggaggccaccgagatcgagcagaccgtgcagaaggccgcccaggccttcaacagcggcctgctgtgcgtggcctgcggcagctacagaagaggcaaggccacctgcggcgacgtggacgtgctgatcacccaccccgacggcagaagccacagaggcatcttcagcagactgctggacagcctgagacaggagggcttcctgaccgacgacctggtgagccaggaggagaacggccagcagcagaagtacctgggcgtgtgcagactgcccggccccggcagaagacacagaagactggacatcatcgtggtgccctacagcgagttcgcctgcgccctgctgtacttcaccggcagcgcccacttcaacagaagcatgagagccctggccaagaccaagggcatgagcctgagcgagcacgccctgagcaccgccgtggtgagaaacacccacggctgcaaggtgggccccggcagagtgctgcccacccccaccgagaaggacgtgttcagactgctgggcctgccctacagagagcccgccgagagagactggtag

SEQ ID NO: 12269 - DNA, 897 bp, synthetic construct
  misc_feature 1..897: note = Description of Artificial Sequence: Synthetic coding sequence
  source 1..897: mol_type = other DNA
atgcaccaccagaagtacctgcagagattcctgggcggcaagagagagaagaagcagaaggaggcctgcagcatccccggcatcggcaagagaatggccgagaagatcatcgagatcctggagagcggccacctgagaaagctggaccacatcagcgagagcgtgcccgtgctggagctgttcagcaacatctggggcgccggcaccaagaccgcccagatgtggtaccagcagggcttcagaagcctggaggacatcagaagccaggccagcctgaccacccagcaggccatcggcctgaagcactacagcgacttcctggagagaatgcccagagaggaggccaccgagatcgagcagaccgtgcagaaggccgcccaggccttcaacagcggcctgctgtgcgtggcctgcggcagctacagaagaggcaaggccacctgcggcgacgtggacgtgctgatcacccaccccgacggcagaagccacagaggcatcttcagcagactgctggacagcctgagacaggagggcttcctgaccgacgacctggtgagccaggaggagaacggccagcagcagaagtacctgggcgtgtgcagactgcccggccccggcagaagacacagaagactggacatcatcgtggtgccctacagcgagttcgcctgcgccctgctgtacttcaccggcagcgcccacttcaacagaagcatgagagccctggccaagaccaagggcatgagcctgagcgagcacgccctgagcaccgccgtggtgagaaacacccacggctgcaaggtgggccccggcagagtgctgcccacccccaccgagaaggacgtgttcagactgctgggcctgccctacagagagcccgccgagagagactggtag

SEQ ID NO: 12270 - DNA, 1548 bp, synthetic construct
  misc_feature 1..1548: note = Description of Artificial Sequence: Synthetic coding sequence
  source 1..1548: mol_type = other DNA
atggaccccagaggcatcctgaaggccttccccaagagacagaagatccacgccgacgccagcagcaaggtgctggccaagatccccagaagagaggagggcgaggaggccgaggagtggctgagcagcctgagagcccacgtggtgagaaccggcatcggcagagccagagccgagctgttcgagaagcagatcgtgcagcacggcggccagctgtgccccgcccagggccccggcgtgacccacatcgtggtggacgagggcatggactacgagagagccctgagactgctgagactgccccagctgccccccggcgcccagctggtgaagagcgcctggctgagcctgtgcctgcaggagagaagactggtggacgtggccggcttcagcatcttcatccccagcagatacctggaccacccccagcccagcaaggccgagcaggacgccagcatcccccccggcacccacgaggccctgctgcagaccgccctgagccccccccccccccccaccagacccgtgagccccccccagaaggccaaggaggcccccaacacccaggcccagcccatcagcgacgacgaggccagcgacggcgaggagacccaggtgagcgccgccgacctggaggccctgatcagcggccactaccccaccagcctggagggcgactgcgagcccagccccgcccccgccgtgctggacaagtgggtgtgcgcccagcccagcagccagaaggccaccaaccacaacctgcacatcaccgagaagctggaggtgctggccaaggcctacagcgtgcagggcgacaagtggagagccctgggctacgccaaggccatcaacgccctgaagagcttccacaagcccgtgaccagctaccaggaggcctgcagcatccccggcatcggcaagagaatggccgagaagatcatcgagatcctggagagcggccacctgagaaagctggaccacatcagcgagagcgtgcccgtgctggagctgttcagcaacatctggggcgccggcaccaagaccgcccagatgtggtaccagcagggcttcagaagcctggaggacatcagaagccaggccagcctgaccacccagcaggccatcggcctgaagcactacagcgacttcctggagagaatgcccagagaggaggccaccgagatcgagcagaccgtgcagaaggccgcccaggccttcaacagcggcctgctgtgcgtggcctgcggcagctacagaagaggcaaggccacctgcggcgacgtggacgtgctgatcacccaccccgacggcagaagccacagaggcatcttcagcagactgctggacagcctgagacaggagggcttcctgaccgacgacctggtgagccaggaggagaacggccagcagcagaagtacctgggcgtgtgcagactgcccggccccggcagaagacacagaagactggacatcatcgtggtgccctacagcgagttcgcctgcgccctgcagggcggcgcctggcccagcgccgcccacagccactag

SEQ ID NO: 12271 - DNA, 903 bp, synthetic construct
  misc_feature 1..903: note = Description of Artificial Sequence: Synthetic coding sequence
  source 1..903: mol_type = other DNA
atgctgatgcaccaccagaagtacctgcagagattcctgggcggcaagagagagaagaagcagaaggaggcctgcagcatccccggcatcggcaagagaatggccgagaagatcatcgagatcctggagagcggccacctgagaaagctggaccacatcagcgagagcgtgcccgtgctggagctgttcagcaacatctggggcgccggcaccaagaccgcccagatgtggtaccagcagggcttcagaagcctggaggacatcagaagccaggccagcctgaccacccagcaggccatcggcctgaagcactacagcgacttcctggagagaatgcccagagaggaggccaccgagatcgagcagaccgtgcagaaggccgcccaggccttcaacagcggcctgctgtgcgtggcctgcggcagctacagaagaggcaaggccacctgcggcgacgtggacgtgctgatcacccaccccgacggcagaagccacagaggcatcttcagcagactgctggacagcctgagacaggagggcttcctgaccgacgacctggtgagccaggaggagaacggccagcagcagaagtacctgggcgtgtgcagactgcccggccccggcagaagacacagaagactggacatcatcgtggtgccctacagcgagttcgcctgcgccctgctgtacttcaccggcagcgcccacttcaacagaagcatgagagccctggccaagaccaagggcatgagcctgagcgagcacgccctgagcaccgccgtggtgagaaacacccacggctgcaaggtgggccccggcagagtgctgcccacccccaccgagaaggacgtgttcagactgctgggcctgccctacagagagcccgccgagagagactggtag

SEQ ID NO: 12272 - DNA, 1728 bp, synthetic construct; identical to SEQ ID NO: 12268
  misc_feature 1..1728: note = Description of Artificial Sequence: Synthetic coding sequence
  source 1..1728: mol_type = other DNA

SEQ ID NO: 12273 - DNA, 516 bp, synthetic construct
  misc_feature 1..516: note = Description of Artificial Sequence: Synthetic coding sequence
  source 1..516: mol_type = other DNA
atggactacgagagagccctgagactgctgagactgccccagctgccccccggcgcccagctggtgaagagcgcctggctgagcctgtgcctgcaggagagaagactggtggacgtggccggcttcagcatcttcatccccagcagccccagcctgatgatgaagcccgtgatgggcaagaagcccagactggtgcagctgatctggaagcccagcagcgtggccaccacccccccccccctgagagagatcgtgagcctggcccagcccctgctgagctggatcagcggcagcgtgcacagcccccaggccagaagaagacccatcaccaccagcatcagccagagaagctggaagttctggcccaagcccaccgtgttcagagagaccagcggcggcccctgggccatgcccagacccagcatgcccagcagagccagcatcagcctgagccccagaaccagaagacccgccgtgagcctgggcctgggcagcggctggctgagaaagagctag

SEQ ID NO: 12274 - DNA, 747 bp, synthetic construct
  misc_feature 1..747: note = Description of Artificial Sequence: Synthetic coding sequence
  source 1..747: mol_type = other DNA
atggaggccctgtgcgtgtgcagcctgatgcccctgcactggagctggatcctgaccgccagccacctggccgccttcttccagggcttcagaagcctggaggacatcagaagccaggccagcctgaccacccagcaggccatcggcctgaagcactacagcgacttcctggagagaatgcccagagaggaggccaccgagatcgagcagaccgtgcagaaggccgcccaggccttcaacagcggcctgctgtgcgtggcctgcggcagctacagaagaggcaaggccacctgcggcgacgtggacgtgctgatcacccaccccgacggcagaagccacagaggcatcttcagcagactgctggacagcctgagacaggagggcttcctgaccgacgacctggtgagccaggaggagaacggccagcagcagaagtacctgggcgtgtgcagactgcccggccccggcagaagacacagaagactggacatcatcgtggtgccctacagcgagttcgcctgcgccctgctgtacttcaccggcagcgcccacttcaacagaagcatgagagccctggccaagaccaagggcatgagcctgagcgagcacgccctgagcaccgccgtggtgagaaacacccacggctgcaaggtgggccccggcagagtgctgcccacccccaccgagaaggacgtgttcagactgctgggcctgccctacagagagcccgccgagagagactggtag

SEQ ID NO: 12275 - DNA, 1728 bp, synthetic construct; identical to SEQ ID NO: 12268
  misc_feature 1..1728: note = Description of Artificial Sequence: Synthetic coding sequence
  source 1..1728: mol_type = other DNA

SEQ ID NO: 12276 - DNA, 1464 bp, synthetic construct
  misc_feature 1..1464: note = Description of Artificial Sequence: Synthetic coding sequence
  source 1..1464: mol_type = other DNA
atggactacgagagagccctgagactgctgagactgccccagctgccccccggcgcccagctggtgaagagcgcctggctgagcctgtgcctgcaggagagaagactggtggacgtggccggcttcagcatcttcatccccagcagatacctggaccacccccagcccagcaaggccgagcaggacgccagcatcccccccggcacccacgaggccctgctgcagaccgccctgagccccccccccccccccaccagacccgtgagccccccccagaaggccaaggaggcccccaacacccaggcccagcccatcagcgacgacgaggccagcgacggcgaggagacccaggtgagcgccgccgacctggaggccctgatcagcggccactaccccaccagcctggagggcgactgcgagcccagccccgcccccgccgtgctggacaagtgggtgtgcgcccagcccagcagccagaaggccaccaaccacaacctgcacatcaccgagaagctggaggtgctggccaaggcctacagcgtgcagggcgacaagtggagagccctgggctacgccaaggccatcaacgccctgaagagcttccacaagcccgtgaccagctaccaggaggcctgcagcatccccggcatcggcaagagaatggccgagaagatcatcgagatcctggagagcggccacctgagaaagctggaccacatcagcgagagcgtgcccgtgctggagctgttcagcaacatctggggcgccggcaccaagaccgcccagatgtggtaccagcagggcttcagaagcctggaggacatcagaagccaggccagcctgaccacccagcaggccatcggcctgaagcactacagcgacttcctggagagaatgcccagagaggaggccaccgagatcgagcagaccgtgcagaaggccgcccaggccttcaacagcggcctgctgtgcgtggcctgcggcagctacagaagaggcaaggccacctgcggcgacgtggacgtgctgatcacccaccccgacggcagaagccacagaggcatcttcagcagactgctggacagcctgagacaggagggcttcctgaccgacgacctggtgagccaggaggagaacggccagcagcagaagtacctgggcgtgtgcagactgcccggccccggcagaagacacagaagactggacatcatcgtggtgccctacagcgagttcgcctgcgccctgctgtacttcaccggcagcgcccacttcaacagaagcatgagagccctggccaagaccaagggcatgagcctgagcgagcacgccctgagcaccgccgtggtgagaaacacccacggctgcaaggtgggccccggcagagtgctgcccacccccaccgagaaggacgtgttcagactgctgggcctgccctacagagagcccgccgagagagactggtag

SEQ ID NO: 12277 - DNA, 1548 bp, synthetic construct; identical to SEQ ID NO: 12270
  misc_feature 1..1548: note = Description of Artificial Sequence: Synthetic coding sequence
  source 1..1548: mol_type = other DNA

SEQ ID NO: 12278 - DNA, 810 bp, synthetic construct
  misc_feature 1..810: note = Description of Artificial Sequence: Synthetic coding sequence
  source 1..810: mol_type = other DNA
atggaccccagaggcatcctgaaggccttccccaagagacagaagatccacgccgacgccagcagcaaggtgctggccaagatccccagaagagaggagggcgaggaggccgaggagtggctgagcagcctgagagcccacgtggtgagaaccggcatcggcagagccagagccgagctgttcgagaagcagatcgtgcagcacggcggccagctgtgccccgcccagggccccggcgtgacccacatcgtggtggacgagggcatggactacgagagagccctgagactgctgagactgccccagctgccccccggcgcccagctggtgaagagcgcctggctgagcctgtgcctgcaggagagaagactggtggacgtggccggcttcagcatcttcatccccagcagatacctggaccacccccagcccagcaaggccgagcaggacgccagcatcccccccggcacccacgaggccctgctgcagaccgccctgagccccccccccccccccaccagacccgtgagccccccccagaaggccaaggaggcccccaacacccaggcccagcccatcagcgacgacgaggccagcgacggcgaggagacccaggtgagcgccgccgacctggaggccctgatcagcggccactaccccaccagcctggagggcgactgcgagcccagccccgcccccgccgtgctggacaagtgggtgtgcgcccagcccagcagccagaaggccaccaaccacaacctgcacatcaccgagaagctggaggtgctggccaaggcctacagcgtgtag

SEQ ID NO: 12279 - DNA, 1413 bp, synthetic construct
  misc_feature 1..1413: note = Description of Artificial Sequence: Synthetic coding sequence
  source 1..1413: mol_type = other DNA
atggaccccagaggcatcctgaaggccttccccaagagacagaagatccacgccgacgccagcagcaaggtgctggccaagatccccagaagagaggagggcgaggaggccgaggagtggctgagcagcctgagagcccacgtggtgagaaccggcatcggcagagccagagccgagctgttcgagaagcagatcgtgcagcacggcggccagctgtgccccgcccagggccccggcgtgacccacatcgtggtggacgagggcatggactacgagagagccctgagactgctgagactgccccagctgccccccggcgcccagctggtgaagagcgcctggctgagcctgtgcctgcaggagagaagactggtggacgtggccggcttcagcatcttcatccccagcagatacctggaccacccccagcccagcaaggccgagcaggacgccagcatcccccccggcacccacgaggccctgctgcagaccgccctgagccccccccccccccccaccagacccgtgagccccccccagaaggccaaggaggcccccaacacccaggcccagcccatcagcgacgacgaggccagcgacggcgaggagacccaggaggcctgcagcatccccggcatcggcaagagaatggccgagaagatcatcgagatcctggagagcggccacctgagaaagctggaccacatcagcgagagcgtgcccgtgctggagctgttcagcaacatctggggcgccggcaccaagaccgcccagatgtggtaccagcagggcttcagaagcctggaggacatcagaagccaggccagcctgaccacccagcaggccatcggcctgaagcactacagcgacttcctggagagaatgcccagagaggaggccaccgagatcgagcagaccgtgcagaaggccgcccaggccttcaacagcggcctgctgtgcgtggcctgcggcagctacagaagaggcaaggccacctgcggcgacgtggacgtgctgatcacccaccccgacggcagaagccacagaggcatcttcagcagactgctggacagcctgagacaggaggccgtgcccagcgtgggccccggcttcctgaccgacgacctggtgagccaggaggagaacggccagcagcagaagtacctgggcgtgtgcagactgcccggccccggcagaagacacagaagactggacatcatcgtggtgccctacagcgagttcgcctgcgccctgctgtacttcaccggcagcgcccacttcaacagaagcatgagagccctggccaagaccaagggcatgagcctgagcgagcacgccctgagcaccgccgtggtgagaaacacccacggctgcaaggtgggccccggcagagtgctgcccacccccacctag

SEQ ID NO: 12280 - DNA, 1005 bp, synthetic construct
  misc_feature 1..1005: note = Description of Artificial Sequence: Synthetic coding sequence
  source 1..1005: mol_type = other DNA
atggaccccagaggcatcctgaaggccttccccaagagacagaagatccacgccgacgccagcagcaagcccagctgcgccagcgccctgagatgcctgtgccccgagagcgacatcggcgccgacagcgcctgccccggccccgccgagtggctgagcagcctgagagcccacgtggtgagaaccggcatcggcagagccagagccgagctgttcgagaagcagatcgtgcagcacggcggccagctgtgccccgcccagggccccggcgtgacccacatcgtggtggacgagggcatggactacgagagagccctgagactgctgagactgccccagctgccccccggcgcccagctggtgaagagcgcctggctgagcctgtgcctgcaggagagaagactggtggacgtggccggcttcagcatcttcatccccagcagatacctggaccacccccagcccagcaaggccgagcaggacgccagcatcccccccggcacccacgaggccctgctgcagaccgccctgagccccccccccccccccaccagacccgtgagccccccccagaaggccaaggaggcccccaacacccaggcccagcccatcagcgacgacgaggccagcgacggcgaggagacccaggtgagcgccgccgacctggaggccctgatcagcggccactaccccaccagcctggagggcgactgcgagcccagccccgcccccgccgtgctggacaagtgggtgtgcgcccagcccagcagccagaaggccaccaaccacaacctgcacatcaccgagaagctggaggtgctggccaaggcctacagcgtgcagggcgacaagtggagagccctgggctacgccaaggccatcaacgccctgaagagcttccacaagcccgtgaccagctaccaggaggcctgcagcatccccggcatcggcaagagaatggccgagaagatcatcgagatcctggagagcggccacctgagatag

SEQ ID NO: 12281 - DNA, 657 bp, synthetic construct
  misc_feature 1..657: note = Description of Artificial Sequence: Synthetic coding sequence
  source 1..657: mol_type = other DNA
atgcaccaccagaagtacctgcagagattcctgggcggcaagagagagaagaagcagaaggaggcctgcagcatccccggcatcggcaagagaatggccgagaagatcatcgagatcctggagagcggccacctgagaaagctggaccacatcagcgagagcgtgcccgtgctggagctgttcagcaacatctggggcgccggcaccaagaccgcccagatgtggtaccagcagggcttcagaagcctggaggacatcagaagccaggccagcctgaccacccagcaggccatcggcctgaagcactacagcgacttcctggagagaatgcccagagaggaggccaccgagatcgagcagaccgtgcagaaggccgcccaggccttcaacagcggcctgctgtgcgtggcctgcggcagctacagaagaggcaaggccacctgcggcgacgtggacgtgctgatcacccaccccgacggcagaagccacagaggcatcttcagcagactgctggacagcctgagacaggagggcttcctgaccgacgacctggtgagccaggaggagaacggccagcagcagaagtacctgggcgtgtgcagactgcccggccccggcagaagacacagaagactggacatcatcgtggtgccctag

SEQ ID NO: 12282 - DNA, 567 bp, synthetic construct
  misc_feature 1..567: note = Description of Artificial Sequence: Synthetic coding sequence
  source 1..567: mol_type = other DNA
atggaccccagaggcatcctgaaggccttccccaagagacagaagatccacgccgacgccagcagcaaggtgctggccaagatccccagaagagaggagggcgaggaggccgaggagtggctgagcagcctgagagcccacgtggtgagaaccggcatcggcagagccagagccgagctgttcgagaagcagatcgtgcagcacggcggccagctgtgccccgcccagggccccggcgtgacccacatcgtggtggacgagggcatggactacgagagagccctgagactgctgagactgccccagctgccccccggcgcccagctggtgaagagcgcctggctgagcctgtgcctgcaggagagaagactggtggacgtggccggcttcagcatcttcatccccagcagatacctggaccacccccagcccagcaaggccgagcaggacgccagcatcccccccggcacccacgaggccctgctgcagaccgccctgagccccccccccccccccaccagacccgtgagccccccccagaaggccaaggaggcccccaacacctag

SEQ ID NO: 12283 - DNA, 516 bp, synthetic construct; identical to SEQ ID NO: 12273
  misc_feature 1..516: note = Description of Artificial Sequence: Synthetic coding sequence
  source 1..516: mol_type = other DNA

SEQ ID NO: 12284 - DNA, 459 bp, synthetic construct
  misc_feature 1..459: note = Description of Artificial Sequence: Synthetic coding sequence
  source 1..459: mol_type = other DNA
atggactacgagagagccctgagactgctgagactgccccagctgccccccggcgcccagctggtgaagagcgcctggctgagcctgtgcctgcaggagagaagactggtggacgtggccggcttcagcatcttcatccccagcagccccagcctgatgatgaagcccgtgatgggcaagaagcccagactggtgcagctgatctggaagcccagcagcgtggccaccacccccccccccctgagagagatcgtgagcctggcccagcccctgctgagctggatcagcggcagcgtgcacagcccccaggccagaagaagacccatcaccaccagcatcagccagagaagctggaagttctggcccaagcccaccgtgttcagagagaccagcggcggcccctgggccatgcccagacccagcatgcccagcagagccagcatcagcctgagcccctag

SEQ ID NO: 12285 - DNA, 939 bp, synthetic construct
  misc_feature 1..939: note = Description of Artificial Sequence: Synthetic coding sequence
  source 1..939: mol_type = other DNA
atgcaccaccagaagtacctgcagagattcctgggcggcaagagagagaagaagcagaagcccatcagcgacgacgaggccagcgacggcgaggagacccaggaggcctgcagcatccccggcatcggcaagagaatggccgagaagatcatcgagatcctggagagcggccacctgagaaagctggaccacatcagcgagagcgtgcccgtgctggagctgttcagcaacatctggggcgccggcaccaagaccgcccagatgtggtaccagcagggcttcagaagcctggaggacatcagaagccaggccagcctgaccacccagcaggccatcggcctgaagcactacagcgacttcctggagagaatgcccagagaggaggccaccgagatcgagcagaccgtgcagaaggccgcccaggccttcaacagcggcctgctgtgcgtggcctgcggcagctacagaagaggcaaggccacctgcggcgacgtggacgtgctgatcacccaccccgacggcagaagccacagaggcatcttcagcagactgctggacagcctgagacaggagggcttcctgaccgacgacctggtgagccaggaggagaacggccagcagcagaagtacctgggcgtgtgcagactgcccggccccggcagaagacacagaagactggacatcatcgtggtgccctacagcgagttcgcctgcgccctgctgtacttcaccggcagcgcccacttcaacagaagcatgagagccctggccaagaccaagggcatgagcctgagcgagcacgccctgagcaccgccgtggtgagaaacacccacggctgcaaggtgggccccggcagagtgctgcccacccccaccgagaaggacgtgttcagactgctgggcctgccctacagagagcccgccgagagagactggtag

SEQ ID NO: 12286 - DNA, 1401 bp, synthetic construct
  misc_feature 1..1401: note = Description of Artificial Sequence: Synthetic coding sequence
  source 1..1401: mol_type = other DNA
atggccgaccagctgtacctggagaacatcgacgagttcgtgaccgaccagaacaagatcgtgacctacaagtggctgagctacaccctgggcgtgcacgtgaaccaggccaagcagatgctgtacgactacgtggagagaaagagaaaggagaacagcggcgcccagctgcacgtgacctacctggtgagcggcagcctgatccagaacggccacagctgccacaaggtggccgtggtgagagaggacaagctggaggccgtgaagagcaagctggccgtgaccgccagcatccacgtgtacagcatccagaaggccatgctgaaggacagcggccccctgttcaacaccgactacgacatcctgaagagcaacctgcagaactgcagcaagttcagcgccatccagtgcgccgccgccgtgcccagagcccccgccgagagcagcagcagcagcaagaagttcgagcagagccacctgcacatgagcagcgagacccaggccaacaacgagctgaccaccaacggccacggcccccccgccagcaagcaggtgagccagcagcccaagggcatcatgggcatgttcgccagcaaggccgccgccaagacccaggagaccaacaaggagaccaagaccgaggccaaggaggtgaccaacgccagcgccgccggcaacaaggcccccggcaagggcaacatgatgagcaacttcttcggcaaggccgccatgaacaagttcaaggtgaacctggacagcgagcaggccgtgaaggaggagaagatcgtggagcagcccaccgtgagcgtgaccgagcccaagctggccacccccgccggcctgaagaagagcagcaagaaggccgagcccgtgaaggtgctgcagaaggagaagaagagaggcaagagagtggccctgagcgacgacgagaccaaggagaccgagaacatgagaaagaagagaagaagaatcaagctgcccgagagcgacagcagcgaggacgaggtgttccccgacagccccggcgcctacgaggccgagagccccagccccccccccccccccagcccccccctggagcccgtgcccaagaccgagcccgagccccccagcgtgaagagcagcagcggcgagaacaagagaaagagaaagagagtgctgaagagcaagacctacctggacggcgagggctgcatcgtgaccgagaaggtgtacgagagcgagagctgcaccgacagcgaggaggagctgaacatgaagaccagcagcgtgcacagaccccccgccatgaccgtgaagaaggagcccagagaggagagaaagggccccaagaagggcaccgccgccctgggcaaggccaacagacaggtgagcatcaccggcttcttccagagaaagtag

SEQ ID NO: 12287 - DNA, 1284 bp, synthetic construct
  misc_feature 1..1284: note = Description of Artificial Sequence: Synthetic coding sequence
  source 1..1284: mol_type = other DNA
atgctgtacgactacgtggagagaaagagaaaggagaacagcggcgcccagctgcacgtgacctacctggtgagcggcagcctgatccagaacggccacagctgccacaaggtggccgtggtgagagaggacaagctggaggccgtgaagagcaagctggccgtgaccgccagcatccacgtgtacagcatccagaaggccatgctgaaggacagcggccccctgttcaacaccgactacgacatcctgaagagcaacctgcagaactgcagcaagttcagcgccatccagtgcgccgccgccgtgcccagagcccccgccgagagcagcagcagcagcaagaagttcgagcagagccacctgcacatgagcagcgagacccaggccaacaacgagctgaccaccaacggccacggcccccccgccagcaagcaggtgagccagcagcccaagggcatcatgggcatgttcgccagcaaggccgccgccaagacccaggagaccaacaaggagaccaagaccgaggccaaggaggtgaccaacgccagcgccgccggcaacaaggcccccggcaagggcaacatgatgagcaacttcttcggcaaggccgccatgaacaagttcaaggtgaacctggacagcgagcaggccgtgaaggaggagaagatcgtggagcagcccaccgtgagcgtgaccgagcccaagctggccacccccgccggcctgaagaagagcagcaagaaggccgagcccgtgaaggtgctgcagaaggagaagaagagaggcaagagagtggccctgagcgacgacgagaccaaggagaccgagaacatgagaaagaagagaagaagaatcaagctgcccgagagcgacagcagcgaggacgaggtgttccccgacagccccggcgcctacgaggccgagagccccagccccccccccccccccagcccccccctggagcccgtgcccaagaccgagcccgagccccccagcgtgaagagcagcagcggcgagaacaagagaaagagaaagagagtgctgaagagcaagacctacctggacggcgagggctgcatcgtgaccgagaaggtgtacgagagcgagagctgcaccgacagcgaggaggagctgaacatgaagaccagcagcgtgcacagaccccccgccatgaccgtgaagaaggagcccagagaggagagaaagggccccaagaagggcaccgccgccctgggcaaggccaacagacaggtgagcatcaccggcttcttccagagaaagtag

SEQ ID NO: 12288 - DNA, 1083 bp, synthetic construct
  misc_feature 1..1083: note = Description of Artificial Sequence: Synthetic coding sequence
  source 1..1083: mol_type = other DNA
atgctgaaggacagcggccccctgttcaacaccgactacgacatcctgaagagcaacctgcagaactgcagcaagttcagcgccatccagtgcgccgccgccgtgcccagagcccccgccgagagcagcagcagcagcaagaagttcgagcagagccacctgcacatgagcagcgagacccaggccaacaacgagctgaccaccaacggccacggcccccccgccagcaagcaggtgagccagcagcccaagggcatcatgggcatgttcgccagcaaggccgccgccaagacccaggagaccaacaaggagaccaagaccgaggccaaggaggtgaccaacgccagcgccgccggcaacaaggcccccggcaagggcaacatgatgagcaacttcttcggcaaggccgccatgaacaagttcaaggtgaacctggacagcgagcaggccgtgaaggaggagaagatcgtggagcagcccaccgtgagcgtgaccgagcccaagctggccacccccgccggcctgaagaagagcagcaagaaggccgagcccgtgaaggtgctgcagaaggagaagaagagaggcaagagagtggccctgagcgacgacgagaccaaggagaccgagaacatgagaaagaagagaagaagaatcaagctgcccgagagcgacagcagcgaggacgaggtgttccccgacagccccggcgcctacgaggccgagagccccagccccccccccccccccagcccccccctggagcccgtgcccaagaccgagcccgagccccccagcgtgaagagcagcagcggcgagaacaagagaaagagaaagagagtgctgaagagcaagacctacctggacggcgagggctgcatcgtgaccgagaaggtgtacgagagcgagagctgcaccgacagcgaggaggagctgaacatgaagaccagcagcgtgcacagaccccccgccatgaccgtgaagaaggagcccagagaggagagaaagggccccaagaagggcaccgccgccctgggcaaggccaacagacaggtgagcatcaccggcttcttccagagaaagtag

SEQ ID NO: 12289 - DNA, 804 bp, synthetic construct
  misc_feature 1..804: note = Description of Artificial Sequence: Synthetic coding sequence
  source 1..804: mol_type = other DNA
atggccgaccagctgtacctggagaacatcgacgagttcgtgaccgaccagaacaagatcgtgacctacaagtggctgagctacaccctgggcgtgcacgtgaaccaggccaagcagatgctgtacgactacgtggagagaaagagaaaggagaacagcggcgcccagctgcacgtgacctacctggtgagcggcagcctgatccagaacggccacagctgccacaaggtggccgtggtgagagaggacaagctggaggccgtgaagagcaagctggccgtgaccgccagcatccacgtgtacagcatccagaaggccatgctgaaggacagcggccccctgttcaacaccgactacgacatcctgaagagcaacctgcagaactgcagcaagttcagcgccatccagtgcgccgccgccgtgcccagagcccccgccgagagcagcagcagcagcaagaagttcgagcagagccacctgcacatgagcagcgagacccaggccaacaacgagctgaccaccaacggccacggcccccccgccagcaagcaggtgagccagcagcccaagggcatcatgggcatgttcgccagcaaggccgccgccaagacccaggagaccaacaaggagaccaagaccgaggccaaggaggtgaccaacgccagcgccgccggcaacaaggcccccggcaagggcaacatgatgagcaacttcttcggcaaggccgccatgaacaagttcaaggtgaacctggacagcgagcaggccgtgaaggaggagaagatcaaggagaagaagagatag

SEQ ID NO: 12290 - DNA, 1566 bp, synthetic construct
  misc_feature 1..1566: note = Description of Artificial Sequence: Synthetic coding sequence
  source 1..1566: mol_type = other DNA
atgggcgaggtggaggcccccggcagactgtggctggagagcccccccggcggcgccccccccatcttcctgcccagcgacggccaggccctggtgctgggcagaggccccctgacccaggtgaccgacagaaagtgcagcagaacccaggtggagctggtggccgaccccgagaccagaaccgtggccgtgaagcagctgggcgtgaaccccagcaccaccggcacccaggagctgaagcccggcctggagggcagcctgggcgtgggcgacaccctgtacctggtgaacggcctgcaccccctgaccctgagatgggaggagaccagaacccccgagagccagcccgacaccccccccggcacccccctggtgagccaggacgagaagagagacgccgagctgcccaagaagagaatgagaaagagcaaccccggctgggagaacctggagaagctgctggtgttcaccgccgccggcgtgaagccccagggcaaggtggccggcttcgacctggacggcaccctgatcaccaccagaagcggcaaggtgttccccaccggccccagcgactggagaatcctgtaccccgagatccccagaaagctgagagagctggaggccgagggctacaagctggtgatcttcaccaaccagatgagcatcggcagaggcaagctgcccgccgaggagttcaaggccaaggtggaggccgtggtggagaagctgggcgtgcccttccaggtgctggtggccacccacgccggcctgtacagaaagcccgtgaccggcatgtgggaccacctgcaggagcaggccaacgacggcacccccatcagcatcggcgacagcatcttcgtgggcgacgccgccggcagacccgccaactgggcccccggcagaaagaagaaggacttcagctgcgccgacagactgttcgccctgaacctgggcctgcccttcgccacccccgaggagttcttcctgaagtggcccgccgccggcttcgagctgcccgccttcgaccccagaaccgtgagcagaagcggccccctgtgcctgcccgagagcagagccctgctgagcgccagccccgaggtggtggtggccgtgggcttccccggcgccggcaagagcaccttcctgaagaagcacctggtgagcgccggctacgtgcacgtgaacagagacaccctgggcagctggcagagatgcgtgaccacctgcgagaccgccctgaagcagggcaagagagtggccatcgacaacaccaaccccgacgccgccagcagagccagatacgtgcagtgcgccagagccgccggcgtgccctgcagatgcttcctgttcaccgccaccctggagcaggccagacacaacaacagattcagagagatgaccgacagcagccacatccccgtgagcgacatggtgatgtacggctacagaaagcagttcgaggcccccaccctggccgagggcttcagcgccatcctggagatccccttcagactgtgggtggagcccagactgggcagactgtactgccagttcagcgagggctag

SEQ ID NO: 12291 - DNA, 699 bp, synthetic construct
  misc_feature 1..699: note = Description of Artificial Sequence: Synthetic coding sequence
  source 1..699: mol_type = other DNA
atgctgggcgccatgttcagagccggcacccccatgccccccaacctgaacagccagggcggcggccactacttcatcgacagagacggcaaggccttcagacacatcctgaacttcctgagactgggcagactggacctgcccagaggctacggcgagaccgccctgctgagagccgaggccgacttctaccagatcagacccctgctggacgccctgagagagctggaggccagccagggcacccccgcccccaccgccgccctgctgcacgccgacgtggacgtgagccccagactggtgcacttcagcgccagaagaggcccccaccactacgagctgagcagcgtgcaggtggacaccttcagagccaacctgttctgcaccgacagcgagtgcctgggcgccctgagagccagattcggcgtggccagcggcgacagagccgagggcagcccccacttccacctggagtgggcccccagacccgtggagctgcccgaggtggagtacggcagactgggcctgcagcccctgtggaccggcggccccggcgagagaagagaggtggtgggcacccccagcttcctggaggaggtgctgagagtggccctggagcacggcttcagactggacagcgtgttccccgaccccgaggacctgctgaacagcagaagcctgagattcgtgagacactag

SEQ ID NO: 12292 - DNA, 5157 bp, synthetic construct
  misc_feature 1..5157: note = Description of Artificial Sequence: Synthetic coding sequence
  source 1..5157: mol_type = other DNA
atgaaccagaacaccaccgagcccgtggccgccaccgagaccctggccgaggtgcccgagcacgtgctgagaggcctgcccgaggaggtgagactgttccccagcgccgtggacaagaccagaatcggcgtgtgggccaccaagcccatcctgaagggcaagaagttcggccccttcgtgggcgacaagaagaagagaagccaggtgaagaacaacgtgtacatgtgggaggtgtactaccccaacctgggctggatgtgcatcgacgccaccgaccccgagaagggcaactggctgagatacgtgaactgggcctgcagcggcgaggagcagaacctgttccccctggagatcaacagagccatctactacaagaccctgaagcccatcgcccccggcgaggagctgctggtgtggtacaacggcgaggacaaccccgagatcgccgccgccatcgaggaggagagagccagcgccagaagcaagagaagcagccccaagagcagaaagggcaagaagaagagccaggagaacaagaacaagggcaacaagatccaggacatccagctgaagaccagcgagcccgacttcaccagcgccaacatgagagacagcgccgagggccccaaggaggacgaggagaagcccagcgccagcgccctggagcagcccgccaccctgcaggaggtggccagccaggaggtgccccccgagctggccacccccgcccccgcctgggagccccagcccgagcccgacgagagactggaggccgccgcctgcgaggtgaacgacctgggcgaggaggaggaggaggaggaggaggaggacgaggaggaggaggaggacgacgacgacgacgagctggaggacgagggcgaggaggaggccagcatgcccaacgagaacagcgtgaaggagcccgagatcagatgcgacgagaagcccgaggacctgctggaggagcccaagaccaccagcgaggagaccctggaggactgcagcgaggtgacccccgccatgcagatccccagaaccaaggaggaggccaacggcgacgtgttcgagaccttcatgttcccctgccagcactgcgagagaaagttcaccaccaagcagggcctggagagacacatgcacatccacatcagcaccgtgaaccacgccttcaagtgcaagtactgcggcaaggccttcggcacccagatcaacagaagaagacacgagagaagacacgaggccggcctgaagagaaagcccagccagaccctgcagcccagcgaggacctggccgacggcaaggccagcggcgagaacgtggccagcaaggacgacagcagcccccccagcctgggccccgactgcctgatcatgaacagcgagaaggccagccaggacaccatcaacagcagcgtggtggaggagaacggcgaggtgaaggagctgcacccctgcaagtactgcaagaaggtgttcggcacccacaccaacatgagaagacaccagagaagagtgcacgagagacacctgatccccaagggcgtgagaagaaagggcggcctggaggagccccagccccccgccgagcaggcccaggccacccagaacgtgtacgtgcccagcaccgagcccgaggaggagggcgaggccgacgacgtgtacatcatggacatcagcagcaacatcagcgagaacctgaactactacatcgacggcaagatccagaccaacaacaacaccagcaactgcgacgtgatcgagatggagagcgccagcgccgacctgtacggcatcaactgcctgctgacccccgtgaccgtggagatcacccagaacatcaagaccacccaggtgcccgtgaccgaggacctgcccaaggagcccctgggcagcaccaacagcgaggccaagaagagaagaaccgccagcccccccgccctgcccaagatcaaggccgagaccgacagcgaccccatggtgcccagctgcagcctgagcctgcccctgagcatcagcaccaccgaggccgtgagcttccacaaggagaagagcgtgtacctgagcagcaagctgaagcagctgctgcagacccaggacaagctgacccccgccggcatcagcgccaccgagatcgccaagctgggccccgtgtgcgtgagcgcccccgccagcatgctgcccgtgaccagcagcagattcaagagaagaaccagcagcccccccagcagcccccagcacagccccgccctgagagacttcggcaagcccagcgacggcaaggccgcctggaccgacgccggcctgaccagcaagaagagcaagctggagagccacagcgacagccccgcctggagcctgagcggcagagacgagagagagaccgtgagccccccctgcttcgacgagtacaagatgagcaaggagtggaccgccagcagcgccttcagcagcgtgtgcaaccagcagcccctggacctgagcagcggcgtgaagcagaaggccgagggcaccggcaagacccccgtgcagtgggagagcgtgctggacctgagcgtgcacaagaagcactgcagcgacagcgagggcaaggagttcaaggagagccacagcgtgcagcccacctgcagcgccgtgaagaagagaaagcccaccacctgcatgctgcagaaggtgctgctgaacgagtacaacggcatcgacctgcccgtggagaaccccgccgacggcaccagaagccccagcccctgcaagagcctggaggcccagcccgaccccgacctgggccccggcagcggcttccccgcccccaccgtggagagcacccccgacgtgtgccccagcagccccgccctgcagacccccagcctgagcagcggccagctgccccccctgctgatccccaccgaccccagcagcccccccccctgcccccccgtgctgaccgtggccaccccccccccccccctgctgcccaccgtgcccctgcccgcccccagcagcagcgccagcccccacccctgccccagccccctgagcaacgccaccgcccagagccccctgcccatcctgagccccaccgtgagccccagccccagccccatcccccccgtggagcccctgatgagcgccgccagccccggcccccccaccctgagcagcagcagcagcagcagcagcagcagcagcagcttcagcagcagcagcagcagcagcagccccagccccccccccctgagcgccatcagcagcgtggtgagcagcggcgacaacctggaggccagcctgcccatgatcagcttcaagcaggaggagctggagaacgagggcctgaagcccagagaggagccccagagcgccgccgagcaggacgtggtggtgcaggagaccttcaacaagaacttcgtgtgcaacgtgtgcgagagccccttcctgagcatcaaggacctgaccaagcacctgagcatccacgccgaggagtggcccttcaagtgcgagttctgcgtgcagctgttcaaggacaagaccgacctgagcgagcacagattcctgctgcacggcgtgggcaacatcttcgtgtgcagcgtgtgcaagaaggagttcgccttcctgtgcaacctgcagcagcaccagagagacctgcaccccgacaaggtgtgcacccaccacgagttcgagagcggcaccctgagaccccagaacttcaccgaccccagcaaggcccacgtggagcacatgcagagcctgcccgaggaccccctggagaccagcaaggaggaggaggagctgaacgacagcagcgaggagctgtacaccaccatcaagatcatggccagcggcatcaagaccaaggaccccgacgtgagactgggcctgaaccagcactaccccagcttcaagcccccccccttccagtaccaccacagaaaccccatgggcatcggcgtgaccgccaccaacttcaccacccacaacatcccccagaccttcaccaccgccatcagatgcaccaagtgcggcaagggcgtggacaacatgcccgagctgcacaagcacatcctggcctgcgccagcgccagcgacaagaagagatacacccccaagaagaaccccgtgcccctgaagcagaccgtgcagcccaagaacggcgtggtggtgctggacaacagcggcaagaacgccttcagaagaatgggccagcccaagagactgaacttcagcgtggagctgagcaagatgagcagcaacaagctgaagctgaacgccctgaagaagaagaaccagctggtgcagaaggccatcctgcagaagaacaagagcgccaagcagaaggccgacctgaagaacgcctgcgagagcagcagccacatctgcccctactgcaacagagagttcacctacatcggcagcctgaacaagcacgccgccttcagctgccccaagaagcccctgagcccccccaagaagaaggtgagccacagcagcaagaagggcggccacagcagccccgccagcagcgacaagaacagcaacagcaaccacagaagaagaaccgccgacgccgagatcaagatgcagagcatgcagacccccctgggcaagaccagagccagaagcagcggccccacccaggtgcccctgcccagcagcagcttcagaagcaagcagaacgtgaagttcgccgccagcgtgaagagcaagaagcccagcagcagcagcctgagaaacagcagccccatcagaatggccaagatcacccacgtggagggcaagaagcccaaggccgtggccaagaaccacagcgcccagctgagcagcaagaccagcagaagcctgcacgtgagagtgcagaagagcaaggccgtgctgcagagcaagagcaccctggccagcaagaagagaaccgacagattcaacatcaagagcagagagagaagcggcggccccgtgaccagaagcctgcagctggccgccgccgccgacctgagcgagaacaagagagaggacggcagcgccaagcaggagctgaaggacttcagctacagcctgagactggccagcagatgcagcccccccgccgccccctacatcaccagacagtacagaaaggtgaaggcccccgccgccgcccagttccagggccccttcttcaaggagtag

SEQ ID NO: 12293 - DNA, 5049 bp, synthetic construct
  misc_feature 1..5049: note = Description of Artificial Sequence: Synthetic coding sequence
  source 1..5049: mol_type = other DNA
atgaaccagaacaccaccgagcccgtggccgccaccgagaccctggccgaggtgcccgagcacgtgctgagaggcctgcccgaggaggtgagactgttccccagcgccgtggacaagaccagaatcggcgtgtgggccaccaagcccatcctgaagggcaagaagttcggccccttcgtgggcgacaagaagaagagaagccaggtgaagaacaacgtgtacatgtgggaggtgtactaccccaacctgggctggatgtgcatcgacgccaccgaccccgagaagggcaactggctgagatacgtgaactgggcctgcagcggcgaggagcagaacctgttccccctggagatcaacagagccatctactacaagaccctgaagcccatcgcccccggcgaggagctgctggtgtggtacaacggcgaggacaaccccgagatcgccgccgccatcgaggaggagagagccagcgccagaagcaagagaagcagccccaagagcagaaagggcaagaagaagagccaggagaacaagaacaagggcaacaagatccaggacatccagctgaagaccagcgagcccgacttcaccagcgccaacatgagagacagcgccgagggccccaaggaggacgaggagaagcccagcgccagcgccctggagcagcccgccaccctgcaggaggtggccagccaggaggtgccccccgagctggccacccccgcccccgcctgggagccccagcccgagcccgacgagagactggaggccgccgcctgcgaggtgaacgacctgggcgaggaggaggaggaggaggaggaggaggacgaggaggaggaggaggacgacgacgacgacgagctggaggacgagggcgaggaggaggccagcatgcccaacgagaacagcgtgaaggagcccgagatcagatgcgacgagaagcccgaggacctgctggaggagcccaagaccaccagcgaggagaccctggaggactgcagcgaggtgacccccgccatgcagatccccagaaccaaggaggaggccaacggcgacgtgttcgagaccttcatgttcccctgccagcactgcgagagaaagttcaccaccaagcagggcctggagagacacatgcacatccacatcagcaccgtgaaccacgccttcaagtgcaagtactgcggcaaggccttcggcacccagatcaacagaagaagacacgagagaagacacgaggccggcctgaagagaaagcccagccagaccctgcagcccagcgaggacctggccgacggcaaggccagcggcgagaacgtggccagcaaggacgacagcagcccccccagcctgggccccgactgcctgatcatgaacagcgagaaggccagccaggacaccatcaacagcagcgtggtggaggagaacggcgaggtgaaggagctgcacccctgcaagtactgcaagaaggtgttcggcacccacaccaacatgagaagacaccagagaagagtgcacgagagacacctgatccccaagggcgtgagaagaaagggcggcctggaggagccccagccccccgccgagcaggcccaggccacccagaacgtgtacgtgcccagcaccgagcccgaggaggagggcgaggccgacgacgtgtacatcatggacatcagcagcaacatcagcgagaacctgaactactacatcgacggcaagatccagaccaacaacaacaccagcaactgcgacgtgatcgagatggagagcgccagcgccgacctgtacggcatcaactgcctgctgacccccgtgaccgtggagatcacccagaacatcaagaccacccaggtgcccgtgaccgaggacctgcccaaggagcccctgggcagcaccaacagcgaggccaagaagagaagaaccgccagcccccccgccctgcccaagatcaaggccgagaccgacagcgaccccatggtgcccagctgcagcctgagcctgcccctgagcatcagcaccaccgaggccgtgagcttccacaaggagaagagcgtgtacctgagcagcaagctgaagcagctgctgcagacccaggacaagctgacccccgccggcatcagcgccaccgagatcgccaagctgggccccgtgtgcgtgagcgcccccgccagcatgctgcccgtgaccagcagcagattcaagagaagaaccagcagcccccccagcagcccccagcacagccccgccctgagagacttcggcaagcccagcgacggcaaggccgcctggaccgacgccggcctgaccagcaagaagagcaagctggagagccacagcgacagccccgcctggagcctgagcggcagagacgagagagagaccgtgagccccccctgcttcgacgagtacaagatgagcaaggagtggaccgccagcagcgccttcagcagcgtgtgcaaccagcagcccctggacctgagcagcggcgtgaagcagaaggccgagggcaccggcaagacccccgtgcagtgggagagcgtgctggacctgagcgtgcacaagaagcactgcagcgacagcgagggcaaggagttcaaggagagccacagcgtgcagcccacctgcagcgccgtgaagaagagaaagcccaccacctgcatgctgcagaaggtgctgctgaacgagtacaacggcatcgacctgcccgtggagaaccccgccgacggcaccagaagccccagcccctgcaagagcctggaggcccagcccgaccccgacctgggccccggcagcggcttccccgcccccaccgtggagagcacccccgacgtgtgccccagcagccccgccctgcagacccccagcctgagcagcggccagctgccccccctgctgatccccaccgaccccagcagcccccccccctgcccccccgtgctgaccgtggccaccccccccccccccctgctgcccaccgtgcccctgcccgcccccagcagcagcgccagcccccacccctgccccagccccctgagcaacgccaccgcccagagccccctgcccatcctgagccccaccgtgagccccagccccagccccatcccccccgtggagcccctgatgagcgccgccagccccggcccccccaccctgagcagcagcagcagcagcagcagcagcagcagcagcttcagcagcagcagcagcagcagcagccccagccccccccccctgagcgccatcagcagcgtggtgagcagcggcgacaacctggaggccagcctgcccatgatcagcttcaagcaggaggagctggagaacgagggcctgaagcccagagaggagccccagagcgccgccgagcaggacgtggtggtgcaggagaccttcaacaagaacttcgtgtgcaacgtgtgcgagagccccttcctgagcatcaaggacctgaccaagcacctgagcatccacgccgaggagtggcccttcaagtgcgagttctgcgtgcagctgttcaaggacaagaccgacctgagcgagcacagattcctgctgcacggcgtgggcaacatcttcgtgtgcagcgtgtgcaagaaggagttcgccttcctgtgcaacctgcagcagcaccagagagacctgcaccccgacaaggtgtgcacccaccacgagttcgagagcggcaccctgagaccccagaacttcaccgaccccagcaaggcccacgtggagcacatgcagagcctgcccgaggaccccctggagaccagcaaggaggaggaggagctgaacgacagcagcgaggagctgtacaccaccatcaagatcatggccagcggcatcaagaccaaggaccccgacgtgagactgggcctgaaccagcactaccccagcttcaagcccccccccttccagtaccaccacagaaaccccatgggcatcggcgtgaccgccaccaacttcaccacccacaacatcccccagaccttcaccaccgccatcagatgcaccaagtgcggcaagggcgtggacaacatgcccgagctgcacaagcacatcctggcctgcgccagcgccagcgacaagaagagatacacccccaagaagaaccccgtgcccctgaagcagaccgtgcagcccaagaacggcgtggtggtgctggacaacagcggcaagaacgccttcagaagaatgggccagcccaagagactgaacttcagcgtggagctgagcaagatgagcagcaacaagctgaagctgaacgccctgaagaagaagaaccagctggtgcagaaggccatcctgcagaagaacaagagcgccaagcagaaggccgacctgaagaacgcctgcgagagcagcagccacatctgcccctactgcaacagagagttcacctacatcggcagcctgaacaagcacgccgccttcagctgccccaagaagcccctgagcccccccaagaagaaggtgagccacagcagcaagaagggcggccacagcagccccgccagcagcgacaagaacagcaacagcaaccacagaagaagaaccgccgacgccgagatcaagatgcagagcatgcagacccccctgggcaagaccagagccagaagcagcggccccacccaggtgcccctgcccagcagcagcttcagaagcaagcagaacgtgaagttcgccgccagcgtgaagagcaagaagcccagcagcagcagcctgagaaacagcagccccatcagaatggccaagatcacccacgtggagggcaagaagcccaaggccgtggccaagaaccacagcgcccagctgagcagcaagaccagcagaagcctgcacgtgagagtgcagaagagcaaggccgtgctgcagagcaagagcaccctggccagcaagaagagaaccgacagattcaacatcaagagcagagagagaagcggcggccccgtgaccagaagcctgcagctggccgccgccgccgacctgagcgagaacaagagagaggacggcagcgccaagcaggagctgaaggacttcagaaacttcctgtag

SEQ ID NO: 12294 - DNA, 4446 bp, synthetic construct
  misc_feature 1..4446: note = Description of Artificial Sequence: Synthetic coding sequence
  source 1..4446: mol_type = other DNA
atgagagacagcgccgagggccccaaggaggacgaggagaagcccagcgccagcgccctggagcagcccgccaccctgcaggaggtggccagccaggaggtgccccccgagctggccacccccgcccccgcctgggagccccagcccgagcccgacgagagactggaggccgccgcctgcgaggtgaacgacctgggcgaggaggaggaggaggaggaggaggaggacgaggaggaggaggaggacgacgacgacgacgagctggaggacgagggcgaggaggaggccagcatgcccaacgagaacagcgtgaaggagcccgagatcagatgcgacgagaagcccgaggacctgctggaggagcccaagaccaccagcgaggagaccctggaggactgcagcgaggtgacccccgccatgcagatccccagaaccaaggaggaggccaacggcgacgtgttcgagaccttcatgttcccctgccagcactgcgagagaaagttcaccaccaagcagggcctggagagacacatgcacatccacatcagcaccgtgaaccacgccttcaagtgcaagtactgcggcaaggccttcggcacccagatcaacagaagaagacacgagagaagacacgaggccggcctgaagagaaagcccagccagaccctgcagcccagcgaggacctggccgacggcaaggccagcggcgagaacgtggccagcaaggacgacagcagcccccccagcctgggccccgactgcctgatcatgaacagcgagaaggccagccaggacaccatcaacagcagcgtggtggaggagaacggcgaggtgaaggagctgcacccctgcaagtactgcaagaaggtgttcggcacccacaccaacatgagaagacaccagagaagagtgcacgagagacacctgatccccaagggcgtgagaagaaagggcggcctggaggagccccagccccccgccgagcaggcccaggccacccagaacgtgtacgtgcccagcaccgagcccgaggaggagggcgaggccgacgacgtgtacatcatggacatcagcagcaacatcagcgagaacctgaactactacatcgacggcaagatccagaccaacaacaacaccagcaactgcgacgtgatcgagatggagagcgccagcgccgacctgtacggcatcaactgcctgctgacccccgtgaccgtggagatcacccagaacatcaagaccacccaggtgcccgtgaccgaggacctgcccaaggagcccctgggcagcaccaacagcgaggccaagaagagaagaaccgccagcccccccgccctgcccaagatcaaggccgagaccgacagcgaccccatggtgcccagctgcagcctgagcctgcccctgagcatcagcaccaccgaggccgtgagcttccacaaggagaagagcgtgtacctgagcagcaagctgaagcagctgctgcagacccaggacaagctgacccccgccggcatcagcgccaccgagatcgccaagctgggccccgtgtgcgtgagcgcccccgccagcatgctgcccgtgaccagcagcagattcaagagaagaaccagcagcccccccagcagcccccagcacagccccgccctgagagacttcggcaagcccagcgacggcaaggccgcctggaccgacgccggcctgaccagcaagaagagcaagctggagagccacagcgacagccccgcctggagcctgagcggcagagacgagagagagaccgtgagccccccctgcttcgacgagtacaagatgagcaaggagtggaccgccagcagcgccttcagcagcgtgtgcaaccagcagcccctggacctgagcagcggcgtgaagcagaaggccgagggcaccggcaagacccccgtgcagtgggagagcgtgctggacctgagcgtgcacaagaagcactgcagcgacagcgagggcaaggagttcaaggagagccacagcgtgcagcccacctgcagcgccgtgaagaagagaaagcccaccacctgcatgctgcagaaggtgctgctgaacgagtacaacggcatcgacctgcccgtggagaaccccgccgacggcaccagaagccccagcccctgcaagagcctggaggcccagcccgaccccgacctgggccccggcagcggcttccccgcccccaccgtggagagcacccccgacgtgtgccccagcagccccgccctgcagacccccagcctgagcagcggccagctgccccccctgctgatccccaccgaccccagcagcccccccccctgcccccccgtgctgaccgtggccaccccccccccccccctgctgcccaccgtgcccctgcccgcccccagcagcagcgccagcccccacccctgccccagccccctgagcaacgccaccgcccagagccccctgcccatcctgagccccaccgtgagccccagccccagccccatcccccccgtggagcccctgatgagcgccgccagccccggcccccccaccctgagcagcagcagcagcagcagcagcagcagcagcagcttcagcagcagcagcagcagcagcagccccagccccccccccctgagcgccatcagcagcgtggtgagcagcggcgacaacctggaggccagcctgcccatgatcagcttcaagcaggaggagctggagaacgagggcctgaagcccagagaggagccccagagcgccgccgagcaggacgtggtggtgcaggagaccttcaacaagaacttcgtgtgcaacgtgtgcgagagccccttcctgagcatcaaggacctgaccaagcacctgagcatccacgccgaggagtggcccttcaagtgcgagttctgcgtgcagctgttcaaggacaagaccgacctgagcgagcacagattcctgctgcacggcgtgggcaacatcttcgtgtgcagcgtgtgcaagaaggagttcgccttcctgtgcaacctgcagcagcaccagagagacctgcaccccgacaaggtgtgcacccaccacgagttcgagagcggcaccctgagaccccagaacttcaccgaccccagcaaggcccacgtggagcacatgcagagcctgcccgaggaccccctggagaccagcaaggaggaggaggagctgaacgacagcagcgaggagctgtacaccaccatcaagatcatggccagcggcatcaagaccaaggaccccgacgtgagactgggcctgaaccagcactaccccagcttcaagcccccccccttccagtaccaccacagaaaccccatgggcatcggcgtgaccgccaccaacttcaccacccacaacatcccccagaccttcaccaccgccatcagatgcaccaagtgcggcaagggcgtggacaacatgcccgagctgcacaagcacatcctggcctgcgccagcgccagcgacaagaagagatacacccccaagaagaaccccgtgcccctgaagcagaccgtgcagcccaagaacggcgtggtggtgctggacaacagcggcaagaacgccttcagaagaatgggccagcccaagagactgaacttcagcgtggagctgagcaagatgagcagcaacaagctgaagctgaacgccctgaagaagaagaaccagctggtgcagaaggccatcctgcagaagaacaagagcgccaagcagaaggccgacctgaagaacgcctgcgagagcagcagccacatctgcccctactgcaacagagagttcacctacatcggcagcctgaacaagcacgccgccttcagctgccccaagaagcccctgagcccccccaagaagaaggtgagccacagcagcaagaagggcggccacagcagccccgccagcagcgacaagaacagcaacagcaaccacagaagaagaaccgccgacgccgagatcaagatgcagagcatgcagacccccctgggcaagaccagagccagaagcagcggccccacccaggtgcccctgcccagcagcagcttcagaagcaagcagaacgtgaagttcgccgccagcgtgaagagcaagaagcccagcagcagcagcctgagaaacagcagccccatcagaatggccaagatcacccacgtggagggcaagaagcccaaggccgtggccaagaaccacagcgcccagctgagcagcaagaccagcagaagcctgcacgtgagagtgcagaagagcaaggccgtgctgcagagcaagagcaccctggccagcaagaagagaaccgacagattcaacatcaagagcagagagagaagcggcggccccgtgaccagaagcctgcagctggccgccgccgccgacctgagcgagaacaagagagaggacggcagcgccaagcaggagctgaaggacttcagaaacttcctgtag

SEQ ID NO: 12295 - DNA, 681 bp, synthetic construct
  misc_feature 1..681: note = Description of Artificial Sequence: Synthetic coding sequence
  source 1..681: mol_type = other DNA
atgaaccagaacaccaccgagcccgtggccgccaccgagaccctggccgaggtgcccgagcacgtgctgagaggcctgcccgaggaggtgagactgttccccagcgccgtggacaagaccagaatcggcgtgtgggccaccaagcccatcctgaagggcaagaagttcggccccttcgtgggcgacaagaagaagagaagccaggtgaagaacaacgtgtacatgtgggaggtgtactaccccaacctgggctggatgtgcatcgacgccaccgaccccgagaagggcaactggctgagatacgtgaactgggcctgcagcggcgaggagcagaacctgttccccctggagatcaacagagccatctactacaagaccctgaagcccatcgcccccggcgaggagctgctggtgtggtacaacggcgaggacaaccccgagatcgccgccgccatcgaggaggagagagccagcgccagaagcaagagaagcagccccaagagcagaaaggccaccgccagcgcctggagacccgacgccctgcaccagagacccagaaccagccccggcagcatcggcagaagcaagctgcagctgcagcccagcagcagagaccacagcagcaagagcagacacagcggctgcagcctgaccgcccccgaggtgacctggaaccagtag

SEQ ID NO: 12296 - DNA, 5049 bp, synthetic construct
  misc_feature 1..5049: note = Description of Artificial Sequence: Synthetic coding sequence
  source 1..5049: mol_type = other DNA
atgaaccagaacaccaccgagcccgtggccgccaccgagaccctggccgaggtgcccgagcacgtgctgagaggcctgcccgaggaggtgagactgttccccagcgccgtggacaagaccagaatcggcgtgtgggccaccaagcccatcctgaagggcaagaagttcggccccttcgtgggcgacaagaagaagagaagccaggtgaagaacaacgtgtacatgtgggaggtgtactaccccaacctgggctggatgtgcatcgacgccaccgaccccgagaagggcaactggctgagatacgtgaactgggcctgcagcggcgaggagcagaacctgttccccctggagatcaacagagccatctactacaagaccctgaagcccatcgcccccggcgaggagctgctggtgtggtacaacggcgaggacaaccccgagatcgccgccgccatcgaggaggagagagccagcgccagaagcaagagaagcagccccaagagcagaaagggcaagaagaagagccaggagaacaagaacaagggcaacaagatccaggacatccagctgaagaccagcgagcccgacttcaccagcgccaacatgagagacagcgccgagggccccaaggaggacgaggagaagcccagcgccagcgccctggagcagcccgccaccctgcaggaggtggccagccaggaggtgccccccgagctggccacccccgcccccgcctgggagccccagcccgagcccgacgagagactggaggccgccgcctgcgaggtgaacgacctgggcgaggaggaggaggaggaggaggaggaggacgaggaggaggaggaggacgacgacgacgacgagctggaggacgagggcgaggaggaggccagcatgcccaacgagaacagcgtgaaggagcccgagatcagatgcgacgagaagcccgaggacctgctggaggagcccaagaccaccagcgaggagaccctggaggactgcagcgaggtgacccccgccatgcagatccccagaaccaaggaggaggccaacggcgacgtgttcgagaccttcatgttcccctgccagcactgcgagagaaagttcaccaccaagcagggcctggagagacacatgcacatccacatcagcaccgtgaaccacgccttcaagtgcaagtactgcggcaaggccttcggcacccagatcaacagaagaagacacgagagaagacacgaggccggcctgaagagaaagcccagccagaccctgcagcccagcgaggacctggccgacggcaaggccagcggcgagaacgtggccagcaaggacgacagcagcccccccagcctgggccccgactgcctgatcatgaacagcgagaaggccagccaggacaccatcaacagcagcgtggtggaggagaacggcgaggtgaaggagctgcacccctgcaagtactgcaagaaggtgttcggcacccacaccaacatgagaagacaccagagaagagtgcacgagagacacctgatccccaagggcgtgagaagaaagggcggcctggaggagccccagccccccgccgagcaggcccaggccacccagaacgtgtacgtgcccagcaccgagcccgaggaggagggcgaggccgacgacgtgtacatcatggacatcagcagcaacatcagcgagaacctgaactactacatcgacggcaagatccagaccaacaacaacaccagcaactgcgacgtgatcgagatggagagcgccagcgccgacctgtacggcatcaactgcctgctgacccccgtgaccgtggagatcacccagaacatcaagaccacccaggtgcccgtgaccgaggacctgcccaaggagcccctgggcagcaccaacagcgaggccaagaagagaagaaccgccagcccccccgccctgcccaagatcaaggccgagaccgacagcgaccccatggtgcccagctgcagcctgagcctgcccctgagcatcagcaccaccgaggccgtgagcttccacaaggagaagagcgtgtacctgagcagcaagctgaagcagctgctgcagacccaggacaagctgacccccgccggcatcagcgccaccgagatcgccaagctgggccccgtgtgcgtgagcgcccccgccagcatgctgcccgtgaccagcagcagattcaagagaagaaccagcagcccccccagcagcccccagcacagccccgccctgagagacttcggcaagcccagcgacggcaaggccgcctggaccgacgccggcctgaccagcaagaagagcaagctggagagccacagcgacagccccgcctggagcctgagcggcagagacgagagagagaccgtgagccccccctgcttcgacgagtacaagatgagcaaggagtggaccgccagcagcgccttcagcagcgtgtgcaaccagcagcccctggacctgagcagcggcgtgaagcagaaggccgagggcaccggcaagacccccgtgcagtgggagagcgtgctggacctgagcgtgcacaagaagcactgcagcgacagcgagggcaaggagttcaaggagagccacagcgtgcagcccacctgcagcgccgtgaagaagagaaagcccaccacctgcatgctgcagaaggtgctgctgaacgagtacaacggcatcgacctgcccgtggagaaccccgccgacggcaccagaagccccagcccctgcaagagcctggaggcccagcccgaccccgacctgggccccggcagcggcttccccgcccccaccgtggagagcacccccgacgtgtgccccagcagccccgccctgcagacccccagcctgagcagcggccagctgccccccctgctgatccccaccgaccccagcagcccccccccctgcccccccgtgctgaccgtggccaccccccccccccccctgctgcccaccgtgcccctgcccgcccccagcagcagcgccagcccccacccctgccccagccccctgagcaacgccaccgcccagagccccctgcccatcctgagccccaccgtgagccccagccccagccccatcccccccgtggagcccctgatgagcgccgccagccccggcccccccaccctgagcagcagcagcagcagcagcagcagcagcagcagcttcagcagcagcagcagcagcagcagccccagccccccccccctgagcgccatcagcagcgtggtgagcagcggcgacaacctggaggccagcctgcccatgatcagcttcaagcaggaggagctggagaacgagggcctgaagcccagagaggagccccagagcgccgccgagcaggacgtggtggtgcaggagaccttcaacaagaacttcgtgtgcaacgtgtgcgagagccccttcctgagcatcaaggacctgaccaagcacctgagcatccacgccgaggagtggcccttcaagtgcgagttctgcgtgcagctgttcaaggacaagaccgacctgagcgagcacagattcctgctgcacggcgtgggcaacatcttcgtgtgcagcgtgtgcaagaaggagttcgccttcctgtgcaacctgcagcagcaccagagagacctgcaccccgacaaggtgtgcacccaccacgagttcgagagcggcaccctgagaccccagaacttcaccgaccccagcaaggcccacgtggagcacatgcagagcctgcccgaggaccccctggagaccagcaaggaggaggaggagctgaacgacagcagcgaggagctgtacaccaccatcaagatcatggccagcggcatcaagaccaaggaccccgacgtgagactgggcctgaaccagcactaccccagcttcaagcccccccccttccagtaccaccacagaaaccccatgggcatcggcgtgaccgccaccaacttcaccacccacaacatcccccagaccttcaccaccgccatcagatgcaccaagtgcggcaagggcgtggacaacatgcccgagctgcacaagcacatcctggcctgcgccagcgccagcgacaagaagagatacacccccaagaagaaccccgtgcccctgaagcagaccgtgcagcccaagaacggcgtggtggtgctggacaacagcggcaagaacgccttcagaagaatgggccagcccaagagactgaacttcagcgtggagctgagcaagatgagcagcaacaagctgaagctgaacgccctgaagaagaagaaccagctggtgcagaaggccatcctgcagaagaacaagagcgccaagcagaaggccgacctgaagaacgcctgcgagagcagcagccacatctgcccctactgcaacagagagttcacctacatcggcagcctgaacaagcacgccgccttcagctgccccaagaagcccctgagcccccccaagaagaaggtgagccacagcagcaagaagggcggccacagcagccccgccagcagcgacaagaacagcaacagcaaccacagaagaagaaccgccgacgccgagatcaagatgcagagcatgcagacccccctgggcaagaccagagccagaagcagcggccccacccaggtgcccctgcccagcagcagcttcagaagcaagcagaacgtgaagttcgccgccagcgtgaagagcaagaagcccagcagcagcagcctgagaaacagcagccccatcagaatggccaagatcacccacgtggagggcaagaagcccaaggccgtggccaagaaccacagcgcccagctgagcagcaagaccagcagaagcctgcacgtgagagtgcagaagagcaaggccgtgctgcagagcaagagcaccctggccagcaagaagagaaccgacagattcaacatcaagagcagagagagaagcggcggccccgtgaccagaagcctgcagctggccgccgccgccgacctgagcgagaacaagagagaggacggcagcgccaagcaggagctgaaggacttcagatgcttcctgtag

SEQ ID NO: 12297 - DNA, 237 bp, synthetic construct
  misc_feature 1..237: note = Description of Artificial Sequence: Synthetic coding sequence
  source 1..237: mol_type = other DNA
atgagagacagcgccgagggccccaaggaggacgaggagaagcccagcgccagcgccctggagcagcccgccaccctgcaggaggtggccagccaggaggtgccccccgagctggccacccccgcccccgcctgggagccccagcccgagcccgacgagagactggaggccgccgcctgcgaggtgaacgacctgggcgaggaggaggaggaggaggaggaggaggacgaggagtag

SEQ ID NO: 12298 - DNA, 4446 bp, synthetic construct; identical to SEQ ID NO: 12294
  misc_feature 1..4446: note = Description of Artificial Sequence: Synthetic coding sequence
  source 1..4446: mol_type = other DNA

SEQ ID NO: 12299 - DNA, 675 bp, synthetic construct
  misc_feature 1..675: note = Description of Artificial Sequence: Synthetic coding sequence
  source 1..675: mol_type = other DNA
atgagcagctacttcgtgaacagcaccttccccgtgaccctggccagcggccaggagagcttcctgggccagctgcccctgtacagcagcggctacgccgaccccctgagacactaccccgccccctacggccccggccccggccaggacaagggcttcgccaccagcagctactacccccccgccggcggcggctacggcagagccgccccctgcgactacggccccgcccccgccttctacagagagaaggagagcgcctgcgccctgagcggcgccgacgagcagccccccttccaccccgagcccagaaagagcgactgcgcccaggacaagagcgtgttcggcgagaccgaggagcagaagtgcagcacccccgtgtacccctggatgcagagaatgaacagctgcaacagcagcagcttcggccccagcggcagaagaggcagacagacctacaccagataccagaccctggagctggagaaggagttccactacaacagatacctgaccagaagaagaagaatcgagatcgcccacgccctgtgcctgaccgagagacagatcaagatctggttccagaacagaagaatgaagtggaagaaggagagcaagctgctgagcgccagccagctgagcgccgaggaggaggaggagaagcaggccgagtag

SEQ ID NO: 12300 - DNA, 2496 bp, synthetic construct
  misc_feature 1..2496: note = Description of Artificial Sequence: Synthetic coding sequence
  source 1..2496: mol_type = other DNA
atgaccgagctgaaggccaagggccccagagccccccacgtggccggcggcccccccagccccgaggtgggcagccccctgctgtgcagacccgccgccggccccttccccggcagccagaccagcgacaccctgcccgaggtgagcgccatccccatcagcctggacggcctgctgttccccagaccctgccagggccaggaccccagcgacgagaagacccaggaccagcagagcctgagcgacgtggagggcgcctacagcagagccgaggccaccagaggcgccggcggcagcagcagcagcccccccgagaaggacagcggcctgctggacagcgtgctggacaccctgctggcccccagcggccccggccagagccagcccagcccccccgcctgcgaggtgaccagcagctggtgcctgttcggccccgagctgcccgaggacccccccgccgcccccgccacccagagagtgctgagccccctgatgagcagaagcggctgcaaggtgggcgacagcagcggcaccgccgccgcccacaaggtgctgcccagaggcctgagccccgccagacagctgctgctgcccgccagcgagagcccccactggagcggcgcccccgtgaagcccagcccccaggccgccgccgtggaggtggaggaggaggacggcagcgagagcgaggagagcgccggccccctgctgaagggcaagcccagagccctgggcggcgccgccgccggcggcggcgccgccgccgtgccccccggcgccgccgccggcggcgtggccctggtgcccaaggaggacagcagattcagcgcccccagagtggccctggtggagcaggacgcccccatggcccccggcagaagccccctggccaccaccgtgatggacttcatccacgtgcccatcctgcccctgaaccacgccctgctggccgccagaaccagacagctgctggaggacgagagctacgacggcggcgccggcgccgccagcgccttcgccccccccagaagcagcccctgcgccagcagcacccccgtggccgtgggcgacttccccgactgcgcctacccccccgacgccgagcccaaggacgacgcctaccccctgtacagcgacttccagccccccgccctgaagatcaaggaggaggaggagggcgccgaggccagcgccagaagccccagaagctacctggtggccggcgccaaccccgccgccttccccgacttccccctgggcccccccccccccctgccccccagagccacccccagcagacccggcgaggccgccgtgaccgccgcccccgccagcgccagcgtgagcagcgccagcagcagcggcagcaccctggagtgcatcctgtacaaggccgagggcgcccccccccagcagggccccttcgccccccccccctgcaaggcccccggcgccagcggctgcctgctgcccagagacggcctgcccagcaccagcgccagcgccgccgccgccggcgccgcccccgccctgtaccccgccctgggcctgaacggcctgccccagctgggctaccaggccgccgtgctgaaggagggcctgccccaggtgtaccccccctacctgaactacctgagacccgacagcgaggccagccagagcccccagtacagcttcgagagcctgccccagaagatctgcctgatctgcggcgacgaggccagcggctgccactacggcgtgctgacctgcggcagctgcaaggtgttcttcaagagagccatggagggccagcacaactacctgtgcgccggcagaaacgactgcatcgtggacaagatcagaagaaagaactgccccgcctgcagactgagaaagtgctgccaggccggcatggtgctgggcggcttcagaaacctgcacatcgacgaccagatcaccctgatccagtacagctggatgagcctgatggtgttcggcctgggctggagaagctacaagcacgtgagcggccagatgctgtacttcgcccccgacctgatcctgaacgagcagagaatgaaggagagcagcttctacagcctgtgcctgaccatgtggcagatcccccaggagttcgtgaagctgcaggtgagccaggaggagttcctgtgcatgaaggtgctgctgctgctgaacaccatccccctggagggcctgagaagccagacccagttcgaggagatgagaagcagctacatcagagagctgatcaaggccatcggcctgagacagaagggcgtggtgagcagcagccagagattctaccagctgaccaagctgctggacaacctgcacgacctggtgaagcagctgcacctgtactgcctgaacaccttcatccagagcagagccctgagcgtggagttccccgagatgatgagcgaggtgatcgccgcccagctgcccaagatcctggccggcatggtgaagcccctgctgttccacaagaagtag

SEQ ID NO: 12301 - DNA, 2802 bp, synthetic construct
  misc_feature 1..2802: note = Description of Artificial Sequence: Synthetic coding sequence
  source 1..2802: mol_type = other DNA
atgaccgagctgaaggccaagggccccagagccccccacgtggccggcggcccccccagccccgaggtgggcagccccctgctgtgcagacccgccgccggccccttccccggcagccagaccagcgacaccctgcccgaggtgagcgccatccccatcagcctggacggcctgctgttccccagaccctgccagggccaggaccccagcgacgagaagacccaggaccagcagagcctgagcgacgtggagggcgcctacagcagagccgaggccaccagaggcgccggcggcagcagcagcagcccccccgagaaggacagcggcctgctggacagcgtgctggacaccctgctggcccccagcggccccggccagagccagcccagcccccccgcctgcgaggtgaccagcagctggtgcctgttcggccccgagctgcccgaggacccccccgccgcccccgccacccagagagtgctgagccccctgatgagcagaagcggctgcaaggtgggcgacagcagcggcaccgccgccgcccacaaggtgctgcccagaggcctgagccccgccagacagctgctgctgcccgccagcgagagcccccactggagcggcgcccccgtgaagcccagcccccaggccgccgccgtggaggtggaggaggaggacggcagcgagagcgaggagagcgccggccccctgctgaagggcaagcccagagccctgggcggcgccgccgccggcggcggcgccgccgccgtgccccccggcgccgccgccggcggcgtggccctggtgcccaaggaggacagcagattcagcgcccccagagtggccctggtggagcaggacgcccccatggcccccggcagaagccccctggccaccaccgtgatggacttcatccacgtgcccatcctgcccctgaaccacgccctgctggccgccagaaccagacagctgctggaggacgagagctacgacggcggcgccggcgccgccagcgccttcgccccccccagaagcagcccctgcgccagcagcacccccgtggccgtgggcgacttccccgactgcgcctacccccccgacgccgagcccaaggacgacgcctaccccctgtacagcgacttccagccccccgccctgaagatcaaggaggaggaggagggcgccgaggccagcgccagaagccccagaagctacctggtggccggcgccaaccccgccgccttccccgacttccccctgggcccccccccccccctgccccccagagccacccccagcagacccggcgaggccgccgtgaccgccgcccccgccagcgccagcgtgagcagcgccagcagcagcggcagcaccctggagtgcatcctgtacaaggccgagggcgcccccccccagcagggccccttcgccccccccccctgcaaggcccccggcgccagcggctgcctgctgcccagagacggcctgcccagcaccagcgccagcgccgccgccgccggcgccgcccccgccctgtaccccgccctgggcctgaacggcctgccccagctgggctaccaggccgccgtgctgaaggagggcctgccccaggtgtaccccccctacctgaactacctgagacccgacagcgaggccagccagagcccccagtacagcttcgagagcctgccccagaagatctgcctgatctgcggcgacgaggccagcggctgccactacggcgtgctgacctgcggcagctgcaaggtgttcttcaagagagccatggagggccagcacaactacctgtgcgccggcagaaacgactgcatcgtggacaagatcagaagaaagaactgccccgcctgcagactgagaaagtgctgccaggccggcatggtgctgggcggcagaaagttcaagaagttcaacaaggtgagagtggtgagagccctggacgccgtggccctgccccagcccgtgggcgtgcccaacgagagccaggccctgagccagagattcaccttcagccccggccaggacatccagctgatcccccccctgatcaacctgctgatgagcatcgagcccgacgtgatctacgccggccacgacaacaccaagcccgacaccagcagcagcctgctgaccagcctgaaccagctgggcgagagacagctgctgagcgtggtgaagtggagcaagagcctgcccggcttcagaaacctgcacatcgacgaccagatcaccctgatccagtacagctggatgagcctgatggtgttcggcctgggctggagaagctacaagcacgtgagcggccagatgctgtacttcgcccccgacctgatcctgaacgagcagagaatgaaggagagcagcttctacagcctgtgcctgaccatgtggcagatcccccaggagttcgtgaagctgcaggtgagccaggaggagttcctgtgcatgaaggtgctgctgctgctgaacaccatccccctggagggcctgagaagccagacccagttcgaggagatgagaagcagctacatcagagagctgatcaaggccatcggcctgagacagaagggcgtggtgagcagcagccagagattctaccagctgaccaagctgctggacaacctgcacgacctggtgaagcagctgcacctgtactgcctgaacaccttcatccagagcagagccctgagcgtggagttccccgagatgatgagcgaggtgatcgccgcccagctgcccaagatcctggccggcatggtgaagcccctgctgttccacaagaagtag

SEQ ID NO: 12302 - DNA, 2088 bp, synthetic construct
  misc_feature 1..2088: note = Description of Artificial Sequence: Synthetic coding sequence
  source 1..2088: mol_type = other DNA
atgaccgagctgaaggccaagggccccagagccccccacgtggccggcggcccccccagccccgaggtgggcagccccctgctgtgcagacccgccgccggccccttccccggcagccagaccagcgacaccctgcccgaggtgagcgccatccccatcagcctggacggcctgctgttccccagaccctgccagggccaggaccccagcgacgagaagacccaggaccagcagagcctgagcgacgtggagggcgcctacagcagagccgaggccaccagaggcgccggcggcagcagcagcagcccccccgagaaggacagcggcctgctggacagcgtgctggacaccctgctggcccccagcggccccggccagagccagcccagcccccccgcctgcgaggtgaccagcagctggtgcctgttcggccccgagctgcccgaggacccccccgccgcccccgccacccagagagtgctgagccccctgatgagcagaagcggctgcaaggtgggcgacagcagcggcaccgccgccgcccacaaggtgctgcccagaggcctgagccccgccagacagctgctgctgcccgccagcgagagcccccactggagcggcgcccccgtgaagcccagcccccaggccgccgccgtggaggtggaggaggaggacggcagcgagagcgaggagagcgccggccccctgctgaagggcaagcccagagccctgggcggcgccgccgccggcggcggcgccgccgccgtgccccccggcgccgccgccggcggcgtggccctggtgcccaaggaggacagcagattcagcgcccccagagtggccctggtggagcaggacgcccccatggcccccggcagaagccccctggccaccaccgtgatggacttcatccacgtgcccatcctgcccctgaaccacgccctgctggccgccagaaccagacagctgctggaggacgagagctacgacggcggcgccggcgccgccagcgccttcgccccccccagaagcagcccctgcgccagcagcacccccgtggccgtgggcgacttccccgactgcgcctacccccccgacgccgagcccaaggacgacgcctaccccctgtacagcgacttccagccccccgccctgaagatcaaggaggaggaggagggcgccgaggccagcgccagaagccccagaagctacctggtggccggcgccaaccccgccgccttccccgacttccccctgggcccccccccccccctgccccccagagccacccccagcagacccggcgaggccgccgtgaccgccgcccccgccagcgccagcgtgagcagcgccagcagcagcggcagcaccctggagtgcatcctgtacaaggccgagggcgcccccccccagcagggccccttcgccccccccccctgcaaggcccccggcgccagcggctgcctgctgcccagagacggcctgcccagcaccagcgccagcgccgccgccgccggcgccgcccccgccctgtaccccgccctgggcctgaacggcctgccccagctgggctaccaggccgccgtgctgaaggagggcctgccccaggtgtaccccccctacctgaactacctgagacccgacagcgaggccagccagagcccccagtacagcttcgagagcctgccccagaagatctgcctgatctgcggcgacgaggccagcggctgccactacggcgtgctgacctgcggcagctgcaaggtgttcttcaagagagccatggagggccagcacaactacctgtgcgccggcagaaacgactgcatcgtggacaagatcagaagaaagaactgccccgcctgcagactgagaaagtgctgccaggccggcatggtgctgggcggcttcagaaacctgcacatcgacgaccagatcaccctgatccagtacagctggatgagcctgatggtgttcggcctgggctggagaagctacaagcacgtgagcggccagatgctgtacttcgcccccgacctgatcctgaacgacagcttcggcagagccaccaagagcaaccccgtgtag

SEQ ID NO: 12303 - DNA, 2295 bp, synthetic construct
  misc_feature 1..2295: note = Description of Artificial Sequence: Synthetic coding sequence
  source 1..2295: mol_type = other DNA
atgaccgagctgaaggccaagggccccagagccccccacgtggccggcggcccccccagccccgaggtgggcagccccctgctgtgcagacccgccgccggccccttccccggcagccagaccagcgacaccctgcccgaggtgagcgccatccccatcagcctggacggcctgctgttccccagaccctgccagggccaggaccccagcgacgagaagacccaggaccagcagagcctgagcgacgtggagggcgcctacagcagagccgaggccaccagaggcgccggcggcagcagcagcagcccccccgagaaggacagcggcctgctggacagcgtgctggacaccctgctggcccccagcggccccggccagagccagcccagcccccccgcctgcgaggtgaccagcagctggtgcctgttcggccccgagctgcccgaggacccccccgccgcccccgccacccagagagtgctgagccccctgatgagcagaagcggctgcaaggtgggcgacagcagcggcaccgccgccgcccacaaggtgctgcccagaggcctgagccccgccagacagctgctgctgcccgccagcgagagcccccactggagcggcgcccccgtgaagcccagcccccaggccgccgccgtggaggtggaggaggaggacggcagcgagagcgaggagagcgccggccccctgctgaagggcaagcccagagccctgggcggcgccgccgccggcggcggcgccgccgccgtgccccccggcgccgccgccggcggcgtggccctggtgcccaaggaggacagcagattcagcgcccccagagtggccctggtggagcaggacgcccccatggcccccggcagaagccccctggccaccaccgtgatggacttcatccacgtgcccatcctgcccctgaaccacgccctgctggccgccagaaccagacagctgctggaggacgagagctacgacggcggcgccggcgccgccagcgccttcgccccccccagaagcagcccctgcgccagcagcacccccgtggccgtgggcgacttccccgactgcgcctacccccccgacgccgagcccaaggacgacgcctaccccctgtacagcgacttccagccccccgccctgaagatcaaggaggaggaggagggcgccgaggccagcgccagaagccccagaagctacctggtggccggcgccaaccccgccgccttccccgacttccccctgggcccccccccccccctgccccccagagccacccccagcagacccggcgaggccgccgtgaccgccgcccccgccagcgccagcgtgagcagcgccagcagcagcggcagcaccctggagtgcatcctgtacaaggccgagggcgcccccccccagcagggccccttcgccccccccccctgcaaggcccccggcgccagcggctgcctgctgcccagagacggcctgcccagcaccagcgccagcgccgccgccgccggcgccgcccccgccctgtaccccgccctgggcctgaacggcctgccccagctgggctaccaggccgccgtgctgaaggagggcctgccccaggtgtaccccccctacctgaactacctgagacccgacagcgaggccagccagagcccccagtacagcttcgagagcctgccccagaagatctgcctgatctgcggcgacgaggccagcggctgccactacggcgtgctgacctgcggcagctgcaaggtgttcttcaagagagccatggagggcagaaagttcaagaagttcaacaaggtgagagtggtgagagccctggacgccgtggccctgccccagcccgtgggcgtgcccaacgagagccaggccctgagccagagattcaccttcagccccggccaggacatccagctgatcccccccctgatcaacctgctgatgagcatcgagcccgacgtgatctacgccggccacgacaacaccaagcccgacaccagcagcagcctgctgaccagcctgaaccagctgggcgagagacagctgctgagcgtggtgaagtggagcaagagcctgcccggcttcagaaacctgcacatcgacgaccagatcaccctgatccagtacagctggatgagcctgatggtgttcggcctgggctggagaagctacaagcacgtgagcggccagatgctgtacttcgcccccgacctgatcctgaacgagagccacagaagcctgagcagcttcaagctggccaagaagagcagcagcgtgtag

SEQ ID NO: 12304 - DNA, 1020 bp, synthetic construct
  misc_feature 1..1020: note = Description of Artificial Sequence: Synthetic coding sequence
  source 1..1020: mol_type = other DNA
atggagggccagcacaactacctgtgcgccggcagaaacgactgcatcgtggacaagatcagaagaaagaactgccccgcctgcagactgagaaagtgctgccaggccggcatggtgctgggcggcagaaagttcaagaagttcaacaaggtgagagtggtgagagccctggacgccgtggccctgccccagcccgtgggcgtgcccaacgagagccaggccctgagccagagattcaccttcagccccggccaggacatccagctgatcccccccctgatcaacctgctgatgagcatcgagcccgacgtgatctacgccggccacgacaacaccaagcccgacaccagcagcagcctgctgaccagcctgaaccagctgggcgagagacagctgctgagcgtggtgaagtggagcaagagcctgcccggcttcagaaacctgcacatcgacgaccagatcaccctgatccagtacagctggatgagcctgatggtgttcggcctgggctggagaagctacaagcacgtgagcggccagatgctgtacttcgcccccgacctgatcctgaacgagcagagaatgaaggagagcagcttctacagcctgtgcctgaccatgtggcagatcccccaggagttcgtgaagctgcaggtgagccaggaggagttcctgtgcatgaaggtgctgctgctgctgaacaccatccccctggagggcctgagaagccagacccagttcgaggagatgagaagcagctacatcagagagctgatcaaggccatcggcctgagacagaagggcgtggtgagcagcagccagagattctaccagctgaccaagctgctggacaacctgcacgacctggtgaagcagctgcacctgtactgcctgaacaccttcatccagagcagagccctgagcgtggagttccccgagatgatgagcgaggtgatcgccgcccagctgcccaagatcctggccggcatggtgaagcccctgctgttccacaagaagtag

SEQ ID NO: 12305 - DNA, 2412 bp, synthetic construct
  misc_feature 1..2412: note = Description of Artificial Sequence: Synthetic coding sequence
  source 1..2412: mol_type = other DNA
atgaccgagctgaaggccaagggccccagagccccccacgtggccggcggcccccccagccccgaggtgggcagccccctgctgtgcagacccgccgccggccccttccccggcagccagaccagcgacaccctgcccgaggtgagcgccatccccatcagcctggacggcctgctgttccccagaccctgccagggccaggaccccagcgacgagaagacccaggaccagcagagcctgagcgacgtggagggcgcctacagcagagccgaggccaccagaggcgccggcggcagcagcagcagcccccccgagaaggacagcggcctgctggacagcgtgctggacaccctgctggcccccagcggccccggccagagccagcccagcccccccgcctgcgaggtgaccagcagctggtgcctgttcggccccgagctgcccgaggacccccccgccgcccccgccacccagagagtgctgagccccctgatgagcagaagcggctgcaaggtgggcgacagcagcggcaccgccgccgcccacaaggtgctgcccagaggcctgagccccgccagacagctgctgctgcccgccagcgagagcccccactggagcggcgcccccgtgaagcccagcccccaggccgccgccgtggaggtggaggaggaggacggcagcgagagcgaggagagcgccggccccctgctgaagggcaagcccagagccctgggcggcgccgccgccggcggcggcgccgccgccgtgccccccggcgccgccgccggcggcgtggccctggtgcccaaggaggacagcagattcagcgcccccagagtggccctggtggagcaggacgcccccatggcccccggcagaagccccctggccaccaccgtgatggacttcatccacgtgcccatcctgcccctgaaccacgccctgctggccgccagaaccagacagctgctggaggacgagagctacgacggcggcgccggcgccgccagcgccttcgccccccccagaagcagcccctgcgccagcagcacccccgtggccgtgggcgacttccccgactgcgcctacccccccgacgccgagcccaaggacgacgcctaccccctgtacagcgacttccagccccccgccctgaagatcaaggaggaggaggagggcgccgaggccagcgccagaagccccagaagctacctggtggccggcgccaaccccgccgccttccccgacttccccctgggcccccccccccccctgccccccagagccacccccagcagacccggcgaggccgccgtgaccgccgcccccgccagcgccagcgtgagcagcgccagcagcagcggcagcaccctggagtgcatcctgtacaaggccgagggcgcccccccccagcagggccccttcgccccccccccctgcaaggcccccggcgccagcggctgcctgctgcccagagacggcctgcccagcaccagcgccagcgccgccgccgccggcgccgcccccgccctgtaccccgccctgggcctgaacggcctgccccagctgggctaccaggccgccgtgctgaaggagggcctgccccaggtgtaccccccctacctgaactacctgagacccgacagcgaggccagccagagcccccagtacagcttcgagagcctgccccagaagatctgcctgatctgcggcgacgaggccagcggctgccactacggcgtgctgacctgcggcagctgcaaggtgttcttcaagagagccatggagggccagcacaactacctgtgcgccggcagaaacgactgcatcgtggacaagatcagaagaaagaactgccccgcctgcagactgagaaagtgctgccaggccggcatggtgctgggcggcagaaagttcaagaagttcaacaaggtgagagtggtgagagccctggacgccgtggccctgccccagcccgtgggcgtgcccaacgagagccaggccctgagccagagattcaccttcagccccggccaggacatccagctgatcccccccctgatcaacctgctgatgagcatcgagcccgacgtgatctacgccggccacgacaacaccaagcccgacaccagcagcagcctgctgaccagcctgaaccagctgggcgagagacagctgctgagcgtggtgaagtggagcaagagcctgcccggcttcagaaacctgcacatcgacgaccagatcaccctgatccagtacagctggatgagcctgatggtgttcggcctgggctggagaagctacaagcacgtgagcggccagatgctgtacttcgcccccgacctgatcctgaacgagagccacagaagcctgagcagcttcaagctggccaagaagagcagcagcgtgtag

SEQ ID NO: 12306 - DNA, 2073 bp, synthetic construct
  misc_feature 1..2073: note = Description of Artificial Sequence: Synthetic coding sequence
  source 1..2073: mol_type = other DNA
atgaccgagctgaaggccaagggccccagagccccccacgtggccggcggcccccccagccccgaggtgggcagccccctgctgtgcagacccgccgccggccccttccccggcagccagaccagcgacaccctgcccgaggtgagcgccatccccatcagcctggacggcctgctgttccccagaccctgccagggccaggaccccagcgacgagaagacccaggaccagcagagcctgagcgacgtggagggcgcctacagcagagccgaggccaccagaggcgccggcggcagcagcagcagcccccccgagaaggacagcggcctgctggacagcgtgctggacaccctgctggcccccagcggccccggccagagccagcccagcccccccgcctgcgaggtgaccagcagctggtgcctgttcggccccgagctgcccgaggacccccccgccgcccccgccacccagagagtgctgagccccctgatgagcagaagcggctgcaaggtgggcgacagcagcggcaccgccgccgcccacaaggtgctgcccagaggcctgagccccgccagacagctgctgctgcccgccagcgagagcccccactggagcggcgcccccgtgaagcccagcccccaggccgccgccgtggaggtggaggaggaggacggcagcgagagcgaggagagcgccggccccctgctgaagggcaagcccagagccctgggcggcgccgccgccggcggcggcgccgccgccgtgccccccggcgccgccgccggcggcgtggccctggtgcccaaggaggacagcagattcagcgcccccagagtggccctggtggagcaggacgcccccatggcccccggcagaagccccctggccaccaccgtgatggacttcatccacgtgcccatcctgcccctgaaccacgccctgctggccgccagaaccagacagctgctggaggacgagagctacgacggcggcgccggcgccgccagcgccttcgccccccccagaagcagcccctgcgccagcagcacccccgtggccgtgggcgacttccccgactgcgcctacccccccgacgccgagcccaaggacgacgcctaccccctgtacagcgacttccagccccccgccctgaagatcaaggaggaggaggagggcgccgaggccagcgccagaagccccagaagctacctggtggccggcgccaaccccgccgccttccccgacttccccctgggcccccccccccccctgccccccagagccacccccagcagacccggcgaggccgccgtgaccgccgcccccgccagcgccagcgtgagcagcgccagcagcagcggcagcaccctggagtgcatcctgtacaaggccgagggcgcccccccccagcagggccccttcgccccccccccctgcaaggcccccggcgccagcggctgcctgctgcccagagacggcctgcccagcaccagcgccagcgccgccgccgccggcgccgcccccgccctgtaccccgccctgggcctgaacggcctgccccagctgggctaccaggccgccgtgctgaaggagggcctgccccaggtgtaccccccctacctgaactacctgagacccgacagcgaggccagccagagcccccagtacagcttcgagagcctgccccagaagatctgcctgatctgcggcgacgaggccagcggctgccactacggcgtgctgacctgcggcagctgcaaggtgttcttcaagagagccatggagggccagcacaactacctgtgcgccggcagaaacgactgcatcgtggacaagatcagaagaaagaactgccccgcctgcagactgagaaagtgctgccaggccggcatggtgctgggcggcttcagaaacctgcacatcgacgaccagatcaccctgatccagtacagctggatgagcctgatggtgttcggcctgggctggagaagctacaagcacgtgagcggccagatgctgtacttcgcccccgacctgatcctgaacgaggagagcatcgtgaccagctag

SEQ ID NO: 12307 - DNA, 1410 bp, synthetic construct
  misc_feature 1..1410: note = Description of Artificial Sequence: Synthetic coding sequence
  source 1..1410: mol_type = other DNA
atggacgtggagaacgagcagatcctgaacgtgaaccccgccgaccccgacaacctgagcgacagcctgttcagcggcgacgaggagaacgccggcaccgaggagatcaagaacgagatcaacggcaactggatcagcgccagcagcatcaacgaggccagaatcaacgccaaggccaagagaagactgagaaagaacagcagcagagacagcggcagaggcgacagcgtgagcgacagcggcagcgacgccctgagaagcggcctgaccgtgcccaccagccccaagggcagactgctggacagaagaagcagaagcggcaagggcagaggcctgcccaagaagggcggcgccggcggcaagggcgtgtggggcacccccggccaggtgtacgacgtggaggaggtggacgtgaaggaccccaactacgacgacgaccaggagaactgcgtgtacgagaccgtggtgctgcccctggacgagagagccttcgagaagaccctgacccccatcatccaggagtacttcgagcacggcgacaccaacgaggtggccgagatgctgagagacctgaacctgggcgagatgaagagcggcgtgcccgtgctggccgtgagcctggccctggagggcaaggccagccacagagagatgaccagcaagctgctgagcgacctgtgcggcaccgtgatgagcaccaccgacgtggagaagagcttcgacaagctgctgaaggacctgcccgagctggccctggacacccccagagccccccagctggtgggccagttcatcgccagagccgtgggcgacggcatcctgtgcaacacctacatcgacagctacaagggcaccgtggactgcgtgcaggccagagccgccctggacaaggccaccgtgctgctgagcatgagcaagggcggcaagagaaaggacagcgtgtggggcagcggcggcggccagcagagcgtgaaccacctggtgaaggagatcgacatgctgctgaaggagtacctgctgagcggcgacatcagcgaggccgagcactgcctgaaggagctggaggtgccccacttccaccacgagctggtgtacgaggccatcatcatggtgctggagagcaccggcgagagcaccttcaagatgatcctggacctgctgaagagcctgtggaagagcagcaccatcaccgtggaccagatgaagagaggctacgagagaatctacaacgagatccccgacatcaacctggacgtgccccacagctacagcgtgctggagagattcgtggaggagtgcttccaggccggcatcatcagcaagcagctgagagacctgtgccccagcagaggcagaaagagattcgtgagcgagggcgacggcggcagactgaagcccgagagctactag

SEQ ID NO: 12308 - DNA, 1377 bp, synthetic construct
  misc_feature 1..1377: note = Description of Artificial Sequence: Synthetic coding sequence
  source 1..1377: mol_type = other DNA
atgaccaagtaccccgacaacctgagcgacagcctgttcagcggcgacgaggagaacgccggcaccgaggagatcaagaacgagatcaacggcaactggatcagcgccagcagcatcaacgaggccagaatcaacgccaaggccaagagaagactgagaaagaacagcagcagagacagcggcagaggcgacagcgtgagcgacagcggcagcgacgccctgagaagcggcctgaccgtgcccaccagccccaagggcagactgctggacagaagaagcagaagcggcaagggcagaggcctgcccaagaagggcggcgccggcggcaagggcgtgtggggcacccccggccaggtgtacgacgtggaggaggtggacgtgaaggaccccaactacgacgacgaccaggagaactgcgtgtacgagaccgtggtgctgcccctggacgagagagccttcgagaagaccctgacccccatcatccaggagtacttcgagcacggcgacaccaacgaggtggccgagatgctgagagacctgaacctgggcgagatgaagagcggcgtgcccgtgctggccgtgagcctggccctggagggcaaggccagccacagagagatgaccagcaagctgctgagcgacctgtgcggcaccgtgatgagcaccaccgacgtggagaagagcttcgacaagctgctgaaggacctgcccgagctggccctggacacccccagagccccccagctggtgggccagttcatcgccagagccgtgggcgacggcatcctgtgcaacacctacatcgacagctacaagggcaccgtggactgcgtgcaggccagagccgccctggacaaggccaccgtgctgctgagcatgagcaagggcggcaagagaaaggacagcgtgtggggcagcggcggcggccagcagagcgtgaaccacctggtgaaggagatcgacatgctgctgaaggagtacctgctgagcggcgacatcagcgaggccgagcactgcctgaaggagctggaggtgccccacttccaccacgagctggtgtacgaggccatcatcatggtgctggagagcaccggcgagagcaccttcaagatgatcctggacctgctgaagagcctgtggaagagcagcaccatcaccgtggaccagatgaagagaggctacgagagaatctacaacgagatccccgacatcaacctggacgtgccccacagctacagcgtgctggagagattcgtggaggagtgcttccaggccggcatcatcagcaagcagctgagagacctgtgccccagcagaggcagaaagagattcgtgagcgagggcgacggcggcagactgaagcccgagagctactag

SEQ ID NO: 12309 - DNA, 696 bp, synthetic construct
  misc_feature 1..696: note = Description of Artificial Sequence: Synthetic coding sequence
  source 1..696: mol_type = other DNA
atggacgtggagaacgagcagatcctgaacgtgaaccccgccgagaacgccggcaccgaggagatcaagaacgagatcaacggcaactggatcagcgccagcagcatcaacgaggccagaatcaacgccaaggccaagagaagactgagaaagaacagcagcagagacagcggcagaggcgacagcgtgagcgacagcggcagcgacgccctgagaagcggcctgaccgtgcccaccagccccaagggcagactgctggacagaagaagcagaagcggcaagggcagaggcctgcccaagaagggcggcgccggcggcaagggcgtgtggggcacccccggccaggtgtacgacgtggaggaggtggacgtgaaggaccccaactacgacgacgaccaggagaactgcgtgtacgagaccgtggtgctgcccctggacgagagagccttcgagaagaccctgacccccatcatccaggagtacttcgagcacggcgacaccaacgaggtggccgagatgctgagagacctgaacctgggcgagatgaagagcggcgtgcccgtgctggccgtgagcctggccctggagggcaaggccagccacagagagatgaccagcaagctgctgagcgacctgtgcggcaccgtgatgagcaccaccgacgtggagaagagcttcgacaagctgctgaagtag

SEQ ID NO: 12310 - DNA, 786 bp, synthetic construct
  misc_feature 1..786: note = Description of Artificial Sequence: Synthetic coding sequence
  source 1..786: mol_type = other DNA
atgttcgaggccagactggtgcagggcagcatcctgaagaaggtgctggaggccctgaaggacctgatcaacgaggcctgctgggacatcagcagcagcggcgtgaacctgcagagcatggacagcagccacgtgagcctggtgcagctgaccctgagaagcgagggcttcgacacctacagatgcgacagaaacctggccatgggcgtgaacctgaccagcatgagcaagatcctgaagtgcgccggcaacgaggacatcatcaccctgagagccgaggacaacgccgacaccctggccctggtgttcgaggcccccaaccaggagaaggtgagcgactacgagatgaagctgatggacctggacgtggagcagctgggcatccccgagcaggagtacagctgcgtggtgaagatgcccagcggcgagttcgccagaatctgcagagacctgagccacatcggcgacgccgtggtgatcagctgcgccaaggacggcgtgaagttcagcgccagcggcgagctgggcaacggcaacatcaagctgagccagaccagcaacgtggacaaggaggaggaggccgtgaccatcgagatgaacgagcccgtgcagctgaccttcgccctgagatacctgaacttcttcaccaaggccacccccctgagcagcaccgtgaccctgagcatgagcgccgacgtgcccctggtggtggagtacaagatcgccgacatgggccacctgaagtactacctggcccccaagatcgaggacgaggagggcagctag

SEQ ID NO: 12311 - DNA, 786 bp, synthetic construct; identical to SEQ ID NO: 12310
  misc_feature 1..786: note = Description of Artificial Sequence: Synthetic coding sequence
  source 1..786: mol_type = other DNA

SEQ ID NO: 12312 - DNA, 1140 bp, synthetic construct
  misc_feature 1..1140: note = Description of Artificial Sequence: Synthetic coding sequence
  source 1..1140: mol_type = other DNA
atgagcagccccagcctgagcgacctgggcaagagagagcccgccgccgccgccgacgagagaggcacccagcagagaagagcctgcgccaacgccacctggaacagcatccacaacggcgtgatcgccgtgttccagagaaagggcctgcccgaccaggagctgttcagcctgaacgagggcgtgagacagctgctgaagaccgagctgggcagcttcttcaccgagtacctgcagaaccagctgctgaccaagggcatggtgatcctgagagacaagatcagattctacgagggccagaagctgctggacagcctggccgagacctgggacttcttcttcagcgacgtgctgcccatgctgcaggccatcttctaccccgtgcagggcaaggagcccagcgtgagacagctggccctgctgcacttcagaaacgccatcaccctgagcgtgaagctggaggacgccctggccagagcccacgccagagtgccccccgccatcgtgcagatgctgctggtgctgcagggcgtgcacgagagcagaggcgtgaccgaggactacctgagactggagaccctggtgcagaaggtggtgagcccctacctgggcacctacggcctgcacagcagcgagggccccttcacccacagctgcatcctggagaagagactgctgagaagaagcagaagcggcgacgtgctggccaagaaccccgtggtgagaagcaagagctacaacacccccctgctgaaccccgtgcaggagcacgaggccgagggcgccgccgccggcggcaccagcatcagaagacacagcgtgagcgagatgaccagctgccccgagccccagggcttcagcgacccccccggccagggccccaccggcaccttcagaagcagccccgccccccacagcggcccctgccccagcagactgtaccccaccacccagccccccgagcagggcctggaccccaccagaagcagcctgcccagaagcagccccgagaacctggtggaccagatcctggagagcgtggacagcgacagcgagggcatcttcatcgacttcggcagaggcagaggcagcggcatgagcgacctggagggcagcggcggcagacagagcgtggtgtag

SEQ ID NO: 12313 - DNA, 1167 bp, synthetic construct
  misc_feature 1..1167: note = Description of Artificial Sequence: Synthetic coding sequence
  source 1..1167: mol_type = other DNA
atgagaaccctgagaagactgaagttcatgagcagccccagcctgagcgacctgggcaagagagagcccgccgccgccgccgacgagagaggcacccagcagagaagagcctgcgccaacgccacctggaacagcatccacaacggcgtgatcgccgtgttccagagaaagggcctgcccgaccaggagctgttcagcctgaacgagggcgtgagacagctgctgaagaccgagctgggcagcttcttcaccgagtacctgcagaaccagctgctgaccaagggcatggtgatcctgagagacaagatcagattctacgagggccagaagctgctggacagcctggccgagacctgggacttcttcttcagcgacgtgctgcccatgctgcaggccatcttctaccccgtgcagggcaaggagcccagcgtgagacagctggccctgctgcacttcagaaacgccatcaccctgagcgtgaagctggaggacgccctggccagagcccacgccagagtgccccccgccatcgtgcagatgctgctggtgctgcagggcgtgcacgagagcagaggcgtgaccgaggactacctgagactggagaccctggtgcagaaggtggtgagcccctacctgggcacctacggcctgcacagcagcgagggccccttcacccacagctgcatcctggagaagagactgctgagaagaagcagaagcggcgacgtgctggccaagaaccccgtggtgagaagcaagagctacaacacccccctgctgaaccccgtgcaggagcacgaggccgagggcgccgccgccggcggcaccagcatcagaagacacagcgtgagcgagatgaccagctgccccgagccccagggcttcagcgacccccccggccagggccccaccggcaccttcagaagcagccccgccccccacagcggcccctgccccagcagactgtaccccaccacccagccccccgagcagggcctggaccccaccagaagcagcctgcccagaagcagccccgagaacctggtggaccagatcctggagagcgtggacagcgacagcgagggcatcttcatcgacttcggcagaggcagaggcagcggcatgagcgacctggagggcagcggcggcagacagagcgtggtgtag

SEQ ID NO: 12314 - DNA, 804 bp, synthetic construct
  misc_feature 1..804: note = Description of Artificial Sequence: Synthetic coding sequence
  source 1..804: mol_type = other DNA
atgagcagccccagcctgagcgacctgggcaagagagagcccgccgccgccgccgacgagagaggcacccagcagagaagagcctgcgccaacgccacctggaacagcatccacaacggcgtgatcgccgtgttccagagaaagggcctgcccgaccaggagctgttcagcctgaacgagggcgtgagacagctgctgaagaccgagctgggcagcttcttcaccgagtacctgcagaaccagctgctgaccaagggcatggtgatcctgagagacaagatcagattctacgagggccagaagctgctggacagcctggccgagacctgggacttcttcttcagcgacgtgctgcccatgctgcaggccatcttctaccccgtgcagggcaaggagcccagcgtgagacagctggccctgctgcacttcagaaacgccatcaccctgagcgtgaagctggaggacgccctggccagagcccacgccagagtgccccccgccatcgtgcagatgctgctggtgctgcagggcgtgcacgagagcagaggcgtgaccgaggactacctgagactggagaccctggtgcagaaggtggtgagcccctacctgggcacctacggcctgcacagcagcgagggccccttcacccacagctgcatcctggagaagagactgctgagaagaagcagaagcggcgacgtgctggccaagaaccccgtggtgagaagcaagagctacaacacccccctgctgaaccccgtgcaggagcacgaggccgagggcgccgccgccggcggcacctag

SEQ ID NO: 12315 - DNA, 681 bp, synthetic construct
  misc_feature 1..681: note = Description of Artificial Sequence: Synthetic coding sequence
  source 1..681: mol_type = other DNA
atgagcagccccagcctgagcgacctgggcaagagagagcccgccgccgccgccgacgagagaggcacccagcagagaagagcctgcgccaacgccacctggaacagcatccacaacggcgtgatcgccgtgttccagagaaagggcctgcccgaccaggagctgttcagcctgaacgagggcgtgagacagctgctgaagaccgagctgggcagcttcttcaccgagtacctgcagaaccagctgctgaccaagggcatggtgatcctgagagacaagatcagattctacgagggccagaagctgctggacagcctggccgagacctgggacttcttcttcagcgacgtgctgcccatgctgcaggccatcttctaccccgtgcagggcaaggagcccagcgtgagacagctggccctgctgcacttcagaaacgccatcaccctgagcgtgaagctggaggacgccctggccagagcccacgccagagtgccccccgccatcgtgcagatgctgctggtgctgcagggcgtgcacgagagcagaggcgtgaccgaggactacctgagactggagaccctggtgcagaaggtggtgagcccctacctgggcacctacggcctgcacagcagcgagggccccttcacccacagctgcatcctggagaagagactgctgtag

SEQ ID NO: 12316 - DNA, 1236 bp, synthetic construct
  misc_feature 1..1236: note = Description of Artificial Sequence: Synthetic coding sequence
  source 1..1236: mol_type = other DNA
atggtgtgcctggagctgagccagagagaggcctggggcagcggcagccccgagaagatgcccgcccagcccgagggcctgtacagactgaagttcatgagcagccccagcctgagcgacctgggcaagagagagcccgccgccgccgccgacgagagaggcacccagcagagaagagcctgcgccaacgccacctggaacagcatccacaacggcgtgatcgccgtgttccagagaaagggcctgcccgaccaggagctgttcagcctgaacgagggcgtgagacagctgctgaagaccgagctgggcagcttcttcaccgagtacctgcagaaccagctgctgaccaagggcatggtgatcctgagagacaagatcagattctacgagggccagaagctgctggacagcctggccgagacctgggacttcttcttcagcgacgtgctgcccatgctgcaggccatcttctaccccgtgcagggcaaggagcccagcgtgagacagctggccctgctgcacttcagaaacgccatcaccctgagcgtgaagctggaggacgccctggccagagcccacgccagagtgccccccgccatcgtgcagatgctgctggtgctgcagggcgtgcacgagagcagaggcgtgaccgaggactacctgagactggagaccctggtgcagaaggtggtgagcccctacctgggcacctacggcctgcacagcagcgagggccccttcacccacagctgcatcctggagaagagactgctgagaagaagcagaagcggcgacgtgctggccaagaaccccgtggtgagaagcaagagctacaacacccccctgctgaaccccgtgcaggagcacgaggccgagggcgccgccgccggcggcaccagcatcagaagacacagcgtgagcgagatgaccagctgccccgagccccagggcttcagcgacccccccggccagggccccaccggcaccttcagaagcagccccgccccccacagcggcccctgccccagcagactgtaccccaccacccagccccccgagcagggcctggaccccaccagaagcagcctgcccagaagcagccccgagaacctggtggaccagatcctggagagcgtggacagcgacagcgagggcatcttcatcgacttcggcagaggcagaggcagcggcatgagcgacctggagggcagcggcggcagacagagcgtggtgtag

SEQ ID NO: 12317 - DNA, 2649 bp, synthetic construct
  misc_feature 1..2649: note = Description of Artificial Sequence: Synthetic coding sequence
  source 1..2649: mol_type = other DNA
atggagcccgcccccgccagaagccccagaccccagcaggaccccgccagaccccaggagcccaccatgcccccccccgagacccccagcgagggcagacagcccagccccagccccagccccaccgagagagcccccgccagcgaggaggagttccagttcctgagatgccagcagtgccaggccgaggccaagtgccccaagctgctgccctgcctgcacaccctgtgcagcggctgcctggaggccagcggcatgcagtgccccatctgccaggccccctggcccctgggcgccgacacccccgccctggacaacgtgttcttcgagagcctgcagagaagactgagcgtgtacagacagatcgtggacgcccaggccgtgtgcaccagatgcaaggagagcgccgacttctggtgcttcgagtgcgagcagctgctgtgcgccaagtgcttcgaggcccaccagtggttcctgaagcacgaggccagacccctggccgagctgagaaaccagagcgtgagagagttcctggacggcaccagaaagaccaacaacatcttctgcagcaaccccaaccacagaacccccaccctgaccagcatctactgcagaggctgcagcaagcccctgtgctgcagctgcgccctgctggacagcagccacagcgagctgaagtgcgacatcagcgccgagatccagcagagacaggaggagctggacgccatgacccaggccctgcaggagcaggacagcgccttcggcgccgtgcacgcccagatgcacgccgccgtgggccagctgggcagagccagagccgagaccgaggagctgatcagagagagagtgagacaggtggtggcccacgtgagagcccaggagagagagctgctggaggccgtggacgccagataccagagagactacgaggagatggccagcagactgggcagactggacgccgtgctgcagagaatcagaaccggcagcgccctggtgcagagaatgaagtgctacgccagcgaccaggaggtgctggacatgcacggcttcctgagacaggccctgtgcagactgagacaggaggagccccagagcctgcaggccgccgtgagaaccgacggcttcgacgagttcaaggtgagactgcaggacctgagcagctgcatcacccagggcaaggacgccgccgtgagcaagaaggccagccccgaggccgccagcacccccagagaccccatcgacgtggacctgcccgaggaggccgagagagtgaaggcccaggtgcaggccctgggcctggccgaggcccagcccatggccgtggtgcagagcgtgcccggcgcccaccccgtgcccgtgtacgccttcagcatcaagggccccagctacggcgaggacgtgagcaacaccaccaccgcccagaagagaaagtgcagccagacccagtgccccagaaaggtgatcaagatggagagcgaggagggcaaggaggccagactggccagaagcagccccgagcagcccagacccagcaccagcaaggccgtgagccccccccacctggacggcccccccagccccagaagccccgtgatcggcagcgaggtgttcctgcccaacagcaaccacgtggccagcggcgccggcgaggccgaggagagagtggtggtgatcagcagcagcgaggacagcgacgccgagaacagcagcagcagagagctggacgacagcagcagcgagagcagcgacctgcagctggagggccccagcaccctgagagtgctggacgagaacctggccgacccccaggccgaggacagacccctggtgttcttcgacctgaagatcgacaacgagacccagaagatcagccagctggccgccgtgaacagagagagcaagttcagagtggtgatccagcccgaggccttcttcagcatctacagcaaggccgtgagcctggaggtgggcctgcagcacttcctgagcttcctgagcagcatgagaagacccatcctggcctgctacaagctgtggggccccggcctgcccaacttcttcagagccctggaggacatcaacagactgtgggagttccaggaggccatcagcggcttcctggccgccctgcccctgatcagagagagagtgcccggcgccagcagcttcaagctgaagaacctggcccagacctacctggccagaaacatgagcgagagaagcgccatggccgccgtgctggccatgagagacctgtgcagactgctggaggtgagccccggcccccagctggcccagcacgtgtaccccttcagcagcctgcagtgcttcgccagcctgcagcccctggtgcaggccgccgtgctgcccagagccgaggccagactgctggccctgcacaacgtgagcttcatggagctgctgagcgcccacagaagagacagacagggcggcctgaagaagtacagcagatacctgagcctgcagaccaccaccctgccccccgcccagcccgccttcaacctgcaggccctgggcacctacttcgagggcctgctggagggccccgccctggccagagccgagggcgtgagcacccccctggccggcagaggcctggccgagagagccagccagcagagctag

SEQ ID NO: 12318 - DNA, 2490 bp, synthetic construct
  misc_feature 1..2490: note = Description of Artificial Sequence: Synthetic coding sequence
  source 1..2490: mol_type = other DNA
atggagcccgcccccgccagaagccccagaccccagcaggaccccgccagaccccaggagcccaccatgcccccccccgagacccccagcgagggcagacagcccagccccagccccagccccaccgagagagcccccgccagcgaggaggagttccagttcctgagatgccagcagtgccaggccgaggccaagtgccccaagctgctgccctgcctgcacaccctgtgcagcggctgcctggaggccagcggcatgcagtgccccatctgccaggccccctggcccctgggcgccgacacccccgccctggacaacgtgttcttcgagagcctgcagagaagactgagcgtgtacagacagatcgtggacgcccaggccgtgtgcaccagatgcaaggagagcgccgacttctggtgcttcgagtgcgagcagctgctgtgcgccaagtgcttcgaggcccaccagtggttcctgaagcacgaggccagacccctggccgagctgagaaaccagagcgtgagagagttcctggacggcaccagaaagaccaacaacatcttctgcagcaaccccaaccacagaacccccaccctgaccagcatctactgcagaggctgcagcaagcccctgtgctgcagctgcgccctgctggacagcagccacagcgagctgaagtgcgacatcagcgccgagatccagcagagacaggaggagctggacgccatgacccaggccctgcaggagcaggacagcgccttcggcgccgtgcacgcccagatgcacgccgccgtgggccagctgggcagagccagagccgagaccgaggagctgatcagagagagagtgagacaggtggtggcccacgtgagagcccaggagagagagctgctggaggccgtggacgccagataccagagagactacgaggagatggccagcagactgggcagactggacgccgtgctgcagagaatcagaaccggcagcgccctggtgcagagaatgaagtgctacgccagcgaccaggaggtgctggacatgcacggcttcctgagacaggccctgtgcagactgagacaggaggagccccagagcctgcaggccgccgtgagaaccgacggcttcgacgagttcaaggtgagactgcaggacctgagcagctgcatcacccagggcaaggacgccgccgtgagcaagaaggccagccccgaggccgccagcacccccagagaccccatcgacgtggacctgcccgaggaggccgagagagtgaaggcccaggtgcaggccctgggcctggccgaggcccagcccatggccgtggtgcagagcgtgcccggcgcccaccccgtgcccgtgtacgccttcagcatcaagggccccagctacggcgaggacgtgagcaacaccaccaccgcccagaagagaaagtgcagccagacccagtgccccagaaaggtgatcaagatggagagcgaggagggcaaggaggccagactggccagaagcagccccgagcagcccagacccagcaccagcaaggccgtgagccccccccacctggacggcccccccagccccagaagccccgtgatcggcagcgaggtgttcctgcccaacagcaaccacgtggccagcggcgccggcgaggccgaggagagagtggtggtgatcagcagcagcgaggacagcgacgccgagaacagctgcatggagcccatggagaccgccgagccccagagcagccccgcccacagcagccccgcccacagcagccccgcccacagcagccccgtgcagagcctgctgagagcccagggcgccagcagcctgccctgcggcacctaccacccccccgcctggcccccccaccagcccgccgagcaggccgccacccccgacgccgagccccacagcgagccccccgaccaccaggagagacccgccgtgcacagaggcatcagatacctgctgtacagagcccagagagccatcagactgagacacgccctgagactgcacccccagctgcacagagcccccatcagaacctggagcccccacgtggtgcaggccagcacccccgccatcaccggccccctgaaccaccccgccaacgcccaggagcaccccgcccagctgcagagaggcatcagccccccccacagaatcagaggcgccgtgagaagcagaagcagaagcctgagaggcagcagccacctgagccagtggctgaacaacttcttcgccctgcccttcagcagcatggccagccagctggacatgagcagcgtggtgggcgccggcgagagcagagcccagaccctgggcgccggcgtgccccccggcgacagcgtgagaggcagcatggaggccagccaggtgcaggtgcccctggaggccagccccatcaccttcccccccccctgcgcccccgagagaccccccatcagccccgtgcccggcgccagacaggccggcctgtag

SEQ ID NO: 12319 - DNA, 2346 bp, synthetic construct
  misc_feature 1..2346: note = Description of Artificial Sequence: Synthetic coding sequence
  source 1..2346: mol_type = other DNA
atggagcccgcccccgccagaagccccagaccccagcaggaccccgccagaccccaggagcccaccatgcccccccccgagacccccagcgagggcagacagcccagccccagccccagccccaccgagagagcccccgccagcgaggaggagttccagttcctgagatgccagcagtgccaggccgaggccaagtgccccaagctgctgccctgcctgcacaccctgtgcagcggctgcctggaggccagcggcatgcagtgccccatctgccaggccccctggcccctgggcgccgacacccccgccctggacaacgtgttcttcgagagcctgcagagaagactgagcgtgtacagacagatcgtggacgcccaggccgtgtgcaccagatgcaaggagagcgccgacttctggtgcttcgagtgcgagcagctgctgtgcgccaagtgcttcgaggcccaccagtggttcctgaagcacgaggccagacccctggccgagctgagaaaccagagcgtgagagagttcctggacggcaccagaaagaccaacaacatcttctgcagcaaccccaaccacagaacccccaccctgaccagcatctactgcagaggctgcagcaagcccctgtgctgcagctgcgccctgctggacagcagccacagcgagctgaagtgcgacatcagcgccgagatccagcagagacaggaggagctggacgccatgacccaggccctgcaggagcaggacagcgccttcggcgccgtgcacgcccagatgcacgccgccgtgggccagctgggcagagccagagccgagaccgaggagctgatcagagagagagtgagacaggtggtggcccacgtgagagcccaggagagagagctgctggaggccgtggacgccagataccagagagactacgaggagatggccagcagactgggcagactggacgccgtgctgcagagaatcagaaccggcagcgccctggtgcagagaatgaagtgctacgccagcgaccaggaggtgctggacatgcacggcttcctgagacaggccctgtgcagactgagacaggaggagccccagagcctgcaggccgccgtgagaaccgacggcttcgacgagttcaaggtgagactgcaggacctgagcagctgcatcacccagggcaaggacgccgccgtgagcaagaaggccagccccgaggccgccagcacccccagagaccccatcgacgtggacctggacgtgagcaacaccaccaccgcccagaagagaaagtgcagccagacccagtgccccagaaaggtgatcaagatggagagcgaggagggcaaggaggccagactggccagaagcagccccgagcagcccagacccagcaccagcaaggccgtgagccccccccacctggacggcccccccagccccagaagccccgtgatcggcagcgaggtgttcctgcccaacagcaaccacgtggccagcggcgccggcgaggccgaggagagagtggtggtgatcagcagcagcgaggacagcgacgccgagaacagctgcatggagcccatggagaccgccgagccccagagcagccccgcccacagcagccccgcccacagcagccccgcccacagcagccccgtgcagagcctgctgagagcccagggcgccagcagcctgccctgcggcacctaccacccccccgcctggcccccccaccagcccgccgagcaggccgccacccccgacgccgagccccacagcgagccccccgaccaccaggagagacccgccgtgcacagaggcatcagatacctgctgtacagagcccagagagccatcagactgagacacgccctgagactgcacccccagctgcacagagcccccatcagaacctggagcccccacgtggtgcaggccagcacccccgccatcaccggccccctgaaccaccccgccaacgcccaggagcaccccgcccagctgcagagaggcatcagccccccccacagaatcagaggcgccgtgagaagcagaagcagaagcctgagaggcagcagccacctgagccagtggctgaacaacttcttcgccctgcccttcagcagcatggccagccagctggacatgagcagcgtggtgggcgccggcgagagcagagcccagaccctgggcgccggcgtgccccccggcgacagcgtgagaggcagcatggaggccagccaggtgcaggtgcccctggaggccagccccatcaccttcccccccccctgcgcccccgagagaccccccatcagccccgtgcccggcgccagacaggccggcctgtag

SEQ ID NO: 12320 - DNA, 1272 bp, synthetic construct
  misc_feature 1..1272: note = Description of Artificial Sequence: Synthetic coding sequence
  source 1..1272: mol_type = other DNA
atggagcccgcccccgccagaagccccagaccccagcaggaccccgccagaccccaggagcccaccatgcccccccccgagacccccagcgagggcagacagcccagccccagccccagccccaccgagagagcccccgccagcgaggaggagttccagttcctgagatgccagcagtgccaggccgaggccaagtgccccaagctgctgccctgcctgcacaccctgtgcagcggctgcctggaggccagcggcatgcagtgccccatctgccaggccccctggcccctgggcgccgacacccccgccctggacaacgtgttcttcgagagcctgcagagaagactgagcgtgtacagacagatcgtggacgcccaggccgtgtgcaccagatgcaaggagagcgccgacttctggtgcttcgagtgcgagcagctgctgtgcgccaagtgcttcgaggcccaccagtggttcctgaagcacgaggccagacccctggccgagctgagaaaccagagcgtgagagagttcctggacggcaccagaaagaccaacaacatcttctgcagcaaccccaaccacagaacccccaccctgaccagcatctactgcagaggctgcagcaagcccctgtgctgcagctgcgccctgctggacagcagccacagcgagctgaagtgcgacatcagcgccgagatccagcagagacaggaggagctggacgccatgacccaggccctgcaggagcaggacagcgccttcggcgccgtgcacgcccagatgcacgccgccgtgggccagctgggcagagccagagccgagaccgaggagctgatcagagagagagtgagacaggtggtggcccacgtgagagcccaggagagagagctgctggaggccgtggacgccagataccagagagactacgaggagatggccagcagactgggcagactggacgccgtgctgcagagaatcagaaccggcagcgccctggtgcagagaatgaagtgctacgccagcgaccaggaggtgctggacatgcacggcttcctgagacaggccctgtgcagactgagacaggaggagccccagagcctgcaggccgccgtgagaaccgacggcttcgacgagttcaaggtgagactgcaggacctgagcagctgcatcacccagggcaaggacgccgccgtgagcaagaaggccagccccgaggccgccagcacccccagagaccccatcgacgtggacctgagaaacgccctgtggtag

SEQ ID NO: 12321 - DNA, 1308 bp, synthetic construct
  misc_feature 1..1308: note = Description of Artificial Sequence: Synthetic coding sequence
  source 1..1308: mol_type = other DNA
atggagcccgcccccgccagaagccccagaccccagcaggaccccgccagaccccaggagcccaccatgcccccccccgagacccccagcgagggcagacagcccagccccagccccagccccaccgagagagcccccgccagcgaggaggagttccagttcctgagatgccagcagtgccaggccgaggccaagtgccccaagctgctgccctgcctgcacaccctgtgcagcggctgcctggaggccagcggcatgcagtgccccatctgccaggccccctggcccctgggcgccgacacccccgccctggacaacgtgttcttcgagagcctgcagagaagactgagcgtgtacagacagatcgtggacgcccaggccgtgtgcaccagatgcaaggagagcgccgacttctggtgcttcgagtgcgagcagctgctgtgcgccaagtgcttcgaggcccaccagtggttcctgaagcacgaggccagacccctggccgagctgagaaaccagagcgtgagagagttcctggacggcaccagaaagaccaacaacatcttctgcagcaaccccaaccacagaacccccaccctgaccagcatctactgcagaggctgcagcaagcccctgtgctgcagctgcgccctgctggacagcagccacagcgagctgaagtgcgacatcagcgccgagatccagcagagacaggaggagctggacgccatgacccaggccctgcaggagcaggacagcgccttcggcgccgtgcacgcccagatgcacgccgccgtgggccagctgggcagagccagagccgagaccgaggagctgatcagagagagagtgagacaggtggtggcccacgtgagagcccaggagagagagctgctggaggccgtggacgccagataccagagagactacgaggagatggccagcagactgggcagactggacgccgtgctgcagagaatcagaaccggcagcgccctggtgcagagaatgaagtgctacgccagcgaccaggaggtgctggacatgcacggcttcctgagacaggccctgtgcagactgagacaggaggagccccagagcctgcaggccgccgtgagaaccgacggcttcgacgagttcaaggtgagactgcaggacctgagcagctgcatcacccagggcaaggacgccgccgtgagcaagaaggccagccccgaggccgccagcacccccagagaccccatcgacgtggacctgctgcccccccccgcccacgccctgaccggccccgcccagagcagcacccactag

SEQ ID NO: 12322 - DNA, 1902 bp, synthetic construct
  misc_feature 1..1902: note = Description of Artificial Sequence: Synthetic coding sequence
  source 1..1902: mol_type = other DNA
atggagcccgcccccgccagaagccccagaccccagcaggaccccgccagaccccaggagcccaccatgcccccccccgagacccccagcgagggcagacagcccagccccagccccagccccaccgagagagcccccgccagcgaggaggagttccagttcctgagatgccagcagtgccaggccgaggccaagtgccccaagctgctgccctgcctgcacaccctgtgcagcggctgcctggaggccagcggcatgcagtgccccatctgccaggccccctggcccctgggcgccgacacccccgccctggacaacgtgttcttcgagagcctgcagagaagactgagcgtgtacagacagatcgtggacgcccaggccgtgtgcaccagatgcaaggagagcgccgacttctggtgcttcgagtgcgagcagctgctgtgcgccaagtgcttcgaggcccaccagtggttcctgaagcacgaggccagacccctggccgagctgagaaaccagagcgtgagagagttcctggacggcaccagaaagaccaacaacatcttctgcagcaaccccaaccacagaacccccaccctgaccagcatctactgcagaggctgcagcaagcccctgtgctgcagctgcgccctgctggacagcagccacagcgagctgaagtgcgacatcagcgccgagatccagcagagacaggaggagctggacgccatgacccaggccctgcaggagcaggacagcgccttcggcgccgtgcacgcccagatgcacgccgccgtgggccagctgggcagagccagagccgagaccgaggagctgatcagagagagagtgagacaggtggtggcccacgtgagagcccaggagagagagctgctggaggccgtggacgccagataccagagagactacgaggagatggccagcagactgggcagactggacgccgtgctgcagagaatcagaaccggcagcgccctggtgcagagaatgaagtgctacgccagcgaccaggaggtgctggacatgcacggcttcctgagacaggccctgtgcagactgagacaggaggagccccagagcctgcaggccgccgtgagaaccgacggcttcgacgagttcaaggtgagactgcaggacctgagcagctgcatcacccagggcaaggacgccgccgtgagcaagaaggccagccccgaggccgccagcacccccagagaccccatcgacgtggacctgcccgaggaggccgagagagtgaaggcccaggtgcaggccctgggcctggccgaggcccagcccatggccgtggtgcagagcgtgcccggcgcccaccccgtgcccgtgtacgccttcagcatcaagggccccagctacggcgaggacgtgagcaacaccaccaccgcccagaagagaaagtgcagccagacccagtgccccagaaaggtgatcaagatggagagcgaggagggcaaggaggccagactggccagaagcagccccgagcagcccagacccagcaccagcaaggccgtgagccccccccacctggacggcccccccagccccagaagccccgtgatcggcagcgaggtgttcctgcccaacagcaaccacgtggccagcggcgccggcgaggccgaggagagagtggtggtgatcagcagcagcgaggacagcgacgccgagaacagcagcagcagagagctggacgacagcagcagcgagagcagcgacctgcagctggagggccccagcaccctgagagtgctggacgagaacctggccgacccccaggccgaggacagacccctggtgttcttcgacctgaagatcgacaacgagagcggcttcagctggggctacccccaccccttcctgatctag

SEQ ID NO: 12323 - DNA, 1332 bp, synthetic construct
  misc_feature 1..1332: note = Description of Artificial Sequence: Synthetic coding sequence
  source 1..1332: mol_type = other DNA
atggccgtggtgcagagcgtgcccggcgcccaccccgtgcccgtgtacgccttcagcatcaagggccccagctacggcgaggacgtgagcaacaccaccaccgcccagaagagaaagtgcagccagacccagtgccccagaaaggtgatcaagatggagagcgaggagggcaaggaggccagactggccagaagcagccccgagcagcccagacccagcaccagcaaggccgtgagccccccccacctggacggcccccccagccccagaagccccgtgatcggcagcgaggtgttcctgcccaacagcaaccacgtggccagcggcgccggcgaggccgaggagagagtggtggtgatcagcagcagcgaggacagcgacgccgagaacagcagcagcagagagctggacgacagcagcagcgagagcagcgacctgcagctggagggccccagcaccctgagagtgctggacgagaacctggccgacccccaggccgaggacagacccctggtgttcttcgacctgaagatcgacaacgagacccagaagatcagccagctggccgccgtgaacagagagagcaagttcagagtggtgatccagcccgaggccttcttcagcatctacagcaaggccgtgagcctggaggtgggcctgcagcacttcctgagcttcctgagcagcatgagaagacccatcctggcctgctacaagctgtggggccccggcctgcccaacttcttcagagccctggaggacatcaacagactgtgggagttccaggaggccatcagcggcttcctggccgccctgcccctgatcagagagagagtgcccggcgccagcagcttcaagctgaagaacctggcccagacctacctggccagaaacatgagcgagagaagcgccatggccgccgtgctggccatgagagacctgtgcagactgctggaggtgagccccggcccccagctggcccagcacgtgtaccccttcagcagcctgcagtgcttcgccagcctgcagcccctggtgcaggccgccgtgctgcccagagccgaggccagactgctggccctgcacaacgtgagcttcatggagctgctgagcgcccacagaagagacagacagggcggcctgaagaagtacagcagatacctgagcctgcagaccaccaccctgccccccgcccagcccgccttcaacctgcaggccctgggcacctacttcgagggcctgctggagggccccgccctggccagagccgagggcgtgagcacccccctggccggcagaggcctggccgagagagccagccagcagagctag

SEQ ID NO: 12324 - DNA, 2598 bp, synthetic construct
  misc_feature 1..2598: note = Description of Artificial Sequence: Synthetic coding sequence
  source 1..2598: mol_type = other DNA
atggagcccgcccccgccagaagccccagaccccagcaggaccccgccagaccccaggagcccaccatgcccccccccgagacccccagcgagggcagacagcccagccccagccccagccccaccgagagagcccccgccagcgaggaggagttccagttcctgagatgccagcagtgccaggccgaggccaagtgccccaagctgctgccctgcctgcacaccctgtgcagcggctgcctggaggccagcggcatgcagtgccccatctgccaggccccctggcccctgggcgccgacacccccgccctggacaacgtgttcttcgagagcctgcagagaagactgagcgtgtacagacagatcgtggacgcccaggccgtgtgcaccagatgcaaggagagcgccgacttctggtgcttcgagtgcgagcagctgctgtgcgccaagtgcttcgaggcccaccagtggttcctgaagcacgaggccagacccctggccgagctgagaaaccagagcgtgagagagttcctggacggcaccagaaagaccaacaacatcttctgcagcaaccccaaccacagaacccccaccctgaccagcatctactgcagaggctgcagcaagcccctgtgctgcagctgcgccctgctggacagcagccacagcgagctgaagtgcgacatcagcgccgagatccagcagagacaggaggagctggacgccatgacccaggccctgcaggagcaggacagcgccttcggcgccgtgcacgcccagatgcacgccgccgtgggccagctgggcagagccagagccgagaccgaggagctgatcagagagagagtgagacaggtggtggcccacgtgagagcccaggagagagagctgctggaggccgtggacgccagataccagagagactacgaggagatggccagcagactgggcagactggacgccgtgctgcagagaatcagaaccggcagcgccctggtgcagagaatgaagtgctacgccagcgaccaggaggtgctggacatgcacggcttcctgagacaggccctgtgcagactgagacaggaggagccccagagcctgcaggccgccgtgagaaccgacggcttcgacgagttcaaggtgagactgcaggacctgagcagctgcatcacccagggcaaggacgccgccgtgagcaagaaggccagccccgaggccgccagcacccccagagaccccatcgacgtggacctgcccgaggaggccgagagagtgaaggcccaggtgcaggccctgggcctggccgaggcccagcccatggccgtggtgcagagcgtgcccggcgcccaccccgtgcccgtgtacgccttcagcatcaagggccccagctacggcgaggacgtgagcaacaccaccaccgcccagaagagaaagtgcagccagacccagtgccccagaaaggtgatcaagatggagagcgaggagggcaaggaggccagactggccagaagcagccccgagcagcccagacccagcaccagcaaggccgtgagccccccccacctggacggcccccccagccccagaagccccgtgatcggcagcgaggtgttcctgcccaacagcaaccacgtggccagcggcgccggcgaggccgaggagagagtggtggtgatcagcagcagcgaggacagcgacgccgagaacagcagcagcagagagctggacgacagcagcagcgagagcagcgacctgcagctggagggccccagcaccctgagagtgctggacgagaacctggccgacccccaggccgaggacagacccctggtgttcttcgacctgaagatcgacaacgagacccagaagatcagccagctggccgccgtgaacagagagagcaagttcagagtggtgatccagcccgaggccttcttcagcttcctgagcagcatgagaagacccatcctggcctgctacaagctgtggggccccggcctgcccaacttcttcagagccctggaggacatcaacagactgtgggagttccaggaggccatcagcggcttcctggccgccctgcccctgatcagagagagagtgcccggcgccagcagcttcaagctgaagaacctggcccagacctacctggccagaaacatgagcgagagaagcgccatggccgccgtgctggccatgagagacctgtgcagactgctggaggtgagccccggcccccagctggcccagcacgtgtaccccttcagcagcctgcagtgcttcgccagcctgcagcccctggtgcaggccgccgtgctgcccagagccgaggccagactgctggccctgcacaacgtgagcttcatggagctgctgagcgcccacagaagagacagacagggcggcctgaagaagtacagcagatacctgagcctgcagaccaccaccctgccccccgcccagcccgccttcaacctgcaggccctgggcacctacttcgagggcctgctggagggccccgccctggccagagccgagggcgtgagcacccccctggccggcagaggcctggccgagagagccagccagcagagctag

SEQ ID NO: 12325 - DNA, 1836 bp, synthetic construct
  misc_feature 1..1836: note = Description of Artificial Sequence: Synthetic coding sequence
  source 1..1836: mol_type = other DNA
atggagcccgcccccgccagaagccccagaccccagcaggaccccgccagaccccaggagcccaccatgcccccccccgagacccccagcgagggcagacagcccagccccagccccagccccaccgagagagcccccgccagcgaggaggagttccagttcctgagatgccagcagtgccaggccgaggccaagtgccccaagctgctgccctgcctgcacaccctgtgcagcggctgcctggaggccagcggcatgcagtgccccatctgccaggccccctggcccctgggcgccgacacccccgccctggacaacgtgttcttcgagagcctgcagagaagactgagcgtgtacagacagatcgtggacgcccaggccgtgtgcaccagatgcaaggagagcgccgacttctggtgcttcgagtgcgagcagctgctgtgcgccaagtgcttcgaggcccaccagtggttcctgaagcacgaggccagacccctggccgagctgagaaaccagagcgtgagagagttcctggacggcaccagaaagaccaacaacatcttctgcagcaaccccaaccacagaacccccaccctgaccagcatctactgcagaggctgcagcaagcccctgtgctgcagctgcgccctgctggacagcagccacagcgagctgaagtgcgacatcagcgccgagatccagcagagacaggaggagctggacgccatgacccaggccctgcaggagcaggacagcgccttcggcgccgtgcacgcccagatgcacgccgccgtgggccagctgggcagagccagagccgagaccgaggagctgatcagagagagagtgagacaggtggtggcccacgtgagagcccaggagagagagctgctggaggccgtggacgccagataccagagagactacgaggagatggccagcagactgggcagactggacgccgtgctgcagagaatcagaaccggcagcgccctggtgcagagaatgaagtgctacgccagcgaccaggaggtgctggacatgcacggcttcctgagacaggccctgtgcagactgagacaggaggagccccagagcctgcaggccgccgtgagaaccgacggcttcgacgagttcaaggtgagactgcaggacctgagcagctgcatcacccagggcaaggacgccgccgtgagcaagaaggccagccccgaggccgccagcacccccagagaccccatcgacgtggacctgcccgaggaggccgagagagtgaaggcccaggtgcaggccctgggcctggccgaggcccagcccatggccgtggtgcagagcgtgcccggcgcccaccccgtgcccgtgtacgccttcagcatcaagggccccagctacggcgaggacgtgagcaacaccaccaccgcccagaagagaaagtgcagccagacccagtgccccagaaaggtgatcaagatggagagcgaggagggcaaggaggccagactggccagaagcagccccgagcagcccagacccagcaccagcaaggccgtgagccccccccacctggacggcccccccagccccagaagccccgtgatcggcagcgaggtgttcctgcccaacagcaaccacgtggccagcggcgccggcgaggccgaggagagagtggtggtgatcagcagcagcgaggacagcgacgccgagaacagcgtgagcggccccgaggtgcagcccagaacccccgccagcccccacttcagaagccagggcgcccagccccagcaggtgaccctgagactggccctgagactgggcaacttccccgtgagacactag

SEQ ID NO: 12326 - DNA, 1683 bp, synthetic construct
  misc_feature 1..1683: note = Description of Artificial Sequence: Synthetic coding sequence
  source 1..1683: mol_type = other DNA
atggagcccgcccccgccagaagccccagaccccagcaggaccccgccagaccccaggagcccaccatgcccccccccgagacccccagcgagggcagacagcccagccccagccccagccccaccgagagagcccccgccagcgaggaggagttccagttcctgagatgccagcagtgccaggccgaggccaagtgccccaagctgctgccctgcctgcacaccctgtgcagcggctgcctggaggccagcggcatgcagtgccccatctgccaggccccctggcccctgggcgccgacacccccgccctggacaacgtgttcttcgagagcctgcagagaagactgagcgtgtacagacagatcgtggacgcccaggccgtgtgcaccagatgcaaggagagcgccgacttctggtgcttcgagtgcgagcagctgctgtgcgccaagtgcttcgaggcccaccagtggttcctgaagcacgaggccagacccctggccgagctgagaaaccagagcgtgagagagttcctggacggcaccagaaagaccaacaacatcttctgcagcaaccccaaccacagaacccccaccctgaccagcatctactgcagaggctgcagcaagcccctgtgctgcagctgcgccctgctggacagcagccacagcgagctgaagtgcgacatcagcgccgagatccagcagagacaggaggagctggacgccatgacccaggccctgcaggagcaggacagcgccttcggcgccgtgcacgcccagatgcacgccgccgtgggccagctgggcagagccagagccgagaccgaggagctgatcagagagagagtgagacaggtggtggcccacgtgagagcccaggagagagagctgctggaggccgtggacgccagataccagagagactacgaggagatggccagcagactgggcagactggacgccgtgctgcagagaatcagaaccggcagcgccctggtgcagagaatgaagtgctacgccagcgaccaggaggtgctggacatgcacggcttcctgagacaggccctgtgcagactgagacaggaggagccccagagcctgcaggccgccgtgagaaccgacggcttcgacgagttcaaggtgagactgcaggacctgagcagctgcatcacccagggcaaggacgccgccgtgagcaagaaggccagccccgaggccgccagcacccccagagaccccatcgacgtggacctgcccgaggaggccgagagagtgaaggcccaggtgcaggccctgggcctggccgaggcccagcccatggccgtggtgcagagcgtgcccggcgcccaccccgtgcccgtgtacgccttcagcatcaagggccccagctacggcgaggacgtgagcaacaccaccaccgcccagaagagaaagtgcagccagacccagtgccccagaaaggtgatcaagatggagagcgaggagggcaaggaggccagactggccagaagcagccccgagcagcccagacccagcaccagcaaggccgtgagccccccccacctggacggcccccccagccccagaagccccgtgatcggcagcgaggtgttcctgcccaacagcaaccacgtggccagcggcgccggcgaggccggcagagagagaaacgccctgtggtag

SEQ ID NO: 12327 - DNA, 1758 bp, synthetic construct
  misc_feature 1..1758: note = Description of Artificial Sequence: Synthetic coding sequence
  source 1..1758: mol_type = other DNA
atggagcccgcccccgccagaagccccagaccccagcaggaccccgccagaccccaggagcccaccatgcccccccccgagacccccagcgagggcagacagcccagccccagccccagccccaccgagagagcccccgccagcgaggaggagttccagttcctgagatgccagcagtgccaggccgaggccaagtgccccaagctgctgccctgcctgcacaccctgtgcagcggctgcctggaggccagcggcatgcagtgccccatctgccaggccccctggcccctgggcgccgacacccccgccctggacaacgtgttcttcgagagcctgcagagaagactgagcgtgtacagacagatcgtggacgcccaggccgtgtgcaccagatgcaaggagagcgccgacttctggtgcttcgagtgcgagcagctgctgtgcgccaagtgcttcgaggcccaccagtggttcctgaagcacgaggccagacccctggccgagctgagaaaccagagcgtgagagagttcctggacggcaccagaaagaccaacaacatcttctgcagcaaccccaaccacagaacccccaccctgaccagcatctactgcagaggctgcagcaagcccctgtgctgcagctgcgccctgctggacagcagccacagcgagctgaagtgcgacatcagcgccgagatccagcagagacaggaggagctggacgccatgacccaggccctgcaggagcaggacagcgccttcggcgccgtgcacgcccagatgcacgccgccgtgggccagctgggcagagccagagccgagaccgaggagctgatcagagagagagtgagacaggtggtggcccacgtgagagcccaggagagagagctgctggaggccgtggacgccagataccagagagactacgaggagatggccagcagactgggcagactggacgccgtgctgcagagaatcagaaccggcagcgccctggtgcagagaatgaagtgctacgccagcgaccaggaggtgctggacatgcacggcttcctgagacaggccctgtgcagactgagacaggaggagccccagagcctgcaggccgccgtgagaaccgacggcttcgacgagttcaaggtgagactgcaggacctgagcagctgcatcacccagggcaaggacgccgccgtgagcaagaaggccagccccgaggccgccagcacccccagagaccccatcgacgtggacctggacgtgagcaacaccaccaccgcccagaagagaaagtgcagccagacccagtgccccagaaaggtgatcaagatggagagcgaggagggcaaggaggccagactggccagaagcagccccgagcagcccagacccagcaccagcaaggccgtgagccccccccacctggacggcccccccagccccagaagccccgtgatcggcagcgaggtgttcctgcccaacagcaaccacgtggccagcggcgccggcgaggccgaggagagagtggtggtgatcagcagcagcgaggacagcgacgccgagaacagcagcagcagagagctggacgacagcagcagcgagagcagcgacctgcagctggagggccccagcaccctgagagtgctggacgagaacctggccgacccccaggccgaggacagacccctggtgttcttcgacctgaagatcgacaacgagagcggcttcagctggggctacccccaccccttcctgatctag

SEQ ID NO: 12328 - DNA, 483 bp, synthetic construct
  misc_feature 1..483: note = Description of Artificial Sequence: Synthetic coding sequence
  source 1..483: mol_type = other DNA
atgcagcccgccagcgccaagtggtacgacagaagagactacgtgttcatcgagttctgcgtggaggacagcaaggacgtgaacgtgaacttcgagaagagcaagctgaccttcagctgcctgggcggcagcgacaacttcaagcacctgaacgagatcgacctgttccactgcatcgaccccaacgacagcaagcacaagagaaccgacagaagcatcctgtgctgcctgagaaagggcgagagcggccagagctggcccagactgaccaaggagagagccaagctgaactggctgagcgtggacttcaacaactggaaggactgggaggacgacagcgacgaggacatgagcaacttcgacagattcagcgagatgatgaacaacatgggcggcgacgaggacgtggacctgcccgaggtggacggcgccgacgacgacagccaggacagcgacgacgagaagatgcccgacctggagtag

SEQ ID NO: 12329 - DNA, 3141 bp, synthetic construct
  misc_feature 1..3141: note = Description of Artificial Sequence: Synthetic coding sequence
  source 1..3141: mol_type = other DNA
atgcagaagcccagcggcctgaagccccccggcagaggcggcaagcacagcagccccatgggcagaaccagcaccggcagcgccagcagcagcgccgccgtggccgccagcagcaaggagggcagccccctgcacaagcagagcagcggccccagcagcagccccgccgccgccgccgcccccgagaagcccggccccaaggccgccgaggtgggcgacgacttcctgggcgacttcgtggtgggcgagagagtgtgggtgaacggcgtgaagcccggcgtggtgcagtacctgggcgagacccagttcgcccccggccagtgggccggcgtggtgctggacgaccccgtgggcaagaacgacggcgccgtgggcggcgtgagatacttcgagtgccccgccctgcagggcatcttcaccagacccagcaagctgaccagacagcccaccgccgagggcagcggcagcgacgcccacagcgtggagagcctgaccgcccagaacctgagcctgcacagcggcaccgccaccccccccctgaccagcagagtgatccccctgagagagagcgtgctgaacagcagcgtgaagaccggcaacgagagcggcagcaacctgagcgacagcggcagcgtgaagagaggcgagaaggacctgagactgggcgacagagtgctggtgggcggcaccaagaccggcgtggtgagatacgtgggcgagaccgacttcgccaagggcgagtggtgcggcgtggagctggacgagcccctgggcaagaacgacggcgccgtggccggcaccagatacttccagtgcccccccaagttcggcctgttcgcccccatccacaaggtgatcagaatcggcttccccagcaccagccccgccaaggccaagaagaccaagagaatggccatgggcgtgagcgccctgacccacagccccagcagcagcagcatcagcagcgtgagcagcgtggccagcagcgtgggcggcagacccagcagaagcggcctgctgaccgagaccagcagcagatacgccagaaagatcagcggcaccaccgccctgcaggaggccctgaaggagaagcagcagcacatcgagcagctgctggccgagagagacctggagagagccgaggtggccaaggccaccagccacatctgcgaggtggagaaggagatcgccctgctgaaggcccagcacgagcagtacgtggccgaggccgaggagaagctgcagagagccagactgctggtggagagcgtgagaaaggagaaggtggacctgagcaaccagctggaggaggagagaagaaaggtggaggacctgcagttcagagtggaggaggagagcatcaccaagggcgacctggagacccagacccagctggagcacgccagaatcggcgagctggagcagagcctgctgctggagaaggcccaggccgagagactgctgagagagctggccgacaacagactgaccaccgtggccgagaagagcagagtgctgcagctggaggaggagctgaccctgagaagaggcgagatcgaggagctgcagcagtgcctgctgcacagcggcccccccccccccgaccaccccgacgccgccgagatcctgagactgagagagagactgctgagcgccagcaaggagcaccagagagagagcggcgtgctgagagacaagtacgagaaggccctgaaggcctaccaggccgaggtggacaagctgagagccgccaacgagaagtacgcccaggaggtggccggcctgaaggacaaggtgcagcaggccaccagcgagaacatgggcctgatggacaactggaagagcaagctggacagcctggccagcgaccaccagaagagcctggaggacctgaaggccaccctgaacagcggccccggcgcccagcagaaggagatcggcgagctgaaggccgtgatggagggcatcaagatggagcaccagctggagctgggcaacctgcaggccaagcacgacctggagaccgccatgcacgtgaaggagaaggaggccctgagagagaagctgcaggaggcccaggaggagctggccggcctgcagagacactggagagcccagctggaggtgcaggccagccagcacagactggagctgcaggaggcccaggaccagagaagagacgccgagctgagagtgcacgagctggagaagctggacgtggagtacagaggccaggcccaggccatcgagttcctgaaggagcagatcagcctggccgagaagaagatgctggactacgagagactgcagagagccgaggcccagggcaagcaggaggtggagagcctgagagagaagctgctggtggccgagaacagactgcaggccgtggaggccctgtgcagcagccagcacacccacatgatcgagagcaacgacatcagcgaggagaccatcagaaccaaggagaccgtggagggcctgcaggacaagctgaacaagagagacaaggaggtgaccgccctgaccagccagaccgagatgctgagagcccaggtgagcgccctggagagcaagtgcaagagcggcgagaagaaggtggacgccctgctgaaggagaagagaagactggaggccgagctggagaccgtgagcagaaagacccacgacgccagcggccagctggtgctgatcagccaggagctgctgagaaaggagagaagcctgaacgagctgagagtgctgctgctggaggccaacagacacagccccggccccgagagagacctgagcagagaggtgcacaaggccgagtggagaatcaaggagcagaagctgaaggacgacatcagaggcctgagagagaagctgaccggcctggacaaggagaagagcctgagcgaccagagaagatacagcctgatcgacagaagcagcgcccccgagctgctgagactgcagcaccagctgatgagcaccgaggacgccctgagagacgccctggaccaggcccagcaggtggagaagctgatggaggccatgagaagctgccccgacaaggcccagaccatcggcaacagcggcagcgccaacggcatccaccagcaggacaaggcccagaagcaggaggacaagcactag

SEQ ID NO: 12330 - DNA, 1800 bp, synthetic construct
  misc_feature 1..1800: note = Description of Artificial Sequence: Synthetic coding sequence
  source 1..1800: mol_type = other DNA
atgagcagaagcctgctgctgtggttcctgctgttcctgctgctgctgccccccctgcccgtgctgctggccgaccccggcgcccccacccccgtgaacccctgctgctactacccctgccagcaccagggcatctgcgtgagattcggcctggacagataccagtgcgactgcaccagaaccggctacagcggccccaactgcaccatccccggcctgtggacctggctgagaaacagcctgagacccagccccagcttcacccacttcctgctgacccacggcagatggttctgggagttcgtgaacgccaccttcatcagagagatgctgatgagactggtgctgaccgtgagaagcaacctgatccccagcccccccacctacaacagcgcccacgactacatcagctgggagagcttcagcaacgtgagctactacaccagaatcctgcccagcgtgcccaaggactgccccacccccatgggcaccaagggcaagaagcagctgcccgacgcccagctgctggccagaagattcctgctgagaagaaagttcatccccgacccccagggcaccaacctgatgttcgccttcttcgcccagcacttcacccaccagttcttcaagaccagcggcaagatgggccccggcttcaccaaggccctgggccacggcgtggacctgggccacatctacggcgacaacctggagagacagtaccagctgagactgttcaaggacggcaagctgaagtaccaggtgctggacggcgagatgtacccccccagcgtggaggaggcccccgtgctgatgcactaccccagaggcatccccccccagagccagatggccgtgggccaggaggtgttcggcctgctgcccggcctgatgctgtacgccaccctgtggctgagagagcacaacagagtgtgcgacctgctgaaggccgagcaccccacctggggcgacgagcagctgttccagaccaccagactgatcctgatcggcgagaccatcaagatcgtgatcgaggagtacgtgcagcagctgagcggctacttcctgcagctgaagttcgaccccgagctgctgttcggcgtgcagttccagtacagaaacagaatcgccatggagttcaaccacctgtaccactggcaccccctgatgcccgacagcttcaaggtgggcagccaggagtacagctacgagcagttcctgttcaacaccagcatgctggtggactacggcgtggaggccctggtggacgccttcagcagacagatcgccggcagaatcggcggcggcagaaacatggaccaccacatcctgcacgtggccgtggacgtgatcagagagagcagagagatgagactgcagcccttcaacgagtacagaaagagattcggcatgaagccctacaccagcttccaggagctggtgggcgagaaggagatggccgccgagctggaggagctgtacggcgacatcgacgccctggagttctaccccggcctgctgctggagaagtgccaccccaacagcatcttcggcgagagcatgatcgagatcggcgcccccttcagcctgaagggcctgctgggcaaccccatctgcagccccgagtactggaagcccagcaccttcggcggcgaggtgggcttcaacatcgtgaagaccgccaccctgaagaagctggtgtgcctgaacaccaagacctgcccctacgtgagcttcagagtgcccgacgccagccaggacgacggccccgccgtggagagacccagcaccgagctgtag

SEQ ID NO: 12331 - DNA, 1473 bp, synthetic construct
  misc_feature 1..1473: note = Description of Artificial Sequence: Synthetic coding sequence
  source 1..1473: mol_type = other DNA
atgctgatgagactggtgctgaccgtgagaagcaacctgatccccagcccccccacctacaacagcgcccacgactacatcagctgggagagcttcagcaacgtgagctactacaccagaatcctgcccagcgtgcccaaggactgccccacccccatgggcaccaagggcaagaagcagctgcccgacgcccagctgctggccagaagattcctgctgagaagaaagttcatccccgacccccagggcaccaacctgatgttcgccttcttcgcccagcacttcacccaccagttcttcaagaccagcggcaagatgggccccggcttcaccaaggccctgggccacggcgtggacctgggccacatctacggcgacaacctggagagacagtaccagctgagactgttcaaggacggcaagctgaagtaccaggtgctggacggcgagatgtacccccccagcgtggaggaggcccccgtgctgatgcactaccccagaggcatccccccccagagccagatggccgtgggccaggaggtgttcggcctgctgcccggcctgatgctgtacgccaccctgtggctgagagagcacaacagagtgtgcgacctgctgaaggccgagcaccccacctggggcgacgagcagctgttccagaccaccagactgatcctgatcggcgagaccatcaagatcgtgatcgaggagtacgtgcagcagctgagcggctacttcctgcagctgaagttcgaccccgagctgctgttcggcgtgcagttccagtacagaaacagaatcgccatggagttcaaccacctgtaccactggcaccccctgatgcccgacagcttcaaggtgggcagccaggagtacagctacgagcagttcctgttcaacaccagcatgctggtggactacggcgtggaggccctggtggacgccttcagcagacagatcgccggcagaatcggcggcggcagaaacatggaccaccacatcctgcacgtggccgtggacgtgatcagagagagcagagagatgagactgcagcccttcaacgagtacagaaagagattcggcatgaagccctacaccagcttccaggagctggtgggcgagaaggagatggccgccgagctggaggagctgtacggcgacatcgacgccctggagttctaccccggcctgctgctggagaagtgccaccccaacagcatcttcggcgagagcatgatcgagatcggcgcccccttcagcctgaagggcctgctgggcaaccccatctgcagccccgagtactggaagcccagcaccttcggcggcgaggtgggcttcaacatcgtgaagaccgccaccctgaagaagctggtgtgcctgaacaccaagacctgcccctacgtgagcttcagagtgcccgacgccagccaggacgacggccccgccgtggagagacccagcaccgagctgtag

SEQ ID NO: 12332 - DNA, 471 bp, synthetic construct
  misc_feature 1..471: note = Description of Artificial Sequence: Synthetic coding sequence
  source 1..471: mol_type = other DNA
agcctgctgctgtggttcctgctgttcctgctgctgctgccccccctgcccgtgctgctggccgaccccggcgcccccacccccgccggcctgtggacctggctgagaaacagcctgagacccagccccagcttcacccacttcctgctgacccacggcagatggttctgggagttcgtgaacgccaccttcatcagagagatgctgatgagactggtgctgaccgtgagaagcaacctgatccccagcccccccacctacaacagcgcccacgactacatcagctgggagagcttcagcaacttcttcaagaccagcggcaagatgggccccggcttcaccaaggccctgggccacggcgtggacctgggccacatctacggcgacaacctggagagacagtaccagctgagactgttcaaggacggcaagctgaagtaccaggtgctggacggcgagatgtacccctag

SEQ ID NO: 12333 - DNA, 1614 bp, synthetic construct
  misc_feature 1..1614: note = Description of Artificial Sequence: Synthetic coding sequence
  source 1..1614: mol_type = other DNA
atgagaaagcccagactgatgaacccctgctgctactacccctgccagcaccagggcatctgcgtgagattcggcctggacagataccagtgcgactgcaccagaaccggctacagcggccccaactgcaccatccccggcctgtggacctggctgagaaacagcctgagacccagccccagcttcacccacttcctgctgacccacggcagatggttctgggagttcgtgaacgccaccttcatcagagagatgctgatgagactggtgctgaccgtgagaagcaacctgatccccagcccccccacctacaacagcgcccacgactacatcagctgggagagcttcagcaacgtgagctactacaccagaatcctgcccagcgtgcccaaggactgccccacccccatgggcaccaagggcaagaagcagctgcccgacgcccagctgctggccagaagattcctgctgagaagaaagttcatccccgacccccagggcaccaacctgatgttcgccttcttcgcccagcacttcacccaccagttcttcaagaccagcggcaagatgggccccggcttcaccaaggccctgggccacggcgtggacctgggccacatctacggcgacaacctggagagacagtaccagctgagactgttcaaggacggcaagctgaagtaccaggtgctggacggcgagatgtacccccccagcgtggaggaggcccccgtgctgatgcactaccccagaggcatccccccccagagccagatggccgtgggccaggaggtgttcggcctgctgcccggcctgatgctgtacgccaccctgtggctgagagagcacaacagagtgtgcgacctgctgaaggccgagcaccccacctggggcgacgagcagctgttccagaccaccagactgatcctgatcggcgagaccatcaagatcgtgatcgaggagtacgtgcagcagctgagcggctacttcctgcagctgaagttcgaccccgagctgctgttcggcgtgcagttccagtacagaaacagaatcgccatggagttcaaccacctgtaccactggcaccccctgatgcccgacagcttcaagatcggcggcggcagaaacatggaccaccacatcctgcacgtggccgtggacgtgatcagagagagcagagagatgagactgcagcccttcaacgagtacagaaagagattcggcatgaagccctacaccagcttccaggagctggtgggcgagaaggagatggccgccgagctggaggagctgtacggcgacatcgacgccctggagttctaccccggcctgctgctggagaagtgccaccccaacagcatcttcggcgagagcatgatcgagatcggcgcccccttcagcctgaagggcctgctgggcaaccccatctgcagccccgagtactggaagcccagcaccttcggcggcgaggtgggcttcaacatcgtgaagaccgccaccctgaagaagctggtgtgcctgaacaccaagacctgcccctacgtgagcttcagagtgcccgacgccagccaggacgacggccccgccgtggagagacccagcaccgagctgtag

SEQ ID NO: 12334 - DNA, 1815 bp, synthetic construct
  misc_feature 1..1815: note = Description of Artificial Sequence: Synthetic coding sequence
  source 1..1815: mol_type = other DNA
atgctggccagagccctgctgctgtgcgccgtgctggccctgagccacaccgccaacccctgctgcagccacccctgccagaacagaggcgtgtgcatgagcgtgggcttcgaccagtacaagtgcgactgcaccagaaccggcttctacggcgagaactgcagcacccccgagttcctgaccagaatcaagctgttcctgaagcccacccccaacaccgtgcactacatcctgacccacttcaagggcttctggaacgtggtgaacaacatccccttcctgagaaacgccatcatgagctacgtgctgaccagcagaagccacctgatcgacagcccccccacctacaacgccgactacggctacaagagctgggaggccttcagcaacctgagctactacaccagagccctgccccccgtgcccgacgactgccccacccccctgggcgtgaagggcaagaagcagctgcccgacagcaacgagatcgtggagaagctgctgctgagaagaaagttcatccccgacccccagggcagcaacatgatgttcgccttcttcgcccagcacttcacccaccagttcttcaagaccgaccacaagagaggccccgccttcaccaacggcctgggccacggcgtggacctgaaccacatctacggcgagaccctggccagacagagaaagctgagactgttcaaggacggcaagatgaagtaccagatcatcgacggcgagatgtacccccccaccgtgaaggacacccaggccgagatgatctaccccccccaggtgcccgagcacctgagattcgccgtgggccaggaggtgttcggcctggtgcccggcctgatgatgtacgccaccatctggctgagagagcacaacagagtgtgcgacgtgctgaagcaggagcaccccgagtggggcgacgagcagctgttccagaccagcagactgatcctgatcggcgagaccatcaagatcgtgatcgaggactacgtgcagcacctgagcggctaccacttcaagctgaagttcgaccccgagctgctgttcaacaagcagttccagtaccagaacagaatcgccgccgagttcaacaccctgtaccactggcaccccctgctgcccgacaccttccagatccacgaccagaagtacaactaccagcagttcatctacaacaacagcatcctgctggagcacggcatcacccagttcgtggagagcttcaccagacagatcgccggcagagtggccggcggcagaaacgtgccccccgccgtgcagaaggtgagccaggccagcatcgaccagagcagacagatgaagtaccagagcttcaacgagtacagaaagagattcatgctgaagccctacgagagcttcgaggagctgaccggcgagaaggagatgagcgccgagctggaggccctgtacggcgacatcgacgccgtggagctgtaccccgccctgctggtggagaagcccagacccgacgccatcttcggcgagaccatggtggaggtgggcgcccccttcagcctgaagggcctgatgggcaacgtgatctgcagccccgcctactggaagcccagcaccttcggcggcgaggtgggcttccagatcatcaacaccgccagcatccagagcctgatctgcaacaacgtgaagggctgccccttcaccagcttcagcgtgcccgaccccgagctgatcaagaccgtgaccatcaacgccagcagcagcagaagcggcctggacgacatcaaccccaccgtgctgctgaaggagagaagcaccgagctgtag

SEQ ID NO: 12335 - DNA, 1614 bp, synthetic construct
  misc_feature 1..1614: note = Description of Artificial Sequence: Synthetic coding sequence
  source 1..1614: mol_type = other DNA
agcctggtgcccgccaccaactacatctacacccccctgaaccagctgaagggcggcaccatcgtgaacgtgtacggcgtggtgaagttcttcaagcccccctacctgagcaagggcaccgactactgcagcgtggtgaccatcgtggaccagaccaacgtgaagctgacctgcctgctgttcagcggcaactacgaggccctgcccatcatctacaagaacggcgacatcgtgagattccacagactgaagatccaggtgtacaagaaggagacccagggcatcaccagcagcggcttcgccagcctgaccttcgagggcaccctgggcgcccccatcatccccagaaccagcagcaagtacttcaacttcaccaccgaggaccacaagatggtggaggccctgagagtgtgggccagcacccacatgagccccagctggaccctgctgaagctgtgcgacgtgcagcccatgcagtacttcgacctgacctgccagctgctgggcaaggccgaggtggacggcgccagcttcctgctgaaggtgtgggacggcaccagaacccccttccccagctggagagtgctgatccaggacctggtgctggagggcgacctgagccacatccacagactgcagaacctgaccatcgacatcctggtgtacgacaaccacgtgcacgtggccagaagcctgaaggtgggcagcttcctgagaatctacagcctgcacaccaagctgcagagcatgaacagcgagaaccagaccatgctgagcctggagttccacctgcacggcggcaccagctacggcagaggcatcagagtgctgcccgagagcaacagcgacgtggaccagctgaagaaggacctggagagcgccaacctgaccgccaaccagcacagcgacgtgatctgccagagcgagcccgacgacagcttccccagcagcggcagcgtgagcctgtacgaggtggagagatgccagcagctgagcgccaccatcctgaccgaccaccagtacctggagagaacccccctgtgcgccatcctgaagcagaaggccccccagcagtacagaatcagagccaagctgagaagctacaagcccagaagactgttccagagcgtgaagctgcactgccccaagtgccacctgctgcaggaggtgccccacgagggcgacctggacatcatcttccaggacggcgccaccaagacccccgacgtgaagctgcagaacaccagcctgtacgacagcaagatctggaccaccaagaaccagaagggcagaaaggtggccgtgcacttcgtgaagaacaacggcatcctgcccctgagcaacgagtgcctgctgctgatcgagggcggcaccctgagcgagatctgcaagctgagcaacaagttcaacagcgtgatccccgtgagaagcggccacgaggacctggagctgctggacctgagcgcccccttcctgatccagggcaccatccaccactacggctgcaagcagtgcagcagcctgagaagcatccagaacctgaacagcctggtggacaagaccagctggatccccagcagcgtggccgaggagctggacatcgtgctgcagtag

SEQ ID NO: 12336 - DNA, 1905 bp, synthetic construct
  misc_feature 1..1905: note = Description of Artificial Sequence: Synthetic coding sequence
  source 1..1905: mol_type = other DNA
atgagcctggtgcccgccaccaactacatctacacccccctgaaccagctgaagggcggcaccatcgtgaacgtgtacggcgtggtgaagttcttcaagcccccctacctgagcaagggcaccgactactgcagcgtggtgaccatcgtggaccagaccaacgtgaagctgacctgcctgctgttcagcggcaactacgaggccctgcccatcatctacaagaacggcgacatcgtgagattccacagactgaagatccaggtgtacaagaaggagacccagggcatcaccagcagcggcttcgccagcctgaccttcgagggcaccctgggcgcccccatcatccccagaaccagcagcaagtacttcaacttcaccaccgaggaccacaagatggtggaggccctgagagtgtgggccagcacccacatgagccccagctggaccctgctgaagctgtgcgacgtgcagcccatgcagtacttcgacctgacctgccagctgctgggcaaggccgaggtggacggcgccagcttcctgctgaaggtgtgggacggcaccagaacccccttccccagctggagagtgctgatccaggacctggtgctggagggcgacctgagccacatccacagactgcagaacctgaccatcgacatcctggtgtacgacaaccacgtgcacgtggccagaagcctgaaggtgggcagcttcctgagaatctacagcctgcacaccaagctgcagagcatgaacagcgagaaccagaccatgctgagcctggagttccacctgcacggcggcaccagctacggcagaggcatcagagtgctgcccgagagcaacagcgacgtggaccagctgaagaaggacctggagagcgccaacctgaccgccaaccagcacagcgacgtgatctgccagagcgagcccgacgacagcttccccagcagcggcagcgtgagcctgtacgaggtggagagatgccagcagctgagcgccaccatcctgaccgaccaccagtacctggagagaacccccctgtgcgccatcctgaagcagaaggccccccagcagtacagaatcagagccaagctgagaagctacaagcccagaagactgttccagagcgtgaagctgcactgccccaagtgccacctgctgcaggaggtgccccacgagggcgacctggacatcatcttccaggacggcgccaccaagacccccgacgtgaagctgcagaacaccagcctgtacgacagcaagatctggaccaccaagaaccagaagggcagaaaggtggccgtgcacttcgtgaagaacaacggcatcctgcccctgagcaacgagtgcctgctgctgatcgagggcggcaccctgagcgagatctgcaagctgagcaacaagttcaacagcgtgatccccgtgagaagcggccacgaggacctggagctgctggacctgagcgcccccttcctgatccagggcaccatccaccactacggctgcaagcagtgcagcagcctgagaagcatccagaacctgaacagcctggtggacaagaccagctggatccccagcagcgtggccgaggccctgggcatcgtgcccctgcagtacgtgttcgtgatgaccttcaccctggacgacggcaccggcgtgctggaggcctacctgatggacagcgacaagttcttccagatccccgccagcgaggtgctgatggacgacgacctgcagaagagcgtggacatgatcatggacatgttctgcccccccggcatcaagatcgacgcctacccctggctggagtgcttcatcaagagctacaacgtgaccaacggcaccgacaaccagatctgctaccagatcttcgacaccaccgtggccgaggacgtgatctag

SEQ ID NO: 12337 - DNA, 1023 bp, synthetic construct
  misc_feature 1..1023: note = Description of Artificial Sequence: Synthetic coding sequence
  source 1..1023: mol_type = other DNA
ctgagcctggtgcccgccaccaactacatctacacccccctgaaccagctgaagggcggcaccatcgtgaacgtgtacggcgtggtgaagttcttcaagcccccctacctgagcaagggcaccgactactgcagcgtggtgaccatcgtggaccagaccaacgtgaagctgacctgcctgctgttcagcggcaactacgaggccctgcccatcatctacaagaacggcgacatcgtgagattccacagactgaagatccaggtgtacaagaaggagacccagggcatcaccagcagcggcttcgccagcctgaccttcgagggcaccctgggcgcccccatcatccccagaaccagcagcaagtacttcaacttcaccaccgaggaccacaagatggtggaggccctgagagtgtgggccagcacccacatgagccccagctggaccctgctgaagctgtgcgacgtgcagcccatgcagtacttcgacctgacctgccagctgctgggcaaggccgaggtggacggcgccagcttcctgctgaaggtgtgggacggcaccagaacccccttccccagctggagagtgctgatccaggacctggtgctggagggcgacctgagccacatccacagactgcagaacctgaccatcgacatcctggtgtacgacaaccacgtgcacgtggccagaagcctgaaggtgggcagcttcctgagaatctacagcctgcacaccaagctgcagagcatgaacagcgagaaccagaccatgctgagcctggagttccacctgcacggcggcaccagctacggcagaggcatcagagtgctgcccgagagcaacagcgacgtggaccagctgaagaaggacctggagagcgccaacctgaccgccaaccagcacagcgacgtgatctgccagagcgagcccgacgacagcttccccaacggcgtgagcctgagaccccccggctggagcagcgtggccagaagcagactgatcgccgccagcaccagctag

SEQ ID NO: 12338 - DNA, 1512 bp, synthetic construct
  misc_feature 1..1512: note = Description of Artificial Sequence: Synthetic coding sequence
  source 1..1512: mol_type = other DNA
atggtggaggccctgagagtgtgggccagcacccacatgagccccagctggaccctgctgaagctgtgcgacgtgcagcccatgcagtacttcgacctgacctgccagctgctgggcaaggccgaggtggacggcgccagcttcctgctgaaggtgtgggacggcaccagaacccccttccccagctggagagtgctgatccaggacctggtgctggagggcgacctgagccacatccacagactgcagaacctgaccatcgacatcctggtgtacgacaaccacgtgcacgtggccagaagcctgaaggtgggcagcttcctgagaatctacagcctgcacaccaagctgcagagcatgaacagcgagaaccagaccatgctgagcctggagttccacctgcacggcggcaccagctacggcagaggcatcagagtgctgcccgagagcaacagcgacgtggaccagctgaagaaggacctggagagcgccaacctgaccgccaaccagcacagcgacgtgatctgccagagcgagcccgacgacagcttccccagcagcggcagcgtgagcctgtacgaggtggagagatgccagcagctgagcgccaccatcctgaccgaccaccagtacctggagagaacccccctgtgcgccatcctgaagcagaaggccccccagcagtacagaatcagagccaagctgagaagctacaagcccagaagactgttccagagcgtgaagctgcactgccccaagtgccacctgctgcaggaggtgccccacgagggcgacctggacatcatcttccaggacggcgccaccaagacccccgacgtgaagctgcagaacaccagcctgtacgacagcaagatctggaccaccaagaaccagaagggcagaaaggtggccgtgcacttcgtgaagaacaacggcatcctgcccctgagcaacgagtgcctgctgctgatcgagggcggcaccctgagcgagatctgcaagctgagcaacaagttcaacagcgtgatccccgtgagaagcggccacgaggacctggagctgctggacctgagcgcccccttcctgatccagggcaccatccaccactacggctgcaagcagtgcagcagcctgagaagcatccagaacctgaacagcctggtggacaagaccagctggatccccagcagcgtggccgaggccctgggcatcgtgcccctgcagtacgtgttcgtgatgaccttcaccctggacgacggcaccggcgtgctggaggcctacctgatggacagcgacaagttcttccagatccccgccagcgaggtgctgatggacgacgacctgcagaagagcgtggacatgatcatggacatgttctgcccccccggcatcaagatcgacgcctacccctggctggagtgcttcatcaagagctacaacgtgaccaacggcaccgacaaccagatctgctaccagatcttcgacaccaccgtggccgaggacgtgatctag

SEQ ID NO: 12339 - DNA, 1380 bp, synthetic construct
  misc_feature 1..1380: note = Description of Artificial Sequence: Synthetic coding sequence
  source 1..1380: mol_type = other DNA
ctgagcctggtgcccgccaccaactacatctacacccccctgaaccagctgaagggcggcaccatcgtgaacgtgtacggcgtggtgaagttcttcaagcccccctacctgagcaagggcaccgactactgcagcgtggtgaccatcgtggaccagaccaacgtgaagctgacctgcctgctgttcagcggcaactacgaggccctgcccatcatctacaagaacggcgacatcgtgagattccacagactgaagatccaggtgtacaagaaggagacccagggcatcaccagcagcggcttcgccagcctgaccttcgagggcaccctgggcgcccccatcatccccagaaccagcagcaagtacttcaacttcaccaccgaggaccacaagatggtggaggccctgagagtgtgggccagcacccacatgagccccagctggaccctgctgaagctgtgcgacgtgcagcccatgcagtacttcgacctgacctgccagctgctgggcaaggccgaggtggacggcgccagcttcctgctgaaggtgtgggacggcaccagaacccccttccccagctggagagtgctgatccaggacctggtgctggagggcgacctgagccacatccacagactgcagaacctgaccatcgacatcctggtgtacgacaaccacgtgcacgtggccagaagcctgaaggtgggcagcttcctgagaatctacagcctgcacaccaagctgcagagcatgaacagcgagaaccagaccatgctgagcctggagttccacctgcacggcggcaccagctacggcagaggcatcagagtgctgcccgagagcaacagcgacgtggaccagctgaagaaggacctggagagcgccaacctgaccgccaaccagcacagcgacgtgatctgccagagcgagcccgacgacagcttccccagcagcggcagcgtgagcctgtacgaggtggagagatgccagcagctgagcgccaccatcctgaccgaccaccagtacctggagagaacccccctgtgcgccatcctgaagcagaaggccccccagcagtacagaatcagagccaagctgagaagctacaagcccagaagactgttccagagcgtgaagctgcactgccccaagtgccacctgctgcaggaggtgccccacgagggcgacctggacatcatcttccaggacggcgccaccaagacccccgacgtgaagctgcagaacaccagcctgtacgacagcaagatctggaccaccaagaaccagaagggcagaaaggtggccgtgcacttcgtgaagaacaacggcatcctgcccctgagcaacgagtgcctgctgctgatcgaggtgctgctgtag

SEQ ID NO: 12340 - DNA, 249 bp, synthetic construct
  misc_feature 1..249: note = Description of Artificial Sequence: Synthetic coding sequence
  source 1..249: mol_type = other DNA
atgagcctggtgcccgccaccaactacatctacacccccctgaaccagctgaagggcggcaccatcgtgaacgtgtacggcgtggtgaagttcttcaagcccccctacctgagcaagggcaccgactactgcagcgtggtgaccatcgtggaccagaccaacgtgaagctgacctgcctgctgttcagcggcaactacgaggccctgcccatcatctacaagaacggcgacatcgtgagattccactag

SEQ ID NO: 12341 - DNA, 1557 bp, synthetic construct
  misc_feature 1..1557: note = Description of Artificial Sequence: Synthetic coding sequence
  source 1..1557: mol_type = other DNA
ctgagcctggtgcccgccaccaactacatctacacccccctgaaccagctgaagggcggcaccatcgtgaacgtgtacggcgtggtgaagttcttcaagcccccctacctgagcaagggcaccgactactgcagcgtggtgaccatcgtggaccagaccaacgtgaagctgacctgcctgctgttcagcggcaactacgaggccctgcccatcatctacaagaacggcgacatcgtgagattccacagactgaagatccaggtgtacaagaaggagacccagggcatcaccagcagcggcttcgccagcctgaccttcgagggcaccctgggcgcccccatcatccccagaaccagcagcaagtacttcaacttcaccaccgaggaccacaagatggtggaggccctgagagtgtgggccagcacccacatgagccccagctggaccctgctgaagctgtgcgacgtgcagcccatgcagtacttcgacctgacctgccagctgctgggcaaggccgaggtggacggcgccagcttcctgctgaaggtgtgggacggcaccagaacccccttccccagctggagagtgctgatccaggacctggtgctggagggcgacctgagccacatccacagactgcagaacctgaccatcgacatcctggtgtacgacaaccacgtgcacgtggccagaagcctgaaggtgggcagcttcctgagaatctacagcctgcacaccaagctgcagagcatgaacagcgagaaccagaccatgctgagcctggagttccacctgcacggcggcaccagctacggcagaggcatcagagtgctgcccgagagcaacagcgacgtggaccagctgaagaaggacctggagagcgccaacctgaccgccaaccagcacagcgacgtgatctgccagagcgagcccgacgacagcttccccagcagcggcagcgtgagcctgtacgaggtggagagatgccagcagctgagcgccaccatcctgaccgaccaccagtacctggagagaacccccctgtgcgccatcctgaagcagaaggccccccagcagtacagaatcagagccaagctgagaagctacaagcccagaagactgttccagagcgtgaagctgcactgccccaagtgccacctgctgcaggaggtgccccacgagggcgacctggacatcatcttccaggacggcgccaccaagacccccgacgtgaagctgcagaacaccagcctgtacgacagcaagatctggaccaccaagaaccagaagggcagaaaggtggccgtgcacttcgtgaagaacaacggcatcctgcccctgagcaacgagtgcctgctgctgatcgagggcggcaccctgagcgagatctgcaagctgagcaacaagttcaacagcgtgatccccgtgagaagcggccacgaggacctggagctgctggacctgagcgcccccttcctgatccagggcaccatccaccactacggcaccggctactgcaccccccccatctgcgtgtgctacgacctgtacacctag

SEQ ID NO: 12342 - DNA, 1374 bp, synthetic construct
  misc_feature 1..1374: note = Description of Artificial Sequence: Synthetic coding sequence
  source 1..1374: mol_type = other DNA
agccccgaggaccccagaagcaagcacaagttcaagatccacacctacggcagccccaccttctgcgaccactgcggcagcctgctgtacggcctgatccaccagggcatgaagtgcgacacctgcgacatgaacgtgcacaagcagtgcgtgatcaacgtgcccagcctgtgcggcatggaccacaccgagaagagaggcagaatctacctgaaggccgaggtggccgacgagaagctgcacgtgaccgtgagagacgccaagaacctgatccccatggaccccaacggcctgagcgacccctacgtgaagctgaagctgatccccgaccccaagaacgagagcaagcagaagaccaagaccatcagaagcaccctgaacccccagtggaacgagagcttcaccttcaagctgaagcccagcgacaaggacagaagactgagcgtggagatctgggactgggacagaaccaccagaaacgacttcatgggcagcctgagcttcggcgtgagcgagctgatgaagatgcccgccagcggctggtacaagctgctgaaccaggaggagggcgagtactacaacgtgcccatccccgagggcgacgaggagggcaacatggagctgagacagaagttcgagaaggccaagctgggccccgccggcaacaaggtgatcagccccagcgaggacagaaagcagcccagcaacaacctggacagagtgaagctgaccgacttcaacttcctgatggtgctgggcaagggcagcttcggcaaggtgatgctggccgacagaaagggcaccgaggagctgtacgccatcaagatcctgaagaaggacgtggtgatccaggacgacgacgtggagtgcaccatggtggagaagagagtgctggccctgctggacaagccccccttcctgacccagctgcacagctgcttccagaccgtggacagactgtacttcgtgatggagtacgtgaacggcggcgacctgatgtaccacatccagcaggtgggcaagttcaaggagccccaggccgtgttctacgccgccgagatcagcatcggcctgttcttcctgcacaagagaggcatcatctacagagacctgaagctggacaacgtgatgctggacagcgagggccacatcaagatcgccgacttcggcatgtgcaaggagcacatgatggacggcgtgaccaccagaaccttctgcggcacccccgactacatcgcccccgagatcatcgcctaccagccctacggcaagagcgtggactggtgggcctacggcgtgctgctgtacgagatgctggccggccaggtgatgttctgctacatcttcatgttcgtgtactgctgcgtgatgtag

SEQ ID NO: 12343 - DNA, 2019 bp, synthetic construct
  misc_feature 1..2019: note = Description of Artificial Sequence: Synthetic coding sequence
  source 1..2019: mol_type = other DNA
atggccgacgtgttccccggcaacgacagcaccgccagccaggacgtggccaacagattcgccagaaagggcgccctgagacagaagaacgtgcacgaggtgaaggaccacaagttcatcgccagattcttcaagcagcccaccttctgcagccactgcaccgacttcatctggggcttcggcaagcagggcttccagtgccaggtgtgctgcttcgtggtgcacaagagatgccacgagttcgtgaccttcagctgccccggcgccgacaagggccccgacaccgacgaccccagaagcaagcacaagttcaagatccacacctacggcagccccaccttctgcgaccactgcggcagcctgctgtacggcctgatccaccagggcatgaagtgcgacacctgcgacatgaacgtgcacaagcagtgcgtgatcaacgtgcccagcctgtgcggcatggaccacaccgagaagagaggcagaatctacctgaaggccgaggtggccgacgagaagctgcacgtgaccgtgagagacgccaagaacctgatccccatggaccccaacggcctgagcgacccctacgtgaagctgaagctgatccccgaccccaagaacgagagcaagcagaagaccaagaccatcagaagcaccctgaacccccagtggaacgagagcttcaccttcaagctgaagcccagcgacaaggacagaagactgagcgtggagatctgggactgggacagaaccaccagaaacgacttcatgggcagcctgagcttcggcgtgagcgagctgatgaagatgcccgccagcggctggtacaagctgctgaaccaggaggagggcgagtactacaacgtgcccatccccgagggcgacgaggagggcaacatggagctgagacagaagttcgagaaggccaagctgggccccgccggcaacaaggtgatcagccccagcgaggacagaaagcagcccagcaacaacctggacagagtgaagctgaccgacttcaacttcctgatggtgctgggcaagggcagcttcggcaaggtgatgctggccgacagaaagggcaccgaggagctgtacgccatcaagatcctgaagaaggacgtggtgatccaggacgacgacgtggagtgcaccatggtggagaagagagtgctggccctgctggacaagccccccttcctgacccagctgcacagctgcttccagaccgtggacagactgtacttcgtgatggagtacgtgaacggcggcgacctgatgtaccacatccagcaggtgggcaagttcaaggagccccaggccgtgttctacgccgccgagatcagcatcggcctgttcttcctgcacaagagaggcatcatctacagagacctgaagctggacaacgtgatgctggacagcgagggccacatcaagatcgccgacttcggcatgtgcaaggagcacatgatggacggcgtgaccaccagaaccttctgcggcacccccgactacatcgcccccgagatcatcgcctaccagccctacggcaagagcgtggactggtgggcctacggcgtgctgctgtacgagatgctggccggccagccccccttcgacggcgaggacgaggacgagctgttccagagcatcatggagcacaacgtgagctaccccaagagcctgagcaaggaggccgtgagcgtgtgcaagggcctgatgaccaagcaccccgccaagagactgggctgcggccccgagggcgagagagacgtgagagagcacgccttcttcagaagaatcgactgggagaagctggagaacagagagatccagccccccttcaagcccaaggtgtgcggcaagggcgccgagaacttcgacaagttcttcaccagaggccagcccgtgctgaccccccccgaccagctggtgatcgccaacatcgaccagagcgacttcgagggcttcagctacgtgaacccccagttcgtgcaccccatcctgcagagcgccgtgtag

SEQ ID NO: 12344 - DNA, 2022 bp, synthetic construct
  misc_feature 1..2022: note = Description of Artificial Sequence: Synthetic coding sequence
  source 1..2022: mol_type = other DNA
atggccgaccccgccgccggccccccccccagcgagggcgaggagagcaccgtgagattcgccagaaagggcgccctgagacagaagaacgtgcacgaggtgaagaaccacaagttcaccgccagattcttcaagcagcccaccttctgcagccactgcaccgacttcatctggggcttcggcaagcagggcttccagtgccaggtgtgctgcttcgtggtgcacaagagatgccacgagttcgtgaccttcagctgccccggcgccgacaagggccccgccagcgacgaccccagaagcaagcacaagttcaagatccacacctacagcagccccaccttctgcgaccactgcggcagcctgctgtacggcctgatccaccagggcatgaagtgcgacacctgcatgatgaacgtgcacaagagatgcgtgatgaacgtgcccagcctgtgcggcaccgaccacaccgagagaagaggcagaatctacatccaggcccacatcgacagagacgtgctgatcgtgctggtgagagacgccaagaacctggtgcccatggaccccaacggcctgagcgacccctacgtgaagctgaagctgatccccgaccccaagagcgagagcaagcagaagaccaagaccatcaagtgcagcctgaaccccgagtggaacgagaccttcagattccagctgaaggagagcgacaaggacagaagactgagcgtggagatctgggactgggacctgaccagcagaaacgacttcatgggcagcctgagcttcggcatcagcgagctgcagaaggccagcgtggacggctggttcaagctgctgagccaggaggagggcgagtacttcaacgtgcccgtgccccccgagggcagcgaggccaacgaggagctgagacagaagttcgagagagccaagatcagccagggcaccaaggtgcccgaggagaagaccaccaacaccgtgagcaagttcgacaacaacggcaacagagacagaatgaagctgaccgacttcaacttcctgatggtgctgggcaagggcagcttcggcaaggtgatgctgagcgagagaaagggcaccgacgagctgtacgccgtgaagatcctgaagaaggacgtggtgatccaggacgacgacgtggagtgcaccatggtggagaagagagtgctggccctgcccggcaagccccccttcctgacccagctgcacagctgcttccagaccatggacagactgtacttcgtgatggagtacgtgaacggcggcgacctgatgtaccacatccagcaggtgggcagattcaaggagccccacgccgtgttctacgccgccgagatcgccatcggcctgttcttcctgcagagcaagggcatcatctacagagacctgaagctggacaacgtgatgctggacagcgagggccacatcaagatcgccgacttcggcatgtgcaaggagaacatctgggacggcgtgaccaccaagaccttctgcggcacccccgactacatcgcccccgagatcatcgcctaccagccctacggcaagagcgtggactggtgggccttcggcgtgctgctgtacgagatgctggccggccaggcccccttcgagggcgaggacgaggacgagctgttccagagcatcatggagcacaacgtggcctaccccaagagcatgagcaaggaggccgtggccatctgcaagggcctgatgaccaagcaccccggcaagagactgggctgcggccccgagggcgagagagacatcaaggagcacgccttcttcagatacatcgactgggagaagctggagagaaaggagatccagcccccctacaagcccaaggcctgcggcagaaacgccgagaacttcgacagattcttcaccagacacccccccgtgctgaccccccccgaccaggaggtgatcagaaacatcgaccagagcgagttcgagggcttcagcttcgtgaacagcgagttcctgaagcccgaggtgaagagctag

SEQ ID NO: 12345 - DNA, 2016 bp, synthetic construct
  misc_feature 1..2016: note = Description of Artificial Sequence: Synthetic coding sequence
  source 1..2016: mol_type = other DNA
atggccgaccccgccgccggccccccccccagcgagggcgaggagagcaccgtgagattcgccagaaagggcgccctgagacagaagaacgtgcacgaggtgaagaaccacaagttcaccgccagattcttcaagcagcccaccttctgcagccactgcaccgacttcatctggggcttcggcaagcagggcttccagtgccaggtgtgctgcttcgtggtgcacaagagatgccacgagttcgtgaccttcagctgccccggcgccgacaagggccccgccagcgacgaccccagaagcaagcacaagttcaagatccacacctacagcagccccaccttctgcgaccactgcggcagcctgctgtacggcctgatccaccagggcatgaagtgcgacacctgcatgatgaacgtgcacaagagatgcgtgatgaacgtgcccagcctgtgcggcaccgaccacaccgagagaagaggcagaatctacatccaggcccacatcgacagagacgtgctgatcgtgctggtgagagacgccaagaacctggtgcccatggaccccaacggcctgagcgacccctacgtgaagctgaagctgatccccgaccccaagagcgagagcaagcagaagaccaagaccatcaagtgcagcctgaaccccgagtggaacgagaccttcagattccagctgaaggagagcgacaaggacagaagactgagcgtggagatctgggactgggacctgaccagcagaaacgacttcatgggcagcctgagcttcggcatcagcgagctgcagaaggccagcgtggacggctggttcaagctgctgagccaggaggagggcgagtacttcaacgtgcccgtgccccccgagggcagcgaggccaacgaggagctgagacagaagttcgagagagccaagatcagccagggcaccaaggtgcccgaggagaagaccaccaacaccgtgagcaagttcgacaacaacggcaacagagacagaatgaagctgaccgacttcaacttcctgatggtgctgggcaagggcagcttcggcaaggtgatgctgagcgagagaaagggcaccgacgagctgtacgccgtgaagatcctgaagaaggacgtggtgatccaggacgacgacgtggagtgcaccatggtggagaagagagtgctggccctgcccggcaagccccccttcctgacccagctgcacagctgcttccagaccatggacagactgtacttcgtgatggagtacgtgaacggcggcgacctgatgtaccacatccagcaggtgggcagattcaaggagccccacgccgtgttctacgccgccgagatcgccatcggcctgttcttcctgcagagcaagggcatcatctacagagacctgaagctggacaacgtgatgctggacagcgagggccacatcaagatcgccgacttcggcatgtgcaaggagaacatctgggacggcgtgaccaccaagaccttctgcggcacccccgactacatcgcccccgagatcatcgcctaccagccctacggcaagagcgtggactggtgggccttcggcgtgctgctgtacgagatgctggccggccaggcccccttcgagggcgaggacgaggacgagctgttccagagcatcatggagcacaacgtggcctaccccaagagcatgagcaaggaggccgtggccatctgcaagggcctgatgaccaagcaccccggcaagagactgggctgcggccccgagggcgagagagacatcaaggagcacgccttcttcagatacatcgactgggagaagctggagagaaaggagatccagcccccctacaagcccaaggccagagacaagagagacaccagcaacttcgacaaggagttcaccagacagcccgtggagctgacccccaccgacaagctgttcatcatgaacctggaccagaacgagttcgccggcttcagctacaccaaccccgagttcgtgatcaacgtgtag

SEQ ID NO: 12346 - DNA, 786 bp, synthetic construct
  misc_feature 1..786: note = Description of Artificial Sequence: Synthetic coding sequence
  source 1..786: mol_type = other DNA
atgagagagagcgccctggagagaggccccgtgcccgaggcccccgccggcggccccgtgcacgccgtgaccgtggtgaccctgctggagaagctggccagcatgctggagaccctgagagagagacagggcggcctggccagaagacagggcggcctggccggcagcgtgagaagaatccagagcggcctgggcgccctgagcagaagccacgacaccaccagcaacaccctggcccagctgctggccaaggccgagagagtgagcagccacgccaacgccgcccaggagagagccgtgagaagagccgcccaggtgcagagactggaggccaaccacggcctgctggtggccagaggcaagctgcacgtgctgctgttcaaggaggagggcgaggtgcccgccagcgccttccagaaggcccccgagcccctgggccccgccgaccagagcgagctgggccccgagcagctggaggccgaggtgggcgagagcagcgacgaggagcccgtggagagcagagcccagagactgagaagaaccggcctgcagaaggtgcagagcctgagaagagccctgagcggcagaaagggccccgccgcccccccccccacccccgtgaagccccccagactgggccccggcagaagcgccgaggcccagcccgaggcccagcccgccctggagcccaccctggagcccgagcccccccaggacaccgaggaggaccccggcagacccggcgccgccgaggaggccctgctgcagatggagagcgtggcctag

SEQ ID NO: 12347 - DNA, 2214 bp, synthetic construct
  misc_feature 1..2214: note = Description of Artificial Sequence: Synthetic coding sequence
  source 1..2214: mol_type = other DNA
atggtggtgttcaacggcctgctgaagatcaagatctgcgaggccgtgagcctgaagcccaccgcctggagcctgagacacgccgtgggccccagaccccagaccttcctgctggacccctacatcgccctgaacgtggacgacagcagaatcggccagaccgccaccaagcagaagaccaacagccccgcctggcacgacgagttcgtgaccgacgtgtgcaacggcagaaagatcgagctggccgtgttccacgacgcccccatcggctacgacgacttcgtggccaactgcaccatccagttcgaggagctgctgcagaacggcagcagacacttcgaggactggatcgacctggagcccgagggcagagtgtacgtgatcatcgacctgagcggcagcagcggcgaggcccccaaggacaacgaggagagagtgttcagagagagaatgagacccagaaagagacagggcgccgtgagaagaagagtgcaccaggtgaacggccacaagttcatggccacctacctgagacagcccacctactgcagccactgcagagacttcatctggggcgtgatcggcaagcagggctaccagtgccaggtgtgcacctgcgtggtgcacaagagatgccacgagctgatcatcaccaagtgcgccggcctgaagaagcaggagacccccgaccaggtgggcagccagagattcagcgtgaacatgccccacaagttcggcatccacaactacaaggtgcccaccttctgcgaccactgcggcagcctgctgtggggcctgctgagacagggcctgcagtgcaaggtgtgcaagatgaacgtgcacagaagatgcgagaccaacgtggcccccaactgcggcgtggacgccagaggcatcgccaaggtgctggccgacctgggcgtgacccccgacaagatcaccaacagcggccagagaagaaagaagctgatcgccggcgccgagagcccccagcccgccagcggcagcagccccagcgaggaggacagaagcaagagcgcccccaccagcccctgcgaccaggagatcaaggagctggagaacaacatcagaaaggccctgagcttcgacaacagaggcgaggagcacagagccgccagcagccccgacggccagctgatgagccccggcgagaacggcgaggtgagacagggccaggccaagagactgggcctggacgagttcaacttcatcaaggtgctgggcaagggcagcttcggcaaggtgatgctggccgagctgaagggcaaggacgaggtgtacgccgtgaaggtgctgaagaaggacgtgatcctgcaggacgacgacgtggactgcaccatgaccgagaagagaatcctggccctggccagaaagcacccctacctgacccagctgtactgctgcttccagaccaaggacagactgttcttcgtgatggagtacgtgaacggcggcgacctgatgttccagatccagagaagcagaaagttcgacgagcccagaagcagattctacgccgccgaggtgaccagcgccctgatgttcctgcaccagcacggcgtgatctacagagacctgaagctggacaacatcctgctggacgccgagggccactgcaagctggccgacttcggcatgtgcaaggagggcatcctgaacggcgtgaccaccaccaccttctgcggcacccccgactacatcgcccccgagatcctgcaggagctggagtacggccccagcgtggactggtgggccctgggcgtgctgatgtacgagatgatggccggccagccccccttcgaggccgacaacgaggacgacctgttcgagagcatcctgcacgacgacgtgctgtaccccgtgtggctgagcaaggaggccgtgagcatcctgaaggccttcatgaccaagaacccccacaagagactgggctgcgtggccagccagaacggcgaggacgccatcaagcagcaccccttcttcaaggagatcgactgggtgctgctggagcagaagaagatcaagccccccttcaagcccagaatcaagaccaagagagacgtgaacaacttcgaccaggacttcaccagagaggagcccgtgctgaccctggtggacgaggccatcgtgaagcagatcaaccaggaggagttcaagggcttcagctacttcggcgaggacctgatgccctag

SEQ ID NO: 12348 - DNA, 384 bp, synthetic construct
  misc_feature 1..384: note = Description of Artificial Sequence: Synthetic coding sequence
  source 1..384: mol_type = other DNA
atggtggtgttcaacggcctgctgaagatcaagatctgcgaggccgtgagcctgaagcccaccgcctggagcctgagacacgccgtgggccccagaccccagaccttcctgctggacccctacatcgccctgaacgtggacgacagcagaatcggccagaccgccaccaagcagaagaccaacagccccgcctggcacgacgagttcgtgaccgacgtgtgcaacggcagaaagatcgagctggccgtgttccacgacgcccccatcggctacgacgacttcgtggccaactgcaccatccagttcgaggagctgctgcagaacggcagcagacacttcgaggactggatcgacctggagcccgagggcagagtgtacgtgtag

SEQ ID NO: 12349 - DNA, 2094 bp, synthetic construct
  misc_feature 1..2094: note = Description of Artificial Sequence: Synthetic coding sequence
  source 1..2094: mol_type = other DNA
atggccggcctgggccccggcgtgggcgacagcgagggcggccccagacccctgttctgcagaaagggcgccctgagacagaaggtggtgcacgaggtgaagagccacaagttcaccgccagattcttcaagcagcccaccttctgcagccactgcaccgacttcatctggggcatcggcaagcagggcctgcagtgccaggtgtgcagcttcgtggtgcacagaagatgccacgagttcgtgaccttcgagtgccccggcgccggcaagggcccccagaccgacgaccccagaaacaagcacaagttcagactgcacagctacagcagccccaccttctgcgaccactgcggcagcctgctgtacggcctggtgcaccagggcatgaagtgcagctgctgcgagatgaacgtgcacagaagatgcgtgagaagcgtgcccagcctgtgcggcgtggaccacaccgagagaagaggcagactgcagctggagatcagagcccccaccgccgacgagatccacgtgaccgtgggcgaggccagaaacctgatccccatggaccccaacggcctgagcgacccctacgtgaagctgaagctgatccccgaccccagaaacctgaccaagcagaagaccagaaccgtgaaggccaccctgaaccccgtgtggaacgagaccttcgtgttcaacctgaagcccggcgacgtggagagaagactgagcgtggaggtgtgggactgggacagaaccagcagaaacgacttcatgggcgccatgagcttcggcgtgagcgagctgctgaaggcccccgtggacggctggtacaagctgctgaaccaggaggagggcgagtactacaacgtgcccgtggccgacgccgacaactgcagcctgctgcagaagttcgaggcctgcaactaccccctggagctgtacgagagagtgagaatgggccccagcagcagccccatccccagccccagccccagccccaccgaccccaagagatgcttcttcggcgccagccccggcagactgcacatcagcgacttcagcttcctgatggtgctgggcaagggcagcttcggcaaggtgatgctggccgagagaagaggcagcgacgagctgtacgccatcaagatcctgaagaaggacgtgatcgtgcaggacgacgacgtggactgcaccctggtggagaagagagtgctggccctgggcggcagaggccccggcggcagaccccacttcctgacccagctgcacagcaccttccagacccccgacagactgtacttcgtgatggagtacgtgaccggcggcgacctgatgtaccacatccagcagctgggcaagttcaaggagccccacgccgccttctacgccgccgagatcgccatcggcctgttcttcctgcacaaccagggcatcatctacagagacctgaagctggacaacgtgatgctggacgccgagggccacatcaagatcaccgacttcggcatgtgcaaggagaacgtgttccccggcaccaccaccagaaccttctgcggcacccccgactacatcgcccccgagatcatcgcctaccagccctacggcaagagcgtggactggtggagcttcggcgtgctgctgtacgagatgctggccggccagccccccttcgacggcgaggacgaggaggagctgttccaggccatcatggagcagaccgtgacctaccccaagagcctgagcagagaggccgtggccatctgcaagggcttcctgaccaagcaccccggcaagagactgggcagcggccccgacggcgagcccaccatcagagcccacggcttcttcagatggatcgactgggagagactggagagactggagatccccccccccttcagacccagaccctgcggcagaagcggcgagaacttcgacaagttcttcaccagagccgcccccgccctgaccccccccgacagactggtgctggccagcatcgaccaggccgacttccagggcttcacctacgtgaaccccgacttcgtgcaccccgacgccagaagccccaccagccccgtgcccgtgcccgtgatgtag

SEQ ID NO: 12350 - DNA, 984 bp, synthetic construct
  misc_feature 1..984: note = Description of Artificial Sequence: Synthetic coding sequence
  source 1..984: mol_type = other DNA
atggccggcctgggccccggcgtgggcgacagcgagggcggccccagacccctgttctgcagaaagggcgccctgagacagaaggtggtgcacgaggtgaagagccacaagttcaccgccagattcttcaagcagcccaccttctgcagccactgcaccgacttcatctggggcatcggcaagcagggcctgcagtgccaggtgtgcagcttcgtggtgcacagaagatgccacgagttcgtgaccttcgagtgccccggcgccggcaagggcccccagaccgacgaccccagaaacaagcacaagttcagactgcacagctacagcagccccaccttctgcgaccactgcggcagcctgctgtacggcctggtgcaccagggcatgaagtgcagctgctgcgagatgaacgtgcacagaagatgcgtgagaagcgtgcccagcctgtgcggcgtggaccacaccgagagaagaggcagactgcagctggagatcagagcccccaccgccgacgagatccacgtgaccgtgggcgaggccagaaacctgatccccatggaccccaacggcctgagcgacccctacgtgaagctgaagctgatccccgaccccagaaacctgaccaagcagaagaccagaaccgtgaaggccaccctgaaccccgtgtggaacgagaccttcgtgttcaacctgaagcccggcgacgtggagagaagactgagcgtggaggtgtgggactgggacagaaccagcagaaacgacttcatgggcgccatgagcttcggcgtgagcgagctgctgaaggcccccgtggacggctggctggtgaccaccccctggaactgcatgagcggctgcggctgggcccccctgcccctgcccagcccccccctgcccctggtgccccccacccccagcgccgccagcagcggcagagtgcaggacgcctgcaccagccccaccagcgccagcagctggttctag

SEQ ID NO: 12351 - DNA, 2133 bp, synthetic construct
  misc_feature 1..2133: note = Description of Artificial Sequence: Synthetic coding sequence
  source 1..2133: mol_type = other DNA
atggccggcctgggccccggcgtgggcgacagcgagggcggccccagacccctgttctgcagaaagggcgccctgagacagaaggtggtgcacgaggtgaagagccacaagttcaccgccagattcttcaagcagcccaccttctgcagccactgcaccgacttcatctggggcatcggcaagcagggcctgcagtgccaggtgtgcagcttcgtggtgcacagaagatgccacgagttcgtgaccttcgagtgccccggcgccggcaagggcccccagaccgacgaccccagaaacaagcacaagttcagactgcacagctacagcagccccaccttctgcgaccactgcggcagcctgctgtacggcctggtgcaccagggcatgaagtgcagctgctgcgagatgaacgtgcacagaagatgcgtgagaagcgtgcccagcctgtgcggcgtggaccacaccgagagaagaggcagactgcagctggagatcagagcccccaccgccgacgagatccacgtgaccgtgggcgaggccagaaacctgatccccatggaccccaacggcctgagcgacccctacgtgaagctgaagctgatccccgaccccagaaacctgaccaagcagaagaccagaaccgtgaaggccaccctgaaccccgtgtggaacgagaccttcgtgttcaacctgaagcccggcgacgtggagagaagactgagcgtggaggtgtgggactgggacagaaccagcagaaacgacttcatgggcgccatgagcttcggcgtgagcgagctgctgaaggcccccgtggacggctggtacaagctgctgaaccaggaggagggcgagtactacaacgtgcccgtggccgacgccgacaactgcagcctgctgcagaagttcgaggcctgcaactaccccctggagctgtacgagagagtgagaatgggccccagcagcagccccatccccagccccagccccagccccaccgaccccaagagatgcttcttcggcgccagccccggcagactgcacatcagcgacttcagcttcctgatggtgctgggcaagggcagcttcggcaaggtgatgctggccgagagaagaggcagcgacgagctgtacgccatcaagatcctgaagaaggacgtgatcgtgcaggacgacgacgtggactgcaccctggtggagaagagagtgctggccctgggcggcagaggccccggcggcagaccccacttcctgacccagctgcacagcaccttccagacccccgacagactgtacttcgtgatggagtacgtgaccggcggcgacctgatgtaccacatccagcagctgggcaagttcaaggagccccacgccgccttctacgccgccgagatcgccatcggcctgttcttcctgcacaaccagggcatcatctacagagacctgaagctggacaacgtgatgctggacgccgagggccacatcaagatcaccgacttcggcatgtgcaaggagaacgtgttccccggcaccaccaccagaaccttctgcggcacccccgactacatcgcccccgagatcatcgcctaccagccctacggcaagagcgtggactggtggagcttcggcgtgctgctgtacgagatgctggccggccagccccccttcgacggcgaggacgaggaggagctgttccaggccatcatggagcagaccgtgacctaccccaagagcctgagcagagaggccgtggccatctgcaagggcttcctgaccaagcaccccggcaagagactgggcagcggccccgacggcgagcccaccatcagagcccacggcttcttcagatggatcgactgggagagactggagagactggagatccccccccccttcagacccagaccctgcggcagaagcggcgagaacttcgacaagttcttcaccagagccgcccccgccctgaccccccccgacagactggtgctggccagcatcgaccaggccgacttccagggcttcacctacgtgaaccccgacttcgtgcaccccgacgccagaagccccaccagccccgtgcccgtgcccgtgatcagctgcacccccgccttccagctgtgccccagaggcttctag

SEQ ID NO: 12352 - DNA, 1647 bp, synthetic construct
  misc_feature 1..1647: note = Description of Artificial Sequence: Synthetic coding sequence
  source 1..1647: mol_type = other DNA
atgcccagaatctgcgacctgagagtgagcagaagatgggagggcccccccgacggcagatgcgagatgaacgtgcacagaagatgcgtgagaagcgtgcccagcctgtgcggcgtggaccacaccgagagaagaggcagactgcagctggagatcagagcccccaccgccgacgagatccacgtgaccgtgggcgaggccagaaacctgatccccatggaccccaacggcctgagcgacccctacgtgaagctgaagctgatccccgaccccagaaacctgaccaagcagaagaccagaaccgtgaaggccaccctgaaccccgtgtggaacgagaccttcgtgttcaacctgaagcccggcgacgtggagagaagactgagcgtggaggtgtgggactgggacagaaccagcagaaacgacttcatgggcgccatgagcttcggcgtgagcgagctgctgaaggcccccgtggacggctggtacaagctgctgaaccaggaggagggcgagtactacaacgtgcccgtggccgacgccgacaactgcagcctgctgcagaagttcgaggcctgcaactaccccctggagctgtacgagagagtgagaatgggccccagcagcagccccatccccagccccagccccagccccaccgaccccaagagatgcttcttcggcgccagccccggcagactgcacatcagcgacttcagcttcctgatggtgctgggcaagggcagcttcggcaaggtgatgctggccgagagaagaggcagcgacgagctgtacgccatcaagatcctgaagaaggacgtgatcgtgcaggacgacgacgtggactgcaccctggtggagaagagagtgctggccctgggcggcagaggccccggcggcagaccccacttcctgacccagctgcacagcaccttccagacccccgacagactgtacttcgtgatggagtacgtgaccggcggcgacctgatgtaccacatccagcagctgggcaagttcaaggagccccacgccgccttctacgccgccgagatcgccatcggcctgttcttcctgcacaaccagggcatcatctacagagacctgaagctggacaacgtgatgctggacgccgagggccacatcaagatcaccgacttcggcatgtgcaaggagaacgtgttccccggcaccaccaccagaaccttctgcggcacccccgactacatcgcccccgagatcatcgcctaccagccctacggcaagagcgtggactggtggagcttcggcgtgctgctgtacgagatgctggccggccagttcctgaccaagcaccccggcaagagactgggcagcggccccgacggcgagcccaccatcagagcccacggcttcttcagatggatcgactgggagagactggagagactggagatccccccccccttcagacccagaccctgcggcagaagcggcgagaacttcgacaagttcttcaccagagccgcccccgccctgaccccccccgacagactggtgctggccagcatcgaccaggccgacttccagggcttcacctacgtgaaccccgacttcgtgcaccccgacgccagaagccccaccagccccgtgcccgtgcccgtgatgtag

SEQ ID NO: 12353 - DNA, 1779 bp, synthetic construct
  misc_feature 1..1779: note = Description of Artificial Sequence: Synthetic coding sequence
  source 1..1779: mol_type = other DNA
atgcccagcagaaccggccccaagatggagggcagcggcggcagagtgagactgaaggcccactacggcggcgacatcttcatcaccagcgtggacgccgccaccaccttcgaggagctgtgcgaggaggtgagagacatgtgcagactgcaccagcagcaccccctgaccctgaagtgggtggacagcgagggcgacccctgcaccgtgagcagccagatggagctggaggaggccttcagactggccagacagtgcagagacgagggcctgatcatccacgtgttccccagcacccccgagcagcccggcctgccctgccccggcgaggacaagagcatctacagaagaggcgccagaagatggagaaagctgtacagagccaacggccacctgttccaggccaagagattcaacagaagagcctactgcggccagtgcagcgagagaatctggggcctggccagacagggctacagatgcatcaactgcaagctgctggtgcacaagagatgccacggcctggtgcccctgacctgcagaaagcacatggacagcgtgatgcccagccaggagccccccgtggacgacaagaacgaggacgccgacctgcccagcgaggagaccgacggcatcgcctacatcagcagcagcagaaagcacgacagcatcaaggacgacagcgaggacctgaagcccgtgatcgacggcatggacggcatcaagatcagccagggcctgggcctgcaggacttcgacctgatcagagtgatcggcagaggcagctacgccaaggtgctgctggtgagactgaagaagaacgaccagatctacgccatgaaggtggtgaagaaggagctggtgcacgacgacgaggacatcgactgggtgcagaccgagaagcacgtgttcgagcaggccagcagcaaccccttcctggtgggcctgcacagctgcttccagaccaccagcagactgttcctggtgatcgagtacgtgaacggcggcgacctgatgttccacatgcagagacagagaaagctgcccgaggagcacgccagattctacgccgccgagatctgcatcgccctgaacttcctgcacgagagaggcatcatctacagagacctgaagctggacaacgtgctgctggacgccgacggccacatcaagctgaccgactacggcatgtgcaaggagggcctgggccccggcgacaccaccagcaccttctgcggcacccccaactacatcgcccccgagatcctgagaggcgaggagtacggcttcagcgtggactggtgggccctgggcgtgctgatgttcgagatgatggccggcagaagccccttcgacatcatcaccgacaaccccgacatgaacaccgaggactacctgttccaggtgatcctggagaagcccatcagaatccccagattcctgagcgtgaaggccagccacgtgctgaagggcttcctgaacaaggaccccaaggagagactgggctgcagaccccagaccggcttcagcgacatcaagagccacgccttcttcagaagcatcgactgggacctgctggagaagaagcaggccctgccccccttccagccccagatcaccgacgactacggcctggacaacttcgacacccagttcaccagcgagcccgtgcagctgacccccgacgacgaggacgccatcaagagaatcgaccagagcgagttcgagggcttcgagtacatcaaccccctgctgctgagcaccgaggagagcgtgtag

SEQ ID NO: 12354 - DNA, 1230 bp, synthetic construct
  misc_feature 1..1230: note = Description of Artificial Sequence: Synthetic coding sequence
  source 1..1230: mol_type = other DNA
atggacagcgtgatgcccagccaggagccccccgtggacgacaagaacgaggacgccgacctgcccagcgaggagaccgacggcatcgcctacatcagcagcagcagaaagcacgacagcatcaaggacgacagcgaggacctgaagcccgtgatcgacggcatggacggcatcaagatcagccagggcctgggcctgcaggacttcgacctgatcagagtgatcggcagaggcagctacgccaaggtgctgctggtgagactgaagaagaacgaccagatctacgccatgaaggtggtgaagaaggagctggtgcacgacgacgaggacatcgactgggtgcagaccgagaagcacgtgttcgagcaggccagcagcaaccccttcctggtgggcctgcacagctgcttccagaccaccagcagactgttcctggtgatcgagtacgtgaacggcggcgacctgatgttccacatgcagagacagagaaagctgcccgaggagcacgccagattctacgccgccgagatctgcatcgccctgaacttcctgcacgagagaggcatcatctacagagacctgaagctggacaacgtgctgctggacgccgacggccacatcaagctgaccgactacggcatgtgcaaggagggcctgggccccggcgacaccaccagcaccttctgcggcacccccaactacatcgcccccgagatcctgagaggcgaggagtacggcttcagcgtggactggtgggccctgggcgtgctgatgttcgagatgatggccggcagaagccccttcgacatcatcaccgacaaccccgacatgaacaccgaggactacctgttccaggtgatcctggagaagcccatcagaatccccagattcctgagcgtgaaggccagccacgtgctgaagggcttcctgaacaaggaccccaaggagagactgggctgcagaccccagaccggcttcagcgacatcaagagccacgccttcttcagaagcatcgactgggacctgctggagaagaagcaggccctgccccccttccagccccagatcaccgacgactacggcctggacaacttcgacacccagttcaccagcgagcccgtgcagctgacccccgacgacgaggacgccatcaagagaatcgaccagagcgagttcgagggcttcgagtacatcaaccccctgctgctgagcaccgaggagagcgtgtag

SEQ ID NO: 12355 - DNA, 1230 bp, synthetic construct; identical to SEQ ID NO: 12354
  misc_feature 1..1230: note = Description of Artificial Sequence: Synthetic coding sequence
  source 1..1230: mol_type = other DNA

SEQ ID NO: 12356 - DNA, 1467 bp, synthetic construct
  misc_feature 1..1467: note = Description of Artificial Sequence: Synthetic coding sequence
  source 1..1467: mol_type = other DNA
atgctgacccccagaaccgacgagagcatctacagaagaggcgccagaagatggagaaagctgtacagagccaacggccacctgttccaggccaagagattcaacagaagagcctactgcggccagtgcagcgagagaatctggggcctggccagacagggctacagatgcatcaactgcaagctgctggtgcacaagagatgccacggcctggtgcccctgacctgcagaaagcacatggacagcgtgatgcccagccaggagccccccgtggacgacaagaacgaggacgccgacctgcccagcgaggagaccgacggcatcgcctacatcagcagcagcagaaagcacgacagcatcaaggacgacagcgaggacctgaagcccgtgatcgacggcatggacggcatcaagatcagccagggcctgggcctgcaggacttcgacctgatcagagtgatcggcagaggcagctacgccaaggtgctgctggtgagactgaagaagaacgaccagatctacgccatgaaggtggtgaagaaggagctggtgcacgacgacgaggacatcgactgggtgcagaccgagaagcacgtgttcgagcaggccagcagcaaccccttcctggtgggcctgcacagctgcttccagaccaccagcagactgttcctggtgatcgagtacgtgaacggcggcgacctgatgttccacatgcagagacagagaaagctgcccgaggagcacgccagattctacgccgccgagatctgcatcgccctgaacttcctgcacgagagaggcatcatctacagagacctgaagctggacaacgtgctgctggacgccgacggccacatcaagctgaccgactacggcatgtgcaaggagggcctgggccccggcgacaccaccagcaccttctgcggcacccccaactacatcgcccccgagatcctgagaggcgaggagtacggcttcagcgtggactggtgggccctgggcgtgctgatgttcgagatgatggccggcagaagccccttcgacatcatcaccgacaaccccgacatgaacaccgaggactacctgttccaggtgatcctggagaagcccatcagaatccccagattcctgagcgtgaaggccagccacgtgctgaagggcttcctgaacaaggaccccaaggagagactgggctgcagaccccagaccggcttcagcgacatcaagagccacgccttcttcagaagcatcgactgggacctgctggagaagaagcaggccctgccccccttccagccccagatcaccgacgactacggcctggacaacttcgacacccagttcaccagcgagcccgtgcagctgacccccgacgacgaggacgccatcaagagaatcgaccagagcgagttcgagggcttcgagtacatcaaccccctgctgctgagcaccgaggagagcgtgtag

SEQ ID NO: 12357 - DNA, 78 bp, synthetic construct
  misc_feature 1..78: note = Description of Artificial Sequence: Synthetic coding sequence
  source 1..78: mol_type = other DNA
atggacagcgtgatgcccagccaggagccccccgtggacgacaagaacgaggacgccgacctgcccagcgaggagtag

SEQ ID NO: 12358 - DNA, 249 bp, synthetic construct
  misc_feature 1..249: note = Description of Artificial Sequence: Synthetic coding sequence
  source 1..249: mol_type = other DNA
atggacagcgtgatgcccagccaggagccccccgtggacgacaagaacgaggacgccgacctgcccagcgaggagaccgacggcatcgcctacatcagcagcagcagaaagcacgacagcatcaaggacgacagcgaggacctgaagcccgtgatcgacggcatggacggcatcaagatcagccagggcctgggcctgcaggacttcgacctgatcagagtgatcggcagaggcagctacgccaagtag

SEQ ID NO: 12359 - DNA, 297 bp, synthetic construct
  misc_feature 1..297: note = Description of Artificial Sequence: Synthetic coding sequence
  source 1..297: mol_type = other DNA
atggacagcgtgatgcccagccaggagccccccgtggacgacaagaacgaggacgccgacctgcccagcgaggagaccgacggcatcgcctacatcagcagcagcagaaagcacgacagcatcaaggacgacagcgaggacctgaagcccgtgatcgacggcatggacggcatcaagatcagccagggcctgggcctgcaggacttcgacctgatcagagtgatcggcagaggcagctacgccaaggtgctgctggtgagactgaagaagaacgaccagatctacgccatgaagtag

SEQ ID NO: 12360 - DNA, 330 bp, synthetic construct
  misc_feature 1..330: note = Description of Artificial Sequence: Synthetic coding sequence
  source 1..330: mol_type = other DNA
atggacagcgtgatgcccagccaggagccccccgtggacgacaagaacgaggacgccgacctgcccagcgaggagaccgacggcatcgcctacatcagcagcagcagaaagcacgacagcatcaaggacgacagcgaggacctgaagcccgtgatcgacggcatggacggcatcaagatcagccagggcctgggcctgcaggacttcgacctgatcagagtgatcggcagaggcagctacgccaaggtgctgctggtgagactgaagaagaacgaccagatctacgccatgaaggtggtgaagaaggagctggtgcacgacgacgagtag

SEQ ID NO: 12361 - DNA, 141 bp, synthetic construct
  misc_feature 1..141: note = Description of Artificial Sequence: Synthetic coding sequence
  source 1..141: mol_type = other DNA
atggacagcgtgatgcccagccaggagccccccgtggacgacaagaacgaggacgccgacctgcccagcgaggagaccgacggcatcgcctacatcagcagcagcagaaagcacgacagcatcaaggacgacagcgagtag

SEQ ID NO: 12362 - DNA, 222 bp, synthetic construct
  misc_feature 1..222: note = Description of Artificial Sequence: Synthetic coding sequence
  source 1..222: mol_type = other DNA
atggacagcgtgatgcccagccaggagccccccgtggacgacaagaacgaggacgccgacctgcccagcgaggagaccgacggcatcgcctacatcagcagcagcagaaagcacgacagcatcaaggacgacagcgaggacctgaagcccgtgatcgacggcatggacggcatcaagatcagccagggcctgggcctgcaggacttcgacctgatcagatag

SEQ ID NO: 12363 - DNA, 66 bp, synthetic construct
  misc_feature 1..66: note = Description of Artificial Sequence: Synthetic coding sequence
  source 1..66: mol_type = other DNA
atggacagcgtgatgcccagccaggagccccccgtggacgacaagaacgaggacgccgacctgtag

SEQ ID NO: 12364 - DNA, 216 bp, synthetic construct
  misc_feature 1..216: note = Description of Artificial Sequence: Synthetic coding sequence
  source 1..216: mol_type = other DNA
atggacagcgtgatgcccagccaggagccccccgtggacgacaagaacgaggacgccgacctgcccagcgaggagaccgacggcatcgcctacatcagcagcagcagaaagcacgacagcatcaaggacgacagcgaggacctgaagcccgtgatcgacggcatggacggcatcaagatcagccagggcctgggcctgcaggacttcgacctgtag

SEQ ID NO: 12365 - DNA, 417 bp, synthetic construct
  misc_feature 1..417: note = Description of Artificial Sequence: Synthetic coding sequence
  source 1..417: mol_type = other DNA
atgatcagcctgaccgacacccagaagatcggcatgggcctgaccggcttcggcgtgttcttcctgttcttcggcatgatcctgttcttcgacaaggccctgctggccatcggcaacgtgctgttcgtggccggcctggccttcgtgatcggcctggagagaaccttcagattcttcttccagaagcacaagatgaaggccaccggcttcttcctgggcggcgtgttcgtggtgctgatcggctggcccctgatcggcatgatcttcgagatctacggcttcttcctgctgttcagaggcttcttccccgtggtggtgggcttcatcagaagagtgcccgtgctgggcagcctgctgaacctgcccggcatcagaagcttcgtggacaaggtgggcgagagcaacaacatggtgtag

SEQ ID NO: 12366 - DNA, 702 bp, synthetic construct
  misc_feature 1..702: note = Description of Artificial Sequence: Synthetic coding sequence
  source 1..702: mol_type = other DNA
atggacagccccgaggacgccgacctgttccacagcgaggagatcaaggcccccgagaaggaggagttcctggcctggcagcacgacctggaggtgaacgacaaggcccccgcccaggccagacccaccgtgttcagatggaccggcggcggcaaggaggtgtacctgagcggcagcttcaacaactggagcaagctgcccctgaccagaagccacaacaacttcgtggccatcctggacctgcccgagggcgagcaccagtacaagttcttcgtggacggccagtggacccacgaccccagcgagcccatcgtgaccagccagctgggcaccgtgaacaacatcatccaggtgaagaagaccgacttcgaggtgttcgacgccctgatggtggacagccagaagtgcagcgacgtgagcgagctgagcagcagcccccccggcccctaccaccaggagccctacgtgtgcaagcccgaggagagattcagagccccccccatcctgcccccccacctgctgcaggtgatcctgaacaaggacaccggcatcagctgcgaccccgccctgctgcccgagcccaaccacgtgatgctgaaccacctgtacgccctgagcatcaaggacggcgtgatggtgctgagcgccacccacagatacaagaagaagtacgtgaccaccctgctgtacaagcccatctag

SEQ ID NO: 12367 - DNA, 813 bp, synthetic construct
  misc_feature 1..813: note = Description of Artificial Sequence: Synthetic coding sequence
  source 1..813: mol_type = other DNA
atgggcaacaccagcagcgagagagccgccctggagagacacggcggccacaagacccccagaagagacagcagcggcggcaccaaggacggcgacagacccaagatcctgatggacagccccgaggacgccgacctgttccacagcgaggagatcaaggcccccgagaaggaggagttcctggcctggcagcacgacctggaggtgaacgacaaggcccccgcccaggccagacccaccgtgttcagatggaccggcggcggcaaggaggtgtacctgagcggcagcttcaacaactggagcaagctgcccctgaccagaagccacaacaacttcgtggccatcctggacctgcccgagggcgagcaccagtacaagttcttcgtggacggccagtggacccacgaccccagcgagcccatcgtgaccagccagctgggcaccgtgaacaacatcatccaggtgaagaagaccgacttcgaggtgttcgacgccctgatggtggacagccagaagtgcagcgacgtgagcgagctgagcagcagcccccccggcccctaccaccaggagccctacgtgtgcaagcccgaggagagattcagagccccccccatcctgcccccccacctgctgcaggtgatcctgaacaaggacaccggcatcagctgcgaccccgccctgctgcccgagcccaaccacgtgatgctgaaccacctgtacgccctgagcatcaaggacggcgtgatggtgctgagcgccacccacagatacaagaagaagtacgtgaccaccctgctgtacaagcccatctag

SEQ ID NO: 12368 - DNA, 12384 bp, synthetic construct
  misc_feature 1..12384: note = Description of Artificial Sequence: Synthetic coding sequence
  source 1..12384: mol_type = other DNA
atggccggcagcggcgccggcgtgagatgcagcctgctgagactgcaggagaccctgagcgccgccgacagatgcggcgccgccctggccggccaccagctgatcagaggcctgggccaggagtgcgtgctgagcagcagccccgccgtgctggccctgcagaccagcctggtgttcagcagagacttcggcctgctggtgttcgtgagaaagagcctgaacagcatcgagttcagagagtgcagagaggagatcctgaagttcctgtgcatcttcctggagaagatgggccagaagatcgccccctacagcgtggagatcaagaacacctgcaccagcgtgtacaccaaggacagagccgccaagtgcaagatccccgccctggacctgctgatcaagctgctgcagaccttcagaagcagcagactgatggacgagttcaagatcggcgagctgttcagcaagttctacggcgagctggccctgaagaagaagatccccgacaccgtgctggagaaggtgtacgagctgctgggcctgctgggcgaggtgcaccccagcgagatgatcaacaacgccgagaacctgttcagagccttcctgggcgagctgaagacccagatgaccagcgccgtgagagagcccaagctgcccgtgctggccggctgcctgaagggcctgagcagcctgctgtgcaacttcaccaagagcatggaggaggacccccagaccagcagagagatcttcaacttcgtgctgaaggccatcagaccccagatcgacctgaagagatacgccgtgcccagcgccggcctgagactgttcgccctgcacgccagccagttcagcacctgcctgctggacaactacgtgagcctgttcgaggtgctgctgaagtggtgcgcccacaccaacgtggagctgaagaaggccgccctgagcgccctggagagcttcctgaagcaggtgagcaacatggtggccaagaacgccgagatgcacaagaacaagctgcagtacttcatggagcagttctacggcatcatcagaaacgtggacagcaacaacaaggagctgagcatcgccatcagaggctacggcctgttcgccggcccctgcaaggtgatcaacgccaaggacgtggacttcatgtacgtggagctgatccagagatgcaagcagatgttcctgacccagaccgacaccggcgacgacagagtgtaccagatgcccagcttcctgcagagcgtggccagcgtgctgctgtacctggacaccgtgcccgaggtgtacacccccgtgctggagcacctggtggtgatgcagatcgacagcttcccccagtacagccccaagatgcagctggtgtgctgcagagccatcgtgaaggtgttcctggccctggccgccaagggccccgtgctgagaaactgcatcagcaccgtggtgcaccagggcctgatcagaatctgcagcaagcccgtggtgctgcccaagggccccgagagcgagagcgaggaccacagagccagcggcgaggtgagaaccggcaagtggaaggtgcccacctacaaggactacgtggacctgttcagacacctgctgagcagcgaccagatgatggacagcatcctggccgacgaggccttcttcagcgtgaacagcagcagcgagagcctgaaccacctgctgtacgacgagttcgtgaagagcgtgctgaagatcgtggagaagctggacctgaccctggagatccagaccgtgggcgagcaggagaacggcgacgaggcccccggcgtgtggatgatccccaccagcgaccccgccgccaacctgcaccccgccaagcccaaggacttcagcgccttcatcaacctggtggagttctgcagagagatcctgcccgagaagcaggccgagttcttcgagccctgggtgtacagcttcagctacgagctgatcctgcagagcaccagactgcccctgatcagcggcttctacaagctgctgagcatcaccgtgagaaacgccaagaagatcaagtacttcgagggcgtgagccccaagagcctgaagcacagccccgaggaccccgagaagtacagctgcttcgccctgttcgtgaagttcggcaaggaggtggccgtgaagatgaagcagtacaaggacgagctgctggccagctgcctgaccttcctgctgagcctgccccacaacatcatcgagctggacgtgagagcctacgtgcccgccctgcagatggccttcaagctgggcctgagctacacccccctggccgaggtgggcctgaacgccctggaggagtggagcatctacatcgacagacacgtgatgcagccctactacaaggacatcctgccctgcctggacggctacctgaagaccagcgccctgagcgacgagaccaagaacaactgggaggtgagcgccctgagcagagccgcccagaagggcttcaacaaggtggtgctgaagcacctgaagaagaccaagaacctgagcagcaacgaggccatcagcctggaggagatcagaatcagagtggtgcagatgctgggcagcctgggcggccagatcaacaagaacctgctgaccgtgaccagcagcgacgagatgatgaagagctacgtggcctgggacagagagaagagactgagcttcgccgtgcccttcagagagatgaagcccgtgatcttcctggacgtgttcctgcccagagtgaccgagctggccctgaccgccagcgacagacagaccaaggtggccgcctgcgagctgctgcacagcatggtgatgttcatgctgggcaaggccacccagatgcccgagggcggccagggcgccccccccatgtaccagctgtacaagagaaccttccccgtgctgctgagactggcctgcgacgtggaccaggtgaccagacagctgtacgagcccctggtgatgcagctgatccactggttcaccaacaacaagaagttcgagagccaggacaccgtggccctgctggaggccatcctggacggcatcgtggaccccgtggacagcaccctgagagacttctgcggcagatgcatcagagagttcctgaagtggagcatcaagcagatcaccccccagcagcaggagaagagccccgtgaacaccaagagcctgttcaagagactgtacagcctggccctgcaccccaacgccttcaagagactgggcgccagcctggccttcaacaacatctacagagagttcagagaggaggagagcctggtggagcagttcgtgttcgaggccctggtgatctacatggagagcctggccctggcccacgccgacgagaagagcctgggcaccatccagcagtgctgcgacgccatcgaccacctgtgcagaatcatcgagaagaagcacgtgagcctgaacaaggccaagaagagaagactgcccagaggcttcccccccagcgccagcctgtgcctgctggacctggtgaagtggctgctggcccactgcggcagaccccagaccgagtgcagacacaagagcatcgagctgttctacaagttcgtgcccctgctgcccggcaacagaagccccaacctgtggctgaaggacgtgctgaaggaggagggcgtgagcttcctgatcaacaccttcgagggcggcggctgcggccagcccagcggcatcctggcccagcccaccctgctgtacagaggccccttcagcctgcaggccaccctgtgctggctggacctgctgctggccgccctggagtgctacaacaccttcatcggcgagagaaccgtgggcgccctgcaggtgctgggcaccgaggcccagagcagcctgctgaaggccgtggccttcttcctggagagcatcgccatgcacgacatcatcgccgccgagaagtgcttcggcaccggcgccgccggcaacagaaccagcccccaggagggcgagagatacaactacagcaagtgcaccgtggtggtgagaatcatggagttcaccaccaccctgctgaacaccagccccgagggctggaagctgctgaagaaggacctgtgcaacacccacctgatgagagtgctggtgcagaccctgtgcgagcccgccagcatcggcttcaacatcggcgacgtgcaggtgatggcccacctgcccgacgtgtgcgtgaacctgatgaaggccctgaagatgagcccctacaaggacatcctggagacccacctgagagagaagatcaccgcccagagcatcgaggagctgtgcgccgtgaacctgtacggccccgacgcccaggtggacagaagcagactggccgccgtggtgagcgcctgcaagcagctgcacagagccggcctgctgcacaacatcctgcccagccagagcaccgacctgcaccacagcgtgggcaccgagctgctgagcctggtgtacaagggcatcgcccccggcgacgagagacagtgcctgcccagcctggacctgagctgcaagcagctggccagcggcctgctggagctggccttcgccttcggcggcctgtgcgagagactggtgagcctgctgctgaaccccgccgtgctgagcaccgccagcctgggcagcagccagggcagcgtgatccacttcagccacggcgagtacttctacagcctgttcagcgagaccatcaacaccgagctgctgaagaacctggacctggccgtgctggagctgatgcagagcagcgtggacaacaccaagatggtgagcgccgtgctgaacggcatgctggaccagagcttcagagagagagccaaccagaagcaccagggcctgaagctggccaccaccatcctgcagcactggaagaagtgcgacagctggtgggccaaggacagccccctggagaccaagatggccgtgctggccctgctggccaagatcctgcagatcgacagcagcgtgagcttcaacaccagccacggcagcttccccgaggtgttcaccacctacatcagcctgctggccgacaccaagctggacctgcacctgaagggccaggccgtgaccctgctgcccttcttcaccagcctgaccggcggcagcctggaggagctgagaagagtgctggagcagctgatcgtggcccacttccccatgcagagcagagagttcccccccggcacccccagattcaacaactacgtggactgcatgaagaagttcctggacgccctggagctgagccagagccccatgctgctggagctgatgaccgaggtgctgtgcagagagcagcagcacgtgatggaggagctgttccagagcagcttcagaagaatcgccagaagaggcagctgcgtgacccaggtgggcctgctggagagcgtgtacgagatgttcagaaaggacgaccccagactgagcttcaccagacagagcttcgtggacagaagcctgctgaccctgctgtggcactgcagcctggacgccctgagagagttcttcagcaccatcgtggtggacgccatcgacgtgctgaagagcagattcaccaagctgaacgagagcaccttcgacacccagatcaccaagaagatgggctactacaagatcctggacgtgatgtacagcagactgcccaaggacgacgtgcacgccaaggagagcaagatcaaccaggtgttccacggcagctgcatcaccgagggcaacgagctgaccaagaccctgatcaagctgtgctacgacgccttcaccgagaacatggccggcgagaaccagctgctggagagaagaagactgtaccactgcgccgcctacaactgcgccatcagcgtgatctgctgcgtgttcaacgagctgaagttctaccagggcttcctgttcagcgagaagcccgagaagaacctgctgatcttcgagaacctgatcgacctgaagagaagatacaacttccccgtggaggtggaggtgcccatggagagaaagaagaagtacatcgagatcagaaaggaggccagagaggccgccaacggcgacagcgacggccccagctacatgagcagcctgagctacctggccgacagcaccctgagcgaggagatgagccagttcgacttcagcaccggcgtgcagagctacagctacagcagccaggaccccagacccgccaccggcagattcagaagaagagagcagagagaccccaccgtgcacgacgacgtgctggagctggagatggacgagctgaacagacacgagtgcatggcccccctgaccgccctggtgaagcacatgcacagaagcctgggccccccccagggcgaggaggacagcgtgcccagagacctgcccagctggatgaagttcctgcacggcaagctgggcaaccccatcgtgcccctgaacatcagactgttcctggccaagctggtgatcaacaccgaggaggtgttcagaccctacgccaagcactggctgagccccctgctgcagctggccgccagcgagaacaacggcggcgagggcatccactacatggtggtggagatcgtggccaccatcctgagctggaccggcctggccacccccaccggcgtgcccaaggacgaggtgctggccaacagactgctgaacttcctgatgaagcacgtgttccaccccaagagagccgtgttcagacacaacctggagatcatcaagaccctggtggagtgctggaaggactgcctgagcatcccctacagactgatcttcgagaagttcagcggcaaggaccccaacagcaaggacaacagcgtgggcatccagctgctgggcatcgtgatggccaacgacctgcccccctacgacccccagtgcggcatccagagcagcgagtacttccaggccctggtgaacaacatgagcttcgtgagatacaaggaggtgtacgccgccgccgccgaggtgctgggcctgatcctgagatacgtgatggagagaaagaacatcctggaggagagcctgtgcgagctggtggccaagcagctgaagcagcaccagaacaccatggaggacaagttcatcgtgtgcctgaacaaggtgaccaagagcttcccccccctggccgacagattcatgaacgccgtgttcttcctgctgcccaagttccacggcgtgctgaagaccctgtgcctggaggtggtgctgtgcagagtggagggcatgaccgagctgtacttccagctgaagagcaaggacttcgtgcaggtgatgagacacagagacgacgagagacagaaggtgtgcctggacatcatctacaagatgatgcccaagctgaagcccgtggagctgagagagctgctgaaccccgtggtggagttcgtgagccaccccagcaccacctgcagagagcagatgtacaacatcctgatgtggatccacgacaactacagagaccccgagagcgagaccgacaacgacagccaggagatcttcaagctggccaaggacgtgctgatccagggcctgatcgacgagaaccccggcctgcagctgatcatcagaaacttctggagccacgagaccagactgcccagcaacaccctggacagactgctggccctgaacagcctgtacagccccaagatcgaggtgcacttcctgagcctggccaccaacttcctgctggagatgaccagcatgagccccgactaccccaaccccatgttcgagcaccccctgagcgagtgcgagttccaggagtacaccatcgacagcgactggagattcagaagcaccgtgctgacccccatgttcgtggagacccaggccagccagggcaccctgcagaccagaacccaggagggcagcctgagcgccagatggcccgtggccggccagatcagagccacccagcagcagcacgacttcaccctgacccagaccgccgacggcagaagcagcttcgactggctgaccggcagcagcaccgaccccctggtggaccacaccagccccagcagcgacagcctgctgttcgcccacaagagaagcgagagactgcagagagcccccctgaagagcgtgggccccgacttcggcaagaagagactgggcctgcccggcgacgaggtggacaacaaggtgaagggcgccgccggcagaaccgacctgctgagactgagaagaagattcatgagagaccaggagaagctgagcctgatgtacgccagaaagggcgtggccgagcagaagagagagaaggagatcaagagcgagctgaagatgaagcaggacgcccaggtggtgctgtacagaagctacagacacggcgacctgcccgacatccagatcaagcacagcagcctgatcacccccctgcaggccgtggcccagagagaccccatcatcgccaagcagctgttcagcagcctgttcagcggcatcctgaaggagatggacaagttcaagaccctgagcgagaagaacaacatcacccagaagctgctgcaggacttcaacagattcctgaacaccaccttcagcttcttcccccccttcgtgagctgcatccaggacatcagctgccagcacgccgccctgctgagcctggaccccgccgccgtgagcgccggctgcctggccagcctgcagcagcccgtgggcatcagactgctggaggaggccctgctgagactgctgcccgccgagctgcccgccaagagagtgagaggcaaggccagactgccccccgacgtgctgagatgggtggagctggccaagctgtacagaagcatcggcgagtacgacgtgctgagaggcatcttcaccagcgagatcggcaccaagcagatcacccagagcgccctgctggccgaggccagaagcgactacagcgaggccgccaagcagtacgacgaggccctgaacaagcaggactgggtggacggcgagcccaccgaggccgagaaggacttctgggagctggccagcctggactgctacaaccacctggccgagtggaagagcctggagtactgcagcaccgccagcatcgacagcgagaacccccccgacctgaacaagatctggagcgagcccttctaccaggagacctacctgccctacatgatcagaagcaagctgaagctgctgctgcagggcgaggccgaccagagcctgctgaccttcatcgacaaggccatgcacggcgagctgcagaaggccatcctggagctgcactacagccaggagctgagcctgctgtacctgctgcaggacgacgtggacagagccaagtactacatccagaacggcatccagagcttcatgcagaactacagcagcatcgacgtgctgctgcaccagagcagactgaccaagctgcagagcgtgcaggccctgaccgagatccaggagttcatcagcttcatcagcaagcagggcaacctgagcagccaggtgcccctgaagagactgctgaacacctggaccaacagataccccgacgccaagatggaccccatgaacatctgggacgacatcatcaccaacagatgcttcttcctgagcaagatcgaggagaagctgacccccctgcccgaggacaacagcatgaacgtggaccaggacggcgaccccagcgacagaatggaggtgcaggagcaggaggaggacatcagcagcctgatcagaagctgcaagttcagcatgaagatgaagatgatcgacagcgccagaaagcagaacaacttcagcctggccatgaagctgctgaaggagctgcacaaggagagcaagaccagagacgactggctggtgagctgggtgcagagctactgcagactgagccactgcagaagcagaagccagggctgcagcgagcaggtgctgaccgtgctgaagaccgtgagcctgctggacgagaacaacgtgagcagctacctgagcaagaacatcctggccttcagagaccagaacatcctgctgggcaccacctacagaatcatcgccaacgccctgagcagcgagcccgcctgcctggccgagatcgaggaggacaaggccagaagaatcctggagctgagcggcagcagcagcgaggacagcgagaaggtgatcgccggcctgtaccagagagccttccagcacctgagcgaggccgtgcaggccgccgaggaggaggcccagccccccagctggagctgcggccccgccgccggcgtgatcgacgcctacatgaccctggccgacttctgcgaccagcagctgagaaaggaggaggagaacgccagcgtgatcgacagcgccgagctgcaggcctaccccgccctggtggtggagaagatgctgaaggccctgaagctgaacagcaacgaggccagactgaagttccccagactgctgcagatcatcgagagataccccgaggagaccctgagcctgatgaccaaggagatcagcagcgtgccctgctggcagttcatcagctggatcagccacatggtggccctgctggacaaggaccaggccgtggccgtgcagcacagcgtggaggagatcaccgacaactacccccaggccatcgtgtaccccttcatcatcagcagcgagagctacagcttcaaggacaccagcaccggccacaagaacaaggagttcgtggccagaatcaagagcaagctggaccagggcggcgtgatccaggacttcatcaacgccctggaccagctgagcaaccccgagctgctgttcaaggactggagcaacgacgtgagagccgagctggccaagacccccgtgaacaagaagaacatcgagaagatgtacgagagaatgtacgccgccctgggcgaccccaaggcccccggcctgggcgccttcagaagaaagttcatccagaccttcggcaaggagttcgacaagcacttcggcaagggcggcagcaagctgctgagaatgaagctgagcgacttcaacgacatcaccaacatgctgctgctgaagatgaacaaggacagcaagccccccggcaacctgaaggagtgcagcccctggatgagcgacttcaaggtggagttcctgagaaacgagctggagatccccggccagtacgacggcagaggcaagcccctgcccgagtaccacgtgagaatcgccggcttcgacgagagagtgaccgtgatggccagcctgagaagacccaagagaatcatcatcagaggccacgacgagagagagcaccccttcctggtgaagggcggcgaggacctgagacaggaccagagagtggagcagctgttccaggtgatgaacggcatcctggcccaggacagcgcctgcagccagagagccctgcagctgagaacctacagcgtggtgcccatgaccagcagactgggcctgatcgagtggctggagaacaccgtgaccctgaaggacctgctgctgaacaccatgagccaggaggagaaggccgcctacctgagcgaccccagagcccccccctgcgagtacaaggactggctgaccaagatgagcggcaagcacgacgtgggcgcctacatgctgatgtacaagggcgccaacagaaccgagaccgtgaccagcttcagaaagagagagagcaaggtgcccgccgacctgctgaagagagccttcgtgagaatgagcaccagccccgaggccttcctggccctgagaagccacttcgccagcagccacgccctgatctgcatcagccactggatcctgggcatcggcgacagacacctgaacaacttcatggtggccatggagaccggcggcgtgatcggcatcgacttcggccacgccttcggcagcgccacccagttcctgcccgtgcccgagctgatgcccttcagactgaccagacagttcatcaacctgatgctgcccatgaaggagaccggcctgatgtacagcatcatggtgcacgccctgagagccttcagaagcgaccccggcctgctgaccaacaccatggacgtgttcgtgaaggagcccagcttcgactggaagaacttcgagcagaagatgctgaagaagggcggcagctggatccaggagatcaacgtggccgagaagaactggtaccccagacagaagatctgctacgccaagagaaagctggccggcgccaaccccgccgtgatcacctgcgacgagctgctgctgggccacgagaaggcccccgccttcagagactacgtggccgtggccagaggcagcaaggaccacaacatcagagcccaggagcccgagagcggcctgagcgaggagacccaggtgaagtgcctgatggaccaggccaccgaccccaacatcctgggcagaacctgggagggctgggagccctggatgtag

SEQ ID NO: 12369 - DNA, 12291 bp, synthetic construct
  misc_feature 1..12291: note = Description of Artificial Sequence: Synthetic coding sequence
  source 1..12291: mol_type = other DNA
atggccggcagcggcgccggcgtgagatgcagcctgctgagactgcaggagaccctgagcgccgccgacagatgcggcgccgccctggccggccaccagctgatcagaggcctgggccaggagtgcgtgctgagcagcagccccgccgtgctggccctgcagaccagcctggtgttcagcagagacttcggcctgctggtgttcgtgagaaagagcctgaacagcatcgagttcagagagtgcagagaggagatcctgaagttcctgtgcatcttcctggagaagatgggccagaagatcgccccctacagcgtggagatcaagaacacctgcaccagcgtgtacaccaaggacagagccgccaagtgcaagatccccgccctggacctgctgatcaagctgctgcagaccttcagaagcagcagactgatggacgagttcaagatcggcgagctgttcagcaagttctacggcgagctggccctgaagaagaagatccccgacaccgtgctggagaaggtgtacgagctgctgggcctgctgggcgaggtgcaccccagcgagatgatcaacaacgccgagaacctgttcagagccttcctgggcgagctgaagacccagatgaccagcgccgtgagagagcccaagctgcccgtgctggccggctgcctgaagggcctgagcagcctgctgtgcaacttcaccaagagcatggaggaggacccccagaccagcagagagatcttcaacttcgtgctgaaggccatcagaccccagatcgacctgaagagatacgccgtgcccagcgccggcctgagactgttcgccctgcacgccagccagttcagcacctgcctgctggacaactacgtgagcctgttcgaggtgctgctgaagtggtgcgcccacaccaacgtggagctgaagaaggccgccctgagcgccctggagagcttcctgaagcaggtgagcaacatggtggccaagaacgccgagatgcacaagaacaagctgcagtacttcatggagcagttctacggcatcatcagaaacgtggacagcaacaacaaggagctgagcatcgccatcagaggctacggcctgttcgccggcccctgcaaggtgatcaacgccaaggacgtggacttcatgtacgtggagctgatccagagatgcaagcagatgttcctgacccagaccgacaccggcgacgacagagtgtaccagatgcccagcttcctgcagagcgtggccagcgtgctgctgtacctggacaccgtgcccgaggtgtacacccccgtgctggagcacctggtggtgatgcagatcgacagcttcccccagtacagccccaagatgcagctggtgtgctgcagagccatcgtgaaggtgttcctggccctggccgccaagggccccgtgctgagaaactgcatcagcaccgtggtgcaccagggcctgatcagaatctgcagcaagcccgtggtgctgcccaagggccccgagagcgagagcgaggaccacagagccagcggcgaggtgagaaccggcaagtggaaggtgcccacctacaaggactacgtggacctgttcagacacctgctgagcagcgaccagatgatggacagcatcctggccgacgaggccttcttcagcgtgaacagcagcagcgagagcctgaaccacctgctgtacgacgagttcgtgaagagcgtgctgaagatcgtggagaagctggacctgaccctggagatccagaccgtgggcgagcaggagaacggcgacgaggcccccggcgtgtggatgatccccaccagcgaccccgccgccaacctgcaccccgccaagcccaaggacttcagcgccttcatcaacctggtggagttctgcagagagatcctgcccgagaagcaggccgagttcttcgagccctgggtgtacagcttcagctacgagctgatcctgcagagcaccagactgcccctgatcagcggcttctacaagctgctgagcatcaccgtgagaaacgccaagaagatcaagtacttcgagggcgtgagccccaagagcctgaagcacagccccgaggaccccgagaagtacagctgcttcgccctgttcgtgaagttcggcaaggaggtggccgtgaagatgaagcagtacaaggacgagctgctggccagctgcctgaccttcctgctgagcctgccccacaacatcatcgagctggacgtgagagcctacgtgcccgccctgcagatggccttcaagctgggcctgagctacacccccctggccgaggtgggcctgaacgccctggaggagtggagcatctacatcgacagacacgtgatgcagccctactacaaggacatcctgccctgcctggacggctacctgaagaccagcgccctgagcgacgagaccaagaacaactgggaggtgagcgccctgagcagagccgcccagaagggcttcaacaaggtggtgctgaagcacctgaagaagaccaagaacctgagcagcaacgaggccatcagcctggaggagatcagaatcagagtggtgcagatgctgggcagcctgggcggccagatcaacaagaacctgctgaccgtgaccagcagcgacgagatgatgaagagctacgtggcctgggacagagagaagagactgagcttcgccgtgcccttcagagagatgaagcccgtgatcttcctggacgtgttcctgcccagagtgaccgagctggccctgaccgccagcgacagacagaccaaggtggccgcctgcgagctgctgcacagcatggtgatgttcatgctgggcaaggccacccagatgcccgagggcggccagggcgccccccccatgtaccagctgtacaagagaaccttccccgtgctgctgagactggcctgcgacgtggaccaggtgaccagacagctgtacgagcccctggtgatgcagctgatccactggttcaccaacaacaagaagttcgagagccaggacaccgtggccctgctggaggccatcctggacggcatcgtggaccccgtggacagcaccctgagagacttctgcggcagatgcatcagagagttcctgaagtggagcatcaagcagatcaccccccagcagcaggagaagagccccgtgaacaccaagagcctgttcaagagactgtacagcctggccctgcaccccaacgccttcaagagactgggcgccagcctggccttcaacaacatctacagagagttcagagaggaggagagcctggtggagcagttcgtgttcgaggccctggtgatctacatggagagcctggccctggcccacgccgacgagaagagcctgggcaccatccagcagtgctgcgacgccatcgaccacctgtgcagaatcatcgagaagaagcacgtgagcctgaacaaggccaagaagagaagactgcccagaggcttcccccccagcgccagcctgtgcctgctggacctggtgaagtggctgctggcccactgcggcagaccccagaccgagtgcagacacaagagcatcgagctgttctacaagttcgtgcccctgctgcccggcaacagaagccccaacctgtggctgaaggacgtgctgaaggaggagggcgtgagcttcctgatcaacaccttcgagggcggcggctgcggccagcccagcggcatcctggcccagcccaccctgctgtacagaggccccttcagcctgcaggccaccctgtgctggctggacctgctgctggccgccctggagtgctacaacaccttcatcggcgagagaaccgtgggcgccctgcaggtgctgggcaccgaggcccagagcagcctgctgaaggccgtggccttcttcctggagagcatcgccatgcacgacatcatcgccgccgagaagtgcttcggcaccggcgccgccggcaacagaaccagcccccaggagggcgagagatacaactacagcaagtgcaccgtggtggtgagaatcatggagttcaccaccaccctgctgaacaccagccccgagggctggaagctgctgaagaaggacctgtgcaacacccacctgatgagagtgctggtgcagaccctgtgcgagcccgccagcatcggcttcaacatcggcgacgtgcaggtgatggcccacctgcccgacgtgtgcgtgaacctgatgaaggccctgaagatgagcccctacaaggacatcctggagacccacctgagagagaagatcaccgcccagagcatcgaggagctgtgcgccgtgaacctgtacggccccgacgcccaggtggacagaagcagactggccgccgtggtgagcgcctgcaagcagctgcacagagccggcctgctgcacaacatcctgcccagccagagcaccgacctgcaccacagcgtgggcaccgagctgctgagcctggtgtacaagggcatcgcccccggcgacgagagacagtgcctgcccagcctggacctgagctgcaagcagctggccagcggcctgctggagctggccttcgccttcggcggcctgtgcgagagactggtgagcctgctgctgaaccccgccgtgctgagcaccgccagcctgggcagcagccagggcagcgtgatccacttcagccacggcgagtacttctacagcctgttcagcgagaccatcaacaccgagctgctgaagaacctggacctggccgtgctggagctgatgcagagcagcgtggacaacaccaagatggtgagcgccgtgctgaacggcatgctggaccagagcttcagagagagagccaaccagaagcaccagggcctgaagctggccaccaccatcctgcagcactggaagaagtgcgacagctggtgggccaaggacagccccctggagaccaagatggccgtgctggccctgctggccaagatcctgcagatcgacagcagcgtgagcttcaacaccagccacggcagcttccccgaggtgttcaccacctacatcagcctgctggccgacaccaagctggacctgcacctgaagggccaggccgtgaccctgctgcccttcttcaccagcctgaccggcggcagcctggaggagctgagaagagtgctggagcagctgatcgtggcccacttccccatgcagagcagagagttcccccccggcacccccagattcaacaactacgtggactgcatgaagaagttcctggacgccctggagctgagccagagccccatgctgctggagctgatgaccgaggtgctgtgcagagagcagcagcacgtgatggaggagctgttccagagcagcttcagaagaatcgccagaagaggcagctgcgtgacccaggtgggcctgctggagagcgtgtacgagatgttcagaaaggacgaccccagactgagcttcaccagacagagcttcgtggacagaagcctgctgaccctgctgtggcactgcagcctggacgccctgagagagttcttcagcaccatcgtggtggacgccatcgacgtgctgaagagcagattcaccaagctgaacgagagcaccttcgacacccagatcaccaagaagatgggctactacaagatcctggacgtgatgtacagcagactgcccaaggacgacgtgcacgccaaggagagcaagatcaaccaggtgttccacggcagctgcatcaccgagggcaacgagctgaccaagaccctgatcaagctgtgctacgacgccttcaccgagaacatggccggcgagaaccagctgctggagagaagaagactgtaccactgcgccgcctacaactgcgccatcagcgtgatctgctgcgtgttcaacgagctgaagttctaccagggcttcctgttcagcgagaagcccgagaagaacctgctgatcttcgagaacctgatcgacctgaagagaagatacaacttccccgtggaggtggaggtgcccatggagagaaagaagaagtacatcgagatcagaaaggaggccagagaggccgccaacggcgacagcgacggccccagctacatgagcagcctgagctacctggccgacagcaccctgagcgaggagatgagccagttcgacttcagcaccggcgtgcagagctacagctacagcagccaggaccccagacccgccaccggcagattcagaagaagagagcagagagaccccaccgtgcacgacgacgtgctggagctggagatggacgagctgaacagacacgagtgcatggcccccctgaccgccctggtgaagcacatgcacagaagcctgggccccccccagggcgaggaggacagcgtgcccagagacctgcccagctggatgaagttcctgcacggcaagctgggcaaccccatcgtgcccctgaacatcagactgttcctggccaagctggtgatcaacaccgaggaggtgttcagaccctacgccaagcactggctgagccccctgctgcagctggccgccagcgagaacaacggcggcgagggcatccactacatggtggtggagatcgtggccaccatcctgagctggaccggcctggccacccccaccggcgtgcccaaggacgaggtgctggccaacagactgctgaacttcctgatgaagcacgtgttccaccccaagagagccgtgttcagacacaacctggagatcatcaagaccctggtggagtgctggaaggactgcctgagcatcccctacagactgatcttcgagaagttcagcggcaaggaccccaacagcaaggacaacagcgtgggcatccagctgctgggcatcgtgatggccaacgacctgcccccctacgacccccagtgcggcatccagagcagcgagtacttccaggccctggtgaacaacatgagcttcgtgagatacaaggaggtgtacgccgccgccgccgaggtgctgggcctgatcctgagatacgtgatggagagaaagaacatcctggaggagagcctgtgcgagctggtggccaagcagctgaagcagcaccagaacaccatggaggacaagttcatcgtgtgcctgaacaaggtgaccaagagcttcccccccctggccgacagattcatgaacgccgtgttcttcctgctgcccaagttccacggcgtgctgaagaccctgtgcctggaggtggtgctgtgcagagtggagggcatgaccgagctgtacttccagctgaagagcaaggacttcgtgcaggtgatgagacacagagacgacgagagacagaaggtgtgcctggacatcatctacaagatgatgcccaagctgaagcccgtggagctgagagagctgctgaaccccgtggtggagttcgtgagccaccccagcaccacctgcagagagcagatgtacaacatcctgatgtggatccacgacaactacagagaccccgagagcgagaccgacaacgacagccaggagatcttcaagctggccaaggacgtgctgatccagggcctgatcgacgagaaccccggcctgcagctgatcatcagaaacttctggagccacgagaccagactgcccagcaacaccctggacagactgctggccctgaacagcctgtacagccccaagatcgaggtgcacttcctgagcctggccaccaacttcctgctggagatgaccagcatgagccccgactaccccaaccccatgttcgagcaccccctgagcgagtgcgagttccaggagtacaccatcgacagcgactggagattcagaagcaccgtgctgacccccatgttcgtggagacccaggccagccagggcaccctgcagaccagaacccaggagggcagcctgagcgccagatggcccgtggccggccagatcagagccacccagcagcagcacgacttcaccctgacccagaccgccgacggcagaagcagcttcgactggctgaccggcagcagcaccgaccccctggtggaccacaccagccccagcagcgacagcctgctgttcgcccacaagagaagcgagagactgcagagagcccccctgaagagcgtgggccccgacttcggcaagaagagactgggcctgcccggcgacgaggtggacaacaaggtgaagggcgccgccggcagaaccgacctgctgagactgagaagaagattcatgagagaccaggagaagctgagcctgatgtacgccagaaagggcgtggccgagcagaagagagagaaggagatcaagagcgagctgaagatgaagcaggacgcccaggtggtgctgtacagaagctacagacacggcgacctgcccgacatccagatcaagcacagcagcctgatcacccccctgcaggccgtggcccagagagaccccatcatcgccaagcagctgttcagcagcctgttcagcggcatcctgaaggagatggacaagttcaagaccctgagcgagaagaacaacatcacccagaagctgctgcaggacttcaacagattcctgaacaccaccttcagcttcttcccccccttcgtgagctgcatccaggacatcagctgccagcacgccgccctgctgagcctggaccccgccgccgtgagcgccggctgcctggccagcctgcagcagcccgtgggcatcagactgctggaggaggccctgctgagactgctgcccgccgagctgcccgccaagagagtgagaggcaaggccagactgccccccgacgtgctgagatgggtggagctggccaagctgtacagaagcatcggcgagtacgacgtgctgagaggcatcttcaccagcgagatcggcaccaagcagatcacccagagcgccctgctggccgaggccagaagcgactacagcgaggccgccaagcagtacgacgaggccctgaacaagcaggactgggtggacggcgagcccaccgaggccgagaaggacttctgggagctggccagcctggactgctacaaccacctggccgagtggaagagcctggagtactgcagcaccgccagcatcgacagcgagaacccccccgacctgaacaagatctggagcgagcccttctaccaggagacctacctgccctacatgatcagaagcaagctgaagctgctgctgcagggcgaggccgaccagagcctgctgaccttcatcgacaaggccatgcacggcgagctgcagaaggccatcctggagctgcactacagccaggagctgagcctgctgtacctgctgcaggacgacgtggacagagccaagtactacatccagaacggcatccagagcttcatgcagaactacagcagcatcgacgtgctgctgcaccagagcagactgaccaagctgcagagcgtgcaggccctgaccgagatccaggagttcatcagcttcatcagcaagcagggcaacctgagcagccaggtgcccctgaagagactgctgaacacctggaccaacagataccccgacgccaagatggaccccatgaacatctgggacgacatcatcaccaacagatgcttcttcctgagcaagatcgaggagaagctgacccccctgcccgaggacaacagcatgaacgtggaccaggacggcgaccccagcgacagaatggaggtgcaggagcaggaggaggacatcagcagcctgatcagaagctgcaagttcagcatgaagatgaagatgatcgacagcgccagaaagcagaacaacttcagcctggccatgaagctgctgaaggagctgcacaaggagagcaagaccagagacgactggctggtgagctgggtgcagagctactgcagactgagccactgcagaagcagaagccagggctgcagcgagcaggtgctgaccgtgctgaagaccgtgagcctgctggacgagaacaacgtgagcagctacctgagcaagaacatcctggccttcagagaccagaacatcctgctgggcaccacctacagaatcatcgccaacgccctgagcagcgagcccgcctgcctggccgagatcgaggaggacaaggccagaagaatcctggagctgagcggcagcagcagcgaggacagcgagaaggtgatcgccggcctgtaccagagagccttccagcacctgagcgaggccgtgcaggccgccgaggaggaggcccagccccccagctggagctgcggccccgccgccggcgtgatcgacgcctacatgaccctggccgacttctgcgaccagcagctgagaaaggaggaggagaacgccagcgtgatcgacagcgccgagctgcaggcctaccccgccctggtggtggagaagatgctgaaggccctgaagctgaacagcaacgaggccagactgaagttccccagactgctgcagatcatcgagagataccccgaggagaccctgagcctgatgaccaaggagatcagcagcgtgccctgctggcagttcatcagctggatcagccacatggtggccctgctggacaaggaccaggccgtggccgtgcagcacagcgtggaggagatcaccgacaactacccccaggccatcgtgtaccccttcatcatcagcagcgagagctacagcttcaaggacaccagcaccggccacaagaacaaggagttcgtggccagaatcaagagcaagctggaccagggcggcgtgatccaggacttcatcaacgccctggaccagctgagcaaccccgagctgctgttcaaggactggagcaacgacgtgagagccgagctggccaagacccccgtgaacaagaagaacatcgagaagatgtacgagagaatgtacgccgccctgggcgaccccaaggcccccggcctgggcgccttcagaagaaagttcatccagaccttcggcaaggagttcgacaagcacttcggcaagggcggcagcaagctgctgagaatgaagctgagcgacttcaacgacatcaccaacatgctgctgctgaagatgaacaaggacagcaagccccccggcaacctgaaggagtgcagcccctggatgagcgacttcaaggtggagttcctgagaaacgagctggagatccccggccagtacgacggcagaggcaagcccctgcccgagtaccacgtgagaatcgccggcttcgacgagagagtgaccgtgatggccagcctgagaagacccaagagaatcatcatcagaggccacgacgagagagagcaccccttcctggtgaagggcggcgaggacctgagacaggaccagagagtggagcagctgttccaggtgatgaacggcatcctggcccaggacagcgcctgcagccagagagccctgcagctgagaacctacagcgtggtgcccatgaccagcagcgaccccagagcccccccctgcgagtacaaggactggctgaccaagatgagcggcaagcacgacgtgggcgcctacatgctgatgtacaagggcgccaacagaaccgagaccgtgaccagcttcagaaagagagagagcaaggtgcccgccgacctgctgaagagagccttcgtgagaatgagcaccagccccgaggccttcctggccctgagaagccacttcgccagcagccacgccctgatctgcatcagccactggatcctgggcatcggcgacagacacctgaacaacttcatggtggccatggagaccggcggcgtgatcggcatcgacttcggccacgccttcggcagcgccacccagttcctgcccgtgcccgagctgatgcccttcagactgaccagacagttcatcaacctgatgctgcccatgaaggagaccggcctgatgtacagcatcatggtgcacgccctgagagccttcagaagcgaccccggcctgctgaccaacaccatggacgtgttcgtgaaggagcccagcttcgactggaagaacttcgagcagaagatgctgaagaagggcggcagctggatccaggagatcaacgtggccgagaagaactggtaccccagacagaagatctgctacgccaagagaaagctggccggcgccaaccccgccgtgatcacctgcgacgagctgctgctgggccacgagaaggcccccgccttcagagactacgtggccgtggccagaggcagcaaggaccacaacatcagagcccaggagcccgagagcggcctgagcgaggagacccaggtgaagtgcctgatggaccaggccaccgaccccaacatcctgggcagaacctgggagggctgggagccctggatgtag

SEQ ID NO: 12370 - DNA, 444 bp, synthetic construct
  misc_feature 1..444: note = Description of Artificial Sequence: Synthetic coding sequence
  source 1..444: mol_type = other DNA
atggccgcccagagactgggcaagagagtgctgagcaagctgcagagccccagcagagccagaggccccggcggcagccccggcggcctgcagaagagacacgccagagtgaccgtgaagtacgacagaagagagctgcagagaagactggacgtggagaagtggatcgacggcagactggaggagctgtacagaggcatggaggccgacatgcccgacgagatcaacatcgacgagctgctggagctggagagcgaggaggagagaagcagaaagatccagggcctgctgaagagctgcggcaagcccgtggaggacttcatccaggagctgctggccaagctgcagggcctgcacagacagcccggcctgagacagcccagccccagccacgacggcagcctgagccccctgcaggacagagccagaaccgcccacccctag

SEQ ID NO: 12371 - DNA, 363 bp, synthetic construct
  misc_feature 1..363: note = Description of Artificial Sequence: Synthetic coding sequence
  source 1..363: mol_type = other DNA
atggccgcccagagactgggcaagagagtgctgagcaagctgcagagccccagcagagccagaggccccggcggcagccccggcggcctgcagaagagacacgccagagtgaccgtgaagtacgacagaagagagctgcagagaagactggacgtggagaagtggatcgacggcagactggaggagctgtacagaggcatgggcctgctgaagagctgcggcaagcccgtggaggacttcatccaggagctgctggccaagctgcagggcctgcacagacagcccggcctgagacagcccagccccagccacgacggcagcctgagccccctgcaggacagagccagaaccgcccacccctag

SEQ ID NO: 12372 - DNA, 2025 bp, synthetic construct
  misc_feature 1..2025: note = Description of Artificial Sequence: Synthetic coding sequence
  source 1..2025: mol_type = other DNA
atggcccccggccaggccccccaccaggccaccccctggagagacgcccaccccttcttcctgctgagccccgtgatgggcctgctgagcagagcctggagcagactgagaggcctgggccccctggagccctggctggtggaggccgtgaagggcgccgccctggtggaggccggcctggagggcgaggccagaacccccctggccatcccccacaccccctggggcagaagacccgaggaggaggccgaggacagcggcggccccggcgaggacagagagaccctgggcctgaagaccagcagcagcctgcccgaggcctggggcctgctggacgacgacgacggcatgtacggcgagagagaggccaccagcgtgcccagaggccagggcagccagttcgccgacggccagagagcccccctgagccccagcctgctgatcagaaccctgcagggcagcgacaagaaccccggcgaggagaaggccgaggaggagggcgtggccgaggaggagggcgtgaacaagttcagctacccccccagccacagagagtgctgccccgccgtggaggaggaggacgacgaggaggccgtgaagaaggaggcccacagaaccagcaccagcgccctgagccccggcagcaagcccagcacctgggtgagctgccccggcgaggaggagaaccaggccaccgaggacaagagaaccgagagaagcaagggcgccagaaagaccagcgtgagccccagaagcagcggcagcgaccccagaagctgggagtacagaagcggcgaggccagcgaggagaaggaggagaaggcccacaaggagaccggcaagggcgaggccgcccccggcccccagagcagcgcccccgcccagagaccccagctgaagagctggtggtgccagcccagcgacgaggaggagggcgaggtgaaggccctgggcgccgccgagaaggacggcgaggccgagtgccccccctgcatccccccccccagcgccttcctgaaggcctgggtgtactggcccggcgaggacaccgaggaggaggaggacgaggaggaggacgaggacagcgacagcggcagcgacgaggaggagggcgaggccgaggccagcagcagcacccccgccaccggcgtgttcctgaagagctgggtgtaccagcccggcgaggacaccgaggaggaggaggacgaggacagcgacaccggcagcgccgaggacgagagagaggccgagaccagcgccagcaccccccccgccagcgccttcctgaaggcctgggtgtacagacccggcgaggacaccgaggaggaggaggacgaggacgtggacagcgaggacaaggaggacgacagcgaggccgccctgggcgaggccgagagcgacccccaccccagccaccccgaccagagagcccacttcagaggctggggctacagacccggcaaggagaccgaggaggaggaggccgccgaggactggggcgaggccgagccctgccccttcagagtggccatctacgtgcccggcgagaagcccccccccccctgggccccccccagactgcccctgagactgcagagaagactgaagagacccgagacccccacccacgaccccgaccccgagacccccctgaaggccagaaaggtgagattcagcgagaaggtgaccgtgcacttcctggccgtgtgggccggccccgcccaggccgccagacagggcccctgggagcagctggccagagacagaagcagattcgccagaagaatcacccaggcccaggaggagctgagcccctgcctgacccccgccgccagagccagagcctgggccagactgagaaacccccccctggcccccatccccgccctgacccagaccctgcccagcagcagcgtgcccagcagccccgtgcagaccacccccctgagccaggccgtggccacccccagcagaagcagcgccgccgccgccgccgccctggacctgagcggcagaagaggctag

SEQ ID NO: 12373 - DNA, 1545 bp, synthetic construct
  misc_feature 1..1545: note = Description of Artificial Sequence: Synthetic coding sequence
  source 1..1545: mol_type = other DNA
atgaaggccgaggaggagggcgtggccgaggaggagggcgtgaacaagttcagctacccccccagccacagagagtgctgccccgccgtggaggaggaggacgacgaggaggccgtgaagaaggaggcccacagaaccagcaccagcgccctgagccccggcagcaagcccagcacctgggtgagctgccccggcgaggaggagaaccaggccaccgaggacaagagaaccgagagaagcaagggcgccagaaagaccagcgtgagccccagaagcagcggcagcgaccccagaagctgggagtacagaagcggcgaggccagcgaggagaaggaggagaaggcccacaaggagaccggcaagggcgaggccgcccccggcccccagagcagcgcccccgcccagagaccccagctgaagagctggtggtgccagcccagcgacgaggaggagggcgaggtgaaggccctgggcgccgccgagaaggacggcgaggccgagtgccccccctgcatccccccccccagcgccttcctgaaggcctgggtgtactggcccggcgaggacaccgaggaggaggaggacgaggaggaggacgaggacagcgacagcggcagcgacgaggaggagggcgaggccgaggccagcagcagcacccccgccaccggcgtgttcctgaagagctgggtgtaccagcccggcgaggacaccgaggaggaggaggacgaggacagcgacaccggcagcgccgaggacgagagagaggccgagaccagcgccagcaccccccccgccagcgccttcctgaaggcctgggtgtacagacccggcgaggacaccgaggaggaggaggacgaggacgtggacagcgaggacaaggaggacgacagcgaggccgccctgggcgaggccgagagcgacccccaccccagccaccccgaccagagagcccacttcagaggctggggctacagacccggcaaggagaccgaggaggaggaggccgccgaggactggggcgaggccgagccctgccccttcagagtggccatctacgtgcccggcgagaagcccccccccccctgggccccccccagactgcccctgagactgcagagaagactgaagagacccgagacccccacccacgaccccgaccccgagacccccctgaaggccagaaaggtgagattcagcgagaaggtgaccgtgcacttcctggccgtgtgggccggccccgcccaggccgccagacagggcccctgggagcagctggccagagacagaagcagattcgccagaagaatcacccaggcccaggaggagctgagcccctgcctgacccccgccgccagagccagagcctgggccagactgagaaacccccccctggcccccatccccgccctgacccagaccctgcccagcagcagcgtgcccagcagccccgtgcagaccacccccctgagccaggccgtggccacccccagcagaagcagcgccgccgccgccgccgccctggacctgagcggcagaagaggctag

SEQ ID NO: 12374 - DNA, 1899 bp, synthetic construct
  misc_feature 1..1899: note = Description of Artificial Sequence: Synthetic coding sequence
  source 1..1899: mol_type = other DNA
atgccctggctggtggaggccgtgaagggcgccgccctggtggaggccggcctggagggcgaggccagaacccccctggccatcccccacaccccctggggcagaagacccgaggaggaggccgaggacagcggcggccccggcgaggacagagagaccctgggcctgaagaccagcagcagcctgcccgaggcctggggcctgctggacgacgacgacggcatgtacggcgagagagaggccaccagcgtgcccagaggccagggcagccagttcgccgacggccagagagcccccctgagccccagcctgctgatcagaaccctgcagggcagcgacaagaaccccggcgaggagaaggccgaggaggagggcgtggccgaggaggagggcgtgaacaagttcagctacccccccagccacagagagtgctgccccgccgtggaggaggaggacgacgaggaggccgtgaagaaggaggcccacagaaccagcaccagcgccctgagccccggcagcaagcccagcacctgggtgagctgccccggcgaggaggagaaccaggccaccgaggacaagagaaccgagagaagcaagggcgccagaaagaccagcgtgagccccagaagcagcggcagcgaccccagaagctgggagtacagaagcggcgaggccagcgaggagaaggaggagaaggcccacaaggagaccggcaagggcgaggccgcccccggcccccagagcagcgcccccgcccagagaccccagctgaagagctggtggtgccagcccagcgacgaggaggagggcgaggtgaaggccctgggcgccgccgagaaggacggcgaggccgagtgccccccctgcatccccccccccagcgccttcctgaaggcctgggtgtactggcccggcgaggacaccgaggaggaggaggacgaggaggaggacgaggacagcgacagcggcagcgacgaggaggagggcgaggccgaggccagcagcagcacccccgccaccggcgtgttcctgaagagctgggtgtaccagcccggcgaggacaccgaggaggaggaggacgaggacagcgacaccggcagcgccgaggacgagagagaggccgagaccagcgccagcaccccccccgccagcgccttcctgaaggcctgggtgtacagacccggcgaggacaccgaggaggaggaggacgaggacgtggacagcgaggacaaggaggacgacagcgaggccgccctgggcgaggccgagagcgacccccaccccagccaccccgaccagagagcccacttcagaggctggggctacagacccggcaaggagaccgaggaggaggaggccgccgaggactggggcgaggccgagccctgccccttcagagtggccatctacgtgcccggcgagaagcccccccccccctgggccccccccagactgcccctgagactgcagagaagactgaagagacccgagacccccacccacgaccccgaccccgagacccccctgaaggccagaaaggtgagattcagcgagaaggtgaccgtgcacttcctggccgtgtgggccggccccgcccaggccgccagacagggcccctgggagcagctggccagagacagaagcagattcgccagaagaatcacccaggcccaggaggagctgagcccctgcctgacccccgccgccagagccagagcctgggccagactgagaaacccccccctggcccccatccccgccctgacccagaccctgcccagcagcagcgtgcccagcagccccgtgcagaccacccccctgagccaggccgtggccacccccagcagaagcagcgccgccgccgccgccgccctggacctgagcggcagaagaggctag

SEQ ID NO: 12375 - DNA, 1671 bp, synthetic construct
  misc_feature 1..1671: note = Description of Artificial Sequence: Synthetic coding sequence
  source 1..1671: mol_type = other DNA
atggccggcgccagcgagctgggcaccggccccggcgccgccggcggcgacggcgacgacagcctgtaccccatcgccgtgctgatcgacgagctgagaaacgaggacgtgcagctgagactgaacagcatcaagaagctgagcaccatcgccctggccctgggcgtggagagaaccagaagcgagctgctgcccttcctgaccgacaccatctacgacgaggacgaggtgctgctggccctggccgagcagctgggcaacttcaccggcctggtgggcggccccgacttcgcccactgcctgctgccccccctggagaacctggccaccgtggaggagaccgtggtgagagacaaggccgtggagagcctgagacagatcagccaggagcacacccccgtggccctggaggcctacttcgtgcccctggtgaagagactggccagcggcgactggttcaccagcagaaccagcgcctgcggcctgttcagcgtgtgctaccccagagccagcaacgccgtgaaggccgagatcagacagcagttcagaagcctgtgcagcgacgacacccccatggtgagaagagccgccgccagcaagctgggcgagttcgccaaggtgctggagctggacagcgtgaagagcgagatcgtgcccctgttcaccagcctggccagcgacgagcaggacagcgtgagactgctggccgtggaggcctgcgtgagcatcgcccagctgctgagccaggacgacctggagaccctggtgatgcccaccctgagacaggccgccgaggacaagagctggagagtgagatacatggtggccgacagattcagcgagctgcagaaggccatgggccccaagatcaccctgaacgacctgatccccgccttccagaacctgctgaaggactgcgaggccgaggtgagagccgccgccgcccacaaggtgaaggagctgggcgagaacctgcccatcgaggacagagagaccatcatcatgaaccagatcctgccctacatcaagtgccccgacgtgagactgaacatcatcagcaacctggactgcgtgaacgaggtgatcggcatcagacagctgagccagagcctgctgcccgccatcgtggagctggccgaggacgccaagtggagagtgagactggccatcatcgagtacatgcccctgctggccggccagctgggcgtggagttcttcgacgagaagctgaacagcctgtgcatggcctggctggtggaccacgtgtacgccatcagagaggccgccaccaacaacctgatgaagctggtgcagaagttcggcaccgagtgggcccagaacaccatcgtgcccaaggtgctggtgatggccaacgaccccaactacctgcacagaatgaccaccctgttctgcatcaacgccctgagcgaggcctgcggccaggagatcaccaccaagcagatgctgcccatcgtgctgaagatggccggcgaccaggtggccaacgtgagattcaacgtggccaagagcctgcagaagatcggccccatcctggacaccaacgccctgcagggcgaggtgaagcccgtgctgcagaagctgggccaggacgaggacatggacgtgaagtacttcgcccaggaggccatcagcgtgctggccctggcctag

SEQ ID NO: 12376 - DNA, 1770 bp, synthetic construct
  misc_feature 1..1770: note = Description of Artificial Sequence: Synthetic coding sequence
  source 1..1770: mol_type = other DNA
atggccgccgccgacggcgacgacagcctgtaccccatcgccgtgctgatcgacgagctgagaaacgaggacgtgcagctgagactgaacagcatcaagaagctgagcaccatcgccctggccctgggcgtggagagaaccagaagcgagctgctgcccttcctgaccgacaccatctacgacgaggacgaggtgctgctggccctggccgagcagctgggcaccttcaccaccctggtgggcggccccgagtacgtgcactgcctgctgccccccctggagagcctggccaccgtggaggagaccgtggtgagagacaaggccgtggagagcctgagagccatcagccacgagcacagccccagcgacctggaggcccacttcgtgcccctggtgaagagactggccggcggcgactggttcaccagcagaaccagcgcctgcggcctgttcagcgtgtgctaccccagagtgagcagcgccgtgaaggccgagctgagacagtacttcagaaacctgtgcagcgacgacacccccatggtgagaagagccgccgccagcaagctgggcgagttcgccaaggtgctggagctggacaacgtgaagagcgagatcatccccatgttcagcaacctggccagcgacgagcaggacagcgtgagactgctggccgtggaggcctgcgtgaacatcgcccagctgctgccccaggaggacctggaggccctggtgatgcccaccctgagacaggccgccgaggacaagagctggagagtgagatacatggtggccgacaagttcaccgagctgcagaaggccgtgggccccgagatcaccaagaccgacctggtgcccgccttccagaacctgatgaaggactgcgaggccgaggtgagagccgccgccagccacaaggtgaaggagttctgcgagaacctgagcgccgactgcagagagaacgtgatcatgagccagatcctgccctgcatcaaggagctggtgagcgacgccaaccagcacgtgaagagcgccctggccagcgtgatcatgggcctgagccccatcctgggcaaggacaacaccatcgagcacctgctgcccctgttcctggcccagctgaaggacgagtgccccgaggtgagactgaacatcatcagcaacctggactgcgtgaacgaggtgatcggcatcagacagctgagccagagcctgctgcccgccatcgtggagctggccgaggacgccaagtggagagtgagactggccatcatcgagtacatgcccctgctggccggccagctgggcgtggagttcttcgacgagaagctgaacagcctgtgcatggcctggctggtggaccacgtgtacgccatcagagaggccgccaccagcaacctgaagaagctggtggagaagttcggcaaggagtgggcccacgccaccatcatccccaaggtgctggccatgagcggcgaccccaactacctgcacagaatgaccaccctgttctgcatcaacgtgctgagcgaggtgtgcggccaggacatcaccaccaagcacatgctgcccaccgtgctgagaatggccggcgaccccgtggccaacgtgagattcaacgtggccaagagcctgcagaagatcggccccatcctggacaacagcaccctgcagagcgaggtgaagcccatcctggagaagctgacccaggaccaggacgtggacgtgaagtacttcgcccaggaggccctgaccgtgctgagcctggcctag

SEQ ID NO: 12377 - DNA, 1740 bp, synthetic construct
  misc_feature 1..1740: note = Description of Artificial Sequence: Synthetic coding sequence
  source 1..1740: mol_type = other DNA
atggccgccgccgacggcgacgacagcctgtaccccatcgccgtgctgatcgacgagctgagaaacgaggacgtgcagctgagactgaacagcatcaagaagctgagcaccatcgccctggccctgggcgtggagagaaccagaagcgagctgctgcccttcctgaccgacaccatctacgacgaggacgaggtgctgctggccctggccgagcagctgggcaccttcaccaccctggtgggcggccccgagtacgtgcactgcctgctgccccccctggagagcctggccaccgtggagagcctgagagccatcagccacgagcacagccccagcgacctggaggcccacttcgtgcccctggtgaagagactggccggcggcgactggttcaccagcagaaccagcgcctgcggcctgttcagcgtgtgctaccccagagtgagcagcgccgtgaaggccgagctgagacagtacttcagaaacctgtgcagcgacgacacccccatggtgagaagagccgccgccagcaagctgggcgagttcgccaaggtgctggagctggacaacgtgaagagcgagatcatccccatgttcagcaacctggccagcgacgagcaggacagcgtgagactgctggccgtggaggcctgcgtgaacatcgcccagctgctgccccaggaggacctggaggccctggtgatgcccaccctgagacaggccgccgaggacaagagctggagagtgagatacatggtggccgacaagttcaccgagctgcagaaggccgtgggccccgagatcaccaagaccgacctggtgcccgccttccagaacctgatgaaggactgcgaggccgaggtgagagccgccgccagccacaaggtgaaggagttctgcgagaacctgagcgccgactgcagagagaacgtgatcatgagccagatcctgccctgcatcaaggagctggtgagcgacgccaaccagcacgtgaagagcgccctggccagcgtgatcatgggcctgagccccatcctgggcaaggacaacaccatcgagcacctgctgcccctgttcctggcccagctgaaggacgagtgccccgaggtgagactgaacatcatcagcaacctggactgcgtgaacgaggtgatcggcatcagacagctgagccagagcctgctgcccgccatcgtggagctggccgaggacgccaagtggagagtgagactggccatcatcgagtacatgcccctgctggccggccagctgggcgtggagttcttcgacgagaagctgaacagcctgtgcatggcctggctggtggaccacgtgtacgccatcagagaggccgccaccagcaacctgaagaagctggtggagaagttcggcaaggagtgggcccacgccaccatcatccccaaggtgctggccatgagcggcgaccccaactacctgcacagaatgaccaccctgttctgcatcaacgtgctgagcgaggtgtgcggccaggacatcaccaccaagcacatgctgcccaccgtgctgagaatggccggcgaccccgtggccaacgtgagattcaacgtggccaagagcctgcagaagatcggccccatcctggacaacagcaccctgcagagcgaggtgaagcccatcctggagaagctgacccaggaccaggacgtggacgtgaagtacttcgcccaggaggccctgaccgtgctgagcctggcctag

SEQ ID NO: 12378 - DNA, 471 bp, synthetic construct
  misc_feature 1..471: note = Description of Artificial Sequence: Synthetic coding sequence
  source 1..471: mol_type = other DNA
atggccgccgccgacggcgacgacagcctgtaccccatcgccgtgctgatcgacgagctgagaaacgaggacgtgcagctgagactgaacagcaacctgaagaagctggtggagaagttcggcaaggagtgggcccacgccaccatcatccccaaggtgctggccatgagcggcgaccccaactacctgcacagaatgaccaccctgttctgcatcaacgtgctgagcgaggtgtgcggccaggacatcaccaccaagcacatgctgcccaccgtgctgagaatggccggcgaccccgtggccaacgtgagattcaacgtggccaagagcctgcagaagatcggccccatcctggacaacagcaccctgcagagcgaggtgaagcccatcctggagaagctgacccaggaccaggacgtggacgtgaagtacttcgcccaggaggccctgaccgtgctgagcctggcctag

SEQ ID NO: 12379 - DNA, 1605 bp, synthetic construct
  misc_feature 1..1605: note = Description of Artificial Sequence: Synthetic coding sequence
  source 1..1605: mol_type = other DNA
atgagaaccttcagcttcgccagcaccgccagcagaagctgcccccccagcccctggcccctgggcctgaagggccccgaggtgagcttctgcctgagcctgcagccccccctggagagcctggccaccgtggaggagaccgtggtgagagacaaggccgtggagagcctgagagccatcagccacgagcacagccccagcgacctggaggcccacttcgtgcccctggtgaagagactggccggcggcgactggttcaccagcagaaccagcgcctgcggcctgttcagcgtgtgctaccccagagtgagcagcgccgtgaaggccgagctgagacagtacttcagaaacctgtgcagcgacgacacccccatggtgagaagagccgccgccagcaagctgggcgagttcgccaaggtgctggagctggacaacgtgaagagcgagatcatccccatgttcagcaacctggccagcgacgagcaggacagcgtgagactgctggccgtggaggcctgcgtgaacatcgcccagctgctgccccaggaggacctggaggccctggtgatgcccaccctgagacaggccgccgaggacaagagctggagagtgagatacatggtggccgacaagttcaccgagctgcagaaggccgtgggccccgagatcaccaagaccgacctggtgcccgccttccagaacctgatgaaggactgcgaggccgaggtgagagccgccgccagccacaaggtgaaggagttctgcgagaacctgagcgccgactgcagagagaacgtgatcatgagccagatcctgccctgcatcaaggagctggtgagcgacgccaaccagcacgtgaagagcgccctggccagcgtgatcatgggcctgagccccatcctgggcaaggacaacaccatcgagcacctgctgcccctgttcctggcccagctgaaggacgagtgccccgaggtgagactgaacatcatcagcaacctggactgcgtgaacgaggtgatcggcatcagacagctgagccagagcctgctgcccgccatcgtggagctggccgaggacgccaagtggagagtgagactggccatcatcgagtacatgcccctgctggccggccagctgggcgtggagttcttcgacgagaagctgaacagcctgtgcatggcctggctggtggaccacgtgtacgccatcagagaggccgccaccagcaacctgaagaagctggtggagaagttcggcaaggagtgggcccacgccaccatcatccccaaggtgctggccatgagcggcgaccccaactacctgcacagaatgaccaccctgttctgcatcaacgtgctgagcgaggtgtgcggccaggacatcaccaccaagcacatgctgcccaccgtgctgagaatggccggcgaccccgtggccaacgtgagattcaacgtggccaagagcctgcagaagatcggccccatcctggacaacagcaccctgcagagcgaggtgaagcccatcctggagaagctgacccaggaccaggacgtggacgtgaagtacttcgcccaggaggccctgaccgtgctgagcctggcctag

SEQ ID NO: 12380 - DNA, 2004 bp, synthetic construct
  misc_feature 1..2004: note = Description of Artificial Sequence: Synthetic coding sequence
  source 1..2004: mol_type = other DNA
atggccggcgccagcgagctgggcaccggccccggcgccgccggcggcgacggcgacgacagcctgtaccccatcgccgtgctgatcgacgagctgagaaacgaggacgtgcagctgagactgaacagcatcaagaagctgagcaccatcgccctggccctgggcgtggagagaaccagaagcgagctgctgcccttcctgaccgacaccatctacgacgaggacgaggtgctgctggccctggccgagcagctgggcaacttcaccggcctggtgggcggccccgacttcgcccactgcctgctgccccccctggagaacctggccaccgtggaggagaccgtggtgagagacaaggccgtggagagcctgagacagatcagccaggagcacacccccgtggccctggaggcctacttcgtgcccctggtgaagagactggccagcggcgactggttcaccagcagaaccagcgcctgcggcctgttcagcgtgtgctaccccagagccagcaacgccgtgaaggccgagatcagacagcagttcagaagcctgtgcagcgacgacacccccatggtgagaagagccgccgccagcaagctgggcgagttcgccaaggtgctggagctggacagcgtgaagagcgagatcgtgcccctgttcaccagcctggccagcgacgagcaggacagcgtgagactgctggccgtggaggcctgcgtgagcatcgcccagctgctgagccaggacgacctggagaccctggtgatgcccaccctgagacaggccgccgaggacaagagctggagagtgagatacatggtggccgacagattcagcgagctgcagaaggccatgggccccaagatcaccctgaacgacctgatccccgccttccagaacctgctgaaggactgcgaggccgaggtgagagccgccgccgcccacaaggtgaaggagctgggcgagaacctgcccatcgaggacagagagaccatcatcatgaaccagatcctgccctacatcaaggagctggtgagcgacaccaaccagcacgtgaagagcgccctggccagcgtgatcatgggcctgagcaccatcctgggcaaggagaacaccatcgagcacctgctgcccctgttcctggcccagctgaaggacgagtgccccgacgtgagactgaacatcatcagcaacctggactgcgtgaacgaggtgatcggcatcagacagctgagccagagcctgctgcccgccatcgtggagctggccgaggacgccaagtggagagtgagactggccatcatcgagtacatgcccctgctggccggccagctgggcgtggagttcttcgacgagaagctgaacagcctgtgcatggcctggctggtggaccacgtgtacgccatcagagaggccgccaccaacaacctgatgaagctggtgcagaagttcggcaccgagtgggcccagaacaccatcgtgcccaaggtgctggtgatggccaacgaccccaactacctgcacagaatgaccaccctgttctgcatcaacgccctgagcgaggcctgcggccaggagatcaccaccaagcagatgctgcccatcgtgctgaagatggccggcgaccaggtggccaacgtgagattcaacgtggccaagagcctgcagaagatcggccccatcctggacaccaacgccctgcagggcgaggtgaagcccgtgctgcagaagctgggccaggacgaggacatggacgtgaagtacttcgcccaggaggccatcagcgtggtggcccagagactgagaaagctggagttccccgtgaaggacagcggcgagcccagcgtgcccagagccgacaagaaccacttccccagacccaccgtgcccggcgaggacatgggcaagggccccgtgtaccagctgagaggcgacaccagagacaccctggcccagctgggcatcgccgagctggtgcacttcagccagagcaccgactag

SEQ ID NO: 12381 - DNA, 1425 bp, synthetic construct
  misc_feature 1..1425: note = Description of Artificial Sequence: Synthetic coding sequence
  source 1..1425: mol_type = other DNA
atggccggcgccagcgagctgggcaccggccccggcgccgccggcggcgacggcgacgacagcctgtaccccatcgccgtgctgatcgacgagctgagaaacgaggacgtgcagctgagactgaacagcatcaagaagctgagcaccatcgccctggccctgggcgtggagagaaccagaagcgagctgctgcccttcctgaccgacaccatctacgacgaggacgaggtgctgctggccctggccgagcagctgggcaacttcaccggcctggtgggcggccccgacttcgcccactgcctgctggacagcgtgagactgctggccgtggaggcctgcgtgagcatcgcccagctgctgagccaggacgacctggagaccctggtgatgcccaccctgagacaggccgccgaggacaagagctggagagtgagatacatggtggccgacagattcagcgagctgcagaaggccatgggccccaagatcaccctgaacgacctgatccccgccttccagaacctgctgaaggactgcgaggccgaggtgagagccgccgccgcccacaaggtgaaggagctgggcgagaacctgcccatcgaggacagagagaccatcatcatgaaccagatcctgccctacatcaaggagctggtgagcgacaccaaccagcacgtgaagagcgccctggccagcgtgatcatgggcctgagcaccatcctgggcaaggagaacaccatcgagcacctgctgcccctgttcctggcccagctgaaggacgagtgccccgacgtgagactgaacatcatcagcaacctggactgcgtgaacgaggtgatcggcatcagacagctgagccagagcctgctgcccgccatcgtggagctggccgaggacgccaagtggagagtgagactggccatcatcgagtacatgcccctgctggccggccagctgggcgtggagttcttcgacgagaagctgaacagcctgtgcatggcctggctggtggaccacgtgtacgccatcagagaggccgccaccaacaacctgatgaagctggtgcagaagttcggcaccgagtgggcccagaacaccatcgtgcccaaggtgctggtgatggccaacgaccccaactacctgcacagaatgaccaccctgttctgcatcaacgccctgagcgaggcctgcggccaggagatcaccaccaagcagatgctgcccatcgtgctgaagatggccggcgaccaggtggccaacgtgagattcaacgtggccaagagcctgcagaagatcggccccatcctggacaccaacgccctgcagggcgaggtgaagcccgtgctgcagaagctgggccaggacgaggacatggacgtgaagtacttcgcccaggaggccatcagcgtgctggccctggcctag

SEQ ID NO: 12382 - DNA, 1365 bp, synthetic construct
  misc_feature 1..1365: note = Description of Artificial Sequence: Synthetic coding sequence
  source 1..1365: mol_type = other DNA
atggccggcgccagcgagctgggcaccggccccggcgccgccggcggcgacggcgacgacagcctgtaccccatcgccgtgctgatcgacgagctgagaaacgaggacgtgcagctgagactgaacagcatcaagaagctgagcaccatcgccctggccctgggcgtggagagaaccagaagcgagctgctgcccttcctgaccgacaccatctacgacgaggacgaggtgctgctggccctggccgagcagctgggcaacttcaccggcctggtgggcggccccgacttcgcccactgcctgctggacagcgtgagactgctggccgtggaggcctgcgtgagcatcgcccagctgctgagccaggacgacctggagaccctggtgatgcccaccctgagacaggccgccgaggacaagagctggagagtgagatacatggtggccgacagattcagcgagctgcagaaggccatgggccccaagatcaccctgaacgacctgatccccgccttccagaacctgctgaaggactgcgaggccgaggtgagagccgccgccgcccacaaggtgaaggagctgggcgagaacctgcccatcgaggacagagagaccatcatcatgaaccagatcctgccctacatcaaggagctggtgagcgacaccaaccagcacgtgaagagcgccctggccagcgtgatcatgggcctgagcaccatcctgggcaaggagaacaccatcgagcacctgctgcccctgttcctggcccagctgaaggacgagtgccccgacgtgagactgaacatcatcagcaacctggactgcgtgaacgaggtgatcggcatcagacagctgagccagagcctgctgcccgccatcgtggagctggccgaggacgccaagtggagagtgagactggccatcatcgagtacatgcccctgctggccggccagctgggcgtggagttcttcgacgagaagctgaacagcctgtgcatggcctggctggtggaccacgtgtacgccatcagagaggccgccaccaacaacctgatgaagctggtgcagaagttcggcaccgagtgggcccagaacaccatcgtgcccaaggtgctggtgatggccaacgaccccaactacctgcacagaatgaccaccctgttctgcatcaacgccctgagcgaggcctgcggccaggagatcaccaccaagcagatgctgcccatcgtgaagaacggcagaagacccagcagcaagtgcagcctgcagtgcggccagatcagcaccaaggactggaccaacagcagataccagtgcttcaccggcagaagcgaggccagcaccaccgaggtgagaagcagatag

SEQ ID NO: 12383 - DNA, 1812 bp, synthetic construct
  misc_feature 1..1812: note = Description of Artificial Sequence: Synthetic coding sequence
  source 1..1812: mol_type = other DNA
atggccggcgccagcgagctgggcaccggccccggcgccgccggcggcgacggcgacgacagcctgtaccccatcgccgtgctgatcgacgagctgagaaacgaggacgtgcagccccccctggagaacctggccaccgtggaggagaccgtggtgagagacaaggccgtggagagcctgagacagatcagccaggagcacacccccgtggccctggaggcctacttcgtgcccctggtgaagagactggccagcggcgactggttcaccagcagaaccagcgcctgcggcctgttcagcgtgtgctaccccagagccagcaacgccgtgaaggccgagatcagacagcagttcagaagcctgtgcagcgacgacacccccatggtgagaagagccgccgccagcaagctgggcgagttcgccaaggtgctggagctggacagcgtgaagagcgagatcgtgcccctgttcaccagcctggccagcgacgagcaggacagcgtgagactgctggccgtggaggcctgcgtgagcatcgcccagctgctgagccaggacgacctggagaccctggtgatgcccaccctgagacaggccgccgaggacaagagctggagagtgagatacatggtggccgacagattcagcgagctgcagaaggccatgggccccaagatcaccctgaacgacctgatccccgccttccagaacctgctgaaggactgcgaggccgaggtgagagccgccgccgcccacaaggtgaaggagctgggcgagaacctgcccatcgaggacagagagaccatcatcatgaaccagatcctgccctacatcaaggagctggtgagcgacaccaaccagcacgtgaagagcgccctggccagcgtgatcatgggcctgagcaccatcctgggcaaggagaacaccatcgagcacctgctgcccctgttcctggcccagctgaaggacgagtgccccgacgtgagactgaacatcatcagcaacctggactgcgtgaacgaggtgatcggcatcagacagctgagccagagcctgctgcccgccatcgtggagctggccgaggacgccaagtggagagtgagactggccatcatcgagtacatgcccctgctggccggccagctgggcgtggagttcttcgacgagaagctgaacagcctgtgcatggcctggctggtggaccacgtgtacgccatcagagaggccgccaccaacaacctgatgaagctggtgcagaagttcggcaccgagtgggcccagaacaccatcgtgcccaaggtgctggtgatggccaacgaccccaactacctgcacagaatgaccaccctgttctgcatcaacgccctgagcgaggcctgcggccaggagatcaccaccaagcagatgctgcccatcgtgctgaagatggccggcgaccaggtggccaacgtgagattcaacgtggccaagagcctgcagaagatcggccccatcctggacaccaacgccctgcagggcgaggtgaagcccgtgctgcagaagctgggccaggacgaggacatggacgtgaagtacttcgcccaggaggccatcagcgtggtggcccagagactgagaaagctggagttccccgtgaaggacagcggcgagcccagcgtgcccagagccgacaagaaccacttccccagacccaccgtgcccggcgaggacatgggcaagggccccgtgtaccagctgagaggcgacaccagagacaccctggcccagctgggcatcgccgagctggtgcacttcagccagagcaccgactag

SEQ ID NO: 12384 - DNA, 1323 bp, synthetic construct
  misc_feature 1..1323: note = Description of Artificial Sequence: Synthetic coding sequence
  source 1..1323: mol_type = other DNA
atgatgcagctgaccttctggctgagagtgcccccccccttcagccacttcaagagacagttcagaagcctgtgcagcgacgacacccccatggtgagaagagccgccgccagcaagctgggcgagttcgccaaggtgctggagctggacagcgtgaagagcgagatcgtgcccctgttcaccagcctggccagcgacgagcaggacagcgtgagactgctggccgtggaggcctgcgtgagcatcgcccagctgctgagccaggacgacctggagaccctggtgatgcccaccctgagacaggccgccgaggacaagagctggagagtgagatacatggtggccgacagattcagcgagctgcagaaggccatgggccccaagatcaccctgaacgacctgatccccgccttccagaacctgctgaaggactgcgaggccgaggtgagagccgccgccgcccacaaggtgaaggagctgggcgagaacctgcccatcgaggacagagagaccatcatcatgaaccagatcctgccctacatcaaggagctggtgagcgacaccaaccagcacgtgaagagcgccctggccagcgtgatcatgggcctgagcaccatcctgggcaaggagaacaccatcgagcacctgctgcccctgttcctggcccagctgaaggacgagtgccccgacgtgagactgaacatcatcagcaacctggactgcgtgaacgaggtgatcggcatcagacagctgagccagagcctgctgcccgccatcgtggagctggccgaggacgccaagtggagagtgagactggccatcatcgagtacatgcccctgctggccggccagctgggcgtggagttcttcgacgagaagctgaacagcctgtgcatggcctggctggtggaccacgtgtacgccatcagagaggccgccaccaacaacctgatgaagctggtgcagaagttcggcaccgagtgggcccagaacaccatcgtgcccaaggtgctggtgatggccaacgaccccaactacctgcacagaatgaccaccctgttctgcatcaacgccctgagcgaggcctgcggccaggagatcaccaccaagcagatgctgcccatcgtgctgaagatggccggcgaccaggtggccaacgtgagattcaacgtggccaagagcctgcagaagatcggccccatcctggacaccaacgccctgcagggcgaggtgaagcccgtgctgcagaagctgggccaggacgaggacatggacgtgaagtacttcgcccaggaggccatcagcgtgctggccctggcctag

SEQ ID NO: 12385 - DNA, 1806 bp, synthetic construct
  misc_feature 1..1806: note = Description of Artificial Sequence: Synthetic coding sequence
  source 1..1806: mol_type = other DNA
atggccggcgccagcgagctgggcaccggccccggcgccgccggcggcgacggcgacgacagcctgtaccccatcgccgtgctgatcgacgagctgagaaacgaggacgtgcagctgagactgaacagcatcaagaagctgagcaccatcgccctggccctgggcgtggagagaaccagaagcgagctgctgcccttcctgaccgacaccatctacgacgaggacgaggtgctgctggccctggccgagcagctgggcaacttcaccggcctggtgggcggccccgacttcgcccactgcctgctgccccccctggagaacctggccaccgtggaggagaccgtggtgagagacaaggccgtggagagcctgagacagatcagccaggagcacacccccgtggccctggaggcctacttcgtgcccctggtgaagagactggccagcggcgactggttcaccagcagaaccagcgcctgcggcctgttcagcgtgtgctaccccagagccagcaacgccgtgaaggccgagatcagacagcagttcagaagcctgtgcagcgacgacacccccatggtgagaagagccgccgccagcaagctgggcgagttcgccaaggtgctggagctggacagcgtgaagagcgagatcgtgcccctgttcaccagcctggccagcgacgagcaggacagcgtgagactgctggccgtggaggcctgcgtgagcatcgcccagctgctgagccaggacgacctggagaccctggtgatgcccaccctgagacaggccgccgaggacaagagctggagagtgagatacatggtggccgacagattcagcgagctgcagaaggccatgggccccaagatcaccctgaacgacctgatccccgccttccagaacctgctgaaggactgcgaggccgaggtgagagccgccgccgcccacaaggtgaaggagctgggcgagaacctgcccatcgaggacagagagaccatcatcatgaaccagatcctgccctacatcaaggagctggtgagcgacaccaaccagcacgtgaagagcgccctggccagcgtgatcatgggcctgagcaccatcctgggcaaggagaacaccatcgagcacctgctgcccctgttcctggcccagctgaaggacgagtgccccgacgtgagactgaacatcatcagcaacctggactgcgtgaacgaggtgatcggcatcagacagctgagccagagcctgctgcccgccatcgtggagctggccgaggacgccaagtggagagtgagactggccatcatcgagtacatgcccctgctggccggccagctgggcgtggagttcttcgacgagaagctgaacagcctgtgcatggcctggctggtggaccacgtgtacgccatcagagaggccgccaccaacaacctgatgaagctggtgcagaagttcggcaccgagtgggcccagaacaccatcgtgcccaaggtgctggtgatggccaacgaccccaactacctgcacagaatgaccaccctgttctgcatcaacgccctgagcgaggcctgcggccaggagatcaccaccaagcagatgctgcccatcgtgctgaagatggccggcgaccaggtggccaacgtgagattcaacgtggccaagagcctgcagaagatcggccccatcctggacaccaacgccctgcagggcgaggtgaagcccgtgctgcagaagctgggccaggacgaggacatggacgtgaagtacttcgcccaggaggccatcagcgtgctggccctggcctag

SEQ ID NO: 12386 - DNA, 1566 bp, synthetic construct
  misc_feature 1..1566: note = Description of Artificial Sequence: Synthetic coding sequence
  source 1..1566: mol_type = other DNA
atgagcggcagaagattccacctgagcaccaccgacagagtgatcaaggccgtgcccttcccccccacccagagactgaccttcaaggaggtgttcgagaacggcaagcccaaggtggacgtgctgaagaaccacctggtgaaggagggcagactggaggaggaggtggccctgaagatcatcaacgacggcgccgccatcctgagacaggagaagaccatgatcgaggtggacgcccccatcaccgtgtgcggcgacatccacggccagttcttcgacctgatgaagctgttcgaggtgggcggcagccccagcaacaccagatacctgttcctgggcgactacgtggacagaggctacttcagcatcgagtgcgtgctgtacctgtggagcctgaagatcaaccaccccaagaccctgttcctgctgagaggcaaccacgagtgcagacacctgaccgactacttcaccttcaagcaggagtgcagaatcaagtacagcgagcaggtgtacgacgcctgcatggagaccttcgactgcctgcccctggccgccctgctgaaccagcagttcctgtgcgtgcacggcggcatgagccccgagatcaccagcctggacgacatcagaaagctggacagattcaccgagccccccgccttcggccccgtgtgcgacctgctgtggagcgaccccagcgaggactacggcaacgagaagaccctggagcactacacccacaacaccgtgagaggctgcagctacttctacagctaccccgccgtgtgcgagttcctgcagaacaacaacctgctgagcatcatcagagcccacgaggcccaggacgccggctacagaatgtacagaaagagccaggccaccggcttccccagcctgatcaccatcttcagcgcccccaactacctggacgtgtacaacaacaaggccgccgtgctgaagtacgagaacaacgtgatgaacatcagacagttcaactgcagcccccacccctactggctgcccaacttcatggacgtgttcacctggagcctgcccttcgtgggcgagaaggtgaccgagatgctggtgaacgtgctgaacatctgcagcgacgacgagctgatcagcgacgacgaggccgaggaccactacatccccagctaccagaagggcagcaccaccgtgagaaaggagatcatcagaaacaagatcagagccatcggcaagatggccagagtgttcagcatcctgagacaggagagcgagagcgtgctgaccctgaagggcctgacccccaccggcaccctgcccctgggcgtgctgagcggcggcaagcagaccatcgagaccgccaccgtggaggccgtggaggccagagaggccatcagaggcttcagcctgcagcacaagatcagaagcttcgaggaggccagaggcctggacagaatcaacgagagaatgccccccagaaaggacagcatccacgccggcggccccatgaagagcgtgaccagcgcccacagccacgccgcccacagaagcgaccagggcaagaaggcccacagctag

SEQ ID NO: 12387 - DNA, 1410 bp, synthetic construct
  misc_feature 1..1410: note = Description of Artificial Sequence: Synthetic coding sequence
  source 1..1410: mol_type = other DNA
atgagcgagcccaaggccatcgaccccaagctgagcaccaccgacagagtggtgaaggccgtgcccttcccccccagccacagactgaccgccaaggaggtgttcgacaacgacggcaagcccagagtggacatcctgaaggcccacctgatgaaggagggcagactggaggagagcgtggccctgagaatcatcaccgagggcgccagcatcctgagacaggagaagaacctgctggacatcgacgcccccgtgaccgtgtgcggcgacatccacggccagttcttcgacctgatgaagctgttcgaggtgggcggcagccccgccaacaccagatacctgttcctgggcgactacgtggacagaggctacttcagcatcgagtgcgtgctgtacctgtgggccctgaagatcctgtaccccaagaccctgttcctgctgagaggcaaccacgagtgcagacacctgaccgagtacttcaccttcaagcaggagtgcaagatcaagtacagcgagagagtgtacgacgcctgcatggacgccttcgactgcctgcccctggccgccctgatgaaccagcagttcctgtgcgtgcacggcggcctgagccccgagatcaacaccctggacgacatcagaaagctggacagattcaaggagccccccgcctacggccccatgtgcgacatcctgtggagcgaccccctggaggacttcggcaacgagaagacccaggagcacttcacccacaacaccgtgagaggctgcagctacttctacagctaccccgccgtgtgcgagttcctgcagcacaacaacctgctgagcatcctgagagcccacgaggcccaggacgccggctacagaatgtacagaaagagccagaccaccggcttccccagcctgatcaccatcttcagcgcccccaactacctggacgtgtacaacaacaaggtgaccgagatgctggtgaacgtgctgaacatctgcagcgacgacgagctgggcagcgaggaggacggcttcgacggcgccaccgccgccgccagaaaggaggtgatcagaaacaagatcagagccatcggcaagatggccagagtgttcagcgtgctgagagaggagagcgagagcgtgctgaccctgaagggcctgacccccaccggcatgctgcccagcggcgtgctgagcggcggcaagcagaccctgcagagcgccatcaagggcttcagcccccagcacaagatcaccagcttcgaggaggccaagggcctggacagaatcaacgagagaatgccccccagaagagacgccatgcccagcgacgccaacctgaacagcatcaacaaggccctgaccagcgagaccaacggcaccgacagcaacggcagcaacagcagcaacatccagtag

SEQ ID NO: 12388 - DNA, 1536 bp, synthetic construct
  misc_feature 1..1536: note = Description of Artificial Sequence: Synthetic coding sequence
  source 1..1536: mol_type = other DNA
atgagcgagcccaaggccatcgaccccaagctgagcaccaccgacagagtggtgaaggccgtgcccttcccccccagccacagactgaccgccaaggaggtgttcgacaacgacggcaagcccagagtggacatcctgaaggcccacctgatgaaggagggcagactggaggagagcgtggccctgagaatcatcaccgagggcgccagcatcctgagacaggagaagaacctgctggacatcgacgcccccgtgaccgtgtgcggcgacatccacggccagttcttcgacctgatgaagctgttcgaggtgggcggcagccccgccaacaccagatacctgttcctgggcgactacgtggacagaggctacttcagcatcgagtgcgtgctgtacctgtgggccctgaagatcctgtaccccaagaccctgttcctgctgagaggcaaccacgagtgcagacacctgaccgagtacttcaccttcaagcaggagtgcaagatcaagtacagcgagagagtgtacgacgcctgcatggacgccttcgactgcctgcccctggccgccctgatgaaccagcagttcctgtgcgtgcacggcggcctgagccccgagatcaacaccctggacgacatcagaaagctggacagattcaaggagccccccgcctacggccccatgtgcgacatcctgtggagcgaccccctggaggacttcggcaacgagaagacccaggagcacttcacccacaacaccgtgagaggctgcagctacttctacagctaccccgccgtgtgcgagttcctgcagcacaacaacctgctgagcatcctgagagcccacgaggcccaggacgccggctacagaatgtacagaaagagccagaccaccggcttccccagcctgatcaccatcttcagcgcccccaactacctggacgtgtacaacaacaaggccgccgtgctgaagtacgagaacaacgtgatgaacatcagacagttcaactgcagcccccacccctactggctgcccaacttcatggacgtgttcacctggagcctgcccttcgtgggcgagaaggtgaccgagatgctggtgaacgtgctgaacatctgcagcgacgacgagctgggcagcgaggaggacggcttcgacggcgccaccgccgccgccagaaaggaggtgatcagaaacaagatcagagccatcggcaagatggccagagtgttcagcgtgctgagagaggagagcgagagcgtgctgaccctgaagggcctgacccccaccggcatgctgcccagcggcgtgctgagcggcggcaagcagaccctgcagagcgccatcaagggcttcagcccccagcacaagatcaccagcttcgaggaggccaagggcctggacagaatcaacgagagaatgccccccagaagagacgccatgcccagcgacgccaacctgaacagcatcaacaaggccctgaccagcgagaccaacggcaccgacagcaacggcagcaacagcagcaacatccagtag

SEQ ID NO: 12389 - DNA, 1566 bp, synthetic construct
  misc_feature 1..1566: note = Description of Artificial Sequence: Synthetic coding sequence
  source 1..1566: mol_type = other DNA
atgagcgagcccaaggccatcgaccccaagctgagcaccaccgacagagtggtgaaggccgtgcccttcccccccagccacagactgaccgccaaggaggtgttcgacaacgacggcaagcccagagtggacatcctgaaggcccacctgatgaaggagggcagactggaggagagcgtggccctgagaatcatcaccgagggcgccagcatcctgagacaggagaagaacctgctggacatcgacgcccccgtgaccgtgtgcggcgacatccacggccagttcttcgacctgatgaagctgttcgaggtgggcggcagccccgccaacaccagatacctgttcctgggcgactacgtggacagaggctacttcagcatcgagtgcgtgctgtacctgtgggccctgaagatcctgtaccccaagaccctgttcctgctgagaggcaaccacgagtgcagacacctgaccgagtacttcaccttcaagcaggagtgcaagatcaagtacagcgagagagtgtacgacgcctgcatggacgccttcgactgcctgcccctggccgccctgatgaaccagcagttcctgtgcgtgcacggcggcctgagccccgagatcaacaccctggacgacatcagaaagctggacagattcaaggagccccccgcctacggccccatgtgcgacatcctgtggagcgaccccctggaggacttcggcaacgagaagacccaggagcacttcacccacaacaccgtgagaggctgcagctacttctacagctaccccgccgtgtgcgagttcctgcagcacaacaacctgctgagcatcctgagagcccacgaggcccaggacgccggctacagaatgtacagaaagagccagaccaccggcttccccagcctgatcaccatcttcagcgcccccaactacctggacgtgtacaacaacaaggccgccgtgctgaagtacgagaacaacgtgatgaacatcagacagttcaactgcagcccccacccctactggctgcccaacttcatggacgtgttcacctggagcctgcccttcgtgggcgagaaggtgaccgagatgctggtgaacgtgctgaacatctgcagcgacgacgagctgggcagcgaggaggacggcttcgacggcgccaccgccgccgccagaaaggaggtgatcagaaacaagatcagagccatcggcaagatggccagagtgttcagcgtgctgagagaggagagcgagagcgtgctgaccctgaagggcctgacccccaccggcatgctgcccagcggcgtgctgagcggcggcaagcagaccctgcagagcgccaccgtggaggccatcgaggccgacgaggccatcaagggcttcagcccccagcacaagatcaccagcttcgaggaggccaagggcctggacagaatcaacgagagaatgccccccagaagagacgccatgcccagcgacgccaacctgaacagcatcaacaaggccctgaccagcgagaccaacggcaccgacagcaacggcagcaacagcagcaacatccagtag

SEQ ID NO: 12390 - DNA, 1272 bp, synthetic construct
  misc_feature 1..1272: note = Description of Artificial Sequence: Synthetic coding sequence
  source 1..1272: mol_type = other DNA
atgaagctgttcgaggtgggcggcagccccgccaacaccagatacctgttcctgggcgactacgtggacagaggctacttcagcatcgagtgcgtgctgtacctgtgggccctgaagatcctgtaccccaagaccctgttcctgctgagaggcaaccacgagtgcagacacctgaccgagtacttcaccttcaagcaggagtgcaagatcaagtacagcgagagagtgtacgacgcctgcatggacgccttcgactgcctgcccctggccgccctgatgaaccagcagttcctgtgcgtgcacggcggcctgagccccgagatcaacaccctggacgacatcagaaagctggacagattcaaggagccccccgcctacggccccatgtgcgacatcctgtggagcgaccccctggaggacttcggcaacgagaagacccaggagcacttcacccacaacaccgtgagaggctgcagctacttctacagctaccccgccgtgtgcgagttcctgcagcacaacaacctgctgagcatcctgagagcccacgaggcccaggacgccggctacagaatgtacagaaagagccagaccaccggcttccccagcctgatcaccatcttcagcgcccccaactacctggacgtgtacaacaacaaggccgccgtgctgaagtacgagaacaacgtgatgaacatcagacagttcaactgcagcccccacccctactggctgcccaacttcatggacgtgttcacctggagcctgcccttcgtgggcgagaaggtgaccgagatgctggtgaacgtgctgaacatctgcagcgacgacgagctgggcagcgaggaggacggcttcgacggcgccaccgccgccgccagaaaggaggtgatcagaaacaagatcagagccatcggcaagatggccagagtgttcagcgtgctgagagaggagagcgagagcgtgctgaccctgaagggcctgacccccaccggcatgctgcccagcggcgtgctgagcggcggcaagcagaccctgcagagcgccaccgtggaggccatcgaggccgacgaggccatcaagggcttcagcccccagcacaagatcaccagcttcgaggaggccaagggcctggacagaatcaacgagagaatgccccccagaagagacgccatgcccagcgacgccaacctgaacagcatcaacaaggccctgaccagcgagaccaacggcaccgacagcaacggcagcaacagcagcaacatccagtag

SEQ ID NO: 12391 - DNA, 870 bp, synthetic construct
  misc_feature 1..870: note = Description of Artificial Sequence: Synthetic coding sequence
  source 1..870: mol_type = other DNA
atgagcgagcccaaggccatcgaccccaagctgagcaccaccgacagagtggtgaaggccgtgcccttcccccccagccacagactgaccgccaaggaggtgttcgacaacgacggcaagcccagagtggacatcctgaaggcccacctgatgaaggagggcagactggaggagagcgtggccctgagaatcatcaccgagggcgccagcatcctgagacaggagaagaacctgctggacatcgacgcccccgtgaccgccgccgtgctgaagtacgagaacaacgtgatgaacatcagacagttcaactgcagcccccacccctactggctgcccaacttcatggacgtgttcacctggagcctgcccttcgtgggcgagaaggtgaccgagatgctggtgaacgtgctgaacatctgcagcgacgacgagctgggcagcgaggaggacggcttcgacggcgccaccgccgccgccagaaaggaggtgatcagaaacaagatcagagccatcggcaagatggccagagtgttcagcgtgctgagagaggagagcgagagcgtgctgaccctgaagggcctgacccccaccggcatgctgcccagcggcgtgctgagcggcggcaagcagaccctgcagagcgccaccgtggaggccatcgaggccgacgaggccatcaagggcttcagcccccagcacaagatcaccagcttcgaggaggccaagggcctggacagaatcaacgagagaatgccccccagaagagacgccatgcccagcgacgccaacctgaacagcatcaacaaggccctgaccagcgagaccaacggcaccgacagcaacggcagcaacagcagcaacatccagtag

SEQ ID NO: 12392 - DNA, 1365 bp, synthetic construct
  misc_feature 1..1365: note = Description of Artificial Sequence: Synthetic coding sequence
  source 1..1365: mol_type = other DNA
atgagcgagcccaaggccatcgaccccaagctgagcaccaccgacagagtggtgaaggtgtgcggcgacatccacggccagttcttcgacctgatgaagctgttcgaggtgggcggcagccccgccaacaccagatacctgttcctgggcgactacgtggacagaggctacttcagcatcgagtgcgtgctgtacctgtgggccctgaagatcctgtaccccaagaccctgttcctgctgagaggcaaccacgagtgcagacacctgaccgagtacttcaccttcaagcaggagtgcaagatcaagtacagcgagagagtgtacgacgcctgcatggacgccttcgactgcctgcccctggccgccctgatgaaccagcagttcctgtgcgtgcacggcggcctgagccccgagatcaacaccctggacgacatcagaaagctggacagattcaaggagccccccgcctacggccccatgtgcgacatcctgtggagcgaccccctggaggacttcggcaacgagaagacccaggagcacttcacccacaacaccgtgagaggctgcagctacttctacagctaccccgccgtgtgcgagttcctgcagcacaacaacctgctgagcatcctgagagcccacgaggcccaggacgccggctacagaatgtacagaaagagccagaccaccggcttccccagcctgatcaccatcttcagcgcccccaactacctggacgtgtacaacaacaaggccgccgtgctgaagtacgagaacaacgtgatgaacatcagacagttcaactgcagcccccacccctactggctgcccaacttcatggacgtgttcacctggagcctgcccttcgtgggcgagaaggtgaccgagatgctggtgaacgtgctgaacatctgcagcgacgacgagctgggcagcgaggaggacggcttcgacggcgccaccgccgccgccagaaaggaggtgatcagaaacaagatcagagccatcggcaagatggccagagtgttcagcgtgctgagagaggagagcgagagcgtgctgaccctgaagggcctgacccccaccggcatgctgcccagcggcgtgctgagcggcggcaagcagaccctgcagagcgccaccgtggaggccatcgaggccgacgaggccatcaagggcttcagcccccagcacaagatcaccagcttcgaggaggccaagggcctggacagaatcaacgagagaatgccccccagaagagacgccatgcccagcgacgccaacctgaacagcatcaacaaggccctgaccagcgagaccaacggcaccgacagcaacggcagcaacagcagcaacatccagtag

SEQ ID NO: 12393 - DNA, 399 bp, synthetic construct
  misc_feature 1..399: note = Description of Artificial Sequence: Synthetic coding sequence
  source 1..399: mol_type = other DNA
atgaaggagggcagactggaggagagcgtggccctgagaatcatcaccgagggcgccagcatcctgagacaggagaagaacctgctggacatcgacgcccccgtgaccgtgtgcggcgacatccacggccagttcttcgacctgatgaagctgttcgaggtgggcggcagccccgccaacaccagatacctgttcctgggcgactacgtggacagaggctacttcagcatcgagtgcgtgctgtacctgtgggccctgaagatcctgtaccccaagaccctgttcctgctgagaggcaaccacgagtgcagacacctgaccgagtacttcaccttcaagcaggagtgcaagatcaagtacagcgagagagtgtacgacgcctgcatggacgccttctag
